United States Patent Application Publication US 2022/0090207 A1 - sequence listing, part 4

SEQ ID NO: 38393 - DNA, 184 bp, Homo sapiens
  chr2:191208156-191208340
  hyper
ccatctgtcaaacccgcagtcccctatgagagtacagatgaatggaggaggaagatttaaaagtgaattcgtgggcggcgacaaggaaacagcagccgtggccaagctgaccccagagcccttcccttcctggccctccctctgaatcatcgcgctccacttgtgacgtcgcggacgcccggct

SEQ ID NO: 38394 - DNA, 30 bp, Homo sapiens; identical to SEQ ID NO: 2091
  chr2:191272589-191272619
  hyper

SEQ ID NO: 38395 - DNA, 30 bp, Homo sapiens
  chr2:191273719-191273749
  hyper
cccagtgacaaggacgcggccacttgtgtg

SEQ ID NO: 38396 - DNA, 31 bp, Homo sapiens; identical to SEQ ID NO: 2092
  chr2:191400042-191400073
  hyper

SEQ ID NO: 38397 - DNA, 40 bp, Homo sapiens; identical to SEQ ID NO: 2093
  chr2:191513081-191513121
  hyper

SEQ ID NO: 38398 - DNA, 30 bp, Homo sapiens
  chr2:191513467-191513497
  hyper
ccgcccactcccggcgcccacttggttcct

SEQ ID NO: 38399 - DNA, 207 bp, Homo sapiens; identical to SEQ ID NO: 2094
  chr2:191514823-191515030
  hyper

SEQ ID NO: 38400 - DNA, 30 bp, Homo sapiens; identical to SEQ ID NO: 2095
  chr2:191728884-191728914
  hyper

SEQ ID NO: 38401 - DNA, 84 bp, Homo sapiens; identical to SEQ ID NO: 2096
  chr2:191745040-191745124
  hyper

SEQ ID NO: 38402 - DNA, 413 bp, Homo sapiens; identical to SEQ ID NO: 2097
  chr2:191745184-191745597
  hyper

SEQ ID NO: 38403 - DNA, 437 bp, Homo sapiens; identical to SEQ ID NO: 2098
  chr2:191745656-191746093
  hyper

SEQ ID NO: 38404 - DNA, 81 bp, Homo sapiens; identical to SEQ ID NO: 2099
  chr2:191746518-191746599
  hyper

SEQ ID NO: 38405 - DNA, 828 bp, Homo sapiens
  chr2:192015069-192015897
  hyper
tcatgaaaactgtgacgttgcttctgaaaactcagtgcctgtctgtcctttttgcgtgcatttcctagaagatcccactaaaggggcattttgtcccaccgtctgtgagctggtggtgccgctttggctctgtggcctgtagcttgcaaaaggagatgacctgccctaaaatgtcactcgcgcccatcaaagccacagtcaccggctgccgtagctgcaagcttttttctgaaatccaggtacgctaatctaaagtcagacatcacagctctagagaagctggctaagaaagtgaagaggggctcactttcagcctccgcgaggacacacctccgcagccgccgcagctcccctggcccccgcagggagattcgcccgggcaccgtggcgcgggcctgcggagcggtttccgcggagaacccgtgccagggcgcatctgtgggtcgtggagtcgggcgcttccttctataataagcctcctcaggaaggttaaaatgaagcaattgtcaaaacgccaagggaaagcaaagcttcagagtatcctgcataataagcatgtcctccttacaagaggcagccagaaggtgtggtctggccacttacctagcgctctctcagcacaggtcccaggcagtgctcaagtccaaagtcagaagcgcccctcacagtccctaggagaaagccgctgacgccatcatcagtaggggatttgcatttctcctcccacttgaggctttcctgtgcgtcagtgttcgagtctctgggactttacttgggtcagttcccacccactctattctagaaatgctaacacgcagaaactgccag

SEQ ID NO: 38406 - DNA, 839 bp, Homo sapiens
  chr2:192109716-192110555
  hyper
ctcccactgtttgccggaatgtgaccccaggctggcttcgagttgtcaaatgttgtatttctcattttatgtcagtgagtctggaagcaaaaaaggtagaaagactgccttccgtgggggccgcgacgatcgcccctccttccctcaagcctcgtcccatccaggctcgccccgggtgcggagggtcgggccgcaaacccgcaaggcgcggaggccgccgcgacgctcaccggggggcgctgtgaagccggcaccgggcggacagaggtgagtcggctcggaggcggtggctcccgttcctgcccgcgcgccgaggggcgaatcccaggcagcgaggtcgccgcccccgcccctcggccggcccctccgccagcgggcgagaggggagtggccgggctcctcccgccgccgctgagcactccgcagctgggtgcgcacgggagcctcaaccgcggcgcgtggaggcagtaccagagcgcgcggcgcgcagtcggccggcagccgcgggacagccttggcagaacagccgcggcgggagccccgcagccccgggctgggcccgcgtcccggagcgccaccggagagcgaggacgacgtggaggcggagtggcgcccggcgaggtagcgccaggcgaggtagcgcgagcgctttctctctctctcccctgcccttccctctgcgtccgtcgtcggcccccgaggcgcctgctccgcgcctttgtgcccgcggtccctggccccgtcgcaccctgcgggcgggggtcagcgggctctgccgctctcttgggagacgcggcgctgcggcgggaacggcgcacgctgtaggttgcggagggtgg

SEQ ID NO: 38407 - DNA, 388 bp, Homo sapiens
  chr2:192110584-192110972
  hyper
cgggagggaagaagggcttgtaaactaagttgctcttactttgccccatgcctctcgtacctgtgggcagagtcgaatctcggctgtcctcgtgttcacccacagcccctccattcctctggcccacagctgtttcctggccccctggaaagacacggtgtggcttcctccgggcaggaaagcggagggagaacaatggggcgtcctggggagtggggttcaggtgcggtgtgccccggcggcggcgggggaggaggggcccgggacgctgtgggcctccctgcgcgtgcagctgcgctcgcctcctttgttccgccgcagcggagggggttgccctgggtctcgtttcctgcccgggatgggattgattcacggtcccagagaggga

SEQ ID NO: 38408 - DNA, 30 bp, Homo sapiens
  chr2:192542887-192542917
  hyper
cggtgttctgtctccgctcccgtttcgctg

SEQ ID NO: 38409 - DNA, 30 bp, Homo sapiens
  chr2:192543313-192543343
  hyper
cgcagccgtagccgcgcctgtcccaatatg

SEQ ID NO: 38410 - DNA, 30 bp, Homo sapiens
  chr2:192587188-192587218
  hyper
ttccccaccccctactgcaaacaccagtta

SEQ ID NO: 38411 - DNA, 343 bp, Homo sapiens; identical to SEQ ID NO: 2103
  chr2:193058974-193059317
  hyper

SEQ ID NO: 38412 - DNA, 204 bp, Homo sapiens; identical to SEQ ID NO: 2104
  chr2:193059344-193059548
  hyper

SEQ ID NO: 38413 - DNA, 1231 bp, Homo sapiens; identical to SEQ ID NO: 2105
  chr2:193059661-193060892
  hyper

SEQ ID NO: 38414 - DNA, 30 bp, Homo sapiens
  chr2:196521658-196521688
  hyper
ctagcgcggagccacggaactccgcagttt

SEQ ID NO: 38415 - DNA, 321 bp, Homo sapiens; identical to SEQ ID NO: 2106
  chr2:197035641-197035962
  hyper

SEQ ID NO: 38416 - DNA, 1378 bp, Homo sapiens
  chr2:197457191-197458569
  hyper
gcagtctcgcgtcctcggaaacgtctacgtctaaatctgcagccccagtttgctccaggccccaagctccagcagaggatgttcacggcacattcccaaccaaaaaggaaatgaagcgtcctctccctcaactgatgctcaaatagaccccaaagtcccagtttccctggagaaccaaaccatccaacacatcctgggcagcggaaaccgaaatggcaaatgaatgaccgcgccggggcgcaagggaggaaaaacaaagccacctcccgccgtccgctacctgcggcgagggccgcgcgctcacctgggctttgcgcccgtcgccacaagctgcgggtggggacccggccgcggggcgggagggcgcccccaaagtcgcccggacccgcggccccggcgccctgcggccggtccgtgcgcgccgaggagaaagcaggcggccgggggcgccgccgcgcgttgcatgcagctcacggctgctgcggccgctgccacggagccgagagtctctgcgctgcagtccccgaccccgagaccgcgagaagcgcccggagagacgcggcgcaggggcagagcgcgctcggcgcgcccctcagcggctcttcccgccgccctccgcagcgggctgggtctcggctcgcctttgtgctggcatcttcctagctcccagcgacacccagagctctcgaggcggctccgcgccgccacccacccccgggttacgccacggcccccgcgcgacccgccgattgtgtcgagtcagcagcggcagcggggacgcgcgaagccatggctcccgcccgcgctcgggagggcgccgggggtcctgcgcctccgggaggtttgtggccgagcgcggcgcggccccgagcggccccgcagcgcccggctccccgccgctcgctctccaggcgccgacccgcctgcgtcgccaccctctcgccgctccctgccgccaccttcctcccgcccgggtgccgggcgtccgctccagccgcggtgccccggtccgcggagagcgaagagtccggcctcctcacctccagccgcgccggcgcccttcccgctagacgcttcggcggcatctgcccgcaccgccctgcgggacgctgggctgggagctggcggcacgtcggggaccggtggaagggaggcgggggcagaggacaggagggacagccagaccttggccagcgggacctccctgaggaaggtgcggaagaacggggcgggtgcggctgggcggaggacgagtcccgaggctgcggcggagcctgagttgctctccttctgcgaagtcgaaggacaggaggattcctagaggtgtcgcggagggtggaggagaccctctgaggtcgtgcagacaacactgttcctc

SEQ ID NO: 38417 - DNA, 30 bp, Homo sapiens
  chr2:197504439-197504469
  hyper
gttccacggaaacccgctcgcctgctgcag

SEQ ID NO: 38418 - DNA, 122 bp, Homo sapiens
  chr2:198175714-198175836
  hyper
acctgcacgcggcgcccggccgggccggccccgggccctgggcggatcgcgggcctccctgacgggtctcacacatatgggtggggaagcccgcggggacacaccccgagggggcaggaaag

SEQ ID NO: 38419 - DNA, 30 bp, Homo sapiens; identical to SEQ ID NO: 2109
  chr2:198257066-198257096
  hyper

SEQ ID NO: 38420 - DNA, 122 bp, Homo sapiens; identical to SEQ ID NO: 2110
  chr2:198257785-198257907
  hyper

SEQ ID NO: 38421 - DNA, 30 bp, Homo sapiens; identical to SEQ ID NO: 2111
  chr2:198260933-198260963
  hyper

SEQ ID NO: 38422 - DNA, 107 bp, Homo sapiens; identical to SEQ ID NO: 2112
  chr2:198262739-198262846
  hyper

SEQ ID NO: 38423 - DNA, 149 bp, Homo sapiens; identical to SEQ ID NO: 2113
  chr2:198265014-198265163
  hyper

SEQ ID NO: 38424 - DNA, 179 bp, Homo sapiens; identical to SEQ ID NO: 2114
  chr2:198265428-198265607
  hyper

SEQ ID NO: 38425 - DNA, 30 bp, Homo sapiens; identical to SEQ ID NO: 2115
  chr2:198266164-198266194
  hyper

SEQ ID NO: 38426 - DNA, 371 bp, Homo sapiens; identical to SEQ ID NO: 2116
  chr2:198266478-198266849
  hyper

SEQ ID NO: 38427 - DNA, 433 bp, Homo sapiens; identical to SEQ ID NO: 2117
  chr2:198267317-198267750
  hyper

SEQ ID NO: 38428 - DNA, 71 bp, Homo sapiens; identical to SEQ ID NO: 2118
  chr2:198268365-198268436
  hyper

SEQ ID NO: 38429 - DNA, 94 bp, Homo sapiens; identical to SEQ ID NO: 2119
  chr2:198269811-198269905
  hyper

SEQ ID NO: 38430 - DNA, 30 bp, Homo sapiens; identical to SEQ ID NO: 2120
  chr2:198270121-198270151
  hyper

SEQ ID NO: 38431 - DNA, 82 bp, Homo sapiens; identical to SEQ ID NO: 2121
  chr2:198272717-198272799
  hyper

SEQ ID NO: 38432 - DNA, 148 bp, Homo sapiens; identical to SEQ ID NO: 2122
  chr2:198273116-198273264
  hyper

SEQ ID NO: 38433 - DNA, 30 bp, Homo sapiens; identical to SEQ ID NO: 2123
  chr2:198274673-198274703
  hyper

SEQ ID NO: 38434 - DNA, 30 bp, Homo sapiens; identical to SEQ ID NO: 2124
  chr2:198285175-198285205
  hyper

SEQ ID NO: 38435 - DNA, 30 bp, Homo sapiens
  chr2:198299731-198299761
  hyper
ctcgaacacacagacggaactggcgctccc

SEQ ID NO: 38436 - DNA, 30 bp, Homo sapiens
  chr2:198364581-198364611
  hyper
caccgcaatgagcccgtgtcccctccctcc

SEQ ID NO: 38437 - DNA, 30 bp, Homo sapiens
  chr2:198569897-198569927
  hyper
tttttctggcaagccgccgtccattggcgg

SEQ ID NO: 38438 - DNA, 1046 bp, Homo sapiens
  chr2:198669112-198670158
  hyper
cgggtacaccctggctcgagtacattagccccgctgggccggctcccagttgcagaacacattccattcttcgcgctcgggcacacccctccgcagtgaggattggtcgggccgagccccctcggcgaggcgaggctcctaagaggcccagacgcctgccaatccccaagggctgtcaaaacaagtctccctccctgtcacaacagagctgagtggaggccgccgccgccgccgcacttcctgggaccgctgcgccgcagtccgcgggcaggtggcgggtgcgcccggccgcagtcgcccggctctggcccctatcgggccgccggcgtccgggctccagaggccgcctggctgggcgcccggtgccttttgtctggcgcagggccggcgtttgcatcacatttcggatacctccctctctttttcgcctctccttctgcctcccgctcacatcgcctccccactcccgccaccgtcccccgccggactgctagcctcctagaccgaagcccgaggacgtctctgcccgagcgatgtcccctctccagaaagttgccgccgccgccgccgccgccgccactgccgccgctgggcggtgaaacaaagtctggcggggccgcctcccggtgcaggagcgcaccggtgcctagcggctggactccgctgccgggcgtcccgctttcccccggggagccctaaacgctccaggccatggccgagggcgcggccggcagggaggatccggcgccgcccgacgcggcggggggcgaagacgacccccgagtgggcccggatgccgccggggactgcgtgacggcggcctctgggggccggatgagggaccgtcgcagcggggtcgcactgccaggcgccgcggggaccccagcggacagcgaggcgggcctcctggaggcagcacgggcgaccccccggcgcagcagcatcatcaaggtaagcaaagccgcgccgcaccgggagcgtggctgtgggtgatgggtgggtcagggacccgggcaggatgtgcggtgtccggaggcatccgggct

SEQ ID NO: 38439 - DNA, 929 bp, Homo sapiens
  chr2:200320440-200321369
  hyper
cagatgagaggcgacgggggcattatttggcaacctggaattcacttcctgtaatcctacaccgcgacagcgcctaatcaacctgaaccctgacacccgggccattatcactgggccgcgggctgcgcgcctccctgctccgggctgttacctcccacggccttggccacggcgccgttgggcctcccgcgggctcccatggggctgccgttctgctccagccgggccaccttcactgggggaggccccttgacgtccgggctgccgctccgccggtcggggctgtcccgcagacacgggctctcgctccgccgctccatgctgctccgactcggagacaaagttcccaccggcaggtcgcaataaaacgcacagggacctagggagggggtggggggaggaagggggagggagaaaaaagagggaaaaccgctcatacacgtgatagacgttcaggccagtggcagagcgctgcaccacagccacacaaacttcctcccacgctgcccgaggggcccgagccgggaagccggtcccaaccttacactgggcggcccccaggaagcccagcgcctcggttcggcgactctgcccagtcgcagctccccagaagtcagccctcggggtcgcggccggggttggcacccaggggcgcctagaagtggtccattcattgggacggggttggcataaaccgttcctgggtgctacagcctagcccgtcccggggtcagggttgcggaataagtgaacttcagaaaaagacgttccacccacatgggaagggagttgggggtgtgcgcaagtccataaccgaattaaccacccggtaaatgcgctgtgaatggccaggcaggagccaaaggccgggcgaaagaaccccttgaatacccgctttttacctatacggagcaagtcctgagataagc

SEQ ID NO: 38440 - DNA, 30 bp, Homo sapiens; identical to SEQ ID NO: 2126
  chr2:200322551-200322581
  hyper

SEQ ID NO: 38441 - DNA, 30 bp, Homo sapiens
  chr2:200323753-200323783
  hyper
tccctggatggcatcgctggagcgctcgcc

SEQ ID NO: 38442 - DNA, 30 bp, Homo sapiens
  chr2:200325411-200325441
  hyper
gctaaggatcacttcgctaacctcacaggc

SEQ ID NO: 38443 - DNA, 169 bp, Homo sapiens
  chr2:200327084-200327253
  hyper
cactttctcggacggcataaccgcgaggggcttagactggaaatcagatgcgccaagaggacaagagccaggggccagaataccccagtgggggacgcgccttggaggacggttcgcccagggtgggcttcagccctttcccagagtgctccgggcgtctggggactga

SEQ ID NO: 38444 - DNA, 28 bp, Homo sapiens
  chr2:200327423-200327451
  hyper
ggaggtagagactgtggaggtcctcctc

SEQ ID NO: 38445 - DNA, 1109 bp, Homo sapiens
  chr2:200327575-200328684
  hyper
cgagggtctggggctagtggggccgaccgttcaggagccgggtgggcgggaagggaattgccaaggtcggcccaggagctgcctcaggcgaggacggggagctttctgcactgggcttcccggggtaggagatgggcgtcgggtgtgggcactgcctgccctgggggaagaaagcgaggagataggtttcagagctgggggagtcgttggtgggagatctggtgtcccttcggcggccgcgggccgggggaccggggaagacggagggtcctgcggcctggagcaccaccctaccacaccaggcaacgccccccggggcgcccttcattcttttgcagagcccagaacttaataggtgggtccccttctgcaaccacgctgcgagagaatgactgccctgctaatctagtttacttgtagaaatcgactgtaaaccgggacaacaaggcaagggtgggggaagaaaaggaagcgccgaaggagccgccgctgcgtccccgcccccagctcggagctgccggggttggggccccgggtggcgctcccgacccgccgcgttttccttagggaaacaccgagtgaggcagaggatctcaggcccaaggtggctgcgaagagccccgaggcctcggcttggcgtcaatgtcccgccaccctcgagcccgggtcactgcccgggtcccggcccggagccccagcgtcctctcccgacagcgccaccgcgtgggctgaggccgaaaccttcggcgccggctctgccggtcgcgtcccggagccaacccttccgcgtcgcctgcagtccacgggttaaggatgtggcgggggatgggcaggtccctggcccagggtaccaccgggccactcaacacaaaaacgccctggcgcgtgcaaaatacgaacgcccacagtttgtcccaaccccttgaaatgaaaagtacacctggaaagcccaagatagcacccggtccgcaccccaaatttcaggcaggccagcaggcgtccagaaatccgctcccacccctcgtaggggcaggcaagctcaggcagccgggtgcaagggggcccaaaccgcagttgcctcccgaacgctttgaggctatgggcccacg

SEQ ID NO: 38446 - DNA, 364 bp, Homo sapiens; identical to SEQ ID NO: 2131
  chr2:200329029-200329393
  hyper

SEQ ID NO: 38447 - DNA, 531 bp, Homo sapiens
  chr2:200329432-200329963
  hyper
cgcctactcccttattattggctgggacctgttcctttccaaagtgtgatgcccggtgtcctaccctaggccacgcggagctctctcccggcgtgtcgggccctgcgcccctgcccagtggctcacctcggctcgctgcgcccgccttcgccccaagtgcccaggacggagcgaggggctgtgggtcggcgcagggacgctggctgctcacctccaggagccgacagaaggtgccttcggcgtcacgcgtccaaccctggggctgatttaaataactaataagctcagagaaattttacgaggggaacttttccttttagtatcaataaagcctagtaattgggtttgttggttacctaagctcgagttcgactttctcagtctctctctctctctctctttctcattcagaggcaacgttttcaaaaaccggcaattgcgtgtgcgtttggggtgtgcaagtgtgagtgtagatgtgtgaaagttatttgtttcagcagtccttgtctcgagagcaatcatcattgtagc

SEQ ID NO: 38448 - DNA, 543 bp, Homo sapiens
  chr2:200331852-200332395
  hyper
gagacctcaagtcaggtctcccggccagactcaggcctttctaatacaggcgtgaagggcgggacgcccagagccctcttgttggccggtggctaaggagccaggtggataacttctgcggattcggctttcaggctgctggagctctccccagcccgaggccttagcccagcgcaatcccttgtccagaccggccagtttccgcgtggcgaaaaagggggaggcaagtgtgtcttttccaaggagcttttatccaacagcctcccctccccccaactctcagccttaggtgccgggcttcagccgaagcgtttttcaaatttgtcatcattggaaacctcggacaagtggagtgtaaaattttgagggtttccaggtaggctctgacttcaggcattcaatgaaaggggaagagggctgagggcgggggagagagacaagcacagagggctccctgtagtcggcaggaattccctccctctgcagcccagctgcacccactagcacacactagtcttgccttctcccggctttggaagaatc

SEQ ID NO: 38449 - DNA, 62 bp, Homo sapiens
  chr2:200333529-200333591
  hyper
aatctctgcactttgtcatcacgcccgagtatttgacattcgcaattatctgcaaataccct

SEQ ID NO: 38450 - DNA, 166 bp, Homo sapiens
  chr2:200333986-200334152
  hyper
gctctcgatttcgccgcagaattacctgctcaaagagccaccccaagaagccctcagctccgaggtcttcccgcccgtcgtctgcgggaagtaaacggcgtcctccctccaaagaagtggatgccccttcgactctcctccgccccccggcggttcctaaatctag

SEQ ID NO: 38451 - DNA, 56 bp, Homo sapiens
  chr2:200334543-200334599
  hyper
acactgggcttagtcgatgttcacacctattacatttttccggaaagtgggaggag

SEQ ID NO: 38452 - DNA, 30 bp, Homo sapiens
  chr2:200334886-200334916
  hyper
cagctggagaaggtcgtcacagtctcccgt

SEQ ID NO: 38453 - DNA, 30 bp, Homo sapiens
  chr2:200335859-200335889
  hyper
tggggagggttgtgcggactacccaaggca

SEQ ID NO: 38454 - DNA, 356 bp, Homo sapiens
  chr2:200336178-200336534
  hyper
tgctggaaaatgcttgttacccgggcggagcgcttccgctctgcgcggtccggcccggcgggcggtagctcgctgatccctccggcgaagcctccaaggagcgggcggctgggagaggttgtgccacccgggaccaagccatcggcgctgctccggactcccggtagggggagccgccgcgggcgccaggccggattgtgttctggcctcggggcggccctgctgccagcggccgggactctcagcacagagctcgggaggactccacctgctctccagataaggcgccatgagcagagaagggaacagacggccaagctccctcctaattccccgttgttgcagagcaaagaaga

SEQ ID NO: 38455 - DNA, 244 bp, Homo sapiens
  chr2:200523980-200524224
  hyper
aaattgcctacacttggggaacgcggcgccccggccgccgcagagccgagccgagccaggcgagcccccgcggcgcccaagcgcgggccccccagccgccgccgggcgcggcatttttattcaagcgagataacggagcccggccgcgcccggtgcattgtgggaacggcccgcggcccgttttcgggaggaggcggagggcgcgaagcgagctggtggatccgtaaagaacccagccaacccc

SEQ ID NO: 38456 - DNA, 80 bp, Homo sapiens; identical to SEQ ID NO: 2136
  chr2:200604746-200604826
  hyper

SEQ ID NO: 38457 - DNA, 567 bp, Homo sapiens; identical to SEQ ID NO: 2137
  chr2:200715513-200716080
  hyper

SEQ ID NO: 38458 - DNA, 30 bp, Homo sapiens
  chr2:200820139-200820169
  hyper
ctgctcccgagaaacgccctccagccgggg

SEQ ID NO: 38459 - DNA, 30 bp, Homo sapiens; identical to SEQ ID NO: 2138
  chr2:200820518-200820548
  hyper

SEQ ID NO: 38460 - DNA, 179 bp, Homo sapiens
  chr2:201170704-201170883
  hyper
ccaggcagaaacccacggctgaagcccacgatgcccatgtgtaacttggttattacacacacgtttggagcccagtgtgcagacccgcagcgcagaggaggcggcggaacaccccgggttggtcgggtttccaagggctgacccgagctccagcactttttccgcgcctgatttttcag

SEQ ID NO: 38461 - DNA, 1254 bp, Homo sapiens
  chr2:201171094-201172348
  hyper
gaggtttggggaaaggcgaggaagtcggtctggagcaagcaagcaaagtgcggaagctgtactgggattcttctagaaagtggggtgggaaaggagctagggagggcgtgtggagggacgagatctgtgtcagaacgtgcgtgtgagcggatacaaaacccgagagaggcgtgagcagcgctgtgtttgcgagcgggagcgaggggcgccggctggggtgtgtgctcctggtgagtgacaccgaggggaaggcgggcgggtcggcgggcgggggcagcctgcgaggggcgggagtgtccctgcgtggggcggccgagccggagttgtgtcagtgaaggaatccagtccgggggccgagctggctgcgccctccgctgcaagcgccggcagcgcggggcgagctccggacggcgcgcggcccaggcagcggctcccgctcggcccgccctccgagccgcaggggccgccaccgccgcggcgcctcccctggcgaccgcgcccccgggccccggctccggcccgggacggaggagccggcgctcgacacagaggtaagcccaggaccccctccacgccgggccggctggggatgcagggcgcgggcggacgcggaggggcctgcgcggccgggacggagactcggctgggccgagcattccgcagcccgggccgcccagcctccgccgcctcccggagcgctgggtgtggcccgcgctcggcgccgaggcgggctggtggcgcggaccggacgcgaaggtcgccgtccttcctttctccagccggcgcgggcaagcgggaggaggcgccggctgggacgcacagtggcgctccccgggcgagcgtgtggccgccgcgctccgacgtgtacccgcccgccccggatctgaatcgcccgcggccgccgtccctcgcctgccgtcctcccgcgcgggcgcccccgttccctcccaagccggaaagagacccaccgtcccccaggctgctctctggcccggagccgcaaagcccacgtcagccgcgaccaccccgccctcggatcccagccgggtgcgggggccgcggccccactgaaccccgcgcccctggcgcccagcgggagtgggatgcgttggcgtccgcgctgcgcgggtgggctggggtggccggagcagacgcggagcgccctggccgcgggacgaagcggtcgcgccgccgcatttgggcggggggaccccggagtccgcgggctgcggaccccagcgggagacggggttg

SEQ ID NO: 38462 - DNA, 31 bp, Homo sapiens; identical to SEQ ID NO: 2141
  chr2:201172568-201172599
  hyper

SEQ ID NO: 38463 - DNA, 30 bp, Homo sapiens
  chr2:201375022-201375052
  hyper
tgaaccccaagggacggtcttgtgtgttca

SEQ ID NO: 38464 - DNA, 437 bp, Homo sapiens; identical to SEQ ID NO: 2142
  chr2:201450484-201450921
  hyper

SEQ ID NO: 38465 - DNA, 72 bp, Homo sapiens; identical to SEQ ID NO: 2143
  chr2:201451013-201451085
  hyper

SEQ ID NO: 38466 - DNA, 30 bp, Homo sapiens
  chr2:201676376-201676406
  hyper
aagagggcggacgacgcagcgggggaagaa

SEQ ID NO: 38467 - DNA, 30 bp, Homo sapiens
  chr2:201676705-201676735
  hyper
taaattcggtgagacgcggcgccccgctca

SEQ ID NO: 38468 - DNA, 141 bp, Homo sapiens; identical to SEQ ID NO: 2144
  chr2:201727375-201727516
  hyper

SEQ ID NO: 38469 - DNA, 251 bp, Homo sapiens
  chr2:201729264-201729515
  hyper
tccgctccctcctgcgtcttaccgtcctggacaaagactccaagtcgaaggagacaaagcttgtaacgcaatcacgggaatcacgcagctgactgcgtcgcgcaccaacaacaaaatggagctgacagctgctgcgtcgagactcgtctcgaaaacactgatgacgcagcgagcgcgtctccgccgcggggcgggtcatgcacggggcgagcaggcggaaagggcgggcgtgtcgcgcgcgcgaccatcgt

SEQ ID NO: 38470 - DNA, 150 bp, Homo sapiens; identical to SEQ ID NO: 2146
  chr2:201828570-201828720
  hyper

SEQ ID NO: 38471 - DNA, 30 bp, Homo sapiens
  chr2:201934081-201934111
  hyper
tctataacgtataaacgatcatctaaccac

SEQ ID NO: 38472 - DNA, 30 bp, Homo sapiens
  chr2:201934323-201934353
  hyper
acacacacacacacacgcataaaagcaaag

SEQ ID NO: 38473 - DNA, 30 bp, Homo sapiens
  chr2:201936490-201936520
  hyper
gtgtctaaggattccgtccccaagcaagga

SEQ ID NO: 38474 - DNA, 43 bp, Homo sapiens
  chr2:201980839-201980882
  hyper
cgtggaacttgtgtcgacatccacccccggttactgcatactc

SEQ ID NO: 38475 - DNA, 30 bp, Homo sapiens
  chr2:201981489-201981519
  hyper
cggctccgaacccccgaaccccttctaccc

SEQ ID NO: 38476 - DNA, 30 bp, Homo sapiens; identical to SEQ ID NO: 2147
  chr2:201982295-201982325
  hyper

SEQ ID NO: 38477 - DNA, 250 bp, Homo sapiens
  chr2:201983184-201983434
  hyper
gtaggtggtgggggcgcagcggctgtccccactcagtcctggtggggtcgcacgtaacggtcctgagctatgcataagccgtttgaccacgcatggagaattttaccacccagagacacgcgagtggccctgtgcaagtttcaactgcgcggggggcggggaattccgcagacaggattctagaatttatgtcttgtgtggtaacatttcagccggtgggtggcggggattaggcgtgaagcggttcagc

SEQ ID NO: 38478 - DNA, 30 bp, Homo sapiens
  chr2:202315792-202315822
  hyper
ggcagaggataaggcgctatgagaagctgc

SEQ ID NO: 38479 - DNA, 16 bp, Homo sapiens
  chr2:202316318-202316334
  hyper
cggcctccacggcccc

SEQ ID NO: 38480 - DNA, 30 bp, Homo sapiens
  chr2:202316986-202317016
  hyper
ctcacctttggccgcgctctcgggcttggg

SEQ ID NO: 38481 - DNA, 205 bp, Homo sapiens
  chr2:202644944-202645149
  hyper
gaggacgaacaccagcgtcaaggacctgtgttatttttctggcttcgcttctcaaaataacttatcttctcctcttgatgaattacttgataggctcaaagacttgcctaaactactaattcttattatcaaagctattttctttctccgcaaccgccttttcaagtagcccttggtccactcttcaacgcgatttgcaccctgt

SEQ ID NO: 38482 - DNA, 30 bp, Homo sapiens
  chr2:202897574-202897604
  hyper
ggttgcttctgcaacgaagatgggatcccg

SEQ ID NO: 38483 - DNA, 30 bp, Homo sapiens
  chr2:202898168-202898198
  hyper
cctgctcaggaatgcgcatctgagtgcacc

SEQ ID NO: 38484 - DNA, 1090 bp, Homo sapiens
  chr2:202898960-202900050
  hyper
gaccggaccaggcgcggggggcgtgcgcgctgcggtgcgccgggggtccagagtcttgggcaaactttgaagggtgccggagccgcttgttgctcctcgcggcggagggagccgcaccgttacgtccccgcggggagagcgaggcggccctcctcggcgcccccaacccaggctgacgagttttgggcccccggcggccctgcgagtgcagggcggcggcgtctgcggcgccttcgcggcgcgggcacccaggcggcagcgccctttgctccacgccgcccacggcccggccccggcgccgtgaggactctcatgcgtcgggcgcggcggcgcctccccgcatccaagcctctcccaaccgcctcgtcgcactcctcaggctgagagcaccgctgcactcgcggccggcgatgcgggaccccggcgcggccgctccgctttcgtccctgggcctctgtgccctggtgctggcgctgctgggcgcactgtccgcgggcgccggggcgcagccgtaccacggagagaagggcatctccgtgccggaccacggcttctgccagcccatctccatcccgctgtgcacggacatcgcctacaaccagaccatcctgcccaacctgctgggccacacgaaccaagaggacgcgggcctcgaggtgcaccagttctacccgctggtgaaggtgcagtgttctcccgaactccgctttttcttatgctccatgtatgcgcccgtgtgcaccgtgctcgatcaggccatcccgccgtgtcgttctctgtgcgagcgcgcccgccagggctgcgaggcgctcatgaacaagttcggcttccagtggcccgagcggctgcgctgcgagaacttcccggtgcacggtgcgggcgagatctgcgtgggccagaacacgtcggacggctccgggggcccaggcggcggccccactgcctaccctaccgcgccctacctgccggacctgcccttcaccgcgctgcccccgggggcctcagatggcagggggcgtcccgccttccccttctcatgcccccgtcagctcaaggtgcccccgtacctgggctaccgcttcctgggtga

SEQ ID NO: 38485 - DNA, 20 bp, Homo sapiens
  chr2:202900071-202900091
  hyper
cgaaccgggccgtgccaacg

SEQ ID NO: 38486 - DNA, 30 bp, Homo sapiens
  chr2:203103464-203103494
  hyper
aggaccaggtcctgcgcatcagtactaggg

SEQ ID NO: 38487 - DNA, 30 bp, Homo sapiens
  chr2:203130940-203130970
  hyper
gggtgggcaggaggcgtgttagaatttaac

SEQ ID NO: 38488 - DNA, 30 bp, Homo sapiens
  chr2:203241555-203241585
  hyper
ttgttctgcgaaggcgtggggactgtgagc

SEQ ID NO: 38489 - DNA, 30 bp, Homo sapiens; identical to SEQ ID NO: 2150
  chr2:203776302-203776332
  hyper

SEQ ID NO: 38490 - DNA, 30 bp, Homo sapiens
  chr2:203776966-203776996
  hyper
gggactgctctgcgcgctcccggtggggcg

SEQ ID NO: 38491 - DNA, 30 bp, Homo sapiens
  chr2:203879446-203879476
  hyper
gcttcaggtcaccccgcccatccccagcct

SEQ ID NO: 38492 - DNA, 30 bp, Homo sapiens; identical to SEQ ID NO: 2151
  chr2:203879853-203879883
  hyper

SEQ ID NO: 38493 - DNA, 30 bp, Homo sapiens
  chr2:204104156-204104186
  hyper
gccactctccaaggcggctctcaagtactt

SEQ ID NO: 38494 - DNA, 30 bp, Homo sapiens
  chr2:204193363-204193393
  hyper
atccccagctgggccgcgtcggggaccccc

SEQ ID NO: 38495 - DNA, 82 bp, Homo sapiens; identical to SEQ ID NO: 2152
  chr2:204399881-204399963
  hyper

SEQ ID NO: 38496 - DNA, 30 bp, Homo sapiens
  chr2:204400326-204400356
  hyper
cctcgcctttcctccgcaagtccctgtgag

SEQ ID NO: 38497 - DNA, 188 bp, Homo sapiens
  chr2:205409781-205409969
  hyper
gttcctaacaggccctcggggcactcctgcatctccgcacccggcagcctcgccccttgggtgtttttggtgggcgtgactagaagcacctgctcctgggctccttttgcatcttgctgcagtcccctcctgtgaagggcgcagctctgcagtctcctcgctcttccctcgggtgttctttctgagat

SEQ ID NO: 38498 - DNA, 898 bp, Homo sapiens
  chr2:205410026-205410924
  hyper
cgtgtgcatgcgtgcgagagggagagagccagggagagacccaggtgacgagacgaggctcccgggctccagttactggcccgcagggccggggcacgtcgtcgcccagcgtgcggcggggcccgggagcgccgcggcccctttaagagccgggcccaggccgtcgccgggaccgcaggagcccagagcgcgggcgccgcagaggagttgggagccggcgcaaaagtttcctcccaactctggccccgtgcgccgccgccgccgccgcccactccagcccccggcttggggccggccctgccaacgccgccagggccagggccagggccaggaccagcgacagggcagggccggcagtttcgctttggtgggcgcggagcagccgcctgggccgggcaggagtaggagcgggaggaggaggaggaggagccggtgccgcggagctgccgcgtcccgggccgccgggcacctgggaggtaacccctttccgcggccgcccctccccgattcccgccacctgccgcctggccaggtggaaggggcgctgccgcgagcctccgggcctcagggtgttccggggagcggcgccccgggtctctgggcccacccgccccgggcgtcctccgagagtgggggctgcgcccgcggggtcagacacctgttcggcccggcccggcgtggtcgccgggggccaggatgaaagtgaccgtgtgcttcggcaggacgggcatcgtggtgccctgcaaggagggccagctgcgcgtcggcgagctcacccagcaggcgctgcagcggtacctgaagacccgggagaaggtgagcgcggcgcggaggagtggggcgcggctgcagccaaggcacctgccaggtgcgacccggtggcgacactcaggggatg

SEQ ID NO: 38499 - DNA, 31 bp, Homo sapiens; identical to SEQ ID NO: 2155
  chr2:206166172-206166203
  hyper

SEQ ID NO: 38500 - DNA, 317 bp, Homo sapiens
  chr2:206546582-206546899
  hyper
acaaaggatctgagtagtaaacgcagcgagtgtttggggttttattcagaccgggctgacggtgtgtgtcgccgccacgcaccgctgcctgttcgaacgcatggctgagctgccgaccggctcgctaccccaaacaccgtacgccacccaactcctcttgtaacgccatcgcgcgtggcattgtgttgggttctgcgtgtgtggcatcggagtcgtggaatttagggggaacaaggcttttccccccgtccccccggggtctcccttgggtgggggcgacacggccaaggcggcgcgccctgggggtgcccgggggc

SEQ ID NO: 38501 - DNA, 590 bp, Homo sapiens
  chr2:206550227-206550817
  hyper
agcaagatggggcagaaggtgcgcgcgggggagcaactgagcaaataacacggcggtcgcggcgcgcggcaccttgggctggcgcgtggctgggaggccgcatgggcgacgcgcaccaggctgcccctctcctcactgcgccgcctcgccagaccgcagtgcagccgctagcctgcctccctccctgccccgggcgcccccgccagtcccctgcgctccgctctgcgcggcaggctcgccgcgacccctagagagacggctttgagtggcgggaggccgaggccggctggcttgggaatccaagcgctggcccaactaggtgagaggaaactggggtgggatttcggagaggagggcggagagaggcgggaaggaaccagcttgagccccaggaatgcgcgcaacttgcacagcctctagaagcgccgcgcgcccagcgcccgccggtgcgcaggaacaggtgaagagcacgcggcgtgcggccatccacgtggtggggacgtgatagcccctcagctctcctcctagccctccctccccttccccgccccccagcgccttctctaacgccgcatcgatttgtttgggct

SEQ ID NO: 38502 - DNA, 125 bp, Homo sapiens
  chr2:206550889-206551014
  hyper
cgaggctgaagcctccgcgaagttggccgcctccaactactccatgcttgtgccctcctcctcctcctcctcctaaggacacccccagggaaaagcctgcggcatttcttcaacgctgccctatg

SEQ ID NO: 38503 - DNA, 265 bp, Homo sapiens
  chr2:206551071-206551336
  hyper
cgccggcgagttcccgcctcccctccccagccgcctcgctctttgcttttccacgtgagaaaaagaaatgttcacggccgatgcttcattttcactgattgatttctttttaatatcaacacaagttaatggaggcaaggcgcgctctgattgaagggctgcccccgcccttcgactcgggctggctgtgccgggggtctttcccaccgggtcgcaggcgtccagcggctgggtggcgggcgccggtagccctagtgtttggagg

SEQ ID NO: 38504 - DNA, 189 bp, Homo sapiens; identical to SEQ ID NO: 2157
  chr2:206750389-206750578
  hyper

SEQ ID NO: 38505 - DNA, 141 bp, Homo sapiens
  chr2:206948756-206948897
  hyper
tgaaaagcagaaaatcgagatttggaaatttatgtttatcactttttttttttttaacgttcagagctcagggcaccaaaatatagctaaaattgaatccatttaaacagaaaacatacgtgtgtgtgtatgaatatatat

SEQ ID NO: 38506 - DNA, 26 bp, Homo sapiens
  chr2:206949016-206949042
  hyper
ttgctaggttccgagggctcttccac

SEQ ID NO: 38507 - DNA, 225 bp, Homo sapiens
  chr2:206949798-206950023
  hyper
agtttcaaaatagccgagtgcgctcccccacgccctggggggtcccgggcgctaggaccagggctccccggagagacagcggcccccagttcgggcctaaaaggaaactttctgggccgcggctgcacctgactcctcaccgcccctccacccgaccccacgcccgccaggccgcccgccccgccccgccccggcctggccgtccggagcgcggaggagggggat

SEQ ID NO: 38508 - DNA, 30 bp, Homo sapiens
  chr2:207024965-207024995
  hyper
cggggagcggttcacgagcaaggaaaggtt

SEQ ID NO: 38509 - DNA, 129 bp, Homo sapiens
  chr2:207139025-207139154
  hyper
aaataggcatggaaacggaaacgactagctctcttagccccgttttcttttctacattcatacgttgctttgaattggcaagcagtttttatttggaccctcaaacgctaaaaccttggtctctacttc

SEQ ID NO: 38510 - DNA, 972 bp, Homo sapiens
  chr2:207139217-207140189
  hyper
cggagtggggccctgaccagggaggaagtgtccgctttaagagcttctggaggggaggaaggggctcctccgcccgggtgggagagtgagtgagtgggtgggcgggcagggggcggtcccgccgctcctgcgtcagaaggggtctggttttcgcaccttccctgacgtcaaacctccatcagggttgcaacgccacgttgccttggatgcctgcgtgagtggagtcgcgactcggggcccgcgtcctgagagacgcgctcccgcgccgcttctcgcctccggaccgcaggggccgaagtcgcctatttctggctccgcgggcagcggggccgtggcgctcggacggtctgggattcgggcgccgccgcggaaccggaataagaagggagagcgcccggctcggtcctcggtctccaccgcggcccggaaggaatccgggcagcctccgcggaggtgagtgccgcggcgggggcggggcgcggccggggcgacgcccgcgggcggggcctgctcgccgggcgcccggggcgccttcttcccgagggacgccaggaccgctcgctgggctcccgcggccgcctcgcaggtcctcggcttccccccaccccgcgtccctttctgcccctgctgcgtgagaggtgtcggcggctccgggccgggatcgaggtggcggggcgagggaaggaggtggggcgcaggctgcattgcgcttctgtccggggccctgggtcagaggggccggcggacgaggcctcgggtccgggcttggggagggggcggtctgcggggtcggattgagggccgggaacccgcggagtcttgcccctgggcacctgtggggccgagatcccgagccacctgtccacacacccccttcccccagtgccctgcgttgggtccagctggccccagacctaggcctttcccagcctcgggcgattatagtttatttgaaaacgtttgatttttgtg

SEQ ID NO: 38511 - DNA, 3 bp, Homo sapiens
  chr2:207307474-207307477
  hyper
tcc

SEQ ID NO: 38512 - DNA, 126 bp, Homo sapiens; identical to SEQ ID NO: 2160
  chr2:207307547-207307673
  hyper

SEQ ID NO: 38513 - DNA, 1517 bp, Homo sapiens; identical to SEQ ID NO: 2161
  chr2:207307712-207309229
  hyper

SEQ ID NO: 38514 - DNA, 30 bp, Homo sapiens; identical to SEQ ID NO: 2162
  chr2:207507077-207507107
  hyper

SEQ ID NO: 38515 - DNA, 30 bp, Homo sapiens
  chr2:207629939-207629969
  hyper
gagcaatctgcgggcggacgcggggatcac

SEQ ID NO: 38516 - DNA, 1018 bp, Homo sapiens
  chr2:208030992-208032010
  hyper
ccctggcggcgggcgcggattggcacgctgcggatctccctgctgccttacaaggcggtgcgaggcgagctatttttagagggctatataagggggctgaggcggccgcccggcggccgggcagcgcgagcgcaagggacagggagggtcgtggcgacactcgcgccagctcccgggacggctgggctcgggctggtcgccgacctccgaccctccactagatgcctggcagagcccggcgcgtccggagcccgcgcccctcagagggaaggggtcgcgcgtcgccgcggcggccctgaggctgacggtcgggaggtgaaaggccggagtgcggggtcaggacgcctcctggagggggcgcggcgcagggggccgcggggaagccgccgagggcgcggagcgggaaggaaggacagtggccaccccgcctccgcctgggcacggggcagggacccgcgcgaggcggtgccggggaggtcctcacgtactcaaaaacaagcagaaaaggcatccagggccccttcccgaactccccacgggctgccagggtgcagagaagaagcgcctgaggaggaagtgccacacaatgggagagaacaaaggggagcggagcgagaccgcggcctgcgcccgccccccgcttgcgcacagtccccgccccgccccgcgggcgccgccgccgccgccctccctcccgcgcctccttctgaccccgagcgagagacctggtcgggagtccggcggctagagttgattgcaaggggcctgttgctcgactgtgcgttaaagaggctagagggagcctaggtagacgtggggcgcaagctggagccggcagcttgcgagggggcctttacgtgatgaggctcaccatggggtctccagcgaggtgtctgcagagcttcgatggtgagaggaggaactcgatttctcgttttctggagttgggatgtagacatagagagatctgttacatctgagatgaaaaccctgcacaattcacgttagggttggccaa

SEQ ID NO: 38517 - DNA, 31 bp, Homo sapiens; identical to SEQ ID NO: 2164
  chr2:208395299-208395330
  hyper

SEQ ID NO: 38518 - DNA, 30 bp, Homo sapiens
  chr2:208489652-208489682
  hyper
aaatacatggtcgccgcagttccgtctccc

SEQ ID NO: 38519 - DNA, 30 bp, Homo sapiens
  chr2:208575824-208575854
  hyper
ttggaagacaggagcggagcactgagttac

SEQ ID NO: 38520 - DNA, 112 bp, Homo sapiens
  chr2:208576182-208576294
  hyper
aggtgaccgcaggtcgcgttccggttggcaggcaccggccagggccagcggccttcagtcggtaggcggcggcggaaggaggaggagctccagccgcgctctctcccggcag

SEQ ID NO: 38521 - DNA, 227 bp, Homo sapiens; identical to SEQ ID NO: 2165
  chr2:208633316-208633543
  hyper

SEQ ID NO: 38522 - DNA, 102 bp, Homo sapiens; identical to SEQ ID NO: 2166
  chr2:208633755-208633857
  hyper

SEQ ID NO: 38523 - DNA, 30 bp, Homo sapiens; identical to SEQ ID NO: 2167
  chr2:208675723-208675753
  hyper

SEQ ID NO: 38524 - DNA, 30 bp, Homo sapiens
  chr2:208890446-208890476
  hyper
tgtgaaagcaatggcgtgtgtcgtggagtc

SEQ ID NO: 38525 - DNA, 30 bp, Homo sapiens; identical to SEQ ID NO: 2168
  chr2:209101844-209101874
  hyper

SEQ ID NO: 38526 - DNA, 30 bp, Homo sapiens; identical to SEQ ID NO: 2169
  chr2:209103912-209103942
  hyper

SEQ ID NO: 38527 - DNA, 30 bp, Homo sapiens; identical to SEQ ID NO: 2170
  chr2:209104621-209104651
  hyper

SEQ ID NO: 38528 - DNA, 79 bp, Homo sapiens; identical to SEQ ID NO: 2171
  chr2:209108239-209108318
  hyper

SEQ ID NO: 38529 - DNA, 309 bp, Homo sapiens; identical to SEQ ID NO: 2172
  chr2:209113080-209113389
  hyper

SEQ ID NO: 38530 - DNA, 153 bp, Homo sapiens
  chr2:209118760-209118913
  hyper
gacagcccagtttatccggtttaaagtacagtgctgagtgtactcggtgggacaaaggccaattttaggcccgcaggcactttccaaataaaggtcatgggagcacaatttatctctgcgtgtgcgagggcgtgcccccgcttcgccgcccgt

SEQ ID NO: 38531 - DNA, 30 bp, Homo sapiens
  chr2:209120079-209120109
  hyper
gccggggagcggggcgcgctggggctgcac

SEQ ID NO: 38532 - DNA, 30 bp, Homo sapiens; identical to SEQ ID NO: 2174
  chr2:210051601-210051631
  hyper

SEQ ID NO: 38533 - DNA, 30 bp, Homo sapiens
  chr2:210288769-210288799
  hyper
cagtctggggcgggcgctcgggctgcgcgg

SEQ ID NO: 38534 - DNA, 30 bp, Homo sapiens
  chr2:210289195-210289225
  hyper
gcggagcagggggccggacgctactggtac

SEQ ID NO: 38535 - DNA, 58 bp, Homo sapiens
  chr2:210636323-210636381
  hyper
gggacactcctgagtgcagctcggagcggggaaagccgaattccgggggctgaagagg

SEQ ID NO: 38536 - DNA, 260 bp, Homo sapiens
  chr2:210636429-210636689
  hyper
cgtacccctgcggctcaagctgccccggattcgcttctccggccgtgcagcccggcgcgggccgctgtccacagtgggaggtgctgaaagcagggagcgggtgcgggggcggcgaggcggaccgctgctccgagcgcccccctcctcgctccgcggctcctccagccctcccctcctcccgcagccatgttccacgcgcggggaggggtggggggaggggagaggcacgggggatcagggcggagagagccggctctgcc

SEQ ID NO: 38537 - DNA, 139 bp, Homo sapiens; identical to SEQ ID NO: 2176
  chr2:210636737-210636876
  hyper

SEQ ID NO: 38538 - DNA, 176 bp, Homo sapiens; identical to SEQ ID NO: 2177
  chr2:210636933-210637109
  hyper

SEQ ID NO: 38539 - DNA, 30 bp, Homo sapiens; identical to SEQ ID NO: 2178
  chr2:210867112-210867142
  hyper

SEQ ID NO: 38540 - DNA, 97 bp, Homo sapiens; identical to SEQ ID NO: 2179
  chr2:211035493-211035590
  hyper

SEQ ID NO: 38541 - DNA, 820 bp, Homo sapiens; identical to SEQ ID NO: 2180
  chr2:211089524-211090344
  hyper

SEQ ID NO: 38542 - DNA, 30 bp, Homo sapiens; identical to SEQ ID NO: 2181
  chr2:211341504-211341534
  hyper

SEQ ID NO: 38543 - DNA, 30 bp, Homo sapiens; identical to SEQ ID NO: 2182
  chr2:212452337-212452367
  hyper

SEQ ID NO: 38544 - DNA, 2887 bp, Homo sapiens
  chr2:213401088-213403975
  hyper
gatcaccttagtatgcgtgttgcaattataccagggatgcacccgagagcttttctttgtgcggccctttcatctggatcactttgtgttttgaacaagtgaggctcgcctttgtgcccccagaatttcaagtacagagtcacacacggaacaacaatggcacgctaatcctcgcgctctaaatgggctcacttgtgggtctgacaattcgcccagggaaacgagaagagacgaagcgagggcgcgagctagtgtcgcctgagacgaggaagaggacagctgcagaactaatttggattacattccttgcagaaattctgaaaagggcttttcggcatagctcaactcggagccgcacagttaataccaaattgctgcggactcggagcggggtcccccagtggcagaggctgaaccagacagcccccagtaggtcgcctcgtagaaattcctctcggctaagcctgcatgtcggtcgccaatgcctttgaatgggtcaatgtgcataatcaacccattgagggaaaatatgaagggactcgaagtggggagggagataaaaagagatgtatctaagaggccgcttggaatgtcaagtccgtgttggtgtgattccggaggtggctggagcgcgggacctggtatgcgtgaagaatttcggagtaattgggagggtgcaaacggccagcacaaacgcctcacatgtgccattcgaaggtcattttgaaagactcgataattgtaacttgttatttactaggcaaaggaggcggcggcggcggcggcggcggagcgggaaaactacagctagccgttttcttggtgaggtcagaaggacaccctccgggggcctaaagcgctccctatcgccactcccgggggctttatcacctcaagctacttcccacgctccagtcaccatccctggatggtttcggaaatctctctggctctccaaaaggcaccccttggccacgtcaagacaccggtcctcctcagacctctcccgtcccactttcatccccaggaaactctagtgtcagaaactttgagctccattgcactgcaggtgctgtcattagtcctgcaagccgtggcgggccagccccgccgcgctgcctctcggggtcaattagccctttgcctgcccaggtacctggggctcgagctctccagcaagcagtggccgcgcacccatcgccgctgccgctttcgcctcgggtggatccagtgacccgcaggctcggcagcctggccgggcagtaaacagacaagtttgaaggactccggccaatagcaagttgaactacaggaagaactcttcccggagccaaacacggcaaccgacgggaaggccgggcttctggctcaagtgtgccaagcctttttttttttttttaagaggtcaggcaggcgagtaagcgcccctcaagtcaatggggagagggctccgggaagccggcggaagaggcccagaactccgggccccggaccgaggcgcgcccgcctgctgcactccggctgcccgggctgggcgcgagttgcgtctgacgccacaaggctcgggcgactgggggcgcagcggtcgccagcagcacacacaggtgcaaagcccgattttctgagcgccgctctccaccgcccttcgggctcggctcgggagaggcccagccagcaccgccccaggaccgcggccccggcggtgcgggttctgccctcggggacccgacagggacagaagagtctcctctgactggggatttgggtctcccatgtcccgaacaacaggcgccaccagaagggatcccgcttaggctcccaaacaaaacgctcgggaaagaaaagcagggggttaaggagagaaaagagggactcagagtgatttttcacgataaataaagcaaacgcacacatacagggtaagtttcaaatggaaagaggggtgaccgaaagcccagggaagaggccccggtcaagcggtccctccacgcctcccgggatgggtgaagagggcaggggagccactcgaggcagccccgccggcggctgcaggttcggcgaccggagtgccagaaggaacccacctgactgagaatcgctgggctggacggtccccgccgccacgagaaggctcacccagacccaaagtcctgtcgccggcttcattttttggaagtctcagatcccgtgctgacaattacatgtccaaatggcatatccccctttcgggcacgcggaggagatcccccagccgggcgcgcgtgggggtgcgaggggggcgggcgcggcgcgcgcggtgtggcgactcccagggcgggcgaccgagtccgcgcccgcgggtccagggccggggcccgaggagggggcgagtgtgagcgcgtgtgtgcgcgtgtgggagtgtgctcggtgtgtgcgcttggcgctctgggccggactgtgcagctatttccccgcgtgagccttcgcttgctcgctccctcctcactttctctctctctcactggttggtcaacaataaaaaaggaaggggggcgaaaggtttccaaaaaaagttgattgcaaagaggcggtaggtttccggcctctccccgcagccgggctatgttctgctccttcttcagtttccttgcacctccagtccaaatcgggaggggagcggggcggggggagcttctcgcttctccccggatcccgtccttctttttcctctcagctttcctcacacttgtccggcggctgcggtaattaaagctccgagcgtcatttccagcgctccgcggtctccagctgcagcccacagagaaattaataagactccagaaaaaaaaaaaaaaaaggtgcggggggcggtgggaataaaacaaccctccacgcaaccaggccggct

SEQ ID NO: 38545 - DNA, 30 bp, Homo sapiens
  chr2:214149410-214149440
  hyper
cctcccactggcggcgccttttgagccttg

SEQ ID NO: 38546 - DNA, 54 bp, Homo sapiens
  chr2:216300253-216300307
  hyper
ttctctcagtaaagcgcgcacacactcgcacacacgcgcgcgcacaaaacttca

SEQ ID NO: 38547 - DNA, 31 bp, Homo sapiens
  chr2:216826037-216826068
  hyper
ctgggcaggtcaaactcggatgtaggtatct

SEQ ID NO: 38548 - DNA, 258 bp, Homo sapiens
  chr2:216946186-216946444
  hyper
gtctccctggtggtcgtaatttcgcccacacctgccccgtctttgctctgcagctccacactccctcagccccgccgagagctcctggctcccgtctccaggttaccccaggtcaccacagccacctctctgcaccagcggcccgctcacgtacccagctccaggagctccttcacgatggcttttccgatgcccgtggccccgccggtgacgatggccacttggccctgcagcaaaccaggcgccaggtagctcctg

SEQ ID NO: 38549 - DNA, 42 bp, Homo sapiens; identical to SEQ ID NO: 2185
  chr2:217008384-217008426
  hyper

SEQ ID NO: 38550 - DNA, 30 bp, Homo sapiens; identical to SEQ ID NO: 2186
  chr2:217236025-217236055
  hyper

SEQ ID NO: 38551 - DNA, 487 bp, Homo sapiens
  chr2:217236410-217236897
  hyper
cgtgggggtgggggcggctggggagtgaggagggggagtaataaaaaatgaaataatactagtggaataattcggttctcaggcaagagtgcttctggagggtgggggcggaggagggcggctgccgggtctgctcggcagctctgcccccgctacccccaccaagggcggcctcggcccgctctctgcccccccaccccgccccttcctcctctccaccgcctctggctggctaggctcgctgttgctacctctcctcgcagatgcaacgaggtaaggcttgtttgcggtgccagctgaaggtggggaggggggagcgaagcagtgtggccgaggtgggaggcagccggcacttggctccagcttggtcctcgcgactccccaaaaccgtatataaatatatctcttataaaagccgagaggaagcaaatcagattccaggctgctgccaggtgttgtctcgtcttccgccgttgctcagcacccg

SEQ ID NO: 38552 - DNA, 30 bp, Homo sapiens
  chr2:217277067-217277097
  hyper
tctcgccaggctcccggcccgaactacaaa

SEQ ID NO: 38553 - DNA, 30 bp, Homo sapiens; identical to SEQ ID NO: 2188
  chr2:217277337-217277367
  hyper

SEQ ID NO: 38554 - DNA, 30 bp, Homo sapiens
  chr2:217277633-217277663
  hyper
gtgggtcttatggccgagtctctctggtta

SEQ ID NO: 38555 - DNA, 89 bp, Homo sapiens
  chr2:217497875-217497964
  hyper
gtcctacccaaacccgcgagttatccgtattctccttcaggagtcatagtcaggccagaagagtgcggagggacggggcccgggaagag

SEQ ID NO: 38556 - DNA, 30 bp, Homo sapiens
  chr2:217498559-217498589
  hyper
gcggccaggggctgcgctgctatccccacc

SEQ ID NO: 38557 - DNA, 92 bp, Homo sapiens
  chr2:217498811-217498903
  hyper
gggactgttgctagcgggacgcggaagtcaggcccggggaggggaactggagttagagcaagtggaagagccctggcgactcatttggtggg

SEQ ID NO: 38558 - DNA, 88 bp, Homo sapiens
  chr2:217499271-217499359
  hyper
ttctccatagggaacgagcagggctcttgctaccacgttgaatggaaaaataaaagggaggcatttggtaggcgaggggtctcctagc

SEQ ID NO: 38559 - DNA, 30 bp, Homo sapiens
  chr2:217556788-217556818
  hyper
actttttggggacccgcccagtggttgtcc

SEQ ID NO: 38560 - DNA, 30 bp, Homo sapiens; identical to SEQ ID NO: 2190
  chr2:217557145-217557175
  hyper

SEQ ID NO: 38561 - DNA, 581 bp, Homo sapiens; identical to SEQ ID NO: 2191
  chr2:217558851-217559432
  hyper

SEQ ID NO: 38562 - DNA, 30 bp, Homo sapiens
  chr2:217905816-217905846
  hyper
aagaaggcaaatggaagctacagaaaccaa

SEQ ID NO: 38563 - DNA, 30 bp, Homo sapiens
  chr2:218296492-218296522
  hyper
tgtctgggagacttccgctgtttctgagaa

SEQ ID NO: 38564 - DNA, 31 bp, Homo sapiens; identical to SEQ ID NO: 2192
  chr2:218802244-218802275
  hyper

SEQ ID NO: 38565 - DNA, 30 bp, Homo sapiens
  chr2:219081750-219081780
  hyper
gcaagcgcagcctccgtttcctccggcgcg

SEQ ID NO: 38566 - DNA, 30 bp, Homo sapiens
  chr2:219154765-219154795
  hyper
tgggggaaaggagtagggacttgtttatgg

SEQ ID NO: 38567 - DNA, 30 bp, Homo sapiens
  chr2:219157392-219157422
  hyper
cacaggggtattttcggatttaaaggcaat

SEQ ID NO: 38568 - DNA, 199 bp, Homo sapiens
  chr2:219232360-219232559
  hyper
tagctctccttggagcgagcggctgggggctcctggggcgcgggggtcccgtccggctgaggctcgggctctgtcccctgccaggaggagctccggctcggccacgccagctatctgcggcagcaccccgaagcccacgcgctcatctccgacttcctgctcttcctgctgctgcgccagccggaggacgtggtcacct

SEQ ID NO: 38569 - DNA, 235 bp, Homo sapiens
  chr2:219232655-219232890
  hyper
cggagggagacgcccgctcgggggcggcctaagcggggcccaggcccggacagggcaggaaaccaggggtcgggctgggacgcgggcgggacgcgccggggcgggtgcgctttccgggctgcggttttgggggaataaatggggccctcccgcttctctgcagcgcccgtcgacagcgtccctggctagcgtctagtgtctcgggctagaaataggaaccgttaccgtcgtacct

SEQ ID NO: 38570 - DNA, 41 bp, Homo sapiens
  chr2:219261656-219261697
  hyper
tccctgtggcaggatgcggtgaagggcgctgcccgtgacgc

SEQ ID NO: 38571 - DNA, 30 bp, Homo sapiens
  chr2:219262177-219262207
  hyper
tgtgcacggctccccgcctccccctgggtt

SEQ ID NO: 38572 - DNA, 30 bp, Homo sapiens
  chr2:219262921-219262951
  hyper
ggagacagatgtcccgctcccaggctggaa

SEQ ID NO: 38573 - DNA, 990 bp, Homo sapiens
  chr2:219263452-219264442
  hyper
cgaggggtgtttgtcgggcttggcattattaatttttaaatggtgaacttacaaaatagtaacgacgagtgaaaagaacttcataaacgaggaaaaagaccaacccgcagacccacggcgcgcaccacggaggggcttgcagcgagaagacagggacctccgttcccaagtgcccagcactgcgccacaggccgggtggaacgggccttgagggcctctggtttgaggtcccccacggtcgggctttgggcccaccgcgtgcggcgccgtgctgggctcctaggatcggcagcgagtccagtgactcccaccgcacccccagtaatcacagggcggccgtcgaccgcgggcaggggagggggtctgggaaggcccctggagaaggtggcatttcctcgaggtcggtggaatttggctacgcgaaaggaacagcgcgtacgaaaacttcaggcgggaacgcgcggtggcccgtgcgcggcgggtagacgtgcggggccccgggtggggccgtggggagaggtcggcagggggctttcccagggcagagagttagaatttcacgtcctacagaccgggggcacctcgccctggggctgcggggggcggcgaccgtcccattcaagagcgtgattctgaggtttgcacagctgtttcgggccagcagagccttcgctggctcttgacgtccttgcgaggtgatctctgcgaccaccagacaggagagaagacccattttacagatgaggtagtgctatctccaagtcctcaacgaggaaaccgagaagcctctagtcccgggtcttcagaaaacgcagaggtggagccgcgccgcactcgggcactccccggcgtgggcgctcccggcgggcgggccttggccgagggcgctcggcggcctggaacggtgagccgggtgccgggcctgccacgcagccgcagagactcagccccgccggcgggcggcaggaagggaggcgacgccccctggag

SEQ ID NO: 38574 - DNA, 30 bp, Homo sapiens
  chr2:219523965-219523995
  hyper
tcagtacctccttccgagagttcccagcgc

SEQ ID NO: 38575 - DNA, 30 bp, Homo sapiens
  chr2:219536855-219536885
  hyper
gcccatgtgtggtccgccgtccattccaca

SEQ ID NO: 38576 - DNA, 30 bp, Homo sapiens; identical to SEQ ID NO: 2196
  chr2:219576524-219576554
  hyper

SEQ ID NO: 38577 - DNA, 851 bp, Homo sapiens; identical to SEQ ID NO: 2197
  chr2:219646294-219647145
  hyper

SEQ ID NO: 38578 - DNA, 54 bp, Homo sapiens; identical to SEQ ID NO: 2198
  chr2:219723642-219723696
  hyper

SEQ ID NO: 38579 - DNA, 167 bp, Homo sapiens
  chr2:219724142-219724309
  hyper
acaaacctgtcaaacgtctcccttccagcccgtcccccattcctcagctcctctttctcccccctcacccctctctactcttcttcccagcccttccttgcccccgactccaggcggccgcgagcggcggggggctccaagtccgagagaggcgaggcgagggggcg

SEQ ID NO: 38580 - DNA, 181 bp, Homo sapiens
  chr2:219724903-219725084
  hyper
agactggggtgttccgcagcctcccggctctacctgctctccgagcccagctttctggcctcggccgggggcgtttctgaactccacttcgacgttcctaaccctcgggaacattctattgtgtttcctcctcccgggttctctcccaccccccgccaagttatgcgctcacccagctcac

SEQ ID NO: 38581 - DNA, 30 bp, Homo sapiens
  chr2:219725692-219725722
  hyper
taggtctccagagccgcaaaccctcgcccg

SEQ ID NO: 38582 - DNA, 903 bp, Homo sapiens
  chr2:219735784-219736687
  hyper
catctgcaggaaggcacggcggctggccgggcggcaggccgagttgtgccaggctgagccggaagtggtggcagagctagctcggggcgcccggctcggggtgcgagagtgccagttccagttccgcttccgccgctggaattgctccagccacagcaaggcctttggacgcatcctgcaacagggtcagtgtggggagggggcggaagtggggctgctttctccctgctgtgggacccgaggagaggagaactggttcgctgaagttgcctgagccccacttccccctcacatgtgtctgggcaccctgcaaggaccctgcctcccaggcccctggggcagccctcccgccgcaggtttcaggtcccaggccccagctgaccgccccagcccgcgctgattgcacctgtctgcattcacagacattcgggagacggccttcgtgttcgccatcactgcggccggcgccagccacgccgtcacgcaggcctgttctatgggcgagctgctgcagtgcggctgccaggcgccccgcgggcgggcccctccccggccctccggcctgcccggcacccccggaccccctggccccgcgggctccccggaaggcagcgccgcctgggagtggggaggctgcggcgacgacgtggacttcggggacgagaagtcgaggctctttatggacgcgcggcacaagcggggacgcggagacatccgcgcgttggtgcaactgcacaacaacgaggcgggcaggctggtgcgtacgggcaggatggagtgagtgtgtgcggaaatgtgagtgtgcgcgcaggagtgtgcttgaggaagtgttggcaggagtgagggtgtgtaggtggaggggggcgttaatgtgtgggggagtgcgcacgggcggaaagatgg

SEQ ID NO: 38583 - DNA, 30 bp, Homo sapiens
  chr2:219745231-219745261
  hyper
gcggcagagctccccgagccgggacagtca

SEQ ID NO: 38584 - DNA, 30 bp, Homo sapiens; identical to SEQ ID NO: 2201
  chr2:219745632-219745662
  hyper

SEQ ID NO: 38585 - DNA, 749 bp, Homo sapiens; identical to SEQ ID NO: 2202
  chr2:219757350-219758099
  hyper

SEQ ID NO: 38586 - DNA, 256 bp, Homo sapiens
  chr2:219761612-219761868
  hyper
gctccctaggctcgcggtgtatggaagctgggacatcccatgattcctctctggaccttgtccttgaagttagggttggcgcataggaggtctctccctggagcggctaacccctgctggtgggttgggaggtataggatggtgaggaagccctttgccacttcgcggctgcgcactttggaatgcccccggttactgtggtaaccagggcagccgaggtgtgtcctcggggctgggaggcgcccgcccccccacc

SEQ ID NO: 38587 - DNA, 30 bp, Homo sapiens
  chr2:219762528-219762558
  hyper
gcttctgattctagcgcagcttctccgccc

SEQ ID NO: 38588 - DNA, 30 bp, Homo sapiens
  chr2:219763161-219763191
  hyper
cgggccttggggcgcgtagccccagttaat

SEQ ID NO: 38589 - DNA, 436 bp, Homo sapiens
  chr2:219773631-219774067
  hyper
tggacttaaaggagccggtggccttaagagtccagtcgatgctgccacgtgatgggcctgggggaaagccccgatcccaagcgccaacagagcagccgacctcagccaacctcaaccaacacgtaggcgaggatgcccagggtgagcgccagcggcgagaagacgcgctatcgcgagatcggtgggacctacgcgtttacaggccggaagtgaggggcgggcctaagggggcgcgctccttttgaaacctgagacggagacctgcggagggcgagggctggttggaggtcgctgtcctttctgggaaccaagcaggggtcgcaggagggcggggatgggtcagcggggatctctgagtggggttcggctgagagaggccacagtttcatctttgggaagctaccctgggccggccacgcgccgtgagccggactgg

SEQ ID NO: 38590 - DNA, 32 bp, Homo sapiens
  chr2:219824036-219824068
  hyper
ggtttatctgctaccgcgacccagtgcatcag

SEQ ID NO: 38591 - DNA, 799 bp, Homo sapiens
  chr2:219824293-219825092
  hyper
gggagcggattggccgcgtgaggcggggcacggcgcgacgaaaaaaggggcccaaggggtggggctgacgctgcagctggcgcagctcaggattagagcagcggagccgcctagcagccaccttcccccgccagtccgcgcgcccgggccggggctaggccccccaccgccgggtcccccggggctgcagtagcagcggcgccgcccgcggctcccgctggggcctgggcgccggccccgctctgcaggatgggcacagtgctgtctctttcgcctgcctcctcggccaagggccggaggcccggcgggctgcccgaggagaagaagaaggcgccgcccgcgggggacgaggcgctggggggctacggggcgccgccagtgggcaagggcggcaaaggcgagagccgactcaagcggccgtccgtgctcatctcggcgctcacctggaagcgcctggtggccgcgtccgccaagaagaagaaaggcagcaagaaggtgacacccaagccggcatccacgggccccgaccccctggtccagcaacgcaaccgcgagaaccttctccgcaagggccgggatccccccgacggcggcggcaccgccaagcccctggcggtgccagtgcccaccgtgcccgcggctgccgccacctgcgagccaccgtcggggggcagcgcggccgctcagccgccgggctcgggcgggggaaagcctccgccgccgcctcccccagccccgcaggtggcgccgccggtgcctggcggctcgccgcggcgggtcatcgtgcaggcgtccaccg

SEQ ID NO: 38592 - DNA, 851 bp, Homo sapiens
  chr2:219825130-219825981
  hyper
cgctgctatcgcctcaaggagctgagcccgggcgagctggtgggctggttccgcggtgtggaccgctcgctgctgctgcagggctggcaagaccaggccttcattacgcctgcaaacctggtgttcgtgtacctgctgtgccgcgagtcgctgcgtggggacgagctggcgtcggccgccgagctgcaggccgccttcctcacctgcctctacctcgcctactcctacatgggcaacgagatctcctacccactcaagcccttcctcgtggagcccgacaaggagcgcttctggcagcgctgcctgcgcctcatccagcggctcagcccgcagatgctgcggctcaacgccgacccccacttcttcacgcaggtctttcaagacctcaagaacgagggcgaggccgccgccagcggcgggggcccaccgagcgggggcgcgcccgccgcctcctcggccgccagggacagctgcgcggccggaaccaagcactggactatgaacctggaccgctagggatacccaggggccgcgcccatcccccgccccagcccctgacacacactcggaccccccgggaccacaaagccaccgccgctgttaccgccgctcagcgccccggctgggcggaggaggagacgcccatgcccctcaggggaaagtggagaccgggacaccagaggccgcggtgtttggatttgctgggcgtggagtggggacggaagatgagcgcgggaaaggcactccaacctcactcttcccgtctgtctgcgcccccatttctccatttctgccggggtctcccccttcccttcagcccattccccctcggttttatccatttccttgcc

SEQ ID NO: 38593 - DNA, 30 bp, Homo sapiens
  chr2:219826728-219826758
  hyper
gaccggaatcctcccggtagggtaccaggg

SEQ ID NO: 38594 - DNA, 547 bp, Homo sapiens
  chr2:219827638-219828185
  hyper
gcctggcttcaacagagtgcccgcggctccgaccctagtctggccgtggccgagaagatccggaaagaacccggggggacctgccaagacgaggcccgggttcgctgtccgtggtgctgaatggcgcgctcgggcggggtcggggcttgtaagggcaggaagagttgcagactcggcctcaactaggtcttccggataatttgggaatagggtgtcatctattctggcggcgagttatagaagtctggctccagaacccaaaaatgtcggtccccacttgccctcccgggacgacaggactcgattcccctggcctcagcccagcgcccttgtaacctgcctggagccggaaatccccagtccagatttgtgaattgagttcccggagggagggggagagctggcggaagggaaggcgggagcagccgcccattggctggaatttggcgcagtcagcgcggtgccgtcatctctcttggtttgggaggagggagggaggatcactagggtcactccgcggctgtcggctgtcgccatagtaaccaga

SEQ ID NO: 38595 - DNA, 1320 bp, Homo sapiens
  chr2:219845550-219846870
  hyper
ggggtgaagggcaaccggaagggagtgaggtgagctggggtcgcctggcagggtgggtatgaggcaaggcggctccctcgggctgagcccaccatccaggcctctcgctgcctgcgggcggcgcccaagcccgcgccaccctccttctcgggacgttttccttggcagttctctgctcaggcccgagatgagcctctccctgctttcccctaaccacgggttctggcgcagcaaagaacagagagagaggaggcagcggagagctcaggagctttaatggggctgaaagggtcagaaacacaccgggagtttctcctgggagtgtggggacaggaggaagggggccgtgtgtcacggaggacggtggctttcaccaaacctgctcaggtcccaggaaggaggaccgtgagaggcctccacgtgctgaggtgggagcagttccttggggaagagcaaaagtgggaaaagatttggcactcgttaaagagtagtgatattgaatggggcttctaggagccaggcggaaatgcactggagtggtggggagacaagagaggtccacaaatcccctccgggacctggagacctagaagaaaaaaagtgaaagagggcgcacatcgccctcctcaggggactgcggggtgggacaggagcaaatctagtaccagacaaggattgagggagcttcggtcccgtccccctgctaagtgcggcaggtggagtaaactctggattagaggacggttgacggaggctcccgggccctccccgggatgccgatgggatcgggcgagactctaggcgtgcgggcgaggccgcaggcacccgaccgccccgtctagtggtaatggccccccaagtgcgaggctgcggccacggccccgaagggcccgggcgggggctgcaagctgggactggggtagagcgcggcggtggcggcggcagcggtggcggcggggcccgggcccggccagtaggagaagccggcgggcgcgaccccggccgaggcggccatgaggttgagtttggagaggccggggaagggcagcggggcgaggccggcgggcagcttgtagagcgcgccgtcctgggcggccgcggcggcggcagcagctgcggcggcggcatgagcgtgcgcgggcggcggctggcaggcctgcgccaggccctggaagtcgaagcggtaggcgtagcgcttgccatgcaccttgctcatgatgttcttgtcgtagtagtagcgcagggcgcggctcagcttgtcgtagttcatgttgggcttgctcttgcgctcgccccaccgccgcgccacctcgtccgggt

SEQ ID NO: 38596 - DNA, 468 bp, Homo sapiens; identical to SEQ ID NO: 2207
  chr2:219846894-219847362
  hyper

SEQ ID NO: 38597 - DNA, 254 bp, Homo sapiens
  chr2:219847580-219847834
  hyper
gctcccttgggacaccacatccgacaggagtaggaacgaacagtggccccctatacgtgacaggaggggcaagctctcatgggctcactatcctagccaccttcgggtgcgcaggcctctgcgctggccctgagaatttggcctcttattttcggaacaggcgggattccctgcctacgaaggtgccatagttctcggggcctgatgaacaactctgaggaggggaacggaccgagcagctgttgtgcttggct

SEQ ID NO: 38598 - DNA, 202 bp, Homo sapiens
  chr2:219849120-219849322
  hyper
gtggtccccaggcgcgaggctgggggcccgggccacccggctcctcctcccggagcctggtccaggcgcgctgcgcggagcccctccatagagcccaagtcaggaaacgcgtccaggaaaaaggaaatccgctttccgaaggggccggctggagccttataaagccgagcggggaactgcgccagccgagctggagcgcgaa

SEQ ID NO: 38599 - DNA, 30 bp, Homo sapiens; identical to SEQ ID NO: 2209
  chr2:219850450-219850480
  hyper

SEQ ID NO: 38600 - DNA, 76 bp, Homo sapiens; identical to SEQ ID NO: 2210
  chr2:219857661-219857737
  hyper

SEQ ID NO: 38601 - DNA, 1146 bp, Homo sapiens
  chr2:219857780-219858926
  hyper
cgcgctcgcagacgttcgcacagtcgcttagcagccgacagcgacggccctggaagtcctcctcgtcccagagcgtgaggctggcgggcgccgggcccggcgcgggggcgctgctcatgccgctgcggacaggaagggtggcaccacgcgctcagcgtctcaagagccccgtttcgagccacacacagcctgcccaacctgggtagcggatgaagaacccgggggctggacccggcctagctctggacccggctgccaggggctcgcagtcttcccgcgctcccctcccttccccaccccagcagagggcattcaccgggtgggtgagcgcggcacgcgagggaaatggaccggctgcgaggctgcgcgcggccgggcgggccgagctttatacctgggccttgtccccctgtccgcaccctttccctcgggggtggggtcgctgagtcagcaggcaggctgcggtcggctctggtctccgctggggagccgaggcctctcccgcagccgccgctgtggccccagcccgcgggaaagacaacagaaagtgctgaggcgcgcaccccgcgcccgccgcagcccaggctgactccgcgctttctttctttccagcctgagccaggcagggcacgccaggcctcggggcagaacgcgccctccctgtcccggccctcggggacgaagggacctggcctcccctgggcctcgggctaagaccgcgctgctgactcgctgagcggaagttcttcccagagtctaatcgccagccttcctcggccctagtccaggcctctcttttgggcgatgctaaggcggaggtagagagggctctgcccaaaggattcgcttcatgtgctcagtcctctttttcctgggggatcggtccatcgcggcccttttcctcccaagcgtgcgttcccagatcctgcgccgcgcccccggggtgtcctcgggcccgggaaggagaggaggcggtggtcaggactcgccacgcggcggcgccgggcgctggaaacgaccgcccgagggccgcgcggtttactcagtgtttaggcataatagccacctagggagtggctcgccgcgggaggtaggaagaatgttgggctttagctcggctcaaccggtgccgctgcgggtctccca

SEQ ID NO: 38602 - DNA, 644 bp, Homo sapiens
  chr2:219866437-219867081
  hyper
ggagggcccggggcctggcggtcgccctcggtgatctcctggtcctggtcttccgcgagctcagtgctgcacagcgccccgctagcctccgccctcacctgaacgcatctgcggctgacacgtcggcggccgcggcggccaccgcaggtgcgcacctggcccgcccctcctttcccagccaccctccgcccggctttcctggcccctccgcccggcccagcctagcttggcttcgtccccagcccacgccttggagcttgtcccggagcccgggctccgtgtgctcttatactgcctgttcagtccccgcccccagacacacacactcacacctgtccaggcgcccgtttgctcggggcaaatattgactcatggaggcggagcgctcccccctcccccgcccgggctctgagaccggagcttctccgaggccttggtggcgggggcggaggggagggtgctggggaccctgggcgcctctggaacaacaccagatgtcacttttccacccacctgcctctgggagggaggagccgagaagcagaggacagaagctcccgggcgggggttaggaggaaccgagaggtgggtatccatcctcgtctgaggactgattcacagtgggagtcgcttagcagggtctg

SEQ ID NO: 38603 - DNA, 30 bp, Homo sapiens
  chr2:219867910-219867940
  hyper
acctccccgcggctcgcctccaccaggatg

SEQ ID NO: 38604 - DNA, 199 bp, Homo sapiens; identical to SEQ ID NO: 2213
  chr2:219906101-219906300
  hyper

SEQ ID NO: 38605 - DNA, 478 bp, Homo sapiens
  chr2:219922757-219923235
  hyper
acacctttcagcgcccggtccctctgtgcctccaaggcaggagggccagccagcggccgggagggaggagtggcagcagagccgactgcctgcggccggcctgcgaggcgtgcaaggcccgaggtgcccagtaggtgtcaccgcagcctcagggctgaggcctggggacgacaggctctggaggcgcggcaggtgcagagcgtctcggtagcttcagggggtgtgttggaggggaatcgccggcctgcctggatccctcgagcaccaccgaggattcccgccgggaccctcttataatcttaaaccggcccacaaccccgccagagatgacagggccagggaaccagaaaccggcggattagcgccagggccgcccaatggggggccacatgcaacgtcttcctctgcaaggcgcaaaaggggctgacaatcccagacctccaggacctctgcaccggtgccccgcccctataccgta

SEQ ID NO: 38606 - DNA, 198 bp, Homo sapiens
  chr2:219923727-219923925
  hyper
gcagccctggttccccgcctctctccctcactgccaccgccccctctcgggtccagagcccgggcgtgcgctgtcaatgattgcccagcccgtggcccggatccttatctgcattcctcggcgcccggcccggcccggccaccagccaaccttcggccccgacactggccggccagccccggcgccagggtgcatgct

SEQ ID NO: 38607 - DNA, 30 bp, Homo sapiens
  chr2:219924680-219924710
  hyper
gggcttggggatgccgacactcctgcctgg

SEQ ID NO: 38608 - DNA, 369 bp, Homo sapiens
  chr2:219924976-219925345
  hyper
gatcttgccttcatagcgtccgctggcgcccagggtcttctcgggcacattggggctgaactgcttgtaggcgagcggcacgagtttgcgtggcggtcgccggcggctgcccaccacccgacccggcccgcagccccatgccgccggcaccaccagcagcagcaacaggaccaggcagaagtgcagtcggggccggagccgggcgggagacatggccggggagcccgggggagcggcgggcgaggtctcctggtgggctgatgggcaggcgcgtcgacgggagcgctgcgggggctcaggcgtccgggtggctccggggggctccaggcgggggcgccatgggcggcgtggtgcggccagggccggcgg

SEQ ID NO: 38609 - DNA, 30 bp, Homo sapiens; identical to SEQ ID NO: 2216
  chr2:219925673-219925703
  hyper

SEQ ID NO: 38610 - DNA, 153 bp, Homo sapiens
  chr2:219925924-219926077
  hyper
gctctggggtgccccgccaggcgcaaacctcccggacaggagctgccacccccacggagaccgcaacccacggcgcggccggacgcgaggggcggggggcagtggccggaccgcacagccgcctacggtgtcccctgcggggaagcaaaccca

SEQ ID NO: 38611 - DNA, 37 bp, Homo sapiens
  chr2:220025697-220025734
  hyper
gcgtcttggagtcacgctggccgagtggaaagaatag

SEQ ID NO: 38612 - DNA, 30 bp, Homo sapiens
  chr2:220042081-220042111
  hyper
atgaacaagccaggcgtagcaatggagaag

SEQ ID NO: 38613 - DNA, 30 bp, Homo sapiens; identical to SEQ ID NO: 2217
  chr2:220043322-220043352
  hyper

SEQ ID NO: 38614 - DNA, 30 bp, Homo sapiens
  chr2:220071035-220071065
  hyper
atataggggttggtcgcattagtgatatgg

SEQ ID NO: 38615 - DNA, 328 bp, Homo sapiens
  chr2:220094204-220094532
  hyper
ggcaaggccagacacggggcctgggattccaataaccggtctcacgtcttacctcaggaacagcgacccgggtgattccagaggctccgccggctccgctcggctcggctcggctcggcgcgacccgcggcgctaggccgggtgtctgccactcactgtcacccgcagccaggctggccaataagcacggggggcggagacacaacggccaattctcggcttcagggacgggactaaagtctcgaggcgggtcttggacagtcagcggcccaatagtgtgctctacgtggggcggggctcaggtgcggacgccgccggttgtcctctt

SEQ ID NO: 38616 - DNA, 30 bp, Homo sapiens; identical to SEQ ID NO: 2219
  chr2:220118258-220118288
  hyper

SEQ ID NO: 38617 - DNA, 35 bp, Homo sapiens
  chr2:220118640-220118675
  hyper
gctagctgcagtgccgcaccgcccttataggcggg

SEQ ID NO: 38618 - DNA, 30 bp, Homo sapiens
  chr2:220144311-220144341
  hyper
ctcctgggcctgggcgtcgagatagctctt

SEQ ID NO: 38619 - DNA, 135 bp, Homo sapiens
  chr2:220173085-220173220
  hyper
gctggccttggaggcggttaccagagaggaaggggtcacagagcgaggactctccactagacctgagccctctgttgtattctgccaacccacagcgtcacaggaagtactctgcctctcgggcctccaagcccg

SEQ ID NO: 38620 - DNA, 97 bp, Homo sapiens
  chr2:220173939-220174036
  hyper
cgtgggcactaacggcgctgcagccccccgggcggctgctcagcagcaggaggcagaggagcagccggagacccccggatcccccgagacccccagg

SEQ ID NO: 38621 - DNA, 244 bp, Homo sapiens
  chr2:220174059-220174303
  hyper
cgagctccgggcgctcgctcccgggccggagccgcagcgacgctggcgggagcctgccagaggggctgaggcggggcttgccgctccccacctccctacgaggcggggtctacatgcccctctcgctgcaacgcggccaaccgcaggcgggtgctgacgacacctccacccccggctcgtaagctaatttgcgtcacatatggcgtaagagccctgtcggagcgggggacctacctagcccatc

SEQ ID NO: 38622 - DNA, 412 bp, Homo sapiens
  chr2:220196348-220196760
  hyper
tgaggagaagggaaagagcttcgggaaggggagctgattctctgaggcagcgttcccaggactggtgggaaggagtggtgacccgctcgggctcggcgtggacccggagcgcgcctggcgctgtccgtggtgctgagaggtggggaggccagcgtggcggcggcgctgggcggaatgtgggcgagacatctccgcaaggcttggcggtccttccccacggccctcatcctctcattgccaccaggcctcctcccacagctgttcctgaatccgctgcattggcctctaaaaccaaaaatcagggagagggggcgacagactaggagtttgcgctctcttccccatgcgctctgcgcaggagttctcgagtgtgcgcagtctggcacgtgagtcagcgcggggtctacgcgga

SEQ ID NO: 38623 - DNA, 205 bp, Homo sapiens
  chr2:220197350-220197555
  hyper
tcctcccaggctcggcgcgctcactccccggccaagtctcagtgaaggtagcggccacggccgaggggctgagcggggctgcagcttcccaccagcccgcgactccgaatctgtttaaccctcctcggcagttcagccaatcgtgagcgggccctgcccctgcggtcgcctccccagctccttcccctaccgcctccccaccctc

SEQ ID NO: 38624 - DNA, 30 bp, Homo sapiens
  chr2:220223608-220223638
  hyper
cccagccccccgggcggctgctcagcagca

SEQ ID NO: 38625 - DNA, 30 bp, Homo sapiens
  chr2:220252532-220252562
  hyper
gcccgcccccaccgcgccgcctgccccgcc

SEQ ID NO: 38626 - DNA, 30 bp, Homo sapiens
  chr2:220267733-220267763
  hyper
tgactatgggtgggcgtgactgaattactt

SEQ ID NO: 38627 - DNA, 6 bp, Homo sapiens
  chr2:220299628-220299634
  hyper
agggca

SEQ ID NO: 38628 - DNA, 30 bp, Homo sapiens; identical to SEQ ID NO: 2225
  chr2:220299885-220299915
  hyper

SEQ ID NO: 38629 - DNA, 30 bp, Homo sapiens
  chr2:220348312-220348342
  hyper
gccggagccccagcccgggagccacccgcc

SEQ ID NO: 38630 - DNA, 399 bp, Homo sapiens
  chr2:220348584-220348983
  hyper
ggtgaggcggagccccggggccggcaccgccgagcgggggcgcccctcgagatccccgtggccaggcttggggcccgtaggctacaggagtctccttccctgtctgccctcagcgaggcccagccatccagccctgcacggcccagcgcccccaaacccagtacccctaagtctgcagaaccttctgccaccacacctagtgatgctccgcagccccccgcaccccagcctgcccaagacaaggctccagagcccaggccagaaccagtccgagcctccaagcctgcaccacccccccaggccctgcaaaccctagcgctgcccctcacaccctatgctcagatcattcagtccctccagctgtcaggccacgcccagggcccctcgcagggccctgcc

SEQ ID NO: 38631 - DNA, 750 bp, Homo sapiens; identical to SEQ ID NO: 2227
  chr2:220349054-220349804
  hyper

SEQ ID NO: 38632 - DNA, 69 bp, Homo sapiens; identical to SEQ ID NO: 2228
  chr2:220361397-220361466
  hyper

SEQ ID NO: 38633 - DNA, 257 bp, Homo sapiens; identical to SEQ ID NO: 2229
  chr2:220361644-220361901
  hyper

SEQ ID NO: 38634 - DNA, 112 bp, Homo sapiens; identical to SEQ ID NO: 2230
  chr2:220361983-220362095
  hyper

SEQ ID NO: 38635 - DNA, 96 bp, Homo sapiens
  chr2:220362303-220362399
  hyper
agaggctaatgatttgctcaacgtcacactgcgagtttaaatgcatctgtatttagtgccgggtattagccggtgaggtgatgccctgcctcatct

SEQ ID NO: 38636 - DNA, 183 bp, Homo sapiens
  chr2:220362444-220362627
  hyper
cgacgaagattcaaaagggacccgacaacactaaggcgcgcaaaggcaccaccgtgacgctgactgcggagatcctgggagagcctgcgcccgacgtaggctggaccaaggacggggaggacatcgaggaggatgacaggcgagggccgggacctgcggcacggccagggcctggggctggaa

SEQ ID NO: 38637 - DNA, 30 bp, Homo sapiens
  chr2:220362933-220362963
  hyper
cctggcgccgagcccgggggtggtgggacc

SEQ ID NO: 38638 - DNA, 156 bp, Homo sapiens
  chr2:220377744-220377900
  hyper
ggggccaggcctgacgcagggggcggggtggccgttgggcagcgggtggacctcgggctctaatccccagcagctgccgtttccctcagatcgattcctttctcactttttttctcagctgctggttctgcggcttggatcgatggagccacctcc

SEQ ID NO: 38639 - DNA, 294 bp, Homo sapiens; identical to SEQ ID NO: 2232
  chr2:220378981-220379275
  hyper

SEQ ID NO: 38640 - DNA, 31 bp, Homo sapiens; identical to SEQ ID NO: 2233
  chr2:220408153-220408184
  hyper

SEQ ID NO: 38641 - DNA, 31 bp, Homo sapiens; identical to SEQ ID NO: 2234
  chr2:220408748-220408779
  hyper

SEQ ID NO: 38642 - DNA, 1378 bp, Homo sapiens
  chr2:220416390-220417768
  hyper
agctcggccccctcccgcagccagcacacgtggccccccgagcgggacacagtcacctccagcaccgcccggcggcccaccagaacggtcttctcgcgaggggggtggcggcacatctggagaggcaatgctgggggtagggggcgggggcttaagttaatagggacacgcatggcccccaggaggagagatgcatcttccctccctgaagtctccactcctggccttagccctctatgccaccagtccgttcccttgcacctcagacccaaagtctcctcttgccggggaaacgcgctgccctctgtgacccggcccaggagagcccctcggggggaagggaagagagaggcagcgttcttggggccagccccaagtccgtcagtcccatggcaggagagacaggatgtacactctctgtcgctcccaccccaggtgcttaccctccacttccagtagagccagggactgggcgggccccgcctggaagcggacttcaccggcgtcctcggcgcgcagctcgctaagcaccagaatgtgtttcttccctgggggtgagggggtcgctagcgaggccggagccacctctgaggagcgttggggacgaaggtgggggcccagcaggcccctgggtcggttcggacgccgttagtgtatgctagggtgggcggaacagggatgcggagcgggaagcctagaggtccgggactaggggctgggggcgggggaaagaacagggacgaggctcacagggccgtggggcggggcccgtcggagccaggggcggggcttgtcccggtggggcgggatctgttcgagcctgggcggggcagcgaggggcccgaaagggtaaccaggcgggcagaccttcctgtcggatgcggacgcgggctccgggtctcagcgggcggcctccgagctcccagcgccccgtggtctcgacctccgacacggtgcactcgaacgtagcgccgtcgccttcgcgggcgctcaccgaccgcagctcggagagtaccgccacagtacgctctggggcggagcccggggcgtgagcggggcggggcagagggcagttaccggtcacgccccctccacgccccctttctagaagcacgcgcggtcatcagggtccggggaagacagctccgcaagtctcgcgcccaaagcagtgcccagcctccacatcaccccgtacccaccgcgcacggtcaggcggaccggtccggcgcgggccgtccccaccgcgcagctgtaggtcccggcgtccgaggggccgcagcgtcgcagctggagaaggcggcgcgtgccgagggcctggagccggagccgcgggctaggcgtaagcgcgttcccgtcctaggggcgggagttgcagagg

SEQ ID NO: 38643 - DNA, 600 bp, Homo sapiens
  chr2:220435323-220435923
  hyper
cgtggcacacgtagacgccggaatccggcagccgagccgccaggatgcgcagtgccaggctcgcgccggggccgtcctcggcgcggcccggctggagcgcgaagtggctgctgtcccacacttcgtccagggccatcccgtccttctcccagtacagtgtgggctcggggaggccccccgcccggcacgtcagcaccacctccgccccccgcagcacccactgggatcgaggccccgtgaggaagaccggggcgccctccccggaccccggcgatggcagcgggcgctcggcgggctgcagctcggggtcggaggccggcggctccagcacggtgacggcggccgccgcgtaggcctcgccggccgcgttgcgggcgcggcacacgtagacccccgcgtcggtgggcagtgcggcggtcagcagcaggccgtgctccgcgccgtccgccgggaagctcaggcgttccgaggccgccagctgctgcccgcccttctcccacaccactacaggcggcggctcccccaggaccacgcacttgagctcggcctcggcgccacttaccacccgcacaggccgcgggaagcgcaggaagcacgggg

SEQ ID NO: 38644 - DNA, 228 bp, Homo sapiens
  chr2:220436136-220436364
  hyper
ctgcggcggcggcggcggcgattcccgggcccgaagcctggcgctcagggggcagtccttcctgtttgcctctccagcgagtggccccgcagcctcccctgcccgctgcctggcttcctgctcttaggagcctctcttcccagccccctcccacagcttgggcctcttccccctcctccctcccacctccagccgccaggtccccagccgcccgccaggcttgggcct

SEQ ID NO: 38645 - DNA, 30 bp, Homo sapiens
  chr2:220462403-220462433
  hyper
tgggtgcccagctccgggccaggaagccca

SEQ ID NO: 38646 - DNA, 179 bp, Homo sapiens
  chr2:220462666-220462845
  hyper
gttcctcgaaagggcggccaggaggatgctcttcctctcttttctttctcgcctttttctccgcatgacgcctcggtttgcgcggacgccctgggcttttggcactaccgcccacctgaggctcttccgcttcctctttccccccccaggctccgccccccagcgtcccgtggccatga

SEQ ID NO: 38647 - DNA, 43 bp, Homo sapiens; identical to SEQ ID NO: 2239
  chr2:220492469-220492512
  hyper

SEQ ID NO: 38648 - DNA, 30 bp, Homo sapiens
  chr2:220507446-220507476
  hyper
tccagttcctcccgcggagaccaagcccgg

SEQ ID NO: 38649 - DNA, 30 bp, Homo sapiens; identical to SEQ ID NO: 2240
  chr2:220969995-220970025
  hyper

SEQ ID NO: 38650 - DNA, 241 bp, Homo sapiens; identical to SEQ ID NO: 2241
  chr2:222435634-222435875
  hyper

SEQ ID NO: 38651 - DNA, 2254 bp, Homo sapiens; identical to SEQ ID NO: 2242
  chr2:222435994-222438248
  hyper

SEQ ID NO: 38652 - DNA, 102 bp, Homo sapiens
  chr2:222438668-222438770
  hyper
ctcctaacaaaccttccgggggttgcctgagtggctgctctcggaaaagcggatcctaaataaagcgggagggttatagggcgacgtcgaggagaggacagg

SEQ ID NO: 38653 - DNA, 114 bp, Homo sapiens
  chr2:223155826-223155940
  hyper
gcccattgtggcggcgcccgcgggcccgctaggccgagccgggggaggaacagaggcgcccattgagcggccgctgcgcagggcggtgcccacagccccggatgcctcggccag

SEQ ID NO: 38654 - DNA, 679 bp, Homo sapiens
  chr2:223158774-223159453
  hyper
gaagggaccttgatccgagctgggcttggctgccgtcagatcaccaatgtcagctagccgatgccctccaagtcacccagcaagtgcgccgcccaaggcgccaccgcttacctcgctcgctcaggatgccgtcgatgctgtgtttggccttcttctcgctttcctctgcctccttcctctccaagtcggcctcctcctcttcacctttcccgaatttacttctcaggatgcggctgatggaactcactgggggcgggaggaggaaggaagcaagggagcgcacatggttgagacaagcagggctgtgcgggaaggaccccccacccccaaacaccagccagggccctagagccgctgccctgcactgctcgcgggtgtctcctcctgcatctctggacatcctcatccttctccagccctctcatcctgccactcaaacccccctccctattatctgtatctcggtactgaaagacggaggctgggaaaaccgtgcctccaagttagggccggatgccatctttgtccctcgattctgggcaggaagcatttcccttcctggactccgaagaccgggctctaggtctgcaatctaagagaattctcccaccagcccaccgggtaccctccttcctccccacctgaatgcatggatcctgcggttcgccttaagggagga

SEQ ID NO: 38655 - DNA, 74 bp, Homo sapiens
  chr2:223159731-223159805
  hyper
ccctctcgctggccccgtgcttgcccctcttctccctccgcctcccccaggctgccgtggcggggggctccgga

SEQ ID NO: 38656 - DNA, 333 bp, Homo sapiens
  chr2:223159868-223160201
  hyper
cggcaaagtccctcccggcgcgggccccatctcccttcggttggggttaccaaaacatttgtttctctttaaaagggaacatcaatattaataaacgctctgcctccgcctcacgtttcctgccctgcctcctcgacagaaatcttctttggggcgtcctcagcggtggtctcgccaccctccgtccccaggacaagcagctcacccctccctccataaagtgccaagaacaccgggttggcaaatattgcagggcctcgggagaggccacctcccaatagctgagatcgataattggggtgattacgtctgggtcgacgtgccggggtaata

SEQ ID NO: 38657 - DNA, 164 bp, Homo sapiens
  chr2:223160250-223160414
  hyper
cggcacggtgtttcgatcacagaccgcgtccttgagtaatttgtctcggatttcccagctgaacatgcccgggttctctcttttgtattcctcaattttcttctccacgtcaggcgttgtcacctgctttaagagaacaggcgggcaggcgttggtacccggta

SEQ ID NO: 38658 - DNA, 70 bp, Homo sapiens
  chr2:223161614-223161684
  hyper
tcagccgttaccccccgcccggtcttccccaacacaggggaccacagtctgggagccaggagggcaaggc

SEQ ID NO: 38659 - DNA, 270 bp, Homo sapiens
  chr2:223161806-223162076
  hyper
cgcagggccggatgccgtggtgggccatctccacgatcttgtggcggatgtggttgggcagcggcctgccgttgataaaaacaccgccgagctggttgacgcggccctggccgaggggagtggacactgtgggaaggtgaaaaagagaagcaagggaaaagtcactggaggaaaataaaaagcaaagaacagcagcacgtaatttcgcagtcttctgtcctatcctcatgttacagcaccgacgctgaaactgctcgacatcggactccc

SEQ ID NO: 38660 - DNA, 214 bp, Homo sapiens
  chr2:223162676-223162890
  hyper
gaatcttcaagtggacggaaaggcgattcctaaacaagttatagaaacttctagatgctatttgagatacatagaattctaatttatttaattattctaaaaattccaatcacaatggcgcggcgttagccaccacaactttgcagggcaaaaaaaaaaaaatacttcctgaactaacatatgtttcacaagtgtgggcgcagccgggacaatt

SEQ ID NO: 38661 - DNA, 296 bp, Homo sapiens; identical to SEQ ID NO: 2247
  chr2:223162928-223163224
  hyper

SEQ ID NO: 38662 - DNA, 446 bp, Homo sapiens
  chr2:223163472-223163918
  hyper
cggggaggggggctgtcggttcctagtccagaggccggagctggaacccgggaaaggggaggacggggaggccccggagtccaggatcccgagcccagggcggaaaagtttggtacgagtctgggcaaatgttccagcgactggggtccctgaaaagggggctcagagagccacggcgagccggggagcctggtgaggctggagcgcggcctgcctgagtctcctcctgtggtgacaccgagtgcggggatccgggctcgggagcatttattagttcttttacccaaagcttggtcaggagccctgagctgcgattggccgacgggtagaccgtcccgggtggcggagacacgcgctgattgggcaacagcgaccactttctcttcccatctctggtggtgccgaggcctctgctggccccgagggggacccgcgctgcgcccctt

SEQ ID NO: 38663 - DNA, 19 bp, Homo sapiens
  chr2:223165483-223165502
  hyper
taagccacttctcagcgat

SEQ ID NO: 38664 - DNA, 222 bp, Homo sapiens; identical to SEQ ID NO: 2250
  chr2:223166003-223166225
  hyper

SEQ ID NO: 38665 - DNA, 1339 bp, Homo sapiens
  chr2:223166293-223167632
  hyper
cgccgccaaacctaacccggctcagagccgtgactccgcagaacagggcgcaacaggtctcaggaatgccgggtgattccagccactctttctctgtctccgagtcttgggcctcccctttatttctttctgaagtctctccggagcccaagccaccccacacccaaaccccgcagctggatgggagtccaggccacttccctatccgcagccggtgggccaaggagtcctggtgccaaatttggccgcggtacaggcgctaattggtaaagggatgacccagcggtggggcttggaaggcgagggcccgcgccctgcatccttgaaccctggtttgggaggcagtgacttttacctgggctaacaaattacccagaaagcatcagtgggactctccacaacggtgttgtgaacgagtgtagggtccactcacgctctgtgcacgttcgaaatgaaacgggagccttgaagacgatatttggataatttgacaaaaaaaaaaaaaaggtgggcgggggagatagcttctattgtcccctctgcgcctctgcccccagtttcagagacactacaggtgaaaataacagcgggctggctgtccaggcctgagtggagcgtgcccttgttagcttgaaagttctccctcgcagcccgtttggatgcgtgcgtctacagcccagtcgcactttggtgaccggcctgggctgtgaagcaccctttagcgaacagcctccgcacttggggacactggcacaagggtttcatggcccgtggacttctcagggcctctgagggttgacttcatactcagccagacacaggtcttaagaggaaattatgatctatgcaaaataatgtccctgacctagtggggagcgggggtggtgtctgccacccagacctttttcctcccgtctgaagggccgagctctggcaggctgacacggtcgagcagagaagttcctggccacccgcccggccccaggcgtgattctcaggatgcagtaaaagttgggcaaacgccgagaaaccctcaatcccacagaaaggctgccgggggctcacggggaggacatcaaaacgccaggttcgtgatcatgagcttccggtccggatgtgatgatacaggattggtgaatgcccgggttaaacccgtggtccttcgcagccgctgcctcagtgacagtcattaggccccccgcagttatttgtcaaaagcattggcgccgctcttctccccatcgaaaaatcagtcgggatgagttcggattaagggactagatgaggatgtggacatcccattgaaacatggtgtaggccagccgaagtgggtttgctc

SEQ ID NO: 38666 - DNA, 483 bp, Homo sapiens; identical to SEQ ID NO: 2252
  chr2:223168348-223168831
  hyper

SEQ ID NO: 38667 - DNA, 52 bp, Homo sapiens; identical to SEQ ID NO: 2253
  chr2:223168916-223168968
  hyper

SEQ ID NO: 38668 - DNA, 2229 bp, Homo sapiens
  chr2:223169337-223171566
  hyper
cgtacgtttgggagcgagggacaggagaataattttgatccagaaccttggagattggagaagcaggtggaaaaattctaaaaagatgaaaactgaccatctccgacacagaaacccatcgaaaggggccaccgagacccgttgattagctggagggagcatgcggcagaagtgcagacccctcgctaacccgccaacctccaagagccctcttgcagaaagctgcccggctccccacggtggccctgcgcgcgcaccatcctcgcggtctcgcttcttcgccccggaaaactctatgaggggcaccccagcctcagccgggttaagacaagtagccccaagaggaaggagcctcagagagcctttcttcctgttcttcttcgtcttcttttttttctaaacgaaatctaatactatctggctgcaaaaatatattatcaccggctctcagcctaagagactaacatttggatatgtaggaaatgtaatctgcatggctaattgattctcagcgtatcagtttaaaggataaagatcgatatctacatgatggatattgtattaataggggcataaataaaggtcgaagagtcgttaccaaaacctttgaagccgcttttcggctctcgggccctccacgcggccagtgggtctctcccacctccccgcccccagctgctgctgggcagggagcatttgcttccccctccaacccgggaccagggtggaggagtctatggttaaagcgaaagtgtttcactgcggcaacgctggggaaaggaggttcttttttcctgggctgcagcaggtggacagtaaggcccgagaaaatgtaatattttaacaaaacgcaccactccccgaaacacacgtatacgacccacacagggacacaaacaaccacacatgtacacacacacacacacacacacactcacacacacacaatcacgcagggcggggagggttctcagcgttccctgagcgccctttggccttagagacagggaataaattcttctttccatccctcggccccctcccagagggcagcgacgaaagccctggccgagcacaaggatcggtgatctgggctcctggaggtaccctctagatggggtaaggacggggaaggatcaagaggttctgcgggaagtgtgcggggctggggggcgggggtgcccgccaatgtccgcagaaggcaaggaggcccactcgaggagggctggatggagacagacttgagtcgggccctgagccccagggagtgcggcccggtagatctcggggcgaggggaacaggatcgggtacacttgatccggaacaagaacgcctcggcctggcggttgcccgttagtcccggatcccagcggccgcttcaccactgagcccgagccgccgagggaattttccaaatgcaaatcaaacacccttggcgccccgcttcttcattaattaagaggaacgtttcgacaaaaccggcgtaatctttattaattacgcagcccttagcgcgccgttcgcatcaatcacgcccaaagcgaaagtgcagggggcgcctaatcccttcccagagcgcgtttggagaaggagccgcgtggccggcgtttccaccgtgacttccacctttctgggctcgcctggcactggctgctcagccggcgcgcagggaggcctttccggaaacaccggctggctgcgcgctagcaggaccgctctagatcccctgacaggccggaaaataacccccactcactatttgggcacgcgctcgtacgcagaaactcgcacagggactcgcgtggacactttatggcccatttcctccgtcccctcacccttaggctcagtggggaccacgcggttctcagtcctcctcttccctaggaccctctaaaaaggagcctggggcgaaatgacagagggaggcagaaaacctcctgttgccccaggacgccccgaaaaactgctctgggggatggggcggggaagaccttagaagttgtcagggcgaccaactcctcccaggtgaccaggttgccataggaccagcacactgctcaggagtgagttttggggagagagagggatcctccagttattgccatagagaaccaggaaagttcgcagcctccgggtcgcaagtgggaaagttgactggagattgcggttagagggggtgggtgcaaactcagggtatttccgggtagccccgcagcagtcttgtc

SEQ ID NO: 38669 - DNA, 296 bp, Homo sapiens
  chr2:223171782-223172078
  hyper
tggatcaagcttggcgtcggaggtctggccctcagctggttcccaccctaaaggactggcctgcccaccctcacgtcctcgggcgcccttggctcgagggcctttcggagcctccgcgggaagcagaaagtcgcacctcacactgagcctttccttcgagcgctctgccgggagctactgagccccagcacgcagccttgggcacccggtggcgggcgaaggaacctgccccattgtgctgctgggctgcactagcggagacgagagtgcgtgtgggagtggcccactagcaccac

SEQ ID NO: 38670 - DNA, 608 bp, Homo sapiens
  chr2:223175903-223176511
  hyper
tgggattacagatgtgagccactgtgccctgcctaaagtgtttgcttattttaaacaacttttttttttcttcccggggaacatttattagcctatattgccatgagaaaacaacttgagacacttcagcctcaaccctcctcctctaagtcggtcgggacaatggcaggcggaagatgaagatataaagtaagaattctaagcttctcgccttcctgttacagccgatctgctctgcatttggaatgcggcgtctttgcgggcgttctgagtcattcctactccgctgcaagccccgcagagaacctcgccttcttcccgaccgccaagtctgattgtacagacttcatagaaggtctggaataaggactgtgttgctgcagaggccgggtcttgggcccctgggcgtgaggacgcaggctcggcccctgggaagaaatgtactaacgcacctcaagactcctaaggtgtttccaagtcccccctccaactttcgtgtccaggtcacgctgccccgccctcggacaatgagagggtgtgtcaagatgctctttgcatctttggaagccgagggggaaataggagactttcgacggggagcaggtttt

SEQ ID NO: 38671 - DNA, 488 bp, Homo sapiens; identical to SEQ ID NO: 2258
  chr2:223176719-223177207
  hyper

SEQ ID NO: 38672 - DNA, 367 bp, Homo sapiens; identical to SEQ ID NO: 2259
  chr2:223177244-223177611
  hyper

SEQ ID NO: 38673 - DNA, 11 bp, Homo sapiens
  chr2:223177813-223177824
  hyper
gaacgcaaagg

SEQ ID NO: 38674 - DNA, 531 bp, Homo sapiens
  chr2:223183521-223184052
  hyper
cagtttccctctctggcccagcgcgaagggcgaggggcgacagaagcccgagggacagaaaaccgaggctcctcagtggccgagttgggagagagtgtgagtccaggagagcccgggggcagcagggagagggtgcagaagctcgagcgcaccgagccagaggccccctcttctcccgccacgcggggctggaggtgcaggcgccggttccgcggcgtggcccggctatgtgtcgctcctccgcgcgccgcccgccgcagcccgtgccctcgggccgccgccgccgccgctgccccccgtcgagcccgcggccgcaccctcgggccgatacttgagccagcagatgacccaggtgacaacgaccgagaagagtgccaggatgctggccaccgacaggcagatgggccccacgggcgagggcgagggcgacccggtggccggtgcctcgccagggggcgccccgcctccgggggttcccccgccgccgtagtggttgacgaagatgaggccggtgaagagcagcaccaccat

SEQ ID NO: 38675 - DNA, 421 bp, Homo sapiens
  chr2:223185034-223185455
  hyper
ctcggccttctcaacgcagctttcccagcagcttaggatatcggtttttgttggacttgaaattgggagttgagggcggcctggaggcgctcgggaaggagatttggggtgcggctgcttataaagatgttgccttttaccccagcagtcccccgccccctacgcggggtggtggcaggaaaccggttcctgagttttccttctttctcttcctcgacacgacctccccaccagtgtgtttctgtttatcctcctcgcccgggggctgggtccctggcgaagcctcgttttcacccacccacccccaagccagagctcaccagtgatgtaatgcgggacccgcgcggggaggggaaacggcagcctcaaccgcctggcagcggcggtttcttctcttcgtgaaaatcgtgatctcatctct

SEQ ID NO: 38676 - DNA, 1280 bp, Homo sapiens
  chr2:223289013-223290293
  hyper
aagagaggcgcagttcggagatcggcactcctccgtccagttacaggcggtcctgcccccgtggccgcccggggccgcccaagccctccgggacggagagaaagggggacgcgttgcgcaaggtggaggcagacacctgggcgggcgctaggacccgggcggcgcacctgttggctgggcccggggccccgcccgcccggcctccgcccggagtgcgggatcggcgggggcgaggcgggagtggcggtgccagcggagggcaccggcccggcgtggcagcggcggcggagcgcggccccgggcacaccatggccgagctgctgcggagcctgcaggattcccagctcgtcgcccgcttccagcgccgctgcgggctcttccccgctccggatgaaggcccccgggagaacggcgcggaccccacggagcgcgcggcgcgggtccccggggtcgagcatctccccgcagccaacggcaagggcggcgaggctccggccaacgggctgcgcagagccgcggcgccggaggtaaccatgggcaggtgttcgccgggtacggggagggggcggctgcggacgtgcgggtccctgcgactccgccacgcggggccggccgggccgagagggcgccgtccccggcagtgacccggctcccgccgctgcgagcggacggggaggcctggccttccagtaaccaggatgccaccctccaacgctgccaggggcaaccgggtctattgagatatccccagacgctttcaatgcagtccatttagagacttcccactttcaaaagtagttaaattcacgtagatgccagcaaatatgtaagagttacgtaatggaacggaggagcggggatgtccttggcacttccccggggagacgttcttagactcccccccacccccgtattcttgcatttccgcccatcccccttccctgatgcgcacaaatgcgggtgcagccgggctcagcgcgctcctcaccgcgctgcaccgccagctctgggcacagaacttggggctcacacagctcctagagagatttacaacctccctgcactacccccggcgatgatgtcttaacagcaactctcgcttgccctcccccagagtctgggggtccctcctgcctggtgggtcttttatggaccgacaccagtgacttctaacagatgcttctgggagggaagctcgctacgctcccgctaggtgttcaaagcgtggttatacaacccactgcggcttggggggaaccagcgtgcgtcgtcgtcgcagt

SEQ ID NO: 38677 - DNA, 30 bp, Homo sapiens
  chr2:223520643-223520673
  hyper
gaaggcatgaatgtcgccacattgcccttt

SEQ ID NO: 38678 - DNA, 30 bp, Homo sapiens
  chr2:223520943-223520973
  hyper
tcatgccattacctcgctgattaaatgtat

SEQ ID NO: 38679 - DNA, 491 bp, Homo sapiens; identical to SEQ ID NO: 2261
  chr2:223536120-223536611
  hyper

SEQ ID NO: 38680 - DNA, 137 bp, Homo sapiens
  chr2:223725609-223725746
  hyper
ggccgccagcgccgcgctccccggcccgaattcgataggcccagccccgcacgcgccaccgctcgcgggccaatgggtggcagcctctctgcataggcaacgagtgccggccgggggtgagcgtcccaggcggttcc

SEQ ID NO: 38681 - DNA, 65 bp, Homo sapiens; identical to SEQ ID NO: 2263
  chr2:224702684-224702749
  hyper

SEQ ID NO: 38682 - DNA, 95 bp, Homo sapiens
  chr2:224809097-224809192
  hyper
aggtcccaggctagtgcgacaccgcaggtcggggttccctggttggaggagcgcggtgggctgggaggggcgcgttggtgcgcactggaacaggg

SEQ ID NO: 38683 - DNA, 1026 bp, Homo sapiens
  chr2:224903615-224904641
  hyper
ccggccaaggcggcccgcgggaggctgagaaagttctctgctccccgacgtcggcgccccagggtcccgctggccccgcagcttcccggccgggcgcaaggtcagggagcagggccggtggcgcgcggagccccggggagcgtcccccgccgagggcagcgccggccgcgcccgggactcaccgcgcagcctgtactcaccgcgctcgctggatccccagggggcggccgcggagggcggtgcggccgcaaccggagcgggagcctggtctcggcggcgcggggagtcggaggacgcagccaagcggcggcggcgaggagggtcacagccggaaagaggcagcggtggcgcctgcagacgccgcgcagcccgggcagccccacagcgcaagctggctgccgcggcggcgggggctttatcggcggcgccgcgcgggcccccgccccttcctgccgcccccgcccccggcccgccttgccccgccttcccgccgcctcctttgtgtggccgcgggccgcagcgtccccgcgcccggcctccaggacgccccctctccgcctgcgacttctcggatgccgccccgccaggggtccgtgtcgtggggctgcgcccggaacgcgccggggagacgcgcagaccccgaggtgcggcgccagcccgggcccagctgcacgtgggtctcccggatgggggtgtgtgaggtggcggggggaataccagggctcgtaccgcgtccctgagacgcagggcatgtcgtcttggctgccccctggaagagacagagggcgccctgagacagcgctcagtcctccgggtgatggggaaacggtgccaggacgcggccgggaaggggcagataacccctcgaggcgttttgcagggtgtcctagagctgacttctccctgcctaggggacagaggaacggcggcaagtcgccttaggcaaatacagacgaggggaaccagaaaactggattcccggctatggtgatagcatgaggtacccgcagcgtcctgggaacccag

SEQ ID NO: 38684 - DNA, 31 bp, Homo sapiens; identical to SEQ ID NO: 2266
  chr2:225381703-225381734
  hyper

SEQ ID NO: 38685 - DNA, 708 bp, Homo sapiens
  chr2:225906070-225906778
  hyper
ctgttgttcccactcgcttcccgtttccactagagttgatttgtctcttgccacctctccccggcagtgtggacctactgcaacgcaggaacatctgggttggtatggataggatcctagcatcagatgctggctgctgccccagggacttcccgcggaaatcacccagcacttagaagccgtttcaataaggaagtaaccagtaaagcattgctggtgggagaaccccgcgaaacatcttagaaaaatatcagaaaccgctggagacctaatgacccacgtctcctccagcctgtgttcctcagccctttctggaggagtattaagtggtttgtgggtttttaccctgcggtgggagggctgttccaagtacatctatttctgcgatagttaacgtcggggggccccagctctaaccagggcgaggaccacggactgcatccctctctctcagcgcactggtctgtttactggagggtgagagggacgcgcagacctccggactcaggggttctgttctgtagatccccccaccccacccggggtctctggcactcgtatcacttagcaccagtgtgactggcggtgcattccggccccctcgcgccccattaaagcccctgcacatcctctcccacgctgcgcttctgctacccacgcagctgctcctctgagcgtcccgcgtgcacaaacgcgcccccggtcctt

SEQ ID NO: 38686 - DNA, 571 bp, Homo sapiens; identical to SEQ ID NO: 2269
  chr2:225906790-225907361
  hyper

SEQ ID NO: 38687 - DNA, 182 bp, Homo sapiens
  chr2:225907439-225907621
  hyper
cggccggggctgtccacgccgcccgggggaactgcaggctgcgggggagggcggggggcggccgccgaggggctccgggcggggcctgtccaaggccgtcgcctgtccaaggccgtcagcctcatttggaggttgctgggagagttggagccctggatgcatttgccgtttagacttctatt

SEQ ID NO: 38688 - DNA, 31 bp, Homo sapiens; identical to SEQ ID NO: 2271
  chr2:227656659-227656690
  hyper

SEQ ID NO: 38689 - DNA, 30 bp, Homo sapiens; identical to SEQ ID NO: 2272
  chr2:227663896-227663926
  hyper

SEQ ID NO: 38690 - DNA, 30 bp, Homo sapiens
  chr2:227700519-227700549
  hyper
cttagaggacagggcgagggtccacactct

SEQ ID NO: 38691 - DNA, 651 bp, Homo sapiens
  chr2:228028699-228029350
  hyper
tgccccacctatgggcgccttacctgtggggacgcccgcagcgccaggagctgccgccttgccaccccacgggacgcgcacctccagccccaatccacccgcgccccgctgcctcttcgcggcgctctcgcagccaagcccggcggccgcaagttggaggcgggctggaggcggggaacgcggaccgccgcgggcgcggggaacaagcggggcctcccgagtgcagacgcccggcgcgcctcccgcttaatctgggcagggccgctggccactccctccaccctgcgcagccacctccccaccgcgcagccacctccccaccgcacacccccaaacgccccacctccgaccgcaccccacttccccgcctgggcccccggaccttgggagcatcacctccttaaccccttaccctggatccgcgcccacctgcccctcaggcgcccagccctttctcgcctcctgggcacgatgcccgggtagaagggacactgcctggtaagttgggagggagggggtatgagggcgggacctgagccacgtcttccctcccttgaagccacaaccaaaaagcctgggtggggagggacgaaccgcgcgaccgagccctacaaaacccgccccggccgagtggcgaggcgagctttccag

SEQ ID NO: 38692 - DNA, 372 bp, Homo sapiens
  chr2:228029372-228029744
  hyper
cgcaggagacgcggtggcctgagagcctgagggtccccggactcgcccaggctctgagcgcgcgcccaccatgagcgcccggaccgcccccaggccgcaggtgctcctgctgccgctcctgctggtgctcctggcggcggcgcccgcagccagcaaggtgagtgggggctgcgcgacccccacccccgcacttccatccctcctccacgcgtccgggggacgcgctggccccacccgcagcggcgcggtagtggagcggctgccgggctagtggcgaggctgagggcttcacgcaggtcccgggacaggcagcgagcggaagggagcaagcggggatgccccggaacaggtggaatgcgcggggctggggga

SEQ ID NO: 38693 - DNA, 30 bp, Homo sapiens; identical to SEQ ID NO: 2273
  chr2:228337227-228337257
  hyper

SEQ ID NO: 38694 - DNA, 16 bp, Homo sapiens
  chr2:228582819-228582835
  hyper
cgtccagacctttcat

SEQ ID NO: 38695 - DNA, 80 bp, Homo sapiens; identical to SEQ ID NO: 2275
  chr2:228736215-228736295
  hyper

SEQ ID NO: 38696 - DNA, 139 bp, Homo sapiens; identical to SEQ ID NO: 2276
  chr2:228736335-228736474
  hyper

SEQ ID NO: 38697 - DNA, 30 bp, Homo sapiens; identical to SEQ ID NO: 2277
  chr2:229045943-229045973
  hyper

SEQ ID NO: 38698 - DNA, 120 bp, Homo sapiens
  chr2:230135774-230135894
  hyper
tttggcagaggagacgctggcgagactgtcgatcgcgccggggggcgaggggctggggtcccgctttacatctggggtcggtgtccgcgggatgtgcgtcctggcgctggccaccgccgc

SEQ ID NO: 38699 - DNA, 34 bp, Homo sapiens
  chr2:230136131-230136165
  hyper
gcgggagtgcagcgcggccgactctaaatcctag

SEQ ID NO: 38700 - DNA, 860 bp, Homo sapiens
  chr2:230578041-230578901
  hyper
ctcctgaaaaccccaaattcacgggcggctgctggctacatcccatcgtcccatccctcgcaccgcccccacgctttctggcggcttcccggtgccctgctcacgccccggctgccagccccaagcgtgcgccccgtggagcgtccggcaggaagggcggccctgccagcgccacgtacaatgccccctcgaatgcctccgactgttccaacactgctcctaagcttagagagggctggtcgcaggccgaggggaggcagctgccctcctcgtcctctggctgctttgtcacagccctcaagggcgtaggaagagaaggagaaagtgccccaccacctggcacggggcccaccatcacctgcctcccacaccgcacaccctttacacacacagggtccagccggacgtggagcgtggaccacctggacattgaacacctcgccggggacgctcggagccggctcctccgcgctgccaaggcgggcaccgctcaagtggttcttggctcggcccggcctggaggggcgcgccactcagtggccaaccggagcgtctagagccccgcgcgagaagtgccgagccccggagcggcacaccccgagagcccggctggccccgcccgggaaccagggcgggtaagggaatcagggtcggcccgggggtccgcgtccacgcgggccaagagactggatccatcttcttcccaaagtgggaaagcctgtgtcaggcgtgcccattgtcgggcagcagcagcagggccggcgggaagaggctgctggtcccggaccagcgccccgcaccgcgcccgccgcttccactcacctggcagttggcgccggagatcccggcggggcaggtgc

SEQ ID NO: 38701 - DNA, 30 bp, Homo sapiens; identical to SEQ ID NO: 2278
  chr2:230785682-230785712
  hyper

SEQ ID NO: 38702 - DNA, 31 bp, Homo sapiens; identical to SEQ ID NO: 2279
  chr2:230786011-230786042
  hyper

SEQ ID NO: 38703 - DNA, 30 bp, Homo sapiens
  chr2:230786753-230786783
  hyper
gccgcctccctccccgcctgctctgacacc

SEQ ID NO: 38704 - DNA, 575 bp, Homo sapiens
  chr2:230932489-230933064
  hyper
tagccccgaaatggccgtccccggtctctcaccccatttcagcctctcttgaggagcctcaatcggaagcgctaagggggcccagcctctgcgcgccctgggtgcgggatcgtgcccgcggggtccggcctcgcgccccacccttcgagcgcccgcccccacccgcgctcggtgctcccgctcccttggcaccccgagaccacatccccacttcgggcaccccgcatccctcggcgcgttcggaagccagcagcccaccggggaagctgggccggctgcagcaccacagcctgtgcagagaggcatccgcaccccgcgaagtccctaggcgcagccccgggtcccccgctctgcgcctcatcactgtccagttcgagtcccaaacgggcctagagagcagccgggcagcgaggctgggctccgggcagaacgcgcttctccagccggacgggggtgcccaggatgacgctcgcggggccccggccagcttgagcagcaaggcgcgcgtccccaagctccgcctggcggtctgccctgaaccgccggttaccctgcccgcccgcagctcccaagcc

SEQ ID NO: 38705 - DNA, 31 bp, Homo sapiens; identical to SEQ ID NO: 2281
  chr2:230933366-230933397
  hyper

SEQ ID NO: 38706 - DNA, 30 bp, Homo sapiens
  chr2:231084926-231084956
  hyper
gggtacagccccagcggcaataggaactgg

SEQ ID NO: 38707 - DNA, 70 bp, Homo sapiens; identical to SEQ ID NO: 2282
  chr2:231191861-231191931
  hyper

SEQ ID NO: 38708 - DNA, 237 bp, Homo sapiens; identical to SEQ ID NO: 2283
  chr2:231692870-231693107
  hyper

SEQ ID NO: 38709 - DNA, 30 bp, Homo sapiens
  chr2:231729770-231729800
  hyper
gctggcatcaagggcgacaaggctgacaag

SEQ ID NO: 38710 - DNA, 459 bp, Homo sapiens
  chr2:231902080-231902539
  hyper
ccctcttcctcccacccgggcccgcgatgcgggctgcgcccaggggcgcgtgcacacagaggccccgcccgggggcccgggggtccggctgggctcggccctcgggggcgtgtcctctgtgccggggcgccaccgccccgagaggcgggcagcgggtgcgcccgggccgcggcggccgcagagggcgggcggcggccagcatggagcgcgagctggaggcgctggcggcccggcttgcgcgccctgccgagccgcccttccaggcgttggtggaagcggcggggggccgcgggcaggtgctgctggtgggcgagctgtgggagcgcgaacagagccgcgcgctgctgcgggacttcgcacgggcggtgttcccgccggagccaggcgcggccaagccgggcggcgcggcggcagagggcgcggggcccggggcggcgcgcggggcgcagagggcggcga

SEQ ID NO: 38711 - DNA, 242 bp, Homo sapiens
  chr2:231902829-231903071
  hyper
tactgccccggcctcccggcctcctgcctggccgtccaggcggccgcctgcagggccctgcaagccgccggagccgggcaaccaggtgagactgcgcggggcccggctgggcgcgggcgggcggtggctcgggcacgtcccccaagttggacccctttggccattcccttattgagcaccgaggtaaactgaggctcagagcagggaggtgcctagagccaggcctcgcagctagcggagag

SEQ ID NO: 38712 - DNA, 154 bp, Homo sapiens
  chr2:231921280-231921434
  hyper
taggtggcactgcgcgcaatgctcgcacctcccctcaacaccctttctctcagcaatggcgggtgatggtgggggtcctctctttgcagggctggccattctaatgcctgacctcaggtgcagaccagtgttccgttgcgcgggactcctgacc

SEQ ID NO: 38713 - DNA, 30 bp, Homo sapiens
  chr2:232260290-232260320
  hyper
tggtccccgccaggcggcggcggggcgggc

SEQ ID NO: 38714 - DNA, 172 bp, Homo sapiens
  chr2:232260769-232260941
  hyper
gctccccggccccgcggccctggacaccgctccaggaccctggcggctgggaccccaggtcttgccggcagctgggtcccctctcccttccagacccctgagggccccctgcgtccgggccactctcctcctctcggggcttccttccgcgggacctcggaccgccgcccgc

SEQ ID NO: 38715 - DNA, 38 bp, Homo sapiens
  chr2:232260984-232261022
  hyper
cggacccggcaggtggagcgcccgcagcccagggcctc

SEQ ID NO: 38716 - DNA, 30 bp, Homo sapiens
  chr2:232276999-232277029
  hyper
atcccgggggcctgcggaggaggtgggcat

SEQ ID NO: 38717 - DNA, 30 bp, Homo sapiens
  chr2:232378833-232378863
  hyper
gtgaactgggtcagcgtccatcactacccc

SEQ ID NO: 38718 - DNA, 122 bp, Homo sapiens
  chr2:232478345-232478467
  hyper
ctatagaaaaaacccgtcgtgctgcctccccggctccagccaggtttacagcaccaggatctgggccggcagcgtccttcaccggagggaaattctaaccctggggcgggacctgggcacgt

SEQ ID NO: 38719 - DNA, 30 bp, Homo sapiens
  chr2:232479180-232479210
  hyper
gcgagccgcctccccgcccccagcctcccc

SEQ ID NO: 38720 - DNA, 30 bp, Homo sapiens; identical to SEQ ID NO: 2288
  chr2:232479660-232479690
  hyper

SEQ ID NO: 38721 - DNA, 531 bp, Homo sapiens
  chr2:232526741-232527272
  hyper
gggaattttcacccccgccagaggaagagggcccagctgcgccattagcgcgtgcgagggaaaatggaggctcctggtcccacccgcgcaccggcgcctgcgccctgggcgcccaccccggcccgcgaggcggccacggccggagagagagggcaagggaaccagtgccgtgtcgcgccccaccctgcgcccgagcgcagtgccggcgagcccggctccggcccttgagagtccgctccaggccgctccacaccacgagccgctccgcaagtttgcagcgctccgtgctttccctccagccctttgtgttctagcgcgcgtcggaaggaacgcgggaacgcgcgccgtgctgtgcgcctgcgcaagggttcaggcggtgcgccaagcctggagtcaagagtgggcgaggctctcggccgctccgccccgggccgccttcgctccgcccctcgcccgccatttcgtgctccgccgcgtctcccgcgtctggggcgcggcttccgcgtgatggacgcccggaagccggcacaa

SEQ ID NO: 38722 - DNA, 39 bp, Homo sapiens; identical to SEQ ID NO: 2289
  chr2:232539452-232539491
  hyper

SEQ ID NO: 38723 - DNA, 350 bp, Homo sapiens
  chr2:232545778-232546128
  hyper
ggcgcgggctggtcccgggccgccgctgggggctcgggtttcggccgagaggggcggggcgagcgcctgggggccccggggaggctgcggcccaatcactgcccggcccggacgctgcccccgaccccggcctccaatcactgcctggccggaccgcccccgctccgctgcgtcctttgttcccgctcccctctgccttcccgggcgccccgctccggccctgcggcttccggcccgcgcggaccctgccgtgtggacgcgtgtgggctgcgcccgccccgggcgcactccgggccccaacgccaggcacaggcccgcttgtggctgggcacgctcgtgtgcccttggcg

SEQ ID NO: 38724 - DNA, 49 bp, Homo sapiens
  chr2:232571123-232571172
  hyper
tcctctgtgaagggcggccccaggtctgcgcggcggtgaagacagactg

SEQ ID NO: 38725 - DNA, 310 bp, Homo sapiens
  chr2:232572331-232572641
  hyper
ctgaggctgtcgcgacggcagtgaccgctcgggacagaccctaactagaaacctagaatgaggggaccgctatgccgtgcggggcccgcgggctgtcccactcgagggctggagccggcatcgcgcatcgagtccgcttgatacatgaatccgtgtgtgcttgggacggtgcccgcttgtcgactgacttggccgacggacgccggacctgatggtgggcaatcgaggtcgcctgcccacaggactaggggtgccctgccctgggagggcgcgagggcatggcagagggacggggcggcccaggtgcccg

SEQ ID NO: 38726 - DNA, 173 bp, Homo sapiens
  chr2:232573065-232573238
  hyper
cgcagcgcgggacgcgccggggcactgccgctttaagcacgcttgtccattgttcggaatcgagccaatgagcgagcgcccgctccctgcgctcagccaatagcggccgggcatgggaagccgagcgccgcccactaatctatattaaagcttctggcgccgcgtgagtcccc

SEQ ID NO: 38727 - DNA, 30 bp, Homo sapiens
  chr2:232573997-232574027
  hyper
taaggcggatggggcgacgggctggctggc

SEQ ID NO: 38728 - DNA, 30 bp, Homo sapiens
  chr2:232645299-232645329
  hyper
gtcccacacaaggtcgcccgctccaagtca

SEQ ID NO: 38729 - DNA, 30 bp, Homo sapiens; identical to SEQ ID NO: 2290
  chr2:232646275-232646305
  hyper

SEQ ID NO: 38730 - DNA, 30 bp, Homo sapiens
  chr2:232651382-232651412
  hyper
ggctcctcactccacgcctgcggccctgct

SEQ ID NO: 38731 - DNA, 1251 bp, Homo sapiens
  chr2:232790785-232792036
  hyper
ctcctgggtcctgcgcgccgcattctccaagcccccagcctcccacgcctctcccaggctcggcgtccccacgacagcacccaccttcggcggcgccccgggcttggcttcggagggccggagggagagcagcgtgagcagcagggcgcaggccagcagctgggagagatgcatggtgccgctggggtcgaggggcgcacacgggcggcagcgagggcgcgcaggtcggcgggcagaccagcagggggatgcggagcaggctggctgggctgcagggcgagcagggtcccagtgctgcgcggcgccggctgggtgcgctctgagcccgtgactctgctcgcgcctttataatccaacctgccgctgatgtcatcctcccgcccaccgggccgcccgggccaatgacaccacgcacgcggccgcgccgagggccgggagggggccgcgggggctcccctcccttatcccaccccggagggatcccgcggctcggcgggctcgctccaggctgcacttggagctgcagagctgagcgcacaggggaactccatttgcagcgagcgcgcgccctggcctgccgagcatcggtgcgcctggtgccctgtgcacccactaggtcctcatcgcactcactctacctggaagggatacgtagccctctttgcaggtgcaaagacaggctcagaggaatgaagtcacttgcccaaagtcatacaggcataaagttggcgctgcccgaaatccacgcagccctgcttgtcgccaaactcttccctgggcacctgacagccgcgggatggcattgcagctccgcctttcacctgccggtcagggcgggagcgcagaccacagcgacgtcgttaggttggggaggcagaggatggggttggaggactggggtgggaggcgcagggagagcggggttcgcctgggccgcaggggggagcgcaagtcttccacactggagagtgcaggggtgtcgccagcctgagtgtttgagcgcaaggcgggaacgaggggactgcgagcgcggaaccaagatattcatgctcatgcgtgtgctccgcggcatcgtatgctcgccagttactgctctaggttcacgttcagccggtttcggccacacagaacgtcccggggtctgactccgctggtgaactccctctgtgggaacaatgcgcacctgaccttgcctgcacccacgcgaggatccgctgctgggggaagcccgctccagtatcctgtgcactt

SEQ ID NO: 38732 - DNA, 30 bp, Homo sapiens
  chr2:232794155-232794185
  hyper
gagggcaggggaggccgatgagactgcaga

SEQ ID NO: 38733 - DNA, 30 bp, Homo sapiens; identical to SEQ ID NO: 2292
  chr2:232826185-232826215
  hyper

SEQ ID NO: 38734 - DNA, 79 bp, Homo sapiens
  chr2:233251507-233251586
  hyper
cagttgaggtcccatcgcgcagcaaccccccggcgctccgccgcgccgcgcaggtcccagcccccgcagtcctcgatga

SEQ ID NO: 38735 - DNA, 644 bp, Homo sapiens
  chr2:233283249-233283893
  hyper
ccaatgcccagagagcgaccagacatccatgggtagagacccagaagcacgcagaccccagcccctctttccacccagacgagatgaccaaagccccatccctgactgtctcagcttacccctgaaagcctgcactttccctacctgtcgggggcacttgcgcagtgccgcactgacccttggggttcctggctttggcgccagccccagccctcacggagatgtcagcccagcccgccggcgcgtccctccctccctgccctcactgccttccagagggctgggaaattgcggctcccgcggctcggctgaacacttcagttaacccagggaaattacttgcgccttcctcccgcgctctgccgccaagcgctcccctcccctgctttccctttctctcctcttgcgcaccctcctcccacgcgcagggacccctagtcagggccacgccccgggtctgcggccgctggctgggcgctcgggaatcgcactcaggcggatgacgtagcgcgaggagttcctgtaatctaggctgatctagagagagaagagcgcggcggcactgtacacgccctgcaccttgtacagcagctggttgaggtcccagctggttgaggtcccgcgacccccggacgctccgccgc

SEQ ID NO: 38736 - DNA, 46 bp, Homo sapiens
  chr2:233284113-233284159
  hyper
ttgggggtggcatggcgcttcagtcagcagccgcagacgaaaaagt

SEQ ID NO: 38737 - DNA, 83 bp, Homo sapiens
  chr2:233284386-233284469
  hyper
cccaggtcctggtggcgctgctccttgagagaagcctgggcggcagaaaggcccttgcacgatccccgcgccacagcagctta

SEQ ID NO: 38738 - DNA, 618 bp, Homo sapiens
  chr2:233284686-233285304
  hyper
caccgcgaggagagacgcaggcctgggtgcagaggccccagctgccggcctcattcactgcggaaaccagggacgaggagagtctggcggggccaccatccccgcgtgcacagtggagtcttctcccctgtcctcctccctgcacacacgtgtcggatgctggattgggaggcctcttatgggaagggggaggcgctgggcacggggcctggcacgtagggggccttcattgcatctctcttcccttcgcctttcttgtccacgacctgtcctagccaaggccaagtggggtgggggaaggagcagaggctggagtgaggaggtgcggtcaggggcgcgtctatgcggcactttcagctctccgagctggacacagacagacgcttcgcaaaacggccaaagaaccaaactttgtcctcgtggaagtctgcgggatctaccacttcaaacccgctcgctggctccttctgctcggtggcccgacggcccacccgccccttcccaaggggaacgcactattgctccagggtcgcggatacacaacccaccccctgcacggcagtgatggggaacccgagacctgtccgtctctatcccctttccgctccactcctggct

SEQ ID NO: 38739 - DNA, 199 bp, Homo sapiens
  chr2:233286044-233286243
  hyper
taaggattgagagggcgctgacggagtgcctgggctgcccgcacagcgcctgcgcagagctcaccttcaccagggagcttcctttacctcctcggaacccctgtccgggatcagctctccccggggtgtctgggcttctggttgtctcgcccccttcccccagcctctgatccacggagagcaacgcagagccctgcca

SEQ ID NO: 38740 - DNA, 205 bp, Homo sapiens; identical to SEQ ID NO: 2295
  chr2:233350334-233350539
  hyper

SEQ ID NO: 38741 - DNA, 435 bp, Homo sapiens; identical to SEQ ID NO: 2296
  chr2:233350843-233351278
  hyper

SEQ ID NO: 38742 - DNA, 27 bp, Homo sapiens
  chr2:233351415-233351442
  hyper
cgtggccgccggcctcctcgtgggcct

SEQ ID NO: 38743 - DNA, 178 bp, Homo sapiens; identical to SEQ ID NO: 2298
  chr2:233351467-233351645
  hyper

SEQ ID NO: 38744 - DNA, 30 bp, Homo sapiens
  chr2:233351942-233351972
  hyper
cctcgcggaagtccgcgggatcgaccacgc

SEQ ID NO: 38745 - DNA, 277 bp, Homo sapiens; identical to SEQ ID NO: 2299
  chr2:233352174-233352451
  hyper

SEQ ID NO: 38746 - DNA, 256 bp, Homo sapiens
  chr2:233352506-233352762
  hyper
cgggcgtccggtgtctcccagcgcccgccgcctcctctgccgccgcgccgagcccgccgcgccgcccgcctgccggcccgagggagggggcgcgccggcggctccaccctcctccgcccgccccgcgcgcccctccttcctcctgcatctctcgggccacctggcagtggggcggcagcgcggacgtgggtcggcggccgcggagacaggctcccgggggtcgtgcgcgggctgcggtcggggactccgggtccag

SEQ ID NO: 38747 - DNA, 597 bp, Homo sapiens
  chr2:233367695-233368292
  hyper
gagggaggtttatccgtaggagtcagcccagttgggtcaaactaaggacccagtgcagaccccgaggcccagagacacaggtgtgcgcacaaacacgcactctgcggaaggccggggcgggcctggccgctgcgggactcctggcccggcgcccttgacgtcagcggctgggccgtgacgtcacctcaccgcccccgccgcgctcccgcccccgcccgcgggcactcagtctccgctaatggcaggcgacggggaatggcacatctgtcttgccgggaattagttcattgaatcaggcggcccgagctgcggcagcgaccttagccctggccccagggaggggtctgggcgggcggcgtgggggaggttcaggctggagggctgagtgcggggacgggaggaggggactcacctggactcgcgagggggactgagcgctctccaaatataggtcaatgtcccgctcagcctccctcccccagcaccgtgaggaccgaggcctggggcctggcgcccgcctggtggacctcgggggcaggctggggaccgggcccctgcgggacgcggcgcggcaggacgctccccgcgcctttcttt

SEQ ID NO: 38748 - DNA, 30 bp, Homo sapiens
  chr2:233386293-233386323
  hyper
cgagtggaaaggacacgctaggcttggggc

SEQ ID NO: 38749 - DNA, 212 bp, Homo sapiens
  chr2:233388946-233389158
  hyper
gcccggccccacccgcgcggcacagccactttctccgccgaggcggtaccctaaccctgtgcctccccaggatcgcgggctgcaggcactcggttcccgaagcggaggccggagccgcgcggagaagccaacggtaatgacgccccctgccgaccttcaggaggggataggctgagggcctggacgaggtcggaagcgcttctactgcagct

SEQ ID NO: 38750 - DNA, 30 bp, Homo sapiens; identical to SEQ ID NO: 2302
  chr2:233414991-233415021
  hyper

SEQ ID NO: 38751 - DNA, 406 bp, Homo sapiens
  chr2:233497773-233498179
  hyper
tagcatgttttggaaacatttcgttccaatgagtgtttgaaaagcagctcccccgccccacgctccgggcgggcgcctcccactccctgaccccggggagggtgggcaccactcccagacgcgggggacgcgtgggtgtcgctcgggggcgctcgcctcccccacccagcctgtcccgggccgcgagcgcttccagtcgggttacttctgggggacaagaaaggcaccgtctgaacggtcgagacgctttttcccgctacggttttccccggagctgacaggggcagcaaggtcggagttgatccgagggtccctgcctggtcccggggggacggtcagcctcccgcccggagccgcggggagaggaagcaggtcggggtctccgggacgcgcagacacccagaca

SEQ ID NO: 38752 - DNA, 181 bp, Homo sapiens; identical to SEQ ID NO: 2304
  chr2:233498345-233498526
  hyper

SEQ ID NO: 38753 - DNA, 302 bp, Homo sapiens; identical to SEQ ID NO: 2305
  chr2:233498571-233498873
  hyper

SEQ ID NO: 38754 - DNA, 449 bp, Homo sapiens
  chr2:233498895-233499344
  hyper
cgaagaggggggacaccaggagcaggagctctccgggacggagcccaaaagttctcggcggctgccgggcccgagttccaggtcccccaaccccgaccactggtcccgccccctccgcccgccagtccggagatttgctccgaaagcaacttctaggaaagggagccgtcgccgcgcctcacctgccagctttcactgtatccccccaagggaaaaattagcccctgttggccttttatcttttaaaacaaaaggggaaagttaatccttggctgcagcgcggggtctgatgaatgagcggaggccgagaacggggagtttggtaaagtcgttgtaagagattcaggactttcctggagcaggcgcggcccgggagcctcctgggggcgcggggagggggggcggttgtgggaaccgaacttggccgctggcaccggtccggcgggggc

SEQ ID NO: 38755 - DNA, 30 bp, Homo sapiens
  chr2:233520329-233520359
  hyper
ctagttccagttggccgttttgccagaagg

SEQ ID NO: 38756 - DNA, 1234 bp, Homo sapiens
  chr2:233740541-233741775
  hyper
agacccctcacacagcgctaccggcaacttgcttaacctagaggtggggggtgacgtccctgtcggccccgtcacctggggccccagcacctctccttggctttgcagacgatgttccacaggagcccgtgcccacgctgtggaacgagccggccgagctgccgtcgggagaaggccccgtggagagcaccagccccggccgggagcccgtggacaccggtcccccagcccccaccgtcgcgccaggacccgaggacagcaccgcgcaggagcggctggaccagggcggcggtacgggcggggcgggggagggaggggagagggagaaattaggaggggcggggggcggggggcgcggggagaagggccggccaggcgggggctagcaggtgacatggtcctccgtcctccgcagggtcgctggggcccggcgctatcgcggccatcgtgatcgccgccctgctggccacctgcgtggtgctggcgctcgtggtcgtcgcgctgagaaagttttctgcctcctgaagcgaataaaggggccgcgcccggccgcggcgcgactcggctgcactcctcacgcgcctgtatgtccgcgcgtgcgtgtccgcgcatgcaggtgtgccagagcgtgagcgcgcgcaggcgagcgctcagggcgggggtgcgcgcggggccgagggtgggtgccgtgcacgcgcgcgggtccggaggcgcgcccgaattccccgcaggggcgccggggcgtgcgtgagcgcacagcatgtccgagcccgcctgcgtgtggcgtgcacctgagcgcgcgcagggccgcgcggctcggcgtccccgtgcaccacggctggagtgcctcaggagcgcgccgcatgtgcgtgcccggtgcgcgtgcgccggggccgccagggcatcggagcgggtgtgcggccagcggtcttagcccgtccgggggcaccgtcacggtcagggccacgccacgggcggccccttctcccggcgccgcctcctctgcctgggcgcgggccgaggccctcgccgcgctccccggggcctgcctcccatcccgctccgctggggttcagagcgttccgtgaggaggtaagcgctagggcaggagaggccgacagagaccccggggcccgccgctccttgaggccggggttggggagggcaggggccgtcggctctcccagccagaggccgcgtggttttgggggacgtcttgactctgagtcctgca

SEQ ID NO: 38757 - DNA, 30 bp, Homo sapiens
  chr2:233790029-233790059
  hyper
caggtgagaagagggcgggggcagccctgg

SEQ ID NO: 38758 - DNA, 154 bp, Homo sapiens
  chr2:234159998-234160152
  hyper
ttgttcctaaactgcgattaaaaataaaagtggggggagacaggccaagaaaaaaaacacgaaaagggttgaaaagcagcaaaagaaaagtaagcagtcaggcggaaacggcccctttcctgcctccttcccgcccggcgctgggccttgcgca

SEQ ID NO: 38759 - DNA, 30 bp, Homo sapiens
  chr2:234160712-234160742
  hyper
acccgcgcttgggacgccgcacgcctttta

SEQ ID NO: 38760 - DNA, 331 bp, Homo sapiens
  chr2:234474914-234475245
  hyper
gacttccccaaggtttcacatcgagtgtggcggagggtcacttggagatgagaaacgtaaagcgcctagcataggtaccaaatgacaggaagcgctgaaatgcaattatttttcttttcctcagaagaaaactaaaaaaacacaactcgagagtctagcctcgagctcgttgtctgcattcctgaattcccaactcctacggccggccgaggccctccaagccaccacaggcccaggggcgcaaaaaggcagaggtccccgtggcccgaaaccactgccccgactccaggagagcgccgcgtcctcaggcaggcctgggcagcctctcgcc

SEQ ID NO: 38761 - DNA, 102 bp, Homo sapiens; identical to SEQ ID NO: 2309
  chr2:234475309-234475411
  hyper

SEQ ID NO: 38762 - DNA, 83 bp, Homo sapiens
  chr2:234475473-234475556
  hyper
cgccggcccctcgcacggggccttatgggaaatgtaactcttctgctccaagagtttgggaactggagcgggagcgggagcgg

SEQ ID NO: 38763 - DNA, 30 bp, Homo sapiens; identical to SEQ ID NO: 2311
  chr2:234652586-234652616
  hyper

SEQ ID NO: 38764 - DNA, 58 bp, Homo sapiens; identical to SEQ ID NO: 2312
  chr2:234699502-234699560
  hyper

SEQ ID NO: 38765 - DNA, 30 bp, Homo sapiens
  chr2:234763371-234763401
  hyper
gtctccggccgccacggccggtggtagttg

SEQ ID NO: 38766 - DNA, 30 bp, Homo sapiens
  chr2:234991351-234991381
  hyper
gacttgttgccaacacgtacaccagatttt

SEQ ID NO: 38767 - DNA, 188 bp, Homo sapiens
  chr2:235404344-235404532
  hyper
ttccactccccaccgcggccccccgacctggtcagtagctctggcgttcagacaaaaggtcccctgagctgggggtggggggcaggtcgagagtaggccggtaaatcagacttcgcagctccttaagtcaccagtcctgcatttgggtgcagagattccgttttaaaaattcgaagcatcgctttggt

SEQ ID NO: 38768 - DNA, 11 bp, Homo sapiens
  chr2:235404550-235404561
  hyper
cgcgggttctc

SEQ ID NO: 38769 - DNA, 172 bp, Homo sapiens
  chr2:235404620-235404792
  hyper
actcgctcgctccccggtcgctccgggcgcattaccgcttcttcttctgcttgagggacttcctgcgtttcaggatcatctcatagagcttgtccatgccctcggtgaggccctcgccgatgatggcgcacgccggctggacgtgataggtggtggccgggataagctcgtg

SEQ ID NO: 38770 - DNA, 1364 bp, Homo sapiens
  chr2:235859954-235861318
  hyper
gccaggcctgttttacgcgccgggggcccagaggcgcccaggtcagacaaagtgtaaacgattccgaccagagcccttcaatctgcattccgcttcgcaggaaactctcctccttttatgattttcagccggactgccttccctgttgttagtttgtaactttcgctccggcccccgcagcctcgcgcctgccttccctccactgtcctcagccaaggtgtagtaaagcgtctccgaacgcggcgcgaccctcgcccacgcccgctcgcggggggaccgcaccgccccaggggtcctcgctaggggttcccggagaaggggtgggagatgggggtgcgggggggcacaggagcgcgggccagcacccagacctgctcggtaccggggacccagacccgaggatgccgggcggccaaggccccgctaccctggccggctccgggcggaggaagaagaggaggcgcccagactggatacccgcctggacccggagccgcggcaccacccccagcccgccccacgctcgccagcctcagacggccgcgccccgccccgcccctctcccgaagccccgccccggcgcgggaccaccccctccgcggcctcagctccggtcctggccccgccccccgcgcccccgcccccgcccccgcccccgcccccgcccaggcgcgggaccaccctccgcccgccgaggcgggggcccagcgcgcccggcactctcggcggtccgggcccctcgccactaccgccgccgccgccgccgtgagtcccgcggagccgcgcgcgcccccggctgggccgagccgctggccgacgagcggagcctcaggagccggcggggacgccatgcgagccaggtaggcaggcggcggcggggagcgcctcgggcggcagggccctgggggccggcgggggcgcggggtcgtgctcgggggctttgcactcccttgcgggcgcagatcgtgccgcgggcgccgatcgtgccaccgccgcctgagttcggggctgcgcgggtgcctgggcgtggggcggcttcggggaagcctcgcgcgcccctcgccgctcccccgggcgctcgggtctccctggtgctggtgggcagggacccggcccggggttccgggcgccgagccgcagccctccgcgtgcgctcgggccgccccccaaccccggctctggccacttcccggcgggcggccctgcggggtggcctccctgggcaaccggacgcgtcctcgggcgcaaatcggggggcgcgctcggctcacgggggccgtgggggccacgggagggcgtggaggggtcggggcgcccccctcgagcggcgctggggaggagggaaggacgcgcggtctccggtt

SEQ ID NO: 38771 - DNA, 31 bp, Homo sapiens; identical to SEQ ID NO: 2315
  chr2:235996528-235996559
  hyper

SEQ ID NO: 38772 - DNA, 1940 bp, Homo sapiens; identical to SEQ ID NO: 2316
  chr2:236402217-236404157
  hyper

SEQ ID NO: 38773 - DNA, 1025 bp, Homo sapiens
  chr2:236577969-236578994
  hyper
gcctcatttaaacgcgcagcaggtgagacatgcccctcgttttgttcttgcaggccaagccccagagtgggcgtggttttagggtgcaggctggtgctgggctgggcccctcggaggctccggtccgcgctgcgtcgatccatcccggcgcttgggcctgcacgccgccgcgctcgccgccgccgccgccgccgcgctcccgggactcggccagcccggctgggcgcgcggcccgcggtcccttgcacgtcggcccccgtcgcccgccccgccccggcgcgcgtttccattttaaaccgccgcccgccgcccgccacccgccacccttcggccgcagccggtgcagctgtccgcgcgtcccggagcccagggagtggcggaggctgcggaaccgccgagctgtgcagccggagcgggaggatgcgcacgggccccgcgtcgtagacaatgaagccgcgggcgccgccgcctgccctgggccctgcgcaccgcggccgcacctgccggcgagagcgctctagcgcctgaccggccgcctcgcttggccccgccggcccatggctcggcgccccgggcccggaccccggcactcgggcggcgcggcgcacgggccggcgggtgccaggggcgccgtccccgcagcctgagtgcggccctcgcggtcagcggggggcgtgggccacactcccggcccgcctgccctccccgcttggcccggcgccctcccggcccgcgggctcgctggatgcggcggggccccagcgcgcgggcgacatgtacttgttggacggcagtggcgagcccgcgtcgccacccgcggacgcgatgccgcgcgggacgccccccagaaagactgtctaccgcatctccgtgaccatggtcaggaaggagcagctggccgcgccgggctccggcggcccggacccacgcccggttcggcggccccggcccgcgcgctccccggacgcgcccgggaggcttgaggaggaggccgaggaggcggagggcgccgaggaaccggaggg

SEQ ID NO: 38774 - DNA, 146 bp, Homo sapiens
  chr2:237072658-237072804
  hyper
ccattttccgccaccggaactgttgggaacgcggcgggaaagggtgactcggtcgctcccagccttcaccctgcgcctgaagtttgggtggaggtcttggtccccaggcccctccgccgtggggaggtgacggcctgtaagtagta

SEQ ID NO: 38775 - DNA, 30 bp, Homo sapiens
  chr2:237075173-237075203
  hyper
cccccaccctttagcggattgtctttctat

SEQ ID NO: 38776 - DNA, 823 bp, Homo sapiens; identical to SEQ ID NO: 2319
  chr2:237075812-237076635
  hyper

SEQ ID NO: 38777 - DNA, 349 bp, Homo sapiens
  chr2:237076656-237077005
  hyper
cgccgcgccgccgccgggaagcccgccggacgccgggagcaccgccgggagcgccgggcaggggccgagcgggacccggagagcagacgcctccgcccctcagtcctgggcccgctgcatgccgggcgggtgcagggggtgtgcggggtgaggccgtgcgccccggagtggagagggcgcccgggccccgagggctcgccggagcccccgtccgccgcttgcccgtcggagcccgcgcgcttcgcgggtttggccctcggccccggtaagctgccgtccgtccgtccgtcccgccgtccgtcgcctcccgcgggccgctggggagcgcgcgaagccggcgtacttatct

SEQ ID NO: 38778 - DNA, 206 bp, Homo sapiens
  chr2:237077033-237077239
  hyper
cgcgctcctctttctcattcacattttgcctgccgcctggcccggctcgcctcacgtggggctgggcgcctctggccattggctgagcggggcgggggtggggcgaaagcggggccccgccctttccacccaagctggcctcgagcgggctgcgggcgccaccgtcggagcgcgcgggccggggagccggagcctgcatgcctagc

SEQ ID NO: 38779 - DNA, 105 bp, Homo sapiens
  chr2:237077284-237077389
  hyper
cggaccttggggccctgcagccttgtcgaggccacctcgaagggtagcctccggggcccgcacccccacggctgggccgggggcgctttatttcttttactgtat

SEQ ID NO: 38780 - DNA, 20 bp, Homo sapiens
  chr2:237078494-237078514
  hyper
gccccaaggccccccggggg

SEQ ID NO: 38781 - DNA, 30 bp, Homo sapiens
  chr2:237079107-237079137
  hyper
agccggggcccttccggcttgccactgaca

SEQ ID NO: 38782 - DNA, 383 bp, Homo sapiens; identical to SEQ ID NO: 2321
  chr2:237080167-237080550
  hyper

SEQ ID NO: 38783 - DNA, 111 bp, Homo sapiens
  chr2:237081315-237081426
  hyper
ccctctccactccagcgacgaggaacaggaggagccacagccgctcggcccgcgaggcgagccctcgtggcatctgggaatgggagggtgggggtggaatgctacacagcc

SEQ ID NO: 38784 - DNA, 17 bp, Homo sapiens
  chr2:237081536-237081553
  hyper
ggccgggatccagatgt

SEQ ID NO: 38785 - DNA, 310 bp, Homo sapiens
  chr2:237082343-237082653
  hyper
cgtccaacacacggagaaggaagaagcagaggccagagacgatggccggcgcttagctgtgagccccatgagcttccaatgctcgccaggagaccgtgtgtctaggagaggcaggccatggaccctatgagtcttccctggaggctggaaccccccgggactcctggacaccccaaaccaagtccccagccgctgcctccacgacggccccgacccccttcagggaagtagtattttaaagaggatgcggtctgcccggagggcacgcatttaaccctttagaaaccgcgctggagggagcagaagggtg

SEQ ID NO: 38786 - DNA, 796 bp, Homo sapiens
  chr2:237086767-237087563
  hyper
gggacccgaactgccggccaaggaccaagggctggcctcgcccttcgctcccactgggcaccgttctcgccgcgggaccttgccttgagcgcgccccctgcgggccgcggtggggattggccccttggaaagagggaaataggctgcgcgcgccggggcgggagaggcgctgcctccagtcctcccgggtgggggtctcccctccgagatccccgagggaacccgtcccgtgcactaccggatttccggtctctgaccagctggggcttcatttctacgcgtgcttttactgctctcctcctcctccggcggttttttttttttttttttttttttgaaaggagcaaacatccccagctttaatgcggcccaattatctcgtttgcacgacttaaaatgtttctctttaactcatttcaatctagtaaatatgcttcagcaagtagctaatttctcagggatggcttcgcctcgccatttgcatataaagcgcgtcggggcccggccccttctccgagtgcgcgagtcccttcttccggtgcgcgggtggcaggcagccaggcctcctagtccagggaggtcgcctaggtttggcctagggaaggcggagtctggggtccgcgacagtgcctggggaccagggtggcagggagggcagggaaacttgggccggggagggaccaggaccttctgagccccccaactcccccgcctccccggcctccgccgtcccttattccgaggaggggcgcccgtggggtaacacgttggcgcgagggtcgggggcgcatttatc

SEQ ID NO: 38787 - DNA, 30 bp, Homo sapiens
  chr2:237087762-237087792
  hyper
tcaattagagctgacgaattcaatcaaaat

SEQ ID NO: 38788 - DNA, 30 bp, Homo sapiens; identical to SEQ ID NO: 2324
  chr2:237088182-237088212
  hyper

SEQ ID NO: 38789 - DNA, 345 bp, Homo sapiens
  chr2:237145403-237145748
  hyper
gcagcaagggcgatgcggtttctgagagagccgcgcgggttcccagcactaaacgtgggcgactttccttaatcttcccccagagacagaaggccatgcaatgacaactccaagggcaggggctggagcattttgactaacagaaaagtcaggatgacacaatgcaagccgagaaaccccacacgagtcctgtgcaaagacaggtggccccgctgcctttccgagacccggagcacacgctgggagggcgctctctggggacgggggctgcgggacccccagaccccgcgcccgggcgcgaactagctgagcggccgctgggcctccctagaggccggcacagct

SEQ ID NO: 38790 - DNA, 294 bp, Homo sapiens
  chr2:237416070-237416364
  hyper
cgggcaggaaaaggtgaggccgggtttgcttcgcaggcacggagcgcgcaggcgcagagaggtgtttcactccttcccgtcgcgacccagagactcgcgaacctcacttcggccactcaggtgggcgcgacgcggccctagcaacggaaacgccgcgcctgcgcattgccttccgcctgccccctccccccccccgccccccgcattccgcgcctgcgccaccgcgggaggcctgggtgggcgcagctgtgggagccggtcggagtccgagcgctccgtcgcggggcccggccg

SEQ ID NO: 38791 - DNA, 98 bp, Homo sapiens; identical to SEQ ID NO: 2325
  chr2:237436059-237436157
  hyper

SEQ ID NO: 38792 - DNA, 30 bp, Homo sapiens; identical to SEQ ID NO: 2326
  chr2:237714754-237714784
  hyper

SEQ ID NO: 38793 - DNA, 52 bp, Homo sapiens
  chr2:237994046-237994098
  hyper
gcccgggcgggggacgctgcccaacaagcaggtttgcggagactcacacctt

SEQ ID NO: 38794 - DNA, 30 bp, Homo sapiens
  chr2:237994910-237994940
  hyper
ccgaaaaccctgtgcgtctttgctccagca

SEQ ID NO: 38795 - DNA, 60 bp, Homo sapiens
  chr2:238200161-238200221
  hyper
ctctggatgaagcctccgcatctggtttccatctccctgcgccgcgggactgaagcccgg

SEQ ID NO: 38796 - DNA, 152 bp, Homo sapiens
  chr2:238384222-238384374
  hyper
ctctgtcgccccctcccggagcggaggagtcacggcgggaaacagcccgaagccggcggggccccgagggggtccgcgctgcctgcccggggaccccttttcttggcagagaggatactgacatcggtctggaggccgtacgtcagtcccgg

SEQ ID NO: 38797 - DNA, 1113 bp, Homo sapiens
  chr2:238395040-238396153
  hyper
tccctaatgtccattggaattcggaaggacaggcaggccgggcggactggagacggcggctcgccttgggaccctctgagcttgcgggccccgctgagcacccaaaggccggccctagagtccaggagaagagcgcagcggcgcggagctcccaggcgttccccgcagcgcgtcctcggtcctggaaccaccgcgccgcgcgtcctggcttccacatctgccccatttgcccgcggatcttgactttttcttggcgggcaaggcctcggtctcctccccgcagcagggctgcccgcggctgcgggaccctcctggtcctgatgcctggcagaatcgaaggggtgagggtacgctctctgcagcagaaagccctgggcttaaagtcctatttattatttggcgttgccacttactggtcggtggctttggtagggcgcgtttctgagcctcagtttccccatttgtaaagccgaagtacatagcgctttccctgcagagttagaaatttcgacgatgtgccgcgcgctctagagcgcgctcagcaagcgggtcccaccgtgcccaaggcaggaccgcggcgcgatgtcacctatgcaaagtcgccgcaactcacgggaatcgcagctgtgtgctcaactttcccctccccgccgccgtctttctccccaaactggcttgggggtcgagtatccggggctctcccccgcactggcgcttcccgcgcgggcgccccaggtgtccgttccgttccgccctctgcctggcagggcatccagaggtgtccgcgctcccggagctgggcggagcggggcgcagcccacgtggttcgggcgggaggcgccgggacgtggccagttgcccgcctgccccggagagccaggcgctaaccagccgctctgcgccccgcgccctgcttgcccccattatccagccttgccccggcgccctgacctgacgccctggcctgacgccctgcttcgtcgcctcctttctctcccaggtgctggaccagggactgagcgtcccccggagagggtccggtgagtgcactgagaagagggaacagcggggccagggtggcgcccaggactcggggcttaggctttggggggt

SEQ ID NO: 38798 - DNA, 12 bp, Homo sapiens
  chr2:238396164-238396176
  hyper
cgtgcagaccca

SEQ ID NO: 38799 - DNA, 792 bp, Homo sapiens
  chr2:238536092-238536884
  hyper
cgcgctgcggacctccggctctggcttcccccgggtccccgcggcccccgtccccccgcgtccccgcgtccccggcccagcgcccgctgacgccatgacgccgcggcggagggaggggccggggccggggccgggccggggcggcgcgagcggctggagcaacgggccccgcggcagctgcgggcgacgcggtcgatggacatgggcacccagggatcggggcgcaagcggctccccaaccgggagcggctcacggcggaggacgacgcgctcaaccagatcgcgcgggaggtgagcgctccgggagggcagccggggggcgccgggcgggcgcgggggccggacggctgtcagggtctctccggcgtccgtctgtcccgctgtgcgtctgtgccactgcgcgtccggctccaggcgggtgggccgggcaggcgcgcgccggggcgctgatccccaggcgctgcgccccggccccgatctccgaggcctgcggaccccgcacccgttctccagccccgggcccagcccgcgacgctgcgcgccctcccccaccccggccaccgtcggccgctgcgccctcgggagaggagccgggcgccgccagcgcgcgaggtggcccgggctggccgggtgggggcgagcgccccgctttgttgtgcggcatgggaggaggcgggggcttaggcccgacctggaggcagtggacggtcgccggaggccacatggccctgctgaaatggccgagtcgctcaggtgaccatttgtcatccatccatcgatgtcactcaaggt

SEQ ID NO: 38800 - DNA, 312 bp, Homo sapiens
  chr2:238583494-238583806
  hyper
gaataaggacgtgcacgcacgtgctggctgttgaactgttgcctctccactgcaaaccctcccttccttgctgcagggccagagctgtgccctatcgggccctgcccccagagagagcctgggcagtgggaggagggagcccggagcacgctgcttcctgcctgcttcctgtttctgtgagcgtcaccccagcaacgggatttcaccctggctgcagttgttggttctgtttctagtgtttttcacacgcccagacaccaccctcaccagtccctcctgagcccccgctctgaggtccgggtccccactcca

SEQ ID NO: 38801 - DNA, 220 bp, Homo sapiens
  chr2:238617173-238617393
  hyper
ctgtccgtttcaggcggaagcccggctcgctgcaaaacgggcggcccgcgcggaggctcgcgagatccgcatgaaggagctggagcggcagcagaaggaggtaacgcttggggctccttgttgggtcttttcacagtgatttgcgtgctgggcccagggtgcaagtgcaggcacctgttgctgcagacgcacctggctgtctcacgttgctcacggtcag

SEQ ID NO: 38802 - DNA, 31 bp, Homo sapiens; identical to SEQ ID NO: 2330
  chr2:238791402-238791433
  hyper

SEQ ID NO: 38803 - DNA, 464 bp, Homo sapiens
  chr2:238864726-238865190
  hyper
cgcggcccgggtaaccaggtcccatgtaaccgcagcctggtgaagccgtgcgccctgggcgcggctacttggccctcacggcagggcggagatgcgaggccccagggttcggccccgcagcgccgctgagtccaaggaccgagctgggagtgggggcggagccaagaaggggcgcccctgcgcccacaagccgcagcgcccaggaatcccctgggcgcctccgcgtcccccgcgggctgtcccggcaggcaggcagcccaccccagggctcccctcgtggaaggacacccctgctgaccctggccctggttctggcggtgtctccactcagccctcggagggacgcccacctcccgcggagctgggggactgtggcttcctcctgcgcggggaggtcggtgggcgccgtggacccgtcccgcccctgtctgaggagccgagtcggccacagaggggcagcagac

SEQ ID NO: 38804 - DNA, 52 bp, Homo sapiens; identical to SEQ ID NO: 2332
  chr2:238876149-238876201
  hyper

SEQ ID NO: 38805 - DNA, 32 bp, Homo sapiens
  chr2:238967038-238967070
  hyper
gctgccagcacgctgtcacctctcactatctt

SEQ ID NO: 38806 - DNA, 30 bp, Homo sapiens
  chr2:238969449-238969479
  hyper
tagcgcccggttcccgggaagctctgtgac

SEQ ID NO: 38807 - DNA, 30 bp, Homo sapiens; identical to SEQ ID NO: 2334
  chr2:238969813-238969843
  hyper

SEQ ID NO: 38808 - DNA, 46 bp, Homo sapiens
  chr2:239072227-239072273
  hyper
aggcccttcaggccgaggggacgtcgccctcgccccacccctgcgc

SEQ ID NO: 38809 - DNA, 235 bp, Homo sapiens
  chr2:239140138-239140373
  hyper
cgggggctgcagagccttcatctcttcctccgtcccgggatgtcggagagacggcagcccagcctccgccaccgcaaagctgcttaacgggcagcgcgagtccctcgggcaccgttggaggccgttgctcaccgttgggcaagtgctttaagaagcacgaggatgtcgagtgtcaaatgcggcaaagggctcagagctcgccgccaaggggcgtggcctccgggccgcggcggcc

SEQ ID NO: 38810 - DNA, 1057 bp, Homo sapiens
  chr2:239148239-239149296
  hyper
agcgcgctcccggacccgcccgcccgccccgcagccccacggcgcctgcccggccgccgcacctcggcgcccgccagcagcagccgcagctcctgcaggctctcgttgatccgcgcgcgccgcttcttctccaccaggggcttccgggcctgcggggagcggggcactgaatcccagccccgcacggcctcccgcccgcttgctcgcccatggccccggcccgcaccttgcggtcccctcgcgtctcccagccgtcctcatcctcacggcccacacggtcccggccaggcgccgcgggtggcgccatgcccgctccgccggggacgcggcaggggctaggagcagcggggacggggagcggcggggaccggagtgccggcgccctccgctgccccgcggccgcccagcagcagcccagccgtccgcgctcctcgcggcttccggcccgccgcggtcccgccccttttatagccgcttatttgcatctcaatgcgccgattggccgcgcgggcccggggcggccgaccgcgaggcgcgctgcagccaatcggggcagcgcgctttgtccggcccagcggctctggcggtcgggcagctggctgagctaggcggggcccccagcccggccttccctagacccccgcgggggcggcaccggggcggcgaccccgggtagctgcggccctgcccgcgcttgtttctctccgtctgctgctctaggaccactgatctgccgcgcgtgcgagcaggcgtccacccgtccgtccgtccgtccgtccactcattcattcacccattaattcattcatttccctccttcgccgatggcgcctccagagttgagcgctggggccactggccccaggagatgcgtccctggtgtgcagagccacagtcaagtccgcggtctctggacctagaggggtttcaggtcccggctggggtggctgccaagccccggggaggcagggtccattgggcagcggtggcggggcggcccctgagtttcttccggactcgtccagacgccgggccggacccccgacgccgccctccg

SEQ ID NO: 38811 - DNA, 30 bp, Homo sapiens
  chr2:239228980-239229010
  hyper
tgctctggcacagccgcactcccgcaaatc

SEQ ID NO: 38812 - DNA, 164 bp, Homo sapiens
  chr2:239755489-239755653
  hyper
ccgcccttgatcacgcggcttgcctgacagcccggctcaggcccgggcctaattgagcccgggtcacctgggaataggttcaaaggcatcaaagccgtaaaaaccacctccaggcccagagccagagcggcctggcgaacaaagagccccccaaccacttcaaa

SEQ ID NO: 38813 - DNA, 41 bp, Homo sapiens
  chr2:239756024-239756065
  hyper
ggggccggggctccccagcaagccagggtaagaaatggtcc

SEQ ID NO: 38814 - DNA, 13 bp, Homo sapiens
  chr2:239756230-239756243
  hyper
cggtgcagactag

SEQ ID NO: 38815 - DNA, 255 bp, Homo sapiens
  chr2:239757475-239757730
  hyper
gggccgcgggggcttggatgccgtgcgcttttcctcttagcaaggaaggcgggcgggcgggacgctcacagtcccagggacacccctgagtgcagacttccacgcgagggtgtcagttgggaaccggcggaccggtgactcccccggcgggttctgaagatacttagacagatggtcgcagttttcattctcggtggtgtgtgggtgtccgtggttggcggtggaaggagcgagcatcagaaaaacctcctgggg

SEQ ID NO: 38816 - DNA, 162 bp, Homo sapiens
  chr2:239757898-239758060
  hyper
cgcgcctggggtccccggccgtcggcgccctggcctgcccagtgggcgtagaggtgcgggcctgcggctccagggtttgcctggggaggacgggaggaaactgccctgcgcttcggggccagagcagccacagggccgggtgtgcccgagaagggccctggg

SEQ ID NO: 38817 - DNA, 26 bp, Homo sapiens
  chr2:239758125-239758151
  hyper
cgcccgcaggcaggtggagctgacct

SEQ ID NO: 38818 - DNA, 240 bp, Homo sapiens
  chr2:240294231-240294471
  hyper
actcgcactccacacgctgctctgcagctcccactcctacatcccggcctcccggtacaccaggagctctggtcccctctctctacagagtgtacgcggcaacacgcacaagcaagcagtttatacacagcgacagaacagacacactgcttcatgttcagagcaatagcttctttctctctttcctgctctctccaccatcaaacacccaacaggaaacctttgcgtggttgctgtcca

SEQ ID NO: 38819 - DNA, 143 bp, Homo sapiens; identical to SEQ ID NO: 2338
  chr2:240402417-240402560
  hyper

SEQ ID NO: 38820 - DNA, 30 bp, Homo sapiens
  chr2:240964533-240964563
  hyper
agcgacctgggagccgccgccagaggccgg

SEQ ID NO: 38821 - DNA, 31 bp, Homo sapiens
  chr2:240965329-240965360
  hyper
agaaaacaaaagcacacgctccaagtccatc

SEQ ID NO: 38822 - DNA, 30 bp, Homo sapiens
  chr2:241172437-241172467
  hyper
gagacccaaaggcgcgtctccctcacccgc

SEQ ID NO: 38823 - DNA, 37 bp, Homo sapiens; identical to SEQ ID NO: 2339
  chr2:241374578-241374615
  hyper

SEQ ID NO: 38824 - DNA, 332 bp, Homo sapiens
  chr2:241375297-241375629
  hyper
ggcgcgggcgggtggccgggggcgccgccggccccgccatggagctccgggcccgaggctggtggctgctatgtgcggccgcagcgctggtcgcctgcgcccgcggggacccggccagcaagagccggagctgcggcgaggtccgccagatctacggagccaagggcttcagcctgagcgacgtgccccaggcggagatctcgggtgagtgagggcgcggcgccgggaacccgggcctggccgggctttgggctccggaccctggtcttcccgacgcggctactcgcccccggcgcgggatcctgccgcctgcgccccgccgcccgggcccc

SEQ ID NO: 38825 - DNA, 30 bp, Homo sapiens; identical to SEQ ID NO: 2341
  chr2:241376010-241376040
  hyper

SEQ ID NO: 38826 - DNA, 171 bp, Homo sapiens
  chr2:241393217-241393388
  hyper
gggcgcccgggacccccagggcggcgacgctgccgccggtgccgccgagcctttgttccgccgccggggccggtttcacgcctgtcgccctcgcaagcagccgcgggtgacaggagccttagccggcctggggcgcggaccctcccacccggggcagaggtgtccctacga

SEQ ID NO: 38827 - DNA, 30 bp, Homo sapiens; identical to SEQ ID NO: 2343
  chr2:241499836-241499866
  hyper

SEQ ID NO: 38828 - DNA, 622 bp, Homo sapiens
  chr2:241758385-241759007
  hyper
ccggggacgtgggcgcgcatcgggtccgcgccgggcgacgtcgcgctcgcgcccagcaggccccatgacttggcattccctccttcccctccccctcccgcccctgcggccggcagggcccccccaaccccacctaccggcgcccagcgccccgctcctgcggaccctccctcccggcggggatgctgccccggcccttcccagcgagagggcagcgcggctggtttgggggaagtcagcgtgaggagcggcttaaagcgggagtgcgaaggtcttcgcggccactgttccttcgtgtcatccgagcccgggcgccgggggcgcgccgccagcctagaccctgcggccccgcagcccctccctcgccgccgggccacacctgttacaggggcgctggctgctgagacgcaggcagtgctcgccggcggcccctcccaggtgctgggtctttctggaagggagctggggtctctggcgtgggagggggtgatgggcaggccggccgtgcaacgaagcgggtggccaggccccaacgccgcagcccccgccccgcccgcctgttttgctcccggctccagcatccgccctcccccaccccgggaaccggagcagctgcccgcgc

SEQ ID NO: 38829 - DNA, 1482 bp, Homo sapiens
  chr2:241759042-241760524
  hyper
cgctgcagccgcgcaccctcccaggtgcggcgtcagcgtcctcagccccgctcaccatccctcccctcccccgccgtctgggcgcagcccctcccgcagccccgccggtggctcctctccagggaagcggaatagccggggaagggcgggggtatcccgatcccgccggccgggcgagccctcccgagggcgacccccgcccgcctaagccgagggtcccgctgcagccgagatcgcggcaaagggaccttttccagcggcacctgaagggcggacacccctgaatttcccccattgttctctgcggagatggaggaaggtctggaagtgaaggggcctcgcagtgcctgcgctttgggcggcaacaagggcgccgggccggagctccccgccctgggcgcagtgggtgcaggtgcgggctgcgggcgcgggctgccgggcgcaggtgcggggcgaggggcgcgggcgcgggaggccgggcgggcggcggccttacctctccggcgtcactggcggcggccccgcatgggcactggcatgggcgcgggctctcgagcccggagctgctgccgctcgccggctgctctgcgctgtgacggcgccgccgcgtgacgggctgcgcgcccccggcccggaccgccccgcgcccctcccgaggcgctggttggctgcgcgcggcgtccgagctccagtcgccagctggtttgtcgcgcggggagagggacgggcgacgcggccgccgcggggatggggctggggacggagggggccggggccgggctgtgacgtcaccgctgacaccgcggcgggccccgcggagggtgggggaccgacacccggctcggacgcagcgtcccctcccccggcgtgcccctgagacctcgcgggggagggacccggcggcgccccgtcccgaagccccgcgtgcacctgaacttgcccgcggacccctcgccgggccgtcccccaccctggcccctttcgagtgaaatcgtaaaacgtccacctgcccccgctctgagccagcgacagacgcatcgtggggggcgggcggggctggggagggagggctccttgcgccagggatgctggctccgggtgtaacaggtgcgcggtgaaatcgcatcttgtgtcggggccggggcgccgggggaagagcagcagtgacccaggccctccccgccggatgatgcaacccgcccgcggacccgccgcctcgcctctaccgcggctcgtggggaccccccgccctcctctcgccccacctctccaggcccccattgtcctcaccccagcctgtccagtttaacttccttggacccccaagtcacacgccgctcgggggccaccccggcaaaccccagcctgcgtcacccgcccccagccgccttcctagttccaggggctgactggtatctctgtgcgcgccaccgtcctccctccaccgtcccagggctgggcaacttcgacaaagcctctggg

SEQ ID NO: 38830 - DNA, 30 bp, Homo sapiens; identical to SEQ ID NO: 2344
  chr2:241760767-241760797
  hyper

SEQ ID NO: 38831 - DNA, 589 bp, Homo sapiens
  chr2:241771577-241772166
  hyper
ttatgaagtcccaggccaaggcgttgggtggaaccccagggtgtggaactgcaacagccccgcagtctggaaagaagccgccagcagcccgcgcggccccgcggttccacggggcctcgtccccgcccctgccccgctgtaggccccgcctgctataggccccgccccgctgtaggccccgcctgctataggccccgctccgctgtaggccccgcctgctataggccccgccccgctgtaggccccgcctgctataggccccgcctgctgtaggccccgcctgctataggccccgctccgctgtaggccccaccccgcaggaaacctcgccccgctggtggcgcgccctggttgccgtggcaacctcctccctccgccgccgggttgccggcttcgctagcctctcagcagcgccgttgccatagcaacggcgggtgggtcccgcggggcgagctgagctagggtgagcatcctgtggggtagactatggcggctgggcgcgtgcggcctgtgcggggcctccccggctgcggtgagagcggctcgaggggtcccgtgcccggaccctgaagtgcggccaagccgtggg

SEQ ID NO: 38832 - DNA, 30 bp, Homo sapiens
  chr2:241853939-241853969
  hyper
tgcagcgctcctcgcggccacacgggggca

SEQ ID NO: 38833 - DNA, 31 bp, Homo sapiens; identical to SEQ ID NO: 2346
  chr2:241902830-241902861
  hyper

SEQ ID NO: 38834 - DNA, 52 bp, Homo sapiens
  chr2:241938220-241938272
  hyper
cgccagcgccccgtcccgcccgcacacctccgcgatgcggcacggcgtcgcc

SEQ ID NO: 38835 - DNA, 161 bp, Homo sapiens
  chr2:242088872-242089033
  hyper
aaggagcccttccgcgcttttatcccaccgaccaatcgcacagcgactagcaccgattgacaagctccacggaccagccacttgcgcgtatgggcgggactaagctagccagagtctagaagcccgcgctaagggttgctagggacgcaccaaacacccct

SEQ ID NO: 38836 - DNA, 30 bp, Homo sapiens
  chr2:242090249-242090279
  hyper
tccagttggagcctcgccccgagcctctga

SEQ ID NO: 38837 - DNA, 58 bp, Homo sapiens; identical to SEQ ID NO: 2349
  chr2:242157857-242157915
  hyper

SEQ ID NO: 38838 - DNA, 85 bp, Homo sapiens
  chr2:242212407-242212492
  hyper
tcgggtggggaaggcggtgccgaggagttgggaaattaatcacctccagaaagcagagggagcgcgccccgcaagaacccgagtg

SEQ ID NO: 38839 - DNA, 30 bp, Homo sapiens
  chr2:242254480-242254510
  hyper
tgctcgtgggctcgcggagcactccccagg

SEQ ID NO: 38840 - DNA, 126 bp, Homo sapiens
  chr2:242269444-242269570
  hyper
taagagaagttagtattattcctaattagacggggagtaaagcctttaaagaggagcctctactttttacatatacacgagctagacatggacatcttaattaaatcttaccgagtccagcaatat

SEQ ID NO: 38841 - DNA, 254 bp, Homo sapiens
  chr2:242448318-242448572
  hyper
gtcgtctccgacgttacggcggccgcgcggccctctcccttgggctctgccctgcgcagccctggttcgagcgggccagtgaggcccggcgccctccccgcctcgccacgaggatccaccgcggccgcccaggcttctagccttgtcgtcacggcacggagataagcccgcgctggccacatcgcgaagcccctgttcgtactgagaccccgcccgggatcacgcgcacaggccagggcgcaccaggccttgga

SEQ ID NO: 38842 - DNA, 247 bp, Homo sapiens
  chr2:242498018-242498265
  hyper
gccgctccggcctggtcgccttctccgggcgcatccagggaactcgctcggtcctccttaagcggggaagctcggaaagcgtctccccgactccgcccccagggttgcctttcccttagaaggccaagccccaagcccagcctctcgccagctgggagtcgcgcgctgcccacctcgctgcccaggcccccgacgccgcggcaggagccccccaagagcgcgggaagccccgtggacctggcgctcc

SEQ ID NO: 38843 - DNA, 362 bp, Homo sapiens
  chr2:242498764-242499126
  hyper
ggcgccggctacggcccttcccgagggccacgcccagcccggcgccccgcgcgccccgttccccgcgccgcctccctccacccggctgagcgcttgtgcccgcaggtgcggcgccccccacccgcgtcgccgccatggaggtgctgcggcgctcctcggtcttcgccgccgagatcatggacgcctttgaccgctcgcccacagacaaggagctggtggcccaggccaaggcgctgggccgggagtacgtgcacgcgcggctgctgcgcgccggcctctcctggagcgcgcccgagcgtgccgcgccggtcccgggacgcctggctgaggtgtgcgcggtgctgctgcgcctgggtgagtgc

SEQ ID NO: 38844 - DNA, 44 bp, Homo sapiens
  chr2:242550006-242550050
  hyper
cctgcttccccagccacggggtcttctcccggcccctcatctac

SEQ ID NO: 38845 - DNA, 42 bp, Homo sapiens; identical to SEQ ID NO: 2355
  chr2:242575607-242575649
  hyper

SEQ ID NO: 38846 - DNA, 30 bp, Homo sapiens
  chr2:242576808-242576838
  hyper
cgcctctgccgcctcgacaactgctcctgg

SEQ ID NO: 38847 - DNA, 185 bp, Homo sapiens
  chr2:242626704-242626889
  hyper
tgcttcccgaagcgcggggcccagtgcaggggctcagccggggctcctcccaaagctcacctggagcccagcacgactgcgttctggaaacgctgtgtttgacagcaggggcaggatggggggctgtgtagacgctggccacgtggcaattgtaggagaaccatgggatcgataaatgttcactg

SEQ ID NO: 38848 - DNA, 30 bp, Homo sapiens
  chr2:242640834-242640864
  hyper
ggtgctgggcggggcggccgctttcctcgg

SEQ ID NO: 38849 - DNA, 30 bp, Homo sapiens; identical to SEQ ID NO: 2356
  chr2:242642357-242642387
  hyper

SEQ ID NO: 38850 - DNA, 507 bp, Homo sapiens; identical to SEQ ID NO: 2357
  chr3:238208-238715
  hyper

SEQ ID NO: 38851 - DNA, 119 bp, Homo sapiens; identical to SEQ ID NO: 2358
  chr3:239006-239125
  hyper

SEQ ID NO: 38852 - DNA, 710 bp, Homo sapiens; identical to SEQ ID NO: 2359
  chr3:239158-239868
  hyper

SEQ ID NO: 38853 - DNA, 57 bp, Homo sapiens
  chr3:240109-240166
  hyper
gggctcgctctaggcggaggctcccgggacgcccacgtggcttcgaattccagctcc

SEQ ID NO: 38854 - DNA, 304 bp, Homo sapiens
  chr3:2139671-2139975
  hyper
gaatgaccgtggcaacgtcgttcaaagcacattctttcgaataacaaggctttcgacatgccccacccccgcgcacaacacaccacaaattgatccttgtacctaatttacagcaactgttccctctgacctccccccgcccccgccccacattccaacctgaaagcactttgcgtggatgagacttcaggtgtgtaacgcagcctgtccagccagtgtcctccgcctaaggacaggcaggtaaaaacctaccaaagccccctcttctggcctaagttcaatgccacccgcccacccacattcc

SEQ ID NO: 38855 - DNA, 110 bp, Homo sapiens; identical to SEQ ID NO: 2363
  chr3:2140037-2140147
  hyper

SEQ ID NO: 38856 - DNA, 253 bp, Homo sapiens; identical to SEQ ID NO: 2364
  chr3:2140181-2140434
  hyper

SEQ ID NO: 38857 - DNA, 622 bp, Homo sapiens
  chr3:2140827-2141449
  hyper
ggggccgtccagctcagagcccggaagccctgcagggtcggggagcgggagctgaacgcctgagcgcggaggactcagggccccgacgacgccaccgtcaccccacagcgacccttcttctccttctcagccggaaaataagtttgttgcgctgcgaggcagccacaaaacaaggaaccgagagcccggaatgctgcgggaagccttcaagtcagctcctccgactggttcgggctactgccccctctccgtgcgccctggcctctggcgccgggttcccggcggggcttttcttctgacagcccagtcacagcccgcagcagagggacgcgaacctggggagtggagggacctgggactaaaggaacaggagcccgtagccgtggtggaaggagccgcgtggagacggaggctgatgtctgtggcgcccgctgggtgccgggctggctgctgagcgctgaggctgcggcggcgagcgacaggccaggtgcctgctcttagggaaggtacctggcttccccagtctctgccgcgggagcctgttgggtggcattcgtttccagcaacttctggggggtttccagtttctttcgagaggcaagacaaccgccccgtcccctcc

SEQ ID NO: 38858 - DNA, 250 bp, Homo sapiens
  chr3:3168520-3168770
  hyper
gaagcccttcggtccgggccccgcccccgcactcgccctcgccccgccgcgacttcccattcgccgccaacccatgtgcgttggtgacgtcaccgcgttcaccagcccggaagtgcgcgtggcggcggtggcggctgcggcaacagcggggccggtaagcgggcgcgcgccgctcagaggggcagagttggtggcgtgagttgctgccccttccttcctgctgtgggccagaggcgccaccgcgcccggt

SEQ ID NO: 38859 - DNA, 30 bp, Homo sapiens
  chr3:3221329-3221359
  hyper
catgttgtgcgcagcgtcctgctgatctcc

SEQ ID NO: 38860 - DNA, 30 bp, Homo sapiens
  chr3:3221817-3221847
  hyper
tccatcagttattccgagggtggttgaatt

SEQ ID NO: 38861 - DNA, 1856 bp, Homo sapiens; identical to SEQ ID NO: 2366
  chr3:3840368-3842224
  hyper

SEQ ID NO: 38862 - DNA, 30 bp, Homo sapiens
  chr3:3842512-3842542
  hyper
aggaacagagctggcgctgagttcccggct

SEQ ID NO: 38863 - DNA, 30 bp, Homo sapiens
  chr3:4344934-4344964
  hyper
ctcctgagaagaaacgaactacaattccca

SEQ ID NO: 38864 - DNA, 30 bp, Homo sapiens
  chr3:4508822-4508852
  hyper
tcctggctccctgccgctccacacagcagc

SEQ ID NO: 38865 - DNA, 30 bp, Homo sapiens
  chr3:4534776-4534806
  hyper
ggggtgactttgaacggctggctccaagcc

SEQ ID NO: 38866 - DNA, 30 bp, Homo sapiens
  chr3:4535060-4535090
  hyper
cgtttcctcaagctcgctggggtgggagga

SEQ ID NO: 38867 - DNA, 203 bp, Homo sapiens
  chr3:4535690-4535893
  hyper
tgtgtaggggccccccgtggggagggtttttaaaaacggaagaaaaccggagaagcggtgagggatgaagtgtggacgaagctcatgtccaatgaggatgcgggcttcggatacttggccttctcgccgggaaacaagtgctttgggatctgccaaacacttcccttagttccagcctcccgcacgttcgaagtttgtgcgtg

SEQ ID NO: 38868 - DNA, 30 bp, Homo sapiens
  chr3:4742260-4742290
  hyper
caggagttttcatgcaggcaggatgcgatt

SEQ ID NO: 38869 - DNA, 386 bp, Homo sapiens
  chr3:4910323-4910709
  hyper
cgggcacttcccagcccagcccggggcgccggcttcgccgcgtgcgcgtgcgcatggtggggtttggctggctgcgggatgcggtcgaggccgccgaggccgcaaactccagtgggaaggcggcgtgccgcggccggcttcggtggaggagggggcgtttccccggaaaaggaaggaagtgggtgtcacgggcctcaatacggcccctttgacgtcttgagtgggaaatcacaagatactgctccagattttcccattttatggctaaatccaaatgactcggaccccctgccccatcacatcaggaacttcagcagttccttccaccaaagctcaactattgctgcaagcgctttggtaatcacgagcattatctatgaagctac

SEQ ID NO: 38870 - DNA, 533 bp, Homo sapiens
  chr3:5018756-5019289
  hyper
tggttttgacgcagccgtgacagcccttcatccttattaaaatcacacaatgaagcaggtcgcccaagattgaaagcgcgtttccagggcggaccccggtccccgcctttggccagcaaaagtacattctggcagggagggatctctgagccccgaagtgaggtcatgccagttagcagttagaaaaggaggcatttctcacacttgctaaagagtttgacgcttgtgaaatataaacaggaagcgggagctctccaaggcgacctgaaggaaatacactgccagtttggtcaacttgtgaatgccagttctctaggtcgtcaagggcactgccagttaagactgatcccctaactgcacccgaggctactactcttcgcccagtctcggcagtgaccccatttttttttcaatccttcccacagccaggtcactcagcagtggggtgactgacccgaagcgcagtgggaagggcttacagtcatctctcaactccccgaacttgcagggcaggggagcgcagaggtcagtga

SEQ ID NO: 38871 - DNA, 31 bp, Homo sapiens; identical to SEQ ID NO: 2369
  chr3:5020396-5020427
  hyper

SEQ ID NO: 38872 - DNA, 30 bp, Homo sapiens; identical to SEQ ID NO: 2370
  chr3:5020934-5020964
  hyper

SEQ ID NO: 38873 - DNA, 30 bp, Homo sapiens
  chr3:5028395-5028425
  hyper
tagcccagttctagcggcatccaaatgcgc

SEQ ID NO: 38874 - DNA, 30 bp, Homo sapiens
  chr3:5068716-5068746
  hyper
aggctggtctccatcgccttctgctggcaa

SEQ ID NO: 38875 - DNA, 30 bp, Homo sapiens
  chr3:5164511-5164541
  hyper
ggctgtgtcctcaacgccgcgggggctcgg

SEQ ID NO: 38876 - DNA, 30 bp, Homo sapiens
  chr3:6841364-6841394
  hyper
tcaccagtatcaaaccgtctaccagtcatg

SEQ ID NO: 38877 - DNA, 242 bp, Homo sapiens
  chr3:6902462-6902704
  hyper
cacccgtgcccagaacgtgggtgtgggtagggaggcttccacagtgagttagggtcgagagctaggctctcgcttgctccccgcaatccctagattccctggggaccacgaaactcccattccgaggaaacctccccccattccccagccgcccacccgtttcccccccttacctcagcacgcagcccctccctgcgtgatgatgcaaaccagtggggagggctggcgctgggaagggtggg

SEQ ID NO: 38878 - DNA, 370 bp, Homo sapiens; identical to SEQ ID NO: 2371
  chr3:6903906-6904276
  hyper

SEQ ID NO: 38879 - DNA, 83 bp, Homo sapiens; identical to SEQ ID NO: 2372
  chr3:6904532-6904615
  hyper

SEQ ID NO: 38880 - DNA, 30 bp, Homo sapiens; identical to SEQ ID NO: 2373
  chr3:8543196-8543226
  hyper

SEQ ID NO: 38881 - DNA, 31 bp, Homo sapiens; identical to SEQ ID NO: 2374
  chr3:8543387-8543418
  hyper

SEQ ID NO: 38882 - DNA, 181 bp, Homo sapiens
  chr3:8809533-8809714
  hyper
ggcggcacagcaggtcgggcccgtagaagcggaaggtgatgtcccacagcaactgcggcagcacctgaaacactgccaccaccaggtcggcgatgcttaggtgcttcatgaagaagaagaggcgcgagtgcttctggcgtgtggtgcgcagcgccagcagcacacacgcgttcccgctcag

SEQ ID NO: 38883 - DNA, 500 bp, Homo sapiens
  chr3:8810873-8811373
  hyper
cggccctagccatcccgtccacccctgcttagcacccagctacctgcaccgagtccgcaggcgaacctaaagttgactccccccggggaagttgcacggcgactgacggccccagtgacgcgtgcgctcccggcccgagttgggatggcctgccggctgcacctaatgtgatgctaagctgaggtctctcactggagcctcggttggaatcccctcgccgcagcctggctggtcgctggatgggtacaggaggcgagcgaggagcgcctcccaggctgcgcgcgcggacagcgtctggatgcggcgctgtgcgctggggctgaggctgcactatcgcacgggtccgctagggggcgggcgaggccagccgcgcagacccctccggagcggagctggttcgcccagcgttggtcccagagccttaacaaatgggtttattttgcagtggtttaaaactgcgagagggagggaactcgtcaataacccgcccgtttcttcct

SEQ ID NO: 38884 - DNA, 30 bp, Homo sapiens
  chr3:9005254-9005284
  hyper
cgccaggcttctgccgcacttaccttgaag

SEQ ID NO: 38885 - DNA, 30 bp, Homo sapiens
  chr3:9077066-9077096
  hyper
actgtgtgaatcacacgaggatttctttct

SEQ ID NO: 38886 - DNA, 30 bp, Homo sapiens
  chr3:9344426-9344456
  hyper
tcccgggggaagagcgccacctggcgaacc

SEQ ID NO: 38887 - DNA, 119 bp, Homo sapiens
  chr3:9691128-9691247
  hyper
ggacggggcggggccggaagtggaagtggaagtagaaggcggtggctgaggcggttccggaggttctagtgtcggagttgggtgcaggcaggtgccatgggcccgcttgaggcacactg

SEQ ID NO: 38888 - DNA, 30 bp, Homo sapiens
  chr3:9746044-9746074
  hyper
agacagtgtgggtgcgttcgcgtccagtcc

SEQ ID NO: 38889 - DNA, 30 bp, Homo sapiens
  chr3:9746302-9746332
  hyper
ccgaccccagtaggcggctccaggaccggg

SEQ ID NO: 38890 - DNA, 30 bp, Homo sapiens; identical to SEQ ID NO: 2376
  chr3:9746622-9746652
  hyper

SEQ ID NO: 38891 - DNA, 30 bp, Homo sapiens
  chr3:9773214-9773244
  hyper
cgccacaaaccgcccgacgaccccagatcc

SEQ ID NO: 38892 - DNA, 30 bp, Homo sapiens
  chr3:9773657-9773687
  hyper
agccgggaccaaagcgtggggcggcagggg

SEQ ID NO: 38893 - DNA, 30 bp, Homo sapiens
  chr3:9791620-9791650
  hyper
ttgagccctacttccggtggtgctgtggtc

SEQ ID NO: 38894 - DNA, 30 bp, Homo sapiens
  chr3:9792125-9792155
  hyper
gaagcctgtcccctcggactggctcctgcc

SEQ ID NO: 38895 - DNA, 65 bp, Homo sapiens; identical to SEQ ID NO: 2377
  chr3:9811684-9811749
  hyper

SEQ ID NO: 38896 - DNA, 92 bp, Homo sapiens; identical to SEQ ID NO: 2378
  chr3:9812388-9812480
  hyper

SEQ ID NO: 38897 - DNA, 30 bp, Homo sapiens; identical to SEQ ID NO: 2379
  chr3:9833989-9834019
  hyper

SEQ ID NO: 38898 - DNA, 34 bp, Homo sapiens
  chr3:9834429-9834463
  hyper
agaaacgaagggctcgtccgcttcggcttgtcct

SEQ ID NO: 38899 - DNA, 30 bp, Homo sapiens
  chr3:9834884-9834914
  hyper
ttgccgcaggggcgcggggccgagggatgt

SEQ ID NO: 38900 - DNA, 31 bp, Homo sapiens; identical to SEQ ID NO: 2380
  chr3:9851550-9851581
  hyper

SEQ ID NO: 38901 - DNA, 31 bp, Homo sapiens; identical to SEQ ID NO: 2381
  chr3:9851988-9852019
  hyper

SEQ ID NO: 38902 - DNA, 30 bp, Homo sapiens
  chr3:9885149-9885179
  hyper
tttccggtccaccacggctgcccgcagcgc

SEQ ID NO: 38903 - DNA, 441 bp, Homo sapiens
  chr3:9904285-9904726
  hyper
ccaaaggatccatgggaagatcgggtggctcaggggagtgactccccggcttggtcggcgctttgaggccccggggacccagcggagagggctcgggtgaggcatctggaggcgctgaatggggccgggagccgcgggacccgcagagggcgcctgtccgtgtgggcgcagcagcgcctagagggaggcggccccggcagcccgcaggggtcaggctctgctggagcaggggcgtccctgtctccgcttcccagcgcaggctgggtggggccgatggccattaaagccccgccccccgcggctcaccgccgcctggccccgtccccgaggccagaaaagaggagacccgaggccgtcagaccgcctgtcaagggctgtcctggagcctggcaccttcccctcgctccccgtctgacccccagaggccgtgctgtccaggct

SEQ ID NO: 38904 - DNA, 245 bp, Homo sapiens
  chr3:9932196-9932441
  hyper
ggggctgggcggggcgggggcgagagggaacgagggcgcctgcgcggagaggagtgaccatagagtcggtcctccagagacagaggggccggaagttctcttcacggagccgcgcggctgcgggggcgcaaatagggtcagtgggccgcttggcggtgtcgttgcggtaccaggtccgcgtgaggggttcgggggttctgggcaggcacaatggcgtctcgagcaggcccgcgagcggccggcac

SEQ ID NO: 38905 - DNA, 912 bp, Homo sapiens
  chr3:9956772-9957684
  hyper
cctataggctagggctgttttcggtaccaacccccagagcaaataaggggcgggggcgggggcggagaggcgagcaccctacggtatcccgagagggtggggagaagagggctgagcagtccctcagccgcccagccttcatctgttgcttcccgccaccaggcccgggcccagcgcggccagtgctcctcctgcacgcggcggactcggaggcgcagcggcgcctggtgggagcgctggctgaactgctacgggcagcgctgggcggcgggcgcgacgtgatcgtggacctgtgggaggggaggcacgtggcgcgcgtgggcccgctgccgtggctctgggcggcgcggacgcgcgtagcgcgggagcagggcactgtgctgctgctgtggagcggcgccgaccttcgcccggtcagcggccccgacccccgcgccgcgcccctgctcgccctgctccacgctgccccgcgcccgctgctgctgctcgcttacttcagtcgcctctgcgccaagggcgacatccccccgccgctgcgcgccctgccgcgctaccgcctgctgcgcgacctgccgcgtctgctgcgggcgctggacgcgcggcctttcgcagaggccaccagctggggccgccttggggcgcggcagcgcaggcagagccgcctagagctgtgcagccggctcgaacgagaggccgcccgacttgcagacctaggttgagcagagctccaccgcagtcccgggtgtctgcggccgcaacgcaacggacactggctggaaccccggaatgagccttcgaccctgaaatccttggggtgcctcgaggacgactggccgaaaagccgcattccctgcctcacaggccggaagtcccagcccagtccccgcgcgcgtccctcttcctcctcatact

SEQ ID NO: 38906 - DNA, 30 bp, Homo sapiens
  chr3:9974514-9974544
  hyper
ctcttgaaacaggacgtccgctcggggggt

SEQ ID NO: 38907 - DNA, 30 bp, Homo sapiens
  chr3:9975518-9975548
  hyper
ggctgtggcagcgacgcggtgaggagacgg

SEQ ID NO: 38908 - DNA, 30 bp, Homo sapiens
  chr3:9975855-9975885
  hyper
cccttgtcaaggagcgaggccactttcctc

SEQ ID NO: 38909 - DNA, 223 bp, Homo sapiens
  chr3:9993709-9993932
  hyper
tggagaggctgtggggggtggcggatctctctgccgcagggactggggagaggccggcctgggggcagggcgaggccgttgcggggcagcctcggagctggtccatctcgggttacctctcctcctcctcctcctcctcctccgtctcctctctccctggctccgcgccttcccgcagtgtcctggatgggggtgggcgccgtgcaggcctggtcgcctgcgc

SEQ ID NO: 38910 - DNA, 192 bp, Homo sapiens
  chr3:9993964-9994156
  hyper
cggggtcccgccatcgccccctccctgggccagctcctcacctgcgcgccgcagcccccgtgttcaccttgcgcgcgtccctgcagccgatcgccgcgccgcatcctccgagatgctcagactcggctaacagagcccggcgctgccgatcgcgagcccgcccacaggagcgcagccctgcttaactctttc

SEQ ID NO: 38911 - DNA, 30 bp, Homo sapiens
  chr3:10028365-10028395
  hyper
cagtctggaatgggcgagcttctcttctcc

SEQ ID NO: 38912 - DNA, 138 bp, Homo sapiens; identical to SEQ ID NO: 2385
  chr3:10052428-10052566
  hyper

SEQ ID NO: 38913 - DNA, 30 bp, Homo sapiens; identical to SEQ ID NO: 2386
  chr3:10052885-10052915
  hyper

SEQ ID NO: 38914 - DNA, 30 bp, Homo sapiens
  chr3:10157071-10157101
  hyper
tgcccatctcactgcggacactgagtgcgc

SEQ ID NO: 38915 - DNA, 710 bp, Homo sapiens; identical to SEQ ID NO: 2387
  chr3:10206380-10207090
  hyper

SEQ ID NO: 38916 - DNA, 30 bp, Homo sapiens
  chr3:10289959-10289989
  hyper
gctgttcgagcccacgtgagtggctccgcc

SEQ ID NO: 38917 - DNA, 20 bp, Homo sapiens
  chr3:10338818-10338838
  hyper
gccaccgcgcccggcctgcc

SEQ ID NO: 38918 - DNA, 1 bp, Homo sapiens
  chr3:10749432-10749433
  hyper
c

SEQ ID NO: 38919 - DNA, 198 bp, Homo sapiens
  chr3:10749467-10749665
  hyper
cgctcccgccctggcccggcgggggtctccggggccgagcgcccgcggaagggaagccagcagggaaagtgacaagagaccgagcgagaggggaagaggcccagagcccgggcccggccgcccctgcctcacctgcgccggctccgagagcgagatgctgccgccgccgctgccgccgccgctgccgctggtgcgcgc

SEQ ID NO: 38920 - DNA, 320 bp, Homo sapiens
  chr3:10858055-10858375
  hyper
gcgcgccacccgcgcgtcaagcgcgacaaggcggtccacgagcgcggccactggaacaacaaggtggagttcgtgctgagcgtggccggggagatcattgggctgggcaacgtgtggcgcttcccctacctgtgctacaagaacggaggaggtgaggtgatagtgaggagaaggggagggggcgccaaccgcccggtgggggcggggagccaggggcgagcgcgagaccccctcccgcgcctgcgtggagcggaacccgagcggagaacctcgactccaggcacctcgcgtgtgagctcgccccggagcgcggcccacct

SEQ ID NO: 38921 - DNA, 30 bp, Homo sapiens
  chr3:11033851-11033881
  hyper
gaaaagaggacgaccgcagagagaaacgga

SEQ ID NO: 38922 - DNA, 747 bp, Homo sapiens
  chr3:11034605-11035352
  hyper
ccggccgcaggtaggaaagggcggccggcgtcggggcgcggggcgcagagcctgggataacggcgcaggaacggccagagccccgagccgctgccgcgagccgggccgggtggggggcggacacctcgagattcaagcccccgcgccgcaccttccctgagccacatgaaggagcagaggcgccgctcggaccccgacgtgcgcccaggccatccgtcccctgggacactcgggaggcaggagggctggaacagaggcgagagttgcatgccccttccctcccgcggtgccccactggccccgcaagttggcactggattctgctggagccgtcgaagctccctattcattccccagggcatggaggggacgcggagtgaatgacacgagcagcgttggggggccgtgcgccactttcccaatcctggggtcagctgagccgagttagagctatgcccctcatttgttctctgcgggctacggcggggtcgggtgcgacttgaggatgggacgtctctgggacagcccgagctctcagaaacgttggcttaaaagcacaccggggcttgggctgagtgcaccggagctaagcctagtgcaccagagctcgcgccgcgctctcccagccccgactttctccaagagatgtggggtgcgggcggtcccttagagggctggaggacggtgcctccttgctgcttcgggaactgcgctccccttcttgcttttggtctctgcgtgtactcc

SEQ ID NO: 38923 - DNA, 122 bp, Homo sapiens
  chr3:11035382-11035504
  hyper
cgggcagtgcccattgggttctgagcacacgtccccacgggtggcacccacagatgtcctgttctaggcttggctcggtcttcagacaagaaactcagaccgggcagtcccctattgaggct

SEQ ID NO: 38924 - DNA, 31 bp, Homo sapiens
  chr3:11258023-11258054
  hyper
cattattcacagcagccgaagagtggaagca

SEQ ID NO: 38925 - DNA, 779 bp, Homo sapiens
  chr3:11684171-11684950
  hyper
aagacagtgggggaagcacctcgcgggcagtaggaggtaataaataacagttcggcgcggctctctctttttcagggcaggctgggggtcggggtgttgtgtaatcgctcccacagggagcggagcgcgaggaacaccccccagtgtcagcgctccccgggctgcacaggaagcgccagcgagacaaagagcccgcctgtgctcgctgacacggtgcccttccggccccacgcgggagagggacattctccgctgtttgggacgctcactcgcgagcacaaaaactcgctgtaactttggctccccctccgtgagctgcagggcgccgtggcccacagcagggtacagtagacggtgcaatccttaccagcccctcccccaaagaggctcaacttttaccggcgtcctacaagtccttcccctaaagacaatattaacggaaatcaaaaatacatacattttaaagagttaaaaatgtgaggcgcgagtacgttgcaagcaacgagcaaactttgaagggtttctacttcactgcctccccgtccagccccctccaccgccccccgcagcctgagatccgaacacactcggtgccgaaccgaacctaagaaacgccggcctttcaagtgccctacaccccggaggaggacagcgggcgcttagaaggcaggcacccagcacactgaggaggagtggccgggacgagcaacgggcagtaattctacaacgggacatctaccttcgtagcacagaatgccgatattgttgttcatcttgtc

SEQ ID NO: 38926 - DNA, 30 bp, Homo sapiens
  chr3:11685395-11685425
  hyper
catgactcctatgccgccgcttcctcttcc

SEQ ID NO: 38927 - DNA, 40 bp, Homo sapiens; identical to SEQ ID NO: 2390
  chr3:12045647-12045687
  hyper

SEQ ID NO: 38928 - DNA, 16 bp, Homo sapiens
  chr3:12045978-12045994
  hyper
cgccaccggaccccgt

SEQ ID NO: 38929 - DNA, 45 bp, Homo sapiens
  chr3:12046307-12046352
  hyper
tgtcccaagcggtaaagcagacggccgcctcggctggcctggtgg

SEQ ID NO: 38930 - DNA, 58 bp, Homo sapiens
  chr3:12046377-12046435
  hyper
cgccaggaaggccaaggtgctgctggtggtcgacgagccgcacgccgactggtaggtg

SEQ ID NO: 38931 - DNA, 214 bp, Homo sapiens
  chr3:12329055-12329269
  hyper
cggtctccccagaccggccctggccgggggcatccccctaaacttcggatccctcctcggaaatgggaccctctctgggccgcctcccagcggtggtggcgaggagcaaacgacaccaggtagcctgccgcggggcagagagtggacgcgggaaagccggtggctcccgccgtgggccctactgtgcgcgggcggcggccgagcccgggccgct

SEQ ID NO: 38932 - DNA, 757 bp, Homo sapiens; identical to SEQ ID NO: 2393
  chr3:12329472-12330229
  hyper

SEQ ID NO: 38933 - DNA, 101 bp, Homo sapiens; identical to SEQ ID NO: 2394
  chr3:12330283-12330384
  hyper

SEQ ID NO: 38934 - DNA, 31 bp, Homo sapiens; identical to SEQ ID NO: 2395
  chr3:12524521-12524552
  hyper

SEQ ID NO: 38935 - DNA, 30 bp, Homo sapiens
  chr3:12526297-12526327
  hyper
cagctgacaatgcccgagaggagccgcagc

SEQ ID NO: 38936 - DNA, 128 bp, Homo sapiens
  chr3:12851561-12851689
  hyper
ggtgtcccgctgggcgccttccacgccagcctcctgcactgtctgctgccacagctgagcagcccgcgcctggcggtgcgcaagcgggcggtcggagcgcttggccacctggcggccgcctgcagcac

SEQ ID NO: 38937 - DNA, 30 bp, Homo sapiens
  chr3:12883130-12883160
  hyper
ataaaataaagacacgtcaaaaaataatgc

SEQ ID NO: 38938 - DNA, 30 bp, Homo sapiens
  chr3:12883436-12883466
  hyper
acagtaaatagtaacgaaaacagctaacat

SEQ ID NO: 38939 - DNA, 419 bp, Homo sapiens
  chr3:13008719-13009138
  hyper
aaacccacagtctggcggacgcaccccgccccgcaggcagctttctctcgcacgccgggcgcccggtcccgacggtcacccgcactcccgcacaggcatccccacagcctgcgccagcccaccgctcagcacccgggaaggccgctcgccccgcgccgcgccctcacccgctgtcaagctctagctccagaagggactgggtcctctccgagttgcagtgcaggcaccacatggcggccgcagtgggagcgggccgggccgggagccgggacccaggcccagcagaggccgccgactcccgccagcgagccgccggatcccggggccgacacccggccacccggagacccgaccacccgccacgcgatcacgtcggggctcctggtccagcgtccgccggctcccgcggctccggcccc

SEQ ID NO: 38940 - DNA, 96 bp, Homo sapiens
  chr3:13009356-13009452
  hyper
gtggccacacggcgccgcggaagaagcacagggggcggggggtcaggggcggggcgtcaggggcggggctacgcgcaggggcggggccgagccgag

SEQ ID NO: 38941 - DNA, 131 bp, Homo sapiens
  chr3:13009475-13009606
  hyper
cggagtcccagacactgcatccaggtcccagcgcgcgaagcctctgttctggaaggaggactttgcgcagcccctccaacactggcgcctcccgggagccatgtcttcctctccagcgtgtaaccacaaca

SEQ ID NO: 38942 - DNA, 31 bp, Homo sapiens; identical to SEQ ID NO: 2399
  chr3:13138221-13138252
  hyper

SEQ ID NO: 38943 - DNA, 639 bp, Homo sapiens; identical to SEQ ID NO: 2400
  chr3:13323366-13324005
  hyper

SEQ ID NO: 38944 - DNA, 113 bp, Homo sapiens; identical to SEQ ID NO: 2401
  chr3:13324234-13324347
  hyper

SEQ ID NO: 38945 - DNA, 254 bp, Homo sapiens; identical to SEQ ID NO: 2402
  chr3:13324419-13324673
  hyper

SEQ ID NO: 38946 - DNA, 199 bp, Homo sapiens; identical to SEQ ID NO: 2403
  chr3:13324740-13324939
  hyper

SEQ ID NO: 38947 - DNA, 30 bp, Homo sapiens; identical to SEQ ID NO: 2404
  chr3:13461129-13461159
  hyper

SEQ ID NO: 38948 - DNA, 30 bp, Homo sapiens
  chr3:13521678-13521708
  hyper
caggctctctgtgtcgcaacactggcgggg

SEQ ID NO: 38949 - DNA, 193 bp, Homo sapiens; identical to SEQ ID NO: 2405
  chr3:13590447-13590640
  hyper

SEQ ID NO: 38950 - DNA, 157 bp, Homo sapiens
  chr3:13692027-13692184
  hyper
gcacagataagttgcgggccgcgggaaacaggaccctggggggccccctagagcctcgcggagcggcttgcagaggagcctcggggccacggcgtgtgtgcagcgacacctggcggtggcatgcggaactgcggacggctgcgcaggagcggacagc

SEQ ID NO: 38951 - DNA, 114 bp, Homo sapiens
  chr3:13697027-13697141
  hyper
gggtctcccaggcgcgcccaagacccatccgcgccggccgcctgccctgctgcgtctgcccactgcccctggggcgcgtgatggtcccctcgacgctccgccctggcttccccc

SEQ ID NO: 38952 - DNA, 2552 bp, Homo sapiens
  chr3:13919796-13922348
  hyper
gagataaagccgcacgcggcccgagtcaatcggctcgagccaatcggccctactggcttcctggatgctgaatgtgcgcggggcggcggggcgcgggccaagatgaagattaaagcaggggaaaaaaaggaaagccacccagacgcgggcgaatcaataacacttaaaacacaccggcaggctggcggtactggcgcgagccccgcagccgcctctccgccgctggtcgggctggcggcccctggtcggctctgcacgcacctgctagcggccgcggccggacaacttgcgaaatccccgctccagagacgtggactggggaagtgacggggtaggggggtagtagtgacaaaacacaaagggtctgccacgcacatcccctcgccgcagcccctgcggtccacccctcctcaaaagggatggtaatgggttcactgctgggggctggaggggcagggtgtgtgagacctaccaagcgggcccttcagcgccagaacctctatccatgcccagatccccccgcccccacaccgctccgagcctcacacgcgttgtcttaagtacaaagggtgaccggctttgcacaagcagctccaggacgcgtcccgagctgccccctcccaccttccagccagagcgcccccgagccccacctccacagaaacgctaggtgaagccggagggctgctcgcgcgcccggccgcctctgctgcccagttccagggggcggggtgtcccgcctctctctagcgcttgtctccctctgtgtctcagaccgcctctcgtcccacctttgtgtgtgtttgttgggggtgggacgtgctgtccccttggcccgggaaggggctctgggagtctaagggcccctggaaattgggtggtgccaaggctccgagcggcggtttatgtttttgccagcgaatgtccttcctcctgggtacctgttccctgtttgcacggaccggccccgccagccacctggggactgcccagtctctaggaacggctgtgccgcgcctcctgagagagttcgtctcgggctccggggactgagctccccgagattggctgtggtcctggcttgatgttcctgctagacctgctgtccctatgcccgggtccgaagggtccccgggatgggctgaacctttgcagcagctagccctcccccagagtccctcaggctggagcgtccctaccggctgtctctggtcctgggggattccagactcagacgtcctcaggatggccagtccccctgcctatatctcctggggtgtcctgcggggggcctttgtgcgtccaccgctcccacaccgcacccacccggcctctcagagaagctgtggaagttggccggcagaggctcgcaggcggcacacctccctccccgggccgtgccaactttgtcgaaacacgcgcggaaagggcgcaggcagcccttacccgatccggaggtagaccatgcccaggctgagaaagaggtggcccaggcagcgccgcgctttccggttcatagtcccgattggccgccggggccgcgggccgggctgtgctgatcccgcgggccggccccggcggggcaatcaacatagcccgcccgggaggcgcgagccgaggcgtccccggggccgtctgtcggtgcgcccgtccgcgcgctccgcgcctgagcctcgccaggagcacgggagccacggagcgggaggagggagggaggagcgagcgcggcgtggggcgacgccgggctgcgcgcgagcgaccggtgcaagtgtgcgagacgcggggagtgcgggggcgctgctgcctccagcccccgcccctccctcctttcccccgtccctcccccgccccctcccccgcccgcctccccggagcgcccgcccagcgcccctgcgcccgcgggacagggccgcctgcacaaggcgcgcgctcgcgcctttccatgcgcgctcccgggggccccctccctgctccggggtgcaggtggcaggctggggagcacagcccggttggaggcggtaggagcccgctcgccccccacccgtcactaacttgcagattgcagggcgagtgggcgtccagaggctgccctcgggtggagtggaccagactcggccgagaggcctagtgccttggtctgctgccctgctccctccagcccggaacagggagctggggctgacagggcacaccccagttccccaaccccagcttcaggggagggcgccccctttcgcggagcgacgggctgactggctcagtgtatttcttccctactcccacctattcgagagtggcggcagggggtgcccaggttgggcagcctcctctgggatcctgctgttagccgacagactgagtcgggctgaggcccagttgccccgcgcggaacagcagtggggcgcctgagccgcgggagcgtgaggggcgcagctggccgctcagagcgcgctcgcggcgtcaccaggcggacgcggcgggtggtgcacctcggcctcgctcccgggaacagaatgctttgagtgccctggccgacccgagggggctaacac

SEQ ID NO: 38953 - DNA, 122 bp, Homo sapiens
  chr3:14166220-14166342
  hyper
cagctgcacctttacgccgtgacctccctctcctctggcagggcgggctcctccgaagcccgcgcggacccgccccctcccaggcctgcccgccgcgcgcctgcctcggcgccctcgcaacc

SEQ ID NO: 38954 - DNA, 30 bp, Homo sapiens
  chr3:14166548-14166578
  hyper
actgcagtaagtcccgcttggccctggagt

SEQ ID NO: 38955 - DNA, 30 bp, Homo sapiens
  chr3:14167230-14167260
  hyper
ggctgggctgggagcgaaggagttggggga

SEQ ID NO: 38956 - DNA, 205 bp, Homo sapiens
  chr3:14220156-14220361
  hyper
tggccacgccccttcgttggaggcctagtcacgcccctaaaggaagctccaccccatacccgtggccactaaaaaactgcgggaagcaggaaagagcacaacaggtttctctctatttccggtgtattgtatcctcacgtttccggagattgacgttgctcttgtgttctcgcgagaggcgggaaagggcgcagggtttgaaaca

SEQ ID NO: 38957 - DNA, 30 bp, Homo sapiens
  chr3:14444020-14444050
  hyper
ggggctggaagccccggccccgccccggcc

SEQ ID NO: 38958 - DNA, 100 bp, Homo sapiens; identical to SEQ ID NO: 2410
  chr3:14444315-14444415
  hyper

SEQ ID NO: 38959 - DNA, 915 bp, Homo sapiens
  chr3:14643797-14644712
  hyper
ggggttgagccgcagcgctgctgtgcaggggcaggcccgggcagggggcagtgcggcgagtcagccccctccctggcctcctcgcaactttgagtaaccgcggactccggggtcggcatgggggtggcgccgggcgttcaaaggaaagttgggtgcgacggaccgcagcctcgggggccaaaggacccccaccgtgagcgcggccacctcccgacacccggcgggctggctggagggagcaggtgaggcacgtggccgcctcgccaagccagggctccctccaggagcccgacccgccggccgggccggtggatgccccctcgagggctcagacccttcgctccagcccccggcgggcgccctgccccgggtcccacactcccgcgccccgtgggccccactgctggctttccgggaccaggctccgctccgcagctcgcgtcctgaggtgatcctccaggctccccactttgggaccccctcctgcgcctcgggtgccggcgcctgtcttcgcctcccgcggggaccctccccggcgccccaggcgtgtgcgccccgggccagctcagctctgggtccgccctccgcaccccgcgccgcgcgcgcgctcaccggccgggcagcggccgcgtcttaccttcgtccggcagccgctgcaggcagagcgcgaggttcctccgccagccccgcatccccgcggccgccctgcggcccggcccggcctcgccagcccggccccggccccgcccccgccgggcagggcggcgcagcgcagcgctggggagggccgcgggcccagggagccgcgggcatggacggccgccgagggtgggggtgccggggcggccgccaggcgctccgctccggctcccgagcccgcggctgagcagctacgcttttcgagcgcgcgctttc

SEQ ID NO: 38960 - DNA, 30 bp, Homo sapiens
  chr3:14693106-14693136
  hyper
accttagcagttagcgtcaacctccgcact

SEQ ID NO: 38961 - DNA, 30 bp, Homo sapiens; identical to SEQ ID NO: 2411
  chr3:14852312-14852342
  hyper

SEQ ID NO: 38962 - DNA, 30 bp, Homo sapiens
  chr3:14989116-14989146
  hyper
gcgggcggcggcggcggcggcaccggggtc

SEQ ID NO: 38963 - DNA, 30 bp, Homo sapiens
  chr3:15106695-15106725
  hyper
gggcatggcggcaacggtggcggggccgac

SEQ ID NO: 38964 - DNA, 222 bp, Homo sapiens
  chr3:15140592-15140814
  hyper
ctctgggcctccaccgtccgtcactcagccgcagccgccatctccatcggtcgctcggaactcggcaggtgcgcctgcggcggcgacgaaaccggaagacaagctggtagacgcctgtcgagcgccgagtcttcgagggcgcgaaaagggcggatacggattcgaatagtggagggcgggccggcggcttctgcgcaggcgctttccgaacgagggagggga

SEQ ID NO: 38965 - DNA, 30 bp, Homo sapiens
  chr3:15469012-15469042
  hyper
ttttgccatggcaccgcccccgccacttcc

SEQ ID NO: 38966 - DNA, 30 bp, Homo sapiens
  chr3:15643306-15643336
  hyper
cattgtctccgagtcggccagctggagcgt

SEQ ID NO: 38967 - DNA, 16 bp, Homo sapiens
  chr3:15901301-15901317
  hyper
cggcatccaaactcca

SEQ ID NO: 38968 - DNA, 30 bp, Homo sapiens; identical to SEQ ID NO: 2413
  chr3:16220028-16220058
  hyper

SEQ ID NO: 38969 - DNA, 1245 bp, Homo sapiens
  chr3:16553593-16554838
  hyper
cccaaacagcttgcttcgtaacccctctctggggtttggtgacatctggggtcacttgaacttcgttgggattcagctgttcagagatacaaattaggaatcccggcagcagagaggccctacccacaggcccagaggtcgctcacattacacccggcttccttcctggcaaggccttaacttatcctgagatgacacacgatggcaggggttggaagatgcctagtctagttgagcgcccagctcctgaaacagctgtaccgactacaagggttccagcacatgagttgctggaaactggggtgaccactgacagagattgagccagactttttttttaaaaaagtacttcttgtttgtttgttttaagcccccgaagaaactcactgacaccacccagcgtccctagggatcacccataaccacacagggcagctgagggcaagcacagagtcacagacagacagcagggagcgtgcctggttctacaaccttggcctccacgcggttcttgctgccaaaggcagcgacaccggaggtgaagggcaccagccctggcctaggactggggtgcgcgtgcctgacaacggggcttcccgaaatacacaaccacctcctcctcgcccagacccatatccatcctggcgtcccttgagtctagagaagtgggttaagacaagggaagaaaatcccttacagaagaggagatccccgttttcagtgctggggactctcggcacccgcgtccctgtgcttctggtggttccggcgcttcctcggagcgcgcggcatgtctgctcctacacgtccagcacctctgtccccagagcaaacccacctcccagggcacacgcagaggggcagtcaggcaccgcctccaccctgccccacccaggccgcgcgcaccccggaaacctggactccgcgaccagctccctcctgttcttttccgaggaccccagcggcagtgtgtcctggacccacctgtagcctccaagctcccccacctctgcgtccttcctaggcgcttctgagcctgcagagcctacgacccccaacaggctgctccgaagtgcctctccctacatcgctccaggaatgactcccctacacccgttccccgcaaaaaaaagttggcccaagatccaggcgtcccaaggatcagcccaggtccccatccgacgcgggccagggggtgctgctctggcagctccggagccccggcaaagagcaacctgcagggag

SEQ ID NO: 38970 - DNA, 322 bp, Homo sapiens
  chr3:16555196-16555518
  hyper
cggctccagccccgacgcgcccccgccgccgccgccgcgcgtccgccggctacacttcctcttcctctgaactcatgtgcaaaatatgctacgctgcatcttcagggaaagcctcgcggcccctgacagcagccgctggagcggtgggcccgcccagctctccccgcgccccctcggagttccgcccggtcacctccacgcggccgagctgcaagcgaccctggcagcctcagaacccaggggtcaggggctcatcgatcctccctcccagcccctcctaatcaaggttgtgtgctgtcaggaagagcgcctgggagacaag

SEQ ID NO: 38971 - DNA, 35 bp, Homo sapiens; identical to SEQ ID NO: 2416
  chr3:16860035-16860070
  hyper

SEQ ID NO: 38972 - DNA, 564 bp, Homo sapiens
  chr3:16925655-16926219
  hyper
atggtgggtcagggggcgaccgaggagggaccacgcggcctgtagggggcagcgccgagctcgggaggagacagcagccggcgggtggggtgggtctgggctgccccctccgggagctgccccggggccgcacggcgattgtcatacccggccgcccctgcccgccgtgggcttcctctcggcgccgcgggccttaacggggctctgaggggacgtgacagagctcggcacgcggcagcctctggggagttagggtccggagagacccacgcgtcgccccccgcccgcccggggccgggagatcctcgggagccgcctccgcgtgtccagagagtgtcggggcggccgccacttcccctcgcccttcgccggaggtgggcgccttttcctgcgtggcgggtgctccgaccccagttgctctgagccccggggaagcgcgccccgagcccctgacgtgggcgccccgttacctcggggtgggtgcctggggcccctgaggtgggcgcgggttgccccggggtgggcgcccggcccgcgcgggttatttttggcgcccgcagaggc

SEQ ID NO: 38973 - DNA, 92 bp, Homo sapiens
  chr3:16926261-16926353
  hyper
cggggctccgccggcgccggagctgactcgtctctctcttctttcccctgcaggaatcttccgataattctgccgccgcgactttaaccgtg

SEQ ID NO: 38974 - DNA, 353 bp, Homo sapiens
  chr3:16926665-16927018
  hyper
tccacgggcgggcgcgctatgacagcggcggggtttccaacggagactgcagcctcggcgtgtccggggacgaagcccgggctagccctaccaggggaccccgcggcgttgcgctcgccccgacccccagcgcggtcgtctgtaccctcccccgggagagcaagccgggcggcctgccccgccggagcagcatcatcaaggtaggtgggagaagggcgctcatcgcccaccctcagccgtccttggattctattttctccctgggggagtggtggtggaaggaggaagcccactgctaacaggaaccactggagcatgggtgcttggggtggttgagcggggattggatgcaa

SEQ ID NO: 38975 - DNA, 31 bp, Homo sapiens; identical to SEQ ID NO: 2419
  chr3:17571374-17571405
  hyper

SEQ ID NO: 38976 - DNA, 505 bp, Homo sapiens
  chr3:18485350-18485855
  hyper
ccaactccaaacccacattcacgccagcagcctctccaggaccggcctcgctacagccagcgagggctcgaaatgaggagtgccgcggctttcaaactccgggctccaacttgagcgccccggcgcccgagtagctcccgggatgcagaagttgccacaaacttcccaggcccctcttcgccgatgcttacaatcagccgcgcaggcagggagcggagggaggcggagatggaccgggaaaggatgctgagcagactcgcgatccggtgggggaacattaccactcccgcagcccactcctccaggcaccttactgcccgcccggctccagaacgcaccgagaggctccccttttccccatttgcttccttcggtcttttccactcccctttccttttctaaaaggggccataccggtgacctgaaggagtttgttcagccagggtctattgggcaggtgtggtggtgtgtccacacccagacagaaaacgaatggcatcttcaa

SEQ ID NO: 38977 - DNA, 183 bp, Homo sapiens
  chr3:18486088-18486271
  hyper
cagaactcactcaggcatggacgttgggggcggcggtggctgtcgagtgcgggcctgaaaccaagaacggctccccgggcgggcgcgccggcgtcggacttccgaggcggcggcttctgcctctcctgccgccgccgccgccgccggagctgcggctgccgcggaagttaattgcaacttgac

SEQ ID NO: 38978 - DNA, 140 bp, Homo sapiens
  chr3:18486936-18487076
  hyper
aagtgtgggcgcttgggggtgcgcttggggtgcgcggcgcggttctcgtcgcccgccaaccctgccccctcacctctccgggggcccccaacacgcgcactcctcctcttgtcgcctgcggcttcctcttgttgcttgtt

SEQ ID NO: 38979 - DNA, 30 bp, Homo sapiens
  chr3:19188399-19188429
  hyper
tcttctgggatggccgccccgcgccgccca

SEQ ID NO: 38980 - DNA, 30 bp, Homo sapiens
  chr3:19189055-19189085
  hyper
cttcagttcctggccgtccgccaggctttc

SEQ ID NO: 38981 - DNA, 30 bp, Homo sapiens
  chr3:19189441-19189471
  hyper
ccctgcccctgtcgcgtgggctcgcaatgg

SEQ ID NO: 38982 - DNA, 608 bp, Homo sapiens
  chr3:19189693-19190301
  hyper
cgtgggagttgcgctcgctctcctttcccggcgtcccgtggagaccgggaggctcagcgcctctcccagctctcagcgccgccctcccagaccccagagacgtcggtcagggcgcggcgccccgggccactgcgggctctttccgggcgggcgacgtggggggcgaggcaccgcgcggcggcgcctggcgggcactgttgcccgcggagggacggtgggggggtttcagcagctggcgggggtggagggggcgggagagggagcctgcgccgggctgagcctggaggtgcggggcgggctcggggagcgctcttggggctcctcctgccacagccggggcggctggaactctctccctttctccctccatccttccacttcccctgctcggccccgccgtcaggccgggtcccccttccctgccgtcatcaggttccccttctcccttcttggcactttcctttcgaaccatccttctggacaaactttgatggagaatttcacaccacgctggaaaaatgccggttatgaaaggattactggcgccgcaaaacaccttcctggacaccatcgccacccgttttgacggaacacgtaagtcttacact

SEQ ID NO: 38983 - DNA, 250 bp, Homo sapiens
  chr3:19988445-19988695
  hyper
ggatctgagccactcgcagggtcacgtgacatcctgcctcgccccgccccgcgaacaaacctaggcggggagggattcgggaaggggcgaggaagcggaaggagcaggcggactggcgatgatgggaagtgacgaagtggcgcagttcgctgcgtgcagcgacgtggcggcggggccggcaccgggcagcggaagtggctccggcggtgggacttgagtgtttgtgttttggttcgtgaaggagccggcg

SEQ ID NO: 38984 - DNA, 30 bp, Homo sapiens; identical to SEQ ID NO: 2423
  chr3:22335323-22335353
  hyper

SEQ ID NO: 38985 - DNA, 30 bp, Homo sapiens
  chr3:22412730-22412760
  hyper
gaaaacatcgtgaaccggaattcagtggtc

SEQ ID NO: 38986 - DNA, 542 bp, Homo sapiens; identical to SEQ ID NO: 2424
  chr3:22413368-22413910
  hyper

SEQ ID NO: 38987 - DNA, 118 bp, Homo sapiens; identical to SEQ ID NO: 2425
  chr3:22413959-22414077
  hyper

SEQ ID NO: 38988 - DNA, 230 bp, Homo sapiens; identical to SEQ ID NO: 2426
  chr3:22414308-22414538
  hyper

SEQ ID NO: 38989 - DNA, 30 bp, Homo sapiens
  chr3:23245385-23245415
  hyper
ggtgtgtctcctggcgagtgccgggtttgg

SEQ ID NO: 38990 - DNA, 31 bp, Homo sapiens; identical to SEQ ID NO: 2427
  chr3:23654182-23654213
  hyper

SEQ ID NO: 38991 - DNA, 30 bp, Homo sapiens
  chr3:23847465-23847495
  hyper
tgttgctgcacttccgcttctctcccagcg

SEQ ID NO: 38992 - DNA, 30 bp, Homo sapiens
  chr3:23848497-23848527
  hyper
tcctagctccagaccgttttcccacagcgt

SEQ ID NO: 38993 - DNA, 30 bp, Homo sapiens
  chr3:23852484-23852514
  hyper
cggcctgtcgggggcgccctgccggggtgg

SEQ ID NO: 38994 - DNA, 70 bp, Homo sapiens
  chr3:23986034-23986104
  hyper
acattcaaggtgaaacgcccagatcttgactgcacattagctgagttcggacacacgcgtacacccgtct

SEQ ID NO: 38995 - DNA, 65 bp, Homo sapiens; identical to SEQ ID NO: 2429
  chr3:23986745-23986810
  hyper

SEQ ID NO: 38996 - DNA, 30 bp, Homo sapiens
  chr3:24535350-24535380
  hyper
aaagtgacaactgccgctaagaagggcaaa

SEQ ID NO: 38997 - DNA, 556 bp, Homo sapiens
  chr3:24536767-24537323
  hyper
ggaaatggcctcctggcgcacaccccgccgccgccgccagccatcgccaccgccccgggctgcccagccggtacagacgccccctgccaggctccgggccagcgctccgacgcgctcacagcgcccggcttgccgaccccgaccccgaccccgagtcctacgcactcgaggtccccgggccggccgcctccgcacctgcctccccaggtgtgggcgctccccctcctcctaatcccggccgtgccctcccagggttggtgacggtgctgtgggtttggtggccgcgcgtccacccacccgattgcctgcgcgcataggtgcgggtttgggcgtcattactctagttggagaagaggaaagaatggggaacgagtgacaccgggaccggagggcgagtcttccaggagcacgtctcggccttctttgcccggcccgaccggcccgacccgtgccgcagcgctcctccctccgctcctaaaccacttgtggcgcgtgtcgggaatacagggcgctctggctcttcttggggcctccgctggtccgaccatctggcagc

SEQ ID NO: 38998 - DNA, 54 bp, Homo sapiens; identical to SEQ ID NO: 2431
  chr3:24563200-24563254
  hyper

SEQ ID NO: 38999 - DNA, 30 bp, Homo sapiens; identical to SEQ ID NO: 2432
  chr3:24563670-24563700
  hyper

SEQ ID NO: 39000 - DNA, 486 bp, Homo sapiens
  chr3:24870690-24871176
  hyper
gaaaccccactgggccgtcgtggctccgcgcggttgcgggccagcgtggagaggcgggacgtggcgcccgggggcggggcctggcgccagggggcggggcgcagcgagccgggctcccgctgtctgctctcagcggcggcggcaggggctgagggcacagccagcgggcggcgcgccgcggactccaaggcagcccgccaaaaggtaaagccaggagagcgcgctggcgggtcttcctgttgggtggctgctgtccaagcccctagcgtccccggagccccaagctgggtctggaagaccagggcatttgcatggcatccagggaccggctgcctagcagggattttgcgtgtaccgcggcggggccgggggctgggggttggggggtctgcagcgggagcccgcgaccgatcccaggacatctggactcgcggacaactttgcgcagcagtcctcttccaagttccctttattgctattgtctta

SEQ ID NO: 39001 - DNA, 194 bp, Homo sapiens
  chr3:24871245-24871439
  hyper
cgtgaacccaggagtcgctggcaagttgcacctgccagccggatccgccccggctcccttcgcgtccctgccgggtccagcgctgtcctgcgcaccttagggctgggcacggcgaaacctggcgcccttgggagcagaggttctcgctccattcccctgtggggatctaagctccaggccggggtgtcggacct

SEQ ID NO: 39002 - DNA, 30 bp, Homo sapiens; identical to SEQ ID NO: 2435
  chr3:24871688-24871718
  hyper

SEQ ID NO: 39003 - DNA, 30 bp, Homo sapiens; identical to SEQ ID NO: 2436
  chr3:24871933-24871963
  hyper

SEQ ID NO: 39004 - DNA, 672 bp, Homo sapiens
  chr3:25469353-25470025
  hyper
gtgtgggctggggggcgaggcggtgggcgggaggcgagcgggcgcaggcggaacaccgttttccaagctaagccgccgcaaataaaaaggcgtaaagggagagaagttggtgctcaacgtgagccaggagcagcgtcccggctcctcccctgctcattttaaaagcacttcttgtattgtttttaaggtgagaaataggaaagaaaacgccggcttgtgcgctcgctgcctgcctctctggctgtctgcttttgcagggctgctgggagtttttaagctctgtgagaatcctgggagttggtgatgtcagactagttgggtcatttgaaggttagcagcccgggtagggttcaccgaaagttcactcgcatatattaggcaattcaatctttcattctgtgtgacagaagtagtaggaagtgagctgttcagaggcaggagggtctattctttgccaaaggggggaccagaattcccccatgcgagctgtttgaggactgggatgccgagaacgcgagcgatccgagcagggtttgtctgggcaccgtcggggtaggatccggaacgcattcggaaggctttttgcaagcatttacttggaaggagaacttgggatctttctgggaaccccccgccccggctggattggccgagcaagcctggaaaatggta

SEQ ID NO: 39005 - DNA, 30 bp, Homo sapiens; identical to SEQ ID NO: 2438
  chr3:25824884-25824914
  hyper

SEQ ID NO: 39006 - DNA, 145 bp, Homo sapiens
  chr3:25825434-25825579
  hyper
acccggatccctttgcgctccggggccagcctaattgatccagctattaaggtggagaaaccgcatgtacctccctcctttccccacaaataaaaccaccttagagccttctcttcgcagattgtcaggacgttctacatagatg

SEQ ID NO: 39007 - DNA, 30 bp, Homo sapiens
  chr3:25825791-25825821
  hyper
ccgcgtggtgaccagcgtaaaacacatgca

SEQ ID NO: 39008 - DNA, 988 bp, Homo sapiens
  chr3:26663870-26664858
  hyper
aaacactcatttgtcgaattgattttaagcctccgcttttcccccaaggagggcaatcaatcccttgcacgttttgctcctttcaccagcttaattcagctctgatctcagtagttagaaaaataggagaaagaatggggccatagcctgctgcaagtagagctgtgtaagggggtgcgaggaaggcaggcgagagcagcagagggagttaatactcctacctcagctggtctccggcagccaacgctcagcccccgcctcctctctccattccggaccccgcaaccgcgaggcgagagagcagcgccggcgaggcactggctgggctctgactgtcacgttaattccctgctgctttttctagtccccagccgcctcgcccctcctccctcattcccagcctgggtttggaggcgatttccctctattgactgagccgactgcatctctgggcaagcggcgctttgcctctctcctgtctttgtctgctcttcctgcaaggctacggcgcctggagcagggtctgcagcggccgccgcagcaacgcgagccaagtcgtgccccgcacggccgcccggggccgcaccctcgctcggtggcggcgcccgaagacgccagccgcgccacgcactgcctgcgtcccgcgccccagccgccgcgcaccaacgccgccgccttcgccgggagccaagcccgccgggccggcccggtcccaggtgggcagctcggcttgcagctggttggaggtggcggccgctgcagccctggcagcgggcacacccctaagcatacgcacccaacgcctcctccctgagccacgaggatggagcagccaccccggcccgggactggcgcaaggtaaggtgcagccgcctgttgcttttcgcagagcgcgggatcatccctctgcccgggtacctaggccgtccctccaaggaacaagtagaggagaactattacaccagttctaagccgtgcctgtctaagc

SEQ ID NO: 39009 - DNA, 788 bp, Homo sapiens; identical to SEQ ID NO: 2441
  chr3:26665112-26665900
  hyper

SEQ ID NO: 39010 - DNA, 466 bp, Homo sapiens; identical to SEQ ID NO: 2442
  chr3:27410376-27410842
  hyper

SEQ ID NO: 39011 - DNA, 279 bp, Homo sapiens
  chr3:27410882-27411161
  hyper
cgttggttttccaatcaaatcctcctccaggccaccaaccagcgctggccaggccaatgccgacaattcttcctccgccacctggggcgcctcagccaatcgggagcagccatgctgcgcagtgcagaacgccatagcgacggatgacgcctgccggggaatcgccgtagcaaccagagacgcgctagatccaccaccaagcttgcaagcagaagaggcagcaagtgatgctgaaggctgtgctgcagccacttcaccggaacctagagctacctgtga

SEQ ID NO: 39012 - DNA, 30 bp, Homo sapiens
  chr3:27415997-27416027
  hyper
caagcagttaattacctaaacatgagttac

SEQ ID NO: 39013 - DNA, 30 bp, Homo sapiens
  chr3:27525499-27525529
  hyper
tctgcctcgccccgcgccctccccctgcgg

SEQ ID NO: 39014 - DNA, 828 bp, Homo sapiens
  chr3:27754316-27755144
  hyper
acttcagactgtccaagatatcgcttagctcctgcgcccggaagaaaatccagcgcaggtcgggttccggcgcgcggaagccctgcgaaccccaaatgtgtgcgctgagccgaggcctctaagcggtaggagagaatctgacctccgacattcttttcaagacacgcgccggtggaccgggtcctgggattggcttactcccgggctggaccttggggttcgcatatttgaaagcgtaaacttgaggaatgacggcggggtgatgggtattttatagagtgggactcaatcgtgctcagcaacagatttctccaaattcccttttaaaaagagcctcccagagctgtcgaaatctccgcggggtgaaagctaaacttttggagtcgctgtgtagccgggtagaggacacggcggcgcgagccggaaagataagtgtccaggcgaatgggaaaggaaagatcttaatttttgttcctactgttagctgaatgtccataaaaatcaaagggaatgcggggaagtttttattccagagcgtttccatgacacccgcagagatttaaaaaattacattcctccccctacgcaggtttaattcggaaagaagagactgcagaggagagggaagaccgtgagtctgctttcacctaggtttaaagcgaatcaaagacggctgtaaaaagggaaaccgggaccaaaaacagatttggagcctcgaaactctccattgaaggtttggaagatacgttgctgcagacttgaaaccggctccaaatccggcccaaacatgggctgaaaatatggcgcgctaatctgctgcttcccctc

SEQ ID NO: 39015 - DNA, 30 bp, Homo sapiens
  chr3:27755665-27755695
  hyper
actaggagaccctggcggagaatgtaaaca

SEQ ID NO: 39016 - DNA, 1046 bp, Homo sapiens
  chr3:27755955-27757001
  hyper
aatctgctatatcccggcagtgattagcactttggggctttctagagggcagaaataggagagcactgttttcgaaattccatcgcatctcccaatattcggtggttggatgcagatgtaagggggctgttgggggtgtggggaaggcgctgaccaggataggggggctatgagtctcccttccggaatctaaatcagtcatccacagtacatatatcttaaaaagcacatcttcaacgcttttgtccttggctccccggtaaagttcggggcgcctttgccaaagtgttttgagtaggccgttcggaaacgcggagcaggagttcgagcccccaaggtcacgggtggcgcgggaagaactcgggccccagagggacggaggggaagggagacaggacagtcgaggtacaaggtcctggcggccttaattgggcgcagaaggggaggaggtctcggctgattgctcgcctcccagcagctaatcctcttagcagctgcatttccgcgctacacagttagcagaatgatcctcccagctagacctttaccccgggagggtccaggagggggctggaaaggtttgcaatctgggcctgaagccgtctgcagataagcctggcgggacgtctggctggggggacaaaggggaccctccaccccactctttggacctcccagggttcagccaggggatgggctgtccttcgtcttcccgtggagcgtgggccaaataaacggaactaagcgcaaggtgaactgctccaaggtcactgtttgcagagcggcagtgcacggaacgactggaatcctcctttgtaagtgccacgcccgtccctagcctgcgcctcagaccgagtccgggcggagtttgactgcagctactgaggccggcagccggcggcggcgggtgcgcagcgtctgggttcagaagaaagccgcaggtgggcgcagaagctgagctgtgtgcagccccccgctccgccgcgccccagggaccctgaactggtgggcgctcaaagggccacgggggttcccagggagcctag

SEQ ID NO: 39017 - DNA, 1678 bp, Homo sapiens
  chr3:27762337-27764015
  hyper
tatcagaactttctcgcgcaccgaacccgagccaggtctggctccagggcagatctaaccacctactccgaccgagcttccgaggccggcgctctagccttcatgcccacctcccggagacgccccgtggagaccctggcgcctaaaactgcgggagcccatctactgcgctcaggtggccagctcttgagccttccctatccgtggctccttgccggcatgcaggcatgcacaagcataccgccgagcaggaggatctaacgaatccagcttgtggacatgccctaatttccatttccgcctcctccaggtctgttcaggtgaggatgatgggagggaaaagcggtgtacagccgtaacattggcaccctgcaagagccgccggggcactgacacagagggacaccgcattggagatgcggtgtctacggagatttattgcgcgcggtgaaacactctaagcaccgcgcggaacaactgggttcagctccctcatcccggaccttccccaggaccacacgtcaccctttatccccgaacccaggggcccctccacgctgcgctcacctgccctgtttcgtaatgatcatctcagtttggtggcggtggaatttgagccacagaggccggttgcacaggtagacgtgggcacggaagccagaacctggaacccccaggccccccagtcctccgcaagatcccgccgctgcggctccagggtacggcccgtagagcggagccccctggctgtactgataggtgcccgggccgccgcccccgccgctgctaccgcccgcgccactgcccgcaccggctcctgggccgaactgcgccctcccgggtgggcacacagccgcggggaagccgccggggggcagcatggagccgtaggggtagcgcgccccgttaggagccgggtacacaggtccgtggggcgccccagccgccgcctggtacgggaagagtgagcagggcgcagccagctccgacccctgaggaccgggggactggaggtagtaccgctcggagctcaggctgtccatggagtagcgcgcagtggccgcagccgcggcggcggcggcggcggcggctgcagcggcggagggcagctcctcctccccgcagggggagcccttgcggccgtccgggggccccggcttggccactgccgcagcgctggcaaatgcgtccccggcgtcggtgtcactaagcatggccgcgggggcccctgcgctggcggctgcgggctccccgctcaccgcctcgcaggagagactgccggaaaacttcttggacgctttgtctaagtccaacttctgaggagagggggccgcgctggggaggtggccagcgctcccgccgctgccgcctcgcgcactctccagcgggtagaagtgcgcgccaggcaggttcactgagctcaccaagagctgctcccctaactgcatgctttgcaaagcgcagacggcagctggctgcttcctctcctccggtggccttattataaaggcaggatgggggagccagcgccctcttccgaggggaaggtaacttccccttcctcccgcgccggggctacccacctgccgactcgcgggccgctactgcgcgtactggcgcgccctgaatccagcgtcctttccggaaggaaagcgccgtgagttggaaagcaggaggt

SEQ ID NO: 39018 - DNA, 13 bp, Homo sapiens
  chr3:27764458-27764471
  hyper
tggggtctccata

SEQ ID NO: 39019 - DNA, 358 bp, Homo sapiens
  chr3:27764595-27764953
  hyper
cgtcccggaggctggggaaactggggcaagttggagacaggcccaaggaagtctctttcctcgtcggaagctgtaacttcaaagcacaccttcctcttgtcgaaggcaaactccctggccttcaacgcacagaaccactttttgtttgttcccatccttttacccagtgggaaaggtttgtagagaggaaactcgcgctaagcttttgggattccggggacggccagagcacattgccatcctggaggacctaagctctcagcttctaaatcagaagcttggacagggtactggggacaggacaagagtgaaactaagcgagctaacaccaacttcatactcacgccaacacaactgc

SEQ ID NO: 39020 - DNA, 151 bp, Homo sapiens
  chr3:27765210-27765361
  hyper
agatagattcaagagcggggccgtcatattttatcgtttcattattacggaagcggggggcacgtttcgttgcggataaggagaagcctgaatattcgctgttaataagcaattacagacgccgccagtaatcgctccgggagcgcatttt

SEQ ID NO: 39021 - DNA, 160 bp, Homo sapiens
  chr3:27765400-27765560
  hyper
cgatcacacgggaaactcttcgcccacaacagatgagatggccaaaggattgctgagtgcgcacacgcaagtgtagaacagtgcgaagctttccaacccagttttccaaccacagcagcaccaacatcggcatgtctggggtctccgagaacgaggtcct

SEQ ID NO: 39022 - DNA, 574 bp, Homo sapiens
  chr3:27771499-27772073
  hyper
tcctgcatgaaagcgcgctctaaagctagggtttttggactttaggagcgcttctcgcctccccctagacgtttgaagccttccaattgagcaagggctgggaagcgagaaggctcctctggtctctccctcctctgagcgcgggacctcggcggacaccctaatcccgaaacactcctctctgggactgcgcacttgccagcacgacagccaactccgcctcagaggagtcttttagggctctgagcgagtggcgaatgctcccccggtgatgcactatcgctcccacccacgccctggtacgcgcagcccgggaaaaagaaaaaaaaaagtccacgtaggggctcaaacccaggcgtcaggcgctgcagtcagggaaggctcccttaggggctgggttcctggcgcttacgacgcagagaaggataagggcgatggtttcgcaatcccaccccctcctttgtcctcctccccacctcccagcctttggcggcttagatctccaaatgcagtctggatggcactcaggtattcgagcgccccagtttatcttatcaccgccccctacaaatac

SEQ ID NO: 39023 - DNA, 211 bp, Homo sapiens
  chr3:28282838-28283049
  hyper
tgggggacggggctcggactttggcccagtcaccgagtgaggcacagtcccaaagtcctgcaggtccgcctccagtcacggccgacccgggtctgcaactggtgcacaagcctcctgaagcgaggctgcgcgcgtcctgcacggtcccgccccaaaggcacgcagacacgccccctttcctggtcattccccctgcgaagtcagttccact

SEQ ID NO: 39024 - DNA, 1733 bp, Homo sapiens
  chr3:28616515-28618248
  hyper
aagaatttccaaggctaccctcgccatctctatttaaatttatagacgcaacgcactgcctgccctggggtcaccaccgaagcctcctggtggagccctgccctgctgaggacgctcttccagcacagaactcaccaccaaaaagagacggcgcccagctggcgcccgccccgggcacattgcagtaaatgcctggcagcgacttctcgcttctccttcctcctaccccatcgaccctctgttgccgacctttacgccaaactccggcgcgccgcgagactcgcgtcctcgctgtccccgaggggccccaccccttcccggttctaacctgcgacctggccagaggcaagggtaggtcgacttcctgcccggaatttgccgttggcttctccttctctactccagttctttagtgcagggctgtgcggcgcggagccgccagcggcagaacagaccccggagcggagctctgggatacacacacgcgcagcccggagggactgaccccggaggcgcgctcggccgggagagggaggggaccagggccagcgcggaggcgggggtcacctggggttgggggtgggcgcaccagccctccgcacgctcctctctttctagtcctcgccgccaccacctcgcacaggtcggagatccctcctttccttggctcctttgcgttggggagggggtaaggctgagggtcggcgcttggtcagcgggcggggaaggtagatttcacttgcacctgagagtccctattcttgccagcttcgccgggcaaagcccggcgaccaggttggttcttccagcaactttgttcagaaggttggtagggaggagaaacgccaaggggccccaagagacgctggaaagcggctaggagcgtgggccgggctggagagcaagtacccaagcggccctgaggctgggagcgcggctgggaggcgccgccgccgccgccgccgccgccgccgggatgcgctctgcttagcgggactgccgggggcgcctgaaggccagcgctccaaggacacgcggccacccgctcctcgcgcaccccggcccagacgccgccagggccggagccaagcaggcgagcggagctgcggggagcgggggcgaagggtggcagaagggagggcgcgcgggaggcggcccctcctcggcgagccatgcgtgccacgggcagctgagtagctgccgggcgccgctgccaagtctccactccgcttttgtcttgccctccagtgaatgggaagatggagatggatgttgagggagtttctccgcgcccggagcccatcccccgctcccagggggctggcggagcctgccaggcgccgccacagccgccccagccccagccgccgcctcagcagctggctcaggatgaactgcccggcgagagtgcaggcgctgaggacagcgacgatcccgagacgagacccaacggcgagaaaggagagagcaaggtaggtccacagtgttggcgctgtgataccttttgaacaaaaccaaggagttgctgtcgtggctgtcactttaacccctccgctccccaacccccttccctggtttgtgtgggggtgggggtggcagatgtgaagaaggcttaagatttaagggaatccatgggcgatagtgactttccgaactggagggtatgtgcagaagtctgtcctggtttcagtgttcagcggtgtgtgcagagaaaagtcgtctggtacatgcgg

SEQ ID NO: 39025 - DNA, 162 bp, Homo sapiens
  chr3:29322327-29322489
  hyper
tccagcggcagcagcgttgctgcaaaaatcgcttgctattcgagatagccagcagagggaatcggaactttgcttgcagcaggggttgaagcagcctttttttttttttttcttggaggaaatactgcagccttctggactgcgtacgctgctccctggaga

SEQ ID NO: 39026 - DNA, 30 bp, Homo sapiens
  chr3:30648083-30648113
  hyper
gagtgagtcactcgcgcgcacggagcgacg

SEQ ID NO: 39027 - DNA, 228 bp, Homo sapiens
  chr3:30648804-30649032
  hyper
gcagcggcccggagcggcagcctgagctgccaaagcagccagcgcacctgggccactccgcccatggcgatgccgcgtgcccacccagctctttctgagccacccgttcaaaaggccagctcctcagtccttagctcctggagacggccacgctttccctcaggccggcttcttggcccggagtttttggaaacaagtttcaagaaaataatcgatttccaaaagaaa

SEQ ID NO: 39028 - DNA, 30 bp, Homo sapiens
  chr3:30682923-30682953
  hyper
cctggaattgttaaggtggggagtctccta

SEQ ID NO: 39029 - DNA, 30 bp, Homo sapiens
  chr3:30804983-30805013
  hyper
actccgtctcggcggcggggggtgggggtg

SEQ ID NO: 39030 - DNA, 30 bp, Homo sapiens
  chr3:31064170-31064200
  hyper
acaaataactaagttcggtggatggattga

SEQ ID NO: 39031 - DNA, 30 bp, Homo sapiens; identical to SEQ ID NO: 2458
  chr3:31575314-31575344
  hyper

SEQ ID NO: 39032 - DNA, 161 bp, Homo sapiens
  chr3:32148436-32148597
  hyper
ggaggcgctgggctcgcgtgcgtgcgggggacagcgcggagagagggcaccccgagcacgcgggcacctgtctgcgcccccgttactgagcgcacagaagccacctgcttgccacgcctgggtgttttgcacaatatcctaagggcgtattccgttctcca

SEQ ID NO: 39033 - DNA, 30 bp, Homo sapiens
  chr3:32280465-32280495
  hyper
tggaggagccgcagcgcgcccgctcgcaca

SEQ ID NO: 39034 - DNA, 1089 bp, Homo sapiens
  chr3:32433046-32434135
  hyper
cacacatccgcagccgcacccacacaaaatcccaggaggctcagtaccagctgtggtccgggccttgcccacctcggagaggccacgacccaaggcatccggtttcctctcgctccagtctaacttccgcgcatctacgagggccgggactgccgctacctttctggaaggcgccggccggccagtcaccggagggatcccgccagaggcggctccgcgtctccagcagcggggcagggacccgggcgccccgccctcgccagcgcccgcccccgcccgcccccggcccgccctctgtatctggcccctgggcagctgcccggggaggcggccagcgagctggggccgcgcaatgtcgcacggagccgggctcgtccgcaccacgtgcagcagcggcagcgcgctcggacccggggccggcgcggcccagcccagcgcgagccccttggaggggctgctggacctcagctacccccgcacccacgcggccctgctgaaagtggcgcaaatggtaagtgagcgcggggcgcgaggccgaggttctacagggcgtcccgggaaagcaggggtccgggagcggacgcgccgggcgtctggacccggccggagcccagggagcatcgcgcagcgggcggggcaccgcgtcgctaaagttcgcggcaggcttcctccgggaaagttgctgccgcagcccccgcgctggagctcagtccccagagccgccccggcccttgctcccgcggacccaggtcgccagggtcgcaagtttctccggccacccccctgcgaagcctgacccgcctactgactgaaaccacgggcaaagttccttttcgtctttcttcctcttctctgggccgcgccgcttcgaacccgagccgggggtggaagagtcgcccaggcggcggcgctgagggagcgaaacccgacctcttccccgtccacggcctcctctttcctccgaacccagcgcggcagggcttccctgctctgtgtgcagtttcgctcgaaggaggaggtcagagggtcttgtgttccatagtggggaaaaagaactgggaccgttgagacggccgtcctggtcccctg

SEQ ID NO: 39035 - DNA, 173 bp, Homo sapiens
  chr3:32442877-32443050
  hyper
ccaggctgcaggcagccagggcgtaagtgggtagaggaggggttcggggtcggtgtgagccccataggttttctggcactgcaggggccctagagaccccggccccgcaagcacgccaggaccctggaatcctaggggattccctgtgtgggccggtgtatttatttaaattc

SEQ ID NO: 39036 - DNA, 413 bp, Homo sapiens
  chr3:32443152-32443565
  hyper
cgcgccgggcccagcgtgcggccctggaagcctggctcggccgccgcccgcgcacgctggccttctttgttactactttggctcagtggtttcctgggctcgctgctcattccctggcagggctcgcggcgtccgcggcgactcctgggatcggcaggggcctggcttccagcccagcgccggcagcagcccgggggctgcggagcggaaagggggctgggacgcggtcactgctccagccacccggcgctcctgggcggaaatcgcgagcagagcccttctcagcctcctgcagaaaacgcgcctcacctgacttgtgtttaaatcagcaagggcagtgacgcggctcttccttttcctggggcagtcactctcctccctctgctgagcccgctctctttagtttactttaa

SEQ ID NO: 39037 - DNA, 83 bp, Homo sapiens
  chr3:32612693-32612776
  hyper
gttcaggctgagagcggtcccccgcccaaaccggcgcttcgccggcgccaagatagaaatgggtcgcccggctggtaaagagg

SEQ ID NO: 39038 - DNA, 30 bp, Homo sapiens; identical to SEQ ID NO: 2464
  chr3:32668904-32668934
  hyper

SEQ ID NO: 39039 - DNA, 30 bp, Homo sapiens
  chr3:32726507-32726537
  hyper
aaaggacagacgcgcgtacgtcccaccgcg

SEQ ID NO: 39040 - DNA, 30 bp, Homo sapiens; identical to SEQ ID NO: 2465
  chr3:32726754-32726784
  hyper

SEQ ID NO: 39041 - DNA, 916 bp, Homo sapiens
  chr3:32858042-32858958
  hyper
ccccagccccctcccagcactcgggcggaagtgagtttgctcctttggagattaaaaggattccgaattccgatcagtcccaataaccggcgtactgaagagaagaggaggaggaggaggaggcagaggcggcaaagcagagaaagagggggcgcgcgcgcgcgcacgcaacccgaactgggggagttgtgcaaagccccaggaggccggggcacggcgggagcaaagctcggtaggcgcagcgcggccgaggccacccgcgtccggatcggcgactcctttcagaaagaagatgacgcgggcgcgagccggcggcgttggccacgcggctcccgagctcgccgcgcggggctgttgccggttccactgattccagcgcgcccgagaggagcctccatccccgaggctcgggatcggaggggggaccaaggcgagggcgaaatggcccgatgacaaaggaaatgtgatcccccttctctgccaaggtttcagagaggacggacgtgaggaggaggaggggcgcagggcgcgcgcggagctcggatagcattgcacgacggcccgcgcggagcgggtacatctaatatcttcctgccgatgaataattcagggcggcccgcggggacctgcggccccgcgcgctaagccgaaggggaaggagcgtgcgtgaggcgcccaggccaggcgaggcgggggcacgagggctccgggccgcgtggggcgcgcgtgcgtgttaagcgcgggcagccgcggcccggctgggcaggcgcgcggaagactcgaggcgcgtgggacgcgcgtgcgtactgcacgcgtgcggccgcggctgggccaccacgagctgcagctgctgcggggcccaccgccctgcaggggaggccgtgcctggctgtgcgcaagccccaagcgcagcacg

SEQ ID NO: 39042 - DNA, 29 bp, Homo sapiens
  chr3:32859255-32859284
  hyper
cgctcgcccctcgcctgtcggggcttgtt

SEQ ID NO: 39043 - DNA, 805 bp, Homo sapiens
  chr3:32859417-32860222
  hyper
gggcagcgctgctctggtgccggctcccggattgcaggcctaatcgatgcatttttctgagtgagtcggtgactcccccacccacctcgtccgctctctcctcctcctcctcctcttcctctctggtctcctccctcctccgggctgggttgcaaatggcttcgttccccgagaccgatttccagatctgcttgctgtgcaaggagatgtgcggctcgccggcgccgctctcctccaactcgtccgcgtcgtcgtcctcctcgcagacgtccacgtcgtcggggggcggcggcgggggccctggggcggcggcgcgccgcctacacgtcctgccctgcctgcacgccttctgccgcccctgcctcgaggcgcaccggctgccggcggcgggcggcggcgcggcgggagagccgctcaagctgcgctgccccgtgtgcgaccagaaagtagtgctagccgaggcggcgggtatggacgcgctgccttcgtccgccttcctgcttagcaacctgctcgacgcggtggtggccactgccgacgagccgccgcccaagaacgggcgcgccggcgctccggcgggagcgggcggccacagcaaccaccggcaccacgctcaccacgcgcacccgcgcgcgtccgcctccgcgccgccactcccgcaggcgccgcagccgcccgcgccttcccgctcggcacccggcggccctgccgcttccccgtcggcgctgctgctccgccgtcctcacggctgcagctcgtgcgatgagggcaacgcagcttcttcgcgctgcctcgactgccagga

SEQ ID NO: 39044 - DNA, 36 bp, Homo sapiens; identical to SEQ ID NO: 2469
  chr3:33137819-33137855
  hyper

SEQ ID NO: 39045 - DNA, 30 bp, Homo sapiens
  chr3:33138261-33138291
  hyper
cggccggagcggaacgcacaagcgaccgag

SEQ ID NO: 39046 - DNA, 30 bp, Homo sapiens
  chr3:33138967-33138997
  hyper
ctagatggaatccgcgtctcatatacgggc

SEQ ID NO: 39047 - DNA, 140 bp, Homo sapiens
  chr3:33155229-33155369
  hyper
tagattatatagaccgtagggccgatgtatataatctattagggccgcgtcggccttgcaggcgggtctccaagtgaatgagcggcagagtcccatcatgcgcatcagcctgcgtgaaccagtgcgcagcgcgcctttcc

SEQ ID NO: 39048 - DNA, 1076 bp, Homo sapiens; identical to SEQ ID NO: 2471
  chr3:33259727-33260803
  hyper

SEQ ID NO: 39049 - DNA, 171 bp, Homo sapiens
  chr3:33318844-33319015
  hyper
gggcaccgcccctgcgggtcacgtgctcgccgaccaccaatggccgcctccgagcccaccttggggacggggcggggcgcctggctggcgtcaccaggacaacgggcgtcgccggcgccgtgtgacttcgggctgtgggctcgctcgcggctcttcggccatggtgagtct

SEQ ID NO: 39050 - DNA, 30 bp, Homo sapiens
  chr3:33482796-33482826
  hyper
ctgctggcgcttgacgggcggaatccttgc

SEQ ID NO: 39051 - DNA, 30 bp, Homo sapiens; identical to SEQ ID NO: 2472
  chr3:33758841-33758871
  hyper

SEQ ID NO: 39052 - DNA, 30 bp, Homo sapiens
  chr3:33759917-33759947
  hyper
gggcaccctgccctcgccctgtgaaatgtg

SEQ ID NO: 39053 - DNA, 30 bp, Homo sapiens
  chr3:33840454-33840484
  hyper
ggttgtctgccagccgtcgctcgccgctcc

SEQ ID NO: 39054 - DNA, 14 bp, Homo sapiens
  chr3:35680720-35680734
  hyper
accgcgggcgcccg

SEQ ID NO: 39055 - DNA, 912 bp, Homo sapiens
  chr3:35680814-35681726
  hyper
cgtccggctgccgccacctcccgggtgtggcgggtctggggcccggggtctccggccagagcagctgtggagccacgtgcaacacgcgcgttgccctcagcccgggcggggaccggacgcatccggagctgcggggaggagccgggcgccgcccccggcggcagtgccagccgcgtgggagggcacggaccggcggaggggcagacgacggaggcggccaagctggaggaacgggaccgagggatcgaccgaggctggctggctaggggtgggactggcagagctacggacaggtgggagcagtcagacagcctgagagagggagaccagaacgcaaagagagcgagagcattaagtaggcagggagaggcacacagaaagatagacagcaacactcgcgtgctccctccctccacacgccctcctcttaccgagcgaagcggccaggggcacagagtgggagaggactgtgggcacagaagaccggaagagggacgctgcattgctggtgggacggagggattcggacggacggacagaccagcgcacagactggcagcctgcgagagtggcagctttgagagcagagcgcagcaaagcgagaatcccgcgccgagctgctagtcggacccacagacggtcggactgacagacgtgcagacggacagaagagcagacaggaggcgggggcgcgttcactcccggcggccagccggccagagaaggcggcggtggcaccttctgagcgcgtccggagcagagaccagcagcagcaggggcagcggggacacaagccgcgaccgagccgccgccgcagccctggctgccacagctgtgtgggatcccagccgacactgcagaaagctccttttactagcagttaaataaatcgaccaaaaacaaaacaaacaa

SEQ ID NO: 39056 - DNA, 30 bp, Homo sapiens; identical to SEQ ID NO: 2475
  chr3:36421688-36421718
  hyper

SEQ ID NO: 39057 - DNA, 89 bp, Homo sapiens
  chr3:36805376-36805465
  hyper
caggaagggcccccctgctggcgagggaaataaaatcagctccggagagcgttattcccctagaaagcaggtttcaggtggtgtacacc

SEQ ID NO: 39058 - DNA, 12 bp, Homo sapiens
  chr3:36805524-36805536
  hyper
acacacagtcct

SEQ ID NO: 39059 - DNA, 423 bp, Homo sapiens
  chr3:36805575-36805998
  hyper
cgcacggagcggggtccagagttagggcgaatgagtcctcccgcccccgccaaggtggcgcccagaacgggtcggtgccggagcgcacggtactcacccggggcaggccgcgccgggcaggctggggctggccgggccgggggcggcggcggctgcggggctggagtggcggcgggcatggcgcggcggcgggctcggggagagcctggagcagaggtggcagcgcggggacgcggctcgacggtcgagcaggcgcgggaaggcggggcgagacgagcagccacgagcccgcgccgactctccctcttctctccctcccgccgcccgccgcccgcctgccagccccgcgccgcgcagcgcccggcgacagccaccgggaacgtctccgggggcgcgggacttagcaaccgcgcaccagctgca

SEQ ID NO: 39060 - DNA, 1091 bp, Homo sapiens
  chr3:36985602-36986693
  hyper
gctccggttcggaaacgctccgaggcagaagcaagggcttctaagggctccgcttcccagccttgggtccctactactaccttccccctagactcggtgagcccaggctgatggaccgtgcagtccagtttgagccagcccagcagccctcaatcgggcgggcagggaagaaggcctcctactgccgggaagaggccagcgcgctccaagttccccgcaaattccgcccttcccgcctggcacggttcccttgcaccgctgtgctccgctcccaggtttctgcccgccaagaatgcttgccccgggggcgcgctcgctggtcaggaacctgtcggcagcccccgggaacccctgaggatgcggaggtgggcccgagagctgcggcttcgatgccggggtgggagctaggcaggccgcgcgccgccgcagtcctgtcgcagcgcgtgccctggtccctccggaccgaaaaggccgaagccgtcccccgcgaccgaccccgcgcaactggctcgggtctgcacctagatggctgtgggccccacagggatggccgggcgggcccgttcggccgctacctcagggtcgccagtccccgcgcgcggccgcctcccgccaggaagggtggcgggcccggaaggccagagatgccccagtgcttcccgcgccgctacgcacctagctgcccgcgggtcccacatggctgcggccggagggtccgcaccaggaccgccgccgcctggggaagcgcttccctgtgggcagggcgcggcgggcagtgcggaagcccgaaagctaccggagcccggggcaggggcggcgcgatgcagaggcggcgttcgggggcccccagctgcctgcggctcggctacccagccgcgatcagagggggcgggggacgcaggaaccccggcgtccgggcggtgtgcagccgcagacctattccaagtttccacgtagttgcgagagcccaaaaactgtcacgtgcacgtcgctgctgagtgggaggaggtgtttgtcatcgcgttcaaaaggggcgtttcggtgtctcccgtcatgcaagcaaatggtatggctctcggccgcctttgaat

SEQ ID NO: 39061 - DNA, 1447 bp, Homo sapiens
  chr3:37033966-37035413
  hyper
tcagggcctacaccgcggataaagaccaggaggtagttctcataggccacaaaagcctggtcgtccaaggcaagagaataggctttaaagtccctggctcggttaaaaagctggttgcgtagattcctgtcaatgctcaggatcctctgccttgtgatatctggagataagtcaacgccttgcaggacgcttacatgctcgggcagtacctctctcagcaacacctccatgcactggtatacaaagtccccctcaccccagccgcgacccttcaaggccaagaggcggcagagcccgaggcctgcacgagcagctctctcttcaggagtgaaggaggccacgggcaagtcgccctgacgcagacgctccaccagggccgcgcgctcgccgtccgccacataccgctcgtagtattcgtgctcagcctcgtagtggcgcctgacgtcgcgttcgcgggtagctacgatgaggcggcgacagaccaggcacagggccccatcgccctccggaggctccaccaccaaataacgctgggtccactcgggccggaaaactagagcctcgtcgacttccatcttgcttcttttgggcgtcatccacattctgcgggaggccacaagagcagggccaacgttagaaaggccgcaaggggagaggaggagcctgagaagcgccaagcacctcctccgctctgcgccagatcacctcagcagaggcacacaagcccggttccggcatctctgctcctattggctggatatttcgtattccccgagctcctaaaaacgaaccaataggaagagcggacagcgatctctaacgcgcaagcgcatatccttctaggtagcgggcagtagccgcttcagggagggacgaagagacccagcaacccacagagttgagaaatttgactggcattcaagctgtccaatcaatagctgccgctgaagggtggggctggatggcgtaagctacagctgaaggaagaacgtgagcacgaggcactgaggtgattggctgaaggcacttccgttgagcatctagacgtttccttggctcttctggcgccaaaatgtcgttcgtggcaggggttattcggcggctggacgagacagtggtgaaccgcatcgcggcgggggaagttatccagcggccagctaatgctatcaaagagatgattgagaactggtacggagggagtcgagccgggctcacttaagggctacgacttaacgggccgcgtcactcaatggcgcggacacgcctctttgcccgggcagaggcatgtacagcgcatgcccacaacggcggaggccgccgggttccctgacgtgccagtcaggccttctccttttccgcagaccgtgtgtttctttaccgctctcccccgagaccttttaagggttgtttggagtgtaagtggaggaatatacgtagtgttgtctta

SEQ ID NO: 39062 - DNA, 92 bp, Homo sapiens
  chr3:37038108-37038200
  hyper
gtttagatgcaaaatccacaagtattcaagtgattgttaaagagggaggcctgaagttgattcagatccaagacaatggcaccgggatcagg

SEQ ID NO: 39063 - DNA, 100 bp, Homo sapiens
  chr3:37042444-37042544
  hyper
gaaagaagatctggatattgtatgtgaaaggttcactactagtaaactgcagtcctttgaggatttagccagtatttctacctatggctttcgaggtgag

SEQ ID NO: 39064 - DNA, 75 bp, Homo sapiens
  chr3:37045890-37045965
  hyper
ggctttggccagcataagccatgtggctcatgttactattacaacgaaaacagctgatggaaagtgtgcatacag

SEQ ID NO: 39065 - DNA, 74 bp, Homo sapiens
  chr3:37048480-37048554
  hyper
gagcaagttactcagatggaaaactgaaagcccctcctaaaccatgtgctggcaatcaagggacccagatcacg

SEQ ID NO: 39066 - DNA, 93 bp, Homo sapiens
  chr3:37050303-37050396
  hyper
ggtggaggaccttttttacaacatagccacgaggagaaaagctttaaaaaatccaagtgaagaatatgggaaaattttggaagttgttggcag

SEQ ID NO: 39067 - DNA, 281 bp, Homo sapiens
  chr3:37053309-37053590
  hyper
ggtattcagtacacaatgcaggcattagtttctcagttaaaaaagtaagttcttggtttatgggggatggttttgttttatgaaaagaaaaaaggggatttttaatagtttgctggtggagataaggttatgatgtttcagtctcagccatgagacaataaatccttgtgtcttctgctgtttgtttatcagcaaggagagacagtagctgatgttaggacactacccaatgcctcaaccgtggacaatattcgctccatctttggaaatgctgttagtcg

SEQ ID NO: 39068 - DNA, 114 bp, Homo sapiens
  chr3:37055921-37056035
  hyper
gagaactgatagaaattggatgtgaggataaaaccctagccttcaaaatgaatggttacatatccaatgcaaactactcagtgaagaagtgcatcttcttactcttcatcaacc

SEQ ID NO: 39069 - DNA, 95 bp, Homo sapiens
  chr3:37058995-37059090
  hyper
gatcgtctggtagaatcaacttccttgagaaaagccatagaaacagtgtatgcagcctatttgcccaaaaacacacacccattcctgtacctcag

SEQ ID NO: 39070 - DNA, 155 bp, Homo sapiens
  chr3:37061799-37061954
  hyper
gtttagaaatcagtccccagaatgtggatgttaatgtgcaccccacaaagcatgaagttcacttcctgcacgaggagagcatcctggagcgggtgcagcagcacatcgagagcaagctcctgggctccaattcctccaggatgtacttcacccag

SEQ ID NO: 39071 - DNA, 372 bp, Homo sapiens
  chr3:37067126-37067498
  hyper
gactttgctaccaggacttgctggcccctctggggagatggttaaatccacaacaagtctgacctcgtcttctacttctggaagtagtgataaggtctatgcccaccagatggttcgtacagattcccgggaacagaagcttgatgcatttctgcagcctctgagcaaacccctgtccagtcagccccaggccattgtcacagaggataagacagatatttctagtggcagggctaggcagcaagatgaggagatgcttgaactcccagcccctgctgaagtggctgccaaaaatcagagcttggagggggatacaacaaaggggacttcagaaatgtcagagaagagaggacctacttccagcaaccccag

SEQ ID NO: 39072 - DNA, 150 bp, Homo sapiens
  chr3:37070273-37070423
  hyper
gaaagagacatcgggaagattctgatgtggaaatggtggaagatgattcccgaaaggaaatgactgcagcttgtaccccccggagaaggatcattaacctcactagtgttttgagtctccaggaagaaattaatgagcagggacatgagg

SEQ ID NO: 39073 - DNA, 110 bp, Homo sapiens
  chr3:37081675-37081785
  hyper
gttctccgggagatgttgcataaccactccttcgtgggctgtgtgaatcctcagtgggccttggcacagcatcaaaccaagttataccttctcaacaccaccaagcttag

SEQ ID NO: 39074 - DNA, 65 bp, Homo sapiens
  chr3:37083757-37083822
  hyper
gtgaagaactgttctaccagatactcatttatgattttgccaattttggtgttctcaggttatcg

SEQ ID NO: 39075 - DNA, 166 bp, Homo sapiens
  chr3:37089008-37089174
  hyper
ggagccagcaccgctctttgaccttgccatgcttgccttagatagtccagagagtggctggacagaggaagatggtcccaaagaaggacttgctgaatacattgttgagtttctgaagaagaaggctgagatgcttgcagactatttctctttggaaattgatgag

SEQ ID NO: 39076 - DNA, 94 bp, Homo sapiens
  chr3:37090006-37090100
  hyper
ggaagggaacctgattggattaccccttctgattgacaactatgtgccccctttggagggactgcctatcttcattcttcgactagccactgag

SEQ ID NO: 39077 - DNA, 115 bp, Homo sapiens
  chr3:37090393-37090508
  hyper
ggtgaattgggacgaagaaaaggaatgttttgaaagcctcagtaaagaatgcgctatgttctattccatccggaagcagtacatatctgaggagtcgaccctctcaggccagcag

SEQ ID NO: 39078 - DNA, 362 bp, Homo sapiens
  chr3:37091975-37092337
  hyper
gagtgaagtgcctggctccattccaaactcctggaagtggactgtggaacacattgtctataaagccttgcgctcacacattctgcctcctaaacatttcacagaagatggaaatatcctgcagcttgctaacctgcctgatctatacaaagtctttgagaggtgttaaatatggttatttatgcactgtgggatgtgttcttctttctctgtattccgatacaaagtgttgtatcaaagtgtgatatacaaagtgtaccaacataagtgttggtagcacttaagacttatacttgccttctgatagtattcctttatacacagtggattgattataaataaatagatgtgtcttaacataa

SEQ ID NO: 39079 - DNA, 1039 bp, Homo sapiens
  chr3:37493090-37494129
  hyper
ccggagaccacacttcgggaatcactggtgtacgagaccaagtgactagaatatggaggggtgctctgctcgcttccacgtggctactattgttatgaacaacaacagccggcgtttactgagcactgctcctacagcttatctcacaactgggtgaaggagcagaggatgcgcagggctagaacctggagtctaaactcgtccttcacccgggttgctctggatcttactggttgtgagacagggagggaaagagagacaaaggcagggagacaggcccagcagggccggcagagcctgtagtgacggaggggagcagccttatctccgggaacccgagcgccccgtgcgcggcggggagggggcagttcggggcgccccggcgggtcccaggggctgactcccgcccgggaagtgcgcgcagggctcacggcccgcagggggcgctgccgcgccgtccagccgccgccgcccgggccgcccacctcgcgggcgcgcccctccgcagaccagcgccgcccggcccgggacccgctcgcgcagacttctcgggcggactgaggacgccgccgctcggggccgcccctgtgctcgccttcagcgcccgctcagcccgccgtccgcgccccggtggcgggcccgacgcccgcattccgcccgtgtccaggcgcagagctcccgccccggggagcttcctggccgtcggcgggccccgcggcccgcgcgctcggcgccctgctcgccgggcagaggggaaggcggcggccggctggggatgggcggcccggctgcgccgaggggcgccgggaggctccgcgcgctgctgctggcgctggtggtcgcggggatccccgcgggcgcctacaacctcgacccgcagcgccccgtgcacttccagggccccgctgactcgttcttcggctacgcagttctggagcatttccacgacaacacgcgctggtgagtgcccgcccgactccgcgaccctggcccgcgcggccaccgccccggcccccaggccagcgccgccgccgccttt

SEQ ID NO: 39080 - DNA, 1 bp, Homo sapiens
  chr3:37494424-37494425
  hyper
c

SEQ ID NO: 39081 - DNA, 30 bp, Homo sapiens; identical to SEQ ID NO: 2480
  chr3:37731246-37731276
  hyper

SEQ ID NO: 39082 - DNA, 824 bp, Homo sapiens
  chr3:37902014-37902838
  hyper
tgcccaccgacgtcgcgccctgtaggccctcccaggccctcctgattcgtggagagcgcgcgcgagcgctcctgccccacccccgagcccgccctcctgcggcactaccccgcccccccggcttacggggctgcagagtgtggcctgcaagttggaagcgcaggacgcgggcgtccaaaggccccgacgctcccaggctgaggaggcactttgtcgtctctcccacgctctggccgtcgtcctaggcctgacagtggccagctgccttgcacaagcacagtccctgccagacttggtctgccaccagcgccttccgctcttctgccctcgacggactcccccggtccccttgctgcacagcacccgaaaatgcccactgcccaggcccctctcagtcacgacaccctcacgtgcaggaggttggtccttcaggacccgccgcccctcacgcgggctctggggccgaatgctgacgcgagtcccgccagcatccgaacaacctgagcctctggcccggtccgcagactccctctctgcacagatcactcccgatcccgctcactcctgggacccctcaagctggggagcgcagccctgggcctctccgaaccttccccacgctccccggtctccatcacagcagcgccgcgcccgggcccctctgcgggccgtctgggtgtcactaccgctcctgggcagcccccacttctgcacaccgcttccctccgcactcacgtcccaggcccctcggttccctcgcctggacgcccctcgcccagcaccttcccgagacaccctcacagcacctccgccagcacttcccg

SEQ ID NO: 39083 - DNA, 477 bp, Homo sapiens
  chr3:37903575-37904052
  hyper
aggcagcggctgcgagcgcccccccgcgccgcgcccccgcgccccccgcgccgcgcccccgcgcgcttggcttgcggggggccgggcctgcgggcggccgccgcgccgcgcacccatggacggcccggccatcatcacccaggtgaccaaccccaaggaggacgagggccggttgccgggcgcgggcgagaaaggtgaggaggggcgcaggcggccgcgggctgggggcgagcgcacaccccgcgccgctggagttcactgccgggcgccggcatgggcctgggggaggggtgcacagggcccggagggtgcgtgggtgtggggtgcgcccggaggagagcgaggctgccagagtgcgtgtgccgactgagccagtgtgagtgtgcaggggctggcggagagactgggagcgagtgtgtgtgcatctaaccgggaggttgtgagtttgtgtgcgcgcacgcccgcagagaagttgtg

SEQ ID NO: 39084 - DNA, 247 bp, Homo sapiens; identical to SEQ ID NO: 2483
  chr3:38035773-38036020
  hyper

SEQ ID NO: 39085 - DNA, 30 bp, Homo sapiens
  chr3:38065521-38065551
  hyper
ccaggccacatacacggtgcctcagaaatt

SEQ ID NO: 39086 - DNA, 30 bp, Homo sapiens
  chr3:38070919-38070949
  hyper
ccctgtccagggcccggaacagctttccag

SEQ ID NO: 39087 - DNA, 30 bp, Homo sapiens
  chr3:38071151-38071181
  hyper
gccgggggtggtcccgggacaccgccccgc

SEQ ID NO: 39088 - DNA, 401 bp, Homo sapiens; identical to SEQ ID NO: 2484
  chr3:38080607-38081008
  hyper

SEQ ID NO: 39089 - DNA, 78 bp, Homo sapiens
  chr3:38081153-38081231
  hyper
cggacggtgccggggtctcagcgctcggcacgcgtcagcacctgccaggtgccaggcgctgttccaggatctggggct

SEQ ID NO: 39090 - DNA, 30 bp, Homo sapiens
  chr3:38178852-38178882
  hyper
tctttacgaatccccgcccagaaatgcaga

SEQ ID NO: 39091 - DNA, 83 bp, Homo sapiens
  chr3:38179800-38179883
  hyper
ccctcagattcctccgtggaagaactgtggctccaccagatcccaaaaagcaaggcccgtttcctacaacccccgaaggaggg

SEQ ID NO: 39092 - DNA, 147 bp, Homo sapiens
  chr3:38179984-38180131
  hyper
cgccccccacatcacccgcctcgagacctcaagggtagaggtgggcacccccgcctccgcacttttgctcggggctccagattgtagggcagggcggcgcttctcggaaagcgaaagccggcggggcggggcgggtgccgcaggaga

SEQ ID NO: 39093 - DNA, 30 bp, Homo sapiens; identical to SEQ ID NO: 2486
  chr3:38180464-38180494
  hyper

SEQ ID NO: 39094 - DNA, 30 bp, Homo sapiens
  chr3:38180825-38180855
  hyper
caggacaggtggggcgattgacagtggact

SEQ ID NO: 39095 - DNA, 30 bp, Homo sapiens; identical to SEQ ID NO: 2487
  chr3:38182009-38182039
  hyper

SEQ ID NO: 39096 - DNA, 55 bp, Homo sapiens; identical to SEQ ID NO: 2488
  chr3:38182281-38182336
  hyper

SEQ ID NO: 39097 - DNA, 159 bp, Homo sapiens; identical to SEQ ID NO: 2489
  chr3:38182625-38182784
  hyper

SEQ ID NO: 39098 - DNA, 46 bp, Homo sapiens
  chr3:38206258-38206304
  hyper
ttcagatctaaagctgcgaatggacagaacccgcccagtgcagggt

SEQ ID NO: 39099 - DNA, 30 bp, Homo sapiens
  chr3:38207095-38207125
  hyper
gctgctgcggaggccgaggacaggacgtgg

SEQ ID NO: 39100 - DNA, 30 bp, Homo sapiens
  chr3:38388723-38388753
  hyper
tcggcgggttcctgcgctgttctgggcacc

SEQ ID NO: 39101 - DNA, 78 bp, Homo sapiens
  chr3:38495096-38495174
  hyper
cggggcactaattgcgagtgcagtggccacaggctcccgggcaaagtggtcaggagcccattcccgccacctccgtcc

SEQ ID NO: 39102 - DNA, 52 bp, Homo sapiens
  chr3:38495213-38495265
  hyper
cgtcctcccacagggcgcgggatgggggcggggcctccgtgttgttgtttct

SEQ ID NO: 39103 - DNA, 102 bp, Homo sapiens
  chr3:38495678-38495780
  hyper
ggaagcgcgcagggaacgagaccgaaggaaggagcgggaaggagagcgcagccgccgcctggccctgcgcgccccgggagcgccgtgcggccctgcccgcgg

SEQ ID NO: 39104 - DNA, 1235 bp, Homo sapiens
  chr3:38496020-38497255
  hyper
tgggcgcccggctcgccgaacttgggggcacgatcttgtctgtgcagtcatctgcgggattctggttcctagaggcgcccctgcgatgggggccgggacgcggagcctcagggtcggagttcgggctacgcgggcgcgtggaacccagggaaagagtgaggaaaacctgagcgtggggaaggcggccaagaggggtgggcagatctcattgggggtggcaggattgtaggtgcagcagcagcagcagcatgcggggagggttgcatgtccctcagagtcactaagtgtagcgaagcgaagggggcggcttcacgcagcccaaagtcccctgcatctcttgccaccagtctgcgtcgcgttaccggcccggcgggctgttggtgctggctcccacctgctccctctttccctgccgttggccccgggatgcggagtgtggtcgcttcgcgggaccgctttgtttgggcacttgggaggggagggggtgggtaagatggaaaacccaacaggtccctcttccttcgggcctccaggaggcacgtggcggggtgggtgaccagcgctcagctcgcccgcggctgcgggcgtgtggctggaggtgttcggccagcgcatgtgtgtttgggggtatgtgggcgcgggcgtaaacaagcggagttccgcctggaaagcttgtttctcctacggtccaagcaccgatttccctctctcagtggtgccggggtgcgcctaaccccggcgggcgcgccgggacgtcccctggccagtcctgggaaacgtggggagctgggcattgaagctctggcgagaaggtcggggcggctggtacccggccgccgggtcctgcgcgtctttgttcccagcccccattacacatgcagcgcgggtcccccgccgccctcggtggcagccgcctggagtctgggaaaccctcgaggggcggggccgggcgtgcaggggcggggccggagtccccacgctgctgcgggggtggggatttgggatctgcgtcccattcccaccctggttctaccttctcctgtgcgtcgtcgtgaggcttagtttacaccgaaagcgagtgagttctgtagggtagtagcgcgcgcgcgcgcagcctgagtccggaaaccgaagggcaaagaccagctggcacctgagtaccgtatggaagagggcgttgcagctctcctggagccgcttcttggaggcgaagtggtggtcgtgttggactttct

SEQ ID NO: 39105 - DNA, 30 bp, Homo sapiens
  chr3:38537861-38537891
  hyper
gctatcaagagtatcgcttcccgcctccgg

SEQ ID NO: 39106 - DNA, 402 bp, Homo sapiens
  chr3:38690810-38691212
  hyper
gggataccctccagccgggcggatctgcgccccttctccccctccggctctctggggcactgatcggggagggagcggctgggcggacccggggcagggaggagcacgcagggactggaggcttcggccctcggggaggaaagttgggcggcggcaggcggagggggctccggccgggccagggctgccgggcgcgggggcactcgctcacctgctggtcccccggccgggccccggggtgggcggctgctgcttggcgcggactcggctcggcgcggggctcggggcactgggcgcaggctcagcggccccgggggagcgatccctgcatcctacgggcgccgccgccgtctcggctccgcggctctgttcgggctcccgggctgggcaggcggcgcgggc

SEQ ID NO: 39107 - DNA, 53 bp, Homo sapiens; identical to SEQ ID NO: 2494
  chr3:38691468-38691521
  hyper

SEQ ID NO: 39108 - DNA, 30 bp, Homo sapiens; identical to SEQ ID NO: 2495
  chr3:39093353-39093383
  hyper

SEQ ID NO: 39109 - DNA, 43 bp, Homo sapiens; identical to SEQ ID NO: 2496
  chr3:39148466-39148509
  hyper

SEQ ID NO: 39110 - DNA, 30 bp, Homo sapiens; identical to SEQ ID NO: 2497
  chr3:39149227-39149257
  hyper

SEQ ID NO: 39111 - DNA, 30 bp, Homo sapiens
  chr3:39850397-39850427
  hyper
gctcactaacccggcggttccgcagctgtg

SEQ ID NO: 39112 - DNA, 1268 bp, Homo sapiens
  chr3:39850768-39852036
  hyper
ggggctcccgaaccgcggccccaatactgcactgcgccgcagggaagagccccgggaggggcgcgggtccccgccccgggcgcgcgcagccctgccccgcctcctcccggtgcgccccgcccctcccggcgcgtgccgcccgcgcgcccgaggtgctctggaggaaccggcccggcgggcaccccctgccccggcgcaggcgcgatcgcgggccgcccctcccgccgggcgccctgcacgcgcccccgccccgcctccgcaggctcccccgctccgggcgcctctgattggctctcggccgggccagcaggtgtcggcggtggctgcggccaggctggccctggctgcctgcggcgcgggcgcctccctcgcagccgctgctgccgacgccgctgcgctcccgcctcctgtcggttcccgggttcccgctgcggctgcggttctggcagccgagcccccgcggtgctgcagcccagctttagcgcgcagaccgacccgcgccccttcttcgccgccggcagcctctaatccacgcggcgcgttgcggcaggtgccctgggcgtactgaggcgcggtggcctgagcccggccgccatcgatgaccccggtcgcggacttgcttcaggctggccaccccccgtgagtaccgtccgcctccctcttctcccctctggcagctttgcgccactctcccctcaacgttgccgcaacttcgggggtgggtgtgtgaaggtgtggaggtgtctctcacgctcccccgcaccctgtgcgcgtccggagccaggaaccctaggcgcggccagtcagcctctgcggaggggcgaggggcgcgggtacttgaacttgctcagggatcatcgcggagccagaatcgcctctttctctcgctgctggggtgggagctcgcctctgcgtttccctcgcgttttccgatcccggatggccacgtagtgcttgggctgcggttcaccgcgtacctactgtgctgcgggcgcaccggcgggacgcctcaaaccatccgttaagcgccccgcaagcagcccagcgcgacggacctgactcaaactcttaattctgtaaaacgggggtaatcagggactctctcaaggtcacagctggtgctcagagttagaacacaggtggattgcgtctggccctcgcccgcgggctgcctggggaggggagagctgttggcggggcggtcacttcagcttcatcccgggttcctcctcatactccctttccgccacagccgccagacttgaaga

SEQ ID NO: 39113 - DNA, 117 bp, Homo sapiens
  chr3:40350786-40350903
  hyper
ttgttcctgcaccccgattttacttacattacccggggcctcgagggtgactcatagagattagccctgagcgtcgacccctcggcgccgccactgcacagcgagagaaggggagtc

SEQ ID NO: 39114 - DNA, 30 bp, Homo sapiens
  chr3:40428628-40428658
  hyper
ccccgcccccgccccgctatacccggcgcc

SEQ ID NO: 39115 - DNA, 30 bp, Homo sapiens
  chr3:40494857-40494887
  hyper
cggaggcacacagccgaccaaccagagatc

SEQ ID NO: 39116 - DNA, 195 bp, Homo sapiens
  chr3:40498460-40498655
  hyper
gagaacgtgaggagcgaacagacctagccatgaataaccaacaaataaaactcgaggaaataaaaaggaactcaaatggcatgcgaccaacggaagacatagcttctgtactcttaaccctaaattactaagcgatgaccctcctgcagctttctaatccaaatcaccaaaaacaatctcgccgcccaactttgc

SEQ ID NO: 39117 - DNA, 228 bp, Homo sapiens
  chr3:40547353-40547581
  hyper
ctaccaggtgtgggcgctgcaggacccctgcctggggccgcccgctcgggcccgtgttgtctcaggcagtagggacactggcgctgacggcgggggtaggaaaccacagagactggcaacttcccaggttcctagagaggaggggcatggaaaacgcacttccggcggagggtctcaagctttccccggtgtcggcggcaggtggaatttccacgctttatctgcgcc

SEQ ID NO: 39118 - DNA, 31 bp, Homo sapiens; identical to SEQ ID NO: 2500
  chr3:40547838-40547869
  hyper

SEQ ID NO: 39119 - DNA, 30 bp, Homo sapiens
  chr3:40566233-40566263
  hyper
actccagccagaggcgatgccgacggctgc

SEQ ID NO: 39120 - DNA, 30 bp, Homo sapiens
  chr3:40924946-40924976
  hyper
atttggatcatgatttaatcaaaccaacta

SEQ ID NO: 39121 - DNA, 30 bp, Homo sapiens; identical to SEQ ID NO: 2501
  chr3:41240628-41240658
  hyper

SEQ ID NO: 39122 - DNA, 55 bp, Homo sapiens
  chr3:41240947-41241002
  hyper
cagcggcttctgcgcgacttataagagctccttgtgcggcgccattttaagcctc

SEQ ID NO: 39123 - DNA, 42 bp, Homo sapiens; identical to SEQ ID NO: 2502
  chr3:41266109-41266151
  hyper

SEQ ID NO: 39124 - DNA, 30 bp, Homo sapiens; identical to SEQ ID NO: 2503
  chr3:42056799-42056829
  hyper

SEQ ID NO: 39125 - DNA, 51 bp, Homo sapiens
  chr3:42304892-42304943
  hyper
gaggcagcattcttacctttccgggcctgctggatgtatcttgccagcagg

SEQ ID NO: 39126 - DNA, 414 bp, Homo sapiens
  chr3:42304981-42305395
  hyper
cgataccctcagctgcctacggggcgcctcctctgcccgctgcagcccggagcccgcgggatctgcgggaggcaccggctgcgtcagggcgccagccgccagtaccgccatcagcacgcacaggcacacgccgctgttcatggctgtagcgagcaaaggaggagggcgcgttaactgaaaggctgggcaacagagctcctgcggcgggccgggcacccagaagcgggcttaggacaaacacaggtgctccagacccgccaggccgccgcaagcacgagggctcgccaagcgctgaccccagccgagtgccatggcgcgcgcccccgggcgcacctggctggtctttgggaactcctcacccagcgccaaggggcagagaccctgttttctgccgtgttgagcagaaggaatgtt

SEQ ID NO: 39127 - DNA, 703 bp, Homo sapiens
  chr3:42542931-42543634
  hyper
tctccttctgtcacacggctccgccagccactctatcctgccgccgcgaccacatctccagcctcgattgtgcaggctcgagcccgtagaaagagggctagcagccacctgcgcttggtccacaagaagacgcgctcccagggcgcagagctggtgaccccgctccccatgccagggacgaataaacgagaaaaggggctgacccggtgtcacccagcggccgagcagccgccccttggaagctcagcaccaaaggcaggcggccagggtcctggcccctctctggaccccagtatccccagctgtaaaatagggaatgcaggaggaggacgacgtctgtggatcgttttaggtcagctgcggagtcggcctgcgggctgggagcagacctcgctccccacgcgagggcgctggcacttcagcccagcctccctggggaggtgccctggacgagacccgcgagggtgcggacacctcatcctccctggagcaggtctcccgaggcttgaagggccagggcacccaacaggtgctgagcgcgccccaccaggtcacccgggagcagggaacaccaaggaacccagagtcgggcctctttcgagccctcgcttcctctcgcctggcttcttcggcgcgaaggatgaattggggttgttgaaaattgatcaaacaacccgatctctgtcagcgcctggacacttgc

SEQ ID NO: 39128 - DNA, 30 bp, Homo sapiens
  chr3:42622935-42622965
  hyper
aaagtctaataacacgggcatgctaaggga

SEQ ID NO: 39129 - DNA, 30 bp, Homo sapiens
  chr3:42623814-42623844
  hyper
agagtgataacgcccggggcgtatgttctg

SEQ ID NO: 39130 - DNA, 46 bp, Homo sapiens; identical to SEQ ID NO: 2506
  chr3:42641735-42641781
  hyper

SEQ ID NO: 39131 - DNA, 143 bp, Homo sapiens
  chr3:42642018-42642161
  hyper
gagctccccagacacgcccccgtgcgtacgcccccgtgcgtacgcccccgctgccgccaccttcggttgaccacccccatctagactgtactctcgcggtatttgtcccgactctcgcggggtttagcgtggcattgggaggc

SEQ ID NO: 39132 - DNA, 30 bp, Homo sapiens
  chr3:42642574-42642604
  hyper
agcgctgctggggccgaggcctgccttggc

SEQ ID NO: 39133 - DNA, 30 bp, Homo sapiens
  chr3:42695565-42695595
  hyper
atccctcaggggagcgggtggaagcctttt

SEQ ID NO: 39134 - DNA, 285 bp, Homo sapiens
  chr3:42696176-42696461
  hyper
acggcaccatggtacgcagggccctgcctgtccccccgcttatccgcccacctgccagctctgacctcccaggcacacggcccgcgggcccgggtggaggggctggagggatcttcccccctcccccggtctcccggctccatctgctgggtcccgcgggccgggaatgcggcgctgtggcgctgctctcggtggggagggggttaaattcctgtggtgggggcgccggcgcgcgaggctgaggtcttgctaggcaccggcgaaggggggcgctcccctgcgccc

SEQ ID NO: 39135 - DNA, 759 bp, Homo sapiens
  chr3:42814257-42815016
  hyper
ggggaactgggagatgcggaagtgcacgccgtcgggtcgcatctttcagtgcggtgcgagagggcccagtggcagaggcccagcaaacagcgcttgtcaggcggacctgagttcgagttctgactgtgccatctacgctatgactttggggcaggcgacccaccctctgcgcctcattaacccatgtactgcatggaaaataagcgtctgcctgggttagaagagggctgtgtgtgaagattcaaaggacgaaggggaagagtcctcgctgggcgcccagcacgcggtgagcgcccggccagtggcagcgcgctcgggctggggttgcgctcgggctcggttccgcgcccccggcagctgcgggctttcccagctccggcccgggcccttccgctctccccggcacttacagcggtctctctccacttctcccttctaggaccgcggcggctaggtcacctcctccggacgccgacacgcgctgccctggcaaccgtcaccagggaaacaagcgacgtcacttgcgcgttttcaacgctactctacgggggccgagggggcgccaagagttctgaaagtgacagaggcgctgatggcgcgctgggctggatccaagcgagcacgatctcgagtgcgctggagattttaaatcttctggagtatatttttaaaaaagttttgtggaccaaacgttctgcacagagatgcccattccgctctcctgttggggagttaaaaagcgaacgatctcaccatgaa

SEQ ID NO: 39136 - DNA, 34 bp, Homo sapiens; identical to SEQ ID NO: 2509
  chr3:42845261-42845295
  hyper

SEQ ID NO: 39137 - DNA, 83 bp, Homo sapiens
  chr3:42846116-42846199
  hyper
ctggcccactaccccggctctagcgtactggcggagacagacgtgagagctcggcgcctggggttcgcgcccgggcacttgag

SEQ ID NO: 39138 - DNA, 105 bp, Homo sapiens; identical to SEQ ID NO: 2511
  chr3:42922531-42922636
  hyper

SEQ ID NO: 39139 - DNA, 30 bp, Homo sapiens; identical to SEQ ID NO: 2512
  chr3:42922845-42922875
  hyper

SEQ ID NO: 39140 - DNA, 307 bp, Homo sapiens
  chr3:42947501-42947808
  hyper
agcggtccctgggatcgtccgtgtctccaggagaaccggaccgctctcccctccctccccgagcgagaaaggaggaccacagagatgcggcgccctccgccgtcctagagcaaccggagcggcccgagccccggcctcccggatgctggggcctggcgggtgtggagcacggggagtcgggcgtggggcgggcagggagtggagtcggggtcttactccggtggctgcagggcgcagggtagccgtgtcaggcctgcccaggtgcagagcgctcttccgcgaccccaacagcctctggtccggtctg

SEQ ID NO: 39141 - DNA, 123 bp, Homo sapiens
  chr3:42947832-42947955
  hyper
cgacctgggctatggcggccgtggcgctggcgagcgggacacgcctcggccttgtcctcgagctgctcccgggacagcccgcgctgccccgggcgcgccgggtgagtgcggggccggagcctg

SEQ ID NO: 39142 - DNA, 118 bp, Homo sapiens
  chr3:43020688-43020806
  hyper
agaccagaagactgcggctggccgagcccccggcagggcttttattgtgaagggagcttccccctcccgcgctttcaggggaatggggaagctgggccgggacgcgcggcagggactt

SEQ ID NO: 39143 - DNA, 81 bp, Homo sapiens
  chr3:43021333-43021414
  hyper
cgctcttagtggggcggaccgtaataagggggcttttattactaatctgcactccttgacctaaccgtaacccactcgcaa

SEQ ID NO: 39144 - DNA, 704 bp, Homo sapiens
  chr3:43147023-43147727
  hyper
tggcaagccccagggcgttgcccaggtccccggcccccggcccccgacccccaatccccggcccccgaccctgagggtccacccccgccccgcccacctcccgcgcctccctcagctcgcttcacacgtcacccctcagttctgcaaactctcctggatcccgaaggcgtcctagaacctccccctcaccccggggcccagcaccgcgtcgtcccctccagggggccgagggttcgacacctccacttcaagtcccaggcgggtgtcggagtccgctccagccccaagcgcgcgcgcgtcttacctgaagcctggactccgcgggacgaagccacctccgccgacgcgtccaggaggccccacggcggcgccgctttcccaccccgccgccgcccccagcgccagcttctggcccaggaggcccagaaggcccaggcagccagcacaggtttggccgcgccgccgggttcgcagcgaccgccacctccaggctcgcaggtgtccgccgtgcgcctgcccggcgggcgagcccggcgcggagcctgtgcgcctgcgcagagccgcgagttcggttgccctggccccggccacaaccttggctcgcggaatcctgggaggtgtagttttgcgtacgaggacagcccgcgccgccaccagcctgcggaatgttgggagtgataatttgcgccgagaggctgagtttt

SEQ ID NO: 39145 - DNA, 38 bp, Homo sapiens
  chr3:43662918-43662956
  hyper
tccgccctgatccccggactgcccgggaagcaagaacc

SEQ ID NO: 39146 - DNA, 215 bp, Homo sapiens; identical to SEQ ID NO: 2516
  chr3:43663333-43663548
  hyper

SEQ ID NO: 39147 - DNA, 201 bp, Homo sapiens; identical to SEQ ID NO: 2517
  chr3:43731958-43732159
  hyper

SEQ ID NO: 39148 - DNA, 31 bp, Homo sapiens; identical to SEQ ID NO: 2518
  chr3:43811143-43811174
  hyper

SEQ ID NO: 39149 - DNA, 314 bp, Homo sapiens
  chr3:43935762-43936076
  hyper
acagggtgagcacgccggttgcgcgctctccagagcagcccagcatctcccgccagcctcgctgcccgctccgccccggcgcaggggccccaagcccacaggcaacgccagcgcgctcccaaccgctggagacagaaacaatgtgcgcgcgcacacggcccacgtgcacgcgcgcacgcccacgcggcatacaggcgcgcacgtgcacacgcgcgcctgcacagctctgcggctctgctccggccccacaggcccatcttaaagtgtttcgtgctctaacttaccaaacacgtggcagccggcagaacgaaaag

SEQ ID NO: 39150 - DNA, 30 bp, Homo sapiens
  chr3:44035436-44035466
  hyper
taaataatctaccgtcgtggtacctccatc

SEQ ID NO: 39151 - DNA, 3812 bp, Homo sapiens
  chr3:44036213-44040025
  hyper
gagagttcaagagagagataccggtcctggcctctcggtgttcaggtgtgtgtataggtgggcgttggtgtgagaacgagcgagagaaagcgggagcaagagcgagagctatgcctcccttagtgtcagggagggtggccggctgatgaaggtgctgtgcagaaagccggggaagggcttaaagagggtgctggcgcctcgggaacgccctcccgctgcaccctacaggaggtcgtgggcggtggcttaacagccccagtgcagagcttgaaccccaccgtccagaaggaaaggtgagtgggggacccgggcgggaggtgaggcctgccggcagcggccctcaggcgtgctgggcagcacggctagcagaggcggcgcctggtcttggatgctgcagcggagacgccaaggagactgaatgcagggagcgaggcgtagcggccgcggagggtggggccgcccggaaatccaggcggcgccagccttgtagcatctgcaggccgggggcgcgcacacgaggggcacgtgggtgtggaggaaccggcgcggcggggcctccttcctgcagcgccgcggcggtcgagtgcccgtgctggaggaacggcgagtggggtgcctgccccgcgcaggcggtacccgccgccccagctccgcacacagcaggcacggccagggaccgggaccgtggcccagcgcctggaggcgctctccacgcgcatctttcccgatgccggggcgggaagccgagtggctttgtccggagatgccaggggatgtgggcaggggacgaagaggtttcccaactggccaaaccctggcttgaggaaagactgaggtggtcattgacccgtgggagcgccctggggcttcgagggaacggcagccgagcccgggagactggtgttgggtacccgcgggggccggcgggttccacgtgggtggaccccgagctgagggcagggtagggtcgcggatcgctgacctatgagctcccctactcccgcacaaggacacctgcacatggacccgggcttccacccgcttctggctgggttggcgccgggagcgcgcaggggagggacggcggcggagtgcggggtttggcgggtgaggtgggtgaggtgtggccgcgggggagggggcgaaggcactagaaggctgcggtcgcgctgtcgctgctgttcccaccgtcggcgcggggcgcggagggggcgaagaggtgcctgccagtcgcactgcggtctaggggtgaaaggaaaagggtccatgtaaaggagaaagggcaggcagagactcttgctggtgccagcaggcacggaaggatgtggccgcggggacttggagtttagagggcaacgctgggtgtcataatgccggagatgaccccgggtgcagaggcgattccagttgggtagagctacagagaacgtggcccgagaaggggagcttccttaaattagacatatcctgtgttgtcctaaacctagcatttaccctctcccaccccgctcccacaacctccagggtcctagcggagtcatttaagcgctcagtactaccagcttcattttaggtaaaaatcaagactaattctgcactttattaacctcctcgtacccaagtcaccacggggcagcttttcacagccctaaggcgtggtcacttcaagcccacagcgagttgctcgtgtcctcggcttctgctccgcaaatctcggacgatgccaccggaggacgctgaaggcaaaggctggtggggccaggcgccggcgagactgccgcgctagcacagcttccgcgggagccgagtgctgacgggcctcgcgaccccctcccgagggcaaacggctcggccctccagggacacttggtcagtgtcactctctccctaccgggtgtcgcgcattttctcaacagaacgtgaccccgtagacggatgaactcggaatcggcaaaacccgcctgcccttgtctagtctctctgccccaccacaccactgcccttcactgcggactgcgccgtgtgcgctccgggaccgcccctgcacctttgcccacagcttcccattaccaaggcagccggaggaagacctttccgagttacctgtctcacgtcagcagccacaccgaggcggtccccctcgcaccactccccaagtgcagagcccctgaaagtccgaggctcctgtgccacgcaccctcccccctgcggggcgaccccgcgtatgcgtgtgtgtgtcacgcgtttaatcgcacagagtaattcccagacgtgcaagacaaagcatttcaagcaaagatggtccagagttcaaattggaaagcacatctcgaggcgctgaatctgttctcgccgtctgcctcggtctctggggcgtcgcatccaggagaagggttttaactccctgccagatccgctcggaattagctcttctggcggtgcagcaacaagtggccccgccgcctcccttgtgcactcggagggactacatcctcctcctctcccagcccctagtccaaacgggagtaggtaatggcggggaaagggggaggtgacgagagcggggagaaggaagtacatattttttaattgtgaaattgtctgtctgcgtgctgtgctctgggattctcttgtctcaatcaacttcaattttaacgtggccgtaacgttaagattaagacctagaaatgaaaacgtacccacctttcttattacaaaggtcgtttgttgttgttgtttttttaaaacaccaagtaaccccccccccccccccccacggacttatactttgtttatgagatttctccaaccttggtggtttggagaaatgaggtgggggaggggaggaccaagggcagcaagacgtccactacgaaaataagatacttactaatttaatagggccgttcctttttacataagatgctcccccaccccccaccaatttacaataggtaaactttgagcttcctcaaagtttcgctatctagcgtttatgcccgaagctttacgaataaactccctttccaggtaaacctgcccaacccttgtcctatgcccagcgaagcccaggtacgatgggtcaaggacccctggcttccacattgtctgagtcacgttccagttggaaaggccatcttgggcgagggacgtgttgcccgactggtctaaataaggaaagaaagtggagtaccaaagaatcaagggcctctgttcctccccatcccgccaccaccaccaccggtccccgggctctgctgagcgctgcggcggtcttggctgaaaactgcgtccccgcccaaatcgagcgcaaaactcccttggacagaagtttgaaagaatccagtgtagaaacagacttctccgtccaatttggttttaatcagtaatcatataagtatacccacataaccacctaagtggagagcagacgcccagattcacggtccccacgtgttgctggagttggcgcagacgcgtgtgcgggcatagcggcggacgtgacaccgcattttctccgaattcctgccatctagggtggtgccgccccaagagggggccgtggggaggtggggtaataggctgcgcaatccacttgctctgggggagcttagggttcagagcagagcgcaactccggggggctgtcgcacagccccattctcccacaccagaagagcaatgctccttatggatgattaatagccgggcttctcctgaccatgcggcgcgtccctgccggcaccacttagttgttttaatttgacctttattagcaacgtgctcccagaggctgcgagttggattcgcacc

SEQ ID NO: 39152 - DNA, 1045 bp, Homo sapiens
  chr3:44040056-44041101
  hyper
cggcttcctgggaaggatcggggactgcagctcccgcgacgcctcctcctcctgcgcagggagcaggcctgagttcctccacgtaatgacctgggagacctcaggcatcccggggcctggtcggagggtcttcgggccctggagctgggcggtgtctgcagtgcaccgccgtgagtttctctcgggtacaatgtgctggtgtgcagagaggaggaaaggaaaaaaaaaaaacccaacaccactcttaagtggcactggcatctatgaagtggcagtggtctacactgagcgtgcccttgcctggaggtgtagggggcggttactgcagccgaggggagggtactgcggccaagggcagggcgagaggacagtcaaggccggctggccgcgtgggagcctttcctctccgggttcagcggccggaatcaccagcactgcggctaaaggggctggtaggctctcctgcaccccgcgtgctcctccgccttctctgtgtcccccggcttttccaggaggaagatggggtgcccatcgcgaatggggcgcgccgggccgcctggccgggcggtcacgtgtcccccctcccccgccactgcggcgggagttccaatcagagcgcgccagggggctcctcccgggcaggaaccacccggctcggcggcggagggtgggccgccgtcacctgaccgcccgcccccgccccccgcgagtaaggggcggtggtagcgtctgctcggttacaaatggcccctcccgcccggctcgcccgctcgctcgggctcggcgcggacccgcctgggcgtgctcctcccgccggctccaggcgtcccaccgccctgcccggcgccagcccgcggtcccagccactcctgagggcgcgccgggcacccagcgcgtaggctcgcccacggaggtcgacacggaagtctggaccgccgaggcgtgtggctcgtctaccggcaggtgagcgtgcaccgcgggcgtgggatgctgtggggacagtgcgggggacgtgtggggtcttcggatgcgaacgcgagtccgt

SEQ ID NO: 39153 - DNA, 831 bp, Homo sapiens
  chr3:44063211-44064042
  hyper
aaacatgtaggaaccctttctcgtaatgccacttgcaggttacagctttcaaagcaaagccagactccggccctgcccggggtaggaagtctttgtctgcctgcgcgcccgagcgctcccggcttgggattgatttttggcccccgctgcagcaagttgggggctggtgaggagtgtagcggtgactgggggcggagtgcggactcgcatccgctgtaccaggagcccactgccacctcgggattttttttttaacttggaatttccatatgacaaaaaagaaagaggtttctcctcaatctaacggagccattaacatctattaataacgccgacagggtaagtaacggagccgcgctcctcggggtggtcaccgggctgcgtggtcctcggccggcctcctgcatccgctgcccctgtgcgctccgggccggatgcgcaagggcggcgcggggaccaagcctggctgccggccgcctactcctccccttccctaaggtaaggggtcgttttcacactcaccagagctcctgcgggctgagctcgccccctcccccgacttctttgcggggcattttctcttgctggtgtattacgtgtcatttctcacggggcattgccggccgcttttctgcaactgtcctttcggatttggtgatctggtccggcacagaggctctcctaggaggtggtgcccatgcatattcattctgtgtagtaaccgactggccgtcttgccattgcaggctgatttattgatttatgtaggaagtgtgttttattttagtaattagggaaccctgaattcacgggaaccgtctgcacttcgca

SEQ ID NO: 39154 - DNA, 30 bp, Homo sapiens
  chr3:44379518-44379548
  hyper
gacttgttccctggcgccagctccgggagt

SEQ ID NO: 39155 - DNA, 31 bp, Homo sapiens; identical to SEQ ID NO: 2524
  chr3:44379883-44379914
  hyper

SEQ ID NO: 39156 - DNA, 30 bp, Homo sapiens
  chr3:44380123-44380153
  hyper
ccgtcaaagcctgtcgcccaccggggcgag

SEQ ID NO: 39157 - DNA, 243 bp, Homo sapiens
  chr3:44481212-44481455
  hyper
cactcaaaactggttcggatgttgaaactgatgacactgcagacaccaagaggttatgaaaaagtttactactcacatgaggccttctagggaaagcaaagcgggcacccacgccagtctgttgggcttcagtgaaaggacgaacaagtggctctggtttttgttgtggttatgagagctcagtgcatttgacagtcagggtttgcacagtttgaacttcccctctgacgcaaagaggaagtg

SEQ ID NO: 39158 - DNA, 233 bp, Homo sapiens
  chr3:44518641-44518874
  hyper
ttaaaaagcaagagcacgctctcatttcgtaatatatatttatggatgtcagtgtgcagaattatgcacagatattttaaatgtcaggaggcctggagacagatttcaggattgcggctacttttacttttcttctactttcccgtgttatctaattgtctctgataaatacgctttatatgcagaattggatgaaacgagaaagcccggagaaacccgggctccagattctc

SEQ ID NO: 39159 - DNA, 30 bp, Homo sapiens
  chr3:44552042-44552072
  hyper
accgactccgccgccgagagacaatcatcc

SEQ ID NO: 39160 - DNA, 583 bp, Homo sapiens
  chr3:44596540-44597123
  hyper
gaccccgaccccgcccgcggcaggtggccgggcacagccgagaagtaagccctgccagctctcccgggtgcggggacgcgcgcgcccaccttcgcaaacgagacttccgggatcccggagggggcggaagtcgaggcctctctcgcttccggctcggccattgtttttggtctaacgggcagtagagtgtccggcttcggtgccgagtgccaccgcgagtgggccgagacgcggagggaggcgcggccggagctcgggtcgccgacgctggccaggaccgcgcttcttcccggcggcaggcggcgcggtccccgtgactctcagaagccgcccgatgtagagccgcttctttgtctcatacccctgaccattcgtgcgtggcacggagccgggtatctgcgggtacagcgatgaacagggcagacgtggccaggtgagcggcgctgctgaagcctggtttaacacgaaaggtagatcgctgttttcccagctcttgcagtaggaaactgtatgaactgtcatatttgggtcagacccaggctcagaatcgcaaacgtggagcgtgacttggaaatgcaaaaat

SEQ ID NO: 39161 - DNA, 561 bp, Homo sapiens
  chr3:44626178-44626739
  hyper
gccacccagatgctcggtctctttccgccctaaccaagccccctgcccagcttccaccacttccagggccctcctcacattggctgaagtcgccaagcccttccatccaatgatagggcaaagcccggaagggaggcagggccagagcgtcggccgaccgcgcggggcttctgaggggcggggggactccagcccgcgggcacagagatgtggaaacctcacgaagcctagaagggccggagggacaggctgggagttagctgggagttgctgacgcagttccttctgcgctttgttcaagatgtgggtctggcgctttcggtgaggggtgctctacagtctggcgtggggggtcgggccgggttctgggagcgtgtgggagacgcaagccaggaggccagggctcctctgcggctgcccgctgctgagatgggcgcggcagccaaggggtcgttgtgggcctcccctttctctcgttcagtgctgcccctttgtcttgggtccagtctctgactcctcgtagctgctcgcttggaccaggctggccgtggtgacagcact

SEQ ID NO: 39162 - DNA, 45 bp, Homo sapiens
  chr3:44666868-44666913
  hyper
cggtgctcctgtctaacggactctgctggcgctttgagaagagct

SEQ ID NO: 39163 - DNA, 624 bp, Homo sapiens
  chr3:44690078-44690702
  hyper
caacagcacaatcctcctaagcgcttctgccccatccctggtctggggcgacattggacacccatcgagaggaaagcacctccgaggttcctagagaggccggcttggcgacttggggagccggaagcccatcccgaggcacttcctgtccggtcattgttctcgtgccggtagaagctgaagtaccggtcagccagcctcctgctgcagagccagtgaactcaggtcgggcttctcagctgcgcacagtgagtggggtcggagggggtgggcacgaacgtcgagggagaaaaaggggctctcccaggggccatggccctaggagcggcccctgcgtcctttccccggggacaccagccttgtctgtcggggtgcggggggcagtgagttccccaccgcctcggaatcccggctgctgcccacctggggcctggtccgggagaggatgcacacggaccggccaaggggccagataggtcccagggacagggccgcgaggagcctatacgtggaaagaatggattgccacgtttggaaatagagaaaggacgttgaaagggagcctttgatagagggccctgtgccgtctgggaccggaggtccgtcagaatctgatcagaagtc

SEQ ID NO: 39164 - DNA, 289 bp, Homo sapiens; identical to SEQ ID NO: 2531
  chr3:44726882-44727171
  hyper

SEQ ID NO: 39165 - DNA, 338 bp, Homo sapiens
  chr3:44770921-44771259
  hyper
ccctgtgctggaagacgcacgccaggtggggtcgcaggttgtttctggtgccggcttaaccggcgcagcaccgaaacccgtagctgcgtgcgggaaggaaccaccgagcggaagccgctcccaccttcctagagaggagacggtagtggttattagccgaggcgcggactgctgacgtcacgccggctgggcgcgtccgggacttactcctttccgcagggcagcacccagggacctgagtgttgcaaggtgcgagaggggagcgccgcggggagcgccgcgggaagcgcatggtgagcggtttctgctgtgcccggctgccgcgggtcgattccagc

SEQ ID NO: 39166 - DNA, 733 bp, Homo sapiens
  chr3:44802920-44803653
  hyper
agaggcaaaagttgaaagtggcgggctggctgcgcttccgaagaaacacgactggcgaaggctcaccttagtctctacggtgggtccctccctgtagccgacccgttccttgaagcgggccagaaacgccggctcggctggccgcacgtacgatacctggttccgcttgctcatggtagctctgggtaaagacagaagacaggttccgcgacggattcgcgacgatacagaggcgcttagctgtgacgtcactgggccacgcccccgatgcgtaggccgggcaacatggcggcctccatgcgggcgtcaacgtccgatccaagcgccaaattcaaatttgcggccatcttgagcgggcggaattcagtcgcgcgcggtgcagtcgggaggtggaggcaccggctgcattgttttcgggatcgaggggtgagggcgctatggcacccggctgcaaaagtaagtctgggcccccggcttcgttaccctatttttgcccccaaatacagctgtgaaaggatggcagcctcggaccgcccgcaaggttcttgctaggcatgaactgcaggagctgagtgaccggcggggacgtttgggaatcccgctctgtcgctcaaagacaatacgctagccgaaaagctcatcccttccttcagtgtcctgtgcgcatgccaggagtctggcgcagttctaggcgctcgggatgagcagtggacctgacgttcttccctttctt

SEQ ID NO: 39167 - DNA, 30 bp, Homo sapiens
  chr3:44903536-44903566
  hyper
ttcaactgtctgtgcgccggcgcgttcggg

SEQ ID NO: 39168 - DNA, 30 bp, Homo sapiens; identical to SEQ ID NO: 2533
  chr3:44931198-44931228
  hyper

SEQ ID NO: 39169 - DNA, 30 bp, Homo sapiens
  chr3:45017825-45017855
  hyper
ggtagctacagcagcggcgttgggtcggcc

SEQ ID NO: 39170 - DNA, 37 bp, Homo sapiens; identical to SEQ ID NO: 2534
  chr3:45187290-45187327
  hyper

SEQ ID NO: 39171 - DNA, 30 bp, Homo sapiens; identical to SEQ ID NO: 2535
  chr3:45636045-45636075
  hyper

SEQ ID NO: 39172 - DNA, 30 bp, Homo sapiens; identical to SEQ ID NO: 2536
  chr3:45729879-45729909
  hyper

SEQ ID NO: 39173 - DNA, 30 bp, Homo sapiens
  chr3:45730474-45730504
  hyper
ggcaaaacagacatcgcgagccagccagga

SEQ ID NO: 39174 - DNA, 30 bp, Homo sapiens
  chr3:45837883-45837913
  hyper
tggcccacagcggccgcgctttctccatgg

SEQ ID NO: 39175 - DNA, 30 bp, Homo sapiens
  chr3:45883613-45883643
  hyper
ttgctaacggaaaccgaggcacgtggactg

SEQ ID NO: 39176 - DNA, 30 bp, Homo sapiens
  chr3:46036556-46036586
  hyper
aggtttcaacagcacggactccagtccagt

SEQ ID NO: 39177 - DNA, 30 bp, Homo sapiens
  chr3:46735439-46735469
  hyper
cccctacgcacccacgcgcacactcaggct

SEQ ID NO: 39178 - DNA, 30 bp, Homo sapiens; identical to SEQ ID NO: 2537
  chr3:46774362-46774392
  hyper

SEQ ID NO: 39179 - DNA, 30 bp, Homo sapiens
  chr3:46866850-46866880
  hyper
gaatattccttaatggccctacaatatcat

SEQ ID NO: 39180 - DNA, 30 bp, Homo sapiens
  chr3:46887958-46887988
  hyper
caacacacactcctcgttttacaaaaatca

SEQ ID NO: 39181 - DNA, 30 bp, Homo sapiens
  chr3:46923053-46923083
  hyper
aatgggtcgagactcggagacccggacccg

SEQ ID NO: 39182 - DNA, 1147 bp, Homo sapiens
  chr3:46923308-46924455
  hyper
ccagtggactgacagcgtcgcggccgggggcgcgcgggggtaccgggcagcctcctcaggggattcgcccatgatgaaagagggctcgcttctcggctcagggtctctattcgccagcgggggccggatgatcaagggaaaaaaaatttaaaagcccgtgctttccagaagagaatgaagcggcggcggcgtcccgggttccctgctcgggtctcgatgttacagctgcccccgccccgtctccccagcactcacatcccgccgccgtaagactccgggcctcggcctctagcgcaatgtcccggggcggggggcggaaggctcctctcggcctctccacactcccgcgtcggcggctgcggagggggtgggggcgggagaggcccgggagggcgcgggggagggaagaggcgcccggccggggagaaggggagcggcagacgccgaggcgagggatgcgcgcggcgggcggtggctccgagcggcggccgggcggggggcgctggaggccaggccggccagcggggggtatcccgagagctccatgaagtccccccggggccgcggacggggcgctggcttggggaggctgtcgggggggccccgacatccatggcaaggcgggggccgcggcggcgcgctcggagtaagtcggggctggggacccgcgccgaggggaagtggccggagtcggggaggagcgactccgggcctggccggagcagccaggctgctctgtctcggtgtcagtcggcggcgcctcctcggaacccgggggagtcgccagccccgcgccgctcggctcggtggcttttttggaaacttgcaaatgttttcgtagagagaaaagggggagggagggagcgagggagtgaccgaaacggagcttggggccgctggaagaactgaggccaaggccgggggagctagagacggactgacagacaggcagaccgacagagcgtcggggccgctgcgcgcccgagccgcacaggcgcaagcggggctctggccaaggatggggaaggggtgcgggaggcggctgccgagggtctgggatctcaggaggccgaacggccgggggctggcggccggaacacctaagggctcagtgtggctgcaaagttgagatcgcaccccctaactg

SEQ ID NO: 39183 - DNA, 155 bp, Homo sapiens
  chr3:46924941-46925096
  hyper
ggccggggcgtgggcggggcggccagcctgacgcagctctgcaccccctaccaccaccagggccggcggcggcggctgccccgagggacgcggccctaggcggtggcgatggggaccgcccggatcgcacccggcctggcgctcctgctctgctg

SEQ ID NO: 39184 - DNA, 30 bp, Homo sapiens; identical to SEQ ID NO: 2538
  chr3:47018362-47018392
  hyper

SEQ ID NO: 39185 - DNA, 137 bp, Homo sapiens
  chr3:47020745-47020882
  hyper
caaaagttgcgtttcggtcttcccataaagcgacagagtagcacctggcatttgataagcgctacaaggggtcgtcatggtggtggtggagattattgttgaaggaccctcgccacctccacgcggcccgccgcccc

SEQ ID NO: 39186 - DNA, 224 bp, Homo sapiens
  chr3:47205649-47205873
  hyper
cagcttcgcaggcccggccccttaaagagacacacacgggccaccgatctgccgccagtcggcgtgccttgcagctgttggcttgaccccaggccgggacgggcagagcggaacactgcccggcgggtccaggccgaccgtgcctgtggctctccggaacaataaacccccggccccagtgatgtgggccagaccggacctggagaggcggcaccgcgacccct

SEQ ID NO: 39187 - DNA, 30 bp, Homo sapiens
  chr3:47206632-47206662
  hyper
ccagcaattggtaacggaaaggaaaggatg

SEQ ID NO: 39188 - DNA, 30 bp, Homo sapiens; identical to SEQ ID NO: 2541
  chr3:47324509-47324539
  hyper

SEQ ID NO: 39189 - DNA, 96 bp, Homo sapiens
  chr3:47422257-47422353
  hyper
gcggggaataagctcgctccgcgcctctcagtttagtggatgaagactactatcccagaagccgtttcgcctcgggctggcgagctcctccccgcc

SEQ ID NO: 39190 - DNA, 30 bp, Homo sapiens
  chr3:47516986-47517016
  hyper
gccaggggatgcgacgccgcgcatctcccc

SEQ ID NO: 39191 - DNA, 30 bp, Homo sapiens; identical to SEQ ID NO: 2542
  chr3:48130378-48130408
  hyper

SEQ ID NO: 39192 - DNA, 30 bp, Homo sapiens; identical to SEQ ID NO: 2543
  chr3:48130791-48130821
  hyper

SEQ ID NO: 39193 - DNA, 30 bp, Homo sapiens
  chr3:48343220-48343250
  hyper
cggcccggcgggggcgatgcccgccagcag

SEQ ID NO: 39194 - DNA, 219 bp, Homo sapiens
  chr3:48470349-48470568
  hyper
cccaacccccagaccccgaggcgaggaccccatcactggccctgggagggcggggaaggggccggccggtcccccgcggcgacggcgaggagggggcgcggaggagcagctccacctcctcagtctcccaatcgcgttccaggcggagtcgccagagtttcccttcgcgcggagaagtgtggtcccaactctcaaaaccaaagccgcccaccactcacc

SEQ ID NO: 39195 - DNA, 72 bp, Homo sapiens
  chr3:48471201-48471273
  hyper
ttgccaggagccgaggcggggggtcgcgctccgcacccgcaggtgctggtggaacagcgtcccggcctcttc

SEQ ID NO: 39196 - DNA, 30 bp, Homo sapiens
  chr3:48481453-48481483
  hyper
ccctcctacggttccgattctaccctggca

SEQ ID NO: 39197 - DNA, 30 bp, Homo sapiens
  chr3:48488408-48488438
  hyper
gacttcactgccgacgacctggaggagctt

SEQ ID NO: 39198 - DNA, 30 bp, Homo sapiens
  chr3:48541487-48541517
  hyper
acggcaacaggatccgcggcgcggggaccg

SEQ ID NO: 39199 - DNA, 30 bp, Homo sapiens
  chr3:48594385-48594415
  hyper
ccggcctccgaccacgcatgcccaactcac

SEQ ID NO: 39200 - DNA, 30 bp, Homo sapiens
  chr3:48594953-48594983
  hyper
gctgggagcaaatgcgtgggactttttttt

SEQ ID NO: 39201 - DNA, 264 bp, Homo sapiens
  chr3:48693436-48693700
  hyper
tcaggagaccccgggcggggcgtcaggggaggggcggtgtctcatggggatgccaggacggggcagtcaggaatctgagtcagggcgggtaggtgggggcggcggggaggcgctcagacacggggcgggcacctacgagagggacagcgtaaggtggaatcgctgccgcaggccgcgaaacatgacgaacgaactgggcgggaaggagcgcgcagccacctcgcagcgcgggccctcgaaggcgccgcctgccgggcactggca

SEQ ID NO: 39202 - DNA, 227 bp, Homo sapiens; identical to SEQ ID NO: 2546
  chr3:48693851-48694078
  hyper

SEQ ID NO: 39203 - DNA, 121 bp, Homo sapiens; identical to SEQ ID NO: 2547
  chr3:48698889-48699010
  hyper

SEQ ID NO: 39204 - DNA, 666 bp, Homo sapiens
  chr3:48699376-48700042
  hyper
ggggggctgtcctttctgctccggatgtcgtggctctctcgccctgacccttgctccctgttgcccataattccccacagcagcgcgcggtgcccactcttttgcgggagcctgtcccagcgttccgctgggaggacaccggcttgggaccgtggtgccgaatcaaaaagtctgaagggaggggcgagctgttccccgagcccgggacccctgaggacagagcccctggtgacagactacctctttgcaaaggtcctgtccgcccgcaagaggagacctctgggcgccagtataacacagaccctggtccctgtcctgtctctcgttcgcggctgcccaatggctggacgccgtgttcaatccccagctcctcattcggctgctcagggggccctcgactattccgggcgctttgccttctccctcggagccccacgaagataggctccctgacccccaggccaggccccccatcctcccggaccccggaagactccggacaaagagctaaggctccgccaccgatatgcgcccttggccccgtagtggcagctaagcctgggtcccagccctggtgcccaccgccccccagctcctcctggctgagggggaacaaagagaggagaaggagcaggagtatgggggtcgaccgtcccccgaggcccc

SEQ ID NO: 39205 - DNA, 330 bp, Homo sapiens
  chr3:48700254-48700584
  hyper
gccctggctttttccgcccccaccacagcatccccgacgctgctgccgcctcccgccgctccaacatggctcccggccgccccgatggttcgctccacctctgccccggcgcccgaaacacggtggtacaacccatcgcgcatggcagctctgaggaccgaagatgttgccgccatctttattgaggacgtgagcgttgctcctggtgctgaacagagcgcgaaggttcgccgtcgttgggtccgccctccccactttcggtcgccgccttcacccacctccctccttctagggcgctgtcccagctccgtctcccagcctttttctgtc

SEQ ID NO: 39206 - DNA, 641 bp, Homo sapiens
  chr3:48701046-48701687
  hyper
tcgtccgtcacgaccgcatgccttaaccccttgaagggactgacacagaaactcagtcctccccccaccctcggtgcattccagctctccctgcgtaactcctggcacgcgccggtctcgccaggccaatgggtggacctggcgcaacagacgtcacgagaggagcggaggcgaggggtgaacgcggagcactccaatcggtcagtcattgtttctattggcacaatgggaggccccgcccctcacggcggactcatcgcatgggggagggggctccgcgggttgccggctaaccgtgagagagtccgggaggtacactatacggaccggcctccaaaggcggaatcgataacgagctgcagcgccgggtgcagaggacgcgggcatcccgaagcccaggaagaggtcagggccgggaccccagaacgctccacagggtgcggctcccgcgatggggtggatcctggttctaacaggcgaggaactcctggccaaggcctctggcccgccccgaacggtccctatgacatcaccatcaaccaatcagtcggcgcatcctttcgccccttgactgctccgcttccgggaggcggggcttctgcgggttccacctcccgagcgccccttgtggctaccaaggt

SEQ ID NO: 39207 - DNA, 30 bp, Homo sapiens; identical to SEQ ID NO: 2551
  chr3:48885299-48885329
  hyper

SEQ ID NO: 39208 - DNA, 30 bp, Homo sapiens
  chr3:48935918-48935948
  hyper
ggctgctcactttgcgccgccgcctggctc

SEQ ID NO: 39209 - DNA, 30 bp, Homo sapiens
  chr3:48955803-48955833
  hyper
tcttgcacggtgaccgtaagtcggagaact

SEQ ID NO: 39210 - DNA, 30 bp, Homo sapiens
  chr3:48956144-48956174
  hyper
actctgggtcagagcgctaagtttcaagga

SEQ ID NO: 39211 - DNA, 84 bp, Homo sapiens
  chr3:49027048-49027132
  hyper
gatgccccctctgacggcctatgaaaccttgcacatcaggcagcttcttcctaaggcctgcctgactccggcgagacttcccgg

SEQ ID NO: 39212 - DNA, 151 bp, Homo sapiens
  chr3:49027395-49027546
  hyper
tgccgctcttgtccgcgtctacgcttgggaccttggcttctgacttggagagtgtacagctctgcccgacggcaacccagcttgggaagagaagccccagcgtgggctggggctcaaggcgcaggaaggccgagcccggcgcggacgcagg

SEQ ID NO: 39213 - DNA, 345 bp, Homo sapiens
  chr3:49027802-49028147
  hyper
gggcgacggcgaggacgcaccggtgcgtccgctgtgcaagccccgcggcatctgctcgcgcgcctacttcctggtgctgatggtgttcgtgcacctgtacctgggtaacgtgctggcgctgctgctcttcgtgcactacagcaacggcgacgaaagcagcgatcccgggccccaacaccgtgcccagggccccgggcccgagcccaccttaggtcccctcacccggctggagggcatcaaggtgaggacctccctgccccgccgcgctccaggccctgcacggctgagcccgagaggaccggcgctcagcccgggtccccacgctgcccccggcgctgctctgcg

SEQ ID NO: 39214 - DNA, 292 bp, Homo sapiens
  chr3:49044450-49044742
  hyper
caccccgccagccgcgatacggcgcagttcctatattcatgttatttattgtgtactgactccatctgccccgtcaaataaaaaaccacaaggttcgagccgccgggcccgacaaactccgggtcggcgaaacagagtccgcgataggtgcagcgggctggcagctgggagcgccccgcaagcgtcacgtgagggggcgaggggcgggatgcccctccgcgggccccgccaatgatgagctggattgcgtgggacgaagggtcgtcattggacaaccgccgcgggcgccctg

SEQ ID NO: 39215 - DNA, 30 bp, Homo sapiens
  chr3:49055306-49055336
  hyper
gaagggagggcggccgcctcagtctgagca

SEQ ID NO: 39216 - DNA, 30 bp, Homo sapiens
  chr3:49056081-49056111
  hyper
gcggcggtggtccccgtaagtggacaggtg

SEQ ID NO: 39217 - DNA, 138 bp, Homo sapiens
  chr3:49057920-49058058
  hyper
cctcggctctcccacgtctacacccatcacctccagcctgagggcgcaactgagaggaactgagacccaagcagctcagtaaagtatgtctgggggtcaggggcaccccatctgggccagggcgctgctcaggcagga

SEQ ID NO: 39218 - DNA, 30 bp, Homo sapiens
  chr3:49058560-49058590
  hyper
gtccacagagcagccgcgggacccccggaa

SEQ ID NO: 39219 - DNA, 30 bp, Homo sapiens
  chr3:49059194-49059224
  hyper
ccaggtgttcgggacgcgaccaggtgggcg

SEQ ID NO: 39220 - DNA, 30 bp, Homo sapiens
  chr3:49059656-49059686
  hyper
gagcttggaccccgcgccctcgaccatcca

SEQ ID NO: 39221 - DNA, 30 bp, Homo sapiens; identical to SEQ ID NO: 2555
  chr3:49066684-49066714
  hyper

SEQ ID NO: 39222 - DNA, 205 bp, Homo sapiens
  chr3:49066961-49067166
  hyper
cgctgaagaaacagcgcatgcgtatagcacatagtggccttgtcactgaggagctgccacttcacgtcccaccccacactccccgcaggacctcggccagttcaattaacaggcaagggtttacttctactgtcccgccgggctcctccccaaaataaagagacgttgttcactaacatgttgaaaagacgtgcttgtcattctt

SEQ ID NO: 39223 - DNA, 30 bp, Homo sapiens
  chr3:49130790-49130820
  hyper
ccaggccgaggccacggatgcccgggaacg

SEQ ID NO: 39224 - DNA, 275 bp, Homo sapiens
  chr3:49142030-49142305
  hyper
ggggcagaggggctcgcacctgagtagcggcctcgcgcagctgcgcgctcagagccgagttcttgagcgtctcgcgggccttctgctcgctcaggccgaggctagtgaagagcgacagggagtctagagccgccattgcagagacaccggaaactaaaagaaacttaggccccagtctgcaggtcggcattcactcgctgaccaatgagagtgaagcctccggggagagccaatggggtccttccttggcgggagggggcggggcgctccaaggt

SEQ ID NO: 39225 - DNA, 134 bp, Homo sapiens
  chr3:49158343-49158477
  hyper
aaggccgagggaggcggagcgccaagctggtgacgcacttccggcgggaatgggctcggagcgacccgcagctccggggcgggcccgagcggaaggaggcggtgctcgggtggcttagcggtgcatgggttctg

SEQ ID NO: 39226 - DNA, 188 bp, Homo sapiens; identical to SEQ ID NO: 2557
  chr3:49171170-49171358
  hyper

SEQ ID NO: 39227 - DNA, 30 bp, Homo sapiens; identical to SEQ ID NO: 2558
  chr3:49208499-49208529
  hyper

SEQ ID NO: 39228 - DNA, 30 bp, Homo sapiens
  chr3:49209145-49209175
  hyper
ggaagtttggggcgcggggtgtagaacccc

SEQ ID NO: 39229 - DNA, 30 bp, Homo sapiens
  chr3:49395699-49395729
  hyper
agcagcacacatggcgcaattgtccaagaa

SEQ ID NO: 39230 - DNA, 71 bp, Homo sapiens
  chr3:49449492-49449563
  hyper
cccgcgcacgcgcgcgcactcacagctcatccactattgctcaggagcccgtccacgccctaaaagcaaaa

SEQ ID NO: 39231 - DNA, 30 bp, Homo sapiens
  chr3:49449833-49449863
  hyper
taccccgggtggggcgagggccagtcatgg

SEQ ID NO: 39232 - DNA, 123 bp, Homo sapiens
  chr3:49507370-49507493
  hyper
ggttctgaaggctccgagtgaccgggaccgaccgccggggtgtgtcccgggacggacttccctggccgtgggggcgaggcttccataatggggcgtgacttttagggcgggggagtggctagc

SEQ ID NO: 39233 - DNA, 30 bp, Homo sapiens
  chr3:49591666-49591696
  hyper
agggctcagcgcgacgtcccagaggccgct

SEQ ID NO: 39234 - DNA, 30 bp, Homo sapiens
  chr3:49592461-49592491
  hyper
agcgcagggtcagtcggggcctgcagaccg

SEQ ID NO: 39235 - DNA, 30 bp, Homo sapiens; identical to SEQ ID NO: 2561
  chr3:49711368-49711398
  hyper

SEQ ID NO: 39236 - DNA, 30 bp, Homo sapiens
  chr3:49761196-49761226
  hyper
aggtgcctgcagcccgcctggccggtccct

SEQ ID NO: 39237 - DNA, 30 bp, Homo sapiens
  chr3:49761708-49761738
  hyper
cacaaagacagactcgcctccgtttctagc

SEQ ID NO: 39238 - DNA, 30 bp, Homo sapiens
  chr3:49840132-49840162
  hyper
cgccgctggactcgcgactagccaagcact

SEQ ID NO: 39239 - DNA, 249 bp, Homo sapiens
  chr3:49893730-49893979
  hyper
tcaaggccctgaagcggtacccgggcaaacaccgggccccaacactgcagtcactcaccactgcaagtggaaggtgtggccgcagtggatggcggccacgtcgcgggagtgatcgaagaagtcggagcagatagtgcacagagcacggataggcatgatggctggactcaaggggcccaggcagccaaagaaactgctacaggtccggcttcgtagacgcgcccccgcgcctccgcttgcttcaaattt

SEQ ID NO: 39240 - DNA, 463 bp, Homo sapiens
  chr3:49906716-49907179
  hyper
ttggagcttcctcccccaccccgcggcagccccgcccagccccctccgggttgtcgcccataaagaactctccgttgtcatggaaattagtgactgctaagcgggagggaaggggcccggggacagttgggaggggctggaggcggctctgggaacggggagggacggctcagctctcggcccctatcctcacgggggaccacgaatcttcgagggttaatcttttcacaattccgagccgcagaagcttccccccagaacccccaagccgtccgaggtaatggggaactttagcccgaccccgcactccctcccccaaatctgcaaagcccgcgcgctctgaccccgccaggacctcgagccctcgctgcgcccccgcgcactctgcatcccgcacctcgagccagggaaacaatcccccaaggccccacaacctgcgttcgggaagcgcccccagcccggc

SEQ ID NO: 39241 - DNA, 30 bp, Homo sapiens
  chr3:49966758-49966788
  hyper
gtttgttggcggggcgggggtgggggagtg

SEQ ID NO: 39242 - DNA, 30 bp, Homo sapiens
  chr3:49978363-49978393
  hyper
tagggtacataaaccgtgagcgtaattgta

SEQ ID NO: 39243 - DNA, 30 bp, Homo sapiens; identical to SEQ ID NO: 2562
  chr3:50126251-50126281
  hyper

SEQ ID NO: 39244 - DNA, 30 bp, Homo sapiens; identical to SEQ ID NO: 2563
  chr3:50192037-50192067
  hyper

SEQ ID NO: 39245 - DNA, 56 bp, Homo sapiens
  chr3:50192567-50192623
  hyper
gcgcaggacctgggtacgccgcgaggaaccgtgcagcccagcgcggccgcccggcc

SEQ ID NO: 39246 - DNA, 115 bp, Homo sapiens
  chr3:50192965-50193080
  hyper
ccgggcgcccaggccccgccgctgcggaagaggtgagtgcagcgggaaccgggagggagcgggcaggcggccgggccaccccgcgacccctctgggacccgcggcactgcaactc

SEQ ID NO: 39247 - DNA, 49 bp, Homo sapiens
  chr3:50242720-50242769
  hyper
ggagcagagcgaaccgcaccggcccgagcggagcgccgcacgttcccaa

SEQ ID NO: 39248 - DNA, 525 bp, Homo sapiens
  chr3:50243084-50243609
  hyper
gctgggaccacaggacgccttgttgggggctcgggcggcacaccacaggcttcctgaggcagggcccatggggcaggctggagagggcccgaggggaggacccaagaggggcctggagcagtccctggagcgctgccccgacgggcgcctgacaggcagagcagcccggctggcacgatgggaatccgggtatatttatctcggctgctccggacaagggcttgagggcagatcgggccgggccgcctgaggggccgcggggtacatgctggtcccagagccggtgccatttgcagaggagccagcgggcacagcgggcgcagggcgcgagtggctccctgacctgaggccggggcgccgtgcgagctcctccccacctggcgctgggtagggtgtaagttagagcccgcgcagcgcacggcggagagaaggaaccaagacttggtttgcaagagcccgcccccgcccggttggccccttcgattggccacagcaaatgcgtgcgtttgtttacacccaggcagg

SEQ ID NO: 39249 - DNA, 104 bp, Homo sapiens; identical to SEQ ID NO: 2566
  chr3:50374390-50374494
  hyper

SEQ ID NO: 39250 - DNA, 149 bp, Homo sapiens
  chr3:50374846-50374995
  hyper
gcccgggccagagccgcgccgcaaccgttaagactgaaacgtagatcgccgggatctagctcttgtctcattggggcaggaacgccggggcggggacacgcacgcttcgcccccaggaatgacctcatcgctccggagctccactcaca

SEQ ID NO: 39251 - DNA, 198 bp, Homo sapiens
  chr3:50375362-50375560
  hyper
ttcccagcccaggtcccggggcccgcaacagtccaggcagacgagcgcgcggcagcggtagtggcaggtgaacttgcaatctgcagagaggcctggcggtgaggcggaggagctccaggtcggggaaatgtcccggagattgaagggaagccccagggagagggccgctgctcgccaggctccgcaggcccgacctat

SEQ ID NO: 39252 - DNA, 262 bp, Homo sapiens
  chr3:50377905-50378167
  hyper
tgccgcgacttgacccgcggcgactgcgctgccccttggctgccccttccgctctcgtaggcgcgcggggccactactcacgcgcgcactgcaggcctttgcgcacgacgccccagatgaagtcgccacagaggtcgcaccacgtgtgcgtggcgggccccgcgggctggaagcggtggccacggccagggaccagctgccgtgtggggttgcacgcggtgccccgcgcgatgcgcagcgcgttggcacgctccagccgggt

SEQ ID NO: 39253 - DNA, 49 bp, Homo sapiens; identical to SEQ ID NO: 2570
  chr3:50387961-50388010
  hyper

SEQ ID NO: 39254 - DNA, 30 bp, Homo sapiens
  chr3:50388329-50388359
  hyper
agcggcggtgcgcgcggcagggcccggagt

SEQ ID NO: 39255 - DNA, 870 bp, Homo sapiens; identical to SEQ ID NO: 2571
  chr3:50402180-50403050
  hyper

SEQ ID NO: 39256 - DNA, 31 bp, Homo sapiens; identical to SEQ ID NO: 2572
  chr3:50526893-50526924
  hyper

SEQ ID NO: 39257 - DNA, 70 bp, Homo sapiens
  chr3:50540206-50540276
  hyper
ctctggctgtaaagcgccggattcccaccagggagggaacgtggggcagatgcgcggctccaactccgcc

SEQ ID NO: 39258 - DNA, 248 bp, Homo sapiens
  chr3:50605124-50605372
  hyper
acggcggaggtggggccgggccgagcagcctcgggggatccccgaagctacagcgccttgcctccctgcacgctccgcgcccccggcctccgattggctgtcgggcctagagcccgcccagaattggaccgttcgcttgtcgctcgggtctggctccacccccagagggagcctagaacctggtcgcagtttttagagactaccctcaccccgtggcctgcgccgaagttgggcggaggacagtgggt

SEQ ID NO: 39259 - DNA, 30 bp, Homo sapiens
  chr3:50649146-50649176
  hyper
gtgggcgcggagcgcgtgctgggtaggctc

SEQ ID NO: 39260 - DNA, 30 bp, Homo sapiens
  chr3:50649439-50649469
  hyper
ccaggaaaacggggcggggccccgcgagct

SEQ ID NO: 39261 - DNA, 30 bp, Homo sapiens
  chr3:50653382-50653412
  hyper
gcagcccaggggtccgtgagtgtgcgtgtg

SEQ ID NO: 39262 - DNA, 30 bp, Homo sapiens; identical to SEQ ID NO: 2573
  chr3:50654371-50654401
  hyper

SEQ ID NO: 39263 - DNA, 780 bp, Homo sapiens
  chr3:50712165-50712945
  hyper
tgcagctgagggccccggaccagcgattctagaagccggtccggggccgggcagtccaatagcttctcgcggatttccctccgctggcgcgcagcagcggcgcgtggattcgcgcgcgggctcgggacggcgcgagcccgggcagcgcgagcccctgcgcggcagggagtggcgcatgcgcgggcgtcctgcgagcccgctggggcgagccgagccgcggcggcgccgggagccgggcggcggagctgtgaagaagcaagcggcggcacgggagcagcggcgacggacaggtggcgagccttcgcccgcgccgccaggggctgctgggccacccgcggagcctcgcggtccagacgtggcgggggtggcggcggcatcccggacggcctgtgagggatgcgccgcccactgccccgcgccgcctgaccgtccccgcctcgactcgcggtgcgccacagccgggcccgcggccgtccccgccgcgttgtcgcccggtcgccgcgcccgcggggccgcgcccggcacggccatgtggacccccacggaggaggagaaatacggcgtaggtaggtgaggctcaggcctggccgtggcgggggttctgggggacgcgcccagctcccggccccgcctggattcgcatcctcgtgcccccgccactgcccgcaggctgcgcggcctcggcgcggggcgagcgcggggtgggggcaggtgcgggtgcgggtgcgggtgcgggggtgggcgcgggtctctgtgcagagagggcggcagggggcgctg

SEQ ID NO: 39264 - DNA, 30 bp, Homo sapiens
  chr3:50751133-50751163
  hyper
atacttactagatttcgccatttggatgtc

SEQ ID NO: 39265 - DNA, 30 bp, Homo sapiens
  chr3:51705048-51705078
  hyper
tagtttgttggaggcgggaaggtacgccgt

SEQ ID NO: 39266 - DNA, 30 bp, Homo sapiens
  chr3:51705665-51705695
  hyper
cgtgcgtggggctccgtgaggaggtgggcg

SEQ ID NO: 39267 - DNA, 30 bp, Homo sapiens
  chr3:51975953-51975983
  hyper
gcctggcaagaccccgcgtattgataggct

SEQ ID NO: 39268 - DNA, 26 bp, Homo sapiens
  chr3:51976239-51976265
  hyper
gggggcgccagagacgcggcgccctt

SEQ ID NO: 39269 - DNA, 127 bp, Homo sapiens
  chr3:51989989-51990116
  hyper
gcacttggcctggcacgctaccgcctcatcgtgcacccgctgcggccaggctcgcggccgccgcctgtgctcgtgctcaccgccgtgtgggccgcggcgggactgctgggcgcgctctccctgctcg

SEQ ID NO: 39270 - DNA, 291 bp, Homo sapiens
  chr3:51990359-51990650
  hyper
ggcctcgcctgcccgggggcaaggcggccctggccccagcgctggccgtgggccaatttgcagcctgctggctgccttatggctgcgcgtgcctggcgcccgcagcgcgggccgcggaagccgaagcggctgtcacctgggtcgcctactcggccttcgcggctcaccccttcctgtacgggctgctgcagcgccccgtgcgcttggcactgggccgcctctctcgccgtgcactgcctggacctgtgcgggcctgcactccgcaagcctggcacccgcgggcactcttgc

SEQ ID NO: 39271 - DNA, 41 bp, Homo sapiens; identical to SEQ ID NO: 2574
  chr3:52001296-52001337
  hyper

SEQ ID NO: 39272 - DNA, 30 bp, Homo sapiens
  chr3:52008092-52008122
  hyper
actgggccgtgctccggggcgccctcttgt

SEQ ID NO: 39273 - DNA, 30 bp, Homo sapiens
  chr3:52008929-52008959
  hyper
gccacatggctctccgccggctctcaagcc

SEQ ID NO: 39274 - DNA, 3 bp, Homo sapiens
  chr3:52016823-52016826
  hyper
cac

SEQ ID NO: 39275 - DNA, 30 bp, Homo sapiens
  chr3:52017508-52017538
  hyper
tgcgacctcgcaggcgacctcgctggaccc

SEQ ID NO: 39276 - DNA, 189 bp, Homo sapiens
  chr3:52029758-52029947
  hyper
gcagcttttgctcccgacagacacacggtcggtcaccagtcctctccgcagcccgcgccccgccgccacccgtaagtcgcggatggcatcggatgccgcgcggccaacactcaccataagccgcggctcccgaagcgcctagaaccggaagagaaaggggctgcggtgcagcacgggaaatagggtcaa

SEQ ID NO: 39277 - DNA, 30 bp, Homo sapiens
  chr3:52272675-52272705
  hyper
ctgtacacggaagacgtgtgcacatgcgtg

SEQ ID NO: 39278 - DNA, 30 bp, Homo sapiens; identical to SEQ ID NO: 2575
  chr3:52273366-52273396
  hyper

SEQ ID NO: 39279 - DNA, 45 bp, Homo sapiens; identical to SEQ ID NO: 2576
  chr3:52280109-52280154
  hyper

SEQ ID NO: 39280 - DNA, 31 bp, Homo sapiens
  chr3:52477535-52477566
  hyper
cctgaggtaggtcctccgggcttggctaggg

SEQ ID NO: 39281 - DNA, 30 bp, Homo sapiens
  chr3:52720020-52720050
  hyper
aagtgcgtgacgctcgtcagtggcttcagt

SEQ ID NO: 39282 - DNA, 30 bp, Homo sapiens
  chr3:52739476-52739506
  hyper
ggaaagtgatgtgacgctccggggatccca

SEQ ID NO: 39283 - DNA, 30 bp, Homo sapiens
  chr3:52804979-52805009
  hyper
ggacggccatagagcggacgccacgagcgg

SEQ ID NO: 39284 - DNA, 30 bp, Homo sapiens
  chr3:52931649-52931679
  hyper
gttggggcgggcctcggccgcggcagctct

SEQ ID NO: 39285 - DNA, 30 bp, Homo sapiens
  chr3:53080425-53080455
  hyper
gggaacccagtgcccgccctggcccagccc

SEQ ID NO: 39286 - DNA, 30 bp, Homo sapiens; identical to SEQ ID NO: 2577
  chr3:53164592-53164622
  hyper

SEQ ID NO: 39287 - DNA, 30 bp, Homo sapiens
  chr3:53195014-53195044
  hyper
ctgcgcgctaatggcgggaggatgcgaaga

SEQ ID NO: 39288 - DNA, 227 bp, Homo sapiens; identical to SEQ ID NO: 2578
  chr3:53195773-53196000
  hyper

SEQ ID NO: 39289 - DNA, 30 bp, Homo sapiens
  chr3:53289955-53289985
  hyper
catggtgcggcaggcggggaccgggcgcac

SEQ ID NO: 39290 - DNA, 35 bp, Homo sapiens
  chr3:53290185-53290220
  hyper
cctaggcgctgggccgctgcggactgcgaggttag

SEQ ID NO: 39291 - DNA, 250 bp, Homo sapiens
  chr3:53381570-53381820
  hyper
ggtgggggcggagtcgcggacaggaaagtgccatcgaggcaaaattcccccatctgcgtcagtcccctcaacttccgcctctacgcgggcctcgcggcagggcggtacgtcagccattctggtccgccgcgcgcacgctccgggcgccgggttccggcgttgtcagggtccgcggccctacgatgtgggcggtgtccaaggctgcgtagtggagcttgcaggctggagctccggcgcttcctttccctga

SEQ ID NO: 39292 - DNA, 531 bp, Homo sapiens
  chr3:53527869-53528400
  hyper
tgcctccaaacacacgtgggggcggggtggggtggggggagatattgccccccatccccgttgccttccgcgacgccaggccaggcgcagggcaggggagaagatggggggcgccctggattcgcggttccagctgcaggcagttacctggggtagtgagtgctctctacagacccgggctaccccaacccccccgattccagaaagggccggagaaaagcagggggcgcctgccccgctccggagcagccagggagcccggccgagccttgacgaggatgagctcggagaccgcagcagctaccgcccgctagcacctgagctcccagggggcggggcctcctccaggtgtgcgcagaggaggccggcgcggagtcggggccggcgcgggagcccgagctgtcccccagcccagaaatgcgcggggaggagcggttcatccgcaccccagcgccgcgggagacactggcgccgcctgcctcctccgggtcccggggggagagcgcaccgtgcggcgcggagggggttaac

SEQ ID NO: 39293 - DNA, 230 bp, Homo sapiens
  chr3:53528642-53528872
  hyper
cggcgtgcggcgcggcgcggcgggcgcggagcgagcgggcgggcgagcgcctccgtccccggatgtgagctccggctgcccgcggtcccgagccagcggcggcgcgggcggcggcggcgggcaccgggcaccgcggcgggcgggcagacgggcgggcatggggggagcgccgagcggccccggcggccgggccggcatcaccgcggcgtctctccgctagaggaggggac

SEQ ID NO: 39294 - DNA, 30 bp, Homo sapiens
  chr3:53529244-53529274
  hyper
gcggaccacgcgaacggtgagcagccagag

SEQ ID NO: 39295 - DNA, 416 bp, Homo sapiens
  chr3:53879617-53880033
  hyper
ggtccctgggccacccacccacgaattacgggggcgtgggtggaggctcgttaaatgcagatcccgggcctgacccggacctgccgtctggatctcattttaggcggcgctagagatcccgggccagggaaacttgagaaccgcagctccaaatcgccagtgctgacggcttccgctttgggagccccaggtgttgctgtccgaactcacttggtggaaacagacatttaccagaaagcctggggtcgggcagcgggcactcctaccgctctaaccccgcgtagctgaaagaattcgctccctcaaaggagtcagtgagcttcggcagtctgcgttccacccgtttcgcttcgcgcggcggggcgattgtgtaaagcgggcccgggtctcggcgtccagcccggccccaaacctcc

SEQ ID NO: 39296 - DNA, 30 bp, Homo sapiens
  chr3:53880702-53880732
  hyper
catctcccggccctcgagcccagatcctga

SEQ ID NO: 39297 - DNA, 274 bp, Homo sapiens
  chr3:53925897-53926171
  hyper
agcgtcacaggccgcgattagacaaaatgctgacgaggacgaaggtgggcagagcccattggctgctgaaagagacgcgcccccgacgggcgtttttgcatcgtcacatctgcgacttctggttaggcggaggcggccgagctgacaaccggatatgacgttaaggactgccctgtagtgcccgcggttgccagtcctctatccgacttgatcgtgcagagttggttcgcaccgcccagtgaggggaagctgttttctcgtcgattgataggct

SEQ ID NO: 39298 - DNA, 88 bp, Homo sapiens
  chr3:54154853-54154941
  hyper
tgcccgcgggcggggcgcacctggcgctcctggagaggggcctgttccttgcgttgccccccaaggtgggagcgcgacctgccagagc

SEQ ID NO: 39299 - DNA, 274 bp, Homo sapiens; identical to SEQ ID NO: 2582
  chr3:54155218-54155492
  hyper

SEQ ID NO: 39300 - DNA, 1104 bp, Homo sapiens; identical to SEQ ID NO: 2583
  chr3:54155524-54156628
  hyper

SEQ ID NO: 39301 - DNA, 248 bp, Homo sapiens; identical to SEQ ID NO: 2584
  chr3:54156654-54156902
  hyper

SEQ ID NO: 39302 - DNA, 6 bp, Homo sapiens
  chr3:54156978-54156984
  hyper
cgccgc

SEQ ID NO: 39303 - DNA, 365 bp, Homo sapiens
  chr3:54157005-54157370
  hyper
cgcgtcgggcggcgaggccggggtgggatgctctggcccctgcccgcaggttgccgagtgagatctggagaggctcacctcaagtgacggcaccaactttggagcctggttaccgaatccaacttccatgggccgctgaatttcccccctctttgctctactgccgccccacttctttttttgggggggggatgggtggatttcttctgactgctatttgccaggtgatgcccagtttggggggtcgagtcctcgggcagtggttcgaatgaaactcagtggtctttttagagagcctgggagactttgcgcattcttaactccgcgacccccctcgggccccctcccgcgctgcgctttgcagt

SEQ ID NO: 39304 - DNA, 30 bp, Homo sapiens; identical to SEQ ID NO: 2587
  chr3:55237864-55237894
  hyper

SEQ ID NO: 39305 - DNA, 30 bp, Homo sapiens
  chr3:55519573-55519603
  hyper
cacatttgtcggcccgcggttcgctgcgca

SEQ ID NO: 39306 - DNA, 2005 bp, Homo sapiens
  chr3:55520344-55522349
  hyper
taataatgctaataacgcgaccccgctccccgcgccggggtgcgcgctggccccccgccaggcactcttaaaggcaaaggggcctgaagcgctcgagttactcggccaaggcaagcctacaatctggcctccgtcggtgcgggggggtgtcggggaaggtgtacgccgctctggagtagttggcccctagttcctctgcgggttctctcaaccaaggagtccctttccccatcccgagccccggccacacaccgtcccggtgcccgcgcagtgggcgcttggtaaatatttgttgaattgaatcattatcctgttactgaaatatacatagtaaattacactcgatgttctcagagcaaaaggaaagtcgtcagtgaaccgcactcagtttgtctactatcgctcttccccactttttctcaaaaatcaaaattgtttgcagaacgggtggtgcgaccagaagtgatctcctgggacactgaggcagtgcgcccggcgtggagggcgaaggggtaggggttcctgccagcgacgctggagttccagcttcttcaggcggttggggaaatggagggataggaagaggcgaagggaactcagttaacttccaacagggggtggggggaagtaaagaaaaaaagtggcagcgcactgaacacctaccttcatggcgagggggagggggcgcggggaggaagtcgccacccgagcgagcgcagccgaggaatccgagcggagcgaccgggttaagcctggggggacggtcaggagcagggctgcggagtcctccggcgcgcgtccggcgggcgcagtgaaccggagctgaagcgggcactggcgcccgggcctggactcccgagttggggcagagctgggatgcgcccaggaatggagggggcgcggacgcgcgcgagccggcagcaagggcagggcctggtcggggcgcaactagggagccgccggtccggcgagggcgcgcaggcaactgttccacggagaggcgctccgtttccaacgtccatcagcgacggcggtaattagggctttccaaccccaaatgtgggcgtgattgtgcaaaagaccttacgacaaataataataaaaagaaattcttcacaagagggtgaaaaaaatgtaccactactcaactgtggcccggggcgggggaaggggggcgatctgtgcgcccaggtgcccccagttcattcacaccacagattctgcaaactcttggcggctcacgcctcctgatctccagctcctcctctctgggtctgtagccgaaacgtctgcttccagacgctgatcctgcagccgcgagttagtgtggacgtctctgtacacacacagacacacaccccaacacacacacccccgctgcagctttggggccacagaacaatcaggcgcgcatggctttttctccgggagatgccgctgaaaacgcacaagtcgccatctgagctgcaagagtcagccccaaattgtgtcctttcattttagggttcggcaaaaacggggagcaaaataggtgaaagtcgccccggaacttattgctgtgcggtgagctggaggggtgcgactaacccaggggagacgcgggctccccccccccaccacgtatcccgttctttctctcttcgggttgatctctcttttccccgtttttccagggcgaagggcgaagagcagcgagtgcaccgcgggcgcgaggctggggaagggcgagagctcggagctccgcggcggcgactcagctccggcggtccatggccggcgaagctgcccacctcctcgtttggcgcccgggtccgaggggcgggagagcgggccggcgggaggcgggcggtcccgggcacaacggcggcggcggaagggctcgctgggcagctgccgcacggaccccggctctgggcggcggaggcggctccgtggagctcgcagcagatttccacgcgatcctgtgccccgcaaacagactgaccgaccgcggggacgcgtcccc

SEQ ID NO: 39307 - DNA, 760 bp, Homo sapiens
  chr3:55522551-55523311
  hyper
tttgctatgcgcatgcgtggtgaggccggcctatgacaaactctgcaggattttaaagccgtactacgggctggggtgccgggaggcggggtacactctccttgtctccccttctctaagttccccatcccccgcggcatctgctgaaagagagaggtccactccgcagccgctgcctgcctgccgcctggttgtctgcgctccttccagagccaccgaccggcgggaggctgaaccccaacttccccgcctggaccccttggctcgcccgcgtatcccagaccgctcccactggggctccacggagactgctgccttgacatggaacctcatgggggacctcctcattcttacctctgggggaggatacttaagcactggggctgatggatagggttaggcgctcacctcctgcaaagtccccagagtagtagggacttgggtagtgggatgcatgattgctcatctggctccggcccagagcatgaggcgcgatgcgtggtcctgccacggagatcttggcgggtgccctcaggtgaggagattgcgaagtttggcaaaaccgggttccgggcaccggaatttctagacgcttccagatgcccgtggttttggggactccggaggggcagggttggtggatttgtgtccgctacctccagcacgccgagggccccaccccacaaacagtgcctcacactggagcgtaatagttattttccgccgtctgcattctccagctgtcaaaggtgaagacaca

SEQ ID NO: 39308 - DNA, 40 bp, Homo sapiens
  chr3:55523370-55523410
  hyper
cattggcatgcacttgaccttaaggcgaaaaatccgtggc

SEQ ID NO: 39309 - DNA, 30 bp, Homo sapiens; identical to SEQ ID NO: 2591
  chr3:55749866-55749896
  hyper

SEQ ID NO: 39310 - DNA, 1065 bp, Homo sapiens
  chr3:56501325-56502390
  hyper
aatcacagagggaaccgacaattcaccgctcggggagtaaattgcctttcatacagcaaaggcaggtagccgcctaaaatcgatccactcctaaaagagcggaccctccctctctggcaaggagaacagagacccttaagtacaaaataaataaggcagggccgaacggagagtttacgagcgctattttattaccccgaaccaaagcagctcttaatcttcactgtcctaagacgatctttcaaaggctcgtacggtattttttttaattaggtacaccttcgtaagtatccctttttttgtataattaggagatggggaggaggagagaagggatgccgttcagttcaatttcacatcgtattccttttcatacaccatcccctagccctccccgataaatcggcttcattttccctgacacgggttttttaaaaaaaaatatgctcccctctgaacccacccaggcggccagccaccccacccccgggcgggggctccacctttctccactttgttctgcttaggattgctcaagacccccgaccccgcgaacaccccacccctcgaggcaagaggggacgccaggcagaagagggggatctgagagaagaaaggcgatggcagtgagggtggctgccggagagggactgcgggaggtggcccgggcagccggggctagcgagcggcgcccgcgcgctggaggaaaccgtgcacttgttccaatccgggggtttatacatcagggcaaagcctcccttaggccgccccatccctccccccgcccaagaaagccccgtaggaggcggatggttcacccttaggctccccacgataacgcattgcagctccccacgagcgagggggacccggcacgaggaatgcccgggcacgggcgccccgagggagccgggcaccaggcggccccggccccggcgtcggcgtctcacctttccgatgctcgccccggggccgtcccacatggatttttacaacctctcgtcgccttggccccgggcggccaggaggagcaggagccggcgccggagccggagaccgagcgag

SEQ ID NO: 39311 - DNA, 165 bp, Homo sapiens
  chr3:56502597-56502762
  hyper
ccggccggccggcacgctcgcccgctcgcagaggccctgactcacattcccagcattcccgaggagccgctaggggggacggggctggggcccgggcgcctccgctgggggcagcagaaagcgcccggcatgggcgggggtcttcgcagcgcctcctcccggcag

SEQ ID NO: 39312 - DNA, 30 bp, Homo sapiens
  chr3:56591110-56591140
  hyper
cagctcagcgcacccgccagcatgccccac

SEQ ID NO: 39313 - DNA, 899 bp, Homo sapiens
  chr3:57112573-57113472
  hyper
cccgtctctggctgcgaggcacccacgctgaccttaaccccttggcgtcctccaccctggtgtcctatctcgggattttctggctgctcggtttacaagatgcagccgccgggacaagggcctcaggcaggctgggacggcgcccgccgcccggagcgccctgagcccggctcccccgccgcgaagtgacccgcggccctgtgagccgccaccagcagcgcccgacgcgacgctgacctgcgggtgccccgcggggctggagaagaaagttgagcgaaaggggcgcgtcccaggacaggtggcacctccctccccggaagtggctccgggaattttcgctcaaggggctacccggggaacagagtcagggtccccagcaggagcgacggctagtcgaggctggcggtggcactgcccacctgcgctgcgcccagtgcgcccccgtgcgctgggcataccccagaccagggagcgctcagggcccgccggggacgccgagacctagcagggtaactcggaggtgggagtgggggtccagctcggggaccagggcaaaggagggactagaccggaagacggtctcactccgggagacctagcgggggtgtcccgccaaaggggtgtctagccggggagggtctagcgcgggagcgggtttcccgactgcttcccgcactcacctcgacccccgcgctggttcggcctctccaggctggaaaactcaccgcggcggcggcggctgcggcggcggctcccctgggctgggcggggccgggggcggggaggccgggccggccacgtgggcgggaggcgggccggggacccccgcgggcgccggagccgggcgacgcaggacttggacgtggccacgcccggccaccgctcgacaccccagctcc

SEQ ID NO: 39314 - DNA, 779 bp, Homo sapiens
  chr3:57198369-57199148
  hyper
ggaatggcaatcacccgcgcccatcgcccagacagtgtcaaaggagcgctcggttccacgaagacggctcaatgcacacggcgaaagtctgggcacctctccagtctcgtctcaggcacctcacccagatgacacccacgcggccctttggcggaaaaatatccgcaactcgaagcagggaaggaggatatcagccgcgagaccttcacaagacgaagggctgaaccgggaggcgaagtttctcaggaggtcccggagtcagaggaggggtaggagtggggtgacggccccaggcgaggaggaacaaagctactagaagagcggggcgcatccctccccggtgctccaagtcccctctccggccgcccgggccttagcagggttgtggactgaaagtccgggagaatacccccttccctctccaaagcgcaacccggtccgggtggctcgggggatcccagcccgggacacgcagccctgggacgaaggaggtcccgggccaagaacaaagggtggggcgcccggcccagccccgccgcccctcacgcccgccctctgaatgggaccccggccggcggccgcacctcattagcaacacaaagccggggtcgggcagccgctttcatctcggccagggccggaggacacgcgtccggggagggaaaccaggaggatgcgcgggaggagtgagacccaggccggccgcggaccccgcgaagagcagacaggttggcgcgggctcgcctccccgcgagcacctgtgcgcgctgcgtcccccg

SEQ ID NO: 39315 - DNA, 30 bp, Homo sapiens
  chr3:57204375-57204405
  hyper
aggtcggagaccgccgccccagactaccct

SEQ ID NO: 39316 - DNA, 31 bp, Homo sapiens; identical to SEQ ID NO: 2596
  chr3:57261347-57261378
  hyper

SEQ ID NO: 39317 - DNA, 30 bp, Homo sapiens
  chr3:57261959-57261989
  hyper
ccgcaggtgaggcgcgggagctggtgggcg

SEQ ID NO: 39318 - DNA, 140 bp, Homo sapiens
  chr3:57262339-57262479
  hyper
agggagagaaaccccgatagtcttatttaatgatttccgaggctcagcaagctaaggaaggaaatggatcgtttttctttgggagaggctgtaaggttgtgtgtggagccctaatggcaaagcccgtgacgggtcccgga

SEQ ID NO: 39319 - DNA, 30 bp, Homo sapiens
  chr3:57582312-57582342
  hyper
aggctccgggtggccgctggcttacatacc

SEQ ID NO: 39320 - DNA, 30 bp, Homo sapiens
  chr3:57583319-57583349
  hyper
ggctgaggcacatgcgtactgggagacgga

SEQ ID NO: 39321 - DNA, 30 bp, Homo sapiens
  chr3:57742968-57742998
  hyper
ccaagggggaaaagcggccgcgatctcaaa

SEQ ID NO: 39322 - DNA, 30 bp, Homo sapiens
  chr3:57993964-57993994
  hyper
tggtgggcttcgagcgcgggtcccaggacg

SEQ ID NO: 39323 - DNA, 623 bp, Homo sapiens; identical to SEQ ID NO: 2597
  chr3:57994557-57995180
  hyper

SEQ ID NO: 39324 - DNA, 30 bp, Homo sapiens; identical to SEQ ID NO: 2598
  chr3:58223131-58223161
  hyper

SEQ ID NO: 39325 - DNA, 30 bp, Homo sapiens
  chr3:58223512-58223542
  hyper
ccagctgggctgggcgccggagctgggagc

SEQ ID NO: 39326 - DNA, 180 bp, Homo sapiens
  chr3:58224036-58224216
  hyper
gaaggactgcagctcgcccacccagatagcatcttgctccgtgtcacgcgccgcctccgcgccgtccccaagatctcgctccgctactcccctcccccagcagcctttcagcttccctttccccagcctgccccggctcccgtgcccttgcgccccttccgtgtcgaaacacttgaatca

SEQ ID NO: 39327 - DNA, 30 bp, Homo sapiens
  chr3:58318384-58318414
  hyper
ggtgttccctggtccgaagcccggagctaa

SEQ ID NO: 39328 - DNA, 30 bp, Homo sapiens
  chr3:58419922-58419952
  hyper
gaagtgcttgcacacgctctactgatgggg

SEQ ID NO: 39329 - DNA, 30 bp, Homo sapiens; identical to SEQ ID NO: 2600
  chr3:58474980-58475010
  hyper

SEQ ID NO: 39330 - DNA, 30 bp, Homo sapiens
  chr3:58571374-58571404
  hyper
gagggtagctggcccgtgagcccaagtccc

SEQ ID NO: 39331 - DNA, 313 bp, Homo sapiens
  chr3:59035645-59035958
  hyper
gtgtgtgtaacctacgtgacggggcgcccagtcgcggagccacagacaaccgcccgctggcctaggaaaagcgggcgcgctcccgctgccgccccaccccagaatcaaaccgcgaaagagcagcgccgagcgccacccgcgttccggccgcgcccattggttcccactgggcgcctgcgcgttgcgctctctaggcttctcgccgacgggcacgggaggatacgcggtgacgtagcgttgcccaggcaaccgcgggactcctggagaaatggtgggcggtccaaacggtgagcagcacgctccttacttaggt

SEQ ID NO: 39332 - DNA, 30 bp, Homo sapiens; identical to SEQ ID NO: 2601
  chr3:61237191-61237221
  hyper

SEQ ID NO: 39333 - DNA, 925 bp, Homo sapiens
  chr3:61546307-61547232
  hyper
gcctagtcctcccatttcccccggacgcctctccccgattgctaaagaagcagccgctccccgggtagctgccaggaaatcagtccggccccgcggcgctgctttcaccctgcagggtgtaagaggcgcacttcctgcgccctccccgcggccaaaccggggtgcgggaaccttctccagagaagctgcgagttggggaaactccgccaccgatccatcgtggcgccgggaaaggggatgcggggctcggaagggctagatttcgcaatcctgggatcgacattcctcccctcccccactttccccagccttggactgggccaatgaaagcccgaaaaagaaaaaaaaaaaaaattaaatctcaatgtagccggagtgcaaaggccgctcggctttgtttcccggcgggggaatgcgctgtgttggaggcgcgaacaggagccgcagacggtgagcctcaccgctgcaaatgccagggcagtgaagccgaacagaaaaccccatcgctttaaaaaggcagctgtccgccctccccctttcccctcgccagggcgaggggcccctcaagtccgggatccgcgagctgcgcggaggatctcgccaaacccgagcaccgtgcggcgtcttttaagagctcgaacaacgggaatccagcaaaaaacaagccggccccagaaggcagcctccctcctctctccgcgcacgggctacaatcgcccccagtccccaaactgtcccagtagaggccgcgcggagagagcagagccgagggacccagcgcaaggcgggagccaagcgcggctgctttaagaacgcggagagcgcgcgcccgccgccagctggcccgggctgcgcgcccccgccgccaccgcgcgccccctgttcgctcgctccttcgctcgccggctttaaagtctctgccagg

SEQ ID NO: 39334 - DNA, 31 bp, Homo sapiens
  chr3:61548182-61548213
  hyper
gagaaaaggattgctccgctggcttggatga

SEQ ID NO: 39335 - DNA, 540 bp, Homo sapiens
  chr3:61548519-61549059
  hyper
ccctttgggagggctaggtttcggggaatggaagtcggaggctggctgcggaggactgaggatgtgtggggagcagcctgcgttctgggtcgggggcgtcctccctctctctgggggctggggcgcgggcagcacttcggtgccggcgtgaggcagcctccttgggcgcagtgagacggcagggcgcaggcggtttcggagagatccgtgtctcccctagccccggcccgtggccctttccctccgctgctctgctcgattggattgcctgggtctggacgcggggagggggcgggggcggtttcggcggccggggcggtttcggcggccgggttgctgttcgcgccggggctgatttttttcctgtctcgcgcgccctgcctaccttcatctttgcccttttgcaggctgttcgcggctggcagacccagtctcgctcctttctggccaggttaagacaggaacaatactggccgttgataagaataaatcaccgcacgtaacggtgtgcggctcggcgaccctccacttccagctctc

SEQ ID NO: 39336 - DNA, 91 bp, Homo sapiens; identical to SEQ ID NO: 2603
  chr3:61656125-61656216
  hyper

SEQ ID NO: 39337 - DNA, 207 bp, Homo sapiens; identical to SEQ ID NO: 2604
  chr3:62254619-62254826
  hyper

SEQ ID NO: 39338 - DNA, 175 bp, Homo sapiens
  chr3:62304988-62305163
  hyper
atgaaccgactttccgggattcccttggcgctgcattaattggcctcgttgcaaaaggaaaccgagaggaaggcggcaagacttggcctgcgggtgatgttagcggaaaatatctgtaatttagaccccggagggcgggcctgtgagcgattgctgtccgcggtgctgaaggaaa

SEQ ID NO: 39339 - DNA, 621 bp, Homo sapiens
  chr3:62353297-62353918
  hyper
caagatctcccagacgtaatggggggagagcgctaataagacactattgtactatatgaggacaaggaaagggagctgactccttaaaccggcctgcagtctccctggggatagatgtctgggaaaagcaaggcgatattttcatatccttagccgccaagtcctcctcgcccatcctggggtttcctggggtttgtggcatccaccgagatttcggagttaaatctgcatattcctctgggtcccaatctcccctaagcgaactgcagccagaacgagctaacatttaaattccccctcgcttcctcttcccccctcccctggctgcgtcttcctagacttgaggggaggaggggaggaatacaaaaaaacgaggacgctctcctttcaggaaatggaattctaatgtacgcgttcctatttctgaatcggaggtactaaaaatacccccgcgacagcctgaggaagctgtcgccgtcctctgtgcaaacaaaatcgacaattctccttccccgcgcaatgggtctgcgaattgggcggcgggcggggacagaaccgttggctgaccaggacacaacctccatcctgccccagagcgtctttctccgagccccaaccccg

SEQ ID NO: 39340 - DNA, 116 bp, Homo sapiens; identical to SEQ ID NO: 2607
  chr3:62354445-62354561
  hyper

SEQ ID NO: 39341 - DNA, 96 bp, Homo sapiens
  chr3:62356123-62356219
  hyper
gcttggctaggcgggcgcgacctcttcgagtgaagaagttgtcaaacttcgtaagcgtcaagccgggtgctctcccgacaagaccgagactgagtc

SEQ ID NO: 39342 - DNA, 1 bp, Homo sapiens
  chr3:62356366-62356367
  hyper
c

SEQ ID NO: 39343 - DNA, 400 bp, Homo sapiens
  chr3:62356792-62357192
  hyper
cgccttctctctccagatccctctttgccttcctgccagccagccgcgacccgagtcctgaggtgaggtgagaagagaaggcctcgcctggcacgttacctttttggtgaaagcctttgccgcaaaattcgcagacgaagggcttgtagcccgcgtggatgcggatatgcgtgttgagcgtggagctgcggttgaacgctttgccgcactggttgcatttatgtggcttttcctgaggaaaggggcgagtgcacagtaaggagaggccacctcgggaacacctggaagggacatcccccccacccccactcaaccctagagggtaagggataatctttggccatcgtatccccggtgttatcactaagattctgggggttgcgcgcgggctaggcccgac

SEQ ID NO: 39344 - DNA, 52 bp, Homo sapiens; identical to SEQ ID NO: 2610
  chr3:62357618-62357670
  hyper

SEQ ID NO: 39345 - DNA, 381 bp, Homo sapiens; identical to SEQ ID NO: 2611
  chr3:62357735-62358116
  hyper

SEQ ID NO: 39346 - DNA, 295 bp, Homo sapiens; identical to SEQ ID NO: 2612
  chr3:62358336-62358631
  hyper

SEQ ID NO: 39347 - DNA, 240 bp, Homo sapiens
  chr3:62358929-62359169
  hyper
accggagagccacctcgcatttacctctttcccccaccaccaaggagatgcgttccgagccatgcagcgtgtctcttctgtcacattttgatggcaaacatcttcccctccgcgtgagatcactgtcttttacattcagctgacatcacatgaagtcacttgaagtggaatgacatgggcggcggcgcggctcccgtagcggcccctgtgttcccccgcgcctgccggccgccgccacca

SEQ ID NO: 39348 - DNA, 533 bp, Homo sapiens
  chr3:62359405-62359938
  hyper
ggtcccggacgcggcgcccccaaagggcccctgggtatcagtctagtagccgaagtatcccttagccctccgcagccgagctgggcatcgtgctaataaactgccatttacccacggaaccggcgccagccccgaacacgcgcaaatgataattacctcattaggatgtggcgcatggacgcgggcgccgcgtttggaggggggaacttgttaatggggaaatattaatttatgcaaaagcaatgagctcgccttggctggcgtcggaggtcgggagaaagctcccactgactaaggacgaccccgaagcgtcacggagagcaaggccgctcgccggcatctcgggggcctcggcgccgcgcaggtgcgcctccagctttatggccagctctgggtctgaggctgggggagactaaaccgagagctggaagactttcggagatcctaatagatcagaattgttgatttatgatcgggtttctgaggcaaagccgagttctgcttctggtttagggctgcgtgcggggaggatt

SEQ ID NO: 39349 - DNA, 216 bp, Homo sapiens
  chr3:62360351-62360567
  hyper
aagcagcgcgctccgcgcttggtttggaggggctgaattcatctgtttgcagaccattccacctgcgtatcacaacaaactgctcaaagacgctccagcactttcaacaggccgggtgctcttggcgacaacaaaagtggtcgaggctgagggttcttacggaggggggtggtggtggctagcaagagagcgagcgagagaattaggtttaggaaa

SEQ ID NO: 39350 - DNA, 100 bp, Homo sapiens
  chr3:62362816-62362916
  hyper
cgaggcctcagccccaggcctatttcacttggagcgcctcagcctagagccggacgctttggcttcttcgccatctggccctaggttgggcctcaaactc

SEQ ID NO: 39351 - DNA, 30 bp, Homo sapiens; identical to SEQ ID NO: 2615
  chr3:62363627-62363657
  hyper

SEQ ID NO: 39352 - DNA, 20 bp, Homo sapiens
  chr3:62364156-62364176
  hyper
ttcgggtaccctcccggagc

SEQ ID NO: 39353 - DNA, 51 bp, Homo sapiens
  chr3:62364279-62364330
  hyper
cgcccggcccactgcacccggcggctgttttgcagcgcccctggcattcag

SEQ ID NO: 39354 - DNA, 30 bp, Homo sapiens
  chr3:62364778-62364808
  hyper
aatttgccagcagacgtgtcattttgtaag

SEQ ID NO: 39355 - DNA, 386 bp, Homo sapiens
  chr3:62365037-62365423
  hyper
ggcttaggatcctccgcgttatttaacttggcagctggttaaactccgcggtggagcctgcccaaaggtattagcgttaagtgctgagagcaggagttaagccggcagggaaaagggaccggaaggggtacaggggtgagggaaaccgatttcagacttcccccaacttctgtaagtttgccaggcaatgtaggtctgagttagatggtgcattgaataagaacctgaagcgttgtgatcgctttgcaagcgaatctctcagctctgttttgtttgtttgttttgtttggctttgataagaacttctcgtgtgtaccggcaaacggaaaagttctctcttgcccgcatctctggagctctcagtcgaatcccatcttttctttacc

SEQ ID NO: 39356 - DNA, 2042 bp, Homo sapiens
  chr3:62859446-62861488
  hyper
gagccagaaggtggcggcgaagtcaccttgggaagaggagaatagggtcaaagacaggacggcggaggggctgacccggacggaaggaccagagggcgtgcccctgctctggggtcagtgaggaagggtcagggggactggtgagaactccagccataaggaagcagtgcccgaggacactttggcgacgctagtcggtgatcagctgacccgggcagggagaggagggtgcccttcgcagagtcacgggaagcttcgccttctgggcttgctttctcccgcctgcccctgcggttgctctctgccccagcgagcggagcgctgctccaagacgctcttctccctccacctcggcgcccccacctgccgttgcccccgcccgccgaacgcacgcccaggagggcgggcccggagttgagcgcagccgcccgccgctggagagcgctgggagccctgcaagcgagcaaggcctctctgggcgccgcgggcagcaaatcactccccgagcctctcggtccacaaagcgggacctgcctgcctcgctcaccaacgctcccgggctgggggggctcgagcaagcggcgctgcgctccgcggccctcgccggtcccagtcagctccaggagcgctccaggctgggttgggctgggcctgggcgagcccggccgctgggagggggcctcgtagccctttccccagggcgcggtctccacctctcctgctcctcctcgccagctgcgccgccagctcccattgttcaccccgcccgcctggcgacgtccgggtgctgctccctgggcctcccaggcgcacctaccttctgctgccggcgagccatgtcggtgggctgcttggcattaaaggggtaggcgatgcagcgcatcacgaacacatacagctgcagcctcttcttcctctcctcctcctctttctgcagccgctccaactcttccttctccttctcgctcaccaccgacgggctggggctggagggccggccgccgccagcgcggctgctgggttgcagccccccggccccgccgccgctgctcgcgccgctgcccccgccgccgcctgcacccaccccggctccggcgccggcgccgccgccccccagcccggcgctgccggccgagccctcgctggtacggctgggagacaggcgcgcgccggacggggccgagccgagcacctccttgccgctctcctcctccacgatctcatccgattcttcttcgctggacgaagggtccagcatagtggcgcctggggagcggggtctctggagcccccggcttggagtgcaaaaggtggggggcgctggaggcagccggggatcagctctcccgggtgggcgcttctccccaggtcagggagcgagagcgctgctgctcagcctcggccgccgcgactgatcctctgcccggcggtcgcgagctgggctcagacccagaagcgcgaagggaggaggggaagggagaggtgcgtccgtggactcgaggtgggcaagggggagaatcaattgcgagccccgagcccgcagccggatgccatctgcggctgctgaaggaggcgcctccagaaaagatgccgagtgttgcaagctgtcgatgcagccaagagccgaagaggcatcttgccgattggggagggagcggcgcttacgtgtttattggcttaactctcccgtgtccgcggcgtaaagggctgctgcagagggctggaggggggagagcgcggagcgtcctcagagcctcagtacttctgaccccaataccttgccaccctcctcccctgccggcttcgtggataatttttttgttgatatctggctctcattgcctcaaccccttttcccctcccgcggacaaaaagttcttgggggagggagaaatccagaaaccagccgagcgggctgtttggagacgctaaatcgagaggtcttacttaggaggaggaagtccgtgagatcttatacgggaaagaaagggtccatctcctttccccaggcttctttacacctggggcgtggggggcgtggg

SEQ ID NO: 39357 - DNA, 30 bp, Homo sapiens
  chr3:62861833-62861863
  hyper
caacatctaatgcgtcgactgtcgcactct

SEQ ID NO: 39358 - DNA, 144 bp, Homo sapiens; identical to SEQ ID NO: 2618
  chr3:63263852-63263996
  hyper

SEQ ID NO: 39359 - DNA, 872 bp, Homo sapiens
  chr3:63264062-63264934
  hyper
cgaggccccctgccctcgccgggctgctccagggtgtcgctcctctggctgctcccgaaggggcttctggccctgaggacggtggtgccaagcgaacttcatttttaaaaagaactggtggatgagaagagcgagcgagggcgagctatggaccctgtgagtcaggtgagacagaactgggcagggcggctggctgggagcagggggcgggggatgccgcggcttgggagaggcgcccccagccccttcctcacgctttgctttctctctctcgcctcattcccccaaagctggcctctgcgggcaccttccgggtgctgaaggagccccttgccttcctgcgagccctggaattggtgagtagcagtgtgtgtgcagggaggggcgccaggcagccagctatcaggtgaggagaggtcggatggggtgctccctgctcagttctgctccaagccggagattcaaccctcaagccggggatttcaatcctgccccctcctaagatgccgttccaaggtggtgaggacaaaatcgaggcaccctgcttggaggcgggagtgtggacgcatttttgcaggggcttagacaagtgtcgtctcacctcaccgcttgcagacgcgcaggggctgtggaaagaaacctcccccttgggagataggggaggggggcgcatggaagggctgccgctgggttctggcccctcacctggaccttcgtggggatgaggggatgggtggagggacccatagttgagcggaggagccgggaagacttggccaagctcagaaagttggtcagaactgagacagctcctctgcgggactgggatgctggaagcgcgtgttcaactgctccgcgggagcttcagggag

SEQ ID NO: 39360 - DNA, 30 bp, Homo sapiens
  chr3:63848680-63848710
  hyper
tgatctaccctagacggtctcatcactata

SEQ ID NO: 39361 - DNA, 30 bp, Homo sapiens
  chr3:63850066-63850096
  hyper
tcgctgggggtccccgcgaagttggcgccc

SEQ ID NO: 39362 - DNA, 30 bp, Homo sapiens
  chr3:63967884-63967914
  hyper
aaaagattcatccgaaaatggatggcacac

SEQ ID NO: 39363 - DNA, 30 bp, Homo sapiens; identical to SEQ ID NO: 2621
  chr3:64232467-64232497
  hyper

SEQ ID NO: 39364 - DNA, 186 bp, Homo sapiens
  chr3:64430619-64430805
  hyper
cgggctggtgctcccggaaagggggcagcagaggacaccccaaaagacggccctaaagtccccgctagagctccaagtggctggacgctggagctttggtgctgggattccgatttgcccggagggagggggctttccagggatcccccagactgtgaccctgagggccacggttcgggtctcact

SEQ ID NO: 39365 - DNA, 1324 bp, Homo sapiens
  chr3:64671300-64672624
  hyper
gcacatgcgggggtcgacagagagtcggggaaccaacgtggattccctgctaaatgctatttggcagcgcaagaaggcggcctccccgccctgcctcagtccctagggaaacgtgcgccgcaggctccctctctccactccctggaacccgtgagtagtagaaaccccagaggaaccgaaatcacgtccggacagcctctccaggctgtctcccactatcccgtttctcccggccaccccgccagtagggtgcagagttggactgcgctgcacccccactctcggttccaccccaattcaaagcgtccggggtaggctccgccttctcccccgcccccagagccctcggcccacccttccgttcctgggacgggacctgctccctgtcaatccagttcagcctcagggttcctggcgcgtgaataaaggccctgagagaaagcggggactctagattacgcaccgccctccacaacacacactgaaggaactcccagtgccttgggcaggggatcctcagccccacatccccgatgcaaggcgcaccaataaggagtctggtccgccctgcgctcagcggctccgctcccgggtggccaagtttgctgcagggaaccgcaactccagtaactttctccgagtttggaaactgacttccaggccgcctcgcagcgttgggcaacgcgccgctgaaccgagtccaaactccagaaagctctgaaacatccagaagcccctgggggcgggtgtgtgcgctccacgccagtgtactcgcacgcacagagctagctacccaaaccatacgagtttctagctgatatttaacgccggagaggagcggagcctcgccacagtgagggtctctaggcttagaggacaattaagtcttctagaagcgggcgaggaggcggaaggggagaggaggtggcgcgcgcccacttaccattcctgagcagaggctgatgacggccgtgtgctcggagttggtattgacatagcctttgtagaaacagtgcttgagttccgcttcctcttcggaataaaacttggtctgattcaccccgggcgtcccgaggagggtgacagtgaacagtggagcgataaatccggcattggcggtgagattaaatagaaactgctggccgaaggcagagaggcggtaatgcgcctgggaggaggtagaggaggaagaggaggaggcgaaggcaggccaggggtcagtggcagagttaatgctccgtcgcgttcttttgaagtggacgttcgtgggaaagggttctccgagagcgttcactcggatgggagacacgatttcgtattcgct

SEQ ID NO: 39366 - DNA, 36 bp, Homo sapiens
  chr3:64673480-64673516
  hyper
cgctgcgagggtcccgtctgcgctcggctgagcaac

SEQ ID NO: 39367 - DNA, 133 bp, Homo sapiens
  chr3:64673805-64673938
  hyper
cgagacgaacggggaccgcctccttccagaccatgtcccctcctcggccggcccgtgcgggactcgcagccggaggccctgccggctgcaagaggcggaggccagaggcgtcaccagcgccggggcagctgtt

SEQ ID NO: 39368 - DNA, 30 bp, Homo sapiens
  chr3:64674299-64674329
  hyper
gcccagcgccggagcgccttcccttcctac

SEQ ID NO: 39369 - DNA, 188 bp, Homo sapiens
  chr3:66023465-66023653
  hyper
cccagccccctcttcgaaacgcaggtgggcaaacaaccctcaacctcgcaacaactttgtgtatttcaccgccaccacagggcgcacggcctcaacttctcttcactgcgctccgaggagggaagcaggaaatcgagaataaggggcagcccacagaccaccctccttttctcggggcgccccccaaa

SEQ ID NO: 39370 - DNA, 30 bp, Homo sapiens
  chr3:66023861-66023891
  hyper
aactccccgtgctccgcgcctcccagcacc

SEQ ID NO: 39371 - DNA, 1263 bp, Homo sapiens
  chr3:66024207-66025470
  hyper
agctttgtttgcattccggtgcctctgggtccacgttccggcgcccgcccgtgctctcccggaccagagtccactctgcgccgctcgggttatttttttttccttccttcctttctctcttgccttttacaaatgcggtgcctcctctttgcctcccgcccggctcgcctctcctcgctggcaggctgttactgagggtgagggaagcccttccagccagttgccgggagccctgaagacgcggtggcggggcggcggggagcagggcgggaggtaagtgctcgcggcccctttaagcagatacaaaggctcggcttgttttgttacagttcattctattccgcgccgcggagcgcagcggccggcgacaggagacgcgcgcgcatgcgccccgcggccgccagccggccggcccacccctcccctcctccccgaagggagagattccaacgtgcttcccgatgggtcctaaaaccgacctgccgggagaaggcaactcccccccaacccttcctgaacccctatcctctctccttttctttcagtgccctggactccgcggattcctttggggctggagggccgcacacgtgttttactccaactgtttgcaacttttgaaacccgggcaatctggctttggcatttgaaaaccatttcaaacaggtgggggttggggaggctgccacactcaccctggcgctcacactcacgcacacgcgcacgcactcgcgccggccctaagcctcctaaccgccctcggccagtggctggccaggctgtcggtcacccagcccggctggttcgccgccccccttgccgcaggtcccactgaaacccccgagacccgccccggggcgctcgccgcctccctgcctgccctgcgcttgcgggttcgggtcctggcgcggggtctgccagggtctctgcgacccgggggagggggacggtgggatcctccggttccccaactgggatccctgtgcgggtcacacgcgctcttacacacacccgcatccttaaactttgggaccaactttttaggacacgggaaactacaggcaagagagagaagccatggtgctagtgtgggttcaggtattcaaccaaaaaagagatccctctagcttttcaactgccctgccagcagagactgctggacccagtcaatcatctgccccggcctcaagttcctggcagggccgagaagcctgcggacctactccggggccaggagataaggatccccgccgggcgcggaca

SEQ ID NO: 39372 - DNA, 1605 bp, Homo sapiens
  chr3:66550297-66551902
  hyper
ctcactcacccccagatggcccgcacgacgcgtgctggctaacccccaaatctctacgacccacgctcgctcgtctccagaccccacgaggcacgctcttcttctccaggctctctcgcacgcctactcccccggacctccacgcagaatctcccttccgccactccaacctgacagtcttccaacacgcacaagcacgcacaactccacacacacaacccagtccgcaccccctccctgagtacgaacccccgccgctccatccccaagtgacagagccccggggcgcagagagggcggaaagggcggcactcacaggctccgcgtccaggagggcaggtccccgggcaacgcagccagcccgcgcccaccgcagtccagcgagtccccagcgcaagtgcaggcggccgcgcagggcgcccgcgggccggccgcggcggtcaccggctccagccgaagcaaaagcagccagagaaggagaaggcaaggcgagcggcgcggggccccgagccctccccggaccggccgcgccatcttgtctggagcgcgctgcgaactccgggcgcggggactgtgaggacccgaacggccgcagacgcgggcgggcccgcggggcgctccgctcggctctagactccgcaccggggcatggcccccgccccaagttctctctgcggccgcggctccggcactcagcgtgcccccggtgcccgggccgctccggagcacccggcgggggccgcaaaccccgcgcccatccgggccggccggcccgcccgcgctagctgcgaactccgccgattcgggcaaggtgtacccagcctgcgctcttcgtccgcccggggcacgccgagtgccgctaccgacaccggccgagggcagtgctgccgctgcgcctggaagacaggcgttcagccccgcagcccgagctcggtgccggcaggcatcttcctctgggctcggagcgcaaagccgtagacctcgggctggacggcgcggccggccccgcgctgggaggccccagtgcgcctcgctgtccccacgccgcggccagagagcgcgcgcgcgcgcgcagcctcgggttccgcacggctcctccgcgcagcaagagtcccgccgacctcgcagccgaacaatcagccgcttgctgttcgcctccccgcggcccagccccggccggtcccccaagccccgcccccggccgctcgcccgcacacaccccctaggctccgcgctccgcggccgcctgctggcccacgttggatgctttgcaacagcgccccgccacgcctccccgcctgctgctcattggctgccggagtccaccgtggccagcctcgagggccattggagcgctcgctgtgatcccgcccctcccgcttcaccggctaccccgcccccacactcttttcccacccaaggtgtgaagggcgggagactgggaggagaaagggagggacggcccccgcctcttaaaggagacacgcaggttgttgttggagaacgggaacgcgggctggggaaaggaggcgtgaagatacgccctctgcgtcaagaaggggagagaaagttaagagggtaaaacgcccccgttttggggctgtc

SEQ ID NO: 39373 - DNA, 30 bp, Homo sapiens; identical to SEQ ID NO: 2632
  chr3:66879269-66879299
  hyper

SEQ ID NO: 39374 - DNA, 879 bp, Homo sapiens
  chr3:67048414-67049293
  hyper
ctcagaatgacagttctcctccgccagaagactacctctcccggcaggcactgcgcgctcgacggccacaggctggccagctccctgctctccacctccatccgaatcagccaataggaattcccggcttgggcctccgcccgacccggaccacgcgggagccggggcaatcaaactacatttcccgacacgcatgtgctcgcgtcgtggccaatcagcgccaggaattcggaggctaggggtggagccagatgcacaggacaccccattggccaggggaagcttagaagagccggaacccgggagctagagaagcgaaatgacatttcctttttaaatagctggagtcggggccccatcgagaaatggccgcgtcggcaggtgggtcgtgtggtggccagggcggcgtggagggaggtgagggggaaggtgggccggggccggccacaggcagtgggatgaggacgtagcggtgcggagctagagggaaggatgaagcggtggaggggaatgagaagagggaggatgaatggtgcggagggcggtgggcggtccggcgggaccgggatggggaggctgggtacccgccggcgctgcgccccaggaggcagcgggaggcggcttgagggggcaccggcggccgccgttgttcgagcttccctcgtgaggctctgccctcggctctcggcggagtccgcgcagacgcctctcctgggctgcgagcgcgtttcctccgcgagcacgggtgccgggctcgccgggctccgcaggagcaggctggcctttgaacttgttccgccgatcgcgctccgccctctgtctcccagatccttaactcgcggtcccacgaggtcgtgcgtatatccacagacatttgta

SEQ ID NO: 39375 - DNA, 454 bp, Homo sapiens
  chr3:68056926-68057380
  hyper
cagcgtctacgccctcgcctttccctggctcctcagtcggcctggacaccgatactaggctcttctgtacagccctccagcaataccttccggggccccgcttgctgcctcctggggctcagcttccctgctgggggcaggcatgtcagagcgcggatgcagcccagggtcctcccgcgcgcctgcaccaggctgcagcgagcgcgcaagcctgctgggtgctggagctcgggccgccccgggagaaggggtggggctggcttgtgctaggggctgaggctgggggctgtttctgggccctgccaccctgtttcccccagccctggtctgacagggaaggcgagggggcgctggtgcccctgcaggtgggcagggaaaccgccctcttcaggacgcgcttgtatttctgcatcctgtgtcctgagcctggcgcgggaaccgccactcaaaccct

SEQ ID NO: 39376 - DNA, 94 bp, Homo sapiens
  chr3:68980932-68981026
  hyper
ggggggacgctgaccggctcccacctgcttgctcctagaaagatcctagctcagattaaagggatgaagcgctaaggtcgacttgtccagaaaa

SEQ ID NO: 39377 - DNA, 477 bp, Homo sapiens; identical to SEQ ID NO: 2634
  chr3:68981337-68981814
  hyper

SEQ ID NO: 39378 - DNA, 82 bp, Homo sapiens; identical to SEQ ID NO: 2635
  chr3:68981851-68981933
  hyper

SEQ ID NO: 39379 - DNA, 159 bp, Homo sapiens; identical to SEQ ID NO: 2636
  chr3:69062097-69062256
  hyper

SEQ ID NO: 39380 - DNA, 30 bp, Homo sapiens
  chr3:69101560-69101590
  hyper
gttaccgaggaacgcggaagggtttctatt

SEQ ID NO: 39381 - DNA, 30 bp, Homo sapiens
  chr3:69129003-69129033
  hyper
tacgtcaagcaccccggagggcccctgcag

SEQ ID NO: 39382 - DNA, 683 bp, Homo sapiens
  chr3:69434905-69435588
  hyper
acaggtggagcctgcttcccacgagtgcccggcatcctgctggggccctcgggtgccgcgcgctccagctcacctggtacacgtcctgcagcccgcaccacgtccgcagcacctggtggcaagcccgcagcctctccgtgtaccatctccgcagcgtggacacggtcaagttccatacgaagcggctgccgctgaacagcaggtcctccacgccacacatgaacaccgaagccatgcctcctccttcgctctgaacccgggcgtcccggctctcgtacgtgcagccccgaccccagcggcctgcccgcctgggctcccgacgccggcttctgctggcagccggggggtcaagcctgccaccaaactcgtctttcaccgtgcgtcctggccaggctccggcggcatgccctgggattgggtgcccgccagccaacggctgcgactggcacacagaagcccagtgtccacccccgcccgctcgcagcgccgagcaagctgtgctaagctccaccaagctggccctcgatgctcccggggcacgggaagccctggccggcgaggactccccctggcgcttccccagggcgcggggcagggacggaagcggagcaactctttgcaggcagagaggggagctgcatttcagcacacttggcttccacgtcttgcgcgcgcgcgaacac

SEQ ID NO: 39383 - DNA, 186 bp, Homo sapiens; identical to SEQ ID NO: 2638
  chr3:69590940-69591126
  hyper

SEQ ID NO: 39384 - DNA, 198 bp, Homo sapiens
  chr3:69591779-69591977
  hyper
cgccgcctctccgggggctggggcggccgctgccaatgaggctcggctgatgcgctgttccggcccagtcattgtatcgggagggaaggaaggggagggggagagggaggaagggagggggcgccctcggcccccgccgcacggggctgcgggctgggctagccttccccggcagagaaagggcgccggtgccaggag

SEQ ID NO: 39385 - DNA, 37 bp, Homo sapiens; identical to SEQ ID NO: 2640
  chr3:69592068-69592105
  hyper

SEQ ID NO: 39386 - DNA, 31 bp, Homo sapiens; identical to SEQ ID NO: 2641
  chr3:69788413-69788444
  hyper

SEQ ID NO: 39387 - DNA, 148 bp, Homo sapiens
  chr3:69788530-69788678
  hyper
aactacagatcccaggcggcgctcggccgccagcccctcccgcccgggtgcgagtgtaaactccccgcgctggggcgggcggccgcgagccggcgagcgggcagagctcggcactgcgccggggcgcacggctcgggggacccaggcc

SEQ ID NO: 39388 - DNA, 62 bp, Homo sapiens
  chr3:69789152-69789214
  hyper
ggagcgacctggcgcgatgtgggggaggaggagcgccgggccgggacgctgtcccggtggga

SEQ ID NO: 39389 - DNA, 1739 bp, Homo sapiens
  chr3:71113095-71114834
  hyper
aggggtaaaaagtcccgtttccactgaccgtccttcatgcagttctgacagttgagttagctacattcagagccggttcagctgggagtaccccgtggcaattcctcagtctgctgcacgtccaaacccaaaccccgctcactacttaattaaccagccaagtaatgcaacagaggcttagaatccccaacctgccagagtgttccattcgctcgctcgcctgctccggtgtggggctctgtgcctctccctccccctttactgtgtgtgaactcgtcgaatttgaacagctaagctgaaaatagcctagacagatatagaaacaaactatcagaagcaaagaaacatccacatgggttacactgagatggaaggctccttgtatatttcacacgctctgaaagtgacagaaatcacaccccagatacgtcccccgaacggagtgatggcgagggcttcaccaaagtggctgcgtgaaggccagaccggcagaaaatgaatcgcaaacgaaaaagagagagagagaaacacacaagcaggacttcctccaactctcaactacaccccacccatgaacatttaaaaaaagagagcgagagtgtgagccaaagagcaaggggggtgggggggtatctctctccaggacccacaggcctgcagctcctttttcttgcccctccactccctccccgcctccacttccagagcgcaactcctacccaacttggtaaacagcgaggatgaggatgattttttaaaagactcaacttcagaaccctcgggctctcctgccttccccagcgaggcccccaggaagcgggcgccgcggagccgggggaaggagagcgaaaccggcaaagatcaatcagaaggaccaacctgacactctccatgtagccgccaggcgcgcggagccgggctcggggcgcccgcgcgggccgggcgtggggtccggcggcctcggcgtgcaggcggactgcacgcgcgcaggggcgctccggctcgcgggctgacaagacgcgccgcgccgcgcccacccgccccgccctgctccaccaatcacaacccgcctctaaacaccccgcgccgcgccgcgccgcgccgcgccccacacaatgggctccgcggcccgcgccccgcgcccgcgcgccccggccccctccgcgcggcaggtgaaatcacgctcgggtgccaccctgcttttgtctggagagcaactccacttaatagctgttaacccggtgacccgcctccggctgacgtctgggtcggccgggctcggcgcgcaccgctccctctggccggggctctgcggggccggggctgccggcggggcggcgtgtttgtttcgtctttgagactgacaaagagttgtcctaacctttccgagaaacccgggaggccgaagaggggcacccggcgctcgcggcgccaagccgactgctccgagcaactgttcggcttcgggagggtacgcaggtctcctaggcagcgcagaaaagcgcttttcctcgaaaacctccctgggaggagaactttcgcttcacgtcgggggtttcacagagccttggcctccccacacccctttctttcccagagtcggtctcgccaaagtgtgccagtgcgcaccgaggaaaactaagccgacgcggggtggaaataaataacaaccaaacgtgcctcgtcgctgaaccaggcgacttcccctctagaacgacagctgccgaagaaagcatctg

SEQ ID NO: 39390 - DNA, 937 bp, Homo sapiens
  chr3:71630564-71631501
  hyper
cacattcctcgctcccggtgccttatcgctaggctcgcgccaccccggctggctctttggggacggagaacccctagtgccgcctggggctctccggtgtccctggaccccgcgcccgcggccgcctcgacttacccgcggagtccggggagggagtaggagcgccgccttcacgcccgcggaggaggcgccggcagcaccatggtccccggcgccgctgccgctgcccccggcccgctcgctcgctcgccgcgcgctctcttcctcttacaaactttcgggttctgcagtcgacaagaaaccggggcgaccctcagcaagtcttccccgtgcaggctggggggaactgaaggggacgggacgggtgagtaggccgaggggccaggacagagagggcagcgggctccgaggacccgcgagtgcgcgtggagggaagagaggatgcggctcagggaatccctgcaaggatccagagaccgggaaatcggcccgagccaaagtctcagcaccttccccaggatctcacaaagttgcaacaacaaaaaggaggggggaggaatagggagaagggggtgggatggggatacgatcacgggcgcaaggtttggagttacaactgtttatttagtccttattctcacagggggcgggagctgcgcgggaatggggggctgcaggcagcgatttcgaagcaaacacatgggaggggggcatgcgactttgtttccgggagcggagctccccagagcccgtgtgtgtcactgccagtctcccgggaccaaggcggagctcacaacaggtggggaggggggctcgtcgagggccaaaaagaagaaggaatctaagtttccgagcgcgacgttgtctgaaaaggagggaggcgggaggcgggggcgagggaaggcggaggcagcaaatgaccgcgaccccgcggcaa

SEQ ID NO: 39391 - DNA, 110 bp, Homo sapiens; identical to SEQ ID NO: 2646
  chr3:71631789-71631899
  hyper

SEQ ID NO: 39392 - DNA, 30 bp, Homo sapiens
  chr3:71632109-71632139
  hyper
ggggcacacacccgcggggaaagaagggga

SEQ ID NO: 39393 - DNA, 63 bp, Homo sapiens
  chr3:71633201-71633264
  hyper
aggccaacacgtcgcggagggagatgttgttattttttgctgttgtgcgtccctgacgtcaca

SEQ ID NO: 39394 - DNA, 1266 bp, Homo sapiens
  chr3:71802517-71803783
  hyper
ccctctgaggcctcccgaccctgccagcccaggcaacctcccccgcgcacggccaccgtgaccccagcgcgggcgccgccgccggacccccgttacctggggccaaacgcgacttgtcgccaccttgcgtcctgggccctgcctccctcccggccgcctcccgaccccgcggctgctgcggaggcgcccccagcccagccgggcccaggcggtgcgggatgcctcggcggggctggcggcggcggccgcgctgcgcgctccggcggaggggagggggctccgcggcggcggcggcggcggcggcagcggcggcagcggcggcggcgggcccggcggggggcagagccaagaggcgcggcggcagcagcggaggagtaggaggagacggaggaggatgcggggggctgcggacggtggcgaggccctgtccgcagtgaagcccgcggcgcctagggcgcagggagtggccgcctcctcctgcgcgcaccattcctgagatggcggcggcggcacagcggcggctcggggagcccaggaggggccggccgggagcgggctgagccccgcaggacggggagctcgcccagggccggcggagcggcggagctcgggccgggcggcctgcgggagcggcgaggcaggggacggccccggggcggagcgcacggcctggtgaggccgcgatggcgaacgcgagcgagccgggtggcagcggcggcggcgaggcggccgccctgggcctcaagctggccacgctcagcctgctgctgtgcgtgagcctagcgggcaacgtgctgttcgcgctgctgatcgtgcgggagcgcagcctgcaccgcgccccgtactacctgctgctcgacctgtgcctggccgacgggctgcgcgcgctcgcctgcctcccggccgtcatgctggcggcgcggcgtgcggcggccgcggcgggggcgccgccgggcgcgctgggctgcaagctgctcgccttcctggccgcgctcttctgcttccacgccgccttcctgctgctgggcgtgggcgtcacccgctacctggccatcgcgcaccaccgcttctatgcagagcgcctggccggctggccgtgcgccgccatgctggtgtgcgccgcctgggcgctggcgctggccgcggccttcccgccagtgctggacggcggtggcgacgacgaggacgcgccgtgcgccctggagcagcggcccgacggcgcccccggcgcgctgggcttcctgctgctgctggccgtggtggtgg

SEQ ID NO: 39395 - DNA, 101 bp, Homo sapiens
  chr3:71803826-71803927
  hyper
cgaccgccgcaagatgcggcccgcgcgcctggtgcccgccgtcagccacgactggaccttccacggcccgggcgccaccggccaggcggccgccaactgga

SEQ ID NO: 39396 - DNA, 396 bp, Homo sapiens
  chr3:71833527-71833923
  hyper
cgcgggggaaagccccggaacccagaaggaagctcccacaattgcttttcaaagcgctcacatggccctggaccaagcgatttcaaagggtttctgcggaggacgcatcggggagcaaactctttgactgtaggattaagactctgggcacttggggaattcgtcttggtcctttgcatttcaggaaggggccgtcaaattttaaggttcgaggttggagagcctccaaaagtacttgagaagactcagagagaaacttctttcagcctaacagaagaaaaatgcgaggagtgaggccgtgggtgatgagggagaagtaagcgggagaaggtggtaataaaggtggtgggcgacatccttgtcactgtttcttccaggacgcgcccagtgtcccca

SEQ ID NO: 39397 - DNA, 730 bp, Homo sapiens
  chr3:71834125-71834855
  hyper
gtccccagcgcggggcgtgagcagcagcggcggcagcagcaagaggagcaggagtggggcgcagcacaggctcctcatggcgccctcgggactgggcggccgccggaggcagttgggggcgcggggcccgggtgcgctgggtggagcgcggagcggcgggcggacgggcgcggcggctcccgcgagcctccgggccgttataaaggctagccccgccgtgactcacgccggcgcccgcccggcagcacacgcggggggcacggcgcgggcacacaccccacgccccacgcgcacacgcgcgcccgcctcggcccggccggctcccagacgagcacgtgctatgcgcggccccccgcgcccccgcctcgggcgccacgcaggcagcgctcccggcggggcgccccgctctgcgccgttccctccgccgtcgcccagccaccgcctttcgcacgcgccggaaccgcttttgtggtctccgagacactcatttgctgtcctggtttccaaagctccacgtgctcagcgccgaaaacttgcaaatcatttgctgtacagatgtttaggggtcgcctactacgtgcggggcgctgtggacacatagggggcggggggtgggtgagggggacacagcagcccctgaatccattcgtttgttcagcaggtctatactgggcgcccgctgcgtgccaggtactgccaccggctctctcctcacggtggaataacttaa

SEQ ID NO: 39398 - DNA, 403 bp, Homo sapiens; identical to SEQ ID NO: 2649
  chr3:72149791-72150194
  hyper

SEQ ID NO: 39399 - DNA, 31 bp, Homo sapiens; identical to SEQ ID NO: 2650
  chr3:72496832-72496863
  hyper

SEQ ID NO: 39400 - DNA, 559 bp, Homo sapiens; identical to SEQ ID NO: 2651
  chr3:72787764-72788323
  hyper

SEQ ID NO: 39401 - DNA, 31 bp, Homo sapiens
  chr3:72896942-72896973
  hyper
acgggttgggaagtcacggagatgtcagcgc

SEQ ID NO: 39402 - DNA, 31 bp, Homo sapiens; identical to SEQ ID NO: 2652
  chr3:72937967-72937998
  hyper

SEQ ID NO: 39403 - DNA, 259 bp, Homo sapiens
  chr3:73045502-73045761
  hyper
tcgcctcggcctccctcccaaagtgttgggatcaccggcctgagccccctgcccggcctcgctctacgttttttaggcgcattctgaacgtgaagtgtatacactgaattctcacagcaactgcatagggcatcagtaccagtgcccttactgtacagatggggaaaatgaggctcagacaggcgaagtaagtagcttaagttcacacagagaggaaatggcagggattcaaagcctaggagtccgcctgcaaccctct

SEQ ID NO: 39404 - DNA, 30 bp, Homo sapiens
  chr3:73046488-73046518
  hyper
acccgttcaggggacgagtggcggacccgc

SEQ ID NO: 39405 - DNA, 392 bp, Homo sapiens
  chr3:73673261-73673653
  hyper
cgggcggcgcggccacgcagcggctgagcgagtcgaggcgcgcgctgtattcggtgaatttcttctggtagcgcagcgcggtcatctgcagctcaagctgcgccgcggccagctgggccaccagcgacttctcgcgcttcccagcgcgcagcgcctccttcttgagcgccttgtgcagcgcgcccaggcgggcctggagcgcgccgttgtgcgcccgcagcgctcgcgcgcagcagtggccgcccgcgcgctgctcgccgtgcgtcaagggtagcccgcagccctcctggcagcggcccactggccgcgcgtcgcaggcgtcgcgcatgtgcgcctccacgtcgcgccgcagcagcacctggccgcaacccgcgtggcgacagcgcgcgggc

SEQ ID NO: 39406 - DNA, 497 bp, Homo sapiens; identical to SEQ ID NO: 2654
  chr3:73673951-73674448
  hyper

SEQ ID NO: 39407 - DNA, 30 bp, Homo sapiens; identical to SEQ ID NO: 2655
  chr3:74663492-74663522
  hyper

SEQ ID NO: 39408 - DNA, 31 bp, Homo sapiens; identical to SEQ ID NO: 2656
  chr3:74663813-74663844
  hyper

SEQ ID NO: 39409 - DNA, 30 bp, Homo sapiens; identical to SEQ ID NO: 2657
  chr3:75168992-75169022
  hyper

SEQ ID NO: 39410 - DNA, 73 bp, Homo sapiens; identical to SEQ ID NO: 2658
  chr3:75471466-75471539
  hyper

SEQ ID NO: 39411 - DNA, 164 bp, Homo sapiens
  chr3:77087845-77088009
  hyper
cacgtgggcccggccgcaccggggcaccgccgacaccggcacccctttgatctaacgtgaccttccttcatcatccccggtcctgaatggcatcctttggtagtcttggtcttaattttcagagttttgtcgtctttgggctgaaattcggcttctttttgagc

SEQ ID NO: 39412 - DNA, 30 bp, Homo sapiens
  chr3:77400955-77400985
  hyper
tccaacaataagagtcgcaggtttttttgt

SEQ ID NO: 39413 - DNA, 30 bp, Homo sapiens; identical to SEQ ID NO: 2659
  chr3:79067581-79067611
  hyper

SEQ ID NO: 39414 - DNA, 30 bp, Homo sapiens
  chr3:79067905-79067935
  hyper
aagcgcagtagtgccgtttcctgcctccac

SEQ ID NO: 39415 - DNA, 74 bp, Homo sapiens
  chr3:79068798-79068872
  hyper
agaatccaattgctcggaatcggaaatccaggcgaatgagaaactgtcttgtttctctcgccacccctagctcc

SEQ ID NO: 39416 - DNA, 208 bp, Homo sapiens
  chr3:79815617-79815825
  hyper
aagggtatcccaggattttagcggccaggtgtgagcgccctccacgcggtcctccgagacctcagggcgcgtggcaactgggcagaagccgtctctgcagcgccgctgccccgggtggagcggcagcccaggctgcagcagtggggttgccacgccgagttttccgcatcggccgcccgcagggctcgcctgcttctccccattgtgt

SEQ ID NO: 39417 - DNA, 569 bp, Homo sapiens
  chr3:79816779-79817348
  hyper
ctgcagagtcctctcggcaaccattctgcactccaacaaccactagtgtaaaacccagcgtgtccccttttacaaatcaaaagccagctgtcacttcccttgcaaccatttccgagacttacccttccataagactgttttcagcaatctagaggctccgtagtgcagacgcagccctgcaactttgctgtgcactgagacctttccgagtttaaaccaagcgaaaggtgacagacttttaaacctaagagtggggaaatagggagagagtgaagtcgggtttcttctctgtatcagcaccctggaaaaattcaatccttcttcagtagagaattctttcaaacccgttatctgtattactattaatgcgcagagcagaaggcattgcatacaaataggtccaagtgtgcgcttctattggtggctgcggaggcccctgggtcctactgctccggtctaaactacacagcaacactaggcacgcagctttggagacgccgaggggaaaatggatttaattgattcgttacctctggtattgtaatgcctgctgcgatgtttaaccgagg

SEQ ID NO: 39418 - DNA, 30 bp, Homo sapiens
  chr3:81810340-81810370
  hyper
caaacctgccactacggaagccacagaacc

SEQ ID NO: 39419 - DNA, 92 bp, Homo sapiens
  chr3:84597194-84597286
  hyper
gagatgtaatccagtagatggcgcttaaaattaacggtctgtaggctgttactcggccgtgcagctctttcgtatttctctgcattcccagg

SEQ ID NO: 39420 - DNA, 1008 bp, Homo sapiens
  chr3:85007717-85008725
  hyper
taggagtccaaatgcgcagaagaacctcgcacccaggacctggcccaggcaccacgaattccagaacatgctggggacacggctaaccccgccccctcgcggtggcgattggctgaacccttcctgagtgcaaagcgctgattaatgaaggcagttgtctcgcctgcaagttcgggcgagacatctctaaagaggtaagatccgccaggggtgctgaatgggggcttcagttcttcctgcccgaagggtccttgagaagcctgtttgtttttcccggcgcttgtctccacccatccccttctctcattggccagacctggtgggcgggggagtttccattggccggggggcggtgtctgtccctggccggggtgggggcggggcctccgccgctctgagcttgcccttgtgtctggtgcttcgtagagctgccgccgtcgccgctgccgctgccgccacagccgccgctgcagccggagcatccgggagccgccactgccgccgccgctgccgctgctaccgccactagcgctgcttccactgcttctacctcccctcccaggaccccgagacaccccgggcgcgagcggcagtgctgcttgcttgctcctcctctcccccagcccttcccctccgtgacctacccactccttgcagccctcgcccgcaccttctccaacaccccggcatccctgcaccacctgctcgggcagccccggcgggctctgggacttgctgtgcgcgccgagaggaaggcaagctccaaacccctgcctggaagacgggctgtcgcggctgcaccaccagcaggaggaggaggagaagaaactatttcgcgataccccattctgcgggtgctttgccgctgccgcttctgctgccgccgatccgagtccgcgggttcgaacaccgcagcggtggggacggtgggtccggcgggcgccgggaggaggacaccagcggagccctgcactctcgtgccccgctcaccagcatctacttgccccc

SEQ ID NO: 39421 - DNA, 404 bp, Homo sapiens
  chr3:85008802-85009206
  hyper
cgggctcctgctacaaggtaatccccgccccggcgcagggaacatcaacttctcgcccattccccatcttccccattccaccccatatttccactctcccctcccagtctccctgtccccagcgatttccaccccctccccctactctctggtgcggcagggggcagtggcagtttgcaccagcccctcgaatttctaacactggctcagccctgccttcccagcagtcagccccttacgcggcaccttttgccttctcattcacctgagcttccttcatctcactccattcccgccagcatccccctcccacgccttttggctggcaacttgtgcctctctgaacattccaccctcccgacaacccccaccagccacctcccacatcacgctcttgagcgacc

SEQ ID NO: 39422 - DNA, 30 bp, Homo sapiens; identical to SEQ ID NO: 2663
  chr3:85617271-85617301
  hyper

SEQ ID NO: 39423 - DNA, 97 bp, Homo sapiens; identical to SEQ ID NO: 2664
  chr3:87039605-87039702
  hyper

SEQ ID NO: 39424 - DNA, 738 bp, Homo sapiens; identical to SEQ ID NO: 2665
  chr3:87040016-87040754
  hyper

SEQ ID NO: 39425 - DNA, 30 bp, Homo sapiens; identical to SEQ ID NO: 2666
  chr3:87276404-87276434
  hyper

SEQ ID NO: 39426 - DNA, 969 bp, Homo sapiens
  chr3:87841756-87842725
  hyper
caagaggagagggctgctaggcgtgctggagagcctggggcgtccgcccacccgcaggcgccccggacccgcaagggcggcgcaagacttccccagcgcgcagtcagcgtcgcggccccgaaagctggcgacaggcgctgctgtcttcccgccccgtggggtcgcccctgccctcccgcgccccggggctgggggcgccaccttgccagctccgactgctgcagggagcgccaggggtgagtgtgcggatcagcgctgagcccgggagtgcgggtcacgcccgcagctggcgcgcaggtggggaaggggtgtggggacgtggggagtgggaggctggacagcgcttgctctcggcggaaacgctgggaagccggcgccaagtcctttcccacactactttgatctaacagcgcaggaattcaagaattgccctttcccttttctgcccacaacctctgctccctgggggcgaagttctgtggtgctaggcggagatagtggtcaaggctgggaggaagggaggggtctgacccgggcccaagggcgaggggtggcggtccaagccggcgagaccccacttagggcgcaggctcctggcgctcctacctcgggaagccgctggggtggagagagacggggcacgggccagaatccagcagcggaaggaggggagagtcttcgaatccatctctcggtgggatcttgagaggattcgcgggggggacggtaagataaatctgaggagctggaagaagccgtagatcggaaatcgcttgcagttttccaactttatttcccgcgggtacgaaccattaaggtaaaagggtcagagagagcttctacctcgcggctgcagcttgcctagttgccgcaggtctgactcaaggtagggttgttggcgccttcctgtttggaggggcaatcaagcaaaagagaaagggggatccgagagaccggcggaatgagggt

SEQ ID NO: 39427 - DNA, 381 bp, Homo sapiens
  chr3:89163678-89164059
  hyper
ttctttgtgcacaagtctctccgcgcctggctgcccaagtcagttcccggagcgcgaccagggtgccacggcctccgtcccgaggtagggtgggtgggcgagcgcagcctgatgctcttttgctccgggtttctgcccccgggcggacggtgtagactctgtagcgagcggagagcgaaggtgcaaagttaagcgaacacgagcgccaggaggagactggagcgcgcgagaggcaaacgtgcgccctctgcctgctgccgcggatctgctggcactgggagagcacggcgtactccttgccacctggaccctccttacctgggcgtcagtaagacgccagagagtccatgcgccttggacgggcctggcaggtcctgacct

SEQ ID NO: 39428 - DNA, 30 bp, Homo sapiens; identical to SEQ ID NO: 2669
  chr3:93692749-93692779
  hyper

SEQ ID NO: 39429 - DNA, 30 bp, Homo sapiens
  chr3:93698849-93698879
  hyper
gtctcgcgcaggggcgggtagccaggactc

SEQ ID NO: 39430 - DNA, 262 bp, Homo sapiens
  chr3:93781751-93782013
  hyper
gaagtaactgcgcacgaaatctcccgcgggagctaagcctcttcgacaagaattctatagcgcgagcaaatcagtatctcgcgagaaattgaagaggaaacgtgagaatgaaagtggatgcccgcgaatcccggaagtcagactgtttttttcagttccctggaggctttttgatactgattcgcgtacacctgttgtttgaaagctctcagcgggacaatgctgacccaggtgagacctggggcccggctgggtacctcta

SEQ ID NO: 39431 - DNA, 2326 bp, Homo sapiens
  chr3:96531739-96534065
  hyper
cttggctccatctcccgctcccctgacctcttgtcactgtgccatttccctcctgtgctttctgcccacttggaaaatatcgtatatcctttacaagaccgctactttctctcctctgttcacatttctccattaccatccacattttctcaaaacattccgacgggttttgaagtggggttttcaacctccctcgactgtgatagccgaagtcccttcaagaaagaaaaatgatgttggaaatactagtaacaaataaagtatcacggaaatccccacccaagcgatacggtttccttgacgcgcccttaaccaaggcgttaagtttagcctgacagcatccctccctcctttcggttcctggcctgatgagccgcctccacctgcgagcggtgcaggcatttttgttgtcgactaaccccctctagcgccgaactggcggcatccgagccgcggctgccaggccgggagaaggctgggcttggccgggctctgcagcgctccgggctccgtccctgccctgggcgcccgcctccgccgcggggcgaggtggtggagaccgcggacgccgagggtcctcccagtcagcacgccgcgttgccccggccctggggcgggggccgcggagtcccaccaagtggcccgcgcctcggcttccgggagacccgagcgcggggagggagtgggtgccgcgagggggcggctcgcgcggggagagccgtcagcccacggcgcccctgcgctgctgtggatgtggccacgcgccactcggcccttggactgctaggagagcgcggcccgacgccaccacgccgtggacgctcggggacccctgaatcccagcgtcaaggctgcgacgatgctcgtgacctccaccgcgaagtcacctccgcaaggcgacgcaaggacctcggcgatcccgggcgccgtacacccgccactttccagcctcatgtaaccccccctctgctgcttcctcccggcgctttgcttttctacaactggaagccgcgaaggcggctactgcgctgagccgctcgctctgctggtcaagtttgggcgacccgcgcggaggagggtcgggctgactgccgccgctgagctgtccccggacgggagcgcctgtccacggcactcaccccctccagcggtggaaatgtggagaagtaagtgggaggcggtgtcgggaactgactcctcttaaaacggtcggcgccgctgctctgaaatgggcggctaagtgcttgtgggactaagggcggcctcagagatgcccggaaaatcgctgccacggccagagtgcggcgcagacgcggcagagttggaggtgtccgcggtgcaggctgctgcccacgccgctcaggccaggtgctgagggctcagcccgcgcctcggccgaaccactctcagccccgttgagccacctcgtccgcccggctttcatcgcaccggccagaggaaagttcccgcggcccccacgcctcttcacagctgcagcgcctcccctgcttttggctccgcaagtgcccacttgagtcgggagaggtcctcgggccgccccaactgcccgccccacctggcagtccgtccccgcccccgtcctcgcggtgaggcgctccccgccccctcgctcccctcccccaaaccacagcccgagctcgctcttgcgcgcgcgcgctctctccggcccaagtgaatagtcctcgcgcaagcgggacactgtggtggatgcaattcccctcgcctccagccgcgaggagctccccggcgccgcaggcagcgtcctcctccgaagcagctgcacctgcaactgggcagcctggaccctcgtgccctgttcccgggacctcgcgcagggggcgccccgggacaccccctgcgggccgggtggaggaggaagaggaggaggaggaagaagacgtggacaaggacccccatcctacccagaacacctgcctgcgctgccgccacttctctttaagggagaggaaaagagagcctaggagaaccatggggggctgcgaagtccgggaatttcttttgcaatttggtttcttcttgcctctgctgacagcgtggccaggcgactgcagtcacgtctccaacaaccaaggtaagggacggggcggaggagcgggagtgggtgggaggaggagggtgcttggagaaccagggtactggttgcctcctgcaggtaactttgtacaggggtcagagtctcctggctcgccacacgaggggatcgaggatgtccccttaccctagcgccctgtttacaccgcccgggacggtgactccacaggctaggatccgttgtgtttctaaa

SEQ ID NO: 39432 - DNA, 30 bp, Homo sapiens
  chr3:97115818-97115848
  hyper
ggaaactattggaaacgtagtcatcagaaa

SEQ ID NO: 39433 - DNA, 30 bp, Homo sapiens
  chr3:97483456-97483486
  hyper
atagttcctcggcgcgcctctgaccttttc

SEQ ID NO: 39434 - DNA, 30 bp, Homo sapiens
  chr3:97483904-97483934
  hyper
tttttcactccacgcgtgtagttgttgcta

SEQ ID NO: 39435 - DNA, 102 bp, Homo sapiens; identical to SEQ ID NO: 2672
  chr3:97690940-97691042
  hyper

SEQ ID NO: 39436 - DNA, 30 bp, Homo sapiens
  chr3:97691377-97691407
  hyper
acccggcggtgttccgcgttcacgcccggg

SEQ ID NO: 39437 - DNA, 30 bp, Homo sapiens
  chr3:98241907-98241937
  hyper
ataggcattcctggcgccgcgcgcggcgca

SEQ ID NO: 39438 - DNA, 93 bp, Homo sapiens
  chr3:98311893-98311986
  hyper
atcttggtcttcatgtcgcccggcctccttcgcagctcgcccaggtcggtcacaggcggggccatgaagctgctgcagcggtgggccagctca

SEQ ID NO: 39439 - DNA, 881 bp, Homo sapiens
  chr3:98450986-98451867
  hyper
aaaagataaaaagtacgaacacatttgcccttgaagggcagagccccggaattcaggagctctctgaacactcctccccttctgatagggaccaaaccttctgctgagccttgtgtcacagtcagtccgcggcgccacaagcctcagtgtttacttctgccgcctgccagccgggcggggaaggggagtacccggccacccctcactttagctcctgcagctttccaaacaaaccagggcgggatgggagtgtcttcttggctgtggaaatcgatcctcctaccttgtcctgaagccacccgccgcctttcctcgtccctcccttcgcggtgattttccggtcccggcgcccggcgagggcgcgcggctggtgtccgccccgcccgaaaggtaggggttcggctgtgctcccgcctggtccccaacgcctcaccctccgggagacccgcagcctcccaccactttgcaccttcctcctcgaatttgggggcggccaccgtgcaactggcgccagccgcggagcaggaggagcttcccgcgactccggaggcgctcggcgcagtcgcccgggattggggctggcgggagcctgagactccgggcagggctgctccctcctctgctcccccgccagatccgcggggaaggaatcgtgcccgcgccgcccctggcccgcgccaccttcctttggtttctgccggcctcgggcttctgcggcccgatgtggcaggcgccgcgagagaggcagcagccggctggagcagcggcccctcaggtctcggagcccggtgcgcctctgcggtcgtcgctcctgggcctcggcgggtcactcttgccggccggcttcgctgcgggtttgcactgcccgggtgagggaaatt

SEQ ID NO: 39440 - DNA, 30 bp, Homo sapiens
  chr3:98452203-98452233
  hyper
ctcttttgtcgaatcgccggcgaggttgtg

SEQ ID NO: 39441 - DNA, 1418 bp, Homo sapiens
  chr3:98619781-98621199
  hyper
acttgggggacagacgggcaagaccttgcctttgcaactcaaccccgtgagtacccagccaggtccggccacgcacgaaagcgcaccgcgcctccctgcagcgtctgcagatttgttcaggggccaagagacccgcagccccgacggaggttcccccgccgctcactcccctgggaccactcaccttgctgggctccagcgtcctcgagcagcaggagcaggacaagtaagagcaggaggaacagaggcatggagaaggaggaggagttggagcagggagggagggagcgggagagggggagcgcggcccaggcgggggcggcggccgcggcccggacttggggacactgcgggcagcgcctggctctcaccaccgcccggctcgccatcgcggcggccggcagtctgcctgcatagtgcgggtgcctcggcagccccgcgcgcctctggccgcggcacccgaccaggagacggcggcagcggcgggagaacaagaggcagccctcgcctcaccccgcgccgggacccttccgcccctcaccccgctttcacctactcctccttcgtcccttccctccgctccccgcgccgagaccccaggccggagcgcaggggaggggagggaaggaagcggagtcctcgagccgcggaggacggccgcggcggagctaaggaacgtgcctcccgcgccgcgctcctcaccagggtcgccgctcgccgcgctcacccgcggctccggctagctggcaggcaggcccgcagccagctccctcgcgctccctctcgcgcgcgccggccacgccccctaggcaccgcggccaatcctcggccagctctggtccgtctccttccgcgaaacccaatcagcatgctcgctcctcgctcgacccgctagttctccggcccattcctcgagctccaccgccccttacctccctcttccaatccccttcggcctttggaggcgtcccacccgcctcctccaatccaggtcccgccctccagcttcggatccccgcggcccccgcccggcccgggcgcctgttattgttgggccctcagcccaaactgatcccgcagaggcggcagccagctcgtcagtgacttccgggacgtcccccatcccgcgctccctgctcctcaggcccagcttgctccttgctcctttctcctcgctcctccgacgcacatcagaccactggaagggggtgggaaacctggatcctgggttgttttagctgggagctgagtctaagggactttttttttttttttaatggcagagcgtggcttgttttgttaaaactgccgccagttgttgcaacagctccgagttagaataatagatgcagtgttcagtttttaatatatgtgttccctgttttctctgctctttttatggcggggggtgggggaca

SEQ ID NO: 39442 - DNA, 30 bp, Homo sapiens; identical to SEQ ID NO: 2676
  chr3:99357066-99357096
  hyper

SEQ ID NO: 39443 - DNA, 30 bp, Homo sapiens
  chr3:99536599-99536629
  hyper
ctgcttctgcctgtcggcgcctgtgtggaa

SEQ ID NO: 39444 - DNA, 450 bp, Homo sapiens; identical to SEQ ID NO: 2677
  chr3:99594871-99595321
  hyper

SEQ ID NO: 39445 - DNA, 57 bp, Homo sapiens
  chr3:99787817-99787874
  hyper
agtgcagggagctgccgttctgctccacaaacccagatagaacgttagcaagtaccc

SEQ ID NO: 39446 - DNA, 30 bp, Homo sapiens
  chr3:99979837-99979867
  hyper
caaagtgacgtggacgtcaacagcaatggc

SEQ ID NO: 39447 - DNA, 449 bp, Homo sapiens; identical to SEQ ID NO: 2678
  chr3:100120033-100120482
  hyper

SEQ ID NO: 39448 - DNA, 30 bp, Homo sapiens; identical to SEQ ID NO: 2679
  chr3:100306083-100306113
  hyper

SEQ ID NO: 39449 - DNA, 30 bp, Homo sapiens
  chr3:100428854-100428884
  hyper
ccgggaggggagtgcgccagctaatgcctt

SEQ ID NO: 39450 - DNA, 827 bp, Homo sapiens
  chr3:101231553-101232380
  hyper
ggaaagtggggtcaggcgctgagaagccgaaatgaaattggaacattggtggaattacgaggaaggcgtggcagagagtgacaagccaaccgggaagatccatgggccgatgagacgcaaggagggtgttcgcgggaggagggaaaaaataaaaggggttttgaggtgaagagcgcccgaggcttcgatgacagctcggaccgggtcttcgactccaggggcgggggcgacccgggagccttccattgtgcgcgccccttcctctccccgcccccgccctcgcccccgcggcttcgggccgcaaccccagctgccgcctgcgcctcccgtttcccccgggtaggagacaatatgttcagcccttctctgaccctttctcaccggatgaagatggccgtcgcccgagctttctcttgtccatcttctcccgctgctgaaatttcagttgcaggcgctgtcacctcaggacccctccggcttggagagggagggggaggggaaaggaaaaaaaaaaaaaaaaaaaaaaaaaaaaaaaagcccgcaaagtgcgaagcgcgcttgcgcaagagccgtcgcctgcccttcgaccggaaatcagccgcccctcccaccttcgaccggaaatcacttcctgggacttttcactgtgggctgcctcttccagcgtttttttggtggcgtttatttcatgatctgagcccctctggggaggtgaaccacctgggtgctcgattttagctttgttgactttgaagattagattgacaaaaattaaaagggaaaaacaggaactcctccggttcactggatctcgcgaggtggccaaa

SEQ ID NO: 39451 - DNA, 319 bp, Homo sapiens
  chr3:101280647-101280966
  hyper
gacgtaaaaagcagcgccggaagggagagggcggaacttccggctgagccccagcgaccgctctggtcggctgtgtagactgttgggtaggctgcgtgctagcttcggcgcggatccctgggcgtccgtacgtcggagtccttcgtcctccagggtccctgttctttgcgccagcgggaaccactatctctgcactcctggtaagcgagtttcttctttcgcctaatgtgtgtgttgggggtgggaggacgccggagacgttccaagatgcacttagtggagcatgtgcgttcggaaggcccacgggtaagaggaagcc

SEQ ID NO: 39452 - DNA, 164 bp, Homo sapiens
  chr3:101292871-101293035
  hyper
ccagctcttccttccgaggcggctactcgatgacatcacatccacttccgcttccgaaggcggcctcttttcattcctcgggaccgctctaggctgccaccacgccggctggccccaaaaactcgatggttgttgggcggggtcgtgacgtccttggcgtggct

SEQ ID NO: 39453 - DNA, 30 bp, Homo sapiens
  chr3:101395150-101395180
  hyper
ggaggcggacctggcgcagcccaggcgtcc

SEQ ID NO: 39454 - DNA, 38 bp, Homo sapiens
  chr3:101396029-101396067
  hyper
agccctgattggagcgcactctcgttttctggcttgat

SEQ ID NO: 39455 - DNA, 30 bp, Homo sapiens
  chr3:101405537-101405567
  hyper
aagacaaaagatggcgaaaagaaagagaga

SEQ ID NO: 39456 - DNA, 346 bp, Homo sapiens
  chr3:101443520-101443866
  hyper
atggcggtggcgcgcgtggacgcggctttgcctcccggagaaggtaaggcgatccctaccccgagtcctaaggtttacttcacggagctgaattaaatagtggagagcagaaaacctaggtttagatgtgcagttctggaccagttcttttgatgcggatctgtggtcgtcgcggaggcgggctaccctctgggagttgtagttcacctgccgttcccagctctccggcgtcgcggtgagggccgagcgggggactacagcccccagaagccttcgcgcggcccggcgccctggctcccgcgctcccgatgctgaggaggcggtggatttcgggctgcgatgacct

SEQ ID NO: 39457 - DNA, 31 bp, Homo sapiens; identical to SEQ ID NO: 2684
  chr3:101475323-101475354
  hyper

SEQ ID NO: 39458 - DNA, 402 bp, Homo sapiens
  chr3:101497829-101498231
  hyper
acgtccgaagttcacgaggagttgggtcgtgagaggggccagacctcgatccgcggggcgacagctgcagtgtcgcgtcgcgagcaggagcttggcggcgtagagcgccagggtgccaacttcgcttccaggcctgtgggttccgcccggcgcgtgctgctgtcagtcaacgccctcggcccgcccccgccgaagctccaccaatcgtagccgggggtcggaggtgaggagacgtcgccgggtgaggaagcggggggctagcggcctggcgctgcggcgaccgaccggggcgtcaggatccctggcccccggagagcgaagggcgggcgggtcccggaggtgagtgctggatgtggtctgtgtgcggacgtcgggaggggccgctgcgggcggagcgaccca

SEQ ID NO: 39459 - DNA, 104 bp, Homo sapiens; identical to SEQ ID NO: 2686
  chr3:101498503-101498607
  hyper

SEQ ID NO: 39460 - DNA, 205 bp, Homo sapiens
  chr3:101546675-101546880
  hyper
tctggccctcctcagtgcccacgcaacccggttcgaaagagaggatgaccgtattctgcattttagaaaacaggctcttagcttcccccgcccccgtcctcactagagtggagaactgaaagcgaacgctataaagggcgccagtgagaggggctggcctcctcttgccacgaggtcagacggcgagttcttagagaaaaaggct

SEQ ID NO: 39461 - DNA, 30 bp, Homo sapiens
  chr3:101568836-101568866
  hyper
gagggtggcccctgcgccctccttagagct

SEQ ID NO: 39462 - DNA, 30 bp, Homo sapiens; identical to SEQ ID NO: 2687
  chr3:102392762-102392792
  hyper

SEQ ID NO: 39463 - DNA, 30 bp, Homo sapiens
  chr3:105085506-105085536
  hyper
tgggggcggagccgcggtgaagcaccgctc

SEQ ID NO: 39464 - DNA, 30 bp, Homo sapiens
  chr3:105087703-105087733
  hyper
aaaaaaggcgtctgcgttctctgacaaatc

SEQ ID NO: 39465 - DNA, 36 bp, Homo sapiens
  chr3:105587999-105588035
  hyper
tcgcgctgccgccccgtccacgtcctccacagtaca

SEQ ID NO: 39466 - DNA, 237 bp, Homo sapiens
  chr3:106959642-106959879
  hyper
cgttggcttctccacgagtgacaaccatgttttcccagatagaagaccggagccctgctcctttgcgatccgccgagggctgcagagagcatcctcatccatttgggcacccctgcccaggaagagcccggccatccctttccggactggatccttaagaggtgaattttcttccgtggattccgatttgctccgtctgaccagcctaggcaatccagcatcgcgtggtaccagtgc

SEQ ID NO: 39467 - DNA, 323 bp, Homo sapiens
  chr3:107148779-107149102
  hyper
gggaggcccaagtcccggcagctgctgcggtggacttagaggcagcagctcctgcttctgccccaaacgttcagtgtagtcggattcccggggacagcagggcagtctgcgcgcacatccccggggcatcgcaggacacctgctgccccctatcggtggtgagaacaataacccgaacccggttggaatcaactggaagaggccttttgaaaaaaagaatattccaggactacgcagtagccagacgactctctaagaacatgggtttccgcagtcagctccgactgcctcgttttaatgcagtttttcgccattgtaggaga

SEQ ID NO: 39468 - DNA, 30 bp, Homo sapiens
  chr3:107149809-107149839
  hyper
gaatagatagacgaacgaaggtgcgtgcaa

SEQ ID NO: 39469 - DNA, 31 bp, Homo sapiens; identical to SEQ ID NO: 2689
  chr3:107245009-107245040
  hyper

SEQ ID NO: 39470 - DNA, 30 bp, Homo sapiens
  chr3:107647106-107647136
  hyper
caacctagcttccccgaggtactgcatgaa

SEQ ID NO: 39471 - DNA, 251 bp, Homo sapiens
  chr3:107940769-107941020
  hyper
ccaagtcagggctgcgtgagctccacggacctcccgggagtttggggtgaagtgcccttccctggctaggaagacggaggcaaggaattgctaacccgctctcacgaaactggttcccagcaggaccaaggagggcatctccctgggggctagcaggcacccgggcgctcggggacgccggcacccacctggacggggccttcaggttgctcttccggaggaactcctcctcgtagcggagcagcttcagc

SEQ ID NO: 39472 - DNA, 41 bp, Homo sapiens
  chr3:107941408-107941449
  hyper
gcccctcatggaggcgtggcgttcgcgccccactgccggct

SEQ ID NO: 39473 - DNA, 30 bp, Homo sapiens
  chr3:108308518-108308548
  hyper
atctcgcgatttctcgggagaggaatcggt

SEQ ID NO: 39474 - DNA, 30 bp, Homo sapiens
  chr3:108308856-108308886
  hyper
ttgtcacatttattcgagaagactacctcc

SEQ ID NO: 39475 - DNA, 30 bp, Homo sapiens; identical to SEQ ID NO: 2692
  chr3:108976491-108976521
  hyper

SEQ ID NO: 39476 - DNA, 228 bp, Homo sapiens
  chr3:110789575-110789803
  hyper
tggtggaccacagacgctcttcttatacgggcaaatgtttaatacttcccgaggtcgcctctctgccatcaaacgaaaacaggcaagaaaataaaactacacatacgaacatgcaaaggaaacaaaaccaaagaaaaacaccaacgcactcgttgggggaaatccatggcctcctgttgccagtcgcccggcgcggaaagtggacagcccagcggccagtgagaagca

SEQ ID NO: 39477 - DNA, 31 bp, Homo sapiens
  chr3:110790314-110790345
  hyper
gaacgaggggcggggccgactaacctattcc

SEQ ID NO: 39478 - DNA, 892 bp, Homo sapiens
  chr3:110790592-110791484
  hyper
tcccaggagttcgacgcgggcgggtgccgaggggaggggagtggcggcggcggcgggcggctcccgcttcagcctcggcagtggcgtcggcgacggcggtgtcgaggcagccgccagcgttcggccaagtgtcagccggcagcgacggcgctagagctgggagctggggacgcgcgcgccggaccttccacagcctccgcccagagcctgaggcgccggggccgggggagccggggggcgggcgggcgagcgggccggggggagggtgggggatggcgcggaccctgcggccgtccccgctgtgtcctggaggcggcaaagcacaactttcctccgcttctctcctcggagccgggctcctgctgcagcccccgacgccacctccgctgctgctgctgctcttcccgctgctgctcttctccaggctctgtggtaggtgaacctcggcggccggcgtgggctgagggagccgccactgagggtgcgggcgccgcggccggctctgccagccgttctctggagcagcgaggcggttggttgtgcgagcgagtgccgaggactttggctggaaacttttcgccgcgcccggggcgaggccctggaagggccaggccagcgaatgctgagccggcggcccgctgccctcccccgcggccgcgcgggtcgccgtgcggatggccgagggttggcgatggtgcttcgtgcgccgaactccgggtttgctccggggaccgttacttcctcgctcattctctgggaaccctcgtaggttaaggtgccgggatgcacgtttgccgctttttttcccggtgaaacttgagctgtgagcccagaaaccctagggaccggagcccgatggaatgaagcctccgggtccacttctcatggcctt

SEQ ID NO: 39479 - DNA, 124 bp, Homo sapiens; identical to SEQ ID NO: 2694
  chr3:111393431-111393555
  hyper

SEQ ID NO: 39480 - DNA, 1051 bp, Homo sapiens; identical to SEQ ID NO: 2695
  chr3:111578039-111579090
  hyper

SEQ ID NO: 39481 - DNA, 30 bp, Homo sapiens
  chr3:111579311-111579341
  hyper
aggcgcagctgaatcgtttgctggttcgct

SEQ ID NO: 39482 - DNA, 70 bp, Homo sapiens
  chr3:111697739-111697809
  hyper
cgaaagagccacgacgctctgcgcatgtgcgctcttcgcaagctgaaaatcttgcggggagctctttagc

SEQ ID NO: 39483 - DNA, 433 bp, Homo sapiens
  chr3:111804990-111805423
  hyper
ggcatagcaggcagcgccctgaacaaatcagaaaaacagccttcggctctggagcccactccggcacggcctcaggtgctctaccccgcgggatccagggagtggccgccactcacagttgcccctcctgtccgctccggtccgctcccgccgcccgaggtccgcgacgccccgcccagtgggtggagtgtgaggcggggaggtcgctcgactcgccggcgctgtggcctcccgcggagccgctcagactttccctgccggcacatggacctggcccaaccctcacagccagtagacgagctggagctctcggtgctcgagcggcagccagaagagaacacgcctctcaatggtgccgacaaggtcttcccttctttggacgaggaggtccccccggccgaggtaaggtccccttggcgctggccctaacttg

SEQ ID NO: 39484 - DNA, 347 bp, Homo sapiens
  chr3:112051793-112052140
  hyper
gtcagtttccccagcggtcacctttgaaaagggaaaaatgtctgaaaatagacaaagctgaatataaacatcatttaattccccccacacagacagcctccgctcctgtgagggcgtggggaaaacggagtgggagaagggggctagcgaggaggaagaggcgggaggtgcggcaggggcacaggtgacgctcctcccgcctgcctagcagagctccaggcgcacatccgcagtcagccacctcgcgcgcgcctccaggagcaaggatggagaggctggtgagcggggccggggcttgggaaggagggcgcagggcaggcgatgttgagccggtggccctggggcgg

SEQ ID NO: 39485 - DNA, 277 bp, Homo sapiens
  chr3:112052251-112052528
  hyper
cggattttgccttccaaagggtggtttacaggcagctgctggcgtccagattctccattccaattgcctgaaaaaaagatgcaccaggccggggctccgggggctcttgatccgcgctgacgaagctggcgcatcctccgggcaggctcggctcggctcactggctccagctcccaaaactggggaggcacagcctattttaaactgcccccaaaagggaaagagaaatgctgtattggttccatattggcaccaaaagctgcggcggagatacaga

SEQ ID NO: 39486 - DNA, 30 bp, Homo sapiens
  chr3:112280226-112280256
  hyper
ggggactcctgcggcgcctggtccctgaaa

SEQ ID NO: 39487 - DNA, 30 bp, Homo sapiens; identical to SEQ ID NO: 2699
  chr3:112710254-112710284
  hyper

SEQ ID NO: 39488 - DNA, 13 bp, Homo sapiens
  chr3:112930423-112930436
  hyper
ccatatggaggga

SEQ ID NO: 39489 - DNA, 158 bp, Homo sapiens; identical to SEQ ID NO: 2701
  chr3:112930455-112930613
  hyper

SEQ ID NO: 39490 - DNA, 987 bp, Homo sapiens
  chr3:112930655-112931642
  hyper
cgcacgcgccctccctctccggcccgcaacttctcggtcctcggctcctttgttgctccagccgcggccgctcgcccgtgttgtgtgtccccggtgtcaccgagcgtgttgtgtgtccgtgcggcgcggcgctgtgtggctccctcgcgcccaccacgctggcccccgggccccggctcgcccttcccaggcgccggctgcagcagaggtgagtcacgtcgctgaagtttgttttcttttcataaaaagttgtgtttactgttggttcggggagaggagggggcgggaggcggccgcaggccgaggcagcgccagcgagtggctgccgggggacgtgccggcggcgggagccgggtcccagcgctcggccgggcgcccggggctgggagctgcggccgaggctgggcgcgccgggcgccgggcgaagaagttggggcgaggcgggcagcgggggtcccgggggctgcagccgctacggggcccaggggcgccgcatctcgttccctgccgcagcggtctggccgggcgatggtggtttcgcctcagcggttcccagaagcttctcgggtggaagaaggatccagccagcctcccaaacttccaccgaaggttgacaccagcgccccggccccatgctccaggccgtggggggaacccgaggcgtggcggcaaatgcgtagagtcactcaacacgcactcggcctctttggagggtgagggtttctcatagttggcgtcttctaaaggaaaaacactaaaatgaggaactcagcggaccgggagcgacgcagcttgagggaagcatccctagctgttggcgcagaggggcgaggctgaagccgagtggcccgaggtgtctgaggggctggggcaaaggtgaaagaggtgtgtgtgtgtgtgagagagagagttcgtgtgtgcgtgtacgtgtgtgcgcgcgcgtgtgtgcgtgttcgcgccagcagcgtcctcctggggtttttgttg

SEQ ID NO: 39491 - DNA, 30 bp, Homo sapiens
  chr3:113234042-113234072
  hyper
agagctccgccccacgcccttgcgtatatc

SEQ ID NO: 39492 - DNA, 1137 bp, Homo sapiens
  chr3:113251173-113252310
  hyper
gagagaacgtgatgacgtgagactctccatggagagtaggaggtaataaagaaataaaacaggtgtctgaggagaggttctattagagaggggagaatagagagtaattatcgttcagacaggcaagagttctctgcaggtagcagcctgggaaagcgaactcgcgcaccctcttgggggacgggctcttttgctttctatttcttctcctgcagccagggtgcacacgtatttgaaacagaccgaatttcctcctcgatgtggcgtcaggttgacttttcgagactagcgggtatttctttttaatgactccaatgcctttttattattgctgttattgaggttgagggagaagagatcggtctaaattctggctgggtaagtggggggattctcggcgatgagaaacgggggacttagaagccggaggaaaatcagcagccccacatctccacttctccagtccgccctactctccacccgtgacctccagtggagaccccaggcggcagcatcagtatttgatcggcccttcgtcagcacgctgccagccctggccggctgggttcgccaggcatcacccgctcggctctgaagcggacgcctggccctgcaccgggctttggaaggaccctctctgcgctcgccccctccccagggtggctccgctttcgagcccgggcgcggtgcccaccatgcgcggctgcctgcggctcgcgctgctctgcgcgctgccctggctcctgctggcggcgtcgcccgggcacccggcgaaatcccccaggcagcccccggcaccgcgccgcgaccccttcgacgctgccaggggcgccgatttcgatcatgtctacagcggggtggtgaacctcagcaccgagaacatctactctttcaactacaccagccagcccgaccaggtaagacactcgctcccctcgctcgactcctagaacttgccagatctcagagccccgtcgctgctttggagtcccctgggaattgaccttgggagacttcggggaccaggggactttctttccctttctcctccgaagcaatcgctgccctgccctagctgcctcaacacgcctcggggacaactctgcttcgcctcgcgcctctcctggcctggtcaag

SEQ ID NO: 39493 - DNA, 30 bp, Homo sapiens
  chr3:113464978-113465008
  hyper
gcgggagtgtctcccgccgccgcgcttgtg

SEQ ID NO: 39494 - DNA, 30 bp, Homo sapiens
  chr3:113466178-113466208
  hyper
gttggaagtgagtgcggccattatggttcc

SEQ ID NO: 39495 - DNA, 79 bp, Homo sapiens
  chr3:113557397-113557476
  hyper
aggaatgagagcgaaactccgtctcaaaaaaaaaaaaaaaaagtttccgagcaattcaccttttcgcacattggggcag

SEQ ID NO: 39496 - DNA, 30 bp, Homo sapiens
  chr3:113774943-113774973
  hyper
aactcctttcaccccgatgggcattagcag

SEQ ID NO: 39497 - DNA, 30 bp, Homo sapiens; identical to SEQ ID NO: 2704
  chr3:113775287-113775317
  hyper

SEQ ID NO: 39498 - DNA, 37 bp, Homo sapiens
  chr3:114866220-114866257
  hyper
caatgagaatgggacgcccctcgtgaggttgccgccc

SEQ ID NO: 39499 - DNA, 400 bp, Homo sapiens; identical to SEQ ID NO: 2705
  chr3:115231422-115231822
  hyper

SEQ ID NO: 39500 - DNA, 703 bp, Homo sapiens
  chr3:115377287-115377990
  hyper
ctttaggcgttccctcggcggctctgcagtgtgatctcatctctttgtttctccccggctgccgtcagtcaccggctctctgcgcccccacccgcgcgggctcgcggccgtgctgcgggcgtggcctcagccgctgagaccctggggaccgcagggcgtggcgcggcctccgcccgctgcacggagagccccccagaggcagcgacacggcgcttggggtccgcggggctcctcctccaactccgcagacctccggggaggcctcttgctccccgaacacccgggagttcgctttcatttttaacgaatctccacaatctcttgtttgggagataattgcttctttcaggggcttggagaacaaaagcgtcagcccagggccccaggtctctccgcgggaggagggcacccaggggcgatgcgccgggctctctccttcgcccttcttggcccgctcgccttcagctcccacccgcagcagcaaccgcagcctgcttccggggactgagcagccctgggtcagccaaggttaagcagcgggtggggaagaggagagaaagctgggtcaattggaagtaaccttcttgtaccgcccactttttccttgcttggaggcggcaaaaagcactttagcattcttcgggctgtttgcgcctctttctctaacagggccaggggagtggaagagcggccggcaggaagg

SEQ ID NO: 39501 - DNA, 30 bp, Homo sapiens; identical to SEQ ID NO: 2707
  chr3:115881799-115881829
  hyper

SEQ ID NO: 39502 - DNA, 616 bp, Homo sapiens
  chr3:116163676-116164292
  hyper
acacacgtgtagacgcgcgcagcagaaaagttgcccgaaagccctacctgaggatggctgtgtccccctgcctcacggtgatgttgtccgtgcctcggttaaaatccacgctgcgaacaggcagtcctgtgggaagaaggcagagcaatctcagtaggaccagtggcaactgtttccgatccggctgaactctcctgaccatggtggccacgccgaggtgcgggtccgcggggtgctctggaggggtgcgcgctgctcgcgaggagaggcttcaccaacacggggctttcatccacagcgagcgcagagcgggctttgccagtttatggtcctttccactttgcctctctctttccctcgctcagtctcttttccctctaagacttaacaaagccctcataaaacccaagcagaagggtgaaaagtaaaagcaacacaatttcaaaagagagagtgcaaatagcaagccctctggaagagctgaagaggaagccaaaggaaagggttcttgtttggtctctctgtgactggatgctcctctgccagtgtctgagctgagctccttcgctctgtaacccactttcccaggctggcgggcgggcgggcgagggagccg

SEQ ID NO: 39503 - DNA, 223 bp, Homo sapiens; identical to SEQ ID NO: 2710
  chr3:117715480-117715703
  hyper

SEQ ID NO: 39504 - DNA, 361 bp, Homo sapiens; identical to SEQ ID NO: 2711
  chr3:117715762-117716123
  hyper

SEQ ID NO: 39505 - DNA, 371 bp, Homo sapiens; identical to SEQ ID NO: 2712
  chr3:117716213-117716584
  hyper

SEQ ID NO: 39506 - DNA, 30 bp, Homo sapiens
  chr3:118753078-118753108
  hyper
aggatcctgcattccgcagagcgcagcgag

SEQ ID NO: 39507 - DNA, 30 bp, Homo sapiens
  chr3:118754082-118754112
  hyper
cctgttgcagttttcggataatttatattt

SEQ ID NO: 39508 - DNA, 30 bp, Homo sapiens
  chr3:118959970-118960000
  hyper
gactgggtgctgagcgcttcccaaattcca

SEQ ID NO: 39509 - DNA, 30 bp, Homo sapiens
  chr3:119012706-119012736
  hyper
atgggagtggccggcgtgaagccactgcct

SEQ ID NO: 39510 - DNA, 34 bp, Homo sapiens; identical to SEQ ID NO: 2713
  chr3:119041463-119041497
  hyper

SEQ ID NO: 39511 - DNA, 30 bp, Homo sapiens
  chr3:119182267-119182297
  hyper
tcccagcgttggaacgctgcaaaccagctg

SEQ ID NO: 39512 - DNA, 30 bp, Homo sapiens
  chr3:119217118-119217148
  hyper
tggcattttaaatacgataaattacttcaa

SEQ ID NO: 39513 - DNA, 30 bp, Homo sapiens
  chr3:119396210-119396240
  hyper
ggcaaacgccgattcgtccgcagtcacttc

SEQ ID NO: 39514 - DNA, 30 bp, Homo sapiens
  chr3:119421924-119421954
  hyper
cgggaggaaagaggcggcaccatgagccac

SEQ ID NO: 39515 - DNA, 30 bp, Homo sapiens; identical to SEQ ID NO: 2714
  chr3:119813912-119813942
  hyper

SEQ ID NO: 39516 - DNA, 111 bp, Homo sapiens; identical to SEQ ID NO: 2715
  chr3:120004171-120004282
  hyper

SEQ ID NO: 39517 - DNA, 31 bp, Homo sapiens; identical to SEQ ID NO: 2716
  chr3:120068919-120068950
  hyper

SEQ ID NO: 39518 - DNA, 1033 bp, Homo sapiens
  chr3:120168943-120169976
  hyper
cttctcttacacttgcgcaacgttacagggaacacttgggaaaaggccgttacattgcccagatgataacacaaaacccgaggacacttcacaaagaagaaaatacatttcagagaatcatgatctcactttaaaagagagaaaggaaaattaattttgccccaaaagaagaatcccgattcctctgcccccgcccccaggagacagacttgggagggaaaagtccccaactactctcagtctcctctgaagtgaaggacggaactgaggcgcctttttgaactcgctgctgctccagtcgccgcctcgtccccgtcggcccagcccgtcccctctcctcctccccgctctccctccatgttagccgcggcggggctcccgcttacggcccgaactacttttcctgctttaaagatttaagtttcgtaagcagcattactgccccagctccaccccagcacaccccaaggaccgaaactcccagcgccaccccgggagagcatccccaggacgcgcgcccacccgcccagcgcgcagacccaagaggccccggggaccgagttcggactcctcggcccctcgcctacctcggcgcggacccaggcgaccgccaccagcgcgagcgcgagcgcgagccagcgtttccacatctgcggaagagagaagagagcgagtctgaaggcgccgggccccgcgctgacctgggaaacttgctcgggtcccgcaggctcgctccggccgcccaagcacccccggccgcccgaagagtccggcctccgcgccgtgcgccctgcgctcaccgtggtctggtccaggtctcctgggggcgcggggcaggacggcggcagcgagctgtaagcggaggtgggagctccgccgatcgccagcctcggaggaaatgcgacctcccctcgccgccccttaagacctctccttccccgcctgcctgcccccccagctcctccccattctcctcccccttctgctgcagcggcccccgcggctcccgctccccctccttccgacccctgct

SEQ ID NO: 39519 - DNA, 120 bp, Homo sapiens; identical to SEQ ID NO: 2718
  chr3:120170066-120170186
  hyper

SEQ ID NO: 39520 - DNA, 30 bp, Homo sapiens
  chr3:120315445-120315475
  hyper
accacgcaaagggtcggccaccgctcccga

SEQ ID NO: 39521 - DNA, 726 bp, Homo sapiens
  chr3:120626866-120627592
  hyper
agaacttaccctatcgaatctaggattggcgccgaagctactcccgccctttgacgtccccgggcaccccgcccccttcacctcccagctttgccggggaagaagcagggcggggcaagctaggggccggcccgggggcggggcctgcctcccacggcgggagggcggagcctgctctggagcctgactgctcggttaggacctcggagagcgccaggcgccgcgaccagagggcccagagaagcggccggagcccgcctacctcggccccctcagcttcccgggctggcaggcggctagaggcgtctgaggaaggtgcctaagtcctgggtcagatagtcatccctctgggacgccgccgccgctgccgccgtccagctgtggctccctcgcacctgtgtgtgtctgtgtgagtgtgtgtgtgtgtttgagagagagagagacagagagagacagagacagagagcgagcgcaccagcgcgcgaatgcccgtgtgagggtgtttgtgtgtgttctggctgggagcgcgaatgcctcggcgtgaggtgtttgtgtgttcgcgcgcccgcgggcgggcgagagccccgcgcctcagcgctgggcctgggggagggacagcgggagcggcggctctgcgcgcccagcaggctgaggcgggactcgggccgcagccgtcgccgccaccgcttcacgtcccccgagagcggctgccgtgcagcggggaga

SEQ ID NO: 39522 - DNA, 188 bp, Homo sapiens; identical to SEQ ID NO: 2721
  chr3:120627845-120628033
  hyper

SEQ ID NO: 39523 - DNA, 30 bp, Homo sapiens
  chr3:120628276-120628306
  hyper
tctttttttccagtcggtcgtaaccaatgc

SEQ ID NO: 39524 - DNA, 30 bp, Homo sapiens
  chr3:120628529-120628559
  hyper
ttccgtacatccggcggggactgcaggggt

SEQ ID NO: 39525 - DNA, 30 bp, Homo sapiens; identical to SEQ ID NO: 2722
  chr3:121634394-121634424
  hyper

SEQ ID NO: 39526 - DNA, 271 bp, Homo sapiens
  chr3:121741106-121741377
  hyper
cctgcggcgctccccacggctccgcctcccgccccgcgcgccgccgtttcctgctccgcccccgcctcccgggggactgcggccaccttccctacctgctgccgcctcctgctcgctgaaacaccgtcccccaccccgctgacggagaagattcccactttcctccagaagttctcgggaaatctcatcccctgcaaatgtatccccctctccttctagaattatgtggatataactttctagggtgtgtttcctgcgttatatttccatt

SEQ ID NO: 39527 - DNA, 140 bp, Homo sapiens; identical to SEQ ID NO: 2725
  chr3:121902809-121902949
  hyper

SEQ ID NO: 39528 - DNA, 228 bp, Homo sapiens; identical to SEQ ID NO: 2726
  chr3:121902990-121903218
  hyper

SEQ ID NO: 39529 - DNA, 211 bp, Homo sapiens; identical to SEQ ID NO: 2727
  chr3:121903323-121903534
  hyper

SEQ ID NO: 39530 - DNA, 102 bp, Homo sapiens
  chr3:122102120-122102222
  hyper
ggtgaccgcggagtcgcctgacaaaaaatatagtacgaggggaatccttaggaaagctgagtgcaaggcttgagttcaacgtggtccgcatccacctcggaa

SEQ ID NO: 39531 - DNA, 30 bp, Homo sapiens
  chr3:122103138-122103168
  hyper
ggcagcaggtgagacgccggtcgggatatg

SEQ ID NO: 39532 - DNA, 30 bp, Homo sapiens
  chr3:122135386-122135416
  hyper
atggagtcacggggcgggtgacagaattta

SEQ ID NO: 39533 - DNA, 36 bp, Homo sapiens
  chr3:122282988-122283024
  hyper
ctggccctgggacccgggtccgcgcccgtccccctt

SEQ ID NO: 39534 - DNA, 45 bp, Homo sapiens
  chr3:122296693-122296738
  hyper
gagtatggtgaggagcgcgggggacgggtgcgggaaggggacagc

SEQ ID NO: 39535 - DNA, 30 bp, Homo sapiens
  chr3:122399329-122399359
  hyper
aaagggtcggcttgcggcaaaaattaaatg

SEQ ID NO: 39536 - DNA, 255 bp, Homo sapiens
  chr3:122399766-122400021
  hyper
ggctcctggggccccgaccccccgaagaacttgaacaccaagttgcagatgtacttccagagcccgaagaggtcgggaggcggcgagtgtgaggtccgccaggatcccaggagcccatcccgcttcctggtgttcttctacccggaggacggtgaggggcgcgaggggtggggtgaggagggggcacctctgccctccctccagggaaatggcggcagggcacgcacgggagggtgacccgcccgacttcggcgg

SEQ ID NO: 39537 - DNA, 30 bp, Homo sapiens
  chr3:122512698-122512728
  hyper
gctgggcgggaccacgcagctttgttttga

SEQ ID NO: 39538 - DNA, 30 bp, Homo sapiens
  chr3:122513050-122513080
  hyper
attttagtggctgccgggaaatacgaacct

SEQ ID NO: 39539 - DNA, 30 bp, Homo sapiens
  chr3:122514128-122514158
  hyper
ggaggcggcggcggcggcgctgcccgcggc

SEQ ID NO: 39540 - DNA, 164 bp, Homo sapiens; identical to SEQ ID NO: 2728
  chr3:122514391-122514555
  hyper

SEQ ID NO: 39541 - DNA, 30 bp, Homo sapiens
  chr3:122705777-122705807
  hyper
agcttgtgtggggcccgggattgtggggaa

SEQ ID NO: 39542 - DNA, 30 bp, Homo sapiens
  chr3:122745545-122745575
  hyper
ccgcaggacgtgagcggaaagtgaatgggc

SEQ ID NO: 39543 - DNA, 70 bp, Homo sapiens; identical to SEQ ID NO: 2729
  chr3:122785819-122785889
  hyper

SEQ ID NO: 39544 - DNA, 30 bp, Homo sapiens
  chr3:122786487-122786517
  hyper
cttgttcttggcttcggccccaggcgtctg

SEQ ID NO: 39545 - DNA, 1077 bp, Homo sapiens
  chr3:123167490-123168567
  hyper
ggtcacacgtcgggggcggcccggggccctgcgctgcagcggggcatcttggcacccccgtcctgagcggaggaggagggcacagccccgaggtgagaagtagctgaggatccgcgtcagaagtcccaggtccgaaatggagttgcctccgaggtggggtcgcagggactggtctggctgctgctgcgccgcacgcggagagacgtccgggatcctggctcgcgtcgagctcgacgagggccggagttgcggacgagacgggacggagtggtgtccttgcgggcggtgcctcctcgggccggcagtgcccgggcgcggcgctcgctgattccgcctaagcggagcccagctgctctcggggctcggcggcggcgagggcggctcggcgggggtcccggcgaagagacactgcgggtgcgctttcctcgcagcggactgggagcgactgggaggtgcgggcgccagccagcattattttcttacgaggggtggggaggtgggatgggaggtggagaggacgggggagggggcgacgggcggagcaacagctccggagccccgggggggagggtcctggagcccgggggggccgttgcccgcatcccccacctctcgcggcgagagtggatgcgtggccccggcgaaagccgagccgagccttcggcgcgtccgcgcagggggcggggtccgggtcagggaccggctcctgcggtgcggcccttcccctctcgcctctccctttcccgcaaacggagcggggccggccgggacctgccggcccggagagctgtcgcgcccgcttcgcaagccccaagctcctcgtcgccggctgcgggcccaccgcggccggcgcggaacgactaggcggaggacggaatccggcgcagcgctgccgcggttctgccccgacgcaggcaggcttctcccggggagtaaggcatccagagatccagcgccggggctcagaagcagccggcccagaggggcccgcctgagagccgcggcgcccgagaggcgctccgggggggcccgcgggagcccggctcagggcgcgccatgcacgcttcgggccctgcg

SEQ ID NO: 39546 - DNA, 236 bp, Homo sapiens
  chr3:123168581-123168817
  hyper
cgcgccgctcctcccttctcgcccgctcgccgccgccggagagccctccgcatcccctcctcccgctgcctccccgccccccgcgccgcccgggcctcggctcacagccgcgcgaggccgcctccgcccccggcctggccatggccccagcctcggcgccccgcgggcatcctcaggcctggccgcgggcaccccagttccccttcctcacctaaaattctcgctgcgcccctccc

SEQ ID NO: 39547 - DNA, 30 bp, Homo sapiens
  chr3:123170279-123170309
  hyper
gtgcaaacagcacctcgggcattcagagag

SEQ ID NO: 39548 - DNA, 443 bp, Homo sapiens
  chr3:123602741-123603184
  hyper
gctgggagaagggtccgcttctcctccgcccctcaaatcaaaggcacccccttcggatgattcctagaaaggcaatcgcatcagtgtccccaagcacttcatctccccaaaagaaaactcgtgcagcctggcgtcactggggtcgtctccttacgcccctgactcctcgccgcaccccggggcccctctccattaggggagtcgggaggcacagacggtgggggtcccagcccccacccagaactcccaccctcggagccttgacttccagggcccgcgcctggacaaaagcatggggcgggctcactcacccgcgcggcgaaggcggcccgggagccggggcaccggcgctcggcggggcgccccggccgcaggcgcacagcgcgggctccgagctcgctcagcgccctgctgccgaccgggcggcgcggggagcccgcgag

SEQ ID NO: 39549 - DNA, 294 bp, Homo sapiens
  chr3:123603206-123603500
  hyper
cggggcggggcggggcggggcgggggtgagcgaaccggcgagagagagagcaagtgggagagcggagagcggacgcgcgctgaggagagcgagtgagagcgcggcgctacggggtcaggactcaaaccacccgctccagcccccatgcactgatttgcatgacatttgcatagcgctcggggagtggacctgctgcccttcccgccacgcccacccgccttctgcctcggagtccggagcggagaatccgcagccaaacctagcgccagacccgggcccccctcgcacttatcc

SEQ ID NO: 39550 - DNA, 89 bp, Homo sapiens
  chr3:123752027-123752116
  hyper
ggaggagctggggaggcggctgctgcggcggcggcggcggcgggagccagagggggagctagagagcgagcgagcgaaggagggaggta

SEQ ID NO: 39551 - DNA, 210 bp, Homo sapiens; identical to SEQ ID NO: 2732
  chr3:123752378-123752588
  hyper

SEQ ID NO: 39552 - DNA, 30 bp, Homo sapiens; identical to SEQ ID NO: 2733
  chr3:123752821-123752851
  hyper

SEQ ID NO: 39553 - DNA, 30 bp, Homo sapiens; identical to SEQ ID NO: 2734
  chr3:123753234-123753264
  hyper

SEQ ID NO: 39554 - DNA, 30 bp, Homo sapiens
  chr3:124449089-124449119
  hyper
gctttgaaccccagcgaccccatccagaag

SEQ ID NO: 39555 - DNA, 524 bp, Homo sapiens
  chr3:124605379-124605903
  hyper
catccccccagcagcccgcccgctcccggccggccacaaggaccgctttgtgcccgccaacggagagcccgggccccaaggcagggctggcggcggtcctccccgtgccctgggcgcgggccctggcgggctaggtcagcaggccggccagcctgtttacacaggaagggaagctcctcctcagcccgggagggaacaggagactcacgacagcccggcggggctgcgcgcggggagcgccccgcggggctgtcccccagcgactggcccaccagggagtgccccgaaggcgccctccgccctcaggcaccgcctgcgctccccgcccctccgagacgcccgcccgcggctgagtgtgcgacaaagtttctctgggcgccgtgggcggcgcggcttacctgcgagccggggcaggagcgcgcagagccccaggaggcaggcgtacagcggcgccggggcccgcggcatggtggggcgcctccctcagcggcggcgcggtcgctgcactccgcgggggccggcgg

SEQ ID NO: 39556 - DNA, 30 bp, Homo sapiens
  chr3:124606568-124606598
  hyper
cggttgctagactgcgagagggagagcagg

SEQ ID NO: 39557 - DNA, 617 bp, Homo sapiens; identical to SEQ ID NO: 2736
  chr3:124773768-124774385
  hyper

SEQ ID NO: 39558 - DNA, 30 bp, Homo sapiens
  chr3:125314551-125314581
  hyper
gactggctgatgggcgagggagggcgaggg

SEQ ID NO: 39559 - DNA, 31 bp, Homo sapiens; identical to SEQ ID NO: 2737
  chr3:125635404-125635435
  hyper

SEQ ID NO: 39560 - DNA, 31 bp, Homo sapiens; identical to SEQ ID NO: 2738
  chr3:125677241-125677272
  hyper

SEQ ID NO: 39561 - DNA, 23 bp, Homo sapiens
  chr3:125690916-125690939
  hyper
caacatgcatcccgccggagctg

SEQ ID NO: 39562 - DNA, 178 bp, Homo sapiens
  chr3:125691029-125691207
  hyper
cgccttcatctcttggaggacgggcggggagagagggtcctgtaaaaccgcggaggttgtcatggctgcagccagggggtcgggactaactggcatcgtctttgttttagctcttgcattgctttgatgctttaaaatccacacataaatactacatctagccgggcaaggatgggat

SEQ ID NO: 39563 - DNA, 30 bp, Homo sapiens; identical to SEQ ID NO: 2741
  chr3:125898665-125898695
  hyper

SEQ ID NO: 39564 - DNA, 1022 bp, Homo sapiens
  chr3:125898947-125899969
  hyper
gtccctttctcttatcgagcctcagttttctcttccataagccgggccagcagtgcccaccccacaggttggcgccagctccgtaagggccctaccaccgcggccggccagatcctcggcgggccagtcctggcgctgcggtcatttagcctgatgacccctggccaggttcagcctcaattgctccaaagaactccggacccgtaccccgagcccggcgtcccagcggcgaagttgatgggccccgcaggagcccttgcggtgagaaccgagtcctggagcccctggagcccccggagcccccggagctgcagccggggcagcctcctttccgccgggagtccagcgctctcgagagcccagaaactcaccgcgcgcaggagttggtgcgggcgtcccgggcaggttagacttctgtgagccgcagccccgaaactgaggttggtgcagacccgtcctgggagccaggaggtgggacctgtccccgccagtccgcgagctctggttaaggccagagcccgtgaggggaggggcgcggggcgggcggagagtcagccgagtgggggcggcgctcaccggtggtgggactatggcgggagcgcagcgcaccctctccgggcgggtctataaatgccatgtaaaagccaaccccgcaggggcctgcgctctttcccgcttaggtcaagaagacttactgtggacccttggagaattcccagggctttgaaaagtcccaagcacccagcagggctggcagttctgagcgctggcaaggctaagtgggtcagaggagaccctcgccaagccggtgactcactcactcgctcaccctctctcactcttgatgggccaagtacctgccatgtgctacggacacagcagagcgaaaggagacgctgccctccgggaatttgcagccgcttgcagaggcggccccttagcagctgcgcatccgggtggatagcggcgcttctgcccgcccagtgcctacccgcctctccgagagaaaaacagcccctggt

SEQ ID NO: 39565 - DNA, 256 bp, Homo sapiens; identical to SEQ ID NO: 2743
  chr3:125932038-125932294
  hyper

SEQ ID NO: 39566 - DNA, 435 bp, Homo sapiens
  chr3:125986251-125986686
  hyper
atcccaggctgtggcgctggggcggtgcgctggccgtgggtcgagaggtcgctgcgccctgcattcctggccgcgcgcgcacaggctggaatccgtacattccattcataacattcccgcaagcgaggggaggagacgcaaagccggggagtgagtgattaaagaaaagaaagaagggcttcttgcagctccgggctgtgttttttcctgcgcgccctggcgcagtccccggctcggaaaggcaggagcacgtgagcggtttgcagagcagcccggcccagccgcgcgcccgtggccggaggctccatttaccctccgcggagggcgctgtgcggcggcacttaagcggcagcttcctctctcccaggcggcctttgtggctgtggccgggacagggaaaagctgcccaggccaagagggcgggggcgtcagggg

SEQ ID NO: 39567 - DNA, 277 bp, Homo sapiens
  chr3:126074821-126075098
  hyper
ggggacacgctgttccgggcacagtccccggctggccgccggactccgccccctcccctggcccggccaggcctgctgtttatcctcccggggacacagcggctgcaggaacaacatgtaattgataacaagcccagcgccggccaagggcttgccattgggtcagcgtgcaaatcacgggggtggcggcgggggctgtccttcaaaataagagtctccggtccctgagccgcccgcaggccccaaagtcgcagagtccgggcgtcctcacacctgt

SEQ ID NO: 39568 - DNA, 215 bp, Homo sapiens
  chr3:126075302-126075517
  hyper
acggcctctctgccccgccgccgccatccctcggtcaggccatggctttggtaatgttcggtctgagcggacggggactcagcgtggagtgagacgcgtgaacggtgcgggtgtgcgtgaaggggtgtgagttcctgtcgtgtgactgcgtgtgcggggcgtggtgcgcggcagccgctgtggctgtgcgggaggctgtccgcgaaggactcgcg

SEQ ID NO: 39569 - DNA, 30 bp, Homo sapiens; identical to SEQ ID NO: 2745
  chr3:126077031-126077061
  hyper

SEQ ID NO: 39570 - DNA, 122 bp, Homo sapiens
  chr3:126113534-126113656
  hyper
agaggaagaaacccgcgttcaccaggcccaggcctgggccaggcgctgtcctggcggcgtcagggaggacatcgtgcccagagctcggacccagcagcccggccccgcgccctccctgtccc

SEQ ID NO: 39571 - DNA, 129 bp, Homo sapiens
  chr3:126113794-126113923
  hyper
cggagcgagccggggcagtcggggtcggtgggtgcgctcgcggtccggggagagggggcgcgcggggtccgtgagggcgcgtgggggcggcggcaggggtgcgaaaccagggcccgaggggcgcgcgtg

SEQ ID NO: 39572 - DNA, 30 bp, Homo sapiens
  chr3:126194147-126194177
  hyper
ggcgaaggccagcgcgcactgcggctcggg

SEQ ID NO: 39573 - DNA, 319 bp, Homo sapiens
  chr3:126195082-126195401
  hyper
cacctacgagggcgagcggcggggcacgggaccgacaggggacggggtgaggctcccaacgctgagcgattccttctcgttcccgctggcgtggaagacgaggcttgtcttgacttcgaatcgtattaatatttcagacacttaacaggcaacctctcgtaggcattgactgcgtcccaggggctgtacctgtccgagctgattaagcgtgcgcggtcacccaggggtgaggaaacagggacggcgagctcgagtcactcggcagccggcagatccaggattcgaacctgtccaacaggccggacgcctacccccagct

SEQ ID NO: 39574 - DNA, 425 bp, Homo sapiens
  chr3:126242886-126243311
  hyper
ccccaatcagtctccgccctagcgccctggacttcggccccattccattgggtgagggtgggggcacgaaaagaggagcgggcttgcggccccaccgtgtcccgcctcctcagtccccagcgactcgcaggggctggtggggctggggtccagctgccgtgctcccctgccctgcgccgcgccgcgcgtcttggtaggcgctgcgctgccggggccgggtcctgggccagtgcaactccgcccccagccgtatccagcggactgtcctccgccgcgcgcccggcacagcatggggaggcgctgctgccggcggcgcgtgctggcggccgcctgtctgggcgccgcgctcctgctcctatgcgccgcgccccgctccctgcgcccgggtgagtgcccgccggccgagccgcgcacccccaaccaaa

SEQ ID NO: 39575 - DNA, 683 bp, Homo sapiens
  chr3:126373467-126374150
  hyper
ggctgacctcaccgccgcagcccgggacccgcgggcgccccggcccggacccgccctgccccgggtggcgtccgcgtggcgggcccggtcgcgcgcggtggaaccggcgagggccgcgcctacccgagtactatggggacagtagctcttgctgaagatcaccacccggctgcgctcgatgaggcccacgaggtggcggcgcagctcctcgcgggcctcggacgagcggctgggcccgggggacgacaggcgggcacggcgccccggcggcgacaacacgcgcgcccctcggacatggcccgagcggcggttgggggcatcgcccgcctttcccggcccgggcgactgcggcggcgaccgctccagagtctcgctctcgctcctggcccggccgggcctgctcacaaaccgaaacgcaggcggctgcggcgccgggacggggcctgaggggcggcgaacgctgccctcgctggccactctcaccacccgcgcgaatccgcgaggcagccgctcgccccgccccccaacaccgccccgcgcatgcgaaattgggtcccccgcccgcccgcagcctaggtgtcacctgcccttcgcaaaggggcgggtaccaagcgcgagcctctttatctccaggttgtgcctgcgtccggagaccacccaatcttggcgatggcgctctgaga

SEQ ID NO: 39576 - DNA, 359 bp, Homo sapiens
  chr3:126701038-126701397
  hyper
cttctgtaggggtgacgtgattcacacagcaaaaaccgcacccctcaggctacagatgggggccaagtccccagccgggactcagccctcccacgacggggttttcctggcccatctgctctgttatcgatgctcctgttgccggcttccccttccttggcctggttgcgtccaccgggaggccctcccggatgcctcctgcctgggagtggcggttgtgagtacagtaactgagtgctgggtgtctgcccctcagccttgccatgcaggctgggggtattgcctggacagctctggcccgtcaccctggattctgcagccccacacctcacaccgtgtagatccgctgccccacgcta

SEQ ID NO: 39577 - DNA, 30 bp, Homo sapiens
  chr3:126854408-126854438
  hyper
ctctcccagtcatccgttatcgcgcggacg

SEQ ID NO: 39578 - DNA, 31 bp, Homo sapiens; identical to SEQ ID NO: 2750
  chr3:127175258-127175289
  hyper

SEQ ID NO: 39579 - DNA, 30 bp, Homo sapiens
  chr3:127308788-127308818
  hyper
gagtccagagggagcggaggcttcgacatg

SEQ ID NO: 39580 - DNA, 52 bp, Homo sapiens
  chr3:127309527-127309579
  hyper
aagaccgtctttttcgtccagcccaaattgcgaaaacggccacagtcccaca

SEQ ID NO: 39581 - DNA, 40 bp, Homo sapiens
  chr3:127316968-127317008
  hyper
atggccctggtgtgaccgaggtcacgcagccagcaagtgt

SEQ ID NO: 39582 - DNA, 30 bp, Homo sapiens
  chr3:127317451-127317481
  hyper
tcgcctgcaccctgcgtgaggcgactcgcc

SEQ ID NO: 39583 - DNA, 469 bp, Homo sapiens
  chr3:127347861-127348330
  hyper
gacgggcggagggacggccgcccgcgcgtccgcttcgtctccgcgggggcgcgcccgcggcacgcggccgggcggggccgggcgtgagtgacggccatgcggaccaatggggcgggcgcgcgccgccgccgccgcccgcgcggcccctgacgcgggcccgggcgccgcgccgctgcggctgcaggcggcgacggctacaccatgggccggctgctgcgggccgcccggctgccgccgctgctttcgccgctgctgcttctgctggttgggggtgagtgcgctccgggcccgagcgcgggagggcgggcggcggcgtgggcgcggtgctggacagctccccgggccgccaacaaaggggccagagtgcggcgccgccgggagcgcgcgtgtcccggccgggccgcggcgccgccccgacacacgcgcacgaggagtgggtgcgtgggggccgcggcgggcgcctggcgtg

SEQ ID NO: 39584 - DNA, 30 bp, Homo sapiens; identical to SEQ ID NO: 2752
  chr3:127391206-127391236
  hyper

SEQ ID NO: 39585 - DNA, 118 bp, Homo sapiens; identical to SEQ ID NO: 2753
  chr3:127451673-127451791
  hyper

SEQ ID NO: 39586 - DNA, 30 bp, Homo sapiens; identical to SEQ ID NO: 2754
  chr3:127541157-127541187
  hyper

SEQ ID NO: 39587 - DNA, 30 bp, Homo sapiens
  chr3:127541440-127541470
  hyper
tcgctagaggggctcggagaagggaggggc

SEQ ID NO: 39588 - DNA, 225 bp, Homo sapiens; identical to SEQ ID NO: 2755
  chr3:127634094-127634319
  hyper

SEQ ID NO: 39589 - DNA, 899 bp, Homo sapiens
  chr3:127794263-127795162
  hyper
ggttttcacggtacacgcctttggcaattttgcatcaaaaaactaagtgtatgcacattttttttaattgaaagcccaactcagccttcccccactgctccttccccgcatgcacggggggacacacgccttcctccctgcctgccgggacttcaacctcgcttgctgggaagtcgcgcactttcgtcgcgacttcccaagtcgtgctgggtgtgacttggaatctcggatccctgggctaggcctggccacgcccccatggggggaggggcagcgcggcgggggcggagcctgggcccgaaacgccacgggcgcgactctgtgcgcgtccgcccacacgggggcgctgtgtcctcgcaagctcccgcggggtgcctcgcggccctggaacgctgtggttttcgaggggaaaagtgagagtggctggtcctgcctccgctgccgcttggccctgagatccccactgcccacgggataggccccagtccacccagccggggccccccccttcccctcgtctcgctctccttggcagttcggacttcgggtcagtcccacactcgcgcccggctgtccctgctgcgctcctgtcactggcattgggaagccctccggccccctctctgcacacctggcacacggctcctccctggcggcatgtgggtatttgggttgggcgagcctctccctcccgattcccgagttccgagtgggtcccggcggaccagcgctattctggaggggcagtgcctcagaggcaggtcgcttcgagtggggatttgtgcgctctggcgcggaggaggggggtgggaagccggctcttgccctcctcacccggtggggagcgagcagggccaacggtgcgctgagagcgctcagggcgtccccaacagcatgac

SEQ ID NO: 39590 - DNA, 49 bp, Homo sapiens
  chr3:127795229-127795278
  hyper
cggccggcatggagaggcggggccggcattcctgcgggcctgccgggag

SEQ ID NO: 39591 - DNA, 30 bp, Homo sapiens
  chr3:127795649-127795679
  hyper
gtaagtgcagcgtgccgtgtgcggcgtccc

SEQ ID NO: 39592 - DNA, 30 bp, Homo sapiens
  chr3:127842607-127842637
  hyper
cagctaggacagtgcgcccggcgcctgagt

SEQ ID NO: 39593 - DNA, 30 bp, Homo sapiens
  chr3:127872132-127872162
  hyper
agaaaccctgcctacggtgacctccagttc

SEQ ID NO: 39594 - DNA, 20 bp, Homo sapiens
  chr3:128202272-128202292
  hyper
agggcaggtttttttagtgg

SEQ ID NO: 39595 - DNA, 227 bp, Homo sapiens
  chr3:128202349-128202576
  hyper
cggggagggctgagccacaaggaaaagtacttcatggccctatttttaaaaaagagctaagcagaggccagaggacaggagtccggcccgtggacactcaacttcggggatcccggagcagagtggggtggcgcaagggtgcccggtgggctccctatacccgaggaggaaatctggcccgaaagaatctggccagaaagagagacgaccccaactgacatcccagt

SEQ ID NO: 39596 - DNA, 1579 bp, Homo sapiens
  chr3:128205403-128206982
  hyper
agaaggaaccccaccggacagaccctacagggaaccctcacaggccagctggaagtgggcagaaaccctgtgggtcccagaccctccccaatcggccgctgctcccacctctcccgccccaatttttcagcagctcgattcctgcggatcctacatccgggaagcaagcagacgggccctcctcccctccctcgcctggcgcgcggcgcctgggttctcatcaccacgggcccagtgctcaccgtgcgcggggctgtaggagacgcgcgcccgcgcgtgagcggggttggcatagtaggggttgccctgcgagtcgaggtgattgaagaagacgtccacctcgtctggaggcagcagctgcgcgggttccatgtagttgtgcgccaggcccgggtggtgtgagtcggggtgctgcgcattcagcacggccgggtgcgccatccagcgcggctgctcgggcgccacctccatggccggcggcggcggctcagggtctgggtgcagacggcaacggccctgcgcgaggaagggggagtgaggcgtgccgccagcgcctgacaccccccaaagtcccaccacgaggtgtcccgcacgccacggagccccagcccagatccggcgagaaagagcaccagtcccgggtgggaggaaagcccaaggctcaaaacgaaaggaaggcgggggagggggttcagccacgcacactcacgtggtgacccgcggctccagaatcacacacccgtgcacatggggtcacgcccggggacgggtcccgacaccagtgaccccaacaaacgcacagagcagcacttcagtcagacactcacactgagcccccccgcccggtagacaaacacatgaacacagactcaaaagttggagacaggcgcccgggcacccagtgtggcacttgatcccagcgacacgcacacacccacacttggcgccagatacacatactgatctcaaccccgaaaacatgcacacgcagccccctgagcgcagtactaagcggcacaatcaggacctctcaacaaagcacaccaaagcagtcgcccgcagcctggccccccgccctaagtccccccagagtcccctcaaagctaggagcgccccaggcccccagccggctctcaaaccccaaacttacacacgcagccgtggggaggggagggactcggcctctgagagtgaaggagttccggcgggagccccgagggcgacgggcccagggacagcacgtccggaggctggcggggcttacagggtaggagctgggggtagagtgcgcctcggcctcgggccctcccggctccggcccctcggcatcctccggccgccctggcgccagctgccgactcctgcacagacatgaagcgggggccgcgcacgcctaagaagcccaagccagccaatcaacgccgcgcgcctcccagcctccgcctcccattggctgcgtccgcaattcccgaaccgctggactccgggactgacccgcgggccggcccccctcagccggcgggccccctccctgcgcgctcctggcggcccctgctgccaacgcgccccaccactaagg

SEQ ID NO: 39597 - DNA, 30 bp, Homo sapiens
  chr3:128207240-128207270
  hyper
gggttgggatggttcggacgacagcggcgg

SEQ ID NO: 39598 - DNA, 1313 bp, Homo sapiens
  chr3:128207960-128209273
  hyper
cggtaattgggtaactggaggcggcttctccggccgggcggccccgccaccgcgacgccgagcccctgacgtcacccgattcgccaggaaatgaactttttaataatccgaggagggaggaaagccctcggtcccctcggctccgggggcgcccggctgggcccagctccgcgggcgcgcccccgtcaccccctcccaggccagttcagggcagcgccaaggggccgcgggctcaggctgaggcctcctcctgcctaggcgtctggcgtccgtttgtctgtccgaggcctcagcgcaggtaaagcgcggggctggggggcgcagagctccattgggctgggaaccagcgcgtctcgtgcccttgggggacccgcctgcccgagccgcctgctaagcctcccgctcccctccacgctggagcgcgcggagcccggtctgctcggaactccactctgcgggagcggaggccggcgccagcccgggaagccgcgcagggggcgggaggccgagcgcgaggcccttggcgccgggcctccgcggccaggccgggcaggtgagcagtctccgtgcctcccggttggcgttcccctcaacgcgtgcggtcccgccggggcccactgtctctccgtccgtctgtctctcaacttttcccatcctttagcttacgattcttcatcaactcgtaaaatgagatcgccgcggagctcgagcctatttggcgtctccggagactagcaagaccctctgaaagacaccgcgtccccagggataatcccccgtgtccggcaaagctgccccgctcgagcgcgaaccctgggacccagcgcgggaggcagaccagcagctggccgctgggctgtgaacgccaggaccgagcggaagcttcccgcccggccgcgatcggtgccgcggctctcagggaagtggctacgcgcgtccctcgggaaagcaggtaattcgcctttttctcccaccggcgcggtaaaaattaccctccccctccccgttccgtgtgtattcccagtttcagcgcagcgagctcggcgtctaacccctccgcggcagggtcccggccactgcggtagtggaggtggccagcctggctgagtcccctgcccaaacgtcagccctgtgctgccgcctgcctgacgcagagcggagcgagggaggggatttaattaccccgctcggcagctcagaaaatcgccgcacagaggggcttagcaggacggttaaggagtgcttgagcaggggcctcgggagacccgaaccagcctccttgcccgcaatccggtgtagaggaaaaaaaggaa

SEQ ID NO: 39599 - DNA, 337 bp, Homo sapiens
  chr3:128216308-128216645
  hyper
ctgtccgtgtgccagcgtgggtggactccgggctggggaagcgacagggaatggtgtgtgccggtgtgacagacgccagagcggcggggtggaacgtgctgtgtcacgggagactttcttgaccaaaacggaatgtgcgagtgtggaaggaagaggggccgtccgcggagtttggggacacccgggcgtccgagccccagagcctctgcagctgggacaaggaagcccgagcccgccgcctgaggtccccgcgccgttagtgacacgcgccgccgacaaaggctgtatttttccaggctcgcgccccgcccgcgcgcgcgcgatggtccccatggcg

SEQ ID NO: 39600 - DNA, 220 bp, Homo sapiens; identical to SEQ ID NO: 2759
  chr3:128216698-128216918
  hyper

SEQ ID NO: 39601 - DNA, 162 bp, Homo sapiens
  chr3:128273889-128274051
  hyper
gctggcatccttgggaaggctcgaatagaggggaggcttggtgtgaacgataccctgccggctgcgtgtggaggggaggctgtggcctgggcggaaggcaggagtcccgggaggggcagcggggacggggaccctgaggcccaggggattgggctcaggggc

SEQ ID NO: 39602 - DNA, 346 bp, Homo sapiens; identical to SEQ ID NO: 2761
  chr3:128274308-128274654
  hyper

SEQ ID NO: 39603 - DNA, 598 bp, Homo sapiens
  chr3:128336528-128337126
  hyper
agccccacgcatgcgcgacttttctagcccgagcccgccgtctgcgcctgcgatttcgcccatactccccggtgcccgcctcgtgacgtgccgcagtgttacgaagggacaccagggcgcaggcgcagctcgctcctcaggcctgcgagaggcccgccggcccagcagagggcgcccaccaatctgcacgcgggcccagcgagttatcttgatttcggccaagctttctgactgctccaaaaaacgaagaaaaagattcagggagagtaagaggatgaagagagctggtgaagcagctgaccaaatggcccgaggtggtatgcagccgcggtaaagcagggcccctccgtgaggcacagccgcccgggggttccctaggggaagcaggggctgcggcagacgcctctcgggcaggtcagggtatgcaccctcccgcaggggctcccaaggccgggcgtgcgtgaggccaggtccacgggcacaccactgtgaacactgattaaacgtggcctccacggcttccaacccccaggacaggaccaaccctctgcccccggctcaggccagagctcggcgagaccgtcgctgtttaacaagc

SEQ ID NO: 39604 - DNA, 137 bp, Homo sapiens
  chr3:128369738-128369875
  hyper
acacaagatggcggcgccgaacaaggaaggaccctgtctccggggcaaccgggaagccgacccggcgcctgattgctaaagccctctcagagctgctcgggatatccttctgttcgtagtgcgagtgtacttacttt

SEQ ID NO: 39605 - DNA, 30 bp, Homo sapiens
  chr3:128400139-128400169
  hyper
ggagtgcgatgagacgatgagatgttacct

SEQ ID NO: 39606 - DNA, 30 bp, Homo sapiens; identical to SEQ ID NO: 2762
  chr3:128417344-128417374
  hyper

SEQ ID NO: 39607 - DNA, 46 bp, Homo sapiens
  chr3:128564767-128564813
  hyper
ggggcggggccaggcggcaggggcggggtgcccaacagccaactgc

SEQ ID NO: 39608 - DNA, 30 bp, Homo sapiens
  chr3:128713042-128713072
  hyper
cctcagccactgcgcgcagtttgtcaaatg

SEQ ID NO: 39609 - DNA, 79 bp, Homo sapiens; identical to SEQ ID NO: 2763
  chr3:128720063-128720142
  hyper

SEQ ID NO: 39610 - DNA, 183 bp, Homo sapiens; identical to SEQ ID NO: 2764
  chr3:128720163-128720346
  hyper

SEQ ID NO: 39611 - DNA, 115 bp, Homo sapiens; identical to SEQ ID NO: 2765
  chr3:128720418-128720533
  hyper

SEQ ID NO: 39612 - DNA, 699 bp, Homo sapiens; identical to SEQ ID NO: 2766
  chr3:128720566-128721265
  hyper

SEQ ID NO: 39613 - DNA, 30 bp, Homo sapiens
  chr3:128839650-128839680
  hyper
aactacttcctgatcgctcctagtcctggg

SEQ ID NO: 39614 - DNA, 30 bp, Homo sapiens; identical to SEQ ID NO: 2767
  chr3:128840242-128840272
  hyper

SEQ ID NO: 39615 - DNA, 30 bp, Homo sapiens
  chr3:128880045-128880075
  hyper
tgttttgtcggaaacgtaaaagaaagggac

SEQ ID NO: 39616 - DNA, 30 bp, Homo sapiens
  chr3:128902362-128902392
  hyper
ggcgccgaaagacccgcatgctcggcgacc

SEQ ID NO: 39617 - DNA, 30 bp, Homo sapiens
  chr3:128902661-128902691
  hyper
aggcctggggaagacggctcgcaaggtaga

SEQ ID NO: 39618 - DNA, 30 bp, Homo sapiens
  chr3:129118646-129118676
  hyper
aatagtgatgagaccggaaccgctaacgta

SEQ ID NO: 39619 - DNA, 1258 bp, Homo sapiens
  chr3:129324075-129325333
  hyper
gacccactcagctcacgacccgctcggttcccgcccgcccccgcccccgcccccgccgccgccgccgccgccgccgccgccaccgcccgggtgtacctggatgttgagcttgcgctcacaggccggtcccgtgccctgcaccacgctgtcgagcaccgccaccacgtcgggcgccggttccacgaagcaggcggtgcgcgcagctcggatggcggctcgcacgtcggcgaagcggaaggcgcagagtgcggccggagcagcgcgggccgcgggggacccctggggccgctcgaagacagcaaagagccgctcccgggctgggaagaccgacaccaggcggctgtagaggtcgccgcggcccgcgccgcccgcgcactgcaagcccaactggatgtaggactcggtgagcttcttggcgtcgccgccggcgccgtggggcaggcagatgcgcgccagcaggctccgcgcctggctctccttgtcgcccgcgcgcgcctcgctgttgagcgccaggtacgcgtaggactgtgcacccggcggcgggtcggacgggtgcaggaaggcgctcacgaagcccagcttgtgctgctccttggcgccctgcttgatcttgaggatgttgtcgtcggaggggttgaggtcgaaggtgaagagcttggccaggtcgccgcgcgtgtccagggagcggatggcgatctcgggcgtgttctcgaagcggtggtcctccaggctgcggttgcgcgggaagaaggagctgccgtaaccggtgtacgtggcgcccacgagcaggcggctgccccccgcgcccgcggcgggaggcagaactagccccacggtggacgcgttcgggtggttggccgccacgttcagcatgctggggaacaccgtgacgggctcggcgggcggcgcggcgggcgggaagcgcacggccacggccgagatgttgccccggcgccgcagctggcagaagccctggtagatggacccgcacacgactaccaggccctggccggggtccagctgcaggatcttgttgtagttgtccgtgaggcgccgcgggtgctcgcacgaggcctgcggcagctgcggagcgtgacacagcgggctgtcgggcaccgggcccacggccgcctcggcctccaggctcaggttggcgcccgacagctgatagaggcggttgacggccgccaggtacacggtccccgccgcgccgtccagggcgaagttgttggtgggcgtgggcgaggggaaccgacgc

SEQ ID NO: 39620 - DNA, 693 bp, Homo sapiens
  chr3:129345978-129346671
  hyper
agccccccgggccctcgctgctccacccagaagttgcggtgactgcggccccagcaccccgttccctggccgggcatcacttgcgcagcatgctgcccccagaggacagggctacagttagtcgcccacacctcattcacccccttgggcccttgagcgtcttagaagccgcagatgccaaggaggggacgctgcctcgcggatggtcacttgggagcaaagctggggactaaaggaaccagggacagagattcctgctctcgccaaattggccgctctgggccaggcactgaggacacaccgcgaagccggatagccaggtcctgtcctcagggccctgtccggaagaggactgggcagcctcgagtccgcggcaatgaatgaatgttcaattgcacagatggggaggcgaaggagggagggagggagggagggcagtcgcttgggcggtcattggaggctctgggaggctatgcgccggcaagaagcagcggggtggaggcagccctgcgggagtcggcgagggccgcgtggatgtgctcggtggttttgaggccagtggctggaggggcgtgagagtgggagaccagacttgaggggagtggctggagttgagactcaaatccaagaaggaaacggtggggcttggaccacttgcctactgagaaaaatggaagtcgggaaggctttaga

SEQ ID NO: 39621 - DNA, 30 bp, Homo sapiens
  chr3:129346923-129346953
  hyper
agagggtgcgctcctcgaagcagccacaaa

SEQ ID NO: 39622 - DNA, 30 bp, Homo sapiens
  chr3:129611953-129611983
  hyper
attccgacgggaaccggctcctaaacagtc

SEQ ID NO: 39623 - DNA, 48 bp, Homo sapiens; identical to SEQ ID NO: 2770
  chr3:129693151-129693199
  hyper

SEQ ID NO: 39624 - DNA, 194 bp, Homo sapiens; identical to SEQ ID NO: 2771
  chr3:129693304-129693498
  hyper

SEQ ID NO: 39625 - DNA, 392 bp, Homo sapiens; identical to SEQ ID NO: 2772
  chr3:129693954-129694346
  hyper

SEQ ID NO: 39626 - DNA, 164 bp, Homo sapiens
  chr3:130064445-130064609
  hyper
tccctaagttcatttggcagccggcggcttctctgaaacaaagccagcaaacagctggagcgtctctggacactcacattaaaacttgtgaagagttaaaagccccagggaagagccaggccaagggcacgggtcagcgccggcttaaaagaccctctcagggc

SEQ ID NO: 39627 - DNA, 119 bp, Homo sapiens
  chr3:130064780-130064899
  hyper
cggtttccagggtccggagtgtcccctgaccccgggaaagctgggtaagtatgcggtgcggggacttggggcctgaggcaggcgggggaggaaacctcgagtagacaggtggatgtgag

SEQ ID NO: 39628 - DNA, 30 bp, Homo sapiens; identical to SEQ ID NO: 2773
  chr3:130132286-130132316
  hyper

SEQ ID NO: 39629 - DNA, 276 bp, Homo sapiens
  chr3:130235787-130236063
  hyper
tcccctctttcttttctcccacggtcgggaccttagggtaggagtttcaagaggggagaagccggtggagcagtaacagccttcataatgtctccagtcccgcttccgtcacctccctaaggctgcgcccccctcctgggggacgtgcgctgggcccggggccgccggggcggggaagggtcgggcccggggcggggagaagcgtttatatgtcggcgaggggcgtgggagctgccacccgcttgcctgcgggacaccggagtcaagaggctgccc

SEQ ID NO: 39630 - DNA, 101 bp, Homo sapiens; identical to SEQ ID NO: 2775
  chr3:130236173-130236274
  hyper

SEQ ID NO: 39631 - DNA, 30 bp, Homo sapiens
  chr3:130465557-130465587
  hyper
ggggagatggaacccgggagagaagtgcag

SEQ ID NO: 39632 - DNA, 30 bp, Homo sapiens
  chr3:130612856-130612886
  hyper
ccaggagtgcggggcgcgactgggcggccg

SEQ ID NO: 39633 - DNA, 30 bp, Homo sapiens
  chr3:130613295-130613325
  hyper
gcgtgagctggggacgttgcgggcacacga

SEQ ID NO: 39634 - DNA, 86 bp, Homo sapiens
  chr3:131081003-131081089
  hyper
ctcctctctcagatgcagatgcgctttgatgggcgcctgggcttccctggcggattcgtggactcgcaagacagcagcctggagga

SEQ ID NO: 39635 - DNA, 176 bp, Homo sapiens
  chr3:131221684-131221860
  hyper
cgactcacgacttccgggcgccctgccgctctgctttcagggagtccccacgccaccgccacgtggacgcagtagccgtggggaagttttcgcaatggccgccggaacggtcgccggccgatgctctctgcgacggaaagaaagccgccggacccacttccggtgcgttttacaat

SEQ ID NO: 39636 - DNA, 143 bp, Homo sapiens
  chr3:131752687-131752830
  hyper
gtctgtgataccacgcggggtcgtgatctccttactcagctgtggcttggtttcagtggtccctccagtcccgtcccctgtccccgtccccctttccttctggctactttattccatagaggaagaagcgctgaaggactacg

SEQ ID NO: 39637 - DNA, 1233 bp, Homo sapiens
  chr3:131753055-131754288
  hyper
cccgattttgaaaaccgtaccccttcttccgccttcgggacttccctgacctatccctcacccgtgccatgctgtcccctcccctccgcggtctttctccccaactccattcgccccaccccacctgggcgagttgggtggatgtcagaaggcgagaggtaggggatggaagtcccttcagattaaagacgttgcttgctgctgctttttaaaacaacaacagcaatgacaaacgtgcaaaggtgagcgagaaccagtgcatctcaaaagttggtcttgctacgcagcagctccaacagactttgcaatcacagcgccccaggaacacaggaatgaagagttggcatttacttacctgggtgtgccaatctcgaagagtggagagagaattcagcccgggacgaggtctgtcccgcccccaggatgcaaaatccggctttgaagtggaggtggttggtgtggtagttttgtactgatgtaaggggcgtcgcacctccttcccctctcgtcctccgaggtcagtttagcaacagcggctgggaaaggtgctgagagcagagttcggtctctccggaaaccctgactccattctcggtgatgggggtgggggaagagggtgaaaatgttggagatgtcaggtcggctctcagttaactcggagagtaaagaggagggtactgagaaaagagggagggagtggagtggagcgagggaggaaggaaaggagggtggcagaaagagaaggggacgagcgggtggcggggagatggcagcttctcacagagagatttccaccttctgacgaatcccatgcacccagcaacccggcaagagactggttccgaaacctccgcgcgagcgccccctgggggttgctgacggagacgagcattgccccgggaacccgagctcaggccccgcccaggccttggcggcggcgctctccgtggtcctgccgcgcccgcagtctgggctttctgctcagctttgtcgctcaactgagctcctggggacacttgatttagatctccaagtgcttggtctccatctccactctagggtggagcggtcgtatcgcggcgcgggtgtggggggaatgggagttacactttttggcactcaccaaagaaaacttcttagatgggtgcttaactgtcaccaaaaatggtaaaggtgttgctaatctctggatccttcgtgtctacaaaactgtctggcgtatggcaggagcct

SEQ ID NO: 39638 - DNA, 231 bp, Homo sapiens
  chr3:132756306-132756537
  hyper
gtgctgtgactgttagcttcccggatgttttctccacatgcttctttctgaactagcctgtatagttctacaacaaattgttacgttttgagaagcagggaccacttataccacttctctggccaagtgtctggcaccgcgccactcagacacacacgcccaaccctttaggattaacgtagacacagtgttctcttccatggccattccgtctccacttctggttccaca

SEQ ID NO: 39639 - DNA, 538 bp, Homo sapiens; identical to SEQ ID NO: 2778
  chr3:132756941-132757479
  hyper

SEQ ID NO: 39640 - DNA, 452 bp, Homo sapiens
  chr3:132757536-132757988
  hyper
cgcctggagggttgctggcatgaaccccctccccaggtggagggtgcgggtgatggggcgcgggcgtcaggagcgctggacctgggctggggccgaggaggaggtggctttaatgcagggggacctgtcacatggggaaacgaagaagaagaaatgtagtgtcactttggccagcccgagggactcgaactaatcctgcggccgcgagcggagccgaattcctagcgcagctgtgcgaagagccctcctgcctaggtgccggcggcctcgccggggacggagcctccgtgctgcccgggaggttgctctgccggctggacctggcggttttcaccccagagttgcagcgaaattgaacgctttgagcctgctggaggaatccagagattggttcaggggctatttttttttttaagcagttgggcaccggtggagccggtctaaatgaaagt

SEQ ID NO: 39641 - DNA, 50 bp, Homo sapiens; identical to SEQ ID NO: 2780
  chr3:133276457-133276507
  hyper

SEQ ID NO: 39642 - DNA, 30 bp, Homo sapiens
  chr3:133292308-133292338
  hyper
tcacctaagagcttcgtcctggcacctgat

SEQ ID NO: 39643 - DNA, 30 bp, Homo sapiens
  chr3:133380464-133380494
  hyper
ccacgtcctctcggcgtcaaaggcccaccc

SEQ ID NO: 39644 - DNA, 250 bp, Homo sapiens
  chr3:133465041-133465291
  hyper
ctgtgctggactccttccactcgcgggtcgtctccagagctcagaaaatgaggtgatcagtgggacgagtaaggaaggggggttgggagaggggcgattgggcaacccggctgcacaaacacgggaggtcaaagattgcgcccagcccgcccaggccgggaatggaataaagggacgcggggcgccggaggctgcacagaagcgagtccgactgtgctcgctgctcagcgccgcacccggaagatgaggc

SEQ ID NO: 39645 - DNA, 386 bp, Homo sapiens
  chr3:133524470-133524856
  hyper
atgtgtgtgtccctcgacaaataacctgtctgcccctatcgttctgtaggaggacggagtcccagagaactacaactcccatcaagcacttgggggatcgccgcggctgagggagagactatggcttaggaaccaccattcgcgtgaggctctgctccccgcgcctgcgcagagtgcagggccacgtcgcttttgctgtaccggggaccacgcgtctcatccatggcttccgcggactcgcgccgggtggcagatggcggcggtgccgggggcaccttccagccctacctagacaccttgcggcaggagctgcagcagacggacccaacgctgttgtcagtagtggtggcggttcttgcggtgctgctgacgctaggtaaaaggcg

SEQ ID NO: 39646 - DNA, 30 bp, Homo sapiens
  chr3:133615104-133615134
  hyper
cctggcgtacttggcgcagatggggctcga

SEQ ID NO: 39647 - DNA, 561 bp, Homo sapiens
  chr3:133646156-133646717
  hyper
agccgtgtgttcccgcgggccctctcggtgcctcgtggcaccttactctctactcctcttgttctctaacgtgtttaatacactttcgtgcagaaaacataaatagactaaacggtgctttatcgcgggcagtcagagaggaagttttctcgaggctgtgtcccgtgagcaggcgccggtgggctcagccgccgggccctccgagtaggggaaggcgtgcgtgcgtgcgtgcggtgggcgcggggagccccgcaggcccgagggcgccccggcggggaagcgggctatcggaggcgcgctgagccgggtggtggagtcccgcccggctggctgtggggccgcgggggcgtcccgtgggcgggctgggcgtggcgcctccgcgggtggcttccccgggccgcggcggaggggcggcgccccctggtggcggaatgcgactccagggcgcaaggggccgcccaccccgcctcgcccacccggcgggggcctccgcgccttttctgagaaagccagaggaaaggagccgagaccgcagtcccctgggcccgtttcctcgtctgt

SEQ ID NO: 39648 - DNA, 237 bp, Homo sapiens
  chr3:133748100-133748337
  hyper
tctgtcccccaaagcgcggggggtccccctggcacctccaagcccatcccattgacgaagtaaccgcccgctggaggccgaaaaagcgttcctcgagatgatctttttcaatcatcgaggacaattctctcgcttataactctgcctggagttgtccgagtaagcggtaagcaggtacttccactgtcccattacttagtccgatgaaggcgtgtgaacacacacacacacactcgc

SEQ ID NO: 39649 - DNA, 550 bp, Homo sapiens
  chr3:133748401-133748951
  hyper
cgcgtcgcccggggatgagatcggagcgcggcacaggagggagcccggggctcccggagcctcctggctccggcagacagaagcgggtgcccagccgaaggtgcgccaggcgcggctccggcccggaagaccccgcggactccgctcaccttaatgttgccgaagaccgagcgggcacagcggccggctcggctagtagaggtgtcgctgccctgggacgcgccgagcttgggcaggagccccatggctgcgggcggctggccgggcgcggagtggcgcggggtcggggcgcctcgggctggagcggccgggcgggtgagaggcgaccgcggcggcagtggccggaggagattcgcggagcggagactgagccagcgagtgcgcgcctagaagtttttataagtggccgccgccgatgatgaaacgcgctctccctcctccctcttttcctcgggtgtcaaaggcgctacgagcccccgccccgccgccgccgccgccgccgccccctcagacaggtgtgacgccgcagcgacccgcgaggcttgactgc

SEQ ID NO: 39650 - DNA, 53 bp, Homo sapiens
  chr3:133969906-133969959
  hyper
cctttcccgacggacgggccaggctggagccaccggccgcgcctgcagctcag

SEQ ID NO: 39651 - DNA, 148 bp, Homo sapiens; identical to SEQ ID NO: 2782
  chr3:134032288-134032436
  hyper

SEQ ID NO: 39652 - DNA, 1049 bp, Homo sapiens; identical to SEQ ID NO: 2783
  chr3:134092502-134093551
  hyper

SEQ ID NO: 39653 - DNA, 239 bp, Homo sapiens
  chr3:134093626-134093865
  hyper
cgcctccactcccagtcgccgacccgctctcacccttcatccctaaacccatcgacgggacgacagcaagggctgtaccacgcgtgtcctggggttgctgcgggaggggactccggctgtgtgtgtgtgtgtgtgtgtgtgtgcgtgtgtgtgtaccgggggaggtgggaaagggaggagggactgcaaagacatccatatcctctgggctgggacagtgccccgggctaagtgaatgc

SEQ ID NO: 39654 - DNA, 599 bp, Homo sapiens
  chr3:134125147-134125746
  hyper
aacccagcatcccaagaggcccggacaatgggtataaattcggaggatcagacgtgcaggcagacaaaaccaacatctgcatttgaaacgggctcccggggctcttcaaggaggcgagcggccgctgcagggctcctctaggccagattacatcccagaacgcccaggcaggacgctccggctcagattgtgaaccctgggactctgcgtccaggaggggcccctaaaccctgcgctaaaagccagaggtccggggagcaggcggatgccctcagacttggctattttgcttaaggtcacctccaaacgggactggaataaaccctccttgtttgcctctcgccaggcctaagccccgggtccccttgggtgtcgtccaggacgccaggcgcggctgcttacaatggctctcagacgacagatggcgggcaggaagggagggggcgccgggcaggtgcgcgggggagacgcgccgcggcagcgccggacgccaggctgcagggtgaatagatttgcagcccgccggctgcaggcggcggccgccgagccctgcaaacaataagtgaattctccgaagcgactgaaaccccccgggctgg

SEQ ID NO: 39655 - DNA, 30 bp, Homo sapiens
  chr3:134204506-134204536
  hyper
ctagaaatgagcctcgcaggccaccaccat

SEQ ID NO: 39656 - DNA, 575 bp, Homo sapiens
  chr3:134369552-134370127
  hyper
cgggttcgctgacctcgttcgggggagcaatgggcgccccccggcgggcaggcccttgtggcaaggaggccaaggtgccgggggacccggggacccgggtcgggcgcgcgttacctcctccgcgctgcagcagcgagctcgggttcgcctgctggtctgagagcgtaccctgtgcggcgcgccgcttctccgagtgcacgatcagcagcatgtcgatagatacagcgttgatgtccttcttcagctccatgatgccgcctcctttccgacctgggcgccgcggccgcacgctaggctgcttgcgctgcaaatggccccgtgcgcgcagctgccccacacgggagagggcgagggcgcggaagagggcgctcccccgccgctggagccgcagggcgctgcttttcgctgactctgccaaacacgccattagggcccgcctgggagggcgctaccctaatgaagcggctctaagtcacctttgaaaggaaatccccgggcccaagccttgacctgcaccggggccatagtcagcaggggcggccggtccagagcctccctccctgcgcccctgcctc

SEQ ID NO: 39657 - DNA, 16 bp, Homo sapiens
  chr3:134370181-134370197
  hyper
cgctgcctcatcccca

SEQ ID NO: 39658 - DNA, 1984 bp, Homo sapiens
  chr3:134513850-134515834
  hyper
gtgagttgggcgggccgctgcggttctccgagagcaccacgagggggagcccggacccctcctagcgccttccgagccctcccgcacagccttgcaagcaaaagtttttcttaaactaacaatgccagtgtaaggaggtgctcgcgcctgattggccgggggaattttgcaggtttgattccttgattggacaggaggtgttaggggtggggagagagctgatggtgggggatcccgctccctcccgcgtcagtctggccggctccgtcctcccgtaggctccgctgtagctagcaatgtgacaccaggacgcactcgctctcgcgcgctctcccaggctcgttctccctcgccctctctctctcacacacgcacgcacacacccacctctcccataaacacacacacacacatgcacacccacacccacgcgcgcccgcaccgccccacgcgcacacactcctgcccacgcccacgcagcgctccgggaagtccggtccgggcgagagcgcgaaaggataccgagaagccacccgcggagagcgcagcggcgccctgggacgcggcgctctcccggcgctgctgcctcggcttggtctcggcctgcgggccgtcggccggcgatggccctggattatctactactgctcctcctggcatccgcagtggctgcgatggaaggtaacgtaccctccacggagcaagttggctgctggtgccggccgccttgggactgctgtgctccgcggttcgcggggttcctctggctgctttgcggtgcaggcatcccgggacccgagggcaaggaggtttgggagcctcggccgctgccgagcgcggggcttgggcggcacccaccagagcgcccccggctggctcttagcgcccgaaactggctcgcgagtcccccggcttcctcgccccggcactccctggtagcctcggtctcccgcagcccccgctcggagagctcggagcccgctgcattgcggtgcatgctccttagctctggggcagagccagagctgggcgttggggagaaaggggtgcctctggccatccggctcctggagtactggcgcccgtctgctcccaggcacggatacgcttctgagcagccgcgcgccacctccttttctccagctcgcagtccacgggctagtggactctgcttggcgtgcaagcactgcgcgcgggggccggagaagctctgccgtggtatcccgcaagtggccgccgaaggagaggggtggagttcattggccgtacccttggggaccagtctggtggtccgggcgcctgcgggactgcaggtttccagggtcagtcggggagaggtggaaacccttttcgcctcttgagccttggaacaggagtgggctggggtgagtggtcggtcctacctaaagtctcccagcctctccaccaccccggagaggatactcggcggccgggagtcgtcgggcagcgtcactctctgccagctcagacttggcggtgcctccggcttggtggctgggaaagcgcgctccaaagacaccgtgcccggcgcagcggggagcctgggcgctcggtagcgctcgcgaatccctgtgggaaatcccggcccagctccccgcctcccgccccttcccccgcctctgttcttcgcagcctagcagcggccgcggcagcctcctgggaacacagctccgcgggagagcggagttggagttgtcgggagaaaaccaactctaggggtgatgcgctgccgcagtccggctagcagccccactttccggtgtcctgctccggatggaactcctctgggggactccaagccggggaggagcagctcttggcgaccgcgcagcgttcccatctgggagctcgctccgcttgttactcgttcctcgcgaaactgtgaccggttgcccagtggaaactcccccaaacacgatggtttggtgccccccgccattccggaaagctctgcccttctgga

SEQ ID NO: 39659 - DNA, 198 bp, Homo sapiens
  chr3:134516053-134516251
  hyper
ggaggggtttgctttttggaacgtgcaggagaagactggagccgtgtggagtgccgtcaacaccctggcgcagggatgcctgggtttgacttattgagagacacgtgtgggagcagttgaaattggaaattcaaggggatatatacccccaaaccgggcaggaaagccagggtgagcgcatttgcaagggcaattcca

SEQ ID NO: 39660 - DNA, 30 bp, Homo sapiens; identical to SEQ ID NO: 2788
  chr3:134592951-134592981
  hyper

SEQ ID NO: 39661 - DNA, 30 bp, Homo sapiens; identical to SEQ ID NO: 2789
  chr3:135684317-135684347
  hyper

SEQ ID NO: 39662 - DNA, 834 bp, Homo sapiens
  chr3:135684609-135685443
  hyper
cgagagtccgcgccgcggggaggcttggaggcaagcgctgcccgcgagctgagccgccggaggaggagccgcgggcaacgaggtaggcaaaggaacactggccgcacggcctggagccttcagctccctcgtcccggcccgagggggtggcgaggctcggggcggcgcgcggaggccggggcgggcggggccgggacctgggggcggggaccggcctggccagaggggccacacggagctgattgggctgtggaagtcggaattccagtcggtgcggtgcggtgcggtgcgttgcctcggcgcggccggccggtcccgggacacggcaccagggaggtgtggaaattgcctgccccaggggcgcccgcggaggagggtaggcgggggcggcctgggccctcccacttttcagggctcctgggccagttcgcccgcacagccctcgggaacttgttaacaggaaagcctggcagagaaacaaatgccagcgttttggaagaactgagagtcacgtcgttaggcgctgaggctttcttttccttccccgccccctgcccaacctcggcccgacttggccaaagaaggatgtgtcaccagctccgggccgcggacgggattcccggcccgccaggagccggggtacctgaaacaaaggtaaacggaggccgggcggcccctggtcctgcaccgcggccgcgctggagcgcctcggtgggtctctcccgcgccgacctggccgccgccgccgcggaggggcgttctcctgggggacctctcgatggaaaccagctggccgggcttggagttgatgttgcatccgaactctgttgtgct

SEQ ID NO: 39663 - DNA, 30 bp, Homo sapiens
  chr3:135914132-135914162
  hyper
acatggggccttggcgcccctccgtccctg

SEQ ID NO: 39664 - DNA, 30 bp, Homo sapiens
  chr3:135914779-135914809
  hyper
tcaccagactcaagcgccgccccctcactg

SEQ ID NO: 39665 - DNA, 30 bp, Homo sapiens
  chr3:136470419-136470449
  hyper
gcatctcccccagccgccaccccgctgccc

SEQ ID NO: 39666 - DNA, 65 bp, Homo sapiens
  chr3:136471112-136471177
  hyper
tgggggggttgttacggggtggtcgccgggggttcgggagcgggggccgcgccttcaacggagct

SEQ ID NO: 39667 - DNA, 30 bp, Homo sapiens; identical to SEQ ID NO: 2793
  chr3:136471619-136471649
  hyper

SEQ ID NO: 39668 - DNA, 1174 bp, Homo sapiens
  chr3:136537642-136538816
  hyper
cttgcgacttttaagcgcaaacaatgggtggaaatggacagaaactgcctccgtgcccacttgcagcggactacgtagccctggcagacaggcaattgcttcaaacaagcgccctccaagggcgtaagctagaggggcccgggcgggcgctttcccgtggaccctcccacctcgcgggtagaggaagtccttcagttcaggcacaaccctgagcgtcccccgcagtctccaactccggcgccagtcaggttgtggggtgggggcggcggagggcggagagcgcaggcgcagagtccgcgcggcggcgcccctctccctccgcagtactccgggcagcgcccgcctcgattttcccaggcgagggcacgcccgcgtcagtcgcctccggggcaccttcctcgccacgacacgcaggtaaccgggccccgggagccggtcggcggcggcggactgggaccttgatcctgcctgcccggccgcccgacaagggaatgagagcggaccccgaactccacacacccgcgtttagccgccacacctaaggggcacaacagtctttttgggtaagggccgggctgggggcgacgcgccccgcccgctttgcagacttcggggtgctctgcacgacgcctgaaaggccgcggggcccgcatttctctgtgctgccctcctggagaaccgggacacggggacgggagggccagcatcggctacggcccggtttcccgtttctttccgctgtcgcgtgtctgggccctcctgcagcgtccatgatgaaggccaggggctgttgctttcctctcgcccagtagccaacccaagcaaggggtgagtcactgtggcgtcatatgggatcaatttcaaatacaagttttaaaaaaggctggatgattttagaaatatggccaagaatttgtattttccattactctcttgtctcatgtccatgactcttgaacgccagtctgtgggcgctgagattttcgtggtacatcgacggtttgtagacatcttttcccaagggaagacgagggcaagggttagtggaggaagggcctcgtcacggccgagagtggcggagaaggctcagggcaagtccgcacagcctccagcagccacggggaggaaaaggcgaatctttcctcacagtgctctgggcgctgtagaatttcta

SEQ ID NO: 39669 - DNA, 30 bp, Homo sapiens; identical to SEQ ID NO: 2796
  chr3:136580754-136580784
  hyper

SEQ ID NO: 39670 - DNA, 383 bp, Homo sapiens
  chr3:136751320-136751703
  hyper
acaaaaatttgtttcccactccgtcctcttcccggatacttggagacagcagcgtcagtggcattgtttggcgtctctgaacgcggctttggcagagccctccggagccagctgtagttcccggagacgccactaggtgacaatgtaggtcttggttggtcaactgcaggctacggttgatttggttgggtcccagcggagccttagcgtcctctccggcaaaataacaaatgtccgtcgtgcagggcactttcttcgggaaggactcctgggagctcaggagtttgcatacgaagccgagggagcgaggggcttctgataatgatattcagcgtcgaacagagtcgctcatatgcagagccggagtctctcccagctttgat

SEQ ID NO: 39671 - DNA, 233 bp, Homo sapiens
  chr3:137479124-137479357
  hyper
tggacacttgggggggtgggccggattaactgtcttgtctctaaacacctgggtgcgctggcgctcactctcagctgcgagctgaagcccacgctgctctcaggcttcccgcaacaggcacctgcgacttcgctcaccaaaatcttccagtggccacagtgagcgggcaggactggtgccagcaagccccaagcatcccaggccctctggacgcaggtgactcttctggcctc

SEQ ID NO: 39672 - DNA, 82 bp, Homo sapiens
  chr3:137479575-137479657
  hyper
gggccccagactgccgcgtctggctctaccaggctgtgtctcgggccccgtgcctgcagctgcaaggcggggaaagacctat

SEQ ID NO: 39673 - DNA, 1282 bp, Homo sapiens
  chr3:137479991-137481273
  hyper
aaggcgcatcctggacgctctgcgccctggagggagacgaaaggcccggagagaagcagattaggtcggtgcccttagaggcctcttccttcacttccgggaaacagcggcggttccctgacaaaatccctgttgctcgggggttcggacgccttgctaaggctggcacgcagcggaccttgagtagctgcgctgtgtactgaacgtgtgcacagcttctccaggcaaatgtgcaagcggaaagacctcatccaagcgttatctccagccctggaggagaatgaactggtagcctggggccaaacttcaggccgtggacaaagcaggaggagtatttaggcaacctctgtcctaatgcttgttctggttgtgaccgaagttgctgactctcctcaggggtcacgtctccaggacgtgctacccggtggtttagacccgtcagggaggcacagcgtgaagggacagcgcagcgcagtagaggcacctgctggagacagcaccaggccagaccccaggatcacgggaactcctgctcccgccacagctctaaagagtgttgaataaaccggtggtcaccggtactgcgtaaggggtgtgcgtggctttgcagttcgcctaggagacaagctgatgcacggcctggaaggtgcagccctcatccctgcgttccctccccgcgcggagttcctgtctcaaggccaagacgcgcagcgctgatgctggccccttcctaggtcagtgcagctggaccaggcaatcggggtctccgaaacgtcggggggtcagctggcgccctgcccaccatcgaacgcccttcgtatcactccgctcctcattgcgaattggactgcgcattggctgcgacccaaggctgaacacaagaagcttggagaggagctcgggcgtttgaggagaaggaaatatgaggaattgcaggaaggcgctcgcctgcccgaactgcctccgggcaactggaaaggattgtcctggaaactgagaggagagaaaggacgtaggaccttgtgccagatccccttgctgagtaatttccaagagcttggtttgcattaacccagaactttgggtgtgcgtttggtgtcccctggggggttctagagtgagagattggcgggtcccctccgaacgctggatctcgctgcagatatcagtatttctctcattccttcccaaagccgtcgggatcgcccagtagaattagaattgggtgattcctgaatctcctatccctggctggctctgaatatagcgcaccgctggtcag

SEQ ID NO: 39674 - DNA, 28 bp, Homo sapiens
  chr3:137481935-137481963
  hyper
cgcgtttctggccggtcctcccaagaga

SEQ ID NO: 39675 - DNA, 91 bp, Homo sapiens
  chr3:137482463-137482554
  hyper
tctgcattgcctgacgcgaggccttccaggagcaggtcagacaacattgctcagccacccagggtcccagcgctacgcccgggcgccgcat

SEQ ID NO: 39676 - DNA, 308 bp, Homo sapiens
  chr3:137482943-137483251
  hyper
tctgtccctcacacctctccccgcccccaccagtcgcgctctctgtttcttgcaccggcgtgttggcaggtgcgccccctcggcttctctgctgctgattggcgcccaggttggggagtcgccgccccgcgcttatgtcagagtgcgtgcagtcccggcccacctcgcctttgaacttcgccgcttttggctctcgttcaccagcctccccgcattctcagccaggtgcagcgctaggcgcggcagctccgggaaagccacgggaagggggagccacgactggaaacgcaagaggagagaagggaact

SEQ ID NO: 39677 - DNA, 121 bp, Homo sapiens
  chr3:137483904-137484025
  hyper
cttccccttgccctacctgggcgacacggacccgctcaaggcggctggcctgcccgtgggggcctccgacggcctcctgagcgcgcccgagaaagcccgggccttcttgccgccggcctcg

SEQ ID NO: 39678 - DNA, 448 bp, Homo sapiens
  chr3:137484084-137484532
  hyper
cgaagtgccccacaccttggctaccggcgctctgccctacgcgtccaccctgggctaccagaacggcgccttcggcagcctcagctgccccagccagcacacgcacacgcacccgtcccccaccaaccctggctacgtggtgccctgtaactgtaccgcctggtctgcctccaccctgcagccccccgtcgcctacatcctcttcccaggcatgaccaagactggcatagacccttattcgtcagcccacgctacggccatgtaacccccagcccggcccggacctgaggcgtggtctgaaagccgggtctgcaccctgtcctctgagcctagccccggcctgcagacgcctccggggtcagccctgccgctgtcccttacaccacccagacttttcctctctcttccagggggaagggtggggcgtcctcccggacccaaggcgcag

SEQ ID NO: 39679 - DNA, 215 bp, Homo sapiens
  chr3:137485307-137485522
  hyper
cagcttggtggtctgcgggttgggtgtagaagggcctagagcttcggatccgtccggaatgcgccctggagattgctttttgcctttagaggctagacaaaggtatcgttccctgggacttcactctctcctcccattcttcccaaaagggtcaggccacttcaaggaatgaatgaactaagtcaaaggccgacccagaccgctgagatctgggt

SEQ ID NO: 39680 - DNA, 30 bp, Homo sapiens
  chr3:137485831-137485861
  hyper
aagggaaaaggaaggcgacattgtcatggc

SEQ ID NO: 39681 - DNA, 218 bp, Homo sapiens
  chr3:137486083-137486301
  hyper
caaaagccgcgctcacgcgtggttttccttaatttgcgtgcttttcccactggctttgatatgctgtggggtgggaggtggggcagcctagaggtttgtgggctttctgctgctgttgagagatttgtacgcttgcctccgctgtttccaaaggagtcggtggctcgaagtgcacgggaaacgttgtcaacagacaccaaagccgaaacccgcggatt

SEQ ID NO: 39682 - DNA, 199 bp, Homo sapiens
  chr3:137486621-137486820
  hyper
ggtgtagggggagtccgggctggctgcgccacgcttacttagcattacaaaacccttttacaaatcgagacaattaggaagtgacttgcctctggtggccgtccggtctgggggcctgggcgcttagggaaggcccctcctcccgccccctaggaagcccaggaggcctgggacggagacgccacggttttcctgtctg

SEQ ID NO: 39683 - DNA, 407 bp, Homo sapiens
  chr3:137487066-137487473
  hyper
aggggcaaaggcctcggacggtggctgaagctggaaaaccgaaaccagggttccgggttgcgcttggtcttaggctcagatggggaattaggaaactagggtgcgctgtagaagagaggcgctcagggggctgcggcctcactcagaggtggctgagacctctttccagcctgcaaagagccgggggcccagttcgggtcctgagacctaaagtcaaagacttggctcgggcggtttttggccatcacacttcgtttccttccttctcagactggccttccccagccatctgccctccttagacctggtcccaacctctgcccccacccccatccccgcaagagcctgcctcagctttgcctccgtcgccccgagggctgcggagcgtccgccgaggtgcgcggccg

SEQ ID NO: 39684 - DNA, 80 bp, Homo sapiens
  chr3:137487707-137487787
  hyper
cccgagcgcgcgtcgcgcagcaaagagcagccaagagttgccctggacagactcctggcatccggagaacctgaactccg

SEQ ID NO: 39685 - DNA, 153 bp, Homo sapiens
  chr3:137487850-137488003
  hyper
cgcgtccggtagccagggagccccagacttctctcgcttagcaacctgggcctccttcgagcggggttggcagggagggcccggacctctcgcctgaggctcccattgcttccccgggacccttctccccgccaaaagtgacccaaatacatg

SEQ ID NO: 39686 - DNA, 287 bp, Homo sapiens
  chr3:137488295-137488582
  hyper
ctttgattcccttccagtttccgagtttttctatttaaatattaatttccttaggcccgatgactttaaagacggaaaagaccagctactttgagtaaattacgctgaggtgtgagtgactgacatctgagaccccctgaacgtttgcattttggaactggagcgagctaacctgtaggaatctccggtgaaccaaagcgggatgatgtttccgtctgagtagggccaaggtactttcaatacagctcaccatttagggaagtgtgtcccgccggtcagcttctctt

SEQ ID NO: 39687 - DNA, 348 bp, Homo sapiens
  chr3:137489001-137489349
  hyper
gcaggagctgggccacggcagagtaattaagaaaataatgaaattgatggcggatgggggcgctagaaatcctggggcgtctacttaaaaccagagattcgcggtcggccccacggaatcccggctctgtgtgcgcccaggttccggggcttgggcgttgccggttctcacactaggaaggagcctgaagtcagaaaagatggggcctcgttactcactttctagcccagcccctggccctgggtcccgcagagccgtcatcgcaggctcctgcccagcctctggggtcgggtgagcaaggtgttctcttcggaagcgggaagggctgcgggtcggggacgtcccttg

SEQ ID NO: 39688 - DNA, 141 bp, Homo sapiens
  chr3:137489557-137489698
  hyper
ttttccacttaggtccgtaagaaaagcaattcatacacgatcagcgctttcggtgcgaggatggaaagaaacttcagaaaaactctcgccagacaacccggcagcacttggccccggaacagagaggagagaaagacctga

SEQ ID NO: 39689 - DNA, 1172 bp, Homo sapiens; identical to SEQ ID NO: 2810
  chr3:137489875-137491047
  hyper

SEQ ID NO: 39690 - DNA, 31 bp, Homo sapiens
  chr3:137834285-137834316
  hyper
ttcccggaatgctcaccgcccgccgttcccg

SEQ ID NO: 39691 - DNA, 30 bp, Homo sapiens
  chr3:137834640-137834670
  hyper
ggctggacttgccccggtttccccacaccc

SEQ ID NO: 39692 - DNA, 30 bp, Homo sapiens
  chr3:137893255-137893285
  hyper
actgaatacagtaccgaactgaatacattt

SEQ ID NO: 39693 - DNA, 30 bp, Homo sapiens
  chr3:137906327-137906357
  hyper
caatagttggctgtcgaaagtgccggcccc

SEQ ID NO: 39694 - DNA, 50 bp, Homo sapiens
  chr3:138048436-138048486
  hyper
agccccctccccaccccggagccggccagggggcgcgcgcagaggccgga

SEQ ID NO: 39695 - DNA, 30 bp, Homo sapiens
  chr3:138048762-138048792
  hyper
acgcagtctctccgcggaggctctgaaccc

SEQ ID NO: 39696 - DNA, 892 bp, Homo sapiens
  chr3:138066746-138067638
  hyper
ttcaaaaggtggaattttatggtgttgaattatatctttatttttttaacggggggaaaatgacgccgctggagaggagttagcggaactgaaacaatgaaatggtgcgcgagtgtcgcctgtccccgtcgcatccatcccaacgaagtttgggccctggaacggtgcacccagaaggcctgcggggagagacgctggggcatgatctggaagaaagacgtctcaggattcgaagggaatgcagctaaggtggcggcggaggttcgcctaggactggggaggcgtccctaggctcagaagttggcccggccggagcggagatttaaaggttggagcgcagaggctcttaaagaggccgagtcgaattcccactcggcgtccaccttaaagccagctccccggcaccacggatctgacccgggtaagtgctgggccgcgggagaggctgcggcgccgaccccagcccctggcgctctagcgcgccctgccgggcccaggggactcggcgcgggtgggctggacttcgtaggcgcgcgtcctgggggccggggtgcacgcgggggcgacagggtcgaggcacccggcccgggctccccactggcgcgcccgcagcggcgctctatttttagcaggcgctgtggcaatataaggaatgcgcggcgcgctaggcgctcggggcgcacgctggcggcgcggtcgctttaaggaggcgccggggcggggacggaccggagtggccggctggcggggagccgtcagtccggcggccgcggggcccggcgggcgcgacgctgcctcctcaccggcgcaggctaggagggggcggcctgagtgccgtagccgagccggggctggagcgcgcggtgagtggtcgggcggccttggaggggag

SEQ ID NO: 39697 - DNA, 1021 bp, Homo sapiens
  chr3:138153255-138154276
  hyper
gcacttggtccacccggactggcgagtgcacacctccggctgacgcctgcgccacgtgctggggtcggaggccgagctcaccggctggttgctctttagagcgggcaggagccaggcgggcggcccgcccctctagggcggagacttccggagctgcggactcactggagccgagaactggggcggcgcggcgcggcgcggtgcatttccaggcgctgctctccgtcgcagagaaccctgagctcggcgcgccgagagtcccagcagggcaagggggcgcggcgtcctggtcctcgagcttgggagacagatgcgcatgggcgtgggggcatgcggacctaagctcgggtgaagctctcgggaagggcaagactgcggcgacgagatgcgagcagaggagccctgcgcccccggggcccccagcgccctgggagcccagcgcacgccgggccccgagctgcgcctgtccagccagctgctgcccgagctctgtaccttcgtggtgcgcgtgctgttctacctggggcctgtctacctagctggctacctggggctcagcataacctggttgctgctcggcgccctgctgtggatgtggtggcgcaggaaccgccgcgggaagcttgggcgcctggccgccgccttcgaattccttgacaatgaacgcgagttcatcagccgcgagctgcggggccagcacctgccagcctgggtgagccaagccgggtgggagtgggaggtggggagatgcctttcgaggttcggaggaacttgcggtcagcggggagctggtgcgcgcaaacccgaggcagggcgggagcccggcgacctgcacaccccgttccccaccgctcccggggcgcagaccctggggacggtgaccgcccctcccgcggcgcgcagcaccctcacgtccacctctggtccgactgcggtgggagtggggaacttgggtttcatttaaggccccagagctcgagagaagagtcacgggcagaccacacccgggagaaaaacaagg

SEQ ID NO: 39698 - DNA, 573 bp, Homo sapiens
  chr3:138312853-138313426
  hyper
tggaggcagttttgtccgatccccaaacccttacgcagggatttttaattggcgcgaccctgtcccagatggctcctccccgacaagggtcagtctgaccacttttaggcccaggtgaggtcaagtccggggtactccgggaaggggctcacgccgacgcctctgagagccccgagagccactcaccttactcagtcgccggcctcccaccagcagccagccgggccaggttaggctgggatcagctacgtcaggccccgcctccgcgaccgttaccaccgccgggggagggcggccaatcgagcccgagcgcgtcgagggccagcccctctttggcctgcgaatgcccccaaacgattctctccagcctctccgggaagctgggtccgccccgctccctccggttggctcactacggggggcggggcttaccgcaaacgaaggcgtcggtgcgatgtgctggtctcgggcacgctggcgcttccaacgcactccttgggtgccctgtcacttacatggaggcttatttgcccggaagacgtcagaaatacttgtggccgtgggtgaaagtga

SEQ ID NO: 39699 - DNA, 126 bp, Homo sapiens
  chr3:138327441-138327567
  hyper
agactggacgcactgcgggacatggtgatgtcctgggttggggctgaggaaggcctatgcgcggagggtgcggccttcggctaaggcagaggaccagggttgggtccgtggcggcgggaggggtgg

SEQ ID NO: 39700 - DNA, 30 bp, Homo sapiens
  chr3:138654909-138654939
  hyper
ccggagtcccccagcgtccgcctgtggccg

SEQ ID NO: 39701 - DNA, 832 bp, Homo sapiens
  chr3:138656662-138657494
  hyper
cctggagacaccgtatggcaccggaggagctgctcagccgtcggtgccacctgggaagtagggtttcgggtgctgctctggagcgcgggaaagtccggatccgggtctgctggtcagcgcttcggcgccgccgggctcctttatctctcatccgccggccggtgagcggctccagtttcaagacccccgatcctgccggtgaggggagggagcgagaaggagtgcgctccgggcccaagaggctgcagggccccactccccaggtctgtcgtccttcctttatctcctcaggtcacacccccacttaaaataaagaagggtgcctgactcattcaggtcagggaagtcggcccccgggagcctcctgccctcacaagccatggtgaagggaggcgaagccagggtttgccacggcctgggagaaaatgcggctgcagggtctctttgggctgcagcgctggcccggggccccaagactgttaaggtgtgtgtgggaggcgcgcagtgtggctaccgaagagccctccatcaccgcaccggcaggccgccgggctcgtcctcctctcatgcttccaagggttctgagctgcgcagcactcgcatcacccagaagtgtctgtggagaaaacgacctcaggtgtaagcccaaggctgctgcctgcaaaggcaatgccgtggagactgggttccacagcgacctgggtttttaagtcaccgaaagctacagggcagggtcacaaacactctcccgccttctctgcagaaccgtgcggctgacaggagagcgttgcgcagaaaattcgaggccgggcgctggaggagtctccgcggc

SEQ ID NO: 39702 - DNA, 679 bp, Homo sapiens
  chr3:138657617-138658296
  hyper
cgattccatttctggggatcgggtccggtggggagccactgtccctaacgcctccagagactttaagtaggacaatataatgctggtaggagcaaggtgcaaggaatttagcggcagaagcctttcgggggggtggggaaaggcagatccgtgcctcgtctgagcctgggggtggggacagcccctggccttgtagcccctgttccggggatcagctgggcccacctaacccccctacatggggttgaaaggggccaatgggacggccccgccgcccctccctcgggattccacagggccctgacccggcctttatctctgcacggtcagcagtcgcgggggcttcaggaaggaggacaaaggcccggtgtcaccgcgggcgggggctcggtttcctggctctctgctcacactcacagcctttagcggttgttgggggaagatttttaaaaatatgtgtcgaatttcctttttttctcttctagaaacaaacaaacaaaaaaggcaaaaggcgaattccccttcactcctcgtccatagagattaaagtttcctgggatcctgccctttttttttctttgactgcctagaaatacttgttctcccttgtacatagaggaaaatgcggggaaaggttttttaaaactcggtttcatactattattattactaaggacaa

SEQ ID NO: 39703 - DNA, 160 bp, Homo sapiens; identical to SEQ ID NO: 2816
  chr3:138658703-138658863
  hyper

SEQ ID NO: 39704 - DNA, 47 bp, Homo sapiens
  chr3:138659080-138659127
  hyper
cgtgcgcctggccccggaaggtgctcgcagggggtgcctgtggccag

SEQ ID NO: 39705 - DNA, 180 bp, Homo sapiens
  chr3:138662793-138662973
  hyper
aaaccaagtcctacctacagtcgcgccttgtgaacgaaccacggcagaaaaagtctttctgctgacgttaaacagccgcaacgggccagtgatgacacagaaaacaaacaatcccaggaaaacaaagcagcagcgacagccacaaacgcctgccaccccggttgctctcaatctttgttt

SEQ ID NO: 39706 - DNA, 120 bp, Homo sapiens
  chr3:138663607-138663727
  hyper
tccaaggccacaatacttccccggttgcccggtgaattttttttcctttttttttttttaaatactctcttaaaaagttccaccgatctttcaaacaaaacattagccagccgccggggc

SEQ ID NO: 39707 - DNA, 241 bp, Homo sapiens; identical to SEQ ID NO: 2818
  chr3:138664141-138664382
  hyper

SEQ ID NO: 39708 - DNA, 67 bp, Homo sapiens; identical to SEQ ID NO: 2819
  chr3:138664701-138664768
  hyper

SEQ ID NO: 39709 - DNA, 533 bp, Homo sapiens; identical to SEQ ID NO: 2820
  chr3:138664802-138665335
  hyper

SEQ ID NO: 39710 - DNA, 131 bp, Homo sapiens; identical to SEQ ID NO: 2821
  chr3:138665396-138665527
  hyper

SEQ ID NO: 39711 - DNA, 976 bp, Homo sapiens
  chr3:138665539-138666515
  hyper
cgggctcggggtagctggccatcatgacaaagccggcgcgccgcggccgggccgcctctgctctccgctccaggcgctggcgcggcaaagagttggggcgcacgagtccgcttacggccaagtctcaaacttctggagactgcggatgccgcccgcgcttgcttgctggaggcctgtcgctgctctcccctctccttccccttcccctagggagcggccggcgggagtggagctcagcctctggccatggggagtccgcccaacagagaggggctccggcctcgccgcccctccccgctcaggccagtccccgccttggtgggttttcttttctgcgctcttcccctccccccgccccccggtttcccgaagcacgacccgcgtctctggcggagctgcctcctggagtccctagtgcgccaggagcctcgctctgttctgattcgtatgggctccaccgagttccgcttgcgtcaggcgccttcgcccctatagcggggcggccagccgcgcacgggcgagttcatctccaagtcactttttgtaaacgccccgcacagcctggaccggcctgcccccgcccagcgagcctcaggggcccagccgacagccaggctcacgcgcccttgaaatctgccggtactcgctctgcgggctgggctgggagatgacgaggaccccggtggggtctgcccgcacccggccaaagcccaggaagctcgggccccagcgaggaaaggcgctccaagcctcctcgcggctttcaggtgaaagaaaacgactcctttgctctgccgtttgctgccgtcttgaggctgaacttctagctcggggctggggaggggcgagacggcgagggggctggacggggtagggtggggagagctgctctgaggctttgggaaagtcagcccagaaacgggtgtgactgtacgaagaagcctcggcctggcctgtccctcgcgctctcagagtg

SEQ ID NO: 39712 - DNA, 357 bp, Homo sapiens
  chr3:138668327-138668684
  hyper
aatactgatttctgactgtcccgtagaggaacagaatccccagccctggtgaagaagaggatgcctgatgcgtgcaccctgggaagggctggaatcggtctccccaagatgtgccttcacatggctgtccggcattcgaaggctcagaaaacaggcaagaaaatgcgggcgggaaagctggcagaatgattactttcaggtcccctccaggcttctgcggaaaagccaggggcttcgggctggagatagaggaatctagggagagaacagaatcctctccttgccggcccagccagaggtgggtgaaccgggcgctccaggaaacggtgcggggcgccctgatttacttctcaacct

SEQ ID NO: 39713 - DNA, 351 bp, Homo sapiens
  chr3:138668757-138669108
  hyper
cgccagggccggttccttttctccccgcggcattggggcgacgcagggcccccggcttagtgaccttggggcggcgctcacctccaaaggccagggtggtgggctgggcagaactcactgcctctttgccccagttttccagggtcccgcagctgcaattcagcagccaccggcgcctcctgaccgtggtcccaccgtagcgccgcctgcggatacggttccagtgaaccgccgattgagcgcagtctcagctcccgcgcctcctcgcagcctggccccgcgcctcggaggtcccgacagccggcgcgagcaatctacacggctctgatacagacgcttttctccccaggg

SEQ ID NO: 39714 - DNA, 254 bp, Homo sapiens
  chr3:138669140-138669394
  hyper
cgcgcctcgggcttccggcggcccagctctactagggaagcgtcgcggctgctctgaggcaggcagcgcttcgctagaaccactcagctcgtcccgcgccgccgccggctgcctgaaccaggttccgctgtcccctttcctagcgggaccccgaaacacccggcggcttcccgctcctgagcgggagagaatagagcttgctgcaaccctctgcttggagggatggcctctgcggtgcttggctagcaaaggga

SEQ ID NO: 39715 - DNA, 15 bp, Homo sapiens
  chr3:138679565-138679580
  hyper
cgggcacagacgcgc

SEQ ID NO: 39716 - DNA, 175 bp, Homo sapiens
  chr3:139062910-139063085
  hyper
aggagttctccgggcgtggaacgggtctgtttccgggctcgaatccagccctggcacggtggcctgctccaaccgctaccttgctctttcgagatggggctgccacgccgccggttcagctccgaggccggtaagtgaccttccggactttcgctggggcgttcttctgggagac

SEQ ID NO: 39717 - DNA, 808 bp, Homo sapiens
  chr3:139258159-139258967
  hyper
cgaggacgccctttctggcgtccgggggcaccggaccgcggctcgccgggatggaggcaggcaggcagcgtctcgggagggctctagggagcggcccggagctgctcggcggggcgcccagggcgcagcgggcagcgcttaccgagggcgcgcaggtactcctcgaaattctcgttgaccaacatcttccagtacccagtgaagtcgactggcatttcggggagtgactggagccagttggccacaagcgggcgggacggctggagactgccgggacagcggctgccggtgctacgcgggtggtgggcggcccggaaatgagcgccctccggggacagggggctctgcggggcggcgacagctggattcccagcgcgcacaaagcctgcgggaggatccattgtagcggtcgctcctccccgcttagcgagggcgggcgcaggggcgggggatgtcgaagggtcaggtttgtccaggccgcgccaccttcgtttcagacgttcagttcgtttcccctacaaaggaagaggagaccggagacgggacgtttgctttgttggccgaactcttcggctgctggggatttccttcaaacgccattaacttctcacactcagcagccactcgggagttgggaaacaatctcctggggtttgtgctggcgtgattaaggaaagaggccacttacaggcctttgtctaaagcctcgcgccggtggtggctggggtcaggaaagctgggaggttcaactacgggcgagaaaattggggcactttccacgtctctcccgaaaataaaagaaaggatg

SEQ ID NO: 39718 - DNA, 30 bp, Homo sapiens
  chr3:139396509-139396539
  hyper
tcctagtgggctgacgaggggcccacgctg

SEQ ID NO: 39719 - DNA, 1784 bp, Homo sapiens
  chr3:139653417-139655201
  hyper
agcctctaagagccgcggctgcccctgcttctcggagatgacgcggagccctgccattgccatccaggtccaaggctatctactctgcccgacaacccctagcaccactaggcgctgctctagtgtgcgcctggcgccctccccagaccagtcgacgcagaacgcccagagacccagccaagggcaagacccttagcgacgcccgtcagtcctctccgcccagatatcagttcaaagggcatggcaggtcagggtccctcgcgccaccccagatgaccctcaggcctcgggtggccactttctgggggagccctccatcccttgcggcagcttttccgagagtcggagtggaggcgcggggctggagggctctccggagccgcccaccagggtcctctgggggcccggtcccgactgggcagggggacctggacagggccccggagcgtggagacggctgaggaaagttgggggtcggggccttggggcggggagcgcggaacccggcgccgatgcccgcgttcatgaatatgcacgagccacctccctccctccgtgacgtcacgggccgtcccggggtgagcgcctgagccgctccgggtccgcgccagtgagcgcggctgctgccggcgagctagcggcgcagcggcgggaacccgaggccgagcgccgcggcggcagcgctagaagcgcacccatcgggcacggcgaggcggcccacggtgcggcaggcaccgggaggcgagagccggcgcggacagtaggcggcggctgcagctcgttggcggctgctgcgaggatgctgcctgggcggctgtgctgggtgccgctcctgctggcgctgggcgtggggagcggcagcggcggtggcggggacagccggcagcgccgcctcctcgcggctaaaggtgggtgctggggaagtttgctcttctcccaggagggaggcagggcaggcttgagggtgaaagcggcaaggacctaggctcaagctggatttgcccaccctcccttgccgcagcttctttggcctctgtgcgccctggattcccgaagtcagttccctgcgcagcggaccagagaggtccacccgcggacgtcaactcaacccctgggcggggtccgggggctgagcagaaggcgaggtctggggagtacggacaactttgagggctgtctgtgccggggtgggagcgcagtgggtgagtttcgagctctggcccagggacggctagagcagggcgctggcgcgccgtggggacaagcaggtgtctgctcctgcctgggggaaggatcagcggcggtgctttcaaggagggagccgagctgtgacttgtctcccagctcggggatggagtggaaacttgtaggctccagggaaggccccgctgacactcctcaagctcccccagggcgtctctgactccccggggaacgtgtaccctccgggtaggcggcggggtccggaagaagcgcgggatgtgaggctccccgctgcctttcctactccgctctgactaccgaggaccgaggagcctaacctggcaccactcccctgcccaccctgttcctttgaagagcttgacctccccgcgcctcccgcccggaaggaagctagatccaagcgaacgcctggctctgtcaggcgagcctggaagccggcgaaccccggactttgacagctgcctgggagcgtcgggagctctggggtggggggccgggtctgaaacaggaggtcacgtgcttgcagggggtggggaggcgagggaagagcagagctggtg

SEQ ID NO: 39720 - DNA, 1423 bp, Homo sapiens
  chr3:140660222-140661645
  hyper
cctatataggagtatccgtgcacaaacctttttatgcattgtgcgagggttactctgagatagacaccaagggaactgctgggtcataaatccaattttttcaaagtaaatccgcttgcgaacccggaaccaagtcgatttttcccgccccgccagttccctgttcaggagagtgcagccgtgattggcgcgttcactcaggccaggggcgccccaggtctcaggtgctaggagcgcggtgacctaccaccctccgggcacgcgttctggccacgcctcgcggcccctttcattgaaagagcccgtagggatcacgtgaaagaacactgcagagtgcgtgacgtcacgacgctcacaccaatgggagcctctgtttatgtcgggagccatcaaatagtcatcttccccctaccatcccccgcccactctccgtcgcgctgcgctgcgtcgctttcagcctctggtgaagggcggcgcgcttaggcaggcggtggcgcggctggagtgccgcggggagggctgtgccggttgctttctgcagccgcatctcggccagctctcctcgccgtccccggggcgctgtgcgtctccagtccgggaccgaagccgcctgccgtagcgggcggccagatccgcgtcccgcctcagcggccggaggacatgcgggagagagaatgagccagagggacacgctggtgcatctgtttgccggagggtaaggtcctggcggggcgtgcgcactggggctgagggtgctggggccgaagacgcaggcgaggggggcgaggggggccgaggggggtgggggggtgggggggcgggagtgaggcctgggcggggagctgccacgggcctgcgggtgaggggagcgacccagcccgtgggtggtgaggggggctccggttcggggaagcaagggggtgaggcccgggcccgagggcgagagagtgaggcccgggcaaagagggttgaggcatgaaacccgggccgggagtgaggttttgggcccgcggggccggggtgaggcggaggccgaatccatgcgtctgaggagacgcgggcaagagctggggtcggcgcttgattacccggacgccgctggacctggccgcacgccgcaatctagcaggcgtcggggatccagggccgctttgaggagcctggcttcggatttcgcgtaggttgcatggcccaaggggacggggcggaaagtgcggaggctgaggacaaaatgggcgccggagactcctttagccctcgctccttgcagcgctcgcttgggcctctgcacgtcactcacgccccacctcggacctcgggccgctcatttccgggctcggctttgcaaggtgggtggtaagggggctacgggatcgagcggggaaggctttggtattctcccgtggttgctgtagggtgtttc

SEQ ID NO: 39721 - DNA, 30 bp, Homo sapiens
  chr3:140713624-140713654
  hyper
tgtattagggttctccgaagaaataggacc

SEQ ID NO: 39722 - DNA, 794 bp, Homo sapiens; identical to SEQ ID NO: 2830
  chr3:140769507-140770301
  hyper

SEQ ID NO: 39723 - DNA, 182 bp, Homo sapiens; identical to SEQ ID NO: 2831
  chr3:140770407-140770589
  hyper

SEQ ID NO: 39724 - DNA, 1203 bp, Homo sapiens
  chr3:140770643-140771846
  hyper
cgcagagggggcgctgctgccgggcatcagccgtgaggacgcgcccctggccgtgcggagagagccggcatttgcgggtcactcgggcgcccctgagtgggcggcggcggcagcagacccctctccagggagtccaggacctgccagcgctggggattcttcccgaacaggcgcttgccctctcttttatggtaagtactctccagctcctggtgaggggcgcgcgggggccgggagccgagatccggctgcacggactttgtgcgggccagcactcgacacagctggcgctcctgacgtcccagtccctgagaattcctctctgcaggttgtggcagttcgagatggttgatttgcgcgcagccctggggcgtttggggcccggcctttggtatcatgggttctaagccctttgcttctctgcgtagcggacaacgcacaaaaaactgccatccgattcacccgctttggtttggatccaggatccgtcactcactggctgagtgaccttggacagggcgccaaacctgtttcctcatccgtaggatgggaatgataattgtgcacattttataggggtattggaaagatctatgggatggtgttcgtaggtagacatgtgctgggcacacaggaaacactcaatcatatgttagctagtattattattagctttgcgagcccaagcttgttatccaactttccgaagctgcagcagttccgtcgtccgtgtaatggggacaataattcctgggggtctgttcgtccggggtattcggagaggtggaagtaaagcacgggtcacgcaataggcaccggtggctgttgttaccgtttattcctgactctggggcagtgaggctggtcgcctggcccgagagcgactcagggaccagtcctggccttgcttgaatacaaacttgtctatgctcgggaagggagggggttgggagctcaggaaaccctaggcgcagggctctgggaaggagggagggggtcagagacttgagcgcggcaaatgtgtccgccctggtcgctctgtacgcgccaggggctccaagccagaaggggacgccgagcccccgacctctgactggcgggagaaccgggggagtggctgctcccgccggcccatggccaagcgcagacggctgccggcaggaaggagaggagggcacttttctgtaccgctgtcgcgagaag

SEQ ID NO: 39725 - DNA, 30 bp, Homo sapiens
  chr3:140950219-140950249
  hyper
ggcgatagcatcagcggcgccagggcaggc

SEQ ID NO: 39726 - DNA, 31 bp, Homo sapiens; identical to SEQ ID NO: 2834
  chr3:141121566-141121597
  hyper

SEQ ID NO: 39727 - DNA, 382 bp, Homo sapiens
  chr3:141378762-141379144
  hyper
gggtgatgcggggacgcggctccctgggaaatcgtgttagcggctccagggctggtccacggcggccttgggagcggcggcaacaggctggagcgtccacgcttcggaggcctctgtctccccaagattccccactgatgaacagggacgccggtccgccttcctcaacttcccctgttccctgccaggcagcgtccctcgcagcgacgttggctgcgacaagtttgacctgcagcgaggacaccaggatttctcagtttctccaaatccaagcccgagcccgagcccgagttccgaccagtcctgacactgcttcccgccgccacctgcctcctcctccagctcccgctgtctccccggcgccggcgccctgggtggccac

SEQ ID NO: 39728 - DNA, 30 bp, Homo sapiens
  chr3:141456867-141456897
  hyper
ctgcacaatctgtgcgcctgctcagacgta

SEQ ID NO: 39729 - DNA, 30 bp, Homo sapiens; identical to SEQ ID NO: 2835
  chr3:141457349-141457379
  hyper

SEQ ID NO: 39730 - DNA, 568 bp, Homo sapiens
  chr3:141516152-141516720
  hyper
gcgctcctgattctgcggcctggggccgagcatgcggggcgggcggagcctcgagctaagtcccctggggtcccagggccgcattcctccgaggtctgcaaaggccactgcttaaaggcgcagaggagcagctgggaacgagaacaaagcggccaggcccccctcggaggaaggaaggagagagccccaggaaacagctgatagcgctaagctcagcttgtttttttcctctgctcaacagttctcctgccacggcaaacaaaacatgtacattctgattccctcttctgtttggattgtgctgtcgactggatctggtttgtgatgagctgggggaagaggcatccgcgggcgatttctggctcggcgtgccagtgtgcttttgctgggccgcgccgggatcgcggagcttcctctccggctcctttctccccgtctgcgtcgctaatccagcctggcccggccaccccaagggaagacacggccgtttcttttgatagtggaattggaggttgccaagttttcagatttaatgggaggtggagggttgctcgtgtccttgaccttg

SEQ ID NO: 39731 - DNA, 30 bp, Homo sapiens
  chr3:141868444-141868474
  hyper
cggcagtgcgtgcacggagtaaacaaaccc

SEQ ID NO: 39732 - DNA, 30 bp, Homo sapiens
  chr3:142166778-142166808
  hyper
actcccatttcgatcgtcaacactaatccc

SEQ ID NO: 39733 - DNA, 30 bp, Homo sapiens
  chr3:142167042-142167072
  hyper
ttgcaacttaggggcgaaaatgccccatga

SEQ ID NO: 39734 - DNA, 30 bp, Homo sapiens; identical to SEQ ID NO: 2837
  chr3:142297280-142297310
  hyper

SEQ ID NO: 39735 - DNA, 30 bp, Homo sapiens
  chr3:142297722-142297752
  hyper
ggaagccgggaagccgttagggggcggggc

SEQ ID NO: 39736 - DNA, 746 bp, Homo sapiens
  chr3:142443146-142443892
  hyper
cgccggcggctggggaggggtcgctggccccggggccgcgcatgcgccgccaccaacttggggctgtcagtggagggcgagtgctggttctcaggggaggcgacgcccttcggggccaacgggcctcgagccgaggcagcagtgggaacgactcatcctttttccagccctggggcgtggctggggtcggggtcggggtcggggccggtgggggccccgcccccgtctcctggcctgcccccttcatgggccgcgatgatggcggccctgtacccgagcacggacctctcgggcgcctcctcctcctccctgccttcctctccatcctcttcctcgccgaacgaggtgatggcgctgaaggatgtgcgggaggtgaaggaggagaatacgctgaatgagaagcttttcttgctggcgtgcgacaagggtgagagttaggcccctttctcctctggacgcccctgtcctccagacctttagtcctctcccccgcctcaacttatatcggggcattccctctgtctcaggcgccgagtgtcttcccgcctcgcctgctgcctcaggcggtcttctcctcaccgcctctgccctgtgagtgtggagctggcgggagagtggagctggggctgcgccctcggagcgctgcaccgtcgggggtggctctggccttggggtccggggtttaggtagcgccttgggagccccgaccccagcgttttagcgccgcccttgctactgaccgcatg

SEQ ID NO: 39737 - DNA, 30 bp, Homo sapiens
  chr3:142607265-142607295
  hyper
tgggcaaagcctctcggggaaggaaaaaaa

SEQ ID NO: 39738 - DNA, 30 bp, Homo sapiens
  chr3:142608213-142608243
  hyper
ccgacgcccagagacgattctcagggaggg

SEQ ID NO: 39739 - DNA, 159 bp, Homo sapiens; identical to SEQ ID NO: 2838
  chr3:142681835-142681994
  hyper

SEQ ID NO: 39740 - DNA, 975 bp, Homo sapiens; identical to SEQ ID NO: 2839
  chr3:142682049-142683024
  hyper

SEQ ID NO: 39741 - DNA, 30 bp, Homo sapiens
  chr3:142720222-142720252
  hyper
attctctgaattcccggacccaataacgcg

SEQ ID NO: 39742 - DNA, 522 bp, Homo sapiens; identical to SEQ ID NO: 2840
  chr3:142837796-142838318
  hyper

SEQ ID NO: 39743 - DNA, 167 bp, Homo sapiens; identical to SEQ ID NO: 2841
  chr3:142838479-142838646
  hyper

SEQ ID NO: 39744 - DNA, 196 bp, Homo sapiens; identical to SEQ ID NO: 2842
  chr3:142838876-142839072
  hyper

SEQ ID NO: 39745 - DNA, 321 bp, Homo sapiens; identical to SEQ ID NO: 2843
  chr3:142839204-142839525
  hyper

SEQ ID NO: 39746 - DNA, 126 bp, Homo sapiens; identical to SEQ ID NO: 2844
  chr3:142839562-142839688
  hyper

SEQ ID NO: 39747 - DNA, 118 bp, Homo sapiens; identical to SEQ ID NO: 2845
  chr3:142839783-142839901
  hyper

SEQ ID NO: 39748 - DNA, 183 bp, Homo sapiens; identical to SEQ ID NO: 2846
  chr3:142839944-142840127
  hyper

SEQ ID NO: 39749 - DNA, 78 bp, Homo sapiens
  chr3:143566886-143566964
  hyper
tcagcacattttctccagtttcggtactttgctatctgagcacaagtctctaattacgctcaagcaacaagtttcaca

SEQ ID NO: 39750 - DNA, 30 bp, Homo sapiens
  chr3:143690478-143690508
  hyper
ctgaaaccagaaaccgcgagttcatgcccc

SEQ ID NO: 39751 - DNA, 30 bp, Homo sapiens
  chr3:145878162-145878192
  hyper
acaactaaggttttcgagcgagcgttgttt

SEQ ID NO: 39752 - DNA, 876 bp, Homo sapiens
  chr3:145878416-145879292
  hyper
tctgcagggaaattcgggcacgctgagttcaccgagaactccaaggagtcaacgagggcgggtgcccctacacttccccagggaccagcgccgcccgaccgcaattctggggaagaccccggcggtcctggagaggagggacaggcccccactactcacctggccagccccgcggaagggctggtggatgaatgaactgcccccccgccggccgagcctcgcgggacagcggcggaccgcggggtgctcacctgtggggatgctcgagggcttctccgagtccgcacccagacagggattccaggggtggaggacgagcgccaggagcagcagctgaggcttcaccgtgcatccccccatattcggccctcgagggccgcgcgggctcaggcgcccacggccccgcagcgccgcgcttctcgcgagaacgcagagacccgggtccgccctgagccgccgattgcgggcgggagccggcgggcaaggcgcgcggccggcagccggagcggcgcgtaacgcagctgagtgaggtcgtcggtggaggcacggagcagcaggcgcccggggcgctgcggaggccttataggctccccgaggggaggcgacggggcgggccgcgccctggctattggccgccggctgacccgccgccgctgcgcgcccggtgcggtcgcctcagctcgccctcctgggccccacgtctggactgtttgctcagcgcggacgctatttaaggagctgcctgcggctacgtgtggaggctcacgcagcgcttctggctggaacggggaagcctgcacttagctttgggagtgggtttgggagagggaggaggagccgccgggagtctggcgggagggcggtgttcccgtctgg

SEQ ID NO: 39753 - DNA, 674 bp, Homo sapiens; identical to SEQ ID NO: 2850
  chr3:145968331-145969005
  hyper

SEQ ID NO: 39754 - DNA, 87 bp, Homo sapiens; identical to SEQ ID NO: 2851
  chr3:147074058-147074145
  hyper

SEQ ID NO: 39755 - DNA, 95 bp, Homo sapiens
  chr3:147074502-147074597
  hyper
gaccggccttgccccgatgcaatcggcttcctaggatgggatggggggtaggggattgcatttctttaacccagatccacgtgcctccccacctg

SEQ ID NO: 39756 - DNA, 271 bp, Homo sapiens
  chr3:147077094-147077365
  hyper
agacagaaagagaaggtctggcggcctgggggcggccatgcgtgtagccctccccggtatgtttttgtgcacagagttggcgccagggcagcgccccagaccccagtcctggctggacaataaatgaccggacagctgcggccgctacaaaggagcccctcgaccgcgtcgctgtttacttagtgtcgggtctgaccccagggctgcttgcggccagtacagatgctgattccaccctgggaacaggctttctgtcctccgttcgccgcgc

SEQ ID NO: 39757 - DNA, 30 bp, Homo sapiens
  chr3:147079038-147079068
  hyper
ttcaactttggcggcggcagcagcaggttg

SEQ ID NO: 39758 - DNA, 104 bp, Homo sapiens
  chr3:147086923-147087027
  hyper
cagaaatacaactggtaaagacgtgtttgccaacatctggatcagctccgcccaatttctggggcagcacatgtttattccacgtttctggtagcagaaagcta

SEQ ID NO: 39759 - DNA, 30 bp, Homo sapiens
  chr3:147087635-147087665
  hyper
caggctcagctgcggcgcggtgcggcgctt

SEQ ID NO: 39760 - DNA, 30 bp, Homo sapiens
  chr3:147089275-147089305
  hyper
actgaggtgatcaccgtggcttcccagact

SEQ ID NO: 39761 - DNA, 349 bp, Homo sapiens
  chr3:147095485-147095834
  hyper
ccagatctactgaaccggactcctgaagtccttaccatagaatcttgctctaacttgcctctttctgctgggtgttttgcgacccagctggccacgctgctcacgctcctatcaccctcaggcaaagctagcgcccctctcccgtcaaggatcaggcaagtcggtattgctggcggacagacaggcagcttgaagggcttgagctccaagatgcgatcactgaccccctttcttgcctttcattggcgtgagtcatccttctattttgcattagaacctattctcacattaccaccaggaattgccccaccacctatccctagcccaggagaggcgggggcctaagtaa

SEQ ID NO: 39762 - DNA, 498 bp, Homo sapiens
  chr3:147098147-147098645
  hyper
cgtgaaacgctgaagcgtgatagcgccagttggccaggacgcgccccttttgttttcgggggacgatttatgtcctttataaaaatgtggtttggaaaaatagaaagggccttgaaaacgttgttacaatgaaaaagggacaaattagaagacattttccgtgatcaaaggagagcgggagagagcgcatgggcattcacaaagcttgacttattcacttccctcctttgcaagccagggcaacaagcgtgtcccccattgacaaggagccctattcagactgcaggtgcgaagtgggccggcgcgcccgaccacattatgtcaaggttgttggagattagtgttcagccctaataactaaagcgcttgatttacattggaaaaaagccccctcagccgtgaaaacaaaatctttgaacgcgtgatcattgcgagggcggctgatatcctaatacgtgcattgttctcggcctggcccaggcgcgccccggcctcctt

SEQ ID NO: 39763 - DNA, 97 bp, Homo sapiens
  chr3:147105107-147105204
  hyper
acggtttgaaactaacggggcagagggagtttgacagagaggagaacaaatcgctgacaaagaaccttttacgtttcatcagcgttgttaggacgac

SEQ ID NO: 39764 - DNA, 30 bp, Homo sapiens
  chr3:147105636-147105666
  hyper
cccttccccccaagtcgccattaaatttaa

SEQ ID NO: 39765 - DNA, 290 bp, Homo sapiens
  chr3:147105884-147106174
  hyper
aaacgtgggcaagtcgggttctagaaaggaagtatatactggagagcgcagtgacagtattaaatggcgtgaaagcaaaggtcagcgcaaatgtatcttaatagagtgtctgtagtgaagtgtgccgcctttgaagcggccgctccccgcgcgtatttccatggcgagcctaacgcggcatgctgatgcaccgtcaaactcacactttcaaccccaaaacccgactctttgaacaacccgagcttgattagacctttctccttttctttcccctcttacaaaccatttcc

SEQ ID NO: 39766 - DNA, 103 bp, Homo sapiens
  chr3:147106207-147106310
  hyper
cgccctctgatcaccgcagaaagcagaaacaaagggggctgagcggcgattcaagcggctcttttcttccttcacattattatccatttttattatgatcggg

SEQ ID NO: 39767 - DNA, 130 bp, Homo sapiens
  chr3:147107634-147107764
  hyper
tcacccagacacggccgcctaggtcaggtctctccactttagaggcttcgactcagtgacgtcatcagctcgctctacacccggagcccaagcacctacaagactacacaggcaacgcctctacaggggt

SEQ ID NO: 39768 - DNA, 30 bp, Homo sapiens
  chr3:147108234-147108264
  hyper
atatttcccattctgcgaagcatgcgggaa

SEQ ID NO: 39769 - DNA, 660 bp, Homo sapiens
  chr3:147108911-147109571
  hyper
gccccgcaccttgcacgtgtatggcttgtcgctagtgtgcacgtgcgaatgcttcttacggtcgctgctgttggcgaagcgccgctcgcagccctcgaactcgcatctgaagggcttctcgcctggcggaggcaacgcagagacattagtgcttgtgggtcgtgttcccgtcaggtgcttgccaccctcccccattcgtctctcattttctggaaaagaactacaaaatattttcagaaatccctttccacggcgcctcaggtcgagcacccctttccctcgtgcagagagcgcccccggtgccctctcttgaacgcctccatccctcccgccttcctcctctgggctcatggggagggtatggaggaggagcgacagtgactccatcttagtcgagtttccatcctcgaaaatcctgatccactcgggttgtttcctccaaattttctccacttggaaccagaagcacctctgctcggaaatacattaacggaggagctcacaatatagttaacggggaagctcacatctgctcgatttaaagttgctgtttcagactaacttctctgccgctaccccgcccagccgttcatcccccccacccacccccatcctggcccaaattgtttcctaaagtaggttttgcgcaaacgccaaagc

SEQ ID NO: 39770 - DNA, 104 bp, Homo sapiens
  chr3:147110010-147110114
  hyper
cgctgcggcttcgggaagaaaacagctgctgctgtcaggccaggcctggctccgcagcccggagggccaccaggcggctggcataggccggggaggggctggga

SEQ ID NO: 39771 - DNA, 454 bp, Homo sapiens; identical to SEQ ID NO: 2858
  chr3:147110228-147110682
  hyper

SEQ ID NO: 39772 - DNA, 304 bp, Homo sapiens
  chr3:147110994-147111298
  hyper
caaaaacaattatttcgctccagacgaggagcagaggagaaaacagcagtgcactgagtgataccggcagccgggaagttcgcaggcccctaggaggccaggtgaggccgcgccccagcttgctccggagctgcaggaggcgccctggtctctgcgcttgacatcacccccgccccccgccaacacccggcctccagtccttccccctccctccagctccctgcactgcgccctgggtgggtgggtgaatgtgaagaggcggcgttgggctaggcccctgcagcccgctcggagcgtcctaggc

SEQ ID NO: 39773 - DNA, 625 bp, Homo sapiens
  chr3:147112080-147112705
  hyper
cgcgaaccgaaagaacgcacaaaattctgtcctgaaaacacgaaaacctgagccagccgtggcgcactgaacttgcttctctgctgtaggtcgactgtgctaagaatttaaccattttctgcttcacagaattcaaacagtgggccggcaaagagctgtaaaagtttgtttgtttaaaaaaaaaaaaaaaaaaaccctgtcattaaagatgagttccttctccagctcaggactgcgagtctaccttccgggtgtccgccgccagctcccggagtagcaggcctggggccaggattccagtgtgacctaccgccccttcccgaagctaaaacctctggtgagggggtgagatccatgcgacattgtgggaaaccctgaaaagaactcagggaaaccgtacacttccagacaagctttagaaataaagtgccaggctccaagtggactttggtctggtctccgcatgtgccagtgtccgggccatggaccttccccgggaagggagagtttggggagaagataggcgttagaacaactagccttaggaagttctttgactccaacaattgtcgatgttccagcaagaataggggcgagtaaggcaaggcaccgggcagtaggagaa

SEQ ID NO: 39774 - DNA, 31 bp, Homo sapiens; identical to SEQ ID NO: 2860
  chr3:147131373-147131404
  hyper

SEQ ID NO: 39775 - DNA, 42 bp, Homo sapiens
  chr3:147136958-147137000
  hyper
gggcgctttccaaatcgtcgcggcaggctctggccgggcagg

SEQ ID NO: 39776 - DNA, 285 bp, Homo sapiens
  chr3:147137075-147137360
  hyper
cgcgggctagagagagaaccaagcagaggctccggcctgtgaaagtcgctggctaggctcccaaaatagtgcggcggggtagctgcacgtgtttgttttcaaaccgcgctggtttaagtgagttcacactgcggagccgacagcagagggtagagcaacctggggctgctgccattggaacggcgagttgagcgggcctgtcagggcctctccgccgagggccgggggctgcatggtgctcgagccccagccggccacaccccagtgcatcgggtggctgggctt

SEQ ID NO: 39777 - DNA, 271 bp, Homo sapiens
  chr3:147138407-147138678
  hyper
tcctacccaaactcccgagtctccgagctcaataacgcaaggatggctgaagagcgtctgctccatgtctctttgccggactcaacgaccctcacccactgccaccgagtgctaggcccacagaggcctggcagaagccactcacccctcactactcatgactaggaagaaagtggccggggcatgagggttcgagttctgtcctaggtcccggaagccagggctcccagcgtctagtcaggggcgcagaaaccctcgttcctccaaaccc

SEQ ID NO: 39778 - DNA, 163 bp, Homo sapiens; identical to SEQ ID NO: 2862
  chr3:147141097-147141260
  hyper

SEQ ID NO: 39779 - DNA, 30 bp, Homo sapiens
  chr3:147141589-147141619
  hyper
atggcttcccaaactcgggtcccccgactc

SEQ ID NO: 39780 - DNA, 364 bp, Homo sapiens
  chr3:148415475-148415839
  hyper
tcgggaccaggtgaacgctgatctgatagttgacacgggacgactgtggcatcatccttgctgccgtcaatatcccgagagggaggaggttgggccgggagggtctcccggggcggggcggaggaggagggaatgcaaaacagagcctcgtccccggaacccaagaagcagcaacgcccctcactataaattcggagctgcctcctcgccaatgattccagcgcctgacagccaggaccccaggcagcagcgagtgacaggacgtctggaccggcgcgccgctagcagctctgccgggccgcggcggtgatcgatggggagcggctggagcggacccagcgagtgagggcgcacagccgggacg

SEQ ID NO: 39781 - DNA, 65 bp, Homo sapiens
  chr3:148415861-148415926
  hyper
cgcaccagcgcagccggccctcggcgggacgtgacgcagcgcccggggcgcgggtgagtccgcgc

SEQ ID NO: 39782 - DNA, 177 bp, Homo sapiens; identical to SEQ ID NO: 2864
  chr3:148710030-148710207
  hyper

SEQ ID NO: 39783 - DNA, 502 bp, Homo sapiens
  chr3:148804062-148804564
  hyper
ggccgttagaccgagcgccccaccccctccgcccccttcacctcttgaacatccaggacatggcgctgagtgggatgacaagaggagcgcctcggctcccctggatcgttttcgagccgcctcgatacgcctccttccaggccccgcagccctgaagccggggacaaattccgagcgccggatcaggagcgcacgactgaaaggtaagtcgccgcgagtccagtcagacgtcgacgccgtctccttctgcaacaatctgggagaccagcgtcgctctgtgactggcactaggaaagcccaatcacgaagaggagagtgcggagccaaaccagtcagagcacagaagggagggcaactccgccccgctgccattcaaagacggcggggggtccgggctgcaagggtggttccatccgggttcttccccgcccccaaggcgggcgcgcgggaaagccacgaggccccaggagtgcgactgcggtgcctgcggtgccggtgtttt

SEQ ID NO: 39784 - DNA, 1276 bp, Homo sapiens
  chr3:149375060-149376336
  hyper
cgggagcggagggggcgccgaggccggattcatcttctgcaaaaagaaggtcagatcagccttttatttaaagtcggaggaagtgggtaagagggttacagggtgagagggcgagatggtgggagaaagaatagagggaaaaggaaacgaggagacagataattgcccgcctggagatcccagacactcagcggtaagaccagcaggatgggggaggggtccctcctggcctcgagaattatgcaactttcttgaagcaaagaagttgcctggaggaggagaagatagggcgaggggtggagggaataactgcactcggggcttgctgaaccgcaggatggcaaaggaaaggtcgcacgattccaggacaggcagccccccgaaagaagttcagcccgagccaactccaccacgtctcgactccggaagcccgaggagcctggagccctggagtggtgccggatgagcgcgcgagctccagcgggcactacctgggcgggcagcgaagctgagcctgagcgcgcggcggccgccgtcccgcccgaacttgccgtcgggcctgggtcgctcgggtgagtcccgagattgcggagctggagccgaggcttggctgacaaatcccgacccgactctgtgcctggcagtctaagggcttcggctctcacatcccccgagctggcctaaggcgctagtgctgggcgaaaaggaggcgcaggagaagcagacagcgcggccgcagcagctcccggactgtcccataaacaaagtttggagcaaactcccacccccaggaaagaggcgggcccgaaagttgagctgttgaattatgtatgacctcctagtccctagccggccagcccccgctcgcccctcctcttcctcctcctcctcctcccacctcggctccagaaaaccctgggcgtgatgggtactttactgggtaagaggagacgggtgccccccacccactcctcccggccgcgcggacctctcccgctcagacctgcatctgcattcctttgagtttaccacggacttggggcgggatcaaagggaaagtggcctgagcctgtttcatcaaggggttgtggaccgaaaccaaggccgggggtggcggagggcacgcggatgaggggctcaggcctaggaagggccggtcctggacaccgcgccctcccctgcagccaggcgccgaggcctgcagcacccggagcgccgcactgacccgcgattctgcccgaaggccggcccgggtgcgccccggcgcggggagaca

SEQ ID NO: 39785 - DNA, 30 bp, Homo sapiens
  chr3:149376657-149376687
  hyper
tggaatgtccctgccgccctccggggagcc

SEQ ID NO: 39786 - DNA, 30 bp, Homo sapiens; identical to SEQ ID NO: 2866
  chr3:149689310-149689340
  hyper

SEQ ID NO: 39787 - DNA, 30 bp, Homo sapiens; identical to SEQ ID NO: 2867
  chr3:149689653-149689683
  hyper

SEQ ID NO: 39788 - DNA, 30 bp, Homo sapiens; identical to SEQ ID NO: 2868
  chr3:150126520-150126550
  hyper

SEQ ID NO: 39789 - DNA, 164 bp, Homo sapiens
  chr3:150321029-150321193
  hyper
tactgctcccctcccccgaccttggctgatcgcgcctgcgcagtggggagcagctcgctcctgggctttgggctggctgcagtctgtctgagggcggccgaagtggctggctcatttaagatgaggcttctgctgcttctcctagtggcggcgtctgcgatggt

SEQ ID NO: 39790 - DNA, 30 bp, Homo sapiens
  chr3:150479745-150479775
  hyper
acgtgtcaggggtgcgcagacggtaggcgc

SEQ ID NO: 39791 - DNA, 30 bp, Homo sapiens; identical to SEQ ID NO: 2870
  chr3:150480265-150480295
  hyper

SEQ ID NO: 39792 - DNA, 30 bp, Homo sapiens
  chr3:150481111-150481141
  hyper
gcgggccgggcctgcgccagtgagcatgcc

SEQ ID NO: 39793 - DNA, 53 bp, Homo sapiens; identical to SEQ ID NO: 2871
  chr3:150481641-150481694
  hyper

SEQ ID NO: 39794 - DNA, 197 bp, Homo sapiens
  chr3:150802802-150802999
  hyper
cgtgggttcaaattccgactcgtttcgtggctttcggcaagtgagtggtcctctctgagctggctcaatttctccatccataaaaagggtacagtaagaccgtggaaggttgtaaggaccagagattctgactatcaagatcctggcacgtagcgaaggctccataaatggcagccatcattcttggccaagtgcgg

SEQ ID NO: 39795 - DNA, 1870 bp, Homo sapiens; identical to SEQ ID NO: 2872
  chr3:150803025-150804895
  hyper

SEQ ID NO: 39796 - DNA, 252 bp, Homo sapiens; identical to SEQ ID NO: 2873
  chr3:150804936-150805188
  hyper

SEQ ID NO: 39797 - DNA, 38 bp, Homo sapiens
  chr3:151556891-151556929
  hyper
tgcattcagttggaacggaactccgccagttagtgact

SEQ ID NO: 39798 - DNA, 30 bp, Homo sapiens
  chr3:151986595-151986625
  hyper
cattaggagctcgacgagtccgccctgggc

SEQ ID NO: 39799 - DNA, 30 bp, Homo sapiens
  chr3:151987529-151987559
  hyper
atcgttttgtagtgcgtcactcaaaaactg

SEQ ID NO: 39800 - DNA, 1426 bp, Homo sapiens
  chr3:152552394-152553820
  hyper
ccagaaatccggtcccggcaaagctagacgctctgcaatgacaggcgttcccagctagggactcctggctgcttggagcttgaaaacacctggcgtggttctcgagggccctagaggctcctgctacggactggtcggctctggggttgtaggcagaaggctctaagcggtcggaagggtttcctgtgtgtcagcaacttcactttgccgagatagctggcggaagagggaaggagcgctcgcgggccaatcgcctgccagcagccaccttggagcgcacccctctccctcgccgccgactccggtagcagcgtgccggcagaggctgaacacactcggcctcggcggagacctgctccccagaagacgcctcctgcttcccactgcgccctggaggacgcgggctggctgctgggcgagctcggcggaggcacgcccctcgcctccccgcggagtgcggactcgccccggtgcccaaactccgcccaccctctagggagctccgctctcccgcctaaccccggcactccggacagagctgggcctggggaaggggttcctgaactacgcggacgccgaacgggacgcgctgcagaagcgcacgagtctgcggccacgcgcgctccgatggctgccaggagctgagctcagggtgggcggaggaagcggttagacgccccgaaactgagctgcacgtttctaaggtagggaggaggaagatgcccccaattaagttgatctttgagccaaggaggctggggagcagcctccccaagctagagccctgcagagcgagtttcccttgacctcgctgcgcctctggcgcgctctgcagcgcggacccgcggcccctcgggaaagcgcagtcggaaagttatccgcggcggttccctgcgcgccctgttgtgtaagctcggcgttgccagcggacggagaagttgctggcttgcccgatagcccagttcggtggcggcccggggcggatttcatggcccgcggcgaacgcggggccagagctggcgtgggcgagcccctgcgcgccccctcccgcggggatccagttcgcctgctcccttccgctcgctggcttttccgatgcttgctgcgcccctggccgccgctgccctctcgccgcctcctacccctcggagccgccgcctaagtcgaggaggagagaatgaccgaggtgctgtggccggctgtccccaacgggacggacgctgccttcctggccggtccgggttcgtcctgggggaacagcacggtcgcctccactgccgccgtctcctcgtcgttcaaatgcgccttgaccaagacgggcttccagttttactacctgccggctgtctacatcttggtattcatcatcggcttcctgggcaacagcgtggccatctggatgttcgtcttccacatgaagccctgg

SEQ ID NO: 39801 - DNA, 30 bp, Homo sapiens; identical to SEQ ID NO: 2875
  chr3:152878836-152878866
  hyper

SEQ ID NO: 39802 - DNA, 1 bp, Homo sapiens
  chr3:152879855-152879856
  hyper
c

SEQ ID NO: 39803 - DNA, 1179 bp, Homo sapiens; identical to SEQ ID NO: 2877
  chr3:153838773-153839952
  hyper

SEQ ID NO: 39804 - DNA, 174 bp, Homo sapiens; identical to SEQ ID NO: 2878
  chr3:153840317-153840491
  hyper

SEQ ID NO: 39805 - DNA, 30 bp, Homo sapiens; identical to SEQ ID NO: 2879
  chr3:154042064-154042094
  hyper

SEQ ID NO: 39806 - DNA, 30 bp, Homo sapiens
  chr3:154042346-154042376
  hyper
ttctggtgacgtcacgggaggacgaccccg

SEQ ID NO: 39807 - DNA, 88 bp, Homo sapiens; identical to SEQ ID NO: 2880
  chr3:154145795-154145883
  hyper

SEQ ID NO: 39808 - DNA, 14 bp, Homo sapiens
  chr3:154146380-154146394
  hyper
tctggcacacacac

SEQ ID NO: 39809 - DNA, 497 bp, Homo sapiens; identical to SEQ ID NO: 2882
  chr3:154146488-154146985
  hyper

SEQ ID NO: 39810 - DNA, 617 bp, Homo sapiens
  chr3:154797160-154797777
  hyper
gaatcccgaagagcccgtgtattgttttcttgaaagccccgaagctaagcaattctaaaaatgtttagcaaagcccttttgggaatggtgagatggggggtggggaggatgggacattttcattgccaccgcccgccccccgtctccccggccccctcacatgaagtgactggatttgggagacctagcggaaaccttcaggtcacccagggaactgctcctctctctggtcctgcagcggcgaggcggggtagggggtggggggggtgggccgtgagagcgccgagacgcgcggggcgcggagatgtgcaagtggcgaagcttgaccgagagcaggctggagcagccgcccaactcctggcgcgggatctgctgaggggtcacggtgagtctctgtgggtgcgggtcggagggatgcccaggtgcctcgtcgccccacggcccgggcggaggcgggtccggaacctcccccaagtccggcctcagcctggagcccgcgcgccttgggcggatgcacggactgagaggcgcttggctgggctctcagcccgccactgccacccggccccgtgcgctcattggtcgggatgtgtcggctcagcagcctccaacttctc

SEQ ID NO: 39811 - DNA, 298 bp, Homo sapiens; identical to SEQ ID NO: 2884
  chr3:154797835-154798133
  hyper

SEQ ID NO: 39812 - DNA, 573 bp, Homo sapiens
  chr3:155461823-155462396
  hyper
gctttaatgctgaactctcaacgtcaaaatgtgatcacaaattgattcgcagaaggaaacaaatagaaaaagcctcgggaaggaggggagagggcgtcgcagacgctcaacagggaactgggtttaggggctcgcggggtggcgtctcggacccgcagctcagtcgccaaggaaacgccgcgcaggcgcagagcgtgccgccgcggggccggggtttgcctccaccaccccgcgccgctcgggcgctcttggttcttcccaggaaagggcaatggagtatatcctcctcgcgctgagcacacctagtctctaagaggtcctgagcagggtcaccgggcgcaggaaaagctgtgagactccccaagtgtaacggacgctgcactccccttgctgggaaacgcggacctgctctcctggcggcgtctggcggtcagagagagggtcccgggaccccgcgtgagggtgaagcatcctgcagcgaggctggaccttccaccgggcgaaacgccacccaccaccaccgcaagggacccgagagttacattatttcgcggacacacacacccaccctca

SEQ ID NO: 39813 - DNA, 239 bp, Homo sapiens
  chr3:155462791-155463030
  hyper
ctagccagcagaagccccagacgagcggggaagagcagggcgccgccgccacaacctgctttctcattcaaatcctcacgctcacacaggagcccccctccctctcggccccgcagcttccgaggaaatcaggaactggagttgcggagagcggactggagcgcctgctgcctcctctggcccgggcgggatgggtgtacggaaccctagggctgcacgtggaaccccaaggctgcacc

SEQ ID NO: 39814 - DNA, 30 bp, Homo sapiens; identical to SEQ ID NO: 2885
  chr3:155523726-155523756
  hyper

SEQ ID NO: 39815 - DNA, 48 bp, Homo sapiens
  chr3:155524158-155524206
  hyper
cagtcgccagtgggcgggccccagatatcagacgtcttaacagtgccc

SEQ ID NO: 39816 - DNA, 30 bp, Homo sapiens
  chr3:155589060-155589090
  hyper
ctcggctcccaccccgtccctctgggaggc

SEQ ID NO: 39817 - DNA, 30 bp, Homo sapiens; identical to SEQ ID NO: 2886
  chr3:155589558-155589588
  hyper

SEQ ID NO: 39818 - DNA, 42 bp, Homo sapiens; identical to SEQ ID NO: 2887
  chr3:155722291-155722333
  hyper

SEQ ID NO: 39819 - DNA, 222 bp, Homo sapiens; identical to SEQ ID NO: 2888
  chr3:156009077-156009299
  hyper

SEQ ID NO: 39820 - DNA, 377 bp, Homo sapiens
  chr3:156009318-156009695
  hyper
cgtgcagtcaccatgaatgctcagctctaggcttctgtaaaaacctcccccactgcatggatttggctgtttaatcagccgagattacagcccgggaagatttgcaaacctgattctccctccagctgctgtgacaacttcggggccgtctgtttacttctctgggtccccggggactctttcctgcatcgcagccccttgtgccactttgtgggcttggctcgaaagtcagccgccaggactcctctgacggcatccccaggaagggggagcaaggagggcttaaaagaaaagcagaaatccccgcaactgctcaacctctcgtgactgcctgtgttctggggttctgagagggaccgtgcgctgcctggggaagc

SEQ ID NO: 39821 - DNA, 30 bp, Homo sapiens
  chr3:156391900-156391930
  hyper
gtgggggaggcagccgtttgcttcctcaca

SEQ ID NO: 39822 - DNA, 30 bp, Homo sapiens
  chr3:156392397-156392427
  hyper
gagctggctggactcggagcgcggtcgagg

SEQ ID NO: 39823 - DNA, 30 bp, Homo sapiens
  chr3:156406981-156407011
  hyper
acctgctgtacgtctggtaatttgtcttgt

SEQ ID NO: 39824 - DNA, 30 bp, Homo sapiens
  chr3:156435624-156435654
  hyper
aaacatgggagttacggacaccccccaccc

SEQ ID NO: 39825 - DNA, 191 bp, Homo sapiens; identical to SEQ ID NO: 2890
  chr3:156534392-156534583
  hyper

SEQ ID NO: 39826 - DNA, 30 bp, Homo sapiens
  chr3:156543818-156543848
  hyper
cgactcccgactcccggcagtgcctctctc

SEQ ID NO: 39827 - DNA, 168 bp, Homo sapiens; identical to SEQ ID NO: 2891
  chr3:156799360-156799528
  hyper

SEQ ID NO: 39828 - DNA, 30 bp, Homo sapiens; identical to SEQ ID NO: 2892
  chr3:156877181-156877211
  hyper

SEQ ID NO: 39829 - DNA, 34 bp, Homo sapiens
  chr3:156877882-156877916
  hyper
tagtcttagcgagccgcacgcaagcccaacgcag

SEQ ID NO: 39830 - DNA, 18 bp, Homo sapiens
  chr3:156893032-156893050
  hyper
cgcgagcttgactcttcc

SEQ ID NO: 39831 - DNA, 826 bp, Homo sapiens
  chr3:157155187-157156013
  hyper
gggaatgccaggaacgggctgcaacttggcaccaccgagggaggtcagcttttacaaagcacatccaaggcaggcctgggcgggctgctaacgtgtgtgtatcccgtactctagccacgccgtgcgcctgcggtcaggagcactcggaatgggacaagctcttcatcatgctggagaactcgcagatgagagagcgcatgctgctgcaagccacggacgacgtcctgcggggcgagctgcagaggctgcgggaggagctgggccggctcgcggaaagcctggcgaggccgtgcgcgccgggggctcccgcagaggccaggctgaccagtgctctggacgagctgctgcaggcgacccgcgacgcgggccgcaggctggcgcgtatggagggcgcggaggcgcagcgcccagaggaggcggggcgcgccctggccgcggtgctagaggagctgcggcagacgcgagccgacctgcacgcggtgcagggctgggctgcccggagctggctgccggcaggtaaggaggcaagcggggccgggacctcccactgcggctttgttccgggagcgcgcgtaacggcaagccaagccaggcaaccttctaggggaagctttcatgggaagcgcgcgcgcgcgcgcgcacacacacacacacacacacacacacacacacacccctatttctgcatgcgcggtcacagagctcaggcacaccatacaaggcgggaaaattggctttaaaaaagtattcctcagtcctaaggagccctaaagagagttgtggaggtaaccatcacagtcttgaaatagacgtctagggcccctta

SEQ ID NO: 39832 - DNA, 633 bp, Homo sapiens; identical to SEQ ID NO: 2894
  chr3:157217105-157217738
  hyper

SEQ ID NO: 39833 - DNA, 268 bp, Homo sapiens; identical to SEQ ID NO: 2895
  chr3:157260965-157261233
  hyper

SEQ ID NO: 39834 - DNA, 67 bp, Homo sapiens; identical to SEQ ID NO: 2896
  chr3:157812190-157812257
  hyper

SEQ ID NO: 39835 - DNA, 1168 bp, Homo sapiens
  chr3:157812436-157813604
  hyper
cgcaccgcctcctttgacctcgggcttcccccgcgctccgctgcttggggcagactggccccgagagggagccaccatctcccctgctccagggtctccagggtccgaacccgtgttgggatctgggttaggattagggtttggagcttggagcctgcctgttaggacccccggccccggcgccgactggagctcgctggaggccacaggaccacggcggatggcctggctgcttcagggcgtaccatgcccgcaggcagatgtttattattaaaaactaccgacgttcatcaaccaggagacccgcaaggcctgcgcactgaatacggcccaaatcctgttcagtggtctttgaaagttaaaagaaagaaacctatcgcccacgtctatgctgaggaacagctttgaatacgagctaagacctgggagagggccaagtgggggtggtggggaacactgctggaggatgtggggctttggcaggggttttacgcaccctccagcacgagggtggggggtcccaggggacgctcaggactctttcagtctttgcggaaggtcccgtcatcacaagagcccgcgcgggaaggaaagttcctgccttggacatggtcagggccgagtcttcaaagtctccaactatccccacacaggcagcacctttgggctttactagtgggatttcttccagaagggggccacgacatggggagagagagctcctcattattttcaaggccaggcttttcctaaacccgattctggcttccaccttctaaatttaaccaatgaagaagctgcttcagccaaccctaaacaggagtgtcagatggggaatcctccctccacagtgccctggcctgcccgcctttgcggctcttttcccgctccgaagtcagcacctgccccgctccagagagggtcaacgaactgggactgattgtcgattatgccataccaaacccaggttgatttcgctccgcaggatccctccttccttcctcccaaaagtgtccccagataaagactggaattatagcaaaacgaataacgagagtccatcttggggaaggaagttactctatcctatgttattttacttcttatctgttctttcattaatttggtataaccctgtttctatgctgggtggataaaatggaggggg

SEQ ID NO: 39836 - DNA, 176 bp, Homo sapiens
  chr3:157813669-157813845
  hyper
cggcacgtaagagcagaggcaagcgcttttccaagttggtatattcgagagagtgatacgcattaatcaaaagggaaagactatcccggatattttaatagtaacaggaacaaagatgactcgaaccccatcaaatgaaacgatattttcattcaattgatcgcaaagtgtcttca

SEQ ID NO: 39837 - DNA, 1127 bp, Homo sapiens
  chr3:157815378-157816505
  hyper
tcccttcctctttttctctcccgtttgtctttcgatttttttgtttgctcattttttcattgttaacaagatttttttttctatgcaagagtccatcgttgcagctttgcggtgagccaaactccgcggttccagcactcccctgtccagtctctctccagactcccccaaacccgctcctacaaaacccaattctaggccctcgagtaggaaaacgggcaggagccacggagcctgcgtgcctcgtgagatccctggtcctgcgtggagtctggctttccgagtccaagatgcgataggggacgagggatggtcagtgaggcgggaagagggccggctcccgaggtctcaaaggggtaacggagaagcagcggggcgcggagggcgtgcaggctgagtgccgcgggacaggcgcgacattggtgctggcgttggcgtcacagacccagggctgcggcgtgctttttggctttcagtctgagatcggcgatgctggagttcttgctggtggtcttggcggctgctgcggccgccactaccgaggcggcggaagccgaatccgcggccagcgtggcgagcggcagtccgaagggcggtgctgggaacatcatgtagggcgcgtgcgcggccaggtgcggatgcaggtggtggtgcgcgtgcgccacagcgctgtccagctgcagctgcgcctgaacctgaaaggacaagggcgtcacgttgcaatgactatcctagggtgacaacagaatagaaacagagcattaacggcgtccagcttggccagagagagagttgggttgtgtttgggcacggggagagggcatttggctgtgcatcttgttccgacagtgaccttctcagcctgttgctgaatctggggttccacatggatactccagtgtcccctgggtctccgaaactcgcttagggtaggcttatttccccggaccccgggaacccccttctgcaggaatgtggccgtctcccctgggaactgggctgaaatggtatattggaaagactgcgggtgaggacccttaccctcttctcttgatgctgccatgcatctcttaccccactaccaaaacaacggagtatcaacaagcaaactacgcaactttttaatg

SEQ ID NO: 39838 - DNA, 38 bp, Homo sapiens; identical to SEQ ID NO: 2900
  chr3:157820830-157820868
  hyper

SEQ ID NO: 39839 - DNA, 406 bp, Homo sapiens
  chr3:157821536-157821942
  hyper
gcagactcgaccctaaacgcttaacccacagagatcaacaggttcaagcggaatattcgcgatcctcggtttctattggttgctcaaagccttttcatgcaaccagcagctcggatgtttaataaaatatgaatttttctgctctgggtttgcacacatccgttgccactttcctgtccttctcctccctttaaaaacaggagctcttctagtgtgagcatatacagccaccatatatatatccccctggaacctttatcctctgcgcccgaatcagagactccgggttttaagaagtcaaagctgagtttagatagtcgaggctgtttgcagttcttcccagcgcaggatccaggccagcatgggtgttaaaaatcatttccggaagagccggtctgcagagaaa

SEQ ID NO: 39840 - DNA, 108 bp, Homo sapiens
  chr3:157823011-157823119
  hyper
cgaccggagggttaagctttccacctctgccccttctccctcccggcaaactctgcgctagaggctagctttagtcccgccgtctggttcagcaccccctcctgcagc

SEQ ID NO: 39841 - DNA, 694 bp, Homo sapiens
  chr3:157823138-157823832
  hyper
cgtccgcctgcgggccatccgggctgcgggcccatcctcccgctggtgaaaaatgcatttcggtggaatgggaacatctgggaagggcgcgcacaaaccccacacgcttccccccacgccacccccacaacacactaggaccccacccatgaccgagcataccaccggacccccacccttccactatcactctagctgacaaagctggggtccagggccctctccgtgtccctctcccctccccgctgggcctcggagtcctctcccgcccgagaggagtccggaaggcgggaaggggaaccgctgccgggggtcagtcaggtcgttaccctccgtcagtcgcgggctgcccggctccctgcttctctcggcggcgcccatgtccagctcccggacgggagagcgccctcctccagctcctccgcctgctcctcctcctcctacacctcctccgcctcctccgccgccgcctccgcctcctccgccgccgcctccgccggccgcccggactgccgggctgctgcggtcgtcgcggcccgcctcggtgcagccggtcggctccttggccccgcgcagcggcccgctctccagcacctcccggtacgtgatcgcctccttcttctccttcactttctggtcaaaagacttggagacgaacgccgtaagttcttccatcgccgccgcacgtcagccc

SEQ ID NO: 39842 - DNA, 66 bp, Homo sapiens
  chr3:157824080-157824146
  hyper
ggaggaggagaagagaaggggcgggggctgccggagggaaatgggaactgatgcttccctgccgga

SEQ ID NO: 39843 - DNA, 134 bp, Homo sapiens
  chr3:157824211-157824345
  hyper
cgctgcgcttgaagtcccactatttatacttcctaacggcggcctcttgttttgagtaaattacctcccctcgcaactcggagtgagcccccttcccgggtagcagtcgcgcctctaccgggggttggggaggg

SEQ ID NO: 39844 - DNA, 504 bp, Homo sapiens
  chr3:157824404-157824908
  hyper
agagaagaggagagagagagattggagttcgggcgggctggggctggagtggtagggcagcacagggggaccggagggggcggggagagaaggccggtccccggccgctcaggttttcagatagcccctgccgcctgtgctcttggccattaatccaggattgacaagaatccctaattaatttaattaggcgtggattttgcgttggtgtcacgacttagttaaacactggggagctggatagaccccgcggggtggggccaagaggaaactgacaagtgcgcagctcttagagtcagtcaggtatcccgacactgcatccttccctacagccttgcttcgagtcagggtgcctcgcaatgctcagcttcgcattgcttttcctcgtccctgccctgcatcaaccgcccagcagtttacaggccccgcatcccattcccgcatcctgaccccgcatcccaattctgcatccccgcctctccctcacaatcccacccctgccgg

SEQ ID NO: 39845 - DNA, 510 bp, Homo sapiens; identical to SEQ ID NO: 2908
  chr3:157825059-157825569
  hyper

SEQ ID NO: 39846 - DNA, 30 bp, Homo sapiens
  chr3:157827667-157827697
  hyper
acccatgacgataacgacgactactaagac

SEQ ID NO: 39847 - DNA, 30 bp, Homo sapiens
  chr3:157828150-157828180
  hyper
gtgcgcagtgtcaccgtgcgcatgcgtccc

SEQ ID NO: 39848 - DNA, 39 bp, Homo sapiens
  chr3:158288779-158288818
  hyper
cccatcccacaggagccttggcgaaaagctccccggccg

SEQ ID NO: 39849 - DNA, 289 bp, Homo sapiens; identical to SEQ ID NO: 2909
  chr3:158288886-158289175
  hyper

SEQ ID NO: 39850 - DNA, 225 bp, Homo sapiens
  chr3:158449683-158449908
  hyper
cctcataaatgctggaaggaacgagccagatttctgcagacgctgtgcaccgaaggggccccttccacgccctgggatacttcaggggcgccaggcccagctgggatctccccgggcgtcgtgcgcactgcaccttccctggcggaccatccgttgggccggcaggcgcgcgtacccaggtgtcacctcccagcgccgtgcgcggacaggcaggcgcgtgccccg

SEQ ID NO: 39851 - DNA, 457 bp, Homo sapiens
  chr3:158449969-158450426
  hyper
cgctgggcgagccggaccggaagttgaagaagtgaagcgccgcgcgcgccgcctgctgcaggagcctgcgcgggaccccagcatcctgaggctgcccagggtcgtcggggtccccggaccccgcgggcgccgccaccggggcgagcaacagcagcagcgcgagcagcggggcggtggggcgcgggcccctgggcccggaccagggagcaggcagccgttgccggcggggctgcatggacgcaggaaagttggctcggcacccgacagacacgggctcggagcgggcagtgccggcgctcgcggaaataaggccgtggtgggcccctcccctccgcccccagggcgaaggtctgtagcgagcccgggtccccatggggccactccttttccacgtttcccgcagcccctgggttctctctgcccctccccgctgcccgggcttagtgctaggatgcgg

SEQ ID NO: 39852 - DNA, 30 bp, Homo sapiens
  chr3:158519630-158519660
  hyper
agcggggcaggaaacggaaagacagtgcag

SEQ ID NO: 39853 - DNA, 763 bp, Homo sapiens
  chr3:159480855-159481618
  hyper
tgaggtcatcctcagcgtgcagcccggaggggaagggaaacgtgagctaaagcaacaggttccacccacagcctgaacttggaaggggatgcggcggcggcaaggcggctggagctgcgcggtggagggagaggaagcggcgaggaggaaggtggaagggaaatgatggtgcatgaccaccgagcacacgtcactcgggctcccacatgggcttgtgtatgtgcgtgtgtgaggggagggaggtccttcacagggtcactcgggcacttccgcgtggaataggaggcgccaggctcgtgctttgggatgccgggtggcttcggcggggtaacgagtcacgcagagacggcttgaggcaagccaagaaaatacgggtgtcggcgtgaaaatacaccactcttcccagcgcgccgcccttgctaactggctggacctgcgcccctaacgcccagtgcccccttcttttgggcctatcttggcccctccaaccccatcccagcctgcctcctgctccagcctgccgccgcgaaaaccgggactgcggactgcgccgcgcccggcagcctctgggcatgctcggtggcgggaccggctccaccgccaggagggcgcgtcctccctcccctagggcggtgacggcgcctgcagcgacttgccgccgcgccccggccaggcacaccttttggggaggcgggggaccaccctgcccggcgtgggccgagagcgccccccaccccgagccttccggcgggtgggaggaggg

SEQ ID NO: 39854 - DNA, 30 bp, Homo sapiens; identical to SEQ ID NO: 2911
  chr3:159481903-159481933
  hyper

SEQ ID NO: 39855 - DNA, 166 bp, Homo sapiens
  chr3:159706859-159707025
  hyper
cagcctcccagccaccgccctcacctgccgcggccacaggtctgcatccagcggctcgccctgtgtccctgcagtgccggctcagcatgtgtccagcgcgcagtgagtactcagcccgccaggtctttggctcgctcgggtgcggaggggcggctgcttgggaaga

SEQ ID NO: 39856 - DNA, 425 bp, Homo sapiens
  chr3:159756611-159757036
  hyper
gggcatagcctgtcctgttggcggggccgtgggacccggccgccctttctcctccgtggctccccagccaggaggctgcgcttacctgctccgcacgacctctgcggcttgggggctctcagctctgtcgctgcggggctccaggctggtgcttgtgctgagaatgactgcgggaggggctcgcgtgcccagcactgcaccgcgaggcgaccaaccgctgacatgtggggcgattgggtggacaggaagactcggcgagcttttgtagccgcgggtagggacagcctgggctccctgaaccaagcgcgcgtgggcggcgaccccgtccctgtgcaccgacccgccagcgcgcagcctggtgagagcacttgtgcgccttgggatcgcctgggctgcttcttggcgctctgcctagggggaacctg

SEQ ID NO: 39857 - DNA, 30 bp, Homo sapiens
  chr3:159942817-159942847
  hyper
catctatttttaatcggaagatcacaagaa

SEQ ID NO: 39858 - DNA, 797 bp, Homo sapiens
  chr3:159943735-159944532
  hyper
gtccacgcaggtacccgcgcggccaggcgcgcccgggacagcggcccgggcctccggggggcgccggaccgctggggggcgcggggccgcccgacgacgacgacgactcgcccgctctgctgcgcgacgaggcggcagccggctctcaggactcactgctggacagtggcggcggcggccggggccggggaggcggcgggcgctcggacccctcctgcgcctcagagcacgagatgcgtgtagtgtcgccggtcttcctgcagctgcccagctacgaggaggtcaagtatctgcccacctacgaggagtccatgcggctgcagcagctcagccccggggaggtcgtgctgccagtgtcggtgcttggccgccctcgaggcggggtcgccgcggagcccgacggcggcgagggccgctaccctcttatctgagcgctcggggatcggcggctggtgcagggctgggggctgcgggtggcaagcaacggccggggtgccgccgccaactgcctcagaccttatctggcaccctggcctaactgcccggcaccccgcgactgggttggggtcactcgtctccctcgcgttctcccgggatcttatgtttctctgcgtttcattccgttcaaagaaacgtggggcacgcgcggcgggtgcggctgcagcaggcgaccctccagcgcaccttcgaaggacgtccctgccctctgccttgcctcgtattgtggttcactagtaagtgcctgcttccctagtcaaagagaacacgtgagccctttggtgcgtcgagagaagggc

SEQ ID NO: 39859 - DNA, 30 bp, Homo sapiens
  chr3:160116795-160116825
  hyper
cggagccccgctgccgccagggagacagaa

SEQ ID NO: 39860 - DNA, 30 bp, Homo sapiens
  chr3:160117379-160117409
  hyper
cagaaatcattgcgcgcatttgtaacgaat

SEQ ID NO: 39861 - DNA, 30 bp, Homo sapiens; identical to SEQ ID NO: 2914
  chr3:160118175-160118205
  hyper

SEQ ID NO: 39862 - DNA, 30 bp, Homo sapiens; identical to SEQ ID NO: 2915
  chr3:160167182-160167212
  hyper

SEQ ID NO: 39863 - DNA, 520 bp, Homo sapiens
  chr3:160167468-160167988
  hyper
caccttctccgcatccgtaaaggtccttagactcaccgcggggaggaagcggaccaggcaactccacagcacggaaacacagcgccacgagctccaggcggatgctgagagccgccccgagtccccgccctcctctgccccgaagggcttcaggtgcccagaccgggcggggcctcgcggagcctcgcagcgcaggcgcagtctgcaggcaacattcaactgcaaggcatcggccaatgggaactattgctgggctcgttcgaaagtaaacggtggacggcgcggcccgaggcaggtggcgggagtcagtttaaggctggcgcccagctttccgcgcctgcgtgctaggcgcaggccgcctctcggaagcttggcctcgcaggagcggctctctatcctgtggggagcttcggccagtgggcctcgtgagctggggtcccgcctggggaatccgcatggcaccggtggtctgggggagaggctgggcctggcgcgggacgaggcgaagcgccggtggccg

SEQ ID NO: 39864 - DNA, 30 bp, Homo sapiens; identical to SEQ ID NO: 2917
  chr3:160283640-160283670
  hyper

SEQ ID NO: 39865 - DNA, 1478 bp, Homo sapiens; identical to SEQ ID NO: 2918
  chr3:160472595-160474073
  hyper

SEQ ID NO: 39866 - DNA, 801 bp, Homo sapiens
  chr3:160822406-160823207
  hyper
cctgtagccctagccccgtgggatttccttctctctccgcccgttctccacattccccacttagtttcacattccttcccaatccctccgacatccctgcgccggggcccttccctagcgctccgggaaagcgttcgccgcaggcctgttaggggcccaccaataccgtaacaccgttcccgtcctcttcctcggcaccgctgcaaacgccccgggtcgctacccggatttgacggtggctggagcggcacgggcgacgcaaggcaggtattgcaccctggggcaaggcaaggtggacaaccagcggatgcggcgcggccgcggcctgggcctgggccctccgcgtcgcccactgccccactgggccccttctcccgcgctcaccggaggcgggcagctgctcgtcaccgagacccgagacccacggtgcggcggctcaacctgggccacgctccgctctagaggagtgggcggtgcctcccggcctagctgccggggtctaggcgtttccgaggacggcgcgttccgggaaaggcgggtccggtggctataccctccacccagtggcaggactcaaccgcctcggagaccctgcagggccgcccttctcactcacctcctgtgctcggcgcgcacccagctcggaagcgggaaggtggccggcgttctctccctgcgcacacacgcagcctccccgcatccgcacgcacggccgggcgcgcgcagaccacgcgccagggccgcggccggaagcccctggctgcacgcgcgggcccaggcggcccccagccctgtgagctc

SEQ ID NO: 39867 - DNA, 212 bp, Homo sapiens
  chr3:161089232-161089444
  hyper
ggtgtatctccctgcggcttaggtgagcgccgaggctttggctcctccccagctgctgcgagcttcccactgcgccgggcgcctgggagcctcccggagttaggtgttcggccccgccctcaggactcttgctaaaactcaaattctacctggctaattccggtgattaattattgacaaaaggaaaacactcctacgcaaacttgtgtcca

SEQ ID NO: 39868 - DNA, 180 bp, Homo sapiens; identical to SEQ ID NO: 2922
  chr3:161090004-161090184
  hyper

SEQ ID NO: 39869 - DNA, 30 bp, Homo sapiens; identical to SEQ ID NO: 2923
  chr3:161090633-161090663
  hyper

SEQ ID NO: 39870 - DNA, 1592 bp, Homo sapiens
  chr3:164913051-164914643
  hyper
ttctacctcttacaacaccagcgagcattccactgggggaggggtccttcgctccgccacctggcctatttgttggagttacttacgatgtcttcacccagaaaagaggtccgagggtatgttagtctccggtacccctccttccaccaacgtccttacacctaactgatccaattcaaaactgcaacaaacccctagcacctgtgagcgtacagaatacaccgcggccaaactcgatgtgctctacaatgcacatcctacatacgagaaatactggtttcaattaggcgaagtaggaaaggatggcggcgagtacctatggtgcagagcgctcaggatctccgaggtttgctgcgaggggctacccagcaggaggggcaaactctctgcgaagctgaattgtatccatcatactgtagccttgtagcttctcctcttctggccaccaactttccgaaaggctaccgaatcacgcttgtaatccgtttaaatgtttccacctttgagacttgcagggaaatggtcgctgcataccaatgggagagcggggcgcgcacctagcgcggcgatgccagcgacagggagctcacgaccacagctccctatgccctcgatggttggtaggcaggcaggcagagtgagtgtcccaggactaggttcctttgatttaaaatctcggtgctctggatcagtggagagcttcgttgttcccgagagcctgagctcagtctctggatttctctctttctctcttcctcaaaggttgtcactcacagcgcaatccctgcccgaggcctccttccatccgagaagatggaattagcccttgcttttccagggtgtctttgctctttgccctttaggtgggtgggagtgggggttggtggcgtgtagatgagagaagaaaagggtggggagaggcggaaaggaggcaggaagggggcgactagatctcagatcccagcattggtcagacggcgaaggtggggggaaagaaggagagggggagagaagatacaaatacacagtatggctgtgcacaccaaattccacttggatttgggagatctcaggcaaagcacgaaggtgaagcgataccgttggcagagagtgagtcctctgaccgctcaccattcaagcaccctcacttctcgagcgggagaaggtgcgggggaggggggtgggagggggaggggactgctgaacgtttcaggccaaggagacgctcgcggcggcggcggcggcggcatcttttaagactgacctgctttaaaagtgccactttaatggcctaggaaataactaaaatcggattacacgttacttaccaacgtctcctcctaaactggagcgccaggtcgtgtataaggagtcaatataggaaacgcagggctggaacctgaatgcaaatccatcagccgcccccaaatcgcgcaccaagggagcggcgctcgggagcccccagatcagcccatcgccggagctccgccagcgcgtcccccccgcacccccggcccctcctccgcgccaactgtgtaaatcagccgccgcagtcctctcgccgcgcatcgcaggcaaaatcccggcttagg

SEQ ID NO: 39871 - DNA, 281 bp, Homo sapiens
  chr3:164914762-164915043
  hyper
gctctctctctctcgctttcgctgtccgcctttccctctcccccattatcggtcacaacctggcagctcttcaagagacaccctgtgaaattgagtgtcgggaagtcagcattctgtacccgtggattgatttgtaacttttatttgcaaatgagagagatgcctgtttggaaaattacagcccaaaaggtggagggtgatcaaattaagaacatctgagctgtattggtgggcggtatcgctaaacgcctccggggagcggtttccaagtgatttgcagt

SEQ ID NO: 39872 - DNA, 119 bp, Homo sapiens; identical to SEQ ID NO: 2925
  chr3:164924699-164924818
  hyper

SEQ ID NO: 39873 - DNA, 423 bp, Homo sapiens; identical to SEQ ID NO: 2926
  chr3:167097865-167098288
  hyper

SEQ ID NO: 39874 - DNA, 30 bp, Homo sapiens
  chr3:167813479-167813509
  hyper
cggctcccactgcacgactttgttgccacc

SEQ ID NO: 39875 - DNA, 243 bp, Homo sapiens
  chr3:167966657-167966900
  hyper
cgagcaggagcggacgctgttcgtctctggaggggccatggtgctcgcgactggctgttcctccttatatttgggggaaaggagctggtttgaaggaaaggagggattaagtttgtaaaagcgttggctcctccttataactctggtgcctaaagggggtgagatgatagccaaataaaacgaagagagatgaccccgttttgagtgaggaggatttctggatgagccggcgatatgtcctgc

SEQ ID NO: 39876 - DNA, 1103 bp, Homo sapiens
  chr3:167967388-167968491
  hyper
gcgagcgcgtttccatggcaccggggctgcgggggctgctgggccactgggctcactcggtttcagttgctcccggcggagcaggggcatgcagctcagcggccaccgagcctctggggctcgcccggccgctcctcgcgctcccagacgcctgtgacgcctgttggggccaagctgctgccgttccctccgcagacagacgcgccgcgccagcctcacgagccctgcaccaacttctgcccgacaagcccaacttctgcgccgggttcggacttgcggagccggaacggcgcaccgcgcgcagcccgggcggcggccagggcggatcagcctcgccgagatgtcctcgcgactgtggctctggtgcttctgcctgggcggttgccggctggccgccaggaagcgccctacagctccggctgggcatgtaagtggcgcccgcgcgctccggaacgcttggagagagcagacaacagtatgccccgccccacctcggacctggtgcggacaccgcggcccgagcccgggaagggatggggggcaggaggtggggacagacacctgcgggggctgcgggctgtcccgggcggagcgcggcggaacgcagtccccagctagtccttggggagcgccagcccgggagcggagaccgcgaccggggcgggtgtgctctccacccggtacttcctcagcgcctgacagatttttgtcccccgcccccaggtttgggtgtgtgcgcgcgtggtatgtgtgtgttttcgttatttttctgttttaagagtaattggctaatgactaccactttgtgacagggttgtgaatgaaatcctgtcgaacaccgagtttgacatttttttctttgtagagaccaatgagttcgtgcacatgtattctttctttttttgggggaagtatcgccgagtcggacggagtggtttattccacaggtttgaccagaggcaaatcctggctcgtctgccgaagtgaggagctggggagatgagtatatgaaggattgagtgctcggccacttagctgctagtccccttattagagaactgaagagttagtaggaaggtgactcaaacgcatcgtctcaggat

SEQ ID NO: 39877 - DNA, 31 bp, Homo sapiens
  chr3:168754776-168754807
  hyper
gggatttgtccaaagacgcagccagtaaaga

SEQ ID NO: 39878 - DNA, 1002 bp, Homo sapiens
  chr3:168863845-168864847
  hyper
ataaaataaagtaacgacacatcttcagtcatttcatataacacactcctgtgtttttaaaagctgtcaacctccaaagatagcttaaaaaaaaaccgtttaggtagactttagagaaaggccctttcaaaaaaccaacagcaaaaggaaaaaaaaaaaaatccccacaatctagccaaagggtccgaatgtgactttctcgcgaagcagcacacgatgttggacagcaaagctgttacttggcaaggtggaactcggccgagagcggctccaaagtcgcgtggccagtgccaggaattcagattttggcaaccgcaccttgtgcgtccccgaaaccgacggacagagacacacggagggaggggaaggaggagaagagcgcaaggaaaagaggccgacaagccggcagagaaacccaccgaaggccggacgacccaccccggagacgtgtccagaccgcaccgtttcgcaggaggaacaaggaaatcgcccggcttagcaacgtagataagcagcagggctccgcgagactgcgggcgaggaggaaagaaggctgggggcggggggcgcccgtagaaacggtgccccggcaggaaactgtccgaagtgacaaactttcacatcgcccagactttttttccttttaaagtgaggagttctcttacctttagatttctatggcctcaactcagcaataataggcattcacagaagaatcaaaataaacaaaataaaataatcagcagcccccaacgctcctgcacgaaaatcctttcaaacgatcccgagcaacatttagagatgtttaaaaataataataataattttttaaaagcctcgcgtctcgatttccaaatgggtctctgacaactttgtccgtctctaggatctgctctccaggaccacgcgtttcggatttattgtccgccaacagtgtatttttaatacaagaaatgaagtcttctttcgtctgggtgacccgggtttggtgtgttttggctt

SEQ ID NO: 39879 - DNA, 30 bp, Homo sapiens
  chr3:168865074-168865104
  hyper
cagatcctccgcagcgccttcgcgggtcct

SEQ ID NO: 39880 - DNA, 30 bp, Homo sapiens
  chr3:168865423-168865453
  hyper
caatggggagatctcgccaggcaggatttc

SEQ ID NO: 39881 - DNA, 235 bp, Homo sapiens
  chr3:168867254-168867489
  hyper
caggtacggcaggacgccggtagatggcattgcgctccgaaataaagcgcagcgccggcggctccagccacccaggtgaacccgcctctgcccgccaggcgccggcaacacagctctgccttccgcctcgcccgccgttccgcgtccttccgagctacgagaggaaggcacactgcagtccaggcatgtagacatcagcctgagagaaggctattcctacgtctgagcttctctt

SEQ ID NO: 39882 - DNA, 267 bp, Homo sapiens; identical to SEQ ID NO: 2928
  chr3:168960220-168960487
  hyper

SEQ ID NO: 39883 - DNA, 898 bp, Homo sapiens; identical to SEQ ID NO: 2929
  chr3:169375889-169376787
  hyper

SEQ ID NO: 39884 - DNA, 677 bp, Homo sapiens
  chr3:169379260-169379937
  hyper
agcagcgagtgtaaagaacaacacccaaaagagaaacagatggactgatgacccaaagagccctatatttaggttgatttctcagacccaggggaaaggaaatgtatcggggagtgtacgagtgcttgggtgaggactgcacaaagcactggaaaggcgcctgggatgacagcatctcgcggggctacaccgccgactccaatgcccgcgaagccgagcctgctgaggtgccgccgacttcccgggctgctgcagggacgcagtgagcaaggaggcgtggatacgatacctaccgtatttggttctaatgtgcgagggtcgcgcggggggagactgggatttcactggggagaagcatcccacccatctccgatctctcatttctgcgttccgtaaacaacacaattagagagttttgttttcggcgagtgcgagtgtgggagagagaaccgcggcctgtccactcccgaggcagctccagccccgcctattgacacctcaaggaagagcgctcccagccgctccggggctcagtgtccctgagtccccttcaactcgaagtagaagcatttggacaaacgcagtcctgtcgtctacagtcctggcggagcatcacaccgtgtgggaaagtgtgggccccgccggcaaagccaggcgagtcatccaacacttttgct

SEQ ID NO: 39885 - DNA, 30 bp, Homo sapiens
  chr3:169380584-169380614
  hyper
ggctccctctgagccgcctaccctacccaa

SEQ ID NO: 39886 - DNA, 30 bp, Homo sapiens
  chr3:169381040-169381070
  hyper
gctccctcccggagcgctagagacagatat

SEQ ID NO: 39887 - DNA, 263 bp, Homo sapiens
  chr3:169381407-169381670
  hyper
ccctttctctcaatccacactcgctatctctccagcattgtcagtttggacaccttcgcacatgcgcgctagacgcccctccaacatctcagcgccgccaaaaaaagtttggagcgatttatcactttgatttggagatcttgtcagatggcaatcgccgaggaggcggagaaagggagccgcggggagggcggcggggggcggggagcgaacgcagggagccagaggggagcagacacctcgcccaaaaaaaggggaggggg

SEQ ID NO: 39888 - DNA, 682 bp, Homo sapiens; identical to SEQ ID NO: 2931
  chr3:169386024-169386706
  hyper

SEQ ID NO: 39889 - DNA, 323 bp, Homo sapiens
  chr3:169386972-169387295
  hyper
accaggtgctaagctcgcggtcccccaccagccgctctggccgccctctccgggctcggcgcggcctcctcccgcacagcctagtctgcggcgccctcgcctggtttctttggccgcggcagctctggtgctcacgccgcttagggctccagctgtgcacagtagccgcctgggcgtgggggtgggaaacagctggagcgccccggggaggcgcgggttggggtggaaaggaacccagcaaggaggattatgaggcgagcaaactcctggagctgctaccggtttagaatcaggaggagcaacttcacggggcacggaacttg

SEQ ID NO: 39890 - DNA, 985 bp, Homo sapiens
  chr3:169482161-169483146
  hyper
accataaaaggcaacaaaaagcggaagacgggagaacccacgcaggaacggctccaggcaaccccggctcactgcccattcattttggccgactttggaggtgccttcacgtctcctgccaatttgcagcacactggcccagtcagtcaggtttgggggttcacaagcccccattgccggcgaggggtgacggatgcgcacgatcggcgttccccccaccaacaggaaagcgaactgcatgtgtgagccgagtcctgggtgcacgtcccacagctcagggaatcgcgccgcgcgcggggactcgctccgttcctcttcctgcggcctgaaaggcctgaacctcgccctcgcccccgagagacccgcggctgacagagcccaactcttcgcggtggcagtgggtgcctccggagaagccccgggccgaccgcggcctccaggcggggttcgggggctgggcaggcgacccgccgcaggtccccgggaggggcgaacgggccagcagctgacattttttgtttgctctagaatgaacggtggaaggcggcaggccgaggcttttccgcccgctgaaagtcagcgagaaaaacagcgcgcggggagcaaaagcacggcgcctacgcccttctcagttagggttagacaaaaaatggccaccacccctcccaggcccaccctccgcaacccggtgcgctgccgggcgagtcggcttataaagggagcggccgccgaccgcacggattggccaagctgactctcgcggctctcgtgagagtcactctctcgggcgggctggttggggggaacgggaaattaaagttccatttccggccatgaggaaggacgttgcccttccgcacgtccgggaaaggctttgcgtctttacttccgaccttctttaaaggtgaaactaacttgaggtatcagagggccttttttctatcctctgcagaccagacgcggttcacctcgactaccttaaaaa

SEQ ID NO: 39891 - DNA, 260 bp, Homo sapiens
  chr3:169487220-169487480
  hyper
taaactggggctcccggcacccagccacgcccgccttgatcattcccgagccgttgtcgatcaccaccggtagctggcagtggttcatgccgccgctgctgccgccgcctcctgtctctgagccgctctagctacgggctcggccggggccgagtgcctggaacgccgcgtcacagaggccccggcacggccgggtgaggccagagtcctgggggcgcaggcagggggtcggcagggccccaggcggaaggactcgctgg

SEQ ID NO: 39892 - DNA, 30 bp, Homo sapiens
  chr3:169492085-169492115
  hyper
gcagtattcgcaccactgtgagcacctttt

SEQ ID NO: 39893 - DNA, 30 bp, Homo sapiens; identical to SEQ ID NO: 2934
  chr3:169530022-169530052
  hyper

SEQ ID NO: 39894 - DNA, 48 bp, Homo sapiens; identical to SEQ ID NO: 2935
  chr3:169645351-169645399
  hyper

SEQ ID NO: 39895 - DNA, 30 bp, Homo sapiens
  chr3:169684380-169684410
  hyper
ctctgcttcctccacgtcctaacgattctc

SEQ ID NO: 39896 - DNA, 175 bp, Homo sapiens
  chr3:169684971-169685146
  hyper
agcctcccctggggcgcagacgctgacccttcccggggctcctcccctcccttcaccccatcctctggccttagctggcctgaaattaaggccacggtaataggggtagcaggaggcggcggactgacctaaagcagctggttctttgtgcgcatagaccgtaagggggaatgat

SEQ ID NO: 39897 - DNA, 30 bp, Homo sapiens
  chr3:169756185-169756215
  hyper
ccaggagtggagcccggacgcccgagcctt

SEQ ID NO: 39898 - DNA, 64 bp, Homo sapiens
  chr3:169940147-169940211
  hyper
tggatggttgcgcccgccctaccccggaatgtgggcctttggagcgagcgaagtgggagggacc

SEQ ID NO: 39899 - DNA, 33 bp, Homo sapiens
  chr3:170073883-170073916
  hyper
cacgacctgggagctcggcggtggaggcctaag

SEQ ID NO: 39900 - DNA, 255 bp, Homo sapiens; identical to SEQ ID NO: 2937
  chr3:170074115-170074370
  hyper

SEQ ID NO: 39901 - DNA, 78 bp, Homo sapiens
  chr3:170075431-170075509
  hyper
gcgggccgaggactcggtgacgtcagagggctgtgtgtagcgatgtgtgtggggttcggagccgcgccggcacagccg

SEQ ID NO: 39902 - DNA, 30 bp, Homo sapiens
  chr3:170138442-170138472
  hyper
ggcacacaatagctgcgggcagtgcttgcc

SEQ ID NO: 39903 - DNA, 166 bp, Homo sapiens; identical to SEQ ID NO: 2939
  chr3:170302489-170302655
  hyper

SEQ ID NO: 39904 - DNA, 55 bp, Homo sapiens
  chr3:170303087-170303142
  hyper
ctctccggggacagacgcccctcggggcgccaccatcctggtcggggtgctgggc

SEQ ID NO: 39905 - DNA, 115 bp, Homo sapiens; identical to SEQ ID NO: 2941
  chr3:170303379-170303494
  hyper

SEQ ID NO: 39906 - DNA, 178 bp, Homo sapiens
  chr3:170303554-170303732
  hyper
cgccatattcctggtcccccgctcccggtgactccggctccctgggtcattccgggagaggcggccatcccagttgcaggggtcccgctggggcgcggggggcgcggagggggacaaacggcagcgaagggggccgttcacttaccggggtcggggctggaggcgacgagctggctgc

SEQ ID NO: 39907 - DNA, 30 bp, Homo sapiens
  chr3:170588195-170588225
  hyper
ctggctgttcaagccgattaattgcagtgg

SEQ ID NO: 39908 - DNA, 732 bp, Homo sapiens
  chr3:170625810-170626542
  hyper
tggggaggtgggatgagaagtcgcagaggagctcgctgagggtggggacacccgccctgggcgctcctccgtgctggaaacagcaggttgcggcccccatcgccccaccgcagaagccggcgaccttcccccgccgcccagccctcggccgccgccccgaaccctactgcgggggacccagcccaggccgcaggtccccgcgaaggatgcggggtaacagaacctggccagcagcacccggccctctgctagctggcgcgcaccccgccctccacccttcaacgtcgccgccgcggccgcacaggcgccccctgttctgccggcatccagggctcagctcggcccggcccggccccactagggcctgagccccggcgggtcccgcgctcgcctctgttcccccatccattctccttctttctctcggtcagcgctcagttctgggcgccttccccggccctgcctcactctggccccatccccaccagcttttccccaccagcttttccccaggtcttcacctttcagctggcaaagagcgcctttcgtctgcgcacccgcgctggtcccctacagcagcggcgccggcagcggcggtggcggccgcggcagttccaagagacggggcggggccgccacactttccacaccccagcctccccgcccttacccgcccccactcagccctatttccgggataggccccggagcgtcacaggcaccgccctctcg

SEQ ID NO: 39909 - DNA, 274 bp, Homo sapiens
  chr3:170626965-170627239
  hyper
acccagctcggcaccgcaggtcctgaggaccccccattcaccccttggtgagatttttggcagcgactgccgccggatgcccctgtagagtcagcactgctccctggggtgggaactcccgaagcgtccgccagctaacaagccagcagtgaaatgaattaacccacttctcacaccaaaggctgttgggaagttgtggaggcgaagggtgtctgactcctacggcattgtgggtccagagaggtgttctgccgactcatccattctttcctcc

SEQ ID NO: 39910 - DNA, 186 bp, Homo sapiens; identical to SEQ ID NO: 2945
  chr3:170746126-170746312
  hyper

SEQ ID NO: 39911 - DNA, 31 bp, Homo sapiens
  chr3:170819237-170819268
  hyper
atcagtctgggtatgtcgctgacagccactg

SEQ ID NO: 39912 - DNA, 200 bp, Homo sapiens
  chr3:170878636-170878836
  hyper
aaggacagtggctacccgaatgggcttctcaaaggtgtgaagtaacgaactgaataacgcaagtccgaaaataccacttaggtctctagaaagttgcagttttaagtatttttagtcctgcattgcccagataattagccttctacccattctacgtgttacatatgtaagaaaacaagctcttacgatagagaccataa

SEQ ID NO: 39913 - DNA, 30 bp, Homo sapiens
  chr3:171176925-171176955
  hyper
cacgtgaaggtaaacgcaaaccagtggggc

SEQ ID NO: 39914 - DNA, 30 bp, Homo sapiens
  chr3:171178161-171178191
  hyper
ttgtgcgtggatggcggctgcattggctgt

SEQ ID NO: 39915 - DNA, 994 bp, Homo sapiens
  chr3:171527554-171528548
  hyper
ccaaacaccttcaatcgtattgtgaggaagaagaccttttacacactccctgctgctggcccccggccccctcgccccacctccgagtggtcacatcacacggcgggagccgcggtcagcagctgtgatcacacccccaggaccgtgctctgcgggctgggctcgaagccttgggacgcggcacttcctggttggtacgggatgccggtcccatcgcccccaccagcccagtcatgccaccgcgcacccgaaccaagggcgcccggatgacctggggacaccacacacactgcacccgaagccctgtggcggcgaggcggtgcatcctgcagaggacgcctgggcttcagcctgagcctgcgcggctctgcgctccaggcagccgcccgcgcggcaaaagtgcgtgccagagttgtcagctttcaccctgcaggaattccacccgaaggcgtgcgagggaggcccttggggatcgctagggagtccgccgccgactcactcgctgaaatcccgtccaagttgggcggggagcggccagctgcccaggttgggcggaggagggacggagggcgagggcagtggaaacccggctcccacgggcgcccggtgatccgggtctcggcgcggctcctacctgcagggcgaaggggccgctagcacctgcgcgttggcggcggactctcagggctcgggtgcctctggcacagctggagctcagcgggagggagggagagagggcgggccggagggggctctgcgctgcgcggccggcaggaactctccgcccggattcgccccggattcgcaggggtggagcgaggcggtgccaggtcccggggcgtcgcggtgccggctggaggccccagcggggcaggtctcgcgactgggcctctgatcgcccgcgttccttgttctcttttcccaaagtttcataactcgaccgcatcaccctagggaatgctcgctattaggaccattatcaggtcctctcgag

SEQ ID NO: 39916 - DNA, 197 bp, Homo sapiens
  chr3:171757154-171757351
  hyper
ggcgatctgcagaacgcgcagccctcgccattcaggagttgttagttccctaagcctcaggtttctttagtctggctgaaccaaaaggagtttctgcttagctaggcagggccgggggacaacagcttctgcgagtctgcgattgtggcggccggtatattcggcggtttacggtaatgggcgggccccaaatcccc

SEQ ID NO: 39917 - DNA, 31 bp, Homo sapiens; identical to SEQ ID NO: 2948
  chr3:171758578-171758609
  hyper

SEQ ID NO: 39918 - DNA, 341 bp, Homo sapiens; identical to SEQ ID NO: 2949
  chr3:172165443-172165784
  hyper

SEQ ID NO: 39919 - DNA, 478 bp, Homo sapiens; identical to SEQ ID NO: 2950
  chr3:172165866-172166344
  hyper

SEQ ID NO: 39920 - DNA, 12 bp, Homo sapiens
  chr3:172166672-172166684
  hyper
cgctggactagt

SEQ ID NO: 39921 - DNA, 142 bp, Homo sapiens; identical to SEQ ID NO: 2951
  chr3:172167331-172167473
  hyper

SEQ ID NO: 39922 - DNA, 291 bp, Homo sapiens; identical to SEQ ID NO: 2952
  chr3:172167595-172167886
  hyper

SEQ ID NO: 39923 - DNA, 288 bp, Homo sapiens; identical to SEQ ID NO: 2953
  chr3:172240997-172241285
  hyper

SEQ ID NO: 39924 - DNA, 30 bp, Homo sapiens
  chr3:172428411-172428441
  hyper
ttccccgtcacaaacgcagacggggaaatg

SEQ ID NO: 39925 - DNA, 154 bp, Homo sapiens
  chr3:172428917-172429071
  hyper
aggaagttggagcgcggacatgccccctctacggtgtccttgcaaagtgtggcagtcactacaggtttgaggaaggctctgtcgctgctctggccgtaggcacagcggactctggaggacactggtttgtactgcatgcgtgtgaggatggctt

SEQ ID NO: 39926 - DNA, 30 bp, Homo sapiens
  chr3:172468142-172468172
  hyper
acatttatctctggcggcactgatttaagc

SEQ ID NO: 39927 - DNA, 776 bp, Homo sapiens
  chr3:173113095-173113871
  hyper
tcacactactcgcacggaacagtctacagccaacgaacgcttcaattcagagattactctgcctctagctagaggaagcagaggaaagagaggggagtttggtggctagagatttaccaaaaagaggggggcgggggaaagaagaggcacagtggaaggctgttgcctccaactccgcgctctccgtcaccaagacgaaaacgcctggaaccggagcacgatgacgccgagaagacagaaactcagagcgtccgacgcctcgcgtctgggcggtcgtgcccgttcactcacacgccgctctgagtggtttggcgaacctcacacgtgactccctgggcccttcacccctcctgccgccgcgggcgctgcggaagctgcgggcggaggacgctcggctgccgcgggaggagtaagggaggagggcggaacttgtaaagggaggggccatcaccagcaccaagtctgccaccgccggacccgcgcccccgaagcccacccccaccaagatcgcgcctccgaccggcgggaggggcgcgcaggggaggggacgctgtgcaataaaccgggcggggagagggaggcagcggagggagtcctggctctgaggggggcaggattgggtctggaggatggtctggcttgattcagactcctgcacccgacaacgccacggagtgaggggagagggagagagagaaggtggcagtgtgtgtgcgcgcgtgtacgtgtgtgtgtgcgtgtctacaggtagcagtggcggcggcggcggcggcggc

SEQ ID NO: 39928 - DNA, 183 bp, Homo sapiens
  chr3:173115237-173115420
  hyper
tttcctcctccgcgcggcatctccagccccggcagtttgtaaattgcccgttttgcccaccctcctggtgggcgttctctcccccactccactcctgccccctctgtcctttcttcattggcgtcttcggagcagatgcatcttctttcttcttggcctcactctcccgttcccccgtcagtc

SEQ ID NO: 39929 - DNA, 33 bp, Homo sapiens
  chr3:173115756-173115789
  hyper
ccaaagccttagagcggcgccccagtcactgca

SEQ ID NO: 39930 - DNA, 30 bp, Homo sapiens
  chr3:173116031-173116061
  hyper
tctggggttggttccgccggttagtttgac

SEQ ID NO: 39931 - DNA, 30 bp, Homo sapiens; identical to SEQ ID NO: 2956
  chr3:173302127-173302157
  hyper

SEQ ID NO: 39932 - DNA, 146 bp, Homo sapiens; identical to SEQ ID NO: 2957
  chr3:173302522-173302668
  hyper

SEQ ID NO: 39933 - DNA, 596 bp, Homo sapiens
  chr3:173302734-173303330
  hyper
cgaagtgttgtagagaccgtctccttgaatcattgcaaagggaccggggaaagatgagggggctccctctgtggatttatcttgctgagggtaagtttgtggctcttttattgggagggggctgccagggttttgtgccactgcgcggaaggtgatgcggacgcggtgcctgtgaaatggagagagaaaggggaatataaaaccacctcgcgcatccccggggggatcgctagggagctacctagatcgagctaaaaaaccttgtttttgtggcgtcggtgggggagccaagcagctctccaagctctcaactttgcattgaaaatctctcagttgggagacgcttcccagatccagtgctttctcctagcaatactttaaggagaggaggcagcggtgccttggaaaacctgcatgtagagcggaaaagcccaagtagaaatcgctggtgcttcggccgccgtttctgcggctgtcgtggcttctagggggatattttgcagggggaattggctgttttcatgttgtctcctcccccacccctctcttcctaccccttcccgcttcccgcttctctcaaccggacactaaagggt

SEQ ID NO: 39934 - DNA, 782 bp, Homo sapiens
  chr3:174158580-174159362
  hyper
ttgaacactgctgcccgcggctcttcttcccacttggctcgacaaacgcgtcttttattatgactcagcccagcccgttccttgccaagcggctgacgctcgcggcggaggcgccggggccgccgctcgggggcgagggttcgcgccgcggctcgcgcccgcttctcccgctttacggctgctgaaaatccggcctggcccggcagccgtaccgcagacgagcccgcgcccgcgccgctcaggtaatcggagtccttttcttttcaaagttttgccaaaacaagctccgcgctctgaggcggcgcggcctcggccgagcggtccgtgtctccttgctcctccgtcctacccaagctggcgcgactgagctgtgggccgcacccctgcgcggggcccggggcgccgacccggcgtgaagtacgggggccgaggggcgcccggccggcggcgggttctgagcgactccgcggggtggcgcgcggggcacctggctctggcagtccgcgaggcgcgctggccaaaggagctcccaacccgctccaaggcccccgcccacctcccgaagccgcttgtcttaggagaggagcgtagcagctccgagtccccgcttctgacacgttcacacacgtatgcagtgcacgccggccaggcagcccgacacggcgcgctagcggggcgcaggtaaagagcggcgccgcgggcccgcgcgttcgaaatggcgcgcagcacagttccgcccccgcgcgtggaatgccgctccagtggacgcccaggatggcttt

SEQ ID NO: 39935 - DNA, 30 bp, Homo sapiens; identical to SEQ ID NO: 2961
  chr3:175414760-175414790
  hyper

SEQ ID NO: 39936 - DNA, 30 bp, Homo sapiens
  chr3:176914193-176914223
  hyper
atacctccttaagacgataaaaagcactaa

SEQ ID NO: 39937 - DNA, 30 bp, Homo sapiens
  chr3:176914740-176914770
  hyper
cttcccttcccccacgcaagcccagttccc

SEQ ID NO: 39938 - DNA, 31 bp, Homo sapiens; identical to SEQ ID NO: 2962
  chr3:176915777-176915808
  hyper

SEQ ID NO: 39939 - DNA, 31 bp, Homo sapiens; identical to SEQ ID NO: 2963
  chr3:177077212-177077243
  hyper

SEQ ID NO: 39940 - DNA, 43 bp, Homo sapiens; identical to SEQ ID NO: 2964
  chr3:178789081-178789124
  hyper

SEQ ID NO: 39941 - DNA, 30 bp, Homo sapiens
  chr3:178789519-178789549
  hyper
gccccctccgcagccgaaggctgactgtca

SEQ ID NO: 39942 - DNA, 30 bp, Homo sapiens
  chr3:178865266-178865296
  hyper
ctctgttggcattacgcgaaaaatccccca

SEQ ID NO: 39943 - DNA, 30 bp, Homo sapiens
  chr3:178865663-178865693
  hyper
gctcgcctgctgctcgtagaaacaaatata

SEQ ID NO: 39944 - DNA, 30 bp, Homo sapiens
  chr3:178865989-178866019
  hyper
gttgtttgtttacacgatgtgagcggaaaa

SEQ ID NO: 39945 - DNA, 131 bp, Homo sapiens; identical to SEQ ID NO: 2965
  chr3:178866989-178867120
  hyper

SEQ ID NO: 39946 - DNA, 30 bp, Homo sapiens; identical to SEQ ID NO: 2966
  chr3:178916861-178916891
  hyper

SEQ ID NO: 39947 - DNA, 30 bp, Homo sapiens; identical to SEQ ID NO: 2967
  chr3:178921538-178921568
  hyper

SEQ ID NO: 39948 - DNA, 39 bp, Homo sapiens; identical to SEQ ID NO: 2968
  chr3:178936067-178936106
  hyper

SEQ ID NO: 39949 - DNA, 30 bp, Homo sapiens; identical to SEQ ID NO: 2969
  chr3:178952070-178952100
  hyper

SEQ ID NO: 39950 - DNA, 30 bp, Homo sapiens; identical to SEQ ID NO: 2970
  chr3:179041479-179041509
  hyper

SEQ ID NO: 39951 - DNA, 41 bp, Homo sapiens; identical to SEQ ID NO: 2971
  chr3:179064153-179064194
  hyper

SEQ ID NO: 39952 - DNA, 1132 bp, Homo sapiens
  chr3:179168655-179169787
  hyper
ttggactaattttggactcagcgtagaacttttatgagtcttccaagcactctccacccaacagccctgctgggcagtcccgaatacccgttattttgggggcacgcacgggctcgtgctctgagttcctggaaggaggcctcggggagtgacgagaaaccaggggggtctgcaggacttggaccgccgaccgttcctcgctccccggggcgagcggtctggaccgcccgggaagtgcctgcgccggcggtcgtggggccagttcccgcgtggcagctgggcgcgacacaggcgcgccctcctcgtccctcccgggcagcgtcggccgcccgagcccggggagacccgccccgccccgcgccgtcacccgggccccgttccgcaggggtggctcgcggcgccccacgtccctgcgagaagcccgggatcgcttcgcggggcgcaccgacgagccgccgctcgcgagctcgccgcctacctggagggagctcaggcccgcgtcgaccgcgcgctgccggtgtccgctgggcgctcagcagcccctggagcgcggagccggcgtggagagcgcagctcacagccgagaccagagccgccggccacacccagtcccgcacctcccagcagccaactccgcggcgcgccggagccggggcggggacgtggctggaggcgcgaggcgcgaggcacgaggcgcgcgggcccggcggggacgtgccggggacgcgcagaccctcggagcgcgcgcagcccgggcggggggcgaagggagcgggcgccgcgcgcagcttctgcttcctattttctctctcgtttcctgccagaaggagaagaaaaacattcattcccgggcagtttcgttttcttgttggtgtggcgccggggcacgctgctaagtagcgcccgtctaagtggcgtggccagtttcctttccggcgctgacaggcgccagtttgcttgttagcaggatcgaagggcagagctagaagaccccaaaggccccatttaggtttcccattctggaattctaaatgtcagaaagtaaactgaagcccagagttgcacaaccttgcgttgcagtccccgctcttccatcactagttgtaggaccgtgtaccgtctcgggcctaag

SEQ ID NO: 39953 - DNA, 30 bp, Homo sapiens
  chr3:179281545-179281575
  hyper
tcaattcaggagcacgtgtaatttaaggat

SEQ ID NO: 39954 - DNA, 30 bp, Homo sapiens
  chr3:179322746-179322776
  hyper
gaacgggcgtgaagcgggtgcggggcgaga

SEQ ID NO: 39955 - DNA, 30 bp, Homo sapiens
  chr3:179370456-179370486
  hyper
atccaatccggggacgtcaccgccctagtc

SEQ ID NO: 39956 - DNA, 521 bp, Homo sapiens; identical to SEQ ID NO: 2973
  chr3:179754238-179754759
  hyper

SEQ ID NO: 39957 - DNA, 69 bp, Homo sapiens; identical to SEQ ID NO: 2974
  chr3:179754803-179754872
  hyper

SEQ ID NO: 39958 - DNA, 241 bp, Homo sapiens; identical to SEQ ID NO: 2975
  chr3:179755086-179755327
  hyper

SEQ ID NO: 39959 - DNA, 30 bp, Homo sapiens
  chr3:180319892-180319922
  hyper
ccccagaacacttccgggtgtaactggttg

SEQ ID NO: 39960 - DNA, 966 bp, Homo sapiens
  chr3:180397083-180398049
  hyper
cttccagtagcttgttctcctcgttcgccaccgggatggcgaacccatcctcccagtgcagctcagccaggaattcgctactcatgactgcaaacggatagagaagatacagagcaaagatccgccttcttgtacagcgggtgagcagcacccgcgtcaagcccaggcacctgcacagtgccgcggcaattgccgggggagccctagcaaccttcccgcgtccttagttaccaaacaggaaacgctccagcccgaaggcgaaacttccggttgagaactccctgcctgcaggccgaagaatctttttcttaccttgagcactgagggatgagcagcaacttgcccctcccgacgttcccgggggttgccaggcggcagcgtaactttccacgaaaaggcggctctcggatcgctcccggagcgtgtgaaaactgtggcccccggagctggctggaggaccacggggcagctggctggaagtaaaccacacgatcctccgattgcctgggggaagacgggagccaacagggattataaactaagtttcttttcaaggtgtgtttgctgtgttgtgtagatttcagctactacagtaggtgaaagtagaccgaagtgaactggtgtttggaaacaactctctctctggcatcactgggatgttctgatcgtcgcctgtttcagtcggccagccttcctcaccgcactcaccggccccatcgcggatgtcccagtcgatcacagacgcggaccgcgcggaggccgcacacttgtggcgcggtgtggtggtccctccggcaccactcccatacttgcatttttctttgcatttttgtttgctaacatttaaagtgtggaatttcgcataaacgtctgtatttcctctgcttgaaaaagggtaggtgacacaatccccattatcaaaaggcaatgttccgctggagaggcgccccctttagaccaacaaag

SEQ ID NO: 39961 - DNA, 55 bp, Homo sapiens; identical to SEQ ID NO: 2977
  chr3:181413013-181413068
  hyper

SEQ ID NO: 39962 - DNA, 916 bp, Homo sapiens
  chr3:181413421-181414337
  hyper
gacccacccagccgggcccgatccctcaagacactttcagcctcagcccccgtttctcctcgggtttccacagacccaggaaaggacagaggcggcgagcaggctgacaagtttattctagaggctttgaaaaatgaggtttccaggtctcttcgcacgcgcgcgcgcgcgttctcgggctaaaggttcgaagctagagtttgaatttaagccacgtcctgggacaggtcgcgttcagcgtgggcgtcggccccgccgcggccccaggcctcttcgaagtgcgcgtcaagtggggtgtcgggtcgttttgttttttctctaagtgaataattcaatcgtgttaggccagattacatgctcataatacccaggtgtatttaaaagcacccgcgtttctaaacctcccgcagaaagtgggaagcaatcgccccctcggacctggcgccgctgcgcctgctggagcctcgcttccccacagtcgggcggccagtggagggcgaggagcgcgcgcgtcacgagaggcggccccggcctcccagagcccgcaccgggaggccgagggctcgggactcgagccttctgagtccgatttctttccacgtgcagagggtagaaagtggccagtcagggcgtgattgattgcttaaggaaagagaagctacagctttcacggtagttgataactaaagcatgacatgatgccatctgtgtgaaactcgtgatgtgtgtggtcattggctccctggaacatccagaccctgatcgtgcgtatcgtgtttccttataagcagcactcgcgatttaaaaacaggtcccggtgcccctcttgctgatcctctctgccattagcccgcttaattccctttttgtaaattcccctctttacctttctttcgtccctccctccctctctttc

SEQ ID NO: 39963 - DNA, 106 bp, Homo sapiens
  chr3:181418364-181418470
  hyper
gtgggagggtttctgcgggaagtcgagcgaggggtgatggggcttgctctttggcgccctctaatggcaacttgaaccaatgttttactttcgtaatgcagtactg

SEQ ID NO: 39964 - DNA, 92 bp, Homo sapiens
  chr3:181418705-181418797
  hyper
attagccattgcgggcgggggagagggtgtaggattcgtttcctacctgaacagcattctgactcttctaacatactcgagaggtgtagggg

SEQ ID NO: 39965 - DNA, 106 bp, Homo sapiens; identical to SEQ ID NO: 2979
  chr3:181419690-181419796
  hyper

SEQ ID NO: 39966 - DNA, 645 bp, Homo sapiens; identical to SEQ ID NO: 2980
  chr3:181419915-181420560
  hyper

SEQ ID NO: 39967 - DNA, 1094 bp, Homo sapiens
  chr3:181421144-181422238
  hyper
cttattgacggaaatcggcttaatttttcataaaagaatggctttttaaaatattgaatactatggctatgcaaggtttatgatacctttatgtttattcttcccacctcccaaaattagcgaattcgagataacatttcaaggggaattgctatttagtgcgatgagagatgacttctccatctggttccagaattagatctcggcttaggttttttagtaagtaggttcagatgcaatggaaggagagaagaatcaagccttttgataaaatctctaccccgaattctatggaaaagacaggcaagcgggattccagccacagcacccccaccttttgctctaccaaaaggcttgtccccattacagaaataatatagtcggtgctagttttgtgaacccgcgccaaccgataaggtaagaaacggtgcgctgacagccgaggtccgaaggctgctcagtggttcccgcagcccgtggggtagggaggccaaagccagcaaaatgttggaggcgacgccagaaagagagtatatgcctgctattcggaagtgatgtcgaacgtgcaatagcagagtcctggagatttccaccccgttccgcacccagggatcccagcctgtggggtagcaggttgttgggtgaaggcaggagggagaagccgcacctggctgagggcgggtgggcgtgccgggagcgagtgcccaactttctagggcccatggagaaagcataacccctagttgaggaaagagagctaaacaagtgggtggcccaggcctgggaatgccacccagctctcccgacgcagtgttatttctgtggtcccagggggccccagcacctgcccgaatcccactccccaaggccgccagcaggaaggcagcccctccatctttgagggctgaggagggggcagcgagtgacttgattccttagtagcagggaaaaccgcagcggctggcaacgggccgcgtttctccgcggcggcaaagcgccctttaggggcggggcgggcatttttggtctcctgtcccagcgtccaggcctgagcccgcgcgggttggctgggcgccctgctttgtaagtaacca

SEQ ID NO: 39968 - DNA, 455 bp, Homo sapiens; identical to SEQ ID NO: 2982
  chr3:181422661-181423116
  hyper

SEQ ID NO: 39969 - DNA, 611 bp, Homo sapiens
  chr3:181428195-181428806
  hyper
gagagtggaaggaaacttagacgaggctttgtttgactccgtgtagcgacaacaagagaaacaaaactacctatttgtaacggacgtgctgccattgccctccgcattgagcgcctacctattgaaatctttacgtcgggacaatgggagagcggctaaaattaccctcttgggtcctgggcgggcaagattcctgagcccctacccccgcccccatctcatcctcctctaacccgggccttgctgggctcccccttccccagtcccggccgccttctcccagtgtgcgctgcctgcacctgtgcctggagagcatcgaccccgcctcccaggccttgagcccctttgcggcgcagccccagccttgcgcggcctgggctttgcggccaccacaatggaaatctacggggaaaatgccagggctggttctgctggagtcctgggaactctgcgtgggagggagtttgtgactgcggcccaaaagccacctccatacagtgccgtgggatgccaggaagttgaaatcaccctcccccatcgcctgcacttttgagcgcccttccgtctgtgtctttccccagcccccatttgaaagccgcacgaccgaaacc

SEQ ID NO: 39970 - DNA, 394 bp, Homo sapiens
  chr3:181429532-181429926
  hyper
ctcctccccctcctcgcctgccccctcctcccccggcctcccccgcgcggccggcggcgcgggaggccccgccccctttcatgcaaaacccggcagcgaggctgggctcgagtggaggagccgccgcgcgctgattggtcgctagaaacccatttattccctgacagcccccgtcacatggatggttgtctattaacttgttcaaaaaagtatcaggagttgtcaaggcagagaagagagtgtttgcaaaagggggaaagtagtttgctgcctctttaagactaggactgagagaaagaagaggagagagaaagaaagggagagaagtttgagccccaggcttaagcctttccaaaaaataataataacaatcatcggcggcggcaggatcggc

SEQ ID NO: 39971 - DNA, 220 bp, Homo sapiens; identical to SEQ ID NO: 2985
  chr3:181430146-181430366
  hyper

SEQ ID NO: 39972 - DNA, 868 bp, Homo sapiens
  chr3:181430443-181431311
  hyper
cgctgcacatgaaggagcacccggattataaataccggccccggcggaaaaccaagacgctcatgaagaaggataagtacacgctgcccggcgggctgctggcccccggcggcaatagcatggcgagcggggtcggggtgggcgccggcctgggcgcgggcgtgaaccagcgcatggacagttacgcgcacatgaacggctggagcaacggcagctacagcatgatgcaggaccagctgggctacccgcagcacccgggcctcaatgcgcacggcgcagcgcagatgcagcccatgcaccgctacgacgtgagcgccctgcagtacaactccatgaccagctcgcagacctacatgaacggctcgcccacctacagcatgtcctactcgcagcagggcacccctggcatggctcttggctccatgggttcggtggtcaagtccgaggccagctccagcccccctgtggttacctcttcctcccactccagggcgccctgccaggccggggacctccgggacatgatcagcatgtatctccccggcgccgaggtgccggaacccgccgcccccagcagacttcacatgtcccagcactaccagagcggcccggtgcccggcacggccattaacggcacactgcccctctcacacatgtgagggccggacagcgaactggaggggggagaaattttcaaagaaaaacgagggaaatgggaggggtgcaaaagaggagagtaagaaacagcatggagaaaacccggtacgctcaaaaagaaaaaggaaaaaaaaaaatcccatcacccacagcaaatgacagctgcaaaagagaacaccaatcccatccacactcacgcaaaaaccgcgat

SEQ ID NO: 39973 - DNA, 30 bp, Homo sapiens; identical to SEQ ID NO: 2987
  chr3:181433492-181433522
  hyper

SEQ ID NO: 39974 - DNA, 523 bp, Homo sapiens
  chr3:181437060-181437583
  hyper
ttgaaagctggaggtgtccttcgttttattaccctagtctgcctgcgtgtacagaatgaagggtgcactgttttatatagagttcggcgctttgaactatcatttgcctagctctcccagcttccgcgcgggccacggctccgggctgtgagcgcgccggcctcccgccggctgccctggggagcgcgcagtgcccagtgctgagagccgacgcgcgggcaaattgaggccgagctgacgagctccggcgggtggacctgacgtcaccgcggcccgggtcacctcacccatggggctccccaagaaggtgctgtgtggggctcgagttctctctgcccgggctctgctcaaacggtcgcattccctctccctcaggcaccgacccgcgtcagacaagtctagaaagtctcccgaggcgttggggccctcaccactccagagtcctctgcctcctgcgccccagcccaagccctctccatgttgacctcgtgacacgggagacggtgtctaggccccagattcc

SEQ ID NO: 39975 - DNA, 153 bp, Homo sapiens
  chr3:181438200-181438353
  hyper
ggttcttatcgctggcggccaggccagaagcgggactgcgcccccacccccacctcgtgacgtcagggcctgcagggctccggggatgaaatgattcgtttgagtgttccagaaagggcaatccgaacgcttacagggcgaggccagtgcagc

SEQ ID NO: 39976 - DNA, 30 bp, Homo sapiens
  chr3:181440945-181440975
  hyper
gccacttcttagtcccggatctgaacattt

SEQ ID NO: 39977 - DNA, 529 bp, Homo sapiens
  chr3:181441348-181441877
  hyper
tggacaccaggaatgcggggtctggcggtgctgggcgcagggcgagaagatttgatgtgcagggtaagtaaaggacaagttatttaaaacctcaacacaggaaaagatggtaagagtgctgtgtagccctttgcttgcttgtgactacgagtcgctaggtggcccgcgtttagagtatgcctacggcgcctactaacgtctagacctaggagaggcgtctcccgcccctcgacccacagccagccgccacttgatagctaacgcgtcttccggccggtacacacccacaattaatctttcttattaaagcctccattctgtacccatggggcgactcaaacctatttagatttccgtggttggctgcacaaatttaagtgggcaacgagttataaacctaataacagaggacgagagagggtgatttgagtagagaagacgcaagattcactagggtcgtgaagatgctgcgggccttgcccaccacggcatctacctcggggtgcacgccaggctctgagaaaggtag

SEQ ID NO: 39978 - DNA, 345 bp, Homo sapiens; identical to SEQ ID NO: 2990
  chr3:181442080-181442425
  hyper

SEQ ID NO: 39979 - DNA, 556 bp, Homo sapiens
  chr3:181442993-181443549
  hyper
caatgcagacgacaacgcctagaaggaatgggtccccgctgctcgaatgaaagattaattacatttgccccaaaagccccaattctaacggtctctatcgcggcttttgccgtcactgaaggaccgctgtctctggggtcttcagacatcggagtcctttgcaaatgaagagcccccaccatttggaattcgggtcaaggagaaagactctgagcctgcagcagtttttgtttttgcgtgtgcccgcctctccattttattcaacttcttctgcctgtcgggaagcagaacaatcgctccccacccacccccctccgccccgtttctaagataaacaggaggtgcaaaatgctttgcctgcacacgcgccctcgtggcccagtcttcctgcaacccccagcgcaccggccatgcatctgtctcccaaccagacgtgggagaagacatccccccttcactcttcccacctgcatttaaaaaccatcacattgactgctctagagtcaggttcacatttttggccctccatgccaccttccagtttcttcccggtcca

SEQ ID NO: 39980 - DNA, 88 bp, Homo sapiens; identical to SEQ ID NO: 2992
  chr3:181444050-181444138
  hyper

SEQ ID NO: 39981 - DNA, 178 bp, Homo sapiens; identical to SEQ ID NO: 2993
  chr3:181444346-181444524
  hyper

SEQ ID NO: 39982 - DNA, 336 bp, Homo sapiens; identical to SEQ ID NO: 2994
  chr3:181444612-181444948
  hyper

SEQ ID NO: 39983 - DNA, 736 bp, Homo sapiens; identical to SEQ ID NO: 2995
  chr3:181444988-181445724
  hyper

SEQ ID NO: 39984 - DNA, 196 bp, Homo sapiens; identical to SEQ ID NO: 2996
  chr3:181445799-181445995
  hyper

SEQ ID NO: 39985 - DNA, 273 bp, Homo sapiens
  chr3:182400057-182400330
  hyper
cagcctataaaataacttaaacgcccagagtgccgagtttcgtcgggccctggctgcgccgggccgagccctgccccgcggaggtcgccgcccagcacggtctgcagatggcagcctctcgcggaaagccccgcaacgccgcttcctgcctgggggcggcacttggggcccgcgccggggtttcagaaacctgttcgagccgttcctttatggcggaacgttcttatttagtaaatatttattccactccccgaggacccagcactaatcact

SEQ ID NO: 39986 - DNA, 30 bp, Homo sapiens
  chr3:182401172-182401202
  hyper
atgagtgtttgaagcgggctgactatagtt

SEQ ID NO: 39987 - DNA, 293 bp, Homo sapiens
  chr3:182510866-182511159
  hyper
cgttcaggactgtgcgtatgcgtgtcgggagacgcgtgaaccaaagaagccacagagcccgaaaaagacctgcaacaggaggtagagaccgaggaatcggccccaagctgcagactccggagatggccagacccacagacacgacttaatcccactcccagaacggggaggagggtggcagtggacagaaacagcgttcgagaacccggcacctttccacgctcgcttcttcccggacccacaacacagaaaccccccaactcggaacggcggcggggcgcgccaggcccccc

SEQ ID NO: 39988 - DNA, 171 bp, Homo sapiens; identical to SEQ ID NO: 2998
  chr3:182511622-182511793
  hyper

SEQ ID NO: 39989 - DNA, 30 bp, Homo sapiens
  chr3:182512111-182512141
  hyper
tctagccccctcagcgagagacgtttctcc

SEQ ID NO: 39990 - DNA, 30 bp, Homo sapiens; identical to SEQ ID NO: 2999
  chr3:182697831-182697861
  hyper

SEQ ID NO: 39991 - DNA, 30 bp, Homo sapiens; identical to SEQ ID NO: 3000
  chr3:182698706-182698736
  hyper

SEQ ID NO: 39992 - DNA, 30 bp, Homo sapiens
  chr3:182834202-182834232
  hyper
tttccctgcccgtgcgcactgactgcgcct

SEQ ID NO: 39993 - DNA, 30 bp, Homo sapiens
  chr3:182880263-182880293
  hyper
gggaagcccttggacgcgccacacctccct

SEQ ID NO: 39994 - DNA, 32 bp, Homo sapiens
  chr3:182880677-182880709
  hyper
ccgtttaccgcacgcgcgtggtcccggcagcg

SEQ ID NO: 39995 - DNA, 225 bp, Homo sapiens
  chr3:182896563-182896788
  hyper
gaagcaatcttggcactaacacgaacaccccatgaacgctcgcagggatgctgggaggcggaccgggagctcccagtctgcggcccccgccgggttggagcggctccggctcctccaaggctcgggctaagcggctctcaaccgattcccaccccgccctggagaaatgcgggcgtgtctgcaggcatttttgattgtcacgatttgggggcggggtggaggatg

SEQ ID NO: 39996 - DNA, 260 bp, Homo sapiens; identical to SEQ ID NO: 3002
  chr3:182896847-182897107
  hyper

SEQ ID NO: 39997 - DNA, 244 bp, Homo sapiens; identical to SEQ ID NO: 3003
  chr3:182897157-182897401
  hyper

SEQ ID NO: 39998 - DNA, 1522 bp, Homo sapiens
  chr3:182970888-182972410
  hyper
agaacaaactggggcggggcccatcaccttcacctacgcgccgggagggtggcggctggcgggcggggccgggctcgggccgtgacgccgagagtgcggggcgcgcggctgggagcctcgcgcccccgcccgggcccgcccccatcccgcccgcatacagcccgcatcccgccggggaagcgagcccagtccagcgctgcccgtccagtcctcgcccaagatttaaagcccgcaagttttgttcttgagaccagcgactttagctccgatgcgggaaggaaagccgacctccgatttggacatttaaagagctgggcttgaacttcgtgagtttcgctctaaactgcccttgaaatgaagctggacttggaggtaaagtcactgggaagctggcctggggcggggtttccccctcttctcgtattttagaaacggacagcggcagtgcagccctagtttgctgtaagtttccttactttgttactgaggcccccagagctccacgcataagtggtgtgaccagaaaccttttaacaagacccgcctgagcctgcgttagagctcccgctcggaaagtaaaagaccatcctaatccgcggcgctgcggaaccggtgtcccgtgtgggaggaaccgcggcgttccctgggcgtagggcccgcgaggccagcacagtccgcctcttggcggagcgccctgggccggtggttccgcgcggagttagtctgtggtcagttacgtggtgaaaacacggctgtgccgcggccgcatctttccgcggccgaggcctctctgggtgggagtgttggcttcctttccggatcgctaaatggggaaagttctggccgctcggcgggatacgtctccaggccacggatggttcgttctccgtgccgcggccccgagctgggctccctgggtctccagcgcgggctcccggcattgggggctgcgggccggcccctccgccccgcccccgccccgccgcgcctcctcggccgagcggctcgcggtctccggcgcgggaggctccgagtctgcccactccgggccgagcgaggtctctggaggagaagagtggcgaggaggtgagggcacgccggccctcgcccggcgggtggcgccaggacttcaggtgggaacgcgcgcttgggccgggggcgcgtggctggcgtggacaccggatcggggcccgccgccctggcccggaccgcgcacggcccagcgccgggaagtcgggaagccggggaggcctctcccaccgcgggccccggcagcccgccctctgaaagcgcggcggagaaggaggctcgtcccctccccggaacgcctttgttccctccggcctgcccgcgcgggtggccagcggctgggacccaggccgggccgccgcccaggtgcggcaggtaggctcgggggccgggcagctccggttggggcggcttcccggggcctgcgggtccccgtccctgaggagctccggctcctcggtggcgggacaggcccgtgcgcgggagccgcgag

SEQ ID NO: 39999 - DNA, 1068 bp, Homo sapiens
  chr3:183145762-183146830
  hyper
catttcactgaaaaaccattccgtataaataaagccaaacaaaactgtttctaccgctgcggtggatgattttttaaaggcatctccgcccaaggatgctctgccctcgccctcttcctggctctccaggcaagaaacgagagtccctcgcagcctaggccagctctccctcgccacgccccgcgggggctcccgtgacagaccaagtctggcgctttcccagcgtcgcagctggaccgagagaggagcggccgttctgcaaaaggaagcaagtcgccaatctcgccggaaccgcgccccggctcctccggccgggcgagctccggggcttccagaatcgcggtcccggccgccaggtttccggcgccgcctccagggactgtagagtgagggatgctccgccaggtgcaggggaggcggcaggtggccgtggcttctctgcgccgccggccccacgccccagcgcccacctcgtccagcccacgggtggcgcccggggctctcggggaggcacgcacgctcccaagcgccgctcgttttggggtcgggaacgctgcgcacctttccctgcggggagcccgcgctccacccccggagtggagctccggtccttactcggaaccgtggggcggggagacagtgactgaggcgctccagtcgcaccggggtccggatcatcagacgcgcgccggccaggtctccgcccctccttcttccgcgccgggtgtctgcggaggagccgcggagagaagggggctggcccggagagctgccgccatccggcaggacccggagcgggaggctgggtgaggcgccgctgcttgccccacctcctgaccccgggggcggctggcgtgtgttttcccccacttggggttgttccacgcagttcttgacctccgctggccacacctgcactgggagcccggcgcccgggctgcgctccgacaaggctgagcacgcgtgggcgcgctcaccccctatgtgggcgttttccttcgtgcagctgcgcccttgcctctgctccgtctgtcacctgtcaggcacgccagtgctaccttctggagg

SEQ ID NO: 40000 - DNA, 739 bp, Homo sapiens; identical to SEQ ID NO: 3006
  chr3:183165108-183165847
  hyper

SEQ ID NO: 40001 - DNA, 30 bp, Homo sapiens
  chr3:183353036-183353066
  hyper
agctctctaagcttcgacccaagctttaaa

SEQ ID NO: 40002 - DNA, 59 bp, Homo sapiens
  chr3:183353407-183353466
  hyper
tttgttgtgagctgcggcagagactggtggctggaggagacgccggcgctggagagtgc

SEQ ID NO: 40003 - DNA, 30 bp, Homo sapiens
  chr3:183354800-183354830
  hyper
aagtcctgcgaacacgttgttgccagttct

SEQ ID NO: 40004 - DNA, 80 bp, Homo sapiens
  chr3:183415418-183415498
  hyper
aggaaagtgatggacgactgtgcctttgcaagaatcgacgcccacactgcccaggaagtgccctcgcgggccggggtccc

SEQ ID NO: 40005 - DNA, 744 bp, Homo sapiens; identical to SEQ ID NO: 3007
  chr3:183542792-183543536
  hyper

SEQ ID NO: 40006 - DNA, 208 bp, Homo sapiens
  chr3:183602889-183603097
  hyper
gaggatggggccagagcgaagagggacaactgtcattttttcgagtaacggcacataccaggcgctttgcctaagatcgcatttaatcgtcacagcactgctagaggtagatgtcatcactgtttcactttgcctctggtcagaggggataggacttgcccggagttgcagggctggtccctagaggaaccaacgtggcaagccaagt

SEQ ID NO: 40007 - DNA, 88 bp, Homo sapiens
  chr3:183676017-183676105
  hyper
ccatgtgtatattgcatgacgctgaggtctgggttactaatgatcctctcacccaggtactaagcatagtacccggcttttccctctt

SEQ ID NO: 40008 - DNA, 31 bp, Homo sapiens
  chr3:183736077-183736108
  hyper
ctaacccgttgagagtcgtcaggccggccag

SEQ ID NO: 40009 - DNA, 31 bp, Homo sapiens; identical to SEQ ID NO: 3010
  chr3:183851914-183851945
  hyper

SEQ ID NO: 40010 - DNA, 30 bp, Homo sapiens; identical to SEQ ID NO: 3011
  chr3:183903765-183903795
  hyper

SEQ ID NO: 40011 - DNA, 30 bp, Homo sapiens
  chr3:183904637-183904667
  hyper
gttgtcaaagataacggagaactacggtga

SEQ ID NO: 40012 - DNA, 30 bp, Homo sapiens
  chr3:183947054-183947084
  hyper
gatagctggggtcgcggcagtgtcggtggc

SEQ ID NO: 40013 - DNA, 30 bp, Homo sapiens
  chr3:183966619-183966649
  hyper
gcagcagcaggcgccgctcttgccaggcgc

SEQ ID NO: 40014 - DNA, 30 bp, Homo sapiens
  chr3:183967394-183967424
  hyper
ggcggagacaccagcgccccgccttctgca

SEQ ID NO: 40015 - DNA, 30 bp, Homo sapiens
  chr3:183978329-183978359
  hyper
ccccctcttcaacccgcacttcaacagatc

SEQ ID NO: 40016 - DNA, 30 bp, Homo sapiens
  chr3:183979879-183979909
  hyper
agatcgtcagggtccgtgcgcctctgagtg

SEQ ID NO: 40017 - DNA, 458 bp, Homo sapiens
  chr3:183980143-183980601
  hyper
aactgggccgacgcgcgcgcaccagggcagacacccccagccctagtccggtggctgtagccccccgcggctctggagtggtgcgctcgcagtgtaggaggaatgaatggcggcgtcgcggggggcgccctgggctgcgggtgacgcggggaagctcggagcacctgaggacgcggagcgcgccagtgtgtgccccgagggagtgcggtagagatggagggtgccccccgccctcgttgctttggaccacgggtgagttctcgcctcaccgatgggaacatgccctcttctccccttgcctcccgcccccacaacccccgccctggctggccgtcacccgcggcgtcacctgcttgccagcgcgcaggagctctggcgcaatcactggccttggggaggagggggtgtctcacatgcggcgacagtgacggcagcgctgaaaacggtaatgatcaccc

SEQ ID NO: 40018 - DNA, 30 bp, Homo sapiens
  chr3:183993891-183993921
  hyper
agcgggccagctgccgggagccctgaatca

SEQ ID NO: 40019 - DNA, 30 bp, Homo sapiens
  chr3:184032268-184032298
  hyper
aaatcccatgtgctcggcggcgcagatcgc

SEQ ID NO: 40020 - DNA, 73 bp, Homo sapiens
  chr3:184053511-184053584
  hyper
gaagggaggttttgcgaccccgtgtagtgtgactgggctggcttagtgagtgttcgccgcccctgccttcagg

SEQ ID NO: 40021 - DNA, 30 bp, Homo sapiens
  chr3:184079739-184079769
  hyper
ggagctgtctacatcggactcctccgggtc

SEQ ID NO: 40022 - DNA, 225 bp, Homo sapiens
  chr3:184097687-184097912
  hyper
cacccgcgatccgggccgctgctgctgggtcggaccccccgggctcagcccggcccctcgccgagctgccgccgccgccccgtttgctgaggaggaggcccccggccggggcgtcgggcgcggggcataaaacgggccggagccggcgcccggggcagtagagccgcgtacggcccgggtcagcgcccgcccgcccgcgctcctcccggccgctcctcccgcccc

SEQ ID NO: 40023 - DNA, 281 bp, Homo sapiens
  chr3:184098371-184098652
  hyper
gcgggggcagaagggcgcggtgcctgggacccgggacccgcgggcagcccccggggcggcacacggcgcgagctgggcagcggcctccagccaagcccgtccccgcaggctgcaccttcggcgggaaggtctatgccttggacgagacgtggcacccggacctaggggagccattcggggtgatgcgctgcgtgctgtgcgcctgcgaggcggtgagtgcaccccgcggccggcccgggccctggcgggtggggagcgccgggtcgcgcgggcgtcggagt

SEQ ID NO: 40024 - DNA, 30 bp, Homo sapiens
  chr3:184231698-184231728
  hyper
tgccctctagtgggcgagctttgaacttcc

SEQ ID NO: 40025 - DNA, 30 bp, Homo sapiens; identical to SEQ ID NO: 3014
  chr3:184243396-184243426
  hyper

SEQ ID NO: 40026 - DNA, 30 bp, Homo sapiens; identical to SEQ ID NO: 3015
  chr3:184278876-184278906
  hyper

SEQ ID NO: 40027 - DNA, 1099 bp, Homo sapiens
  chr3:184279131-184280230
  hyper
tgtcacaggatacatcgcggtgggggtccccccaagtagcactaagctacagccacatgagggcgtcgcagggcagacgcgggccacatgggggcgcccccggtccgtcttagctggttggcacctcctcggactcagtttaggttactaatcgccaatgggcgccaggaggcggggttctccctctgatggacagcatcgctccgcccaatctaattcatcttttccttagccccgcccactccggcccctgagaccccgagggtgggcctggcggagacaccgccaactgaactccagctgagtgctctcgaggccgaaccagcgggcctggcggtctgtgagtgggtggccagccgctaggggcggggcctcagcgttgacgggcaggcaggccgtcccacccctctcgcccagagcggccgcgccagcgctggggacagcagaagtgagtacgtgagcggcgcagcaagatcccagctcggaccccggacggcgcgcgcccccgaagccccggatcccagtcgggcccgcagctgaccgccagattactgtgcatcccgaatcacgaccacctgcaccctcctgccccggcccgccccccaagtcctcaggcacccagctccccggcgccccggatcctcctggaccggtccgtccagattcccgcgggaccgacctgtccgcatccccaggaccgccgggctcggtgcaccgcctcggtcccggagccgcccgcctggattgcattccctcctctcctggatctcctgggacccgacgcgagcctgccccggagcccgccgagcgcaccctctctcgggtgcctgcagccccgccggcgcggcccggcccggcgcggcccggctcggctcctagagctgccacggccatggccagagcccgcccgccgccgccgccgtcgccgccgccggggcttctgccgctgctccctccgctgctgctgctgccgctgctgctgctgcccgccggctgccgggcgctggaaggtgagcggcgtcggggggcgcgcccgggaacaaggtgcctggggtcgcggggctgcgggctagcagcgtgggtccgacccggattgagc

SEQ ID NO: 40028 - DNA, 30 bp, Homo sapiens
  chr3:184287181-184287211
  hyper
ccgccagccggctccgcacatccctccggc

SEQ ID NO: 40029 - DNA, 394 bp, Homo sapiens
  chr3:184301276-184301670
  hyper
gcgcggaggaggccgcgggcgaaggttgcagggtctgctgcgtggcgcactcccggccgcggaagccgacggcgatcggaggagcctgggagcggccctggcagcggccctggcacagctggcggcggcgcgggctcctcaggccgcccccgtccttcaccgcgcgctcccgcgctggggctgctcggcggcgcccgctccttagtattccccccacggagcccagccgcgccgccgcagccggcccgggggaggggcgccccgcacggctaagctctctgcgtccccggggcggacgcggggaggggaggggaagggacgcagcctctccgccgaggcctccttcctcccctagtgggggggaggggctgtgcgggggcaggggcgggcgatg

SEQ ID NO: 40030 - DNA, 274 bp, Homo sapiens
  chr3:184319873-184320147
  hyper
cggcgggcccctcctggccattttggccggggaatctgtgtaaagtgtttaaaaagaaaaactctccggaggaggacgtaaccttttcttaacatctggggctcaattagctaatgacagcaaagccttctccggtgtcgctgacccctgggcggcagcccagctcccccacccccggtatttatacagctgcggcccctcgctgggacggggggcagggggcttgactgggttatctctgcggagatccgccgcccaccccaaaaaggagaaa

SEQ ID NO: 40031 - DNA, 111 bp, Homo sapiens; identical to SEQ ID NO: 3018
  chr3:184321762-184321873
  hyper

SEQ ID NO: 40032 - DNA, 184 bp, Homo sapiens
  chr3:184322209-184322393
  hyper
cgccccttgccaaggtcaatcaaaccctcccacgctccggaggcgcgcgctgcgtgctctaggcagcggggattggggccggaggggcgcgtcccggcggggccgggcgagggtgggtggggggtctggcctggggggcgcctcccgccccctcttggggaaggtgctcggagactcccgggcc

SEQ ID NO: 40033 - DNA, 30 bp, Homo sapiens
  chr3:184429619-184429649
  hyper
aggcaggtgcagagcgcgtacacgggccga

SEQ ID NO: 40034 - DNA, 64 bp, Homo sapiens
  chr3:184430243-184430307
  hyper
gagactgaaatttattctggacgtaaagagaaaatactgcagcgggatttaagcaagtgagtgt

SEQ ID NO: 40035 - DNA, 30 bp, Homo sapiens
  chr3:184530228-184530258
  hyper
gtcgtacgttggcccggaactgggtcgggc

SEQ ID NO: 40036 - DNA, 1188 bp, Homo sapiens
  chr3:184870164-184871352
  hyper
tgtagaagtagctaaagaaagcgaggcgccccacgggatttcatctcgtcgtcaaggcagcgccaaccccagccgtccggcgcaaggaaagctccggcgggcccggagcccacggcggccccagcctccggcagagcagccccggcagagcccggagccccgcggccgcagagttccggcagcgaccccggacggcccggcgggcgtcccccggaccgcggcggaaggcgggaagacgcggctcgacttacagtgacaccatcctaggtgacagcaccagtgcagcttgaagcacttgccatggctgtgcgtggcacagatagacagcccgtcgcacggctggaagtcgggtctgcgggcggcgcaactccgcgccagggcctgagcctcatctagtttctcgctcttccaaccccgctccgacgccggcgaggccgccgcactcatttcctctccctccgcgcggagccgacaccgggagcccgggagaagcgacgtctgggtgggcaggaagccgagccggctgcggacgcgggagggcgcggcacgggccgggagtcacgccagcacgcggcggcggcgggagcgcggcggtcccaggctcgaggaggagccgccccgggcgctgcgaccgggtccgggctggcagcctccctccctccggcgcggcgcgcgccgcgccccacgcgcacacgcacgcgcacaggcgcgcgccggtcggccccgcgcgacgttcctcagcgagcccggccttctcacacacacgccgctggggagcttggccgtcggcgtccccgccggtcacagcgaggtcctcctcacatactcactccttcctcggagaaagaccccgacggagggccgtggtgaacacacactcctcggccgctttgtactcacatgcacgccagcctacatatgcacttccccccgagtgacactggccaccgagaactgacacacgcgtccacacgctccacggagggctgcgcacacctggcccacgcccacccgaacctcctagtggcccgggccgggtgcatcgcgtagcgaggatctcacacacacagcctgtccccacaggcgtctcacatctccctcgtacacacctccccgtgtctgggcatggagcccctgggaggcgcgcacacgctcgtgcacacgcgcgcactccccccacccagggcg

SEQ ID NO: 40037 - DNA, 30 bp, Homo sapiens; identical to SEQ ID NO: 3021
  chr3:185233301-185233331
  hyper

SEQ ID NO: 40038 - DNA, 254 bp, Homo sapiens
  chr3:185541178-185541432
  hyper
gtgtctcgggacaaggcgaggagggtgcgagcccgggtcggaccccaggtatagccgtgggtggcattaccggaaaaacaaatttaataaagagcggcgccaatttgaaaggatgagctcatttgaaactcaagctgcagggctggcgcggccccgctgctctcccggcccccacctctccattccgctaatccggggcccgaaggctccaccgggctcccctccctgccctctcctcccggtggccccgagaa

SEQ ID NO: 40039 - DNA, 138 bp, Homo sapiens
  chr3:185541794-185541932
  hyper
gcgggaggcggggggacgggcggcggaaagcccccagccccgagttcttctcaataaaatcggacaaaaaattcagagaaaaataggagcgcttgagagagcaagcgagaggggactgaggttcgggaaaggaccgag

SEQ ID NO: 40040 - DNA, 237 bp, Homo sapiens
  chr3:185542333-185542570
  hyper
gggcgccccaaggctgcggccccgagggcgagggcagagtccagagctgtggggggaggggagcgggccgtcccaggagcgggccggcggcgagagttgagggtctggtgcgtggaagtgagcgtgcgggcgcgggagccgccgccgggcgccgcccgccggactcggcctccctcccggcgccgtcccggcctgagcggggcgaggcggggggagggggccgcgctgagtgctcac

SEQ ID NO: 40041 - DNA, 828 bp, Homo sapiens
  chr3:185543196-185544024
  hyper
tcggcagtggctgctcgggctccggccccgcgccaggcgggcggaagcgggtcgcggccccgggctggggctccgggcgccggaaccccgggcgggcgcggcgccgaggccgggcgagcggcggggcggggaaggcgcgccccgggcgcgggtgggagcgcgcgagggggcgacggggagccgcgggcgtgggagggagaggggctgcgagtgagcgcggagaggggtgtgcgcaaggtggaccggatgtgagtgcgctgctgccagggcaagcgggaaggtgtgtcccggaggtgagaggcgagggcaggctgggagacaacaactttcgcagcgacttggccggggctggcgccctgcgcgttcccgggccgtgcgctcgctctgagacccgctccccgccacgctctctgaggtgaccgagcggcgcgtgtggtcgaaggatcgcgcgcgggagtcgggacgcctaggaccggggttggccgggccctcgcggaccgtgctcgcggggaagtggttcccggtcccgggcctcagtttcccgaccggggagggaaggcggaaggccagcgcggagtcacgtcctctccgcccagaccccgcgtgtccggaaccccgcggcaggcggcagcctgacgttggcagctgctctctattctgggaagtgccgagggcttcccgggcggcggcggcgaaagccaggtggcgggtggggaaacgaacgccgaggggccagggactgcggcgaggccggagcgctggggtcagcggccgggggacggatggtcgccgcccggctgcgcggccggttcagctccaaagccaggg

SEQ ID NO: 40042 - DNA, 714 bp, Homo sapiens
  chr3:185825459-185826173
  hyper
acccgcgccccgggcgcccccaggaaaactttagcacagcgcagcggcgcgatccaggcccctcccctgtggcgcgcagcgggcccggttttatgaatgggagagcgagccgcggccgccacatcaggtagaggctgtaactggatctctagcgctgggccccattcacaaaacaagacacacttccacccaattctcagccttccccattcatgaaaactccttcagctgcgcccccgcccccatttccaacgcacgcccagcctccgacgcaggcccctcaccccagcgttttaggaagaaagctcaatgcttcattcacaaaaagggaagaaaaaaaaaaaagccgcagggagcagcgagccaacgaaagaaacccgcttcattcataaagtcacccacattcataaaaacgaggtgcggcgcccggcgctaccaaccgcttccaatccccccacccccaacatctctccctggcaccccctcgtcgaccaggagttcggttcccccccgagttttctccaccctctgaaaatgcggccggaaccctaatccgctgcgaggctgcagcatctttcggtgctgtcccctccacacccgtgttatccccaccatccccaggccgctgttccggtgcgccccgattttctcgagtcgccgcacagccggacgccctcagcctgctgggtgggagcagggcgactggatgtccac

SEQ ID NO: 40043 - DNA, 473 bp, Homo sapiens; identical to SEQ ID NO: 3026
  chr3:185826424-185826897
  hyper

SEQ ID NO: 40044 - DNA, 300 bp, Homo sapiens; identical to SEQ ID NO: 3027
  chr3:185827120-185827420
  hyper

SEQ ID NO: 40045 - DNA, 1081 bp, Homo sapiens
  chr3:186078689-186079770
  hyper
tcctccccacagagaggtcatcgtatgctaatgaagtccgaggaggcagcggcgcagcgcgggagagcgcgcccacgggttcacagcgctcccgggcaccactgcggcgcagccacagatcgcttcgcgctgcagcagacgctcccgccgcggggggcgactgggggaggggtctcgaccgccaccctgagttccgcagctcatccctcccatctgggaggtggttctagctctagtcccaagctttccactgcagtgatggtggggatgggggcagcacgtcaaatcacctgtagggctttttagaactccacagccccctcccctaattctattccactagttcaaacgaagaaaatctcagactaggcaaggggaggtggaccggtggagtctgcgaaagcaccacaggtgactccgggtacgcactcctcaggacacaagcacacacacggacacatcttgtgactctgagactacacagatcaacctcagattcgacccttccctcctttattctctgaggtgtccgtgttcgcttcagcttccctttaagtcgccctgcgcaggggctttgtggagtgcccccaaagtcctagaaccccgcgggacggtcggaggctttggcggccagacattaggaaaagcatctcctgcttctcggactgcctggagcgcgaactggatatcaaggagccaaggttaagtccagaagaagaaggaaatccgaccagttgctttagcaaactgcctggagcaaggccgcctcccacccgcacagctttgaggcttgagggggcctctcagtcgcagagagagccgagccccaccctgtgcgttccccaagcctgcacccctcgagcggggcatcccttcctgcagggctttgtggcaggtggaactgtcggggtgggcgccgtggctttggctgcagccccttccctggccgcgggaccggctcccgctttgccctcctttaccaagttgctgcaccgggtgctccctgagccggggaccccctccgccgcgccggccgccgtcttacctcaccaggcaacacttggttgcgcggtggcccggg

SEQ ID NO: 40046 - DNA, 484 bp, Homo sapiens; identical to SEQ ID NO: 3029
  chr3:186079818-186080302
  hyper

SEQ ID NO: 40047 - DNA, 95 bp, Homo sapiens
  chr3:186285248-186285343
  hyper
atctaggctggggtcgagagtccgcaacagtggcacctggagccagacccaccgctttctggtgtcgcgcctttcaacccgggggggtaggaagc

SEQ ID NO: 40048 - DNA, 30 bp, Homo sapiens
  chr3:186500724-186500754
  hyper
ccatttttccttctcgcgctgcaaaatgta

SEQ ID NO: 40049 - DNA, 30 bp, Homo sapiens
  chr3:186524296-186524326
  hyper
acgcgggcacgtaacgcgtcacttccggtg

SEQ ID NO: 40050 - DNA, 48 bp, Homo sapiens; identical to SEQ ID NO: 3030
  chr3:186544978-186545026
  hyper

SEQ ID NO: 40051 - DNA, 30 bp, Homo sapiens
  chr3:186648160-186648190
  hyper
tttaaccccaagcccgctcgctagcgacct

SEQ ID NO: 40052 - DNA, 297 bp, Homo sapiens
  chr3:186649396-186649693
  hyper
tgctgggtgcactattgtccccgcactccggcgattgcctctgtggggatattttggtcgcctcctcagcctgcgggaagaatgtacgagtcgcccagtgcggtcttgctctttgcctctgaggcccgtgtccgtgtgcccagacaccccagatgtcactagccccttttggcttgttaatgcattttcgcaagcaaggccagccgagacctcgtattctagctggggacgtacaattttcagttctgagtttatttgaaagaaattccgaggtccggaaaaagagaactcttgttt

SEQ ID NO: 40053 - DNA, 639 bp, Homo sapiens
  chr3:186857082-186857721
  hyper
ggcccagctccctcaggtctgcgtgtcaccgacccgaacccgctccgtcgtcctgacgcccccggcctagctgcagccaccttgtcgcaggggccttggtgtctctgagactccgagacgcctcgcccccacctggcgttcggaggcggttgcctcgctgggcgcagcaattcaaccgccgcgcgccggatgctaagaccgcgatttccccggatgctagggcggtgatttcccccgtgacaggccccgccccggccccgcccaggcccgggcggtcccgccccactgagctgtggctcggggagccgtgggtccgactcctgcgtgtgatgtgtcaccaagttgactttggggtcccccattcttccttagttctctattttacctcagcgcgttgtctagctgctgcctggccacggtacttagcacacagcgtgacttaatactggataaacgaggaaaggattcgtacgccctggcggggccagaggctcacagcttgggttcccgcgagcacacgagccaggaaccgccaatgcctccagggggcgctctccctcccatcgagccaccgccgggccattggagaccaggaggacctctcagctccatccctgcgtctctaacaattgtctcatt

SEQ ID NO: 40054 - DNA, 59 bp, Homo sapiens
  chr3:187387556-187387615
  hyper
tttggaagtgaggtacgctaagaggtagcagcttcagaggtctgcgtttcagcacctgg

SEQ ID NO: 40055 - DNA, 76 bp, Homo sapiens
  chr3:187387844-187387920
  hyper
agaaggactgagcatcccttacgtccaaaccaatggggcaggagcaaggcttagggagggctggagaatccgggag

SEQ ID NO: 40056 - DNA, 240 bp, Homo sapiens; identical to SEQ ID NO: 3034
  chr3:187388006-187388246
  hyper

SEQ ID NO: 40057 - DNA, 2819 bp, Homo sapiens
  chr3:187455341-187458160
  hyper
aagcctaggcagacttcgctaccccaccccgaccactccgtacctgtcttccagggactgcccgcccctgggcgatccacctcgaagccccccgcaaggcgcgacggaggctttgtggtatgaccgtggcggcccttaatttagttacattcaaataaaacttttggtgcacctcggtagctaacattgtgtgtatgcctttttttttttttttttttttttcctgttacgccgtcaatgcagcaggcaatgaggggaatgacacagccctctcattcccggaacgtagtcaatctcggctctgcggatttcacagaacacactttgcctattgccggctccaacaagaagtaactttccaggaagctgccggccccggcagccgccaggatcgctgcctgcgctgcgctggccgccggggattcacccagggaggcggggccgctggggaaggctcgcggggaatacagcacactttcccctaaatccctcgtccgcgccgagtgcagggctctcagagttcacctagtcccacctctcacccacaacagtttataaatggggaaggtcagacaagttagtagcagagctgggtctagaacccaggagttcgaatacaatccgaggctcatatcgagactttaagttgtccgattccgaagtttatttgcttttttccctctttttgccttccattctccctcacccccgttcttttaggggaatgtttgagcgagacttcaaggtcaaaagatggagtccctaggggctgagggtctccatcataggcgccccaggcaaggttggagaaaaactaaacagaaagccccttccgcctacgttggcaagaacgggaacccagctccacttggtttccgcccaaagtctttagaacaggagctgccaagccgtaaggatttccgaatccgatttccccgaaaccgtagagacacagcttggactcggcaaaggccggggccccgacccctgcgcgcgcactggcactctccaaagttgcctcgccttcctgtggccctcccgggaattataacccccgggtgccatgtcctaattggtctcggtagcaggctccggggtgcgctttcgggggctaggggacagcgaaagactcagccacaaaggccgcagtctggtcctaaaactagccagtggcgtcacactgcgccgctcatcccttctgcggcaagcggaagggtcagagtcggtctgcaaagaacgagcctttggcctcaaaatcctacattgaggctttctcaccccttcgcccggtgggataaaggtgaaagagacggttgggatttaataaggggtagggatgagaatctgggaagttaaaatgaagtaagtgcatttattggaaattaggagtcccgtggttccgggagctcaaaccgaatggtgtttttaccgctgcctaacgctagagagagccctccatcaaggtttgaaaccgtcaacccctttctcgcccctcccctccttcccattgacctagtttggccagagcctcccgatttggagaatgccttccgcccttcccccctcctctccagccagagaggctacagaggctgttggattattggtaatctaataactccaataacccgctgaaaaatccaaagggaaatctgaaagtgtaaagcactgtttagggacaaggacaaggaattttaataaggctgcaactgccgtagtgaaccccgcatcaggggccctgccgtggggctcccggtctcagcagtgtttcagccaactagctgcacggctgcagacaccaccgtggtccggcggcagggggtgaggtcaaatcgcggagctgtttttattcttgggggaaaacactcttcgccctcttggctggggaacgggagggtgcaggagacgacagtaaataaaagcgaatttgataacgcgatggcctcgacagccgctttggataaccgaggtgttcggggacattgtgtcctgactttcatttctatcacgtttcctgccaacagtgctcttgcaagcctgcaagcttctaggaaatgcaataaaacagagggatgtgttttatcatcaagatctgaagaggagttgcagaagggacgttccccatacgctcagcgcgagacagccttccagaagggcccgaagacaatgccagcaaatcgcgtcccggagcagagatccctcggccgtcctggctggactgggctcagcctttgcaaaaaggctggcgggggaggggagaagcatgatctcctcaagcaaacaatgcctttaaaaatccgatctggaaagaagtcagccaaggtccttattcacgttaatgaagatggaaggcactaactgtccttggaaagcgatgagtcaaacttgaccgcgcttcaaactcgttcccagattcgtttccagtccgaacagaggcgcgtttctccgacgcggcctccgacggctcccgcagtgggaggggccgaactcgatccccgccgacccgggcgggggcgacggcgctgtctccccctgcagagcgcgcctgctgccgctaggggccgccagcatgcggacgcgcgtttgccatcttaagtcacgagctcggagaaagaaaactttacggaggaactgttgtggcacaaattctggcctatccacatgacccccaccccctcacacacacacacccggtttctcgccaggctactatgcagaggatgttaggaaggggaagagagcgatttcagaatcgaggctcgccctgcaagtctttggtccaggccttaacccccctcttaacacgcaaacccccgagc

SEQ ID NO: 40058 - DNA, 1028 bp, Homo sapiens
  chr3:187458573-187459601
  hyper
atggtgtgttcgaagcgggttatttgtggtttttcttagtgcaaatagatgctcatcgctgagtgatgggcaagcagcgaggcctttctgattttcatccctcttgccaaaactttggaggttgtatgccatccccattggagggtgccctccttctgtcagtcctagcatctggtcagggtaccgccgcccgggaggtggaacggcgagcccaccgcccatggccgcgaactcgatctcagcccaccgctaggtggcaggccagcccgtccgagaatcgccgcgcggccgcagcttccacaccgatccctacccgcccctctttattttctgtctggtgggggcgagggttgggggtgtgattgcctctaaaagcaaagctagaaaacatttaatttagtgtatgtaattccgttcctcccgatgctcccgcctctagcaaccacaacgcggtatctggagctggtttcatgtatcataagttgatttctcccccagcctccgaaaagctttatgtactgggaagggaaagaaggtgcacttgtcttcaaaaggcagaatggcactcgacagtattggcagagattcttgccaaacactggtcatccagcaaagaaagtcgggaataaactcctgatcttctcggaggaaaggggcgctgggggccgagtgctggatcccactcaggctcactgcgcctggcaaagcgggggagtggggagtcgggtatggtcttttggtgaagttgtgggtctcggagtggacatcgggagggttgggaggggccgttcctggtttccactggggcaaagagaaaccagccagttctgccaccacgctgcaccctcgctgtgctcgcggcggcagcggcggtcccacttgttgcgcagtgctggaaaccggcacgcgccattcgatgttgattcacagagggctacagaccagcctaccattgctccacgccatccacaaacctcctcaacacaccccctacacatacgtcctgccaccgccggcaaaactacagc

SEQ ID NO: 40059 - DNA, 57 bp, Homo sapiens
  chr3:187461960-187462017
  hyper
ccaacacagagtcacgcagcgcccaaaatacaaacaccgcagcggccagaaatcccg

SEQ ID NO: 40060 - DNA, 249 bp, Homo sapiens
  chr3:187462563-187462812
  hyper
agaggagggagggaagcggaggccaggagcgacggagcaaggaaagcagtttgcaagcgagaaaagagggaaaaaacacagccgcacgaatccagagagatcacaagccgtacgcaagcagcagcagaaagagcgagagcgcgagcgcgcgtcctctccgcggtctggggccagacagcccccagactagcccgaatcaccccccaagcactgtctcgtcctctctgctccggccgccccctaattccc

SEQ ID NO: 40061 - DNA, 210 bp, Homo sapiens
  chr3:187463099-187463309
  hyper
taatgatcatgagcagcggcggcggcagcggcaccagcggcaacagcggcggcggcggcagtagcagcagcagcggcggcagcaacagcaataatcacctggtgtccggcctttcctagaaacttcttgcatcaccacttctaagaaccccagttctaagaatcaacagagctcaattctcggaatttgagcttcggactttaccactgc

SEQ ID NO: 40062 - DNA, 30 bp, Homo sapiens
  chr3:187871821-187871851
  hyper
tgcacggcccggggcgcggggcgtggggcg

SEQ ID NO: 40063 - DNA, 30 bp, Homo sapiens
  chr3:189508455-189508485
  hyper
cattcctcagaatggggcagctgtgttgac

SEQ ID NO: 40064 - DNA, 30 bp, Homo sapiens
  chr3:189645917-189645947
  hyper
ttagtgcattcaatctcttaaaaaatgaat

SEQ ID NO: 40065 - DNA, 833 bp, Homo sapiens
  chr3:189838066-189838899
  hyper
tgtagggcactctgcgctggaagtcgctgcgcacatcctcgctgacgcggtggcgggatgcggggcccccgaggcgctgggtctcacagctgcgataacagcgcgcccgccccaacaaggagcggaaaaggggcagctcagcgccggggccctcgccggggggcgggggcgggagcgggtggcgcgccgcgcagtggcgggcacagcgcgtgcggatttcccgcaggcgccggtggctgcgcagcgccgcttccaagtcgcgcaccgctcgctcgtagtctccgctgtagtaggcggccgcgccgctggcgtagagcaggtcgaagggctgcagaggcccgggctccagctccagctcccggcgtgggctgtccggggggccgccccacagtggcggcggcagtagcagcggcagcagcagcagcagcggcggcgcccagatgcgctcccgcatcctccgcctcagagaggcgcgggacggttacgctcgagagggcttcggggcacctcgcgtccgggtcccctctcccaccttccctcggggaagcgcgccgactccgccgcgatctggccgctccgcgagccccaggtgaccgccggcgctccgcgtactgagaggcggaggccgtgcctggccagccgctcttaaagggacgcccacagctcacacgctcctcctgctgcctgagactccgagagccgctctcccaggctccccgctgcagcggcggggctgccaggggcggcacactccagcgccagccagagagctagcgccgcttgaggccggccggggacgaggcgctttacacgtgagctcccttctggttgta

SEQ ID NO: 40066 - DNA, 28 bp, Homo sapiens
  chr3:189900046-189900074
  hyper
gcgcccagccggtcgtttatctcttgaa

SEQ ID NO: 40067 - DNA, 74 bp, Homo sapiens
  chr3:190231323-190231397
  hyper
aggactgcggagatcgcatctacatcctgccgcgctctgtgccggcacagggtggttgcgaaaatcgtgcagtc

SEQ ID NO: 40068 - DNA, 374 bp, Homo sapiens; identical to SEQ ID NO: 3042
  chr3:190580539-190580913
  hyper

SEQ ID NO: 40069 - DNA, 30 bp, Homo sapiens
  chr3:191046934-191046964
  hyper
cccccacctaaagacgcgaccctcccgtag

SEQ ID NO: 40070 - DNA, 22 bp, Homo sapiens
  chr3:192125806-192125828
  hyper
tactgacctggtctccgcctca

SEQ ID NO: 40071 - DNA, 595 bp, Homo sapiens; identical to SEQ ID NO: 3044
  chr3:192126115-192126710
  hyper

SEQ ID NO: 40072 - DNA, 586 bp, Homo sapiens; identical to SEQ ID NO: 3045
  chr3:192126786-192127372
  hyper

SEQ ID NO: 40073 - DNA, 174 bp, Homo sapiens; identical to SEQ ID NO: 3046
  chr3:192127556-192127730
  hyper

SEQ ID NO: 40074 - DNA, 274 bp, Homo sapiens
  chr3:192127936-192128210
  hyper
cgcccaggtggggccgagctgggggccgggcccctggagcgctgggaagcacagcgcgctctagtcaggttccctttcctggagccctccgcttccagactcccttctttcctccctccctcccgccacccctctccctcctctctgtgtcttctgtctctccccttttctcctctctacgcaatcctacgtgattgaggtttggatgagaaattctcagaggcagagcgagggaactgcagcttgggtctgctccgtccggtccctcccacaa

SEQ ID NO: 40075 - DNA, 398 bp, Homo sapiens
  chr3:192231877-192232275
  hyper
tttcccagggcacccggttgaagcccaaggctaactgggaccctcctacttcagcaccaaggacagaaatcgctaaatctccaggggaaacgtacccctaaccaccgccagatgtctacttttcagacaaagcaagaaaaagaaaatatacctgccttgccagccatctgtttaaaagtcccctctcctgtggaacgcacgagcaacttttcggagacactgaacaactccaagtcgcgcgccgccctcgcaaatcgcagagagggccgcgagaaggtgcgaacgcaggtcacggccagcgccgcttggagagagacccgcaggtttcagcccaggcgcgcccggcgaaagccaacgcgctctccctacaaagcgtcgatgacttcagggatttaaaa

SEQ ID NO: 40076 - DNA, 286 bp, Homo sapiens; identical to SEQ ID NO: 3049
  chr3:192232532-192232818
  hyper

SEQ ID NO: 40077 - DNA, 102 bp, Homo sapiens; identical to SEQ ID NO: 3050
  chr3:192232849-192232951
  hyper

SEQ ID NO: 40078 - DNA, 255 bp, Homo sapiens; identical to SEQ ID NO: 3051
  chr3:192233094-192233349
  hyper

SEQ ID NO: 40079 - DNA, 21 bp, Homo sapiens
  chr3:192445365-192445386
  hyper
cagatttgcatgggcgctggc

SEQ ID NO: 40080 - DNA, 188 bp, Homo sapiens
  chr3:192445421-192445609
  hyper
cgcctcccgctcccccgcccccttcgcctccctccccaatacggtcctcagttatcccagctgaggagctgtagcattcggtcacagggaagcgctgctaaaaataaacgccggaccggattttcctctgcaaactagaaaatggattggactagtactgcgtgcatcaggacgaattactgaagtct

SEQ ID NO: 40081 - DNA, 547 bp, Homo sapiens
  chr3:192635621-192636168
  hyper
atcttcatgcaaaacgcgccgagtagcagctccgcggcagcgcggcacccacccccgccccccaccccgcccccctgggcctcctcccctcgcaggctcccaggctttggccccggctcgtgggcgggttggcgggcgggcgtctgggcgggcagtcccccgctccgtgcgctctgggcgtgcgagcttcgggaggagctggactgcagcgagggtgcgtgtgtggccccgacacccttttctccggccccacgcccgccccgatgctgcgcgtccctgccctgccctggccctctctggcagcggcaacggcggtcgtagagccaactggagcctcccccgggcgaggaaagtgaagtggaaacaatgtgaaattcaccagctctgaaatcaacaagctgccggctccggtgttacggagccagcaccagcgtctccatttaaagggacagcgcacccagtggaaaggaaaataaataaatgacagaggtctgcacgcatataccacttgccaatccgtacttgggaagacgcgcgaggtgtggat

SEQ ID NO: 40082 - DNA, 30 bp, Homo sapiens
  chr3:192636409-192636439
  hyper
atgataggattgagcgtataaaaaaagagg

SEQ ID NO: 40083 - DNA, 30 bp, Homo sapiens
  chr3:192958711-192958741
  hyper
attatctttataaccgcggcgcctagcaca

SEQ ID NO: 40084 - DNA, 31 bp, Homo sapiens; identical to SEQ ID NO: 3055
  chr3:192959658-192959689
  hyper

SEQ ID NO: 40085 - DNA, 42 bp, Homo sapiens
  chr3:193310991-193311033
  hyper
ctgtcaggctcttgcggaagtccatgcgccattgggagggcc

SEQ ID NO: 40086 - DNA, 207 bp, Homo sapiens; identical to SEQ ID NO: 3056
  chr3:193721400-193721607
  hyper

SEQ ID NO: 40087 - DNA, 478 bp, Homo sapiens
  chr3:193775944-193776422
  hyper
aagaaaaaaagaaggaaagagcgctgaaggacccacccagggaggaggctgagccgcgctccctctagcctccccagaggtgcattcgttaggttcccgccccggccccagccccagccccagcatcagctccggttcctctgcagacgttcagccccttcggaaatgtaaaacccgggaagcgaaagctgcggcgacctcccagagcctctcaggcacgcggcatctctccccaccggcagcgccttgaaataccaaaggcctagccaaagatggaaccgttttgttgggagctcgggtttcccccgccgcgaggctgagccggtggcgcagctgctcaaaggtcacgcccgagacacgtccgcacaagcccgggtggcggggcgggcagcggggagagaagaggggagtggggagggggacgggggcaggggggaggggcgccaccttctccagggccctgcggggtgggctccca

SEQ ID NO: 40088 - DNA, 31 bp, Homo sapiens
  chr3:193852179-193852210
  hyper
gcgtagtgagggggagcggcccggccgcccg

SEQ ID NO: 40089 - DNA, 70 bp, Homo sapiens; identical to SEQ ID NO: 3058
  chr3:193852643-193852713
  hyper

SEQ ID NO: 40090 - DNA, 30 bp, Homo sapiens
  chr3:193852976-193853006
  hyper
tcttaaagggcccgcgggcgccgggggccg

SEQ ID NO: 40091 - DNA, 30 bp, Homo sapiens
  chr3:193853211-193853241
  hyper
ttcctggggaagcccggggtctaaggcccc

SEQ ID NO: 40092 - DNA, 30 bp, Homo sapiens
  chr3:193853737-193853767
  hyper
cctgggctcaggcgcgcgccattggccgcc

SEQ ID NO: 40093 - DNA, 31 bp, Homo sapiens; identical to SEQ ID NO: 3059
  chr3:193853961-193853992
  hyper

SEQ ID NO: 40094 - DNA, 185 bp, Homo sapiens; identical to SEQ ID NO: 3060
  chr3:193854186-193854371
  hyper

SEQ ID NO: 40095 - DNA, 31 bp, Homo sapiens; identical to SEQ ID NO: 3061
  chr3:193854613-193854644
  hyper

SEQ ID NO: 40096 - DNA, 312 bp, Homo sapiens; identical to SEQ ID NO: 3062
  chr3:193858569-193858881
  hyper

SEQ ID NO: 40097 - DNA, 282 bp, Homo sapiens; identical to SEQ ID NO: 3063
  chr3:193858949-193859231
  hyper

SEQ ID NO: 40098 - DNA, 151 bp, Homo sapiens
  chr3:193987503-193987654
  hyper
gtttccgggactggccgggtcaccctgcggctcggccgtgtctggcagccccacccttcctggcagccaggccctctgaaattccgccagcaccgggggacgaagaaggtcttgctaggatgggggagggcgggaagacggggagcacgag

SEQ ID NO: 40099 - DNA, 283 bp, Homo sapiens
  chr3:194207974-194208257
  hyper
tgggatgaaatggaacggcaaatcccacttcatcccctttgggctatgacaacatcatagtccaatctcccattttatgaacagggaaactgaggctcagtgactagacagacgttgcccagagtcatggtcatggaggaagcttgtgctagaatggtggagaggaaaccagagcccagctcctaatgcaaggctctttcattcctttagccaccctcgcccccgccaaaacaaacagacaaaaaactgtcattctcatatgaccacggactctgcgccccgg

SEQ ID NO: 40100 - DNA, 77 bp, Homo sapiens
  chr3:194208467-194208544
  hyper
cgcgcccggccacctgcagcctctggctgcggccatctttccgcctggggccacctggcctgcgccctttgtgcccg

SEQ ID NO: 40101 - DNA, 116 bp, Homo sapiens; identical to SEQ ID NO: 3066
  chr3:194278584-194278700
  hyper

SEQ ID NO: 40102 - DNA, 572 bp, Homo sapiens
  chr3:194353931-194354503
  hyper
gcgcctcccccatggcgcggctgggcgcgcggcgcggggccggggacctgggcgcagcctccctcgccgcgggcaagccccgagcgccgccgccccgcgtgcccttctctgggttccgttccgccgcggcgcctccggccgagcgcaccgaccgcgggcagagaagggcgcgctcccgggcgcgggcggcggcggcgaaggcgccggggaaaagtttccgggaccgcgcgctccccacccctcgcgctattgtcgggggtcggcagggcggaggccgccccccagcggcgggagccgggagctgcgcgcgcacaaagactgcggcccccgccccccgccgacctcttcgcggtcacccacctccaacatcctggccggagcggggcgggcggctgggctcgcggacggccgagtccctgccggtcgctgtaaggcacggcgtcccttcctgcgtattgtccacatttcctgagccaacagcaattagttgcgctgctgaagcgcatgggtgctgggatcccgaggtgaagggggcgtggtcctgatcgccgacagggcgcagtaaaaagggt

SEQ ID NO: 40103 - DNA, 30 bp, Homo sapiens
  chr3:194393107-194393137
  hyper
gatagatttcctggcgaatgtctcgagttt

SEQ ID NO: 40104 - DNA, 117 bp, Homo sapiens
  chr3:194406435-194406552
  hyper
tggaccggtctccccgctccctcgaccaatggctgtcacgcggtccctttaagaaaccaggaatccgcccggagtcggagcccaaaacagatcctcttctctgctcctcccctgtcc

SEQ ID NO: 40105 - DNA, 477 bp, Homo sapiens
  chr3:194406589-194407066
  hyper
cgagatcttcctcccggacggcaaggatgtgaggcaggcgagccggacgccgctcgcagcaccggagagggcgcactgcaaaggcgggcagcagaccgtggagagcccgggagcggagctggacaccgcctcggagggaagaaatgaggtagcggcggttcccggacccggccatgcccgtcccctgttctcggagcccagcgccgtctcggccaggccagcccggacactgagcgggccgagcgcgagtccccggcgtccggcggagcgaagatgcagtgagtccccgcgggactgctgcgcggggcccgccgcggccagccggacccagcatccgaccgcactttgggcgagctgctgacttgagaccagcccaaacggggggctttccatctccagcacccctcggaggtggggagcaccggcccctaggcacactcgctgtagagtttccgcgggttttggccccagtcctga

SEQ ID NO: 40106 - DNA, 581 bp, Homo sapiens; identical to SEQ ID NO: 3068
  chr3:194407407-194407988
  hyper

SEQ ID NO: 40107 - DNA, 772 bp, Homo sapiens; identical to SEQ ID NO: 3069
  chr3:194407996-194408768
  hyper

SEQ ID NO: 40108 - DNA, 246 bp, Homo sapiens
  chr3:194408838-194409084
  hyper
cgtcgccggcgctccaccgtggctacccatccgtggtcccgacaacctccctgtcccttgcccgcccccaggaagggggaaatggggcatttggggcccagacctacacttggagcccaggtccagcgttcccccgaccgctttcccctacctcccggcccccgctcccgccccagcacttttggctctgttgcgcgtggggatgcggggagatttgagaggggaaaaccccgccaggagggagag

SEQ ID NO: 40109 - DNA, 31 bp, Homo sapiens
  chr3:194602924-194602955
  hyper
cctgctctggggaaggcgctgcctcagggca

SEQ ID NO: 40110 - DNA, 253 bp, Homo sapiens
  chr3:194827127-194827380
  hyper
tgaaaggttctggccccagcacggccccgcacacaccctctctcactggacttgccccttcccttctcccgggcctcacggcggtgtctacgccgggctcgctggaaccttccagggctcggtgattcggggctgcggtgggagggccctgagttcttagacccgcgtgcagatccggccgcgacacaggcgagacccctgccggcgaggcgcggaactgcaggcacgccgcggcagggagggccgcagagcg

SEQ ID NO: 40111 - DNA, 259 bp, Homo sapiens
  chr3:194980252-194980511
  hyper
cagcaagcaggcggccgggctcctcctcccagggagaggcctcccgccccaggtacaggcctgggaagccctcatctcaccgcgaggacagtcgcgtgcgacaggcctgtaaggtggcatccgagtccctcccgcaattaaggacgccgggctccaggccagcgccagggacagacccagcaccagggcggcccccggagccggcctctggcggcctcgggtcttttgccaaattccccaccggcgccaggataccgag

SEQ ID NO: 40112 - DNA, 30 bp, Homo sapiens
  chr3:194992080-194992110
  hyper
cggctgagaaatggcgccctacgcggcgag

SEQ ID NO: 40113 - DNA, 30 bp, Homo sapiens
  chr3:195269693-195269723
  hyper
aggggctcccaggccgtccctcccagcgct

SEQ ID NO: 40114 - DNA, 30 bp, Homo sapiens
  chr3:195599090-195599120
  hyper
gggccctggagtcccgagcggggccaggtc

SEQ ID NO: 40115 - DNA, 1961 bp, Homo sapiens
  chr3:195599452-195601413
  hyper
caggaccaggctgtgtgccaccggccctcctccccaacagcccccgtgacccaccatgccccgtacaggcctgtttgcacacggccttacccacaactctctaggtgggtcaggcagctttccctatggtttgcaaataaggaggcacgctggaagctgctgcagcaggcaacatgacctgtccacggttaccagaaagatcccagcagacctgggacccaacgccagctttcaggtctgtggggccagcgccccgcccacacctcctcctcacccctcagttccctggcaaggccggggccccagtcctcttctggccacttgatttcactcctcggctgggttccaggagttctgagaggtgcgggggtgccgggggacacctagggccttgcactaggctgggggccaggcctccagctacaacctgcctcccgaatgcagacgcgggagagtctaggagcactcgggcaactcagtccctccctccaccgcttcacctgcttccggagctttccaccacctcccggaaggcctgcgggagcctccccgtctcctcaggaggggctctacctgtgtccaaaagggaactcagctctcccacagtgaccagacagtagggctgccagtccccctctgacctcagacacgaaacctctgctgatgtggcctaagccggggcctgggcaggggcaggggcaggggcaggggcaggcaggccaggaagcacagggctcccgcaagacactcctgactcccgaaggctctcacaggttgtgaggctcccgcgtctgctgctggacttgtcatacgtgatgccgtgagcagagtctgggcaggcgggggcggtgagagccccgtgggcagtgtctgggcaggcgggggcggtgagagccccgtgggcagtgtctgggcaggcgggggcggtgacagccccgtgggcagagtctgggcacgcgggggcggtgacagcccagagctgctagggtggacacgtgtggcaccacactgcacgccctccccaccaacccccacttctcctgtcccagggccaaagcgtgaagaagggctcctctgaaacccagccaggccggggagagaggacggaggaggtggcgacgcctgggcacccagacccacagccttgtaaggtgacgaggcctggctggagcggggtgactccggaacagcccatcccagagaccaaagtcaaacccgagagcaccacggtcggcggggaggcggggggcgcggggcgcggggagacggggctgtgctccccctgcccagcctcctcatacacagggccactggcctggccccaccacacacagccaccctgtgattcccaccctgcctgcagggagggaaggaaggagagaggacagtaccccgagacgagacgagtcccatctgaaaaatagcagggccactcgaaggagcagagccccggctccccagcacgcacacagcctcccacggcggcccgtagaggaggaaccccggcaccggctgggctgcggctctcccgctacacccacgggctccccggtggctgccgcgggccagacgccggactctgctctccacacctcttcagaggcgctcagtaactgggtgagaatgccgctgaggccgagaccttgctcagagcagcgtgactcgtgcccaaggcaggtcactccgtctggcctctcccttccgccaacactgcccagctccaggcacagaagcctcctttgggacccacttctgagagggaaaggagacatcaagcccacctcccttagtgcaggtatggccgaggcaagagcccccatggctgctgggagtcctgacaccactcgagaaaacatgcttgctcctgggggaaggagagtaagagtgcggaggacgtgtgcaagaagctcccctcgggatggcgcccacgcacactccgaggcacaagaaactccccctcg

SEQ ID NO: 40116 - DNA, 538 bp, Homo sapiens; identical to SEQ ID NO: 3073
  chr3:195622171-195622709
  hyper

SEQ ID NO: 40117 - DNA, 34 bp, Homo sapiens; identical to SEQ ID NO: 3074
  chr3:195636197-195636231
  hyper

SEQ ID NO: 40118 - DNA, 402 bp, Homo sapiens
  chr3:195808864-195809266
  hyper
atgaagggaggacacgagggtcggtgtagttctagaagcccgcactcacactagcgcgtcctccgtcccgagccgccacccgatatcccgacgctctgaggggatggcggcccctaaccggcggtttatagcctggccccgcccccggcccccaggggggctgtgcgtcacttcctgaggcacgtacgctcgcgaggtgctctgacagatcgcccggggggcggggatgcgcgcgcagcgggcggggccctatgcggagggcgctgcgggcgaggcgaaggccaagggaaaaggcgccaaggcagcaggtgccccgaggagccgcgcgatgggcgcactggcctctgcctcggcgccttcctccaccctggtagcctggcagcctccgcctgaccttgacca

SEQ ID NO: 40119 - DNA, 19 bp, Homo sapiens
  chr3:196045320-196045339
  hyper
tgcagaagtaattgcggcg

SEQ ID NO: 40120 - DNA, 30 bp, Homo sapiens
  chr3:196158960-196158990
  hyper
gggatctccctccacgctactaggagacag

SEQ ID NO: 40121 - DNA, 30 bp, Homo sapiens
  chr3:196230655-196230685
  hyper
ccgcccgccaaaatcgcacttcccacccag

SEQ ID NO: 40122 - DNA, 30 bp, Homo sapiens
  chr3:196296017-196296047
  hyper
gagctgcggagctgcgccctggtgtgcaag

SEQ ID NO: 40123 - DNA, 82 bp, Homo sapiens
  chr3:196366354-196366436
  hyper
ggcccctagctggccgcccccagccctgccaaggcaccaacgcaagaaagccgggggagcctcggtcgcattgctggaagat

SEQ ID NO: 40124 - DNA, 30 bp, Homo sapiens
  chr3:196466479-196466509
  hyper
ctgtcagcgtcttccgtcggcagagacctg

SEQ ID NO: 40125 - DNA, 31 bp, Homo sapiens; identical to SEQ ID NO: 3077
  chr3:196467926-196467957
  hyper

SEQ ID NO: 40126 - DNA, 31 bp, Homo sapiens; identical to SEQ ID NO: 3078
  chr3:196476222-196476253
  hyper

SEQ ID NO: 40127 - DNA, 30 bp, Homo sapiens; identical to SEQ ID NO: 3079
  chr3:196594752-196594782
  hyper

SEQ ID NO: 40128 - DNA, 30 bp, Homo sapiens
  chr3:196669202-196669232
  hyper
agctgaatgggaggcgacacaatgagacaa

SEQ ID NO: 40129 - DNA, 240 bp, Homo sapiens
  chr3:197023960-197024200
  hyper
tcaaagttacacaaacgattctaaaacggcaatcaaaaaactgacacacggaaaagcaagtgacatcgacaacagagttacggaataaactctcaccttgcttccggaccggcatttttctccagaatcaggaagagggcacacacctttaaaacacacaacggaaaggaaaaaggatagaatcatgttaaactagcattttcccctatcgaaatagaaaaccctcgcagcctatttgaa

SEQ ID NO: 40130 - DNA, 678 bp, Homo sapiens
  chr3:197025625-197026303
  hyper
gttaagttactcttcgtcccttagtaataggcttggggggaggggtttcattacagaaggacatatgaaatagagacactggttaacttggcaagagtttgagggttatagtacaagatttttaagcctaactgattaattccgagtatggtatacttaagggtgggcagagaaggtttgttcattcattcgctcattcattcattcattcatttccctcaagcctgcgtccccgcccggtcagcatcgcaggtgttacccaaactctgacggtccctttaagaactcacccggagtcgcgccctccgaagctgagccgccctcggccagcgctgcaggtttgtttcgtgcgcacctccgggcggaattaccggccggctgggaccccgctcccggtctgagccacccaggttatagaaggggaatctcgggaagctttccaagtcactgcccacgtcttcgaacttcctcggggtgacgaggacctccctattaggaggtccagagagaatttgcccaaagttaccccgagtgagtgacagaactggaaacccggagatcctgtctttcaaaaccggaaggctcttcccagtaaacctgacggcctctgactgaggccgtatccattggctaccaaagggaaggccgaggaacctcgtattgtaaccttaacagcta

SEQ ID NO: 40131 - DNA, 352 bp, Homo sapiens
  chr3:197183383-197183735
  hyper
agggctccttccctgtgggagcggaggtttgccgcgagccatcgcccggcacgggacacgtctcagggggaaggaacacgttttctctcagactgagcgctcgctgaccccggctcccaggcaccacgtctaccacgtgactggattcctgcggccgccgcgagccgggagaattctaatagcgcagatgcccggaaccgctgcagcagcccgagccggaagtgccagactcctacttcccaccggatgcggggctcggcaggctcggcaggctcctccgcaggccacacagccggcggcacaggcctcctgcggggaaccccaccccaccggccagcccggtgctctgccc

SEQ ID NO: 40132 - DNA, 97 bp, Homo sapiens; identical to SEQ ID NO: 3081
  chr3:197222651-197222748
  hyper

SEQ ID NO: 40133 - DNA, 294 bp, Homo sapiens
  chr3:197237061-197237355
  hyper
tgctgcttgcttctttgttcccggtttccgaagcgcgaatcccgaacgccgtgagaaacctcaggctcgggcggcagcgcgggagtctggggcgctggaggccggcgccggctgcggaggaggagcgccctctagcggcaggtccgcccagggagaggcggaaacgcggagtctgattcgaaggcgggcactggggaccctgccccgggccgaaagccccctggaggacagtggtgtttggcttcggtcccaacatacaggccctgggcagtcgcagggatggcagctttcaaa

SEQ ID NO: 40134 - DNA, 30 bp, Homo sapiens
  chr3:197463363-197463393
  hyper
ccgtccttcctctgcgaaatgcttcccaaa

SEQ ID NO: 40135 - DNA, 30 bp, Homo sapiens; identical to SEQ ID NO: 3082
  chr3:197476865-197476895
  hyper

SEQ ID NO: 40136 - DNA, 515 bp, Homo sapiens
  chr3:197807201-197807716
  hyper
acgtcccggcacctgcgcgccaggcggcgctccacctccgcggcgtcgcccttgagggccgccctgtggatcttccgcagttccgcgtccctggtgtggtacgcgggacccgggtactcgtggtcgatggagcccaggaccgcccggcccgggcgtctcccgaagctgaagagcttcctcatggggcgacttctcctcagacgcccaccaccggctcctgagcccccgcggctcctcgtggcctttccactaaccctaaccccaaacccgagatgtagctcagaatccgcgacccggccgggtccaccacagccttcagcagcgacactcgcagcctctgacctctcagcccgcgaagccgttaggcgcgcgcctgcagctcagcgcccgcgcggactccggaagccgctcccaagcccgcgctgccggcagggggcggctgcggctcgggcgcaggcgccgctggcttgcgggttctcctgggctcgcccgggacgtcccgtagtcgcaggcgc

SEQ ID NO: 40137 - DNA, 30 bp, Homo sapiens
  chr3:197807915-197807945
  hyper
ggctgggagctccagcgagcttgggagctg

SEQ ID NO: 40138 - DNA, 1497 bp, Homo sapiens
  chr4:330715-332212
  hyper
gggtgagcttggggagggagacacactctcagcccacctcgccccgcccgacagcgctccgagtcctgagtcccctcacccccattctacagacacgaaggtgaagccaaagacgggacgctcacttcctgagaatttgctgcctgctgcgtggacaccaccgacctattgtttacagcggtcagggacccgccccccagacccccaggaccgcgcttccgggggaggagggtgtcctcagcaacggtgacccgcaccaaagccctcctcaccggggtcaccgccacagccggtgcgaggcccgcagggcgctggggatgcgcgaccgactcccgtgaacctgctcctcgcgcgtcagggagagctgtgcacccaactaggctctgtgaggacggactgaggtcggcctgcaggctgcggccccgaaggcaggatttgtggagagatgattcgcgagccttggaggaaggatgggctgtgcgtgcgtgggtgcgtgcgtgtgtgtgtgtgtgtgtctgtgacttttgtatgtttatgtgagactgcgtacgtgcgcgcgtctgtgtgtgcgcgcgcgcgtatatgtctgtgtgtgtgcgtgcgtgtataatttctaaatggacgtcaccttacacatcacaaggttaaaaaatgacccctgggctgtgccaggccaagcacgaagagaaagccccgcctgaaactgcctggaggccccccggctgtcactctcgccacattccgtggagtatgtggttgcaacttctgtcactcaaggtctgatggcggggagattggagccgtatccaatcagcgcactggagtgaaaactgcccaatcaggcacgcagccagagaggaggcggtggcttccgggatgtggcgcgggtctttgcgtctggctactaccagaccgcgggttaggggcttcatctctctgcgttctcagttgtgggaggccttggtgattcggccacagctcagcctccgtcgctctgtgacctgcgggtattggatgattggtagctaagactcccgaatacttcagaagtggggaaatggtgagtgtgcggggcagggcgtcccaaggctgaggaggtctcatcggagctggcgggaaatggcggcgggaccgagtctgcgaacggagtccccgctgccgccgctcagccctggggcctcagtaccctccggtgagggacctgggctcctgtcggtccccgcacagcggctctggcccagcctgcagccctccttgtgcagctctgcgcccgcagccccgcaccttccccaggctgtggggtgaggagtagcttatctggaagccgcccgcgcggcgtgcgcgatgccggcgtgggaggagctgtgggagaagctgtggtctggggatcccgtccctgctttaccctgttcggaatgagatcgaggccccatcaaaacagagttcatgtgagcaaatggggactcattaatgggacagcgccggccgtggctcgtg

SEQ ID NO: 40139 - DNA, 30 bp, Homo sapiens
  chr4:468025-468055
  hyper
gggtccaggcttcacgccctcaggctttga

SEQ ID NO: 40140 - DNA, 110 bp, Homo sapiens
  chr4:568245-568355
  hyper
tctgaattaccagctgctctgcgtctctgtctgctcttcctccgtgggaagtcgccgtcctggggcgctcgctctgtccccctcgcctcggaccaccaggcagagcagcc

SEQ ID NO: 40141 - DNA, 100 bp, Homo sapiens
  chr4:569335-569435
  hyper
gcccggggccgagccggggctcgaacctggcgcccgcgggggcaggcagtagtgcgagtacttgcgctccaccagggacacggtgtcgccgtcgatcacg

SEQ ID NO: 40142 - DNA, 272 bp, Homo sapiens
  chr4:569460-569732
  hyper
cgagcatgaagaccaggacgccgagcagaagcaggttctggctgctcaccggccccggggccccggccgcggcccccgactcgcccggcgtggcctcgggagcgcctgccggcgccgcggggacccccaaacccgggcccggttccgaccccgcgaggggcgcgtcccggggtccgcagcagagcagggcggcgccgagcagtgagaggccggcggccagcagcagcccggagtagaaggcgccggcggcggcccccaggcggaacggctcc

SEQ ID NO: 40143 - DNA, 30 bp, Homo sapiens; identical to SEQ ID NO: 3085
  chr4:570346-570376
  hyper

SEQ ID NO: 40144 - DNA, 866 bp, Homo sapiens
  chr4:570830-571696
  hyper
gggttgttcaagggatggggacgatcagggtctctgggaagtgctgacgtgtgcgcgtgtgcggtgtgttgcttgtgggtgcgtgtgtggtgtgtgcatgtgtgtgcgcgcgcgtgtgtgcggggtgtgccgtgagcgtgtgcccgcggttcgggggatgagtaggggcgctgacttttaggaccagccatttgagtcaagctggagacgacgtcttagaacctaggatgagtctcgtttggttttagtctgcaaagctcgtctgcatcagacaggaattttccccagacgcgggtgcacgtgaattaattcatcagaaggcggttcacggcctgagtgagggggacgagggcggcgaattcctccgcctcattcctaccctgacgattcgaggtgggtgagaggaaggcgtggggcggctgggtgcgtggggtgggggaaggtcacctcttcggcctctctgggccctccagcctcttcctgagaggagctcgcctcggccccttggttggggggatgggagcgtctccggaaggccctcggccgagcagctgggcctgcacccctggtcccttccagttcgtttctgctgcggcggcaagaggctggggagccgatgactcaccctgccggctaattgcagcgttaaataactttgcgccggattcggtggctgcagcagggaacgcgctccgggcgccgggggaggtggagggacgccctgagaacgcacctccgtccctgtcaccagccttagcaagttctggcctgtggagccgtcatccagagcgcacagcttcatgcccttgaagggcgcagtgtgtcccgtggtgcccggtgggcccggacagagaccccagaggctc

SEQ ID NO: 40145 - DNA, 30 bp, Homo sapiens; identical to SEQ ID NO: 3086
  chr4:657827-657857
  hyper

SEQ ID NO: 40146 - DNA, 227 bp, Homo sapiens
  chr4:667539-667766
  hyper
gagctgattccactatcggggtcacgctcggtggaggacacggtcctgcagcctcgcatgcgtcccaagcccccttccagagctggagttctccaaatagcacaggagctccacaggaaagccgagcagaccccgccccggccccgcccgcggtcactcactgtagcgcgtggctccgtaggccacaccgaggaacagggcggagtagcggccgagctgcgaaagag

SEQ ID NO: 40147 - DNA, 31 bp, Homo sapiens
  chr4:699369-699400
  hyper
gtcgctctcctgaccacgcccctcatggccc

SEQ ID NO: 40148 - DNA, 30 bp, Homo sapiens
  chr4:699935-699965
  hyper
ggactccgggaggtcgaagaccccagccca

SEQ ID NO: 40149 - DNA, 31 bp, Homo sapiens
  chr4:781538-781569
  hyper
tcaatacgcctccccacgccacactcctcca

SEQ ID NO: 40150 - DNA, 317 bp, Homo sapiens
  chr4:785954-786271
  hyper
cgcagggctgcgcatcggaatgcgggcctaggaagcccgccagggctggcgctgtggtcaggagcaggaggggctgggccccacagagggagcccaacccggagcccccacccctcacccctccgccactctgaagcccccaaagggtaggaggcccagggggacgcccgcccctcttccgggcagccccttccacccaggcgggatctgggtccccgctggactcagggccgccttcccgcaggcggggccggcccggcgcgcaccttgtctcggatgccctggcgcacggcctcgcgctccgcctccatcttggc

SEQ ID NO: 40151 - DNA, 30 bp, Homo sapiens
  chr4:789490-789520
  hyper
cacagcggcacaggcggataaaccctctgg

SEQ ID NO: 40152 - DNA, 298 bp, Homo sapiens
  chr4:819436-819734
  hyper
gaagcgaggaggaggccgggcgcgggccgggaccgcgggggccgcttcagcaccgcggcagtggacagcgcccgccccggaccccgcgcgcgcggagcccgggagagaaacgggggctgcggggagaagccggggtcggggggagaaacgggggccggagggagaggccggagccggggggagaagccggagccggggaggagagacccggggagcggaggccggggggaggagctgggcgaagccggggccgcggggagaaggggggccgggaaggagaaaccggggccggcgggag

SEQ ID NO: 40153 - DNA, 31 bp, Homo sapiens; identical to SEQ ID NO: 3089
  chr4:824547-824578
  hyper

SEQ ID NO: 40154 - DNA, 310 bp, Homo sapiens
  chr4:966932-967242
  hyper
ctcaggctcccgcccacggggcagaggcagggctgcagccgggtaggcatcgggcccgggcgctcaccgtcgcacaggaagccggccagcccccagatgaagtcggagcagaggtggcagaaggtgggcttggtgagcgtcaccttccggaagctgtgtcccggcgcggcagcggggcccggggctctgacgcccgcccgctcgggtcccggccccggccccggccccgggcgcgcgcggcctcctgagcccagcacggggctgcaggccgggctgccggggcgcggggagccgccgcccagccaggcgc

SEQ ID NO: 40155 - DNA, 118 bp, Homo sapiens; identical to SEQ ID NO: 3090
  chr4:995875-995993
  hyper

SEQ ID NO: 40156 - DNA, 74 bp, Homo sapiens; identical to SEQ ID NO: 3091
  chr4:996100-996174
  hyper

SEQ ID NO: 40157 - DNA, 361 bp, Homo sapiens
  chr4:1004428-1004789
  hyper
cgggatgtgggcaggccgtgaggtttgtgttgcaagactgggaggcaggatgaggggaggccatggggcggctggaggtgcggcctgggagccctgcgtgctgggccctgggcagggacggcaggcgaggcgtgtggaggaagagccgcgaagagctgggcgctgtcttctccacgcctccgtttcttcatctgctcctggggccgcctgcccggtagcggagattgaatcgcatgttgacgtctattacgatgattaatgttcttgtcattcccgtcactagcaggtgagaggctgggaggcctcaggtgggaacatacctttggccaaaggcaccaggtaacccgaacgccccggggag

SEQ ID NO: 40158 - DNA, 30 bp, Homo sapiens
  chr4:1006225-1006255
  hyper
cgtgttagtgacggcgcccccaatgtcccc

SEQ ID NO: 40159 - DNA, 31 bp, Homo sapiens
  chr4:1036591-1036622
  hyper
acacacaacccacccccgcacactgacacac

SEQ ID NO: 40160 - DNA, 30 bp, Homo sapiens; identical to SEQ ID NO: 3094
  chr4:1037600-1037630
  hyper

SEQ ID NO: 40161 - DNA, 30 bp, Homo sapiens
  chr4:1040647-1040677
  hyper
tccccgagcccttcccgagcccttccggag

SEQ ID NO: 40162 - DNA, 30 bp, Homo sapiens; identical to SEQ ID NO: 3095
  chr4:1049638-1049668
  hyper

SEQ ID NO: 40163 - DNA, 1090 bp, Homo sapiens
  chr4:1165512-1166602
  hyper
tctggtgttagagtctcccgacgtcagcacgccccagactgggaagcgccgccgtgcagctgtgcggggggctccggcgccgcagccctcctggtggagcaggaggcgaggagggggctgtacttacccagcagcgaagaccactgcgcaggggggcggaacagggggtactgcttggggaaggccgtctggctccacttgcccgtgaaggtgatgctgtatttggccagggctctggcggaacagatggactctcccccaagaggctggccggcggcgccgagagtggccaggaggagagcgcagagggccttgcccagggcggcggccgggctggggttttccatcacctgggagcacagaggggagcagccgcgcgctggcaccgtcgtggcagcctcggggtggaaagccgagagggctgcggcactttgggctctgaggacggccccgagcacccgcgaccccctccctgctccgcaaagctctcctgcggtgcttccgagacccccatcagcggaatggacggcgcggggttagatcgcccgtgcgcctgcgagcgaccaggggtaacgggcaggttttcagtccgagtccctgcagcttgccgggccggtctgggtgcggcctccgggatgccttcgccgtcgcagggacccggggccttggccgactggctgcccccgggactagacccttaaagctcggtcgcagccagtcctgggggtccctctggaggtgccacaaggttctgggccgcggggaaagtgcaggaggcccgggccctctctgggtgtcccgggggcacgcagtactcacccggcaggagcagcgggagcgcggccggcagcggtcgggtcccagccagagcccggagctcctatttaagcccgaggccggcgccccgggccggccaatgaggctccagttcctcctgtcttcgatgctgcacggcctggcctccagcgagaggcagataggacgtgggagaaaggaggagaaggggctgcgggggcggcgggggctgccgctttcccaactcgccctgcccagcgaccttccccgggtcggatcaccctcttcccctggc

SEQ ID NO: 40164 - DNA, 141 bp, Homo sapiens; identical to SEQ ID NO: 3096
  chr4:1243420-1243561
  hyper

SEQ ID NO: 40165 - DNA, 31 bp, Homo sapiens; identical to SEQ ID NO: 3097
  chr4:1310814-1310845
  hyper

SEQ ID NO: 40166 - DNA, 1999 bp, Homo sapiens
  chr4:1331725-1333724
  hyper
cccagagggcagtgagtgtttcgcgattgctgctggtacctggctgtgccggggtatgaatgagactcaggccccctcccttgtcccctctttgtggaactctgggcgagagggctggcgtgcttgcccactgcctgttcctaggtgccagcagaacgtccctgctgggtggctcttgtcctgcctggagaggttgcgtggccggggagagggcggcgggcgacggagccactctgtgcctgtggtcctggtgctggaggccggggtgagaaggcgcaggcttcttgtctccaccgaggcctcagtggggctgtttagctgtcgagtgcagcacttcctgtgcctcgaaagacagccccgtgtagtcagcatggcgcccacatagccagaagggcacgcagcccagggcagagtggccacagggggctgggctcaccccggctgccctgagtggcccccaacccttccttgacccgatgctcagacagtgctacaaggaggacggcagctccaagagccctgactgccctgtgtgcagccgctccctgaacaagctggcgcagcccctgcccatggcccactgtgccaactcccgcctggtctgcaagatttctggcgacgtgatgaacgagaacaatccgcccatgatgctgcccaacggctacgtctacggctacaatgtgaggggggcagggcaggggggccaggctggcacgcatcgccatcgggacagggctgtgtgggacgggcagggcaggggggccaggctggcacgcatcgccatcgggacagggctgtgtgggacgggcagggcggggggccaggctggcacgcgtcgccatcgggacagggctgtgtggggcgggcagggcagcggggccaggctggcacacgtcgccattgggacagggctgtcctctcgccccaccctgccttagcttcgttcgaaatggatgaaggggtgggaaggacaggcgaggtggccccgggatttctttggcaggtgtgccttcgggaaggaactttgcctgagaggatgagtcattccctggtggttcattgtggggattttccatggaaatccgtgtgtacgttgtagtcgcttgccttaatgcattcccggttttatttttcagtctctgctttctatccgtcaagatgataaagtcgtgtgcccgagaaccaaagaagtcttccacttctcacaagccgagaaggtgtacatcatgtaggccccacgtcgtgaagcgcacgcctcggggacgggctgcagtgggcggggaggccacgccttcctcctgtcccacgctccagcctgccgcggcgtttctgtttcttgcgaccaaagatccgtgagcaacgataaatactcttaggaagagagaaaataaggtttcataagtttgtacttgaaaacatttggattggtaggattttgtaacacgtcaaccatttgatgcttctgaaaagtactttcaacttgcgaaggaaactcttctttaaagactgacctaaacaccgagggaaacttaagaacgtttaaaatataggagtccgtgatttccctgtgttttcagtttctttccttctgtgaacgatgagacttggagaacgggctggtccttcaccacttcctgttggccctggcctggccggggaaggtggcagcggcaccggactgacctgcagtgacccgcgatgccgcgccacgagggacacttatggcttcattcgagagctgctgccaaaacgcctggcgccgccaccgtcgggggctggcttcgaggacgcccgcctgcctcgcgggtcgtgtccgcgggactgtgttcgtacgtgcatagtttcgatatcacatcgcggggctgtgttcgtagctgcgtcgtttcgatatcacaccctctgtgtgccgccttacttcctgcttcgagaatgtataacgtggaaatccacgggaccaaatttctgcagaggccttgccggatggttccataactgtaga

SEQ ID NO: 40167 - DNA, 725 bp, Homo sapiens
  chr4:1395971-1396696
  hyper
gcccaggcagccccttctccccggggaaaacaggcaggcgcttcttcctccaggcagtagccgaagctgacaccgcccccaagctgacacgcctagcccggtgctcccttgcggggctgtggggcaggggagtgggaccggagcaggctgcaggggtggggagcaggaggcggaaaatgccgcggccccaccagctccatggctaagaggagaggcgaagaggaagcagctggtcactttccgagacctgtgatcttttttgggacggggagggggcggtcagggaggtgacgctgggacctgagcctcagccagcttggcgggtgagcccctgcgctcagcccctgcgcccacgacgacgggcaggcaccagcagagtggcctgaattccggccgggggacgccaggccggtgggaaaacgggctggagtcccgctcaaggccaacacccgaggagccttggtccccaccggagaggattcacgggtgggcccggccgggcggagggcggcgcgggagcctgggagaagggggcgcggccgcctgcggtttattgattgagtgaagttccgcaaagtgcttcgcagcgggccgagcccgcgggagccacctgcccggccccgacgcgcatggtcatttataaatttaaaactcttccgtagcaaccggttatgtacagagtcaacgactggaatcgtagaaaacagccgggcccggcagcggcc

SEQ ID NO: 40168 - DNA, 97 bp, Homo sapiens
  chr4:1396923-1397020
  hyper
gggcagccccgtgccaggcccggcccccggtcccggtccgcccccgccgccggtcggagcgctggtgtcggcgcccgggttctgcttcttccacttg

SEQ ID NO: 40169 - DNA, 30 bp, Homo sapiens; identical to SEQ ID NO: 3100
  chr4:1397842-1397872
  hyper

SEQ ID NO: 40170 - DNA, 30 bp, Homo sapiens
  chr4:1399211-1399241
  hyper
ggatatcgacccgaccgggggcgcgggccg

SEQ ID NO: 40171 - DNA, 47 bp, Homo sapiens
  chr4:1399585-1399632
  hyper
ccctgcagtccgggtcggatggaggccacgggtgggctggtgcggac

SEQ ID NO: 40172 - DNA, 153 bp, Homo sapiens
  chr4:1399665-1399818
  hyper
cgtgggccagacccaactcgccacggtgtcccagggtcgtaaacgcatagaagcctccggtcccccgtccctgcgacctggtgccgggcgcatcctactcactcggcggctcagctccggcggctccgactcccccggcgccggcgagggcgc

SEQ ID NO: 40173 - DNA, 164 bp, Homo sapiens
  chr4:1400175-1400339
  hyper
gaggcggcggtagcgcgggaatgtccccaggagcctcggggccgctagcgctcatgccggcctcccgccgctccggcggctcgggccccgccacctactgggctcccatccctggcggcccccgcacctccacacgaccccgcgcaggcggccgctgctccgct

SEQ ID NO: 40174 - DNA, 30 bp, Homo sapiens; identical to SEQ ID NO: 3101
  chr4:1401839-1401869
  hyper

SEQ ID NO: 40175 - DNA, 178 bp, Homo sapiens
  chr4:1402244-1402422
  hyper
gagccctcacaaacgcgctggcatccctgcatctccctcttccccgccagcgccagcgccagctccgcgctggtgttggttcctctttcactgtttcccgaggaggggcacaccagacactttccagattgctgcgccccctccccaggagaccgctgggtggcgggcgaggcctggg

SEQ ID NO: 40176 - DNA, 30 bp, Homo sapiens
  chr4:1404431-1404461
  hyper
cgtgttcagcaccgcggacagcgccagcaa

SEQ ID NO: 40177 - DNA, 30 bp, Homo sapiens
  chr4:1714964-1714994
  hyper
agctgacggccccgcggatccagccaacta

SEQ ID NO: 40178 - DNA, 30 bp, Homo sapiens
  chr4:1734223-1734253
  hyper
tgcatttggtaggaattgatggctgagttg

SEQ ID NO: 40179 - DNA, 30 bp, Homo sapiens
  chr4:1750427-1750457
  hyper
cagtagcaggtgcgcgtgccacctgtgccg

SEQ ID NO: 40180 - DNA, 20 bp, Homo sapiens
  chr4:1794935-1794955
  hyper
ggggaccgggcgggagcggg

SEQ ID NO: 40181 - DNA, 342 bp, Homo sapiens
  chr4:1794972-1795314
  hyper
cgcggaccgtcccccactggctgcggcgcgcggggcagcccaggctcagtgcgcggtggcggcggcgtcgcgggcagctggcgccgcgcggtcctgctctgccggtcgcacggacgcaccggcgggccgccggccggagggacggggcgggagctgggcccgcggacagcgagccggagcgggagccgcgcgtagcgagccgggctccggcgctcgccaggtccgtgcttggggccgggcaggctcgcggaggggtccaacggtgctcgcggaggggtcggggcgcggctgtcgcggaaccacagaggtccctgcagcgggccgggccggggcgcgggcttc

SEQ ID NO: 40182 - DNA, 35 bp, Homo sapiens
  chr4:1795555-1795590
  hyper
gtagtctcccgagcggcgcccgcctcccgccggtg

SEQ ID NO: 40183 - DNA, 1181 bp, Homo sapiens
  chr4:1795964-1797145
  hyper
agctaccctccaagtgcgaggccaccacggggagccaggctgggggttggcgtccgcagccccgatcccctgcgactccctagccctggcctgtcgggagggcgcggggggccccatttccacgattcccgctgttgttattcgggttctgcgcagacggaaagttcccattgttggcgtccccctcccccgggccccagtttgtggccagcttcggccaaggcgagagaccggacttctaagggtgggtgtgcgcgtcagcgaagcccggcccctgcccgcccgaagaggcagcagcctccagcgtccccgctgccgaccctgcccctgcctgggggccgagggcgcttccccgtgggtgcgcgccgagctccaggcaagcgaggggcgcgtgtcccagcgtcgcgggccctagactgggctggcggtccaggtcccgcgggacgtcgagggtctgaagggaggtcccaaggggcgaggggaggggaaggggcgcccggccggacctgcacacgcgccgcggttcctcgtgggccgggccgagagctccggtgccgccgccgcgtacacccgcagccggctccggacgggcgaggggggcgcgcacagctcagcccggcggccgcgcggagggaggccttggcccggtgagctcgcgccccacccgggccgaggcccgaacagccgcttctttgtacctcgacgcggccacagaccgcgcattgatggcggctcggcggctcgcggggaggtgtgagcgaccgcgggcgcggcgggccggggagggcgcctggagggccgaggcagatggcgtccgccccgcccgcgcccccgcgcccctttctccgtcggcggctgcagcctcccggaacaatgtcattttttttatgaatgaaagtggcccggcgcttgaatgtgcgtgtcattcagcggcgtgacaggggccgtcgggaggtcagcgcgcgcttttagcgtctgctcgggcggccccgcttccaggggtgccggaggggcggccgcggggggagcttggctttcgcattctcattcagataaagatattactccctacggcccgggaatgtcagccagccccggggaagggcggcggccaggctgcggagcctctcctggaccccctgcgggcgcgcggggcctcccccagtcgctcctggaacgcc

SEQ ID NO: 40184 - DNA, 30 bp, Homo sapiens; identical to SEQ ID NO: 3106
  chr4:1811808-1811838
  hyper

SEQ ID NO: 40185 - DNA, 41 bp, Homo sapiens
  chr4:2010688-2010729
  hyper
tgggggaaagcgcgcgccgctgccccggcatcttatgaaga

SEQ ID NO: 40186 - DNA, 30 bp, Homo sapiens
  chr4:2011066-2011096
  hyper
gtgcaggtgtcaagcgccgcagacttgctg

SEQ ID NO: 40187 - DNA, 55 bp, Homo sapiens
  chr4:2042203-2042258
  hyper
acgcctgcggcccggcgcgtccccggaggcacgtcccccccagggctccgcggcc

SEQ ID NO: 40188 - DNA, 39 bp, Homo sapiens; identical to SEQ ID NO: 3107
  chr4:2043631-2043670
  hyper

SEQ ID NO: 40189 - DNA, 278 bp, Homo sapiens; identical to SEQ ID NO: 3108
  chr4:2043956-2044234
  hyper

SEQ ID NO: 40190 - DNA, 83 bp, Homo sapiens
  chr4:2060071-2060154
  hyper
cttcaggtgacctcagctgcccggctggccccaactccaccgcacaacgcagactgcgggtccccaggcctggacccctggcc

SEQ ID NO: 40191 - DNA, 155 bp, Homo sapiens; identical to SEQ ID NO: 3110
  chr4:2060173-2060328
  hyper

SEQ ID NO: 40192 - DNA, 30 bp, Homo sapiens
  chr4:2060919-2060949
  hyper
ctcccccacccccgcgatcacatggtgacc

SEQ ID NO: 40193 - DNA, 601 bp, Homo sapiens
  chr4:2061492-2062093
  hyper
ggccgagcaggaggcggcgcgccgcatcttctacgacggcatcatggagcgcatccctaacacggccttccgcggcctgcggcagcacccgcgcgcgcagctgctctacgccctgctggcgggtcagtgcgccgggcccccggctgccgcagtccctcgggccggcgcggagctcccccgccccggcgtccacgcggaccccgcgcccggctcccggggaccagcctgggaagccccccgctttctgccgcgccgggccccgcgcagggctggctatgggcgtggggatgggcgcagggccccgagcgggccggagccggggagggtccggggtccgcacctgcgtccccgccgcgcagccccccacccccaccgcctcccctgtcccctcccgggcatcctgggtgggggcgggtgccagggcaggtagcgcccgccgcggctgggccccggcgagtgcctaaatataatctgcgggcgggggaggccgcctcccgctcggtgctaatttatgaggggaagacagccggcgccgcggggggtgcgcgcgcctggcacagccggggcggtcgcagagggcggccccttcagcgtctttggg

SEQ ID NO: 40194 - DNA, 30 bp, Homo sapiens; identical to SEQ ID NO: 3113
  chr4:2062493-2062523
  hyper

SEQ ID NO: 40195 - DNA, 954 bp, Homo sapiens
  chr4:2418949-2419903
  hyper
ccaagatctcagggcccgggcctccccgctgcgccggccccagggtgccaccctcggacgcccagatgcgccctggaccctgcgccgggatcctgaacaccgccgcgccttcatcccgcgccgagcgcgcccggccctgctccggctgcagcgggcacgagccccaggcgggcggcggggacgcagcgcccgcagtgcgactggcgcagccgctgaggcacggggcgcgccgcccggaccccgaccccgcggcgctaggagaggcgcgggcgccggctggagagccgcacctcccgccccgccgaggctgctggccacgggcgcgctcgccccaagggccgggcggaggacctgtcccggattccagaggacgtgggtggggaagggacaaggatagggacaagggaggggacgcgaactgggccgaggtgtgggtcagtcctggttcgggaagggaggccgttggcagggccatcaggatcctctctggacatggaaggacgggtctgccctggacccagggattgggaaatgtgggttctctcagaacctggggaagtggggagagggtctgttctggagtgcggagggagatctattccgggcccaggacaatgggggtgggggcaggacgggaatgagggggcattcctggtgcagggaggggagacggagaagtagtagggggtctgctccgggcccgcgggctggggaccacgaagtgtaggagggcaccgtccaggaccgggatgaggagggagaggggcccgttgtggccctggatagagggggagggaaagtgcgccccggcccgagaggaggagcaggagggtcagtcctggacccgggcttaggaagccgggagggaggttcggatccgcctcagagacagggcgatgaagatctgtccaagtcttggagtggagggaaggatgtcggcggtgggggaagagg

SEQ ID NO: 40196 - DNA, 30 bp, Homo sapiens
  chr4:2471010-2471040
  hyper
ggtttaggcagcttcgcggcctacagaggc

SEQ ID NO: 40197 - DNA, 31 bp, Homo sapiens; identical to SEQ ID NO: 3117
  chr4:2760070-2760101
  hyper

SEQ ID NO: 40198 - DNA, 30 bp, Homo sapiens
  chr4:2765881-2765911
  hyper
cacgcgcccagaaccgtctggtgacccagt

SEQ ID NO: 40199 - DNA, 30 bp, Homo sapiens
  chr4:2936116-2936146
  hyper
gggtgcacaccggacgcaggagcaccccca

SEQ ID NO: 40200 - DNA, 30 bp, Homo sapiens
  chr4:2965188-2965218
  hyper
cgcgcccgcaggctcggcttactcgccgat

SEQ ID NO: 40201 - DNA, 31 bp, Homo sapiens; identical to SEQ ID NO: 3118
  chr4:2965932-2965963
  hyper

SEQ ID NO: 40202 - DNA, 30 bp, Homo sapiens
  chr4:3039193-3039223
  hyper
gctcggtttgctaccgggtgtgtctccatc

SEQ ID NO: 40203 - DNA, 169 bp, Homo sapiens
  chr4:3076403-3076572
  hyper
gggggctgccgggacgggtccaagatggacggccgctcaggttctgcttttacctgcggcccagagccccattcattgccccggtgctgagcggcgccgcgagtcggcccgaggcctccggggactgccgtgccgggcgggagaccgccatggcgaccctggaaaagct

SEQ ID NO: 40204 - DNA, 155 bp, Homo sapiens; identical to SEQ ID NO: 3119
  chr4:3445266-3445421
  hyper

SEQ ID NO: 40205 - DNA, 90 bp, Homo sapiens
  chr4:3464989-3465079
  hyper
cctgcccgcgggcccgccctcctggcccagcccagggccctgcgagctattttgaaagtgaccctgggctggggcgccggggcgagcgcg

SEQ ID NO: 40206 - DNA, 30 bp, Homo sapiens
  chr4:3482492-3482522
  hyper
caggcagcagggagcgccttcagcagtttc

SEQ ID NO: 40207 - DNA, 31 bp, Homo sapiens; identical to SEQ ID NO: 3120
  chr4:3573649-3573680
  hyper

SEQ ID NO: 40208 - DNA, 49 bp, Homo sapiens
  chr4:3768063-3768112
  hyper
tccccccgcagccgcgtcgccgctcgctccgggcgcctcctgctctgca

SEQ ID NO: 40209 - DNA, 30 bp, Homo sapiens
  chr4:3873083-3873113
  hyper
actggagggcgatcgcgggctccaccggga

SEQ ID NO: 40210 - DNA, 173 bp, Homo sapiens
  chr4:3873315-3873488
  hyper
ctgcggagaaggtgccgcacctgcgcgaccgctgcctggccggtctagagcccaccgcggtggagcgtcagccctcctgagtggcggttcctgtgggcgggacgcctgggttgccatggagaccgagagcccagccccgcggagccccgggtgtgcaccgggacaggaagccg

SEQ ID NO: 40211 - DNA, 30 bp, Homo sapiens
  chr4:3873991-3874021
  hyper
tgaaatggccttaacgcacggtacaaggca

SEQ ID NO: 40212 - DNA, 30 bp, Homo sapiens
  chr4:3882405-3882435
  hyper
gatctgcaaactcacgcccgcccagctcag

SEQ ID NO: 40213 - DNA, 30 bp, Homo sapiens; identical to SEQ ID NO: 3121
  chr4:4250036-4250066
  hyper

SEQ ID NO: 40214 - DNA, 30 bp, Homo sapiens
  chr4:4292479-4292509
  hyper
agtagcgcttaagacgacagagcccacagc

SEQ ID NO: 40215 - DNA, 600 bp, Homo sapiens
  chr4:4387682-4388282
  hyper
tcctcctcgtccagcgcctgacagggcccagctcctggcccaggtgcccaggaggcaccgatccccgcagccggcctcctcccgcgcgggctccactcccatttcggcctcgcccccacaccccatagtctttcatccgtgagtcctgcaggcaggacgggttggaggtctgcaaacaggaccctctctgggaagccgcgacagcggctgagctcggggtttgggggcgcaggtcgggctagaaccaccccccttctctccgcgtccgggcatcgtcccagcggcccctcctctgtgcccaggatgctcgggcggcggctgcagtgggacctccaccttctctgccaaccagagcggaggaacctttccgcctccctccaagcggcgcactgagcgctctttgcctagaacgacttccctcccgctgcctggggcagcctcaccctgggcgcccacaccccagccctgggagagcgctactccgcctcccgcaccaccgaaaacctcctcctcctttacgggccgcgcctcctttacgggccgcgccccctttatacgcggacgcgccctcttttggtcgccccctccccaacccagcac

SEQ ID NO: 40216 - DNA, 30 bp, Homo sapiens
  chr4:4388490-4388520
  hyper
gccgcccggggtggcgcagcccgcagccct

SEQ ID NO: 40217 - DNA, 30 bp, Homo sapiens; identical to SEQ ID NO: 3122
  chr4:4389100-4389130
  hyper

SEQ ID NO: 40218 - DNA, 30 bp, Homo sapiens
  chr4:4389653-4389683
  hyper
cgcgggatgctgggcgggggaggggagccc

SEQ ID NO: 40219 - DNA, 30 bp, Homo sapiens
  chr4:4389903-4389933
  hyper
ccgaggcgggggagcgttctccttggtcag

SEQ ID NO: 40220 - DNA, 516 bp, Homo sapiens
  chr4:4854675-4855191
  hyper
tgcctgggccgacccggcgctttactgcttctcacgaaggtgcgccggctgctccagaaatcgcagactgcctccaggaagaacttgctggagtcacagcagcttctcagcgacttgacagcagtgattcagacttcaacttgggcggaggggcgggggaggagaaagagatttccagagaaaacgactgagcggtagggaggggaagagagaccgagccacgcgcctcgagaagcagtgcagagagcggaagagacagaggctgcgagacctacccacagagaccaagagagacgctcggaggggagaccgccttaggcgcagagattcagaggcagacagacaggcagacagaaggatacaggaaaggaatgtcgccgaaaggcagggacaaacctgagtcccagaaaaataagagacaactcccacacaccaggctgtccgcgggccgccttgtcacagaaaggcagctccccagccccgcagagtcccgacagctgcccccgcgaaggtggg

SEQ ID NO: 40221 - DNA, 133 bp, Homo sapiens
  chr4:4855230-4855363
  hyper
cgcccctcctttccagcctcagctctggcctttctcggcatccccagcttgccttcagtttcactccatatctgggtctctcagaggcctcgggaggtcttccgttctctctgtcgccgtgtccacggaagga

SEQ ID NO: 40222 - DNA, 30 bp, Homo sapiens
  chr4:4855614-4855644
  hyper
aagaaggtggtgggcgggagggggaggagc

SEQ ID NO: 40223 - DNA, 198 bp, Homo sapiens; identical to SEQ ID NO: 3124
  chr4:4856358-4856556
  hyper

SEQ ID NO: 40224 - DNA, 768 bp, Homo sapiens; identical to SEQ ID NO: 3125
  chr4:4856593-4857361
  hyper

SEQ ID NO: 40225 - DNA, 152 bp, Homo sapiens; identical to SEQ ID NO: 3126
  chr4:4857407-4857559
  hyper

SEQ ID NO: 40226 - DNA, 28 bp, Homo sapiens
  chr4:4857620-4857648
  hyper
cgacaacaaatgccgaagtgagaagtca

SEQ ID NO: 40227 - DNA, 236 bp, Homo sapiens
  chr4:4857870-4858106
  hyper
ccatcttcaggatccgaaatgcagaggccctctacttgggggcggggagtgctttaggatgcctgaaaatgaggggagatggagcgagaggggaggggagagaagtctagaggatggaagcggagcgccagtccccgagctttatctgctggggccagccctgcccttgccaggcatgaattactgcccggctttctcggctgcagcggcagcgcagagaaatgccgggggtacaa

SEQ ID NO: 40228 - DNA, 699 bp, Homo sapiens
  chr4:4858130-4858829
  hyper
cgagataacaggctcagccccagggcctgcctgctcgctgaacccctgggccgggaaatcggtaaagtcctagacaaaaaataactcagagaagtctccctctcactgcccctgtaactcgtggctttcctcccgcgggaacaaacaacgccctgggaaacaggcagacattttatttcttttatctgactcctttctcttgagactgccggcacctttctttctctcgcaatccaggggcagagcaatgggaaagccccgcgcttttctgacacggaattgagtctgaacccccttctctgccgatgcactcttctcgcctagcaacgtttacacgcggttaacctgccgcgcggggcgacagcagacacgaacccaggccgaacctataaagaagacaccgtggcgttcagacccggctcgggaagccgaggggctggctgcggggccggtgctgcggggccaggcgatttgctccccggaggcaggggcgcgacttcaagggcccgtgcgccgggtgcagcctttgatccggccgccgctggcgccttaaaacaacatcctagtctgcctattaggcgcgctgaggaatcgtgacacattgtttatccccgcaattagcgatgcggcccttttcaggccgcccgcccccgggccccccgcccccccccccccccccgcggcggagtccaggccttg

SEQ ID NO: 40229 - DNA, 1081 bp, Homo sapiens
  chr4:4861383-4862464
  hyper
gccgcggtagggcccggagccggcgagtgctcccgggaactctgcctgcgcggcggcagcgaccggaggccaggcccagcacgccggagctggcctgctggggaggggcgggaggcgcgcgcgggagggtccgcccggccagggccccgggcgctcgcagaggccggccgcgctcccagcccgcccggagcccatgcccggcggctggccagtgctgcggcagaagggggggcccggctctgcatggccccggctgctgacatgacttctttgccactcggtgtcaaagtggaggactccgccttcggcaagccggcggggggaggcgcgggccaggcccccagcgccgccgcggccacggcagccgccatgggcgcggacgaggagggggccaagcccaaagtgtccccttcgctcctgcccttcagcgtggaggcgctcatggccgaccacaggaagccgggggccaaggagagcgccctggcgccctccgagggcgtgcaggcggcgggtggctcggcgcagccactgggcgtcccgccggggtcgctgggagccccggacgcgccctcttcgccgcggccgctcggccatttctcggtggggggactcctcaagctgccagaagatgcgctcgtcaaagccgagagccccgagaagcccgagaggaccccgtggatgcagagcccccgcttctccccgccgccggccagtgagtagccagaacccaggcgcagagggagggggccgggtgggggccgggtggggtgtgggacccgagggctcctggtggcctccggcgcctgcgtacctgcagccggtgctagggagccgtgggctgcaaggccgggtcttgcgcctccctccactcccacccaggaagaaggttccagacctcctcgccttggcccagagacgctgcgggtgggagttaacggataggacaccgatgtctgggcaccctgtcctcctgcccccaccaaacgacctcaggggtccatgatccctcatctgatcccaaactctgtttcatcggcttcaccccagcggatgaatgtgtgtggtgcggtatcttccctgc

SEQ ID NO: 40230 - DNA, 504 bp, Homo sapiens
  chr4:4862706-4863210
  hyper
tgggaagctcccaaacgtctaggactgagccattaaagtggactccaggtgcccaaggcggttcgctccaaggcctcacggccccctggctgctctactcagagaacacgctcggagatatttcaggagcacgggaaattcccaagttttcctcgtttcctccgattattttgctcggcataatagcagccagatttcaatggcgtgatgctgaggaatgatttttatctggggattaaacgtctttgaaaggccagtccctccctaagcctaatggccggagaaggtggccccgctctgggttgtcgccgctgaagggagtgacgtttctctcggcgcccgcccctcgggcggcccggcggaaagctagttgggggccaagcgcttcccggactcccggtggcctccagcagggaagaagcggggtgttaacacgagatttcgtttgactcacatcctggtggtctgaaagtccaaaggatcgttgtgttttctttgttttgt

SEQ ID NO: 40231 - DNA, 302 bp, Homo sapiens
  chr4:4867791-4868093
  hyper
ttccttccacttctgggcctccgaatctccccatttttgtttctgtccgtctagcccattctttgccccccttttgtttccgcattccctctctgaacagggtgtgcacacagaaggtgctcgataattgtttgctagatcggagcggcacgctggtgtggggagaacacccagagccacagtcagccgggtccggccggaaatcgcggctgcgcttccggcactgcttctcgtccatcccagtccttcgaactgtgttccctggtttatcaaccgagggcggagtgggcaggggtttcctg

SEQ ID NO: 40232 - DNA, 84 bp, Homo sapiens
  chr4:4868708-4868792
  hyper
gacctggggcgcctcgagctttgagcataggtccgcagggccggggcggttggggaccgggaggctggggtggggctgaagacc

SEQ ID NO: 40233 - DNA, 171 bp, Homo sapiens; identical to SEQ ID NO: 3133
  chr4:4868828-4868999
  hyper

SEQ ID NO: 40234 - DNA, 126 bp, Homo sapiens; identical to SEQ ID NO: 3134
  chr4:4869131-4869257
  hyper

SEQ ID NO: 40235 - DNA, 68 bp, Homo sapiens
  chr4:4869481-4869549
  hyper
cgcacacgaccaacacacgtcatccacacgacataccaacacacaccgaaacagacacacatgacact

SEQ ID NO: 40236 - DNA, 30 bp, Homo sapiens
  chr4:4870111-4870141
  hyper
ttctggctccacgcacgtggggtcaatccc

SEQ ID NO: 40237 - DNA, 30 bp, Homo sapiens; identical to SEQ ID NO: 3136
  chr4:4870467-4870497
  hyper

SEQ ID NO: 40238 - DNA, 982 bp, Homo sapiens
  chr4:4870848-4871830
  hyper
gggctagcgcaccagcggggtgcaataaagatcggcctttgtgtgtgtgtggtgggggggaggagtggggggtaggtagttaaaagcgaattcaaaagcccgccctcaatttggggcctgattaggggcagatggaaggaagggtccccgaccctacgtggcagcctttgttgcacattttacaggcgaggagacagtggtgggatccaagcccgctgctgtgggacctcaggagttgctttctccttcaccagctgggtgcagattttgatgatgcacagggcgcggcctgacagtgcgtgtgtgcgcccaccgggcgctgctgccagagtttgcggggttcagggagcgggaggagggtctgagagaccccaaagcctcccctttgcgagaccactccttgcttcccccgcctggcgctttccataaccctctgcggcgccctgcctctttgttgccccttagatgagctgccccaagggcgggctggactctagtgctttgagtcgctgtttctctgacgatgctgcttttaaaaagaaaaccccgttccctctctgatgactctcgtggcacccgggtggcagcaggggcttctccaccggagaaacagccacatcgactaaaagggaatgtgtgaggcaggctgagaccttgggtggggccccccacctctcgagttttccaagactcaggttccatctctgttaaatggacacaatcctgacccctggcaggtcctgaaagagtagaagggaaggggttctccacgggctgtaccatcacttgcgtccccagttcggtgatggtggtgaggtcatcacagttgttccgcctgcggtgactgcagctgacatgtatgcgcgcttgcctatggatcacaacccttagaatctaagttttccacgcgggttatcccaacgaatcctcactaccaggtgggcacgtgccattgtgacccgtgtcatagactgaagcatag

SEQ ID NO: 40239 - DNA, 70 bp, Homo sapiens
  chr4:4872352-4872422
  hyper
ccgaggcacagagagcgtatgtgacttgccaaatgtcacataggtgtctaagacccggcctgtatttccc

SEQ ID NO: 40240 - DNA, 984 bp, Homo sapiens
  chr4:4872734-4873718
  hyper
aaggctggacagacccggcatccccaattttagtccagcttccttaaattaattcattcggcggggttgaacaagaccagcacactaagaaataacgaattcgggtagagctgaatgcttctaaggggaaaagtaacaagacgggggcaggaagcacagtcggagcctatttttggcggagcggtcaaggcaggcctctcggcggaggcgacttaagggttgagacttgaagggtgaggtggagccgtagtttgaagaaggaatctcccattgagaggggtcggcaaatgcaaaagccccaaggagagctgaggccggcgcggctggaaccggccttaggcgagtttggagtaggcttagcgttttgtgatgctctggcggccacttggaggagaaagatgggggcgaggtagaaggggccgcgtgcccttgtaggagagggaagtgtcaatggccgggaccaggggtggctgcctgagacgtgcctcgtctttggtgattcccctacccccaaatcagagagggttccggaagaaacttcgcagccttgcagagtgaagcatcgccgggacccaaggatgtttctcttccctacggagctcacccggattccttggcgcccagctgcggccccggagtccccgaactcggctgtgccagcccggggcggggccagctgaacctcagttgtggggcggagtccgttgcggacaccctcaccccccgggcaaccgcagctcccaactccgctggctttcccctccctctgacaccctgcgcggctcctgcgacccaggtgcgtgccagctgtaggagcctgctccgcctgccctcctggaacgcagtcatcctccaggccctgcccgcgcccatttcgcggcccaggaaactgaggtgtggaagcctgtgaagggagggactgctacctatcgattcgtaccggatccagaccctgtgctaaacgctcggcgtgcatggtgcccc

SEQ ID NO: 40241 - DNA, 30 bp, Homo sapiens
  chr4:4874026-4874056
  hyper
tgaacagaagcagaacgtgagtccgtatct

SEQ ID NO: 40242 - DNA, 30 bp, Homo sapiens
  chr4:4874533-4874563
  hyper
cccggtgggaaatccggcagctcccgtctg

SEQ ID NO: 40243 - DNA, 192 bp, Homo sapiens
  chr4:5052364-5052556
  hyper
attccctgcagtcccggagagctgggcccgcaggactgcaaggcagggggacctgcctgtccctcagggagcgtcctgggaacccgcgctcgccccacacgtcttggggcgcatctgccgcaccccttacttaggcacccgcaactgtggcgcgtatctcccgatccaggctcccgccgcaggagcccaggg

SEQ ID NO: 40244 - DNA, 1137 bp, Homo sapiens
  chr4:5052780-5053917
  hyper
cttaagaggaacagcgtcggttggagagccagcagacactccactgcccatcccaatatgaatgggcaaatacaggctagcggggagtcctgggactcccttcgcagccggggccgactaaccacagacctaagagcccctctacctctagacctccgtctactgcgctctaaaatatgaacgatgctttcttactgctgggttgtcggaggcggatgtgggatggtgctaacaaagcgcgtagccgaggcctggccatagtgggtgctgacaaaccgcttactgcctgcagggaccgagctcccggccgagggaggagggccgagcagggattcagattcttccgggccgatccctttctcagctccttccgccctgccgccgcccactgcgtgctgccttcgtccgtcccctcctcccccgctccttcccctccttcccctgctcccgcgccgcctcgcgtctcccgcccgctgtagccggcgaggagcgccgcacgttggccccggcgcgaggagctcccgggttcccgggcgggcactggagtaaggagctgcgagcgcagcccgaggcggggcacggcggaaggcgcggcgagagcggggtccctgcgagcgcagtcggaagggcgtccaggagaagggggacgccgtccccgcccctgcacggtgctcggccccctcgggctccgcgcgcggctacaacccggactgggcgcgcccccggcatcccgcatctctgcgcgcgtcccacatcccgcatccggcatcccagcggccgggcatgtagcagcggcagcaacggcggaatatgggcgggaaccactcccacaagccccccgtgtttgacgagaatgaggaaggtaagagagcgagaggtgcgaattcccgcttcgcggggcatccccttcctccaccaccctcggccgagccctgcggggcaccgcatgctgcccggcgcggggacccaggcatggccacttcgcccagcgaatgcagtgtgtgcccgacccgtgccaggcgcggcgcttctgctgaggcaactcctaggtacccagtgccgtttagtagtcgggacggtgcctagcgcgggactggggaggcggcttcagagagttgaacccgaaacctgcacttg

SEQ ID NO: 40245 - DNA, 265 bp, Homo sapiens
  chr4:5709719-5709984
  hyper
caggagtgaactgccctaggtcgaagctcgtaaaatggagagcaggattcgaaccagggtcgctggtgaagtccaagccggcagctgccacaccccgaggaaggtctccagtttccctcgaagctttctggccgtgagcgggatacacctaagggccgcgaagcaccctattcagatcctgccctcccttcctcattctttgcgaaatactaagggtcctccctgccaccgccggtgtagacaaagtcaaaccactacagtcaga

SEQ ID NO: 40246 - DNA, 65 bp, Homo sapiens
  chr4:5710450-5710515
  hyper
ggcggccaggcctgggtttgcttgcgcccaaaccgaatcagagcgggtcactcccctgctccccg

SEQ ID NO: 40247 - DNA, 448 bp, Homo sapiens
  chr4:5712783-5713231
  hyper
taaagttaaaggggtggaaaccgggcccccctccggaagggtccggggctgggaggcgcgtctgtctctgggcatgctcagtgcaggggcagggctggggcgggggtggctgaaagttttgagcggtgatccaggctcctccctccggctcggcgaagcagggaaggggagagaagcaggagtcgggagactgcacaggccagaaagtctgcggagcgggccgcgcccctggcccgcccgggctccaagtcccgcgtcgccgccctggcggggacggtgcagcaggcggcgggatgcggcggggcggcagcctgagcgccccggatggcccgcggcggggcggcctgcaagagcgacgcgcggctgctgctggggcgggacgcgctgcggccggcgcccgccctgctggcccccgccgtgctgctgggcgccgcgctcggcctcggcc

SEQ ID NO: 40248 - DNA, 78 bp, Homo sapiens
  chr4:5713393-5713471
  hyper
cgcacgcaaccgcttaggcgtcgggttccccttctgctccaggagggaggtggcggcgtgactaaagggcattggcct

SEQ ID NO: 40249 - DNA, 401 bp, Homo sapiens; identical to SEQ ID NO: 3146
  chr4:5889212-5889613
  hyper

SEQ ID NO: 40250 - DNA, 796 bp, Homo sapiens
  chr4:5889852-5890648
  hyper
ggggggcgcccctgccggcgccccgtggatctggaccctgccgggcgcccactcccagcccacaaaggccagcgcggggcggcgggggcgggggccgcttaccgtgatgtgcgggatgctcttcttgccctggtacgacatggccccctctggcgccctcggcccggccgctgacctgcggggctgtctgactggaaccggcgctctcggccccgctcccagcgggcgcgctgacaaaggcccgggagggatagagacacggacggaggctcggcgcccgtggatgcccacgcgcggctgccccggctgctcggcccgcccgccgccgctccggctgccagcaccgcccggatcggcgaggagggcgggagaaggaggagggagaggcgagggcgggaggagggggctgcagacagctcctcccggcggcgcggagcgaagccggattcgcccctctcggctcgaaccaggaagcgcttcccttccgatctcccaccccgccccccgccccccacccgcccagccccgccgacccccgccctgcgcacacgcccttggcgggccctggcctcgctctcgcgatccagagagtatggttttcagggctcctttaaaagaaaaagacggcgcggtcagggcccgcgggcggcgccacaggtgtgtggccgcgcgtctggaggcctccccggaacatctgcgggggtgtggggggagggagtgtgggacgggggccaaggatcggcccaagctgctgggaacgttcttgtccctccaggatcgcgcccaaggaccgctc

SEQ ID NO: 40251 - DNA, 263 bp, Homo sapiens
  chr4:5891818-5892081
  hyper
tccctgtcaatgaccggaaattgcagatggggacactgtccctccccaactcctacactcccttccttggagttgttaagtcctaggttccccgtaccagggcgttccctggggtcagtctggagatctgagcagaaagcccctacagcaagggacaagaccacgtgcgtatcagggggaggagcatccgcctgccactggccaaacagatcgctgctcccaagcagatttcgccggtacaaagcgccgcagccgctcagcct

SEQ ID NO: 40252 - DNA, 141 bp, Homo sapiens
  chr4:5892109-5892250
  hyper
cgcagaaacccctcctgcagcccagggagaagcctggtgggcggggggggaagggccggggcacccgttgcgaagccctggagcggtgaggcccgccccggaacccgagcccactgtaacccaagcctcaaggccgctctg

SEQ ID NO: 40253 - DNA, 69 bp, Homo sapiens
  chr4:5892316-5892385
  hyper
cgagtgctttcggagccccgggagcgccagaggcgctgccttttgtccggtgcctgagaagccatggag

SEQ ID NO: 40254 - DNA, 33 bp, Homo sapiens
  chr4:5894599-5894632
  hyper
cgtacttctggcgcggggtctgcgccgcgctgc

SEQ ID NO: 40255 - DNA, 249 bp, Homo sapiens
  chr4:5894812-5895061
  hyper
cggcccagggaggggaggggcggggcgtggcgcgcgccggggcggggccggggcggggcctctgggcggctgcgggctagcggcgcggccagctacaaaggaccaggaggcggggatcgcggctggggcggggagggacggtgacgctcccgagccgcagcgcggagggcgggccgcggcaccgcagtgccctcgccgcaccccccactctccgcccccaggcggagcgcagggcgcgaggagagcgcg

SEQ ID NO: 40256 - DNA, 420 bp, Homo sapiens; identical to SEQ ID NO: 3150
  chr4:6200872-6201292
  hyper

SEQ ID NO: 40257 - DNA, 1382 bp, Homo sapiens
  chr4:6201349-6202731
  hyper
cggcgcccacgtgggcggagcagcgcgagggtgtgcgtggcaggggccgcggcggcgtgtgccgtgcgtggggtggggtgcgggctgggcggcctcgccttcgggccccgcgccgccggggcgcggcccccagctccatcttctttgccacctgggcggagatctgggggactgtgacctaccctgcggaagacacggaggggacgggccggccacaccccccgcgccactccggcaggcaccgggtgggtccccctcccgctccttggcttgagggcggaatccggagaagagtggaaataggggtggcgtgaaggagagctgggggctgggggcgggaccgggagggggtgttgggggaagcgacgcagcggctgggagattttgcaagggggtctgaagaggagtgggggatgggtatggaagggtgggggaccactgaggtgggatgcgagagtggaagggggacccagagggggcgcgatggccggaggagggggagatggacgatggggcggggcggcaccggtcgccgcgtcccttgccgccaggtccgcccctcggtcgccgggtccacgggttccctctggccagcgctcgcctcccgccccccggcgcacctgtacccacctgctcggcgctcaggcccgagccgggcagcagcagcggacgtagcgagcgcagccccgcgccgcatcctccggccgccccctccccgctgcgagcttacgccgctgtcgccgccgccaccgccttaaaaaggacaaaacggaacagaaaatgaatgcatgcacaaaaaaaatcgtaaaaagcaattgaggaggatggcagtcgcgcgcgcggctcggcggggcgggagtcgagaggccgcggcactggtggccgcgatccgggcaggcggccggcgcgtgccgcacgcgggtggctgcagctccctcggtcgcccgcgcccggctcaggcacggcaccgcccctccccccggggagcccctccgattggtctgtcttcctgccagtcaggcaggagggcgcggcgcccgccccgccccgcccccgcccccgccccgggcagatgccgggagctctcctgccgccgtgggagggggagctgagctgccggagcgtgcgcactgggccagcgggcggccggggcagggctggggtcccggcgctgagcgcccccagccgcgccgggcagcctggcgcctcgctgagtcggagcaacccccggcaggagctttcaggctctggtcaagcctcgggacccgggaagctatccctgccctcgggggctcgagcctggagtggggcttgcaggtaaagcggggctggggccgtcctggccgtcagtggtcaggaagacgcagcgaccccggagatcc

SEQ ID NO: 40258 - DNA, 39 bp, Homo sapiens; identical to SEQ ID NO: 3152
  chr4:6223660-6223699
  hyper

SEQ ID NO: 40259 - DNA, 823 bp, Homo sapiens
  chr4:6271358-6272181
  hyper
ttcgctgtgggcgagccggacccgccttctggcccctcgggcccaaccacgcagggggagtgccgggccgcagctaggcgaggcgcaccgtgattggcggagatgtggagtgattggcggctacaccggccactcagcaggccgagctggcgccgcatccggggggccgcgtctggagtggagggaggccgaaggccccgcccctgccccgccccctcgtgcagaaggccgcgctagccggctcttcagcagcgagtgcagattgctcccccgcggccgcagatctcccgtttgcgccgcgttcagctgctcccgaacaacttttctgccggcccagaggccccagggcgtcgcagcgccgcgtgcggcccactcacgggccggtgagtacttcggcgctggggcagtggcgcggtggctgtgggcagcgcgcaggaggcgggcaagagccctgaggcactgtcctcttcgggcctcagtttccccttccgagctgatgggtggctggccccaaagtcccgacaaggtccccgaagttggagggccgggggtcccgcccgctctgcaacgcgcaaggcgacccctgttccgggcccgaacgggtcacccggggggcgcgccccggtcccccgcgcgctgtcgcctggagccccgccgcgggcgggacagcaggcccgagaggcggagcggccggcgggcaggccccctccccgcgccccgcgccatcccccccgagttgccccgtcatgcccctcccccgcggtcccgggacccacggccgccctcggtgcccgcccggccgttggaacgcgcctgggccccc

SEQ ID NO: 40260 - DNA, 135 bp, Homo sapiens
  chr4:6339430-6339565
  hyper
ccagcctccagcaggaaaaaccgcaaagatcaaaggctgagagaacaattgaatcgatagtggaaacaaagccaaacggcgctggcccttgtcgccccactgctggctgtactcgggcatttctgagggttttta

SEQ ID NO: 40261 - DNA, 30 bp, Homo sapiens
  chr4:6472430-6472460
  hyper
cgactcagcctcgccgaagcaggcgacaaa

SEQ ID NO: 40262 - DNA, 30 bp, Homo sapiens
  chr4:6473042-6473072
  hyper
gccctgcctgcgcacggaagctgtccccac

SEQ ID NO: 40263 - DNA, 651 bp, Homo sapiens
  chr4:6473817-6474468
  hyper
gggcattcggtgcgacggcatccccacgccgcggccggccggaggggtctcagacaacacgtacgttaccttcagtcacatagctgtggtcccgcaggaagctgtggttaattttccgcgtgtccgtgtcctcgcccattgaaggccgtgcccggtgctctgggcatgccccgccgccacacaccgatgcaatccgcagaggtcgcgccgggcgcgcgggccatgccgccgcagcctagcaggggcgcgggccgccggggccccgaagggagggcatcgcggcagggggacgggcgggggcggccgggggcgggcgccgcggtcaagcgagcgcgcggtgggcgggcggcggccgcgggttcgggcgggccggggcccaggcgcgcatcccggccggcccgtgcgcgctgcgtccgtgcgcccggcggcggggcctggtgccggtgcgcctggctgcggcgacggcggcgaggggacgcgcgcggcgctgcgctgcgccgaccaagccggggccgagccgggctgcgcgggctggggccgccgccgccgccgctgtcgcaggcccctccctcgcgccgcccgctctccgcccccgcggccctgcaggtggagccggcgcccaagccgaggctgcaccgccgtgctcgggcc

SEQ ID NO: 40264 - DNA, 959 bp, Homo sapiens
  chr4:6564805-6565764
  hyper
ggactgaactccgccgcattgggtcttaccccggactccgagccggaccccgcgcccgcaccttcagccgggcagcgagggggggctcgagcgcgccggttctcggccgagacgctgtggctgacaccggtggagcgatctgccctggctcgcgcggcgagcaagtgctggaggcagggttccaagccggttctgtcgggttccctcaagaccccgagagcacgcgctccggagggaccccggcacttcggaccctagcagagccagccctgccccaggaccgccccggggtcggtgcccgggctctctgagtctcgcttctggcccgcgaagacgcgccctctcctccagtcgcgggagtcccgcacccgagggccgcgtccccgggcagggtgaggtcctgcggggctgggggtgaggcggggtgggcgcgaggcggctccggagcggcggggccgggcgccctgcagcccgcgcttaccttcggaaacttcgaggtcggcggccccattgagctggcacaggcaccaggagccctggtcggcggcgggcgcggcgggcgcggcgggggcgcggtcagctggcaaaacagcaagggcgcgtgagcgcgggcccggggcggggggcggggggcgggggcgcgcggcgaggctaacccggctgctgggccatgggcggctccgcaggctgcgaccgcgacgggcgtcctccgggcggctgcggggggccgggcgcggcggccgctcctcctccgcctcctccgggctcggctccctgcgcgggcgggcgggcggggaggcgcgcccagaaggctccgcccggagcgcgggtgcggggcgcggggtgcggctgcgggcgccgagggtgggcgcggggcgacgatcgcgaggcgcggatcgcagggcgcggatcgcggggcgcggggccgggcaccgggtaagaggcgcggggtgcgggcg

SEQ ID NO: 40265 - DNA, 427 bp, Homo sapiens
  chr4:6675572-6675999
  hyper
gggccctgaccctagaatcaacgcccaaagagctgtggcgctacagcgggcggggacatggggtgcgcatgcgtgcgggggggtacgcgtgcgtgcaagtgcgcgtgcgcgcgcaggaccgctgaggcgggagccccgaatgcggttctcgcttgctgcgtggcggtaaaggaccgcaggtgtcgtaaaagggccgcagtggcagcgtcctggccgacggctagtagcccattttggataccgtcctcgctgcggaaagttggggcaacctgttgctagtctggtcgttggtgacagcgaggcttccgcgctcgctgctggtgagcagccccggcgtgccccgcgggctggaagaggcggcggcgtgatgcggcccgtggacgcggacgaggcgcgggagccccgcgaggagccgggcagcccgctg

SEQ ID NO: 40266 - DNA, 30 bp, Homo sapiens
  chr4:6711877-6711907
  hyper
ataagactggctggcgttcacagcgcttac

SEQ ID NO: 40267 - DNA, 123 bp, Homo sapiens
  chr4:6717791-6717914
  hyper
aaacaaaggtggatgcgcgtgaacagacgccctcgcaggccgccggaagcaaaggcgtgagcgcgcgtgcgtgcgtgtgcgggtgcgtgagcgtgagcgcgcggaggccggaagcgagcgctg

SEQ ID NO: 40268 - DNA, 31 bp, Homo sapiens; identical to SEQ ID NO: 3155
  chr4:6890788-6890819
  hyper

SEQ ID NO: 40269 - DNA, 31 bp, Homo sapiens; identical to SEQ ID NO: 3156
  chr4:6897665-6897696
  hyper

SEQ ID NO: 40270 - DNA, 30 bp, Homo sapiens
  chr4:6912195-6912225
  hyper
gacctccacccacgcgaaccgtctgtccct

SEQ ID NO: 40271 - DNA, 31 bp, Homo sapiens; identical to SEQ ID NO: 3157
  chr4:6989299-6989330
  hyper

SEQ ID NO: 40272 - DNA, 30 bp, Homo sapiens
  chr4:7044720-7044750
  hyper
ggggcaacagaaggcgcgcgcgctgggccc

SEQ ID NO: 40273 - DNA, 30 bp, Homo sapiens; identical to SEQ ID NO: 3158
  chr4:7069896-7069926
  hyper

SEQ ID NO: 40274 - DNA, 30 bp, Homo sapiens
  chr4:7105257-7105287
  hyper
accccgggacatctcgctggactcagcctc

SEQ ID NO: 40275 - DNA, 705 bp, Homo sapiens
  chr4:7194162-7194867
  hyper
gggcggcgggccggccggcaggtggcggtgcgcgctcggcgtcgcgggtggcgccggggccgccgagtcccctcctcccgccgctccctcccctcgccggctcctttctctgcgctctcgctcgcgctccccagcgccctcctgctctcccggccgcggtcccctcgtccgcgccgccccgccgccggctccgctgccgcccctggcgaccatggcgcaccgggggccctcgcgcgcctcgaagggccccggccccaccgcccgagccccgagccccggggctccgccgccgccgcgctcgccgcgctcgcggccgctcctgctgctgctgctgctgctgggcgcctgcggggcggcggggcgctcccctgagcccgggcgcctgggtcctcacgcccaactgacccgggtgccgcggagccctcccgcggggcgcgcggagcccggtggcggcgaggaccggcaggcgcgcggcacggagccaggcgccccgggtccgagtcccggtcccgctcctggtcccggcgaggacggcgcccccgccgcgggctaccggcgctgggagcgggcggcgccgctggccggagtggcttcgcgggcgcaggtctcgctcatcagcacgtcgttcgtgctcaagggggacgcgacgcacaaccaggcgatggtgcactggacgggcgagaacagcagcgtaagtgacctcca

SEQ ID NO: 40276 - DNA, 74 bp, Homo sapiens
  chr4:7195191-7195265
  hyper
gtaccccagctcggcgttacctcccctgcccccagactccaccagctgagcgtcgcgttctgggattttgggct

SEQ ID NO: 40277 - DNA, 9 bp, Homo sapiens
  chr4:7195308-7195317
  hyper
cgcctccgc

SEQ ID NO: 40278 - DNA, 682 bp, Homo sapiens
  chr4:7940409-7941091
  hyper
tcttccactctccaggcgctgagagctacaaagttcaatctggctttccagattttttttttcttcccattactaacggaagaaatcaagaagctccgggcagtagggccctgctccctccaatcagagcccagcccggggccagagcaggaagcgcggcggtgggacgcgcggtgacagccccgcgccccccggggcccgccggccaggggagaggacggtgcggccgctgcgcgacagctccgggcccgcgcctctcgcttccacccgccgggcaggtgagaggataaatcacggggcggggcagtgcgcccccaccaaccgcgccccccgcgcacggacccccattacactcgcgtcccaggcggggtcgacccagacgagccacggggcggcgcagagccccactcgcagggcggccgggacccacgcgcgtgggtccacgcaacaacctataggtgacaaaacactcaggaagccgtcatgcggggccaagaaagagcccccatccagagtcacggaccccctcgtccgagggtccgcgcagtcccctcggtaagtcggacgaagcagtctcgctacgggggagggcggcggagcctcccactcttggtgacccggaccccgccccacgagtgggtcttcgcagggccccctctgacgcacacggggaccagccacg

SEQ ID NO: 40279 - DNA, 650 bp, Homo sapiens; identical to SEQ ID NO: 3161
  chr4:7941129-7941779
  hyper

SEQ ID NO: 40280 - DNA, 626 bp, Homo sapiens
  chr4:8159728-8160354
  hyper
cgcggctgggctccagcgctgtgggatttttccagccccgcacagaggctgtcagatcccggagggtgggtgcggcgggaaaggcaggggtgcgacgcgcaggggcgaggggctggagacgcgcagagatcgggtcggggccgggtctgacacatgcgggctccgggtccccagatctgctgcggagagtcctgggcgccgagggtcggcctgacgcccccaacccaggcgctgccagagcggcgcaagggcggcgcccccagctgcaaagccccgcctatcatctcacctctgcgtgcctaggtctgctggggccccggcccttcgcccggaccccaggcccccgcgcggaccctgaccgctttctgcagcctggaacaacccggacccccgtgagaagcaaagaaggggcgccttccagacatcctggcgcagccacgccggccggcgcgctgggaaaggatccccggcccgcgccactgagctacgcgctccgggcgcagggcagagggctgcgctctggcccctcggggctgcaaaatcctggagcaaaagttgggtggagccgctgggtgattttccccggcgttgcaggtgcagcctccgaatgccacccagcccttgcg

SEQ ID NO: 40281 - DNA, 141 bp, Homo sapiens
  chr4:8160429-8160570
  hyper
cggagtcggggcggcccggcgctgcgacagccagaccctcgggcccgcaggtgccgcgcccgcgctatcctccgcccgcccgccggctccgcgcccgctccttgcgcacacgccaggcagcgccgccgcagccccacggcg

SEQ ID NO: 40282 - DNA, 272 bp, Homo sapiens; identical to SEQ ID NO: 3164
  chr4:8201024-8201296
  hyper

SEQ ID NO: 40283 - DNA, 218 bp, Homo sapiens; identical to SEQ ID NO: 3165
  chr4:8271304-8271522
  hyper

SEQ ID NO: 40284 - DNA, 30 bp, Homo sapiens
  chr4:8271777-8271807
  hyper
gctgcgacgtgtcgcggtgtcccagccccc

SEQ ID NO: 40285 - DNA, 30 bp, Homo sapiens; identical to SEQ ID NO: 3166
  chr4:8313111-8313141
  hyper

SEQ ID NO: 40286 - DNA, 30 bp, Homo sapiens; identical to SEQ ID NO: 3167
  chr4:8313537-8313567
  hyper

SEQ ID NO: 40287 - DNA, 30 bp, Homo sapiens; identical to SEQ ID NO: 3168
  chr4:8582095-8582125
  hyper

SEQ ID NO: 40288 - DNA, 30 bp, Homo sapiens
  chr4:8582550-8582580
  hyper
cgccgctttcctcgcgctgctctggacctt

SEQ ID NO: 40289 - DNA, 43 bp, Homo sapiens
  chr4:8594309-8594352
  hyper
ccccttggacggggcggggcactccgcccggggcaggcagggg

SEQ ID NO: 40290 - DNA, 31 bp, Homo sapiens; identical to SEQ ID NO: 3170
  chr4:8594372-8594403
  hyper

SEQ ID NO: 40291 - DNA, 132 bp, Homo sapiens; identical to SEQ ID NO: 3171
  chr4:8609442-8609574
  hyper

SEQ ID NO: 40292 - DNA, 122 bp, Homo sapiens
  chr4:8858925-8859047
  hyper
atgcaatgcagccgccgaggaagcgtcggggacagatggggttggacgccgtccccacttcctcccctgcagccgcctccaggccgccaacctcgcccagccggagcctcagtcctggaggg

SEQ ID NO: 40293 - DNA, 556 bp, Homo sapiens
  chr4:8859381-8859937
  hyper
cggatcgttccgccgttcgccctgggtctgagtctgggggttcgggaaacaattttggacgtttctggttggattgtgtctaaatcgtgcattttacgcgacaggggactcgaggtccttgaggatcccaaactgccgcagcccctccctcctcctccccttgcccttgcccctgcccagagaagtgcgctcctccagggtcatccacacgcgccgtgccgagccccgggccccagttccaggagccgcgtctctacgggccagtgggtcctgagagagtagggcttcgggcgctcggggagaggaggcggaggaggggtgaagccgaggggtggcttttaacgaaaaagaagttgaagcatcagctaagccattagggctaatgcgatgtactgtaagacggggatcaatgccgggcctcggggaccggcgtgggggagggggcagcaggccgaccgcccccaagccggtcgaggcccccgtccatttgggggaaatggattttcgcgatttaagaaacaaacccaaatcaaatgagcgaggcccggatgtgctg

SEQ ID NO: 40294 - DNA, 133 bp, Homo sapiens
  chr4:8860397-8860530
  hyper
gtgacactcaggcacacatacaccaatgccccgggcccgctagggacgctgagctccaggcaacgaaaaacgaaggtcctggagtcggtcctgagtgcattcctccactgggccccgtcgagaatgaaactct

SEQ ID NO: 40295 - DNA, 31 bp, Homo sapiens; identical to SEQ ID NO: 3172
  chr4:8862780-8862811
  hyper

SEQ ID NO: 40296 - DNA, 94 bp, Homo sapiens; identical to SEQ ID NO: 3173
  chr4:8863143-8863237
  hyper

SEQ ID NO: 40297 - DNA, 203 bp, Homo sapiens; identical to SEQ ID NO: 3174
  chr4:8863323-8863526
  hyper

SEQ ID NO: 40298 - DNA, 39 bp, Homo sapiens; identical to SEQ ID NO: 3175
  chr4:8863856-8863895
  hyper

SEQ ID NO: 40299 - DNA, 295 bp, Homo sapiens
  chr4:8868975-8869270
  hyper
gtcccaggaaagggacgtttagtgttgggggcagtctgtggggacagtcaccgctcagccttggacagccggttcgtagttttcctttgttgcgctgggcttggcctgagggcagctgccccgggtggccatggccgaccgctcctcgctgaggccggggggtggccgtggcgccgggggctgcgcagcccagagtctctgcatggccccctgttcgagtggggatccagcctggcaaatgggtggggcgtcccattacattctagaggcgctccccacagaagctgaggcccgc

SEQ ID NO: 40300 - DNA, 445 bp, Homo sapiens
  chr4:8869368-8869813
  hyper
cgtccacacaggtccacagggtcgtggggagagggcccggcaggcggggctcacaccaggccaggcatctgcgcccgcagaaagggcacggaggcggcggccgggaaggcggccagcgggtaggcgagggccccggagaagccgagcagcggtgggggcggcgcgggcgcggcgggcgccagcgggaagggcagggtggccgggggcccagcggcggctgcggccggggggctttcgtggtagagcaccggcacgcggaccaggcgctgcgctcccggcggggacaggctggccgcctccagctcggctgccagctgccgcttccacttgttgcggcggttctggaaccagatcttaacctgcgtctcggtgagctgcagggaggcggccaggccggcgcgctcggcgctgctcaggtagcgcttcaggtcgaaggtggattcca

SEQ ID NO: 40301 - DNA, 154 bp, Homo sapiens
  chr4:8872918-8873072
  hyper
gacccaccctccccgcgccctcactcactgtcaggactgaggccgcctccatagccaccgtgcgcccgtgggtaccagcgcgctgcgcctccgcagcccagagcgaagggcggcccgggaccggggggcggccgaggaccgaggcccagcgcgc

SEQ ID NO: 40302 - DNA, 207 bp, Homo sapiens
  chr4:8873773-8873980
  hyper
gggcgcaggcggggggtcgcgccgggtccgatcccgcgtgatcagttcccccgtcccgcgccacccgctccgtgggggcggggcctgggctgagcggccacccattggctgtggggccccgatgaggaacgggctggccaatcaccgtccggccagagccgtaattaccccgctgcgaggagggtgttggaccgaccgtgagtaact

SEQ ID NO: 40303 - DNA, 30 bp, Homo sapiens; identical to SEQ ID NO: 3176
  chr4:8893445-8893475
  hyper

SEQ ID NO: 40304 - DNA, 41 bp, Homo sapiens; identical to SEQ ID NO: 3177
  chr4:8893684-8893725
  hyper

SEQ ID NO: 40305 - DNA, 313 bp, Homo sapiens; identical to SEQ ID NO: 3178
  chr4:8893815-8894128
  hyper

SEQ ID NO: 40306 - DNA, 627 bp, Homo sapiens; identical to SEQ ID NO: 3179
  chr4:8894330-8894957
  hyper

SEQ ID NO: 40307 - DNA, 544 bp, Homo sapiens; identical to SEQ ID NO: 3180
  chr4:8895231-8895775
  hyper

SEQ ID NO: 40308 - DNA, 133 bp, Homo sapiens; identical to SEQ ID NO: 3181
  chr4:8895964-8896097
  hyper

SEQ ID NO: 40309 - DNA, 212 bp, Homo sapiens
  chr4:8896117-8896329
  hyper
cgctggaactccccctcctggccccctcctccgcttctgtttgtttaaccttccggcagggcggtgaccctgcgccctgccaggcgctgccatggggtcaggcgggggtggggggcgcctcaggggtccggcggcggctgggagtcccccgagcagcagagaccctcctcctgtctcctgttctgcccatcgtgggaagtgtcccaggcctg

SEQ ID NO: 40310 - DNA, 31 bp, Homo sapiens; identical to SEQ ID NO: 3183
  chr4:8966280-8966311
  hyper

SEQ ID NO: 40311 - DNA, 106 bp, Homo sapiens
  chr4:9534313-9534419
  hyper
gggaggctcagtggccggccccgggttgaagttggtaactgagcggcaactccggcgggcgcggagttacagctcgtgacggcctccgagacgccagctgcccctt

SEQ ID NO: 40312 - DNA, 210 bp, Homo sapiens; identical to SEQ ID NO: 3185
  chr4:9684932-9685142
  hyper

SEQ ID NO: 40313 - DNA, 30 bp, Homo sapiens
  chr4:9766951-9766981
  hyper
ctgagcacagacagacgtttccctgcttac

SEQ ID NO: 40314 - DNA, 44 bp, Homo sapiens; identical to SEQ ID NO: 3186
  chr4:10089889-10089933
  hyper

SEQ ID NO: 40315 - DNA, 237 bp, Homo sapiens
  chr4:10090132-10090369
  hyper
atttactgggctctgacgacgagtctgcagatgtggggagggcgatgtctaagttctgcatgtcaggactagcattaggcagcctgcggctctgagcagtcacgggagcaggcagacaagccattccccaccccaaaacccatcccagttcttacctggccgtcagcactggctgtggcaaatctgttcccatcaggagagaatcgcacacagttgacaaagcggctgtggtcctgc

SEQ ID NO: 40316 - DNA, 30 bp, Homo sapiens
  chr4:10117784-10117814
  hyper
gttgcccttagggtcgccgccgatgatctt

SEQ ID NO: 40317 - DNA, 30 bp, Homo sapiens
  chr4:10118444-10118474
  hyper
cagaggccagctcgcgcctgccctgcgcgc

SEQ ID NO: 40318 - DNA, 1013 bp, Homo sapiens
  chr4:10458335-10459348
  hyper
ccgctcgccgcgagggaaggccggggttcttccaaccgaagaaaaccaaaaccgtcaacgctcagctccgaggcccgcaggaggctttaaaaatggcctcctgacgacacttcctgctcggcgcggacggtaggagccctcggaggaggcatccttcataacgctgggggcggggagcgcaggccgggccagcggcgccacacgaacggccccgcgggacgctgccacccccgcctcggtcgccccggcgcgtcggccgagtccgcggggtcgcggcgcacaaaggcgagctgggggcgccgggccggaccccgaccctaggccaggcccgcgtacctgctcaacgcgcgccaagccgcggcccgggcccccaccccagccggtgccccacgcccaccagccggagcccgcgttcggcctacccggtgccacttgccacgacgccagccctcagcgcgggcacgcggggccgcggccgctcgacccgccccggcctggccccgtcaggcccccgccccgcgcgcccccacgacccggccgcagctggcgcttcggtcacgtacacgcggatccgggggccctcgccctcccgctcagctacttacccggcaggccggattcgggtgccaggtcccggcgaaggggcgtctacaccgccggccgcagaccgccggcgccgcgcccgctgtaggtccctacccggggggcggagcccgcgccagccccgcgcgtgcgcaatgtgaagcggcggcgcggctccagcgaggccggcgcctgaggtctctaaggctgcgcccgcccccgccgggcttctaagctgtccagagcggggagcctcagacccagccgagccccacttctgggcttagagcttgacccaacacgttcgcaccgtagcgagcgaggtccacatttagccatgccgcaggcaaaagaaggattcggcttcggtcctggcccagtctgccatcccggggcgcctgccttgtaccgggtcccgcggagggcggcct

SEQ ID NO: 40319 - DNA, 160 bp, Homo sapiens
  chr4:10462887-10463047
  hyper
ccctttcccgccctgcggcgcaggcccactctcttggctctcctggcccgcacactcagctcggccgccgcggctgccgcggaagcgcgcagtgaggctagtggggccacgagcggcgcgctgagcatgcgcgcccgatagagcctcgagatgcgccggg

SEQ ID NO: 40320 - DNA, 345 bp, Homo sapiens; identical to SEQ ID NO: 3190
  chr4:10463072-10463417
  hyper

SEQ ID NO: 40321 - DNA, 31 bp, Homo sapiens; identical to SEQ ID NO: 3191
  chr4:10577054-10577085
  hyper

SEQ ID NO: 40322 - DNA, 317 bp, Homo sapiens; identical to SEQ ID NO: 3192
  chr4:11429393-11429710
  hyper

SEQ ID NO: 40323 - DNA, 938 bp, Homo sapiens
  chr4:11430338-11431276
  hyper
tccagcccgtccggcgccctaaataggctcctaggctgggccatgggcagcactgccgagcacccgcggcgggtagagcaagtttctggatggcccggggcaggcgggcggggagaaggcgcaggcacccactgagacccggctgtcgtggcggcgactcctggctgccagggcgcagaggaccttgcaggcgggcgttttggtgctcaatcccgaggagggggaggagcgggaggaggagcgggagcaaaaggaggggacggaggaggccgggcccggagggagagcgcgttgggcagaggaggatcgcgagcgcccactgctgcccggcccgctcgggtgccgcccagagtccggcccgctaggtgcctggtgctccgctctgcgctcagctgctccgcacagccccgcctggcacgcagctccagcggctggtcgggtagtagtcggtcccgcccacccggtgcggtggcccctggggtttcagtccaaggggagggaccagcgctccaagaaggtgaggctgctgggatgggtgactccgccgtcactgcaaacacgggacgtcccgtctactcccttacgcctgcttggtctgagcccgagtctacctcttctctaagtcgccagctcggcacttgtacccgggacctgtgctcctcccacgtgagtctgcaccatgcgtattcccttcctggcaggtgacccaccttaggcgctggcgctccttccgccccccgggaagcaggaggtgccatcctctccaattcgctctgcagccggactgggaccggagcggcggcctgggccagaatccgcgtgaggagccggcttcaaagagcgccctgtcgccattgaacactccttttcctttggtttagcgtcggagagcggacgccaatttgccaggagagcgcggaaaattcagcttttttttt

SEQ ID NO: 40324 - DNA, 30 bp, Homo sapiens
  chr4:11521627-11521657
  hyper
ttacactttctgctacgatcaaagggtcca

SEQ ID NO: 40325 - DNA, 30 bp, Homo sapiens
  chr4:13486088-13486118
  hyper
tccggcgggagaggcgaggcgctgcgtttc

SEQ ID NO: 40326 - DNA, 232 bp, Homo sapiens
  chr4:13524019-13524251
  hyper
gaagggaactggggagaagcacgttccaggtgtgggttcagctcggcactcgccacaggcctccgcaggtggctctccttggcagcgaggcaaggcgcaaacccgctggcttgggaagcctgacgtgacccccgcccgccaagcctggcaggaagcgacgccggggttctccgcaagaagaaggcggcctccgggtgtcggccgcagccaggctactgtgctccggggcaaa

SEQ ID NO: 40327 - DNA, 111 bp, Homo sapiens
  chr4:13524529-13524640
  hyper
cgaaaactactgggaggccgagagaggtcccgggagcaggggcttgaggaggcaccttggggctacggacttcgctgccgtggtggcctcgcaggagaaagtggcttaaat

SEQ ID NO: 40328 - DNA, 30 bp, Homo sapiens
  chr4:13529536-13529566
  hyper
agtgctctgagactcgagctgcgcccgcaa

SEQ ID NO: 40329 - DNA, 30 bp, Homo sapiens
  chr4:13529794-13529824
  hyper
ccgctcagcagtggcgcaagtgcttcctcc

SEQ ID NO: 40330 - DNA, 30 bp, Homo sapiens; identical to SEQ ID NO: 3195
  chr4:13530079-13530109
  hyper

SEQ ID NO: 40331 - DNA, 30 bp, Homo sapiens
  chr4:13537287-13537317
  hyper
agacctgaggagcccgctcaggtcctcagg

SEQ ID NO: 40332 - DNA, 30 bp, Homo sapiens; identical to SEQ ID NO: 3196
  chr4:13537744-13537774
  hyper

SEQ ID NO: 40333 - DNA, 30 bp, Homo sapiens
  chr4:13545348-13545378
  hyper
ggcctcaccccaggacgtagggctctgagg

SEQ ID NO: 40334 - DNA, 592 bp, Homo sapiens
  chr4:13546096-13546688
  hyper
agcgggacagagagcgccggcggccgcagcgcgagtgagctgggtgtgcgaggccgccgccgcccactgctgcgcggcccagcagctcccgccccactccgtcccaggatcagcgccgaccctcgcccccaccttagaggcccaccccgcccggagaccccctccccccgaatccagagccagacgctctcctttcgcagctcagctggattatctcatcgcttctcgcccttaggggcgggctggggtctgccccctcgggggacgtgaaggaggattggcgggggcccctccgtggcagcagtcccctcccgagcgccgccggggcgcacagcccgagtcactttttctttgcgcgtctgtcccttcctcgcctgcaggatttcgctcctggcccgtcctccccttccctgctgggcaggctcttccggagcccacccccggcggcggcggcggtagccgcggccgcggccgctggattccgagaggcgcggggaacttttttaccccctgccctggttttatctgtttcttttctctttccttcccttgcgttccactgtaccacccccctcccgcccgggtgtcattc

SEQ ID NO: 40335 - DNA, 20 bp, Homo sapiens
  chr4:13548569-13548589
  hyper
acgttccgcgtcttccggag

SEQ ID NO: 40336 - DNA, 1090 bp, Homo sapiens
  chr4:13548634-13549724
  hyper
cgcttagtcgatcattaggtctgtgggtgactgtaggcagagccgggagttgggtgcttggcgcggagggtgaactcgcgggtcttgagctgcaactagaagctgctcctagcaaggggtcgggtggagatgaaaagactgtggggaaggggaggtggttgtatgcccagagatatcccggcgtaactacggagtccaggcccagagtggcggtgtgtggcgaaggcgcagcaggcctgcgcctgtcggaggacggcagatctggacgcgaccgcgcgggcgtgcctgggtcccgcttcctgcccatcgagggcgacttccttcgggctcagctgtgagctccaggaactctgcaacctcccgacgggcgccacgctccggcttgggccggcccgggagttggcggagctgcgcggcccggccgggcggccggtgaggctttcgagaggcaccgggctcgctcagcgtccgcgcctctctaccccgccgcgccccctccgcgcccacgggcccattttttcctagtcttctgcctctcttccttcttcctccctcccctcctcctccacacctttgtcttcttcctcctccctcctcctgcttctcctccgcagtttggatcctacgggccccctacgtgccgcgcccttcggtccccggaaccgcccgggctgggggtgctgctgcgcggtgagacttccgcgggcggcgggcggagagcgggatttgactgcgaaagccaagggggcggggaaggggaagccccggccctcgggggcgcgcagtaaactgctgcacacgtgcccgcgctcccgaggggggcgcccagtgggctcgggatttcctggctgcgccaccgcgcgcctcgcccccgacgcccgccacctgtgccctgggccgccttccctgacgccagcggccggaggtcgcgcgcgccgggtgctgcccagcaacgaaaggccatgcggggttcgtccctcagatgccggtgaccttgattgaagtcacctgccttctctagcttccagtcctttaaaacgagggtttggacccggtgccttctgaacccggtgcttcactgagtgagcaa

SEQ ID NO: 40337 - DNA, 45 bp, Homo sapiens
  chr4:13550559-13550604
  hyper
gaaaccagattgtgcgcgcggttctgagacgtagccaagcgacct

SEQ ID NO: 40338 - DNA, 30 bp, Homo sapiens
  chr4:13629573-13629603
  hyper
ttagggcttcgacccgcgcgacacctgggg

SEQ ID NO: 40339 - DNA, 34 bp, Homo sapiens; identical to SEQ ID NO: 3200
  chr4:13655882-13655916
  hyper

SEQ ID NO: 40340 - DNA, 30 bp, Homo sapiens; identical to SEQ ID NO: 3201
  chr4:13669550-13669580
  hyper

SEQ ID NO: 40341 - DNA, 30 bp, Homo sapiens
  chr4:15003261-15003291
  hyper
gcctggaatatagccgaggcttcatgttta

SEQ ID NO: 40342 - DNA, 30 bp, Homo sapiens
  chr4:15005214-15005244
  hyper
ggtgaaccccgcgccgggctccatggagtc

SEQ ID NO: 40343 - DNA, 30 bp, Homo sapiens
  chr4:15005898-15005928
  hyper
gcagcaccaggcggcggccgccgccttcct

SEQ ID NO: 40344 - DNA, 93 bp, Homo sapiens
  chr4:15412548-15412641
  hyper
agttacaacccagaaacaaaacagagttttgaaaagcagcagtgcctgtcatccaaattgcatttcctgtttcacacgcgaacaggaaggaaa

SEQ ID NO: 40345 - DNA, 48 bp, Homo sapiens
  chr4:15683191-15683239
  hyper
cagagggccccaggcgcctagggagtcgttaccgccctggcattcaaa

SEQ ID NO: 40346 - DNA, 30 bp, Homo sapiens
  chr4:15683676-15683706
  hyper
gattattctagggtcggccgaggggttcag

SEQ ID NO: 40347 - DNA, 896 bp, Homo sapiens
  chr4:15780069-15780965
  hyper
ggacaaaccctgctgccggctctctaggagagcccaactctgtcttggcgtcagtatcctggtcctgatcctcgtcgtggtgctcgcggtggtcgtcccgaggtggcgccagcagtggagcggtccgggcaccaccaagcgctttcccgagaccgtcctggcgcgatgcgtcaagtacactgaaattcatcctgagatgaggtgggttggcgactaaggcgcaccggtgggcactgcggggacagcagggccccgcgcgcagggaagccgcccggatcgcccggaaccgggcatcttccgtggcgggtcagccgagagcccgccgggtggtgctgagtagggagtcccgggctcggggctccgcgggccgctttcaggagcagctggccttggcaccgagcgtgcccgcgggaggcgggggggggcgctgctcggtggctctgctgcgtagccggtgaacacttggcaccgatgcccgccttctgggcaaggtgccctgagcccagcccctcgccgggctgcagcccaccctcggcgcgctcagcccgcttcaccgcttcagggacggaatagaactcgcagatgcagggtgtcgctgacattttcaactttttctgcggtttccgcccgctgtctctgacccgaaagtgcccccggacggttacagaggacacttaagtggtttgcaaagcctgtggtaggggaggagggtgtagaagggccaaaccacggaacttagttttattcatttatataaagcagcactccgattctttttgcgcggcctgaaatgcatgtgaccagagaagtaattaacaaaacaatgtcaacttctaaaaccgagacattacttagatgataaggcgcagcaactcggtgaatctgtacaaaccttg

SEQ ID NO: 40348 - DNA, 765 bp, Homo sapiens
  chr4:16084053-16084818
  hyper
cctttctccagaaaggtcagtcgccttagcgggctccaggagcaacctgttgcagaatgaagcctggggcgccggcttccccgccctttacctccaaaccacctccaggccaagccccctccaggcctagctcccttctgggcggaagcctctcgcgagctgcgggacacaaaagaatgagcggcggggcgggcgcgggaagccaagagactccaggaattcgcagccgcgcaggggagggggttgccggagtaacttggctgctctgagcgcgtcggcgccagttccccgccgcggcccctgttgggcaccgatcgggggcgatcttgccagagagaaggggttctggagctagttcctccctccgatccgactccctgcccctccagacacgggctttcggggaaactgatcccgagcctctgactttctacagccgtgaagctcctggtctgtccacgctcctctttgttgtccggtcggcgtgttctggcagggtgcgccttgagcaccccagttctccatctagcgatagccgcgggtccccgcgcatgcaagcagaagggccgtggagcgagaggctgggaaggtgcttcaagccaggggtgcatgctttctcccacggacgcggggagatggcctcgctttgtacccccatatccctactcccgctgtggtcggctgcacagtgttggcccatttccgcactcagccagggaagctcagcgcctcacgtccccggggccatccctagagtttccttta

SEQ ID NO: 40349 - DNA, 135 bp, Homo sapiens; identical to SEQ ID NO: 3203
  chr4:16085166-16085301
  hyper

SEQ ID NO: 40350 - DNA, 250 bp, Homo sapiens; identical to SEQ ID NO: 3204
  chr4:16085351-16085601
  hyper

SEQ ID NO: 40351 - DNA, 8 bp, Homo sapiens
  chr4:16085674-16085682
  hyper
cgagccct

SEQ ID NO: 40352 - DNA, 139 bp, Homo sapiens; identical to SEQ ID NO: 3205
  chr4:16228990-16229129
  hyper

SEQ ID NO: 40353 - DNA, 186 bp, Homo sapiens
  chr4:16229291-16229477
  hyper
ttacgtgattgcaaacgagcaagtttaaaacggagtgggctttgggctgcagagccgcctggcattctgacagctgagcaggaggcagaggtgagagtccaagatggactaaaaatgtcccagcagctgggagcccaacctcggcccaacctcgttgaaaggaggaacattcggtgcagccgtcgg

SEQ ID NO: 40354 - DNA, 9 bp, Homo sapiens
  chr4:17578853-17578862
  hyper
cacacgaat

SEQ ID NO: 40355 - DNA, 740 bp, Homo sapiens
  chr4:17782740-17783480
  hyper
cccgggcgtgcagctcgctggcccgctgcgccccaccttaccttggtgagctgggcgatcttcttgcacattttcacgtgcatctggggatcacagtccattctccagccggcgccaccgtcggctttggagccctggcaagtgccgggcgggttaattttgctgttgagagcagaagccatcgctaaaacgcgcccagcactcagactctctcgttttctccctgcccaccgtgtgcacgtgcgtgcgcgcgcgggcgtgcgagcgtgtgggtttctcgggagaggtggcactgcagtcccgtcgcctgcaccgccgcgtggccccagcttcccgaaggtctccgcctcccgggcccacccgcgcgcccaccctttttcctctcctgctggttctctggctggctggctccgcgggcacccgcaccctgcggcgaggcgtcggcgccccgcacgtgccgctggcgatcagtctgcagttccccagccagtgcaggtttcgtgtgcaaggggagagcttccgcggctaggagctgccggccttggggggtttgcggtgggcgggcactgcgctcttggacacgtgggtggcgcgcggccctggacttggtggcgacggaccctgcccgaggtggggatcccaggctaaagaggaagaagagcctccggagagggacagggcacagtgactggcggcctccggagagggacagggcacagtgactggcggctcccgagtct

SEQ ID NO: 40356 - DNA, 30 bp, Homo sapiens; identical to SEQ ID NO: 3207
  chr4:17812558-17812588
  hyper

SEQ ID NO: 40357 - DNA, 30 bp, Homo sapiens; identical to SEQ ID NO: 3208
  chr4:18024246-18024276
  hyper

SEQ ID NO: 40358 - DNA, 941 bp, Homo sapiens
  chr4:20253115-20254056
  hyper
gcccccttaaggatcgcgtggcaaaagctgcaggagaggcactggcagggctgtttatttatgagccgcgttcaaagccgacctcttcccattctcccactgcaaacgactatctccgagcccaggtcacctctggggccaaggagttgggggctggggctcgggtggctccttcttcgggccaagtttgcccgcgcgtgggagcgagggggcgagccagggcgcacgggaacgcgcgccgccagccgccgcctccgcccagcgctggcagccccggcctcacctctcccctctccccagcgaggtgcgggctcccagagcggagccagggggcgggcctgggcctcgaggggcggggtcagggggcggaggctcgggcggctatataaggcccgcgccggctcaacttcggacttggtgttatttatttgggaagcgcccggacggcggagcttggcggcggcggtggtggtggctgccgcagactgtggttaaaaaaaagaaggcggcggcggcggcggcggcggaggcggaggcagctgcgaggcatgggagcgccgaagcgcccaggcgcaggccgaagctgccgcgctttctgggcacggcgggagtgctgagcagaaaggggagcgccgggggcccgcagccggctccggaggcgcgggccgggtttttgtttggctacgctgagcgccagtcagccccagcgaacaactccagttacgacaacaacccaccttccttccagacaagcgagacttgggctgctgcgtccgtcctattgtttagacacttgccaggggctccggagtcggcagagccaccgagtccccgctctgagtcgtcgccctccctctccccgacctcgctccctggagcgggaggccaggaaagcagcgggagaggggaaggggctagaaggagaaggactacccgggact

SEQ ID NO: 40359 - DNA, 534 bp, Homo sapiens
  chr4:20254239-20254773
  hyper
cggctcttgtttcttctacctttgccatcaggtgtctgccgcggagctgcggcttatctgggagacgagcggggttgacacgcgcgcacacactactgccattcagctgccgcctggctctgcctggagtagtggatcccacccgcccacctgccaccgagccattctccagtacgccccagcaggacgctgacacctccaaccttggcctttgcctttccactccttccggtctgcctggtttttaagtccgcccccagtcagtccccactcagtcttcgcagcagctctcatcctccacttggcctcttggagttcctcgccggagtgctgactagtggatatttctgcccggctgcggcggcccgactgcccttttgtcttttctgcgtgacctcggggcaggtcctggtgcagagcgtcgccaaggacgccgagcgggaggcgggattgcccagacatccttcagcgaagtgcatgtgtgtttgtaaaccatcgttggctgtcgggagaccgcgaggaccggtccaggct

SEQ ID NO: 40360 - DNA, 341 bp, Homo sapiens
  chr4:20255026-20255367
  hyper
cgtgggatcagaggaccgccctccccacaacaaccggcccctgcatcttagcagccgttggaagccccagctcttttaccgccaagttcatccttgggagacagaagacgcgtgatctcctctccgctgctcttggggtctccttgcagccctggccaggcggattcatcctcaggacctaaagttgcccaaggagctcctgctctgccagaggagggtggagagggcggtgggaggcgtgtgcctgagtgggctctactgccttgttccatattatttggtgcacattttccctggcactctgggttgctagccccgccgggcactgggcctcagacact

SEQ ID NO: 40361 - DNA, 761 bp, Homo sapiens
  chr4:20255524-20256285
  hyper
ggcgcagtgctcttgctcgggcagcacagtggactgtcacgggctggcgctgcgcagcgtgcccaggaatatcccccgcaacaccgagagactgtgagtatgcgctcttcgtcttcccctctccccatccgggccgcgcacccctgcctccactggaggaacctgtcagctcagggtcctgtgcctggggcagccctcgctagctctcccccatgcacatcctggggttgagctctccgggagggcactggccagggaagggcctctgtccaaggaggggcgggtccgctggcagctgcgctagttctccctcccctgctctcgtcccgccactcgcagctccttgctggctagttctctggggctggggagcgggtagataggggacaagtactggaggatgcccggggcaagtgagacgccactttgttctccagagtccataaacggagtcaccttgcgattgccagcatccaggtcggtttcagagcccagtcctcgctcttgtcgcaggctggcgcggaggggatagcagggagactcaaaagagagaaacttgccttccccgattttttgtcaccctcctgggggcgaaggttaggaagaaggggtcatggagtgcctgggggtgcttctcacaggtcgcggggagaagggtgccccaggacggcgacacctcgcatagtagcctcgcgcagccccccgccccccacttctccggggaggggaagacggcgtcaggcccctagggacttgtctca

SEQ ID NO: 40362 - DNA, 194 bp, Homo sapiens; identical to SEQ ID NO: 3215
  chr4:20256382-20256576
  hyper

SEQ ID NO: 40363 - DNA, 96 bp, Homo sapiens; identical to SEQ ID NO: 3216
  chr4:20256841-20256937
  hyper

SEQ ID NO: 40364 - DNA, 30 bp, Homo sapiens
  chr4:20702362-20702392
  hyper
ggtagagggtcagtcgagagtagccttcgt

SEQ ID NO: 40365 - DNA, 30 bp, Homo sapiens
  chr4:21215998-21216028
  hyper
gtgttataaatggtccgtttacgttctgtc

SEQ ID NO: 40366 - DNA, 82 bp, Homo sapiens
  chr4:21305986-21306068
  hyper
cgaggaaacatgaggcccggcgcggaggagatggctctgcgccccgggactctgcgcgccgcgccgccgccaccagtggctt

SEQ ID NO: 40367 - DNA, 30 bp, Homo sapiens
  chr4:21949838-21949868
  hyper
ttaggggaaggaagcgtgcggtctggagtc

SEQ ID NO: 40368 - DNA, 30 bp, Homo sapiens
  chr4:22358598-22358628
  hyper
tccagaatcccaacccgagctgcaggacat

SEQ ID NO: 40369 - DNA, 30 bp, Homo sapiens
  chr4:22458521-22458551
  hyper
ctaagtatttaatcacgtgggactttttct

SEQ ID NO: 40370 - DNA, 31 bp, Homo sapiens; identical to SEQ ID NO: 3217
  chr4:22516749-22516780
  hyper

SEQ ID NO: 40371 - DNA, 287 bp, Homo sapiens
  chr4:22517044-22517331
  hyper
tccacacaaaggcgcgtgggtgccggctggaccctgctccaaagttgagcggagagataagaaagagccgagcgggagaggacccagcgtcgcgggagatactcacagggtgaccgtgcggttgggcagagtatctgggggcaggacctgcgcgagttccaggctgctgcacaccaccttgccctcggcggcgcccgccgccctgccagcccctcggggccgcccatcgtgcttgcagccggcgggcagcgccgcggcgccgccgccgccgccgcctcccagcagcg

SEQ ID NO: 40372 - DNA, 426 bp, Homo sapiens
  chr4:22517554-22517980
  hyper
gctcctttgtccgctgcggctgcgctgggcctctagggagccgggggtcacggccgcatgggtcccagcgccgctctaccgcccggcgcgagcaccgcctcctcctcctcctctgccgccgccgccgccgccactgcctcctcccctggccaggacccgcgcgcggcggctcctccccgcccgccgccggcggccgcccccgccccttcccctcctctttcccggctctcctgctctccccgtgtctgcagctgcccgggacctcggggaggaggcgcgcgctcccgggacctgccgagcccgactccgacccggtgcgcgcccgggcctcggcctccgggcaggagttgtggggagcccgcgggaaggcagtaactcgtagagagaacggaggaaagttcgagtccgaacggaggaaagttcgag

SEQ ID NO: 40373 - DNA, 30 bp, Homo sapiens; identical to SEQ ID NO: 3219
  chr4:23890875-23890905
  hyper

SEQ ID NO: 40374 - DNA, 30 bp, Homo sapiens
  chr4:24472239-24472269
  hyper
cggctgcctcaccgcgaatcctcactccgc

SEQ ID NO: 40375 - DNA, 30 bp, Homo sapiens
  chr4:24474846-24474876
  hyper
ggtggggagtgggccgccctgagcccggga

SEQ ID NO: 40376 - DNA, 30 bp, Homo sapiens; identical to SEQ ID NO: 3220
  chr4:24585266-24585296
  hyper

SEQ ID NO: 40377 - DNA, 30 bp, Homo sapiens
  chr4:24586251-24586281
  hyper
acgacgcccaaaggcgggaactcctgtccc

SEQ ID NO: 40378 - DNA, 610 bp, Homo sapiens
  chr4:24914264-24914874
  hyper
aaagtgcaggaggagcggcgcacctggcggggtcgcgcgggtgcggcagccgcggccacttggagtgcgcgcccccctctcgtccctcccagctcggcctctctgggggcgcgggcccggggctggcggccgctcggcccggcccatcccgcctggccggcgccgcggcctcacctcgctcaccagcccctgccagtcgctctcagtccggtcgccgttcatggcctcctcctccatgcgctggccggcctcctggacccccgccgcctcctcctcctcgcgacgtcgcgtcgccgccgccgcccgggccccgcgcggccccgagagggcccggcgcctccgagccgctgcgccgccgcctctcgcggccgccagcgctgttgactccacgtcagcctccgccggagggaaagggaggaggggcgcggccgccggggccgcagacacagcccgggccgcagccgagccccgccgggcccgccccgcgccctcagccccgcgacctcgggctccgcgcctcctgcccggcctctaggcaaggggaagccagggtctcagcctacaggtcactccggacccctcagcgctctccgcgcgggaggcgggcccc

SEQ ID NO: 40379 - DNA, 220 bp, Homo sapiens
  chr4:25031936-25032156
  hyper
gctcaggtcctcaccgtcctccccgggggccaacactccacccacgtcccccacacaaaggcaaagaaggggcctggggagtgggtcagggtcgcgctggcccggcgccagaggcaactccctcgcggcggcggacgcagggtggggcgggacgggatgggggctggaggggtcccactcacagggagctgatgtcgcccggcacgatcctgggcaccca

SEQ ID NO: 40380 - DNA, 30 bp, Homo sapiens
  chr4:25032473-25032503
  hyper
agcagcatgctggccgccacccccactcgg

SEQ ID NO: 40381 - DNA, 30 bp, Homo sapiens; identical to SEQ ID NO: 3223
  chr4:25162005-25162035
  hyper

SEQ ID NO: 40382 - DNA, 77 bp, Homo sapiens
  chr4:25235354-25235431
  hyper
tgtcagggagaagccgcttttggttgcaggagggcacctctttgaaaattactcaccttcccgccctccactgggag

SEQ ID NO: 40383 - DNA, 30 bp, Homo sapiens; identical to SEQ ID NO: 3225
  chr4:25378959-25378989
  hyper

SEQ ID NO: 40384 - DNA, 30 bp, Homo sapiens
  chr4:25379421-25379451
  hyper
acacagcttaacaccgtcacgcaatcctgc

SEQ ID NO: 40385 - DNA, 65 bp, Homo sapiens; identical to SEQ ID NO: 3226
  chr4:25656815-25656880
  hyper

SEQ ID NO: 40386 - DNA, 469 bp, Homo sapiens
  chr4:25657098-25657567
  hyper
ttcttgaggagaaggcaggggcgggagagccccacttgcgggaatctcgtgcggaccgagtcggggcgggagagggcgcgcaccagccaggctagggcgcgcggggcgccgaggggcgcggggccgtttggggccgttcgggccagttcgcgcggcggggcccgtcggagcttttctctcggcagcctggctggccgcgcgtcttctccgcgcagcgggcgaagtcgcgatgggttcattaaggcggcaggtaggcagtgccccggcggcggctgcggcaggcggtcctggaatgtgcgaggggcgtgatgacagcggccagcctctttgcgcaacaccttcgccatatatacccggggcgctgcgctccacctggccgccgcctccagcccagcacctgcggagggagcgctggtgagtaccgccgccggggcaggggcgcttcctcgctctttcaaggactttgatt

SEQ ID NO: 40387 - DNA, 30 bp, Homo sapiens
  chr4:25863674-25863704
  hyper
actctggcggtaagcgtgttacagagaact

SEQ ID NO: 40388 - DNA, 101 bp, Homo sapiens; identical to SEQ ID NO: 3228
  chr4:25864189-25864290
  hyper

SEQ ID NO: 40389 - DNA, 252 bp, Homo sapiens; identical to SEQ ID NO: 3229
  chr4:25915658-25915910
  hyper

SEQ ID NO: 40390 - DNA, 54 bp, Homo sapiens
  chr4:26030408-26030462
  hyper
tgggtgattttacgtgcggatgcagaggaggggcagcgtcggggcggcggagtc

SEQ ID NO: 40391 - DNA, 30 bp, Homo sapiens
  chr4:26321337-26321367
  hyper
tacatgcgcagtgccgctcgcgcgggccgc

SEQ ID NO: 40392 - DNA, 30 bp, Homo sapiens
  chr4:26323531-26323561
  hyper
ttagttttctcctccgcacctctttttctc

SEQ ID NO: 40393 - DNA, 30 bp, Homo sapiens
  chr4:26863097-26863127
  hyper
gccagggcgcgatgcggagccctgcctgct

SEQ ID NO: 40394 - DNA, 511 bp, Homo sapiens
  chr4:27086329-27086840
  hyper
tctccttacgcttatcggttttaacacatgccatttaccacctcccacccgctgattagggggctggaaacgggcttacatcactgtcagggcaggagaggaaaaattgcaaagtaaacggcaagatgttgccgcgatagcgagcaggaaaatctgcagtgcttaggagaatgcgggacccaaatgaaattccgcgtctccccgcggcgggtgccgcagagccaccggcgaggggcgggcgccaccacgtgactgattattcaaatggaccgatgattaactcggtttatattgatgcaaataatcctgccggagcctgcaacggctaatgcattttggaactgtggtttttccattgatagcacaaaatattgtagaggaaagccattttcataatattaataatggaattacagaatcaggtcacttaaaggaacggcgctgactcagcgacagcagcgtggaggttgaatgtggggattagcactgagcaaaacgaatacaaaccttt

SEQ ID NO: 40395 - DNA, 30 bp, Homo sapiens
  chr4:30719002-30719032
  hyper
cagggcaaagccgccgccacttctttgctg

SEQ ID NO: 40396 - DNA, 1063 bp, Homo sapiens
  chr4:30720726-30721789
  hyper
caccctccacccaccgccgcccctgccccccgcaaccatccaaagtctgagctcccaaaaaaggatctttctccagctctctggagtttgatgttctctcttcactactgcagcccgtcatggtttttcagaacagagtggctttctgggcgctcgtaggttccccaggaccccgataaccatgtcctaaccaagatcctaaatcgcgaaccggagacactttccggggggaggaggacgtcgtctgagagggagggagaaggagaaacctatcctgacaccagctccgaaagctctcacgcgtgaactgggcattagtcaagggaggaggaaatttaccagcccgagggagggaaaacaagtcccccagagaagacggcggtactcgctagggagggggactgggctttggcttaaagaggactggctgggattgggcacactttgagcggcccctggagctgaggctgggctttcccgagcgcggcggctggctgacgctccctcccgcctccttatcccgggccctcctccctcgctctctcctagtgtgtagtttcggcggctcggctgctactgccgccgccgctgcagcagcagcgtcagggacaagcctgatccgtgagcgagcgagcacccagcagcaaccaccactttgggcaacttgcgggtttcctgctcgcgggtagcgaacgggagattcccactagcggttcagtgtctccgagccgctgcagcccgaggggcggcgggagcgcccgcaccagactctcccagacgcgaaaagggacgagacaactgcggaattcaccagccgtgccagggcacttccgaggccacaaccgactgacactttttctccccttggcaaactggatttttttttttaagctacttggcagctgtctctgactccacctccccctccacccccgcccgaaagcctttggcttttcttcggaaatccagacagaattgggcatctttgttaattgccgttggggacgcccggccgtgcgctttcgccggctaacgtcgcctgtgctccgagcctggtttgctc

SEQ ID NO: 40397 - DNA, 776 bp, Homo sapiens
  chr4:30722020-30722796
  hyper
ctccgacatgcgggccgaatgcaggtgagaaaaggcacggactctgcggctgcgaacccaaacttgggcaccgcacggtgcgcactgctcagccttcgcccccgtgggcgaaaggctgctgcggtttcaggcggctgcttcgtgactaatgaccttgcgcagagttgttaagaaaaaagagaaacccgcgctctccggggtgagaagggactgactctgggcgtctctgaagatggctcgggcttctctttggcgcgccggggggaccctgacactgaccgctctgtgacgcgagtagtctcccctgcaccgtgcccgaagcgacgtgccgggggatttttcattctcgatctgttgactggctcccccgctgcatgagcagagtcggagttgagactggcttgttgctggccccagcgcctggtgcaggaagcgactcacgtttgtctgggtggccggagccggagcagagcctgggtttggagtgagtgcctggaacgtgaattggactcaactcgagtagcagcaaagaccagcgggctggcaggcgggggaggctgcaggctcattccccacctcttcccagccccactgcccgtctgccggagcggttctggccccttccgacagagcggggactagagccggggattctccgcccgctgaggggatgactctgggttgggggagcgccgaacccgcggcgcgcagtgtcccgtgaactgtgagtactgcgactgaacggcggcaggcgagcgggcgattagcacccattg

SEQ ID NO: 40398 - DNA, 18 bp, Homo sapiens
  chr4:30723494-30723512
  hyper
acggtggaggagaatcgg

SEQ ID NO: 40399 - DNA, 207 bp, Homo sapiens
  chr4:30723855-30724062
  hyper
gcgactcctacgagctgaccctgcgagtgcgcgacggcggcgacccgcctcgctcctcgcaggccatcctacgggtcctcatcaccgacgtgaacgacaacagcccccgcttcgagaagagcgtgtacgaggccgacttggctgagaacagcgccccggggacccccatcctgcaactgcgcgcagccgacttggacgtgggggtca

SEQ ID NO: 40400 - DNA, 304 bp, Homo sapiens
  chr4:30724126-30724430
  hyper
cgagacgtccggctggctcagcgtcctgcaccggatcgaccgcgaggaggtgaaccagctgcgcttcacggtcatggcccgcgaccgcgggcagccccccaagaccgacaaggccaccgtggtccttaacatcaaagacgagaacgacaacgtgccgtccattgaaatccgcaagattgggcgcatccccctcaaggacggggtggccaacgtggccgaggacgttctggtcgacacccccatcgctctggtgcaggtgtccgaccgagaccaaggcgagaacggggtggtcacctgcaccgtg

SEQ ID NO: 40401 - DNA, 799 bp, Homo sapiens; identical to SEQ ID NO: 3234
  chr4:36245408-36246207
  hyper

SEQ ID NO: 40402 - DNA, 140 bp, Homo sapiens; identical to SEQ ID NO: 3235
  chr4:36246257-36246397
  hyper

SEQ ID NO: 40403 - DNA, 82 bp, Homo sapiens
  chr4:37245499-37245581
  hyper
tgcactttgcgtaacgttgcgctggggggcgctccagagaacccacaccctcccgcccggcccaggtgcgcacccggccgcg

SEQ ID NO: 40404 - DNA, 524 bp, Homo sapiens; identical to SEQ ID NO: 3236
  chr4:37245836-37246360
  hyper

SEQ ID NO: 40405 - DNA, 210 bp, Homo sapiens; identical to SEQ ID NO: 3237
  chr4:37246489-37246699
  hyper

SEQ ID NO: 40406 - DNA, 222 bp, Homo sapiens
  chr4:37247015-37247237
  hyper
gctggccggttttgcctgcacacttctattaggacacccattctccaccccgggttattcccctgggtcaatccaagaaacatccaaggcattagccggcccttctggaagctccattctgccgccgccgccaccaccacctcctgtcccccgcccttttttttttttttaaagcggtttcttctccgagatgaccgcaaacacaaacagtagctctcctcc

SEQ ID NO: 40407 - DNA, 630 bp, Homo sapiens
  chr4:37455199-37455829
  hyper
tgttttgtgtatccccgtactccagtcccttgatcataggaagctcccttctctccagcgcaacattggagtaagcaccccggagtttcccgtgatggcaggcggttggcgcggtcgtttgtgctcagaggccaacaagcgcgtggattttctgcttcagtgcgcccgggactgccaccccggccccggggatgtcggacatcgtactccagggtttcgagccctagccccgccgcatcctcggggcgtgcaggtaaagggttacgcgtgtcgggaaggctcacccgcagcccgggccacgtgacgcgcgggcccaatgacagcgctggggcggccgctgcgagctcggcgggctcagggcagcgcggagccgctagcgtctcccggcgcggctgcccgaggccggcgaagccatgggcgccgggaccccgccgccgccgccgccgccgccgtctggccccaggtagggacaatcccccgccccgcgcgcgcaaagagggctttagtcctgcggaacttggctttggggcgagctttcccccacttctctccgagtcgcctacttttaagtttaatttcttgatttgcttttgccctgaaaaaaaaaattagagacgcaattcaaagttt

SEQ ID NO: 40408 - DNA, 30 bp, Homo sapiens; identical to SEQ ID NO: 3241
  chr4:37526315-37526345
  hyper

SEQ ID NO: 40409 - DNA, 30 bp, Homo sapiens
  chr4:37687714-37687744
  hyper
gccagaaagcaggacgccgcggggctgccg

SEQ ID NO: 40410 - DNA, 87 bp, Homo sapiens; identical to SEQ ID NO: 3242
  chr4:37688563-37688650
  hyper

SEQ ID NO: 40411 - DNA, 30 bp, Homo sapiens
  chr4:37892178-37892208
  hyper
ggccgagcaagcggcgggcagtgccacctg

SEQ ID NO: 40412 - DNA, 30 bp, Homo sapiens
  chr4:37893298-37893328
  hyper
gcgtgtttgcaaggcgaccagattggaaag

SEQ ID NO: 40413 - DNA, 211 bp, Homo sapiens; identical to SEQ ID NO: 3243
  chr4:37978651-37978862
  hyper

SEQ ID NO: 40414 - DNA, 31 bp, Homo sapiens; identical to SEQ ID NO: 3244
  chr4:38098758-38098789
  hyper

SEQ ID NO: 40415 - DNA, 30 bp, Homo sapiens
  chr4:38320994-38321024
  hyper
ttaggttgcctcgacggccatttccactta

SEQ ID NO: 40416 - DNA, 31 bp, Homo sapiens; identical to SEQ ID NO: 3245
  chr4:38664663-38664694
  hyper

SEQ ID NO: 40417 - DNA, 30 bp, Homo sapiens; identical to SEQ ID NO: 3246
  chr4:38666036-38666066
  hyper

SEQ ID NO: 40418 - DNA, 355 bp, Homo sapiens
  chr4:38666433-38666788
  hyper
ctcccgcccgctcacgattccctccaaagccccagaaatctccgtgctctccgcgtgtggcaacgttgtttggagaaaggtagcgccgcggccgcgcgctcctgctcctccccctcccggtgcccccccaccaccaccacaacccaggctcccgcgtccttcccctcccctccctccgcccgcgccccccgccgcccccctcccaggacacggcgcgcggccgctcgcccgccacagcaaacttggagcagtctcccggccctctggaaagaaacttagggcaattgggattggaggcagcatcccattctcggttctggagcccaggagctgccagggcgtctggatcctccgg

SEQ ID NO: 40419 - DNA, 31 bp, Homo sapiens
  chr4:38732941-38732972
  hyper
agggaggcccaggcacgcggagcttctagtt

SEQ ID NO: 40420 - DNA, 615 bp, Homo sapiens; identical to SEQ ID NO: 3248
  chr4:38868923-38869538
  hyper

SEQ ID NO: 40421 - DNA, 313 bp, Homo sapiens
  chr4:39047090-39047403
  hyper
aactggaaaccatttcggattttttttttcctctccttattacttgcaggcaattttgacctaagtttttaagcttttcttttaaataataccctcgcccccggagtgtggagaataagacggggacttcattttcccgagacccggcgtgcctggtgaaacttttgcatttaggcatttatttcagtgcatgctctgggatcagaagctggcggtaaaagtttgctatgtcagagagtaaagcgttactgtcgttttttatcgcttcatttcattttcaaaaatattcttcagtagtcgacaagttcacaga

SEQ ID NO: 40422 - DNA, 87 bp, Homo sapiens; identical to SEQ ID NO: 3250
  chr4:39183809-39183896
  hyper

SEQ ID NO: 40423 - DNA, 142 bp, Homo sapiens
  chr4:39368011-39368153
  hyper
gcgagctttgcttccgtcccgcccagaggcgggaggtgcgacgcctgcccaggtgctgccccgagggcaggcgggccgctgacatcgagaggaaccacggtgctttggtgtgagctcggtttttggcgggggcgctaaagta

SEQ ID NO: 40424 - DNA, 30 bp, Homo sapiens
  chr4:39461140-39461170
  hyper
ccgctaggcttcagcggcagacattgagaa

SEQ ID NO: 40425 - DNA, 250 bp, Homo sapiens
  chr4:39529279-39529529
  hyper
tagctgggcaaatccgctttggccagctcagcggctccgcccctaccgcgagcggcgctgggcggggctgcgtgcgtggcgtgtccgctggaccaggggacgggggcgcgccgcaggtgtaggagctttgcgcgcctacctggcggtcgtgggtcgaggaggggtcaagaattgttgtctagcagccctctccccgctgccctgtcctggccgaggcaaaggccgcgtgcgctccgcgtctgccaggctt

SEQ ID NO: 40426 - DNA, 250 bp, Homo sapiens
  chr4:39529694-39529944
  hyper
ccccggggtcaaccgcgccctccgggccggcaacccagggtttagtcagattcctcctgacccaccgcttctgggaaagaggcgcctcccgtcaggaggatgctgagttcctcatgactggaccagtgagtgtccactccctggtccctggcgagagaggcgggacccccacgccctcctggcgctctttgcagagatgttcctcaggcccaatccgggatttgggatgtctgtgcgtgctgtggagcag

SEQ ID NO: 40427 - DNA, 30 bp, Homo sapiens
  chr4:39639312-39639342
  hyper
taaaggaatctgcgcggccagccaccctaa

SEQ ID NO: 40428 - DNA, 30 bp, Homo sapiens
  chr4:39640543-39640573
  hyper
agacccggatctgccggctcccgcgggcgg

SEQ ID NO: 40429 - DNA, 30 bp, Homo sapiens
  chr4:39978125-39978155
  hyper
agcgatcttcccgtcggcactcacgacgcc

SEQ ID NO: 40430 - DNA, 13 bp, Homo sapiens
  chr4:39979357-39979370
  hyper
cgcttgtgtccgt

SEQ ID NO: 40431 - DNA, 30 bp, Homo sapiens
  chr4:40057226-40057256
  hyper
tcatgaggttatttcgcttctctattctgg

SEQ ID NO: 40432 - DNA, 30 bp, Homo sapiens
  chr4:40057544-40057574
  hyper
cgaaaactcaagctcgaactgggggcaaag

SEQ ID NO: 40433 - DNA, 30 bp, Homo sapiens
  chr4:40569239-40569269
  hyper
actttctaacaacttcggaattttaggaaa

SEQ ID NO: 40434 - DNA, 54 bp, Homo sapiens
  chr4:40631724-40631778
  hyper
attccacagtggaaagcgggagcggcgacccgaaggcagcgaagttctctcggg

SEQ ID NO: 40435 - DNA, 336 bp, Homo sapiens
  chr4:40632133-40632469
  hyper
aggttcaaagaaaatcggccttgatggcagagattgggggacttgaccagacggacttctctccccgccccaaaagtcacatgcctttcagacacccagaagtggcacctgctccacctgggggcatctgtccgagtcagacgctcggcccccttcgggctgctccgagaaacccagccagaaccacgttggagaaattaggaacctgctgctgaatttcaagccgatcggaaccgccccgctccccttcttccccccataaacaagtcgctggacgaggtgggatctctgcgacccccgcgtgcccggggagagctcccggggcgagctcccggg

SEQ ID NO: 40436 - DNA, 30 bp, Homo sapiens
  chr4:40751828-40751858
  hyper
gaaacaggtgtctccgcgcgctgggggaag

SEQ ID NO: 40437 - DNA, 495 bp, Homo sapiens
  chr4:40752078-40752573
  hyper
gcgcgaggccaggcgaggccccgaggcgcccaccacttcacgacaccggagcgaaccgggcgccagaggctgcgacccccctgccccgaatcctgccggtgggagtggctgcatttgaaccaaacggccttcgcgggcagcagccgtcgccccgcagtcccggggctcccaagggcctgtgaccgacgccgccctccgcgtcttcgtccccgaagccccgggaaccatccgccctcggggtaagggaggagtcgggggagccggtgactgggctgtggggacgcggacggggctccgggggcagctctgcccccagactggcttgagggaagccgtcggtctccttggggctcttctccctccgccgctgcacccctcctcgcttttttttttttttttgagcgtcccaggctcgaagtctgggacactcagatgggacgggaaatgctccctcttagtctttaaggccacaacgaagggggccacccacagggg

SEQ ID NO: 40438 - DNA, 31 bp, Homo sapiens
  chr4:41003481-41003512
  hyper
aattcttcaagtaacacgcagggagaaaaat

SEQ ID NO: 40439 - DNA, 31 bp, Homo sapiens; identical to SEQ ID NO: 3253
  chr4:41168397-41168428
  hyper

SEQ ID NO: 40440 - DNA, 139 bp, Homo sapiens; identical to SEQ ID NO: 3254
  chr4:41216264-41216403
  hyper

SEQ ID NO: 40441 - DNA, 316 bp, Homo sapiens; identical to SEQ ID NO: 3255
  chr4:41218382-41218698
  hyper

SEQ ID NO: 40442 - DNA, 13 bp, Homo sapiens
  chr4:41258775-41258788
  hyper
aaggtttgggggc

SEQ ID NO: 40443 - DNA, 788 bp, Homo sapiens; identical to SEQ ID NO: 3257
  chr4:41259085-41259873
  hyper

SEQ ID NO: 40444 - DNA, 380 bp, Homo sapiens
  chr4:41362382-41362762
  hyper
tgcgccccactgggcgcgcgtctcccatatgatgccagacccatccgcccgcccctcagcagccggcggggcgcagggacgtgcggggcggccagcggattccctctatcgggccgggtgtgaacgggagggagacacgcagcgctcgctccgggttatttttagtccgtagctgtgctccccctccccgggggcggagcggccctcgaaggtggggaggagaagaagctcccggcgcctccgcgctcgctcccgcgggtcactcacggcgcgttggagcccgggcggcgccgggaacagctgccgcggcgtcctctagcagcgcgcggctctcccgggacctgcgccggccgggggcggggagaggcggggaggggagg

SEQ ID NO: 40445 - DNA, 1058 bp, Homo sapiens
  chr4:41362780-41363838
  hyper
cggggagcgcgctcctgcggcggcgacggcggcggccgtcctcatcccggcgcttgagaggacgcggggctgcgcaaatggcttgtcccgctctcggtctggaagctcttcagcccctgcagcccgagccgccccccgagcccgccttctccgaggcgcagaagtggattgaggtaggtgcgggtggctggcgggcggccttgcactggcgccctgagccacggacccgcgcacgctccgaccgcaggtccagccttgcctccccccaaccgcccccactttcttttgccagctgctccaggtcacccccccgggcctcggcgagccgcgaaaccttagcgctttggcattggaatcccgggcgagggtgggcgtgaaaggggacactgcagtctagctgcgcgcgtgagggcaggaagggatcccctgcgcgtccatccttcctgcccgctggcctcgcaaatctcagctagcgccgcttccaggcgctgccaagggaagcgcagtgctagcaaagcgttgcaaaggcgcaggaagcgcgagcccccagagacttcaccggtgctcgcatttcggggtatcttgcttctggtcccacatttcgccccttgtccccctaccccgcacccttccggagcagagttggcagtgtcttcacggaggcgcatacccaccggagcctcttgctgtattcctggcaccgggtcaggtgtgaggctggcacagtgcgcagggcgggggtagcttgcaagacccacctgcgagcacgcatccgcatagacgctgcccagcctttggcaacccccgcccctctccatcccaaggactgcagggtcggttccgaagtacgggctacccggtctggttggcatatttcacttcttaaataactcgttggcaggccagggaaatcactggagctctcggctctcagtcccggaagcgctcactgggtgatcctgattcacgatgtctatcagtagatgcagcttggtagccccgagctcccgaaatgaactgtctgcggggttcaggacgcttgaagggcatgaagggga

SEQ ID NO: 40446 - DNA, 312 bp, Homo sapiens
  chr4:41746821-41747133
  hyper
ggaagaagaaaatgccgacggggtaggcgggagcgagggggaaaaaaagagttgcgaaacatgagacacattttgcagagtttgcagatgaaaaggcatctcatggatagggcatctttcagggccgaacggctgcaaagattcggggttgggagttgcaactgtgtggggttccgatgcgctaatggcgggatggtgttcagcgaggtgggacaggcaagggggtgcgagaaagtcactccggccgccgggacagtctgagcaagtcgtcgccgcagtgacccgaacccaaggacacgataggaagggggg

SEQ ID NO: 40447 - DNA, 30 bp, Homo sapiens
  chr4:41747506-41747536
  hyper
cccgcgtccaggccgcgctgctcacaaccc

SEQ ID NO: 40448 - DNA, 30 bp, Homo sapiens
  chr4:41749691-41749721
  hyper
gctgcgggaagaaaccgaggaaatttgtta

SEQ ID NO: 40449 - DNA, 315 bp, Homo sapiens
  chr4:41750096-41750411
  hyper
ttaattattttctaagctttacgtctcatcgcaaagtaaataaattatgcctatcattttggcagcttaagataattttgttggcggttcgggtgtgactaggatagtgtaaccctgtaagtgaattacccctccctgcaatcgcttctaacgtgataaattctttcatttgtgtaagcaaatttcgtttggtaaatactaaacacatttccattttcaaatgcaatcaaggcttcctatatacgggcggaaaggcggcttcctccgctgagaaagctgaaggtccttacctgcggcgtacggactgctctggtg

SEQ ID NO: 40450 - DNA, 30 bp, Homo sapiens
  chr4:41751782-41751812
  hyper
aatcctccacagacccggggattgtgtctg

SEQ ID NO: 40451 - DNA, 296 bp, Homo sapiens
  chr4:41752226-41752522
  hyper
gtctttataggggcatttaggcgttcagtgtttgccaaactaagtggtttaattcgatgctagtgccggggagtggatgggctcccgctctcccctgccaccgtgttttattgcgcactaaactgccgcggacgcagtaatggattaaacggggacagcggtcccccagccttgtgcttctttgcagggtgagtttcaggctcgtttcaggtggttgcaaatcctcggggcgtgaggaagcgctaaagtcgggagtgcagggagccggacctaccgaggatcctggtgatagtttt

SEQ ID NO: 40452 - DNA, 1151 bp, Homo sapiens
  chr4:41752765-41753916
  hyper
cagcaaagacggatgcgaatccaagtgctattacagcggagatttgtctttatttatcccgctctcatgaatatgaatttgcatttgggccgggaggtggctgtatccctttggactccacacatggaatttcccccacgctcatccccctccccaaccacttaagggaggtgggggataggttgtcaagcacaaggctgagatcgtccaagtttcttcgttccctcggatttcgggttgggggatgtgcttgctggttttctgaacgcaactctgccgccgaggcctgcactcaggagatgtggatgtagggagcacaggccggggtgtccaccgccagcccgctcctctgctgtagggtttaagcgcgtttccctgcagaagagagtgaccaggggtggtcaggaggtgatgaatttcggctccaaggcctatttttgacagtaaccaggttcacaccccgcttggcactagagccttactgcacctggggtgtgtctccgcgtggtgcagagcgcgcgctctactccggaagctacggccgggtgccgcgccaccgctgtgcgccctgggcctgatccctacgccctagtcgagtgcagggcagggcaatttcgccgtgggtcctagtttgctgacagttcccaggcccctttagcttttggggaggaggcgagactaggacctaaaaagtgctgggagctcggagtagaggggttcatgttgccagtttctgaggattgctcttaggtgaagatgtggaacttggaaatttaggtggtgcacagaggcacttcctgagcgaaagggagtgttggggtggggagttcagtgggcacctcaggggacctggatgctgacggggcatcagagggtgtcaaaaggagaagctaagggatctgggcgaggtctcagccgaagggcgctggcaagggaagtgcttggccggggagggtgcccggggggcggtcaaggggcaggcccggggctctgtccctcccggtcctggggtcccttcccgtcccgcggttccggaacgcctcgccagccctctctgggcgccccctgctgccgggcgccccctgctgccggccgccccgggtcggggtgccgtgagccttctcgcctttgtaccaggagacctttcagcg

SEQ ID NO: 40453 - DNA, 15 bp, Homo sapiens
  chr4:41754030-41754045
  hyper
cgtccctctgcccgt

SEQ ID NO: 40454 - DNA, 155 bp, Homo sapiens
  chr4:41869044-41869199
  hyper
cccccattcagggaccgaattgaaatggatatttccctcctcggcccagctgaacgaggctcaatgcctcaaagatgcagagctgcctcggtggacatgctctgtggctgatattataattttcataatgcgcttttatgtcgcgccagactcct

SEQ ID NO: 40455 - DNA, 314 bp, Homo sapiens
  chr4:41875473-41875787
  hyper
cgcagggtggaggagcgggtagttggggaaccgggcgcgcctgatggggcgcaggaaggaaaaactgatcgacgcaatggcccccgccaccggccatttggggctttcaaacgccctaacgaggagtccgagcggccactgaaagcctccctgttcctgggcagggcagccagagtgccctcccctctcccttcccagcctcccggcggcgccaccattaacccggagccagacccaggcggaggccccggcgccgaggcccgcggaagcaagagacagccctgatagtcttctaaacccggtccagtttcgag

SEQ ID NO: 40456 - DNA, 51 bp, Homo sapiens
  chr4:41883149-41883200
  hyper
ggtgagggggtccgcgcagcggcggaccccgcaccccggcccccaacggcg

SEQ ID NO: 40457 - DNA, 512 bp, Homo sapiens
  chr4:41883399-41883911
  hyper
gatgtccccatttagcgcctttgactggtcagctgaatggggccgcctgcttttgtcctttcccacaagtcccttcagaaagatccctttaaacgcccggtacccgctgatggatccgttttcaaacggcgcggggacggcagtgccggaggccgcgtctccttagtaatcgcgcgggcagggctcggcaaggggtcgctgcaagggtcgcgctcacccgccccgggtttgggcgctgggggtggggaagggagagaaggttcgaacagttttgtctctcccgcgccccggctcccccagggtgctgcgcctccagccgccccgaggcgcttcccccggcgtccgcgcgctcctctccgcaggggtctcgcgcccacggtgccgcagccgcgcggctcagccgccctccgcacccgcgcctttccagcgcccgggttcccaaaccatcgctaaaggcggacggggggcgccaggagtaacggctgctccccggagaccccaccgagcccagc

SEQ ID NO: 40458 - DNA, 71 bp, Homo sapiens
  chr4:41884450-41884521
  hyper
gccaaggtgggggctcgaaccctgagcggccgcgccggctacttacgttgaaggtgcgcgcattccagacg

SEQ ID NO: 40459 - DNA, 30 bp, Homo sapiens
  chr4:41884967-41884997
  hyper
ccctctgctggagcgcgcggggagcaggcc

SEQ ID NO: 40460 - DNA, 178 bp, Homo sapiens; identical to SEQ ID NO: 3264
  chr4:41991960-41992138
  hyper

SEQ ID NO: 40461 - DNA, 30 bp, Homo sapiens
  chr4:41992606-41992636
  hyper
ggtaccggtggcggcgcggaggcagaaggc

SEQ ID NO: 40462 - DNA, 30 bp, Homo sapiens
  chr4:42119644-42119674
  hyper
cccgcccctgtcgggcgtgaccgacagcgt

SEQ ID NO: 40463 - DNA, 450 bp, Homo sapiens; identical to SEQ ID NO: 3265
  chr4:42152961-42153411
  hyper

SEQ ID NO: 40464 - DNA, 41 bp, Homo sapiens; identical to SEQ ID NO: 3266
  chr4:42153591-42153632
  hyper

SEQ ID NO: 40465 - DNA, 1123 bp, Homo sapiens
  chr4:42153881-42155004
  hyper
ggcccggccgggcccgggggggtaggagctctgcgcctggaactgctgcggcggcggctcgctgctgctgatggagacggcggcgtgcggcgcgaagggcggcgggggcggcgggggcgcccgcacgtgcggcagctccaccagggtgggtcgctcgtagcgcttggccagcgccggtctcttgctggggaacgtcttgaggacgctgtaggggctgcgctgcttgtagattttggggacgctgggcccctcctctgccggctgcatctcttcctccatccggcgcctcggggccggtccctcggagcacgtcccctccccgccgggcgccgggctccgagggtgcctccgccgcctgcccgccgggtctgccctggtgcgcgcgtgtgggagggtgtgtgtctgtgccgtggccgccgccgccgccgcctgtcgctgaggctggcatcgccgagcccccgcgcggggggctgccgcccgagctcctgattgacaggctgcctcgccaatgcctggagggagaaaggaggtaaagagcaagtgtttagggtaatatctgctaatgataatgggggcggggcggggcctggcgccgcagccgcccgcggggtctgcctggcggctccgcgcctccgacggggagcgggggaagggggaaagcgaggacctggaggacgcccgggaactggtgaagaaggtggggatccgggatctggctacggcgagactttagagacccagatgtggactcgaggcttctgcggctgcgggcggggtccggcttccgaaacgagctcgtggcgccccctgcatgaccccaaactctcggggttgcacagaggaggggctagtcgttggggcggggtcgtcagagtacgtgtgtattacagcaagttcttctaccaatcgggaattgctctccgatccttctgaaaagaacctcttgaagatcttggcccgggtggtcgcgcggtgtttacggggctttggggtcctgctttccccgagcatcgcggcctctgagctcatgcggaacataaaagctcgcaaggcgtagaactttttcacgttttcatttgtttcccgtaggggccccgagaacgtgcatgacaccatgatttcc

SEQ ID NO: 40466 - DNA, 2289 bp, Homo sapiens
  chr4:42398814-42401103
  hyper
ctttgcgggcgtgaacggagaagtcgtgctctttgaggttttgcgagctggccttggctggcagaggtgaccggcaatccttcagccggcggaaaaagtgcgagtgtgtgtgtgtgtgtgcttgtgaaaatgtgccgttcctcccagaaaaagtggaaacgtaggtggaaagctcagcacatgttggcgacacctaaaaaccatgttctcggtcctgaacctttagaagcggtatcccaggaacgagtctgagtctgtgcaacagggcacagatgattcgacaaacttcaatgactgcaccgcattcatgcattatatccattgaaaagtaaatccagcgtctccactcgcgcgcccacgtgcgtggataaacgcgggaattcggcagccctcaacgtcactctgcagagatttccgggctgtgagagagttggggtgtgcggcgggggaggggagggtctgatatcttcaggttgagagtcaagtcctgggggagcggcatgggcgggggtggccggggggaggcggaggatggagcgcgaaccagaaagcgcagaggaccctcggcccgcgccgcacccgctgtgattagctccagaggcgcgatccgggagggcggactctttcttaaccctcattgtctcctcctccctcttcctttttaaaagacgccttgcgggcagagctgtcagcaaccccgcggccgtttgtacttggccgcggcggagctgactcctgctcctgtgacagataggggctggggctgagcggccgcctgtctggggtactcgcacgtggggaacaaattcttttcctccggctcctctcgggacccggcgatcgccacaggttgggactctgtgcggcgctggagttggcagccccgggcgctatggctcccttgaggagtggggagggaggtggccggggggttggcgcgcccctcgcgcggggagcgctatgagccgggcgaagggcggcagcgacagccccagcaactgcctctgccggcgcctcccgcaggccctcgccaactcgccccgcgcaccatgctgactcccggcctgcggaactcgtagtgcagcccctgtcgcctccccggcccctgctatcccacgcaggactggcttcggccgccggggccagcagcttgcgacgtgtccctggggaggcggaatcgctgtgcgccctgagcccgggctcagcccttcgctttccagctgcgtcctgctcccggccgcccagggagcccagtggcgatgagggcactgctggcgctttgccttctccttggctggctgcgctggggcccggcgggcgcccagcagtccggagagtactgccacggctgggtggacgtgcagggcaactaccacgagggcttccagtgcccagaggacttcgacacgctggacgctaccatctgctgcggctcctgcgcgctccgctactgttgcgccgcggccgacgccaggctggagcagggcggctgcaccaacgaccgccgcgaactggagcacccaggcatcactgcgcgtaagtgcggggccctcggggacatatccccgcccgcctaacggcggcggctgcatgtgtgcgcgggaggatgcacagacccaggcaggtctatgcgccttcctgggtctgtgcgccagggggacgcggccgggtgggggaatcaagggatgagtgggtggtcgcgtttcagatcatggtcctctattcatttgcagtcccgcttcccgccacttgcggtctctgcgggtcggcccgcagggaaagtttgccagggacagtgaggagcgcggggcttgtgcctggtagccggggggaagacagctggagctcccgggagaagggtagtgcgggtaaagccagggtagacttgggttttggtggaggggccgagggtgtcccattgctcgcccttgtcacttcgggagcttcgggaagtgccgaatgcagggaatcgcgactcttgtcgcgcgctcatttgcagcccttcagggctaagaaaccccagtcactttttttttctgtcttaatgatagcgtttctaagccacggccccgttctgcagacttcctttcaattctctgcatcgaattaccctctccggcccaccccctattgtcacgcctttcagaaatgcccaggtcttcgaggtggagatttagaaacaagggtcgaaggggcttccccgccccctattctcacttcggaaaacacgggtcaaatttccgctgacttcagagcggaataaatcacgaccccagcagagaaaattta

SEQ ID NO: 40467 - DNA, 269 bp, Homo sapiens
  chr4:42657888-42658157
  hyper
agagtgggaatcagcgatgatggcaagatagatttctgaaaaacatgttattccaccctctgcaggattcaagtacaggtttatgggagaggacaaacaaaccttgggatatttacagtcttggctttgacgcgagcaaaatcaaataatatttacagagtgcctgccacatggcaggcaggatgttgagggctcctcggagacgatgaagagtctgggccctcggaaagcttacttgcttctaccccggagcatctgttgctcagtgt

SEQ ID NO: 40468 - DNA, 36 bp, Homo sapiens; identical to SEQ ID NO: 3270
  chr4:42659637-42659673
  hyper

SEQ ID NO: 40469 - DNA, 30 bp, Homo sapiens; identical to SEQ ID NO: 3271
  chr4:43770052-43770082
  hyper

SEQ ID NO: 40470 - DNA, 30 bp, Homo sapiens
  chr4:44448454-44448484
  hyper
cccagctggcttttcgtttgtccaaatcgc

SEQ ID NO: 40471 - DNA, 30 bp, Homo sapiens
  chr4:44449061-44449091
  hyper
aactggaggctcccgcgcggcagctgcacc

SEQ ID NO: 40472 - DNA, 168 bp, Homo sapiens
  chr4:44449401-44449569
  hyper
cggtgaaatgtaaatcgtgtctactgcataagggaatcgtgcagggagagccgctctctataaggagttaaccagcgcctgccccggacacccccgcggggcctccagcggggctcaaactggcggcggctcagcagggggcgaggggtgctgggaaacgccggggct

SEQ ID NO: 40473 - DNA, 90 bp, Homo sapiens; identical to SEQ ID NO: 3273
  chr4:44449652-44449742
  hyper

SEQ ID NO: 40474 - DNA, 205 bp, Homo sapiens; identical to SEQ ID NO: 3274
  chr4:44449971-44450176
  hyper

SEQ ID NO: 40475 - DNA, 334 bp, Homo sapiens
  chr4:44450741-44451075
  hyper
gagagaggagctccgccggtgcggcggcggcaatggagaggcaagaaggagctgctgctcctttggggcgagggcggggaagtgtgagagagacttgcgagaggctctagggctgctgctcggctctccgtggggagggcgggaggaggggccgaagcaaagaaaactcgccgccccggcagcttgcaagcgtgccgcgaggccggagcgccgacggtggcgctaactactcctggcagcacgggaggaggcactgacgtcaagccccggactgggacccgagcctcagctgtcatttaaagagataggctgcagccgcggctcccgggctccg

SEQ ID NO: 40476 - DNA, 30 bp, Homo sapiens
  chr4:44680329-44680359
  hyper
ctgtctacaccctgcgttttagggagtcaa

SEQ ID NO: 40477 - DNA, 30 bp, Homo sapiens; identical to SEQ ID NO: 3276
  chr4:44833239-44833269
  hyper

SEQ ID NO: 40478 - DNA, 1528 bp, Homo sapiens
  chr4:46391144-46392672
  hyper
agatgggtacttcacgccacaaccccctcaaccaagaccacctccgcaaccacagcgggaaaagctaggggcaggcagcccacttttgcaattactctacattacagtgaactgcggtcctcacgtcttcttttcttcactccccttaacaaaataaaataaataatttcccttcctgcccacccacggttgcccaagaccaagtcttagaggcagccgggttccgatcaagtgctgcgaaacgacgcgtttgacagctgctctggagccgaggatcacaataagagaaggcgcgtgaggctccggcagcaaacaccagccaggcaggcagcggtaatcacagtgagcaaagttgaagactataaaagagccaggctaacgtgctgccgagcaggtgtcctggattttattgtagttgcaaatatgcttctggtgataagtatcgaaattattttttaagtgcgctggggaggagggaggtgcgggaattgagcctcctccgtttccagggagcctctgaaagtggggtggggggagatgaggcatgcacgcgaggcaaagacaaacaggaaagtgtctctatcgggaccaacgtgtgcgaccctacctgaaacggcaagcagaattcggtgttttcttccttttgccctgatcttgacgagataggaaacttgggagagagagagagagagagagagagagagagagagagagagagagagagagagagagagaccgagactgcagcagccaagagagcgtggagcgatgggctggtggaagccggagaggagcgctaggagccgcggcggcggcgcgaggtgtagaaggaggcgaaggcgttcgtagtggcggtgatgggcggaggaggaggaagaggaggaggaggaagaggaggagggggaaaacgatgacaggagctggggccggggggggaaattggggggacgcgggcggaggcgcggtgcgcgccggcggtggcgggcacgagccccgcgcctggaggaggaggagtcaggccgggtaggagggctaaggaggttcccgggaaggcagggccccccctcccccccctcccccccccccacacacacacactcccctgcctcgatccctcgatccctggtaactgaccgtcgcccgcctggcactagcagcggcgcagacccgggcggcgtcgggcgcctgggtgcgctcggagcgccgctcccctcgcccacacctcgccggaggagcggagcccacgcgcagcctcgggctgctccccgaggccgcttgctggggctcccgagaggccccaaggttcctgacagagctgctgttgggtgttggtgtaaagccgggaatgtagtgtggcggtgatgccctagatccctggggccgcgccctgccgcccgtcccccaacatcaccctactgtggagcgacgtggctgctaagaggtaaagaggttccgctcctgctggagggcaaggggactaatcacgcctttacttagtcatcaacgcatccacgcaggaccaagttca

SEQ ID NO: 40479 - DNA, 935 bp, Homo sapiens
  chr4:46995371-46996306
  hyper
ggaagcgcaggagggcgaaactgaccccggcggacagagcgatcgcgggtaccttcttggcagaaaccatctttgcaacatgccatacttcaagcctgttcacgtttccaggctcttcagatgccctgagcagggtgcgaggagagggcagagaggctcccgcggcgtgcgcacactcgcgctcacactcgcccgcgctcagccagcccgagccgcggtgggcgtgtgtgtgcacggggccaggggaggcggaacctgccttcctcgccccctcctttctcgctcagcgctcaatgtgtatgtagagctatgtataccgctccacaccctttcgtgcccgcgcgctgaaggttctggggttcgtatccgcgcgcttgcgctgcaagactcggcaagtttgttccgactgtaactccggggatgaggaacggggtctctcgcccctcctccggcttcgcagcccccgaccccaagtgggctccccgcccacagcagtgttcgtcctcctacctcctggccccctcccttccgctgggatttggatctaaccaatgaagctcctctgtcatcaggttgtgcgaggacctgtttgtacccagagtcaaggttggaggtggagaaagggcgggtgacggggactgctgggcgtcgggtggtagcggtggtgaggagaggggatcaagtccgggctcaaaccacctttgagaccctcccattcaggtgttatggggggcggtagggagagcaatgaaagcagaaagattcttcctggtaacaggggttgcagctcacccggcggactctcgccaaactattgggaagtggactcgagccgcactctagtcccagtatttgctaagctattgctttaaagacaccccatttctttacccgcctccaccagacacgcgcacaccctccgctttgctgctcca

SEQ ID NO: 40480 - DNA, 214 bp, Homo sapiens
  chr4:47033408-47033622
  hyper
cgtaggatcccctgcgtggaaacagcagcttgtctctgactacccggaggacatggagcaccccaaataggaactttagagggattgaaatctgttgcctgttccactaggaatattgtttgcaaggcacaaggtgtcttttggtagtgagcgcgctctgcgcatgcgcaggtccattcgggaattactgcccagcagccgactaagttgcatt

SEQ ID NO: 40481 - DNA, 988 bp, Homo sapiens
  chr4:47033995-47034983
  hyper
acattcgcttgcggccggacttcggaggtaacgcttcatcttttttcaacctgtaacccatccttagttctccttttctgtcaaagataaatgtcaaaaaaaaaaaaagaaaaggcatgtcattttcgtaagcgtgcactataccctgggcacacacacacacacacacacacacacacacaccccgggtccccagtctcaggtggatgaatcctcaggcggaggcgaccttctcccgggccgacacaccctctgcatagtcactgcatcacgcgtgtgcccacacctgttttcccaggcagtcccctgaaaggggtggtggggggagcagggagggagcccgttaagaatggagtaagggctgggaagcccccagaccctccccagcctgctgtcactgagagaatctgttcctaatgtggcccacctccccggcagggccccccgtcgacgttgggatgcggatcgatgtcgccagcatagacatggtctccgaagtgaatatggtgagtggcctcccgaggggcccggcggttcggcttacgcagatgggaaatggacaggtccctttgccctctgcgtttcattggcggtcacctcgcccctggcccctgaggtcccactccgcacccgctccccgctccggcacacacacccggtcgcccctggtttgtaatttcgacacacacgggctactgcggtgttccaggggaaacgtgctcggcactattttgggaaggacgagtgactgttgcgccgtggatctgctggggcggagtctgagcgttactttagctgggtttccctgcgtgtttggatgaggagggcaccatctgctggcagccgggcggcctgcactagggtccccggaccggtggtcggcagccatcacctccccaggcgcggtgctggcaatccccatggccctcgcagtccgcgagcccggatgcaccaaggccctgccaccgagagcacagtctgggtttca

SEQ ID NO: 40482 - DNA, 30 bp, Homo sapiens; identical to SEQ ID NO: 3281
  chr4:47465872-47465902
  hyper

SEQ ID NO: 40483 - DNA, 30 bp, Homo sapiens; identical to SEQ ID NO: 3282
  chr4:47569090-47569120
  hyper

SEQ ID NO: 40484 - DNA, 315 bp, Homo sapiens
  chr4:47838719-47839034
  hyper
aaagtcagagctcccagggctcggtcccaggaaccgggagccgtgcaaaaagcgcgtacactgccatccactggccccgagcaggtagtagcaggagtgaggcgcctgccacgggagctcaggaactgggtcccagtaagatccgacaagacaccacctcccttccgcccgcacagcctgccctctctgcctgcagctagcgtcaccggtcggtccccgattcggagcagctgggaccctcgcggtagcaagcggattccggggccctaatgacaccgaaggagaggggcagccgcaaattagaccttcttcctg

SEQ ID NO: 40485 - DNA, 361 bp, Homo sapiens
  chr4:47839261-47839622
  hyper
ctgggatgccagcacttaggacgggcgagtgatccccaggcaccaactgggggccggggaaccaagcgcgagcccgggctgtggagggaccgacacccaggcgctcgcagctggggaagggggcttacgtctggggcaggcaagactgctgcacagtccctccagccacccggcgcccgagacgccggcgcagacaggaagctgtagatccccgaggggctggctccgacagctccacctgcagcctcccctgccgccagtgtgcagccaagtccactagatgcttggagggcaccgtgcggaggagggactctgcaggaaaggtggcatcacccccggcatggagaccggggtctccgga

SEQ ID NO: 40486 - DNA, 396 bp, Homo sapiens
  chr4:47839675-47840071
  hyper
cggacgccgggcgaccggggtggtggtcgggaccagggccgtgcgcctgggaactgggtgcagggcgctgagcgcggaactgtcagagcgggagctcaccggcggctggggaaggaggtggcatcgggcggaggagaggacgggggcgggaggggctgaccctgaattcaccgggactaagaggccatcacacctggctgcggtaggacagcgaatcatcgatcttaccggctttggggacccggctctgcggcagcgctcttccggagcgagggcaggagactgtttcatggataaaaagtctcgcttattcttctgtccacttttatcttggtcgcttttctctcctctacgtgtcccccggggaggcactacggatgattttctccaagctca

SEQ ID NO: 40487 - DNA, 30 bp, Homo sapiens
  chr4:47916483-47916513
  hyper
cgaagacagaaagccggaggagaagtcgaa

SEQ ID NO: 40488 - DNA, 30 bp, Homo sapiens; identical to SEQ ID NO: 3284
  chr4:48226149-48226179
  hyper

SEQ ID NO: 40489 - DNA, 461 bp, Homo sapiens
  chr4:48271820-48272281
  hyper
tgcgccgcggagtccggagcctagcgccccagagtccagagcaaagcgccccgccccgccctctgatctccccgtcccgcccccaatcaccccgccccgccccgattgctggccccgtggacgccctaccccgcctctgatcctgcaggcccgcccagtcctcgatcgccccgccccggtcgcttgggccctgggtggcaggtttgcgcagccctgcggcgatttcaaggcaagtgaccggaatgggtcggaagcgcgtcccggtgagtttcagggagcgtcccttaggtttccgggggcggcgttgaacctccctagccccagtcttcccatcccaggagacccgcccctagtggctcgaacgcccctagccaggagagccccgagtagtgccacttgtggaagactacgtgcctgtcggaattaggaaccgcacctccccttccgctaagcggtgggag

SEQ ID NO: 40490 - DNA, 130 bp, Homo sapiens
  chr4:48485158-48485288
  hyper
gagcccatcagagaacttgatcggcagccaggaacggttttttcctgctctggtcctttgtcaggtctttgttccgcccctggctacactcgataacagaaccacttactggcgattcacaggaggggac

SEQ ID NO: 40491 - DNA, 760 bp, Homo sapiens
  chr4:48485589-48486349
  hyper
cgacaacgtgaccctgctcttcgcccctctgctgcgggacaactacaccctggcgcccaatgccagcagcctgggccccggcacggacctcgccctcgcccctgcctccagcgccggccccggccctgggctcagcctcgggccgggtccgagcttcggcttcagccccggccccactccgaccccggagcccacgaccagcggcctcgcgggcggcgcggcgagccacggcccttccccgttccctcggccctgggcgccccacgcgctcccgttctgggacacgccgctgaaccacgggctgaacgtgttcgtgggcgccgccctgtgcatcaccatgctgggcctgggctgcacggtggacgtgaaccacttcggggcgcacgtccgtcggcccgtgggcgcgctgctggcagcgctctgccagttcggcctcctgccgctgctggccttcctgctggccctcgccttcaagctggacgaggtggccgccgtggcggtgctcctgtgtggctgctgtcccggcggcaatctctccaatcttatgtccctgctggttgacggcgacatgaacctcaggtacggatctgtctattccttgggcatctgtctcatcccagacgcgcgtttacggccgtgggctcacgacgaaggacagaggcagtggaggggttggaattaggcgtggaggaaggaggagaaaaggagaggaagttgatgacgccccggctttagaagtcaaggccgacctgcaggttgt

SEQ ID NO: 40492 - DNA, 522 bp, Homo sapiens
  chr4:48492096-48492618
  hyper
aagggtcattgtgccaacatccgggcgtggagagtttctgtagggagaaggacgaagaggggccccctcggcggggacgcgggccggtggcaggaagggcgtggagggcggtgcagcgtgcgagcccccgccgagggccatccccgcctccgctcggccgcccgggcaagtcgcctatttagggtgcggcggcgggcgggagcagtgcgcccatggcggccctgggggacgaggtgctggacggttacgtgttcccggcgtgccccccctgctcgtaccggtacccataccccgcggccaccaagggcaagggcgcggcgggcggcagctggcagcagcgcggcaggggctgccttcccgcctcctccccctgctcggcgggcgcggcctcgttgtccttcccgggctgcgggcggctgacggccgccgagtacttcgacagctaccagcgggagcggctcatggctctcctggcgcaggtggggccgggtctcgggccgcgcgcccgcagggccggcagct

SEQ ID NO: 40493 - DNA, 30 bp, Homo sapiens
  chr4:48833373-48833403
  hyper
gggtggacagatcgcgctcgggtctcggcc

SEQ ID NO: 40494 - DNA, 180 bp, Homo sapiens; identical to SEQ ID NO: 3287
  chr4:48908454-48908634
  hyper

SEQ ID NO: 40495 - DNA, 294 bp, Homo sapiens
  chr4:52710792-52711086
  hyper
tccttagagggatggccgggccctaggccgcgccccacgcccggggggcgcgacttctcccaggcgtgctgggagggcgcttgaggggtttcctttagggtttgtctccagtcaacgggtatgaaggggaaaggcggtcccgccgaattctgggacttgtagtcgcggccgcgcccggccgcggttgggttgggtgcacgtgggtaactgtggaaacgggtcccggcatgcagcgcgcccttggagccttcctgctcggccaactcgtgctttattccccggccagctcctgcg

SEQ ID NO: 40496 - DNA, 192 bp, Homo sapiens
  chr4:52904505-52904697
  hyper
cgccctggcggggactgggggcacccgctgctcacaccctcccctccccagcccgcatccctgacgacccgcatcccagccctgcgggctcaggctctgcggcggcccctgcacctaggaccttggcctggggcgcgttgtattgcacaggggccagaaggggcctatggggattccgctccaccccgggcc

SEQ ID NO: 40497 - DNA, 933 bp, Homo sapiens
  chr4:52917367-52918300
  hyper
taacttctgcttttctggacacgcgtgggcacccagaaccccgaatggggaggaatgctgtagacgccctgctgccctccagcccgcgcggctgcgcgtctcagtccacccctggggcgcgcggctgtcacccagggcggggcggcgcgggcgttgccacgacgcgggccgcgcgcgtccctggcagccaacccgtccacgtcaaggtttgtttaataatcgccagggtatctatggccgggctcaggcggctgctggggagccaggagaccgcgcgggacggcggatgaggcgcggcggctgcggcccagggcacctcccctctggcttcccgaacccggccaggtccgacccgagggggaggatggaaacacctgccgcgctctgagccccccagaagagaacacccttcccgccatatcaccccacggtcctgcggaggccaccgcctggtccccccaagtctccatcgcgcagcgtggggccgagaggaatagtgagcgatggcggaaaacctgaaaagactggtctcaaacgaaactttacgaacgttgcaggaaaagctagacttctggctgaaggagtacaacgtgagtctgggtgaaaaacccccggggttcgccctcccataggttccagcacagcccttgtcggggatttcttagggctggagttggtggccactttgcaaagcctccgcggttgcgattcctaaccaggatctcagctttcgaccgggatcgctggggaaggaaggacatgtgtgtacatgcccttgtctcagagcttcgggaggcggcgcgcaggcggcctgcggagcgcagcactaggctgcggagactggagagtgcttccaatcagtggtaactaaggacgccggcgacctagcaatagggaagccctgctgtccgcggctggtctggtcatgcctgc

SEQ ID NO: 40498 - DNA, 30 bp, Homo sapiens
  chr4:53578481-53578511
  hyper
cctccaccccgccccgctcaggatcttccc

SEQ ID NO: 40499 - DNA, 30 bp, Homo sapiens
  chr4:53588580-53588610
  hyper
tgtctgccaatcaccggatgggggcggtcc

SEQ ID NO: 40500 - DNA, 687 bp, Homo sapiens
  chr4:53617171-53617858
  hyper
ttgggttcctgtcgccgcacgcgtggcccgcccgaaacccgctacaaagtagcggcgtgtctgccctagggaggcaaagcgcaaacttgttaccgcgccgggacctgccccgggattctcccagcggctccgcaggacgcagcgcctgtgcctcgcgcggccctgggacgggcacggccgtccgccccctgggccgccgagggctgctttacccctccgttctggccgcgggcagcagaggagctcggggcgggcaaagctcgaggggacacggggcgagcccagaccctgcctgggagccctccccgccggagaccaaagggcagaaacgcactcacagtgcaactccgagggataaactggccgacgatcgccgccaggccagaagaccaagaagaaggctcgcggcgggaactgaagtgagcggggacacacgagggctgggaagatcctgggttggggcggagcggggctgggaagatcctgggttggggcggggcggggcaccgcagagcggacagccggattcaggcaccaggaacccaccggtcccactggccaggtgctccgagctgggtgattttctcccgctcaagactaggaacatacctgcgctttcggcgcagggaagactctgggcgagggcggggctgggaggagggccgcggggcaggcagccaatcccag

SEQ ID NO: 40501 - DNA, 910 bp, Homo sapiens; identical to SEQ ID NO: 3290
  chr4:53728016-53728926
  hyper

SEQ ID NO: 40502 - DNA, 30 bp, Homo sapiens
  chr4:54244102-54244132
  hyper
ctgtctctgtctctcgggttctctcaggcc

SEQ ID NO: 40503 - DNA, 30 bp, Homo sapiens
  chr4:54931195-54931225
  hyper
gtttatctaataatcgcatctcgcttttcc

SEQ ID NO: 40504 - DNA, 30 bp, Homo sapiens
  chr4:54958526-54958556
  hyper
gcacagggttcccgcgccctgtccctatgc

SEQ ID NO: 40505 - DNA, 1418 bp, Homo sapiens
  chr4:54965793-54967211
  hyper
gtggacaggggtaggtgtaaccgtggccagagctgcgctcagggactggacgactgccagtccgtcgcccgcacaatcctgctccaaaccgcaggcctcacacttcaccgcgccgcagccacccctaccacagaggagctggaaacactgagcattcctattaaataagcctccaagtccccacctggtacgctttgcggtggggcgtggggaagagttgggctgcggccagggtagcgagagggggtgggatggaggatgcagcgctgtgatttctcagtaaagcgtggagaaagagggggaggaggccggcctccccgggaaattaacaaaacctacactttgcaaagtctcccccatccccctcccccgagttcttccccgccgcgcgcccgcccctcctcgcggcttctgttgtgactcgggcagcctatcccgagggtgcggagctgccgaggagcctgagccgagcggtactccgcagcatcacgtgccagggtggggggctataaaatacccgagccggggcgccgggcgggggacgtgaggaccagccctctccggggacccctttgttcccagcccagacgccaacacctctgcgtccccaagggcttgactgcccgtgtctgcgcggctcccagggcagagcttagaacactagaggagaggggtcgccgcgaactgccggggcttccagccacccacccctctcgacatgtcgcgctccttctatgtcgactcgctcatcatcaaggacacctcacggcctgcgccctcgctgcctgaaccgcaccccgggccggatttcttcatcccgcttggcatgccgcccccattggtgatgtccgtgtccggccccggctgcccgtcccgcaagagcggcgcgttctgcgtgtgccctctctgcgtcacttcgcacctgcactcctctcgggggtctgtgggcgccggcagcgggggcgcaggggccggggttaccggggccggaggcagtggggtggcaggggccgcaggggcactgcctctgcttaagggccagttctcttcggctcctggggacgcgcagttttgcccgcgggtgaaccatgcgcatcatcaccaccacccgccgcagcaccaccatcaccatcatcagccccagcagcctggctcggccgcggcggcggcagcagcagcagcggcggcggcggccgcggcggccttggggcacccgcagcaccacgcacctgtctgcaccgccaccacctacaacgtggcggacccgcggagattccactgcctcaccatgggtagggcggggtcttggggcacctgcgctccgcgcctttcgcgctcctggagcaaactttccacctccagtggaggaagtgggagcccggggacagggtgaagagagaggacgggcttttagtgta

SEQ ID NO: 40506 - DNA, 30 bp, Homo sapiens; identical to SEQ ID NO: 3291
  chr4:54967659-54967689
  hyper

SEQ ID NO: 40507 - DNA, 258 bp, Homo sapiens
  chr4:54970011-54970269
  hyper
ctcctgtctctcacgcgcagagctccgggctcttcgccctgcccgccacgaaagggaggaggcgcaggccggctgcctttccaaaagattctgtctcccttcttcccaagaagcaggcctctccgcgcgcgagaacagaggtgggaggacgggagtttgcaggcgcaaagaacaggagtttaagcagactatttccaccaggggaaataagaagcacaaagagcgcctgctgcagctctttgcgctcttgcccaaagc

SEQ ID NO: 40508 - DNA, 52 bp, Homo sapiens
  chr4:54975879-54975931
  hyper
cacctgaacaacgtcgcctctgcccacgtggaaagcctcgcttgtctggcag

SEQ ID NO: 40509 - DNA, 125 bp, Homo sapiens
  chr4:54975990-54976115
  hyper
cgggcaccagcgtccgggcgggaagggacgtgtgcccaagcctcgcctcctggccctcagtgggctgggacgcccttgatcaccggcgcaggaaagaggctccccagcccgtgagcttcgtccgg

SEQ ID NO: 40510 - DNA, 1 bp, Homo sapiens
  chr4:54976170-54976171
  hyper
c

SEQ ID NO: 40511 - DNA, 30 bp, Homo sapiens
  chr4:55083828-55083858
  hyper
tagggcctggcccgcggtggaatggacgcg

SEQ ID NO: 40512 - DNA, 315 bp, Homo sapiens
  chr4:55093023-55093338
  hyper
acactgggagagcgcggcaagaactagccccaccttcccccgacgccccggactgactgccgggcgcagacccgacttctcccgaaccagcctcggaccagccttagaaggcggaaaacaggattcaaacccgcctatgagcagtggtaggggcgggggctgtgggggcaggactcggtttaaggaaccaaccgcctcggttcgagggcctcctgtccggaggttgctcctgaccactgggtttattttgcttttgcagaggaggcagatgttgacctctcttctttgcacagtctctccgcaaaattttccccc

SEQ ID NO: 40513 - DNA, 266 bp, Homo sapiens
  chr4:55093566-55093832
  hyper
gcctggagacactcccgcccggactgcttctcgggccccattaaacggctctgaaatgaactgtgaagttaccatttgtgggcggagagcgctggggccctgcggacggaagaccctggcttgaccggactaacagtgtcgccgaagcaaagcagcccctctgggtaggctgtctgtctcgcctcctaccctctggggcaactagcctaaaaacccggttctcaacttaacagcatgtggcccagcacccgcttttgccttttatt

SEQ ID NO: 40514 - DNA, 205 bp, Homo sapiens
  chr4:55093888-55094093
  hyper
cggtatcctgttagcattccgaacaaggggctgttcatatatttgccttcaatgatttcctgaagggacatgtggaagtaatagcgagcggtgcagtcacccaagctgaagatgcacgagagcgggtcgcgtagaagaactgcggcaatgggacccccagcgcagccccaggcgccctgttttcgaggctgacatcccaagatcc

SEQ ID NO: 40515 - DNA, 453 bp, Homo sapiens
  chr4:55094322-55094775
  hyper
gatgaaggtgaacgcgctcccctcccccgctgtcgctgggaagccccactctgcccaggtctggttcctggagcatcagcgccccctttccctcgccggcaggatcgtttcctcccgacactggcctctcgccttgggcgcagggtttggggctcagctgtcaattccaaggaattcgtagggttcgacccacgcggcgggagggaacggagggagaatcaaaaggcatcctcccccacgacgcggaggcggtggtacgattcctcaaacgcccaagcttgagctttttttgtatgcgagatagaagccagggcaacctcgcccagataaccccgaaaacaaaggcacgaccagataagtgacttcaagggagtaaaggtcgttctatcggagaacgttccaaacctacacagaccctcttttctttgtaccgtatttcagaccacccagtct

SEQ ID NO: 40516 - DNA, 32 bp, Homo sapiens; identical to SEQ ID NO: 3295
  chr4:55095429-55095461
  hyper

SEQ ID NO: 40517 - DNA, 30 bp, Homo sapiens
  chr4:55096215-55096245
  hyper
acagcacagggagccggccgaatgcgcgtg

SEQ ID NO: 40518 - DNA, 30 bp, Homo sapiens
  chr4:55098468-55098498
  hyper
acttccccctaattcgggttctgccagatg

SEQ ID NO: 40519 - DNA, 610 bp, Homo sapiens
  chr4:55099111-55099721
  hyper
gccgctacccacggccgtgcggctctcgtgcccataggaggcgctggcgagctcctgtaaccctaaacccctcggcccctttccccccacccgcccggattctcttcccgctctcccccctctctccacacccgcccggccccctctcgggtctcagttgaaaacaatgcaaacgcagagcgtcgtgcctggggcgcagcggcctctgcagctctgaggttcagagcgcggcgcgcaggggcgcaggggcgcaggtccccggagcggctgggcatcgccgccaaccccgggacaaccaagccgccgaggacttggtggaggtgggagggagagcggaccgcgcagtgttcctctgggtcccggggtcagaagccggacagtggcgggggctggacagtccgagcgcagagcctcccgggcgaagtctgcgcgcagcactcccggctgcgctgtcggggaccaggagcctgggctgcgggcgagctagctggcgagccgggtaagattcgcggggctgtcgcgccctctagtgggctccggggacgcatcccgctttccccagccccgggcggtcggcgccgctatctcagtggagcgcagcgctggaacc

SEQ ID NO: 40520 - DNA, 150 bp, Homo sapiens
  chr4:55099930-55100080
  hyper
ttggggggcaggcgccgtcttctgcgttccagcccctcgccagctcccttgccccgcgggcggcctgttgctgtttgtttgttttacgaccctgcgttattgtgcaacggtaacagtcgtttccaatcagctgcgcggccgtcgcggccc

SEQ ID NO: 40521 - DNA, 1576 bp, Homo sapiens
  chr4:55523741-55525317
  hyper
gcaggtggcgggcccgtgccctaacgtgtgcgtggtgcccagcttcacaaagcgagcgggcagcacctccttggtccgggaacggcctcagcctggccgtccacatcccaggggtggaaaggtggagagagaaaggggctccggagtcaagagcggggagagagggcgcgcgcgccctcctcctcccggcgggcacggccccccggcattaacacgtcgaaagagcaggggccagacgccgccgggaagaagcgagacccgggcgggcgcgagggaggggaggcgaggaggggcgtggccggcgcgcagagggagggcgctgggaggaggggctgctgctcgccgctcgcggctctgggggctcggctttgccgcgctcgctgcacttgggcgagagctggaacgtggaccagagctcggatcccatcgcagctaccgcgatgagaggcgctcgcggcgcctgggattttctctgcgttctgctcctactgcttcgcgtccagacaggtgggacaccgcggctggcaccccgaccgtgcgactactcggcgaagcctgtgcctgggagggtggtacccgccagggtgcatccggagagaggactgcgggccctcagtgcccgtgcgttccagcctccggggagactccaggtggccctcggactctccggcgccctgcctcgctcacctgcgcgaggagaccccagctgctggtggtgggggacgcgaatccggggttcttcgggaatggggacagcaagagggggttaggcgtgagcgaggctgcaggctccgtgcgagtttggggtggcttttgtgccgacgttgcgcggggggcggaggcggggggctcaggggtttgcaccgagcgccttctcttgccgtgcgaggcgcggccgcagcttccttttgttaaaagttgcgtgtgtgtgaccggcgcccgggaggacctgcctgcaggttctccgccgcgctgagggcaaagttagagagccctttctctgctctgcggctactgccttccaaccgcaggcgctctttgtgcccagagctggggaccgacccgctgccgcctctgctcgcggcgccacccgtggagaccaatcgaaggctgcggcgtttccccgcctccgggttaggcttttgcgctgggagtgcgcggcgtggggctgttgtggggccggactcccgcgagcctggaggtggtggcgacagggacaacttgggcagggcgtgtggaaagcagccgctaggttgcagactttttgctttcgtacatcccgtgctcgcccctttctgccgcggcgccgtttcattcctgccgcgcgccccggggcggctggaggctgtgtttgccgcctgctccgggaaggcaagggacagcgtgctgggactctgcgttccctgactccaaccgcctagcacgccggccagagtgcccggcctgcctggcgggttctgaaagcccctagttcccggtgtctgcgacctgtattcgcaggtcctgttttcttcggaaatttttgagattcgtgaccgcccgcctccccgcccccgggacttctatacttcagggc

SEQ ID NO: 40522 - DNA, 230 bp, Homo sapiens; identical to SEQ ID NO: 3297
  chr4:55561713-55561943
  hyper

SEQ ID NO: 40523 - DNA, 92 bp, Homo sapiens; identical to SEQ ID NO: 3298
  chr4:55564468-55564560
  hyper

SEQ ID NO: 40524 - DNA, 30 bp, Homo sapiens; identical to SEQ ID NO: 3299
  chr4:55565886-55565916
  hyper

SEQ ID NO: 40525 - DNA, 76 bp, Homo sapiens; identical to SEQ ID NO: 3300
  chr4:55569949-55570025
  hyper

SEQ ID NO: 40526 - DNA, 30 bp, Homo sapiens; identical to SEQ ID NO: 3301
  chr4:55573295-55573325
  hyper

SEQ ID NO: 40527 - DNA, 30 bp, Homo sapiens; identical to SEQ ID NO: 3302
  chr4:55589780-55589810
  hyper

SEQ ID NO: 40528 - DNA, 46 bp, Homo sapiens; identical to SEQ ID NO: 3303
  chr4:55592093-55592139
  hyper

SEQ ID NO: 40529 - DNA, 303 bp, Homo sapiens; identical to SEQ ID NO: 3304
  chr4:55593415-55593718
  hyper

SEQ ID NO: 40530 - DNA, 30 bp, Homo sapiens; identical to SEQ ID NO: 3305
  chr4:55594000-55594030
  hyper

SEQ ID NO: 40531 - DNA, 63 bp, Homo sapiens; identical to SEQ ID NO: 3306
  chr4:55595496-55595559
  hyper

SEQ ID NO: 40532 - DNA, 35 bp, Homo sapiens; identical to SEQ ID NO: 3307
  chr4:55598030-55598065
  hyper

SEQ ID NO: 40533 - DNA, 43 bp, Homo sapiens; identical to SEQ ID NO: 3308
  chr4:55599305-55599348
  hyper

SEQ ID NO: 40534 - DNA, 97 bp, Homo sapiens; identical to SEQ ID NO: 3309
  chr4:55602682-55602779
  hyper

SEQ ID NO: 40535 - DNA, 30 bp, Homo sapiens; identical to SEQ ID NO: 3310
  chr4:55604624-55604654
  hyper

SEQ ID NO: 40536 - DNA, 233 bp, Homo sapiens
  chr4:55991392-55991625
  hyper
cccacagaggcggcccgggtctccacgcagagccacagggcgacggccagcagcaccttgctctgcatcctgcacctcgagccgggcgaaatgcccagaactcgggagccggttctttctcccagcgcctgtctagagaaggaggcgcggaggtggaactcgcggcaccccgcagcgcaggacagttgagcgcacagggctagggagcccgggcgccgaccgcggctgcaggg

SEQ ID NO: 40537 - DNA, 287 bp, Homo sapiens; identical to SEQ ID NO: 3312
  chr4:55991802-55992089
  hyper

SEQ ID NO: 40538 - DNA, 18 bp, Homo sapiens
  chr4:55992152-55992170
  hyper
cgcgcgtctgaagtggcc

SEQ ID NO: 40539 - DNA, 30 bp, Homo sapiens
  chr4:56261512-56261542
  hyper
ctggacaagggcaacgttagccatttttgg

SEQ ID NO: 40540 - DNA, 35 bp, Homo sapiens; identical to SEQ ID NO: 3314
  chr4:56412389-56412424
  hyper

SEQ ID NO: 40541 - DNA, 30 bp, Homo sapiens
  chr4:56501426-56501456
  hyper
tatctcccctggaacgtttgcgttctgctc

SEQ ID NO: 40542 - DNA, 1204 bp, Homo sapiens
  chr4:56501660-56502864
  hyper
ctagtgcctgaaaaccgataaggcacaaagcccactccttcccttctaagcggttagcgtggggcccgttgtaccgctcaggtttatctcagcataacactagctcactcaccaaagaggctgagcactcgccaagtttaccttgcctcagcggatgaagtatcaaactcactcttgttttgcttcaaccatcaatctctccaataattgcaatcaaagggaaaacattttaatgttcactattttagtacccgtttccacgggccggggggtctggaaatcccgaggatgagggaaccctaccagtctccatctatcgcagccggcccggcgcagggtctccgctgggcatcaacgagcagggcctgggtatttcggccctggccgggccccttgctcctacgtcgctagttgccctggggaggcgacctgtgcctgggaggcgggaaaccccgcggcaccagagaagccaagtgaagtcccagaagccaagtaaaggtgagagaaagagggtggaggagagcggtgagtggagccagagagaggcgcgcatggcgtggaagcggccgggtgcggggccgtcttacctcggcaggcgcccgcgcaccaggcgagcagcagcagcagcagcaggagcggggacgccgcggccacctgtccggcgggcgacctggggcggcagctctctgttcgcagcatctcggcggctgcgggaggctcggtgctagggacgctgcgctgcgccacgcgtagctggtgctccacctggtgccctggctgtgcctcggggcccggacacaggactgagcgcccggcgagccgccaacttttaaatctcgcgcacaagtgggctgggctgcgcggtccccgccgcgcgtcacctcgccgcctgccgcccccggcctacctcgcctcaccccgccccgctgcctgcccgcgccccaccctgcagcaggacccgagccccctagcctgagtttctgacccgagtaccacgcattttcgctctgggataaagagaatggaatttaaataatgcaccattcccacctttggaaggactggactgggaacagggtgtggatggcaaaccaggccgtctgagtttttaaacttggtagtggcgacgctctctggtgtcctgggtctacgtgggacaccctttctccttcacctcttccagagctccggcagtcactagtac

SEQ ID NO: 40543 - DNA, 197 bp, Homo sapiens
  chr4:56659669-56659866
  hyper
gagtcggggtcgcctcgctgcgatggcaggttcagcttcggttcactaatcgcaaccagccccaccgcgggagacggggagagccctggctgctgcaggccggcacctgggtagatgttaccttttcccgcacagggtcagtccacagacgtgcaccagcaccccggcgaccggtcacagccttcccctcgccccgg

SEQ ID NO: 40544 - DNA, 65 bp, Homo sapiens; identical to SEQ ID NO: 3316
  chr4:56659934-56659999
  hyper

SEQ ID NO: 40545 - DNA, 126 bp, Homo sapiens
  chr4:56719666-56719792
  hyper
gcccttccctgacacgcccctccaatgaggccttgttccgcctggccacgcccgtcggttggcgccccgcccctccgcgtctattggccgctccctttttctcccatcgctgcttcttccttctct

SEQ ID NO: 40546 - DNA, 46 bp, Homo sapiens
  chr4:56719823-56719869
  hyper
cgtgcccggatataggaagtgttgggggaacggccgcttcccgttc

SEQ ID NO: 40547 - DNA, 30 bp, Homo sapiens
  chr4:56751724-56751754
  hyper
gagagttatttgtgacaattgagtgcatag

SEQ ID NO: 40548 - DNA, 30 bp, Homo sapiens
  chr4:56915885-56915915
  hyper
ctccccaccgcccccggagctgcattgctt

SEQ ID NO: 40549 - DNA, 83 bp, Homo sapiens
  chr4:57253653-57253736
  hyper
acgtaaatcttccgcgtcgctacgtgacgtcagtgcgagcgaccccgggccggctgcgtggagctggcgctgcctctcctgaa

SEQ ID NO: 40550 - DNA, 30 bp, Homo sapiens
  chr4:57301338-57301368
  hyper
agcgaggtgcccctcgtgcacgcctaggca

SEQ ID NO: 40551 - DNA, 30 bp, Homo sapiens; identical to SEQ ID NO: 3317
  chr4:57334148-57334178
  hyper

SEQ ID NO: 40552 - DNA, 610 bp, Homo sapiens
  chr4:57396556-57397166
  hyper
tcctggagagtggtgcgtccccttggcaaccgtacaacgcgcaggaaggcggagtgagatgaggctgagtccggccggggcggggctgtgtgggactagggcggggctcgggggctagaccggggcggggctgtgtagggctggggcggggctcggggcggggctcggggcggggctgggcgcggggggccccggcagcccttatcgtatcgcgcagagagcaaactgcgcctgggcaaccagtcgggagggtgagtcccgcgcgcgacagaagcttctggcgcgaatggagaaccaagagtttctaagttcatctgcgccgtccgaggtgaccgatgggcaggtctcaacagaaatatccacttgctccgaagtcttccagaagcccattgtgctcaggattctcgacactcacagagagcttgaggagtccgaggatcccgagaaacacgagaatcccgaggaacccgaggaggtcagggagcaagaccagagagacgagtccgaggaatgtgatgagcctcatgagtcctatgagccccacgctccctatgcgccccacaagccccgggactcctatgcaccttacgaactccatgggccccatgca

SEQ ID NO: 40553 - DNA, 40 bp, Homo sapiens; identical to SEQ ID NO: 3319
  chr4:57521355-57521395
  hyper

SEQ ID NO: 40554 - DNA, 158 bp, Homo sapiens; identical to SEQ ID NO: 3320
  chr4:57521505-57521663
  hyper

SEQ ID NO: 40555 - DNA, 682 bp, Homo sapiens; identical to SEQ ID NO: 3321
  chr4:57521700-57522382
  hyper

SEQ ID NO: 40556 - DNA, 396 bp, Homo sapiens
  chr4:57522419-57522815
  hyper
cgcctcccgcgccccccgggaccccttgcaggaactgtatccctgcctgcgacgggggcgagatagatgattccgcgggccctcaccgacctccggctctaaggaaggagtgaaggaagcgcgggggtgattttgagaaatccccttaaaaacttcctcccgaaagggggacctcccctggggacagacttgacagatcgcgagggtgggttcgcccgagtccgcgactagccggcctccggcctccccggtaggcggccttctgtctccgcagtgggttggcgctttggggccctctccaggcagggctgcacaccccacccttcctccaaaaaagttccccgcaagacaagttacttctcaaagttggggagacggaggcggtgcttttaatgt

SEQ ID NO: 40557 - DNA, 575 bp, Homo sapiens
  chr4:57687531-57688106
  hyper
cttagagctgggagcgaagcccaagcaagaactaaagagggtggctgactccacaaagccacccccacaacccccagttcgcgttcctccacctggcaggtcctctggggaaccgccagtaacgggcgcgcgggtaccgtcgccgaggccgcccggagcagggcagggtccgccgccggtctgactcccaaacccgcttttctccggaggtccccgctcgccaggaccgctccgagcgctacctgcgaaggtaactgccaggagcagcagcgccaagcgcagcaccgacagcgccatcctcctcccgcgccggctgtcttgcccctgcggtctgttacctgcgccactcgcagggagcgctcgtgcgacggggcgcggggagggcgggggaaggggcggggcgagaatgggaggaaaagcagcggtaggtggcgagggaagaggggcggcgggaagaggagcggcgggaagaggagccgtgaagggtcgggggagaaccggaaagggctgggaaggagaaaggtagaaggacgggggagggggccatggggaaggaggggcgagggagatagagg

SEQ ID NO: 40558 - DNA, 146 bp, Homo sapiens; identical to SEQ ID NO: 3324
  chr4:57775638-57775784
  hyper

SEQ ID NO: 40559 - DNA, 30 bp, Homo sapiens; identical to SEQ ID NO: 3325
  chr4:57843995-57844025
  hyper

SEQ ID NO: 40560 - DNA, 30 bp, Homo sapiens
  chr4:57844900-57844930
  hyper
cagcccggcagcggcggcccacaatttacg

SEQ ID NO: 40561 - DNA, 30 bp, Homo sapiens; identical to SEQ ID NO: 3326
  chr4:57944966-57944996
  hyper

SEQ ID NO: 40562 - DNA, 1587 bp, Homo sapiens
  chr4:57975869-57977456
  hyper
ccgctcctggcattccgcggctgccaactctttccctcccatctggctcctgggatgcccgcgggggaatcgcagtgagcagcgcggggcgaggccgccgcggacgccccgtcggatgtgcccttcgctgggccgagcggcgcagggttggagagggaagcgctcgtgcccaccttgctcgcaggtgcccttgctgacctgggtgatggccttctccccgcggctctcggccctctggctggcggcgcgcagctggcagccgctcgggtaggtggtgccgtcgctgccgcacaccgggtagcggctcttgcacacgcacacgccgcttacacccggaccgccggctgctgccccggctttacccttccgcctcttgcggctcttcacgcactccatgcccggcgcgcagtaccccctgccggcgccgccacccccgcacggctcgccctcgccgcgggcgcacatagggcagcagccgcacgcgtcgcgggtctcgcccagcaggcagcccagcgggggcaggggcgggcaggaggccggctcgcaggggccgcaggtgtccgaagaggaggaagaggagaggggcaggagcaggagcagcagcccagcggcgccgaggagcagggcgcgcagcgacggccgctccatggcggggtgcggtggcagcggcaagggcgcgagtgagccgtgtcgggccggccggcgccttaaacccgccgccccgcccggcctgtccgcgggaaccacaccccggggcggtgagagcacgggggccccgcccgtgccgccctcccggccccgcggggcctgcgcgcgcgctcctgctggcgtcggggggtgagcgggcacccggcgtgaccggcccatgggcgctcggtctcacgcccgcttcgcagagctcaccccgccagctcctgctcggtccccagtcccctgccccgagccctcagggatcgcaccgcagtgcgagcggctcttccaccctctggtttctccccgtttccggtcaatatatttaaacttcttaacaaccacggcttcgagacgatccagggtttcatctattaaatcctccgtgggcctgagacacctgagtgctcattactctgtggtttgggaagctctcttaagaacaagctgttaaaaacccccacttgtggactgtgtccccgctggccacaggcctgctgtggtcttgggtgtcaagcactaaaaggacaaaccgttgccaaccacttccctttctggaacctcttaactgcctgcacctccctccccgctttgtctcccagtggcattcaacaagactctgtgctttttttgtgctgagccgttttcagtgagtactggaatccgtgtgagagctgtgcccttgttttgagttcttgctgaactgctcgccctccagcaagcctctcgggagaacagagcgcagctgagaggagcaggggtcccagctccttcctcgttggagctgccacggaggcacctaaagcgcccccagtcttcaccagcattccaggaggtttttgatataaacggtggactcttcctcagtctttctgcgaagtgctctgcaaactcaac

SEQ ID NO: 40563 - DNA, 654 bp, Homo sapiens
  chr4:58029870-58030524
  hyper
ctagcccggcgagcgcgcggcaggcagagcattcccggacgagtccggtagatggtagcattgtgcagccgatgcgtcctctcccagcttgcgtctcatttttccctctccccctttcctgggctcagcggtgaggctcaggtaccggcgccgccctgatgcctactatgccgcgccatctccagatggtccgcacctggcgggtcacgacgagtctcaatccacagcatggggctgactcggactcaggagtttttgtggctccaggcgtaaccgttgctttggataaaattggtccagttcacttgaccaaggagaagtgcagaggaggataaacgtccccatcccagtggtgtcctctcccgactcctttcgtgtagtgagctttatttttagagactcccgcgcctgccagccgctcatgctcgggttccccaagcggaggggctccgcgtgcagtgtgatgcccactgtcgccggcagagggcaccgtcgtcacacactgcgcaggagccggcgcgggaaggcggcggggctgtccttcccggtcagcgtcctacgcgtgaccttgggacccgcaaatgtctgcgccggaggcattgcctcttcccgactatgggggatactgcacggggctcccgatggcctcttcca

SEQ ID NO: 40564 - DNA, 277 bp, Homo sapiens
  chr4:62065793-62066070
  hyper
gagcgagcgccgaggcgggcctcgaagccactggagaggtaccctttgtctgacaaaccctgaaagggaagcctctagtagcagccctcccgttcccacctccaagcgtttgccgaactgctaggtggagcccgcgccgcggagcccacgagcactccatatccgggttttgccggccacccctttccctggcgcgagccccctccccggctctcggagctcttgccgctggcccgcccgaccgctgctcattctggcctccgctccggccccggct

SEQ ID NO: 40565 - DNA, 1383 bp, Homo sapiens
  chr4:62066133-62067516
  hyper
cgtcgcccccctcgcctgctggcccggcaccgctcgctccagttcccaggagcggggatgcagatgctgcagctggtcggggtgggcgccgccgccgccgccgccgccgctgctgctggtttttctcggactgctcgttgcctccgctccggcagctgctgccgccgccaccgccgcctgtgactcgccccctcccctttctttcttctctttttgccttggtcctcttcctacgggtgtgcgcgcgcgcgggttgcacggtttgctttggcaggagctcgctcgtgtgtgcgcgtgtgtgagtgtgcgtgtctggagagcgccagtgcctcgctcgctcttggggagtcgaagaagagaaagaaccgaagagacagcggcggcggcgcagagcccggggccgcgcgatgaagctcccacatgcccgcagctgcccggcccggccggcgagctaatcatccaccccacgggctcggggttcgccggcccccgggacgcagccctcggcggccgggcgcccgctctgtctgcgcgccccctccgtgcaccggggaaggagtttgtgtggctctcgctccggctgtccgcggaggttgcgggcttgagaggggaccctcggctgggagagagcctcgggaggacgaagaggaggacggtttggcggagaagccacccctggccctcgcggctccccctacctattccatcgctcccgctccgaggcggaaaggggaggacgtggaagaagaaaaagaaagagaaggggggtggggtgggagaactggatataaagatcggctggggggatggtggaagatttttggtctcttcggcagcgtcttttcttaagcggcggcggcagcagcagcagcaagagaaggagaagcagccccagctatgactgccgcatgttaatagctgccgctgggtccctcggctgctgctggagacagagcctgactccgaagttgtgcaactgtggactgggagagacatttgaaccctcttttcttttcgctccccttttgcccccttggggtgtgtgaagcgaggaacgtaaaggaaggcgaacatttggctctctttttccttcccctttctccgtggctgtgtagcggaagaaagggaagagagactttttgttgttgtttccttgactggggtctccaccctcctgctgctttctctgcgcttcgattctcgttatttgccgcgtgtggttgggggtgtctgcacaggggccggccggtcttttgccccgggctcaatggctggattgtggaaactgcacccgccttcaggttgttgagcaactgatgggacgatctcagggaccggcgtttacgaaaggtaatttattcttcgcactcttcataatagggg

SEQ ID NO: 40566 - DNA, 665 bp, Homo sapiens
  chr4:62067536-62068201
  hyper
cggcggcatccaccgggcgggcaacaagagggggtgcggggtgcatgcacactcgcccttccactcacacactcgccctcacacacacacacactcatccggtcgtggtgcggggcgggaagggaacctcctggctggtgggcgctcgggtctggcgcgggttggagttttttccagccattgggcgatttgaccggccgaggggagtgagggggataagagactgggcgcattcgcagctgcacacgctggggaataggaacagttcccaccccgttaattttccctctcctctcaccccagtggcatcccctggtgggggcagaaagcggacaggagggcgacttttctccgtcaggctggaactggtgccgctggaggcgggagcgggctggaggacggacagggtctgggtgagaagctgggctctgggaagatggaaaatgcagggtgccgagcccggcgcgattctccctcaacgcttgcctggagcatccctggccccttttgcccaggtcgcgcccctgagtcttggagtcgcgctgcctccccgcgccctgcctgttgtgtctccttcacggcagtttggtttagacctgcgtgcccaggctttgttaggcggttttggctggagaaagctgccactttcgtgggtggcccgggct

SEQ ID NO: 40567 - DNA, 287 bp, Homo sapiens
  chr4:62068237-62068524
  hyper
cggtgttgcacgaatccgggcggccgcggcgccggggcggggtgggcagagcattggtggtcgcggttggcgggttacaggtaggagagaaggcacctcggcgcttctctgaggagaagggaaggctccaggctgcagcgcagcgtctgagctgccgcgacccagcctccggtcccacgtcggagctcagaagcttagggtgccaggcccccagcactataggtgggtgtgtgtgtgtctgtgcgtgtgtgtgtggtgtgtaggggtgggggcgacctcctctacca

SEQ ID NO: 40568 - DNA, 280 bp, Homo sapiens
  chr4:66535034-66535314
  hyper
cccaaccagcctctgtccacacgcatgttccttgcccagcactccgcagctaacgtcaaacaatgcaaccaaaaaccgcagaggggagcgaaaaggccagtggaaggggacgacaaataccaatttgagatgagactgcgatttagtctgcagcagcagcgtccagcgcgctgagacctgaactcccaggccccgcctagcccctccgccccaggtcgccacggtccccacccccatctccctaccttcgttgctggggctggccaggagggtccggagt

SEQ ID NO: 40569 - DNA, 132 bp, Homo sapiens
  chr4:66535350-66535482
  hyper
cgtcgaggtgcagagtagcagccggccagggacgctggggtgatgggggtgtcgccgccgccgcttgggggccgccggcgtcccgcaccccggggccccgagccccgcatcttctccgagcctcctccggtg

SEQ ID NO: 40570 - DNA, 173 bp, Homo sapiens
  chr4:66535574-66535747
  hyper
cgccttctggcacgcggctcctccaaatgtaggaaccacggatccggctgagacagctgaagtttgcttctggctcctctcgcctccccctttggtggggttaaatgaaatattagttctggttgctagtgcagatctggactcggatcaagggtgtcgagagggtcctgggt

SEQ ID NO: 40571 - DNA, 617 bp, Homo sapiens; identical to SEQ ID NO: 3336
  chr4:66536013-66536630
  hyper

SEQ ID NO: 40572 - DNA, 30 bp, Homo sapiens; identical to SEQ ID NO: 3337
  chr4:71467461-71467491
  hyper

SEQ ID NO: 40573 - DNA, 30 bp, Homo sapiens; identical to SEQ ID NO: 3338
  chr4:71553539-71553569
  hyper

SEQ ID NO: 40574 - DNA, 30 bp, Homo sapiens
  chr4:71554188-71554218
  hyper
agtcctcaatcgtacgccacgcggagagca

SEQ ID NO: 40575 - DNA, 30 bp, Homo sapiens
  chr4:71571610-71571640
  hyper
aagagaaatcggagcggtgcatgagaagac

SEQ ID NO: 40576 - DNA, 30 bp, Homo sapiens
  chr4:71704869-71704899
  hyper
cgtcagcagcctcacgaaacctaccatggg

SEQ ID NO: 40577 - DNA, 730 bp, Homo sapiens; identical to SEQ ID NO: 3339
  chr4:71767777-71768507
  hyper

SEQ ID NO: 40578 - DNA, 30 bp, Homo sapiens; identical to SEQ ID NO: 3340
  chr4:71859615-71859645
  hyper

SEQ ID NO: 40579 - DNA, 30 bp, Homo sapiens
  chr4:72052105-72052135
  hyper
agctgggaaactcacgcaattttagttctg

SEQ ID NO: 40580 - DNA, 30 bp, Homo sapiens
  chr4:72052909-72052939
  hyper
gctcggccccgccgcgtcccgggctcgcgc

SEQ ID NO: 40581 - DNA, 30 bp, Homo sapiens
  chr4:72053382-72053412
  hyper
tgctaagtcccctgcgcgcaactgggcgtc

SEQ ID NO: 40582 - DNA, 653 bp, Homo sapiens
  chr4:73433656-73434309
  hyper
tcttctgagagcatcgggcttcaccttgagcctccaaagggttgggggcagggccgaaaagaaacagagctgcactcaacttagctttaaaaagaggaggagttgtgcagagggggaggggagaaggcggccggcgcctgcagcctctgcccaggaaaacggagggcaggaaacgtctccagcccccctccccaactgtcaaatcctagcccggccgtggtactcccaggacacgtgtctactggatctctccctgtccggcccaaggacttcctgaaacccccgcctccggctgcccgaaaaaaccgtgagtcagttcggaggagagaaagctccaggaacccgactctggcggcagcagccagagcgctgggatcccggacccagcgtccagaacttcattcaagcgcccagaccgccctccagaaaggggaagcccagatggcccggcgaggatgggaactggctgcggtttgtcactaggaattgttacgaatgtcgcagactggtgaagccctaggtgtgacaagactgggctcccggagtgggagtcgtaacctcccgtgcaactcaaccctctacccccaaaagcccgcacgctgcgcccagccctcaaaacaccgtttctgaacgcaaaagataacagggaaggg

SEQ ID NO: 40583 - DNA, 572 bp, Homo sapiens; identical to SEQ ID NO: 3342
  chr4:73434678-73435250
  hyper

SEQ ID NO: 40584 - DNA, 344 bp, Homo sapiens
  chr4:74702405-74702749
  hyper
gtatcctccagtctccgcgcctccacccagctcaggaacccgcgaaccctctcttgaccactatgagcctcccgtccagccgcgcggcccgtgtcccgggtccttcgggctccttgtgcgcgctgctcgcgctgctgctcctgctgacgccgccggggcccctcgccagcggtgagagctcctggcactggggtgcatcccagcctctgcggggccgctgcgttccagggaactctcccagcaacctgccctataaaaatgtctttcttccccagctggtcctgtctctgctgtgctgacagagctgcgttgcacttgtttacgcgttacgctgagagtaaacc

SEQ ID NO: 40585 - DNA, 30 bp, Homo sapiens; identical to SEQ ID NO: 3345
  chr4:74730215-74730245
  hyper

SEQ ID NO: 40586 - DNA, 353 bp, Homo sapiens
  chr4:74809939-74810292
  hyper
ccgggacccatctgccgctcgccggccggaggctaccaggagcaggagcagcagcgccgcccgcagtagccggggagcgcgggggacagcggggggcgcggcgcagttcaccgggctcagaaggcaggtcgggcggcggtgcgaggagcgggagagctggcagggaggtgcctgcagcccaggctctgtggctccccaagatcggtgaaccctttttatgcatgattggggctgaaaagtctggaacccccgggccagggaaattctcggagctccaggtctatcccgagtactgaagaaaagggctggccccacccccggggtgggtgggtggtgggcggtggctggttacc

SEQ ID NO: 40587 - DNA, 821 bp, Homo sapiens
  chr4:74903959-74904780
  hyper
agtcggggaccccagcggtggcagcggaagcgcggggcgggacttacatgacttcggtttgggcgcagtggggtccgggggaccttacattcacactttggatgttcttgaggtgaattccctgcagtgtctgcaagcactggcagcgcagttcagtgaccacggacgctcctagggaagaatagactcgctgattgagcggggctgtcggcgcggggcgcccaccccagccgcgtccggcccggggaccccagggcgccgggacccacctgctgcgcgccggctggcggccaccaggagcaggagcagcagcgccacccgcaggagccggggattgctgggggcggcggagagcgtggcgtgggccatggggctcagcagacgcgtcgggaagctgtgcgagaagcgggagagctggcggggaggtgcctgcgacccgggctgtgtggctccccaagatcggcgaaccctttttatgcatggttgagactggaaagcccggagcggccgggccagggaaattcccggagctccagatcgatccggagtcccgaaggaaggcgacggccccgcccccggggtggagtcggatacgggtagggggagcccactggtgacgcctacgcctcgccctccagagtaacccccgtgcactctgggactttgggatattcattttctgccccaaattcctggagaggcagtgagtccacctcgctgaagatacagcctgtgaggggggaccttaggtccccgatgaccccccgcgtacggggtagggttggaggaaagagctggggggacccgtgagaaccaggaca

SEQ ID NO: 40588 - DNA, 513 bp, Homo sapiens
  chr4:74964664-74965177
  hyper
gagcggggctgtcggcgcggggcgcccaccccagccgcgtccggcccggggaccccagggcgccgggacccacctgctgcgcgccggctggcggccaccaggagcaggagcagcagcgccacccgcaggagccggggattgctgggggcggcggagagcgtggcgcgggccatggggctcagcaggcggttcgagcggctgtgcgaggaggagagctggcaaggagctgcctgtggcccgggctctgtggctctccgagaacggcgaaccccttttatgcatggttggggctggaaagcccggagtcccgggccagggaaattcccggagctccagatcgatcccgagttcggaaggaaggcgatggccccgcctctggggtggaggggggtcggggcactcacgagtgacgtccgggtctgactgtcttgcgtaactcccgccaactgtgggatgttctctttctgccccgaatccctggagcgggagcgagagcccgccgctctcagagat

SEQ ID NO: 40589 - DNA, 30 bp, Homo sapiens
  chr4:75023525-75023555
  hyper
ggccttctctgtgccgtcgctatgggaatg

SEQ ID NO: 40590 - DNA, 254 bp, Homo sapiens
  chr4:75230600-75230854
  hyper
agccatctggtccacgctccccacctcccggagggagatggaaaagtttcgggagtagtccccggccaatcggaaagacattttttcattcctcaaccactactctcaggtgctccagggagggaggatgacttcctgacggtcctcctgccgctcctccctcgggccaattatgaaactctgggcactcttgacctcaccccgttagggcccgggaggggctccctagtataaagttcgcagcaccagacagt

SEQ ID NO: 40591 - DNA, 30 bp, Homo sapiens
  chr4:75231162-75231192
  hyper
tcattcgacaagtacggagttgtctccagg

SEQ ID NO: 40592 - DNA, 30 bp, Homo sapiens
  chr4:75719942-75719972
  hyper
cctaccccctagggcgtaaacaaggtaggg

SEQ ID NO: 40593 - DNA, 1718 bp, Homo sapiens
  chr4:75858216-75859934
  hyper
tggcccagtcatcgccgcggggcccgggtgggaggggtttggcagcggcaggcgcggcggcggcggcggaggcggaggcggccccgggctcgggcggctgggatggagcagaagagcgcggagcaccggagggcacgcagctgacggagctgcgctgcgttcgcctcgtttgcctcgcgccctccactggagctgttcgcgcctcccggctcccaccgcagcccacccggcagaggagtcgctaccagcgcccagtgcgctctgtcagtccgcaaactccttgccgcccgccccgggctgggcaccaaataccaggctaccatggtctacaagactctcttcgctctttgcatcttaactgcaggtaattggcgccatcctcccggaagggcaggtcgcggggtgggccccagtagctagcgcgtggtcggggctgaagctaggagatccggcagtgagtcgccgcgcgcctccgggtgagtgcgcaggtgtgtgcgcacttagatttggggtgacgtgcacctttggcggtcccgaaccgtactgagggaggggacgatggggtccttcctgccgcagcccgcgcccgcacaaactccagctttgtagaacaggtggctgtcttagctgcgtgttcgaacccagagtgggcaacacggactgcgcctcaaggcttctctttcttcaccagggtttcggagcgcactctgccaaagtacgggaccagacttcttgttgccgttgggccctggaagggatgaaaaagccggggaagtgggggtgggaggttcgcatctgggaaggcttcagcagcggctgcgcgcctggcggggctggtttgctttctcgagtcttggcggtctctgatctccggcgtcccttcctagttatgcttaggatgatgtggcactaacagcagcggcccggccttggtcaggctcgcaatcgtcactgggggtagcaaggctaccttctgccccagaactccccaaaaacgtatcccatagaagaaactattaacttggctaaactagcatcctctcccctccccctgcaccacctctgaaaggcttcgtaggagccactctcgggtttcgggaccacagacggcgacgacctctggcagcggggatggggaagaggggagccagatgactgagctcggcttggcggggaccggggagagattcagaaagacgctttgaatctagagttcaggtacctattttttccagaaaacgtctcccgaaaagggacaactggctgtggatatggtgctgctgggaaaagtagcccgactgcgcggccactggcattttcagtttaaatgtgacccaaagtcacatagcgcaaaccgattctactcgtgctttagtctgtatatcctccctctgagttcgtcgggttcctacagttgtggacacgagtcgtcgcaatcccttgaaaagaagctagcggttttcaggcagctcacagtgggtaatgcagttataaggaaaagtttcccaacttgaaactatagcgtattttctctacttagtgaacgtccgtctgagaaaacctctttctcgctggtatctcggcacggtttggagacgcgtccgcggacagttcccgaatactcgcaggcggctttggctgcccagcctcgggctgagatgagagagcctaggtccggcaggtgcaataggcagcggagctcccggctggctgcgggt

SEQ ID NO: 40594 - DNA, 30 bp, Homo sapiens
  chr4:76439689-76439719
  hyper
gtctccgtcgttgacgttagtcgcagtctt

SEQ ID NO: 40595 - DNA, 713 bp, Homo sapiens
  chr4:76555325-76556038
  hyper
ctagcaaactagcaattccagcgctgttgtgatttcttctgcggacgcagtcacgagtccagggcgaagcaggcagggaggcaggtgggcctcggtccgccgcaagctcacacttaggaggaccacgggccgcatgctgtcgtcgtcaaggcaacgacctcactctgtccccaaccataggcacaaagtcttgggagacagatacggcccaggtcagaatgcgttcacggcaggcaccaacacctgtgaaggccaagggctagagagcaattagctgggtgagaggcaccacctcccagctcgtaaggcgcccagtacctggagcctgggaacctgcaccgctccaactacccctgggcgaaggcgttggccgcggagctgcaagggggggcggtttctcacccgccccgagagcgccaggcctcccttcttctgattggccgagccgagtcgtcacgagccatgattggctcagggccaaccaccccgccccttcacctagggctcggcccaggttctgctccctgacacgcagaggccctgcgtccccacacgccttggttctcgtcaggaggcgcctttctgccttccccagcgggaggaggcgattgtgatgcccacgcgaagggtaaaggtggcggttatgtaggactgcgaagactatgcaaaatgcgatacggtttccctcatagcatcgccgctggggcaggggc

SEQ ID NO: 40596 - DNA, 156 bp, Homo sapiens
  chr4:76598778-76598934
  hyper
cggggaaccggaaccggcctaaagccaagataagagtccgctgatttgacgtcacaagcaggctgcctttctccggtcccgaggctccagccttgccgcccttcttcctgatcgcgcaagcgagagctggttcgcagcaacgcagtgtcttttgta

SEQ ID NO: 40597 - DNA, 30 bp, Homo sapiens
  chr4:76649531-76649561
  hyper
taagtcccgcttggcgacgattaaacaccc

SEQ ID NO: 40598 - DNA, 30 bp, Homo sapiens; identical to SEQ ID NO: 3352
  chr4:76861088-76861118
  hyper

SEQ ID NO: 40599 - DNA, 30 bp, Homo sapiens
  chr4:77069755-77069785
  hyper
gtaaaatgctgggacgctcgcgagggtgtg

SEQ ID NO: 40600 - DNA, 30 bp, Homo sapiens; identical to SEQ ID NO: 3353
  chr4:77135180-77135210
  hyper

SEQ ID NO: 40601 - DNA, 30 bp, Homo sapiens
  chr4:77135491-77135521
  hyper
gcataagtttgtcacgtaaggggcatgtgc

SEQ ID NO: 40602 - DNA, 622 bp, Homo sapiens
  chr4:77172533-77173155
  hyper
cttgctatctctttatcgctcctcctgccttcttcctttctttccttcagtaaacgttttttgaaacgatgatgagcaaaaaacgcctgatccagtctatggcgcgtttcggtgggaagatgaacacgccttcccagcagagtaaaacgtgattacaccaaggaccggtaccctctcccttccctcggccaggtccacgtccccaggcgtcggagaaggggttggaccgcgcagcggggcgtcagagttgccaggcgcccggggcaaataccggcagcggtggttgtgcggtgtcctagcaacggggcggcagcagggcacacacaccgcccaagcccggacggtggccgcgaagctagggccaccatggcggaccgcaggcggcggctccggccggggacgttggccccggtgcgcgagggcgtgaactgcaggtccaggtaaacactcagcgcccgggccgagggcgcatcccacgcgggccgcgcgggggcgcctggagacccgcgcttgctggggcgggggcgaggggagaggtccagcctgccttccctcctcaatgcttcctgtacgtacaacataatacgctgagataaccaacgcttggcgctgctctttgcaa

SEQ ID NO: 40603 - DNA, 941 bp, Homo sapiens
  chr4:77227270-77228211
  hyper
gagctggcggcggagcggagcttccactagggctcccagtttccccgcaccgcgcccgccgtcctccgggccacccatcccacccgaacgcgccaccgctctagcccgcgctccagcccgcgcgtcaccgacgcccgcggcctctcccacctctaagttccaggaagctctcggcctctagctgaccgcgttgctgctgagcttccctggggagaaggcgccgaggtgcccggtgcgggccgaggcagggctgggcctcgcgggcagcaggcggaagaaggaagggcggtggggcaggtcccggctgcgcggggcagttgtgcgcacttgggttcttcacgcgggacacacgtggaacgccgacccctgcgcccctggccgctggcaactggcaaggccgggaacagaaagtgtagggacagaagagcgctggagtcttccccgggagggagcccggggctgcagcccaggggcggggagcggggcggggctgggaaagttgagtactggtcgctcagggccgggctccgccggagtgcccggcgcagaaaccgtaaaaggctggagcgggcggggtaggtgtggctctgtgtgcgtgacctgagccccggtcccagtccctgtagtctcctgcggccgcggcctctcagccatgggcgccgtctggtccgccctgctggttggagggggtctggccggagcacttttcgtttggctgctgcggggcggccctggcgacaccgggaaggacggggatgcggagcaggagaaagacgcccctcttgggggagctgcgattccgggaggccatcagagtggcagcagcggactgagccctggaccttccgggcaggagctggtcaccaaaccaggtattcttccccccgtgactccagggcacatctgccagagctttgaggttcatcgaggaagggagcaaa

SEQ ID NO: 40604 - DNA, 99 bp, Homo sapiens
  chr4:77610389-77610488
  hyper
tccaccccagaatccgttttcaaaccttagggagccttctttgccattgaaatgcaaatccggtcctgagctcccgggccaatccgggaggcttcctgt

SEQ ID NO: 40605 - DNA, 30 bp, Homo sapiens; identical to SEQ ID NO: 3358
  chr4:77611005-77611035
  hyper

SEQ ID NO: 40606 - DNA, 905 bp, Homo sapiens; identical to SEQ ID NO: 3359
  chr4:77818254-77819159
  hyper

SEQ ID NO: 40607 - DNA, 431 bp, Homo sapiens; identical to SEQ ID NO: 3360
  chr4:77819271-77819702
  hyper

SEQ ID NO: 40608 - DNA, 30 bp, Homo sapiens
  chr4:77997550-77997580
  hyper
gggaggggatttcacgatccgctcctgtgg

SEQ ID NO: 40609 - DNA, 30 bp, Homo sapiens
  chr4:78078305-78078335
  hyper
gtgcaggatccctccgcggggagtcacgtg

SEQ ID NO: 40610 - DNA, 30 bp, Homo sapiens
  chr4:78079010-78079040
  hyper
gttgtccctacgggcgcggggcgggcgggc

SEQ ID NO: 40611 - DNA, 30 bp, Homo sapiens
  chr4:78739387-78739417
  hyper
ctaagctcaatagccgaccgagttaagcag

SEQ ID NO: 40612 - DNA, 30 bp, Homo sapiens
  chr4:78740065-78740095
  hyper
tgccgcgcgtgtgccgcactcactcagccc

SEQ ID NO: 40613 - DNA, 30 bp, Homo sapiens; identical to SEQ ID NO: 3361
  chr4:78783067-78783097
  hyper

SEQ ID NO: 40614 - DNA, 30 bp, Homo sapiens
  chr4:78978693-78978723
  hyper
cgacgcaacgccgacgtatggtgccaagcg

SEQ ID NO: 40615 - DNA, 29 bp, Homo sapiens
  chr4:78979218-78979247
  hyper
tattgcctcatcattccgaaggtgagaga

SEQ ID NO: 40616 - DNA, 53 bp, Homo sapiens
  chr4:78979306-78979359
  hyper
cgtgcagtttaaaaatctcagcaggttttatggtatttcggtgaggtggaagt

SEQ ID NO: 40617 - DNA, 631 bp, Homo sapiens
  chr4:78979945-78980576
  hyper
ccgtgagactagttgtcgccatgatatcaaatgcaatccgggctcagccaaataaatgagtcaataagtaaatcaagagtttggggtcatgggatgccgggcctggggacgcgaggcgctgtgagctccctcctgctccgaggagccagggaagtcgccccgccagtgcttagggagggggaagggagccggcgggctgggaggaagacggcttaatccacagcgcctggctctcggcttcccctcccggctccattcattattcatccagctgcgggaagaagagttcacctgcccagccgcaaaccagagccgcggctgggcggcggcggcgggcgcagggcgggccgccttctccgccctggtgcctaggaaggggcgcggggcggctcccgggagtcgagctctggcgcaggactgggggctgcgggaggcccggggaggacaaagctctgcctcgggtcgacctccagtcactggagcagctgccttttctttgctggcttcccaagagaaaggccttgggaatccacgcacaagggtgggggactttcccgtgggtccaggtgctgccttctgcactcttccgggatgtgtgtcaagtgtgtataatctccgcgaaaggcacatc

SEQ ID NO: 40618 - DNA, 30 bp, Homo sapiens
  chr4:78980804-78980834
  hyper
cagcaacgcaggaaacgtgctatcactccc

SEQ ID NO: 40619 - DNA, 292 bp, Homo sapiens
  chr4:79472690-79472982
  hyper
aagtaaaggtgtagtggaaaccgagagcgaaatgagggcgtagggagaaaagggtggggaagcttagagaccggtgagggagcagagctggggcgcctgtgtacagggatagagcccggcggcagcagggcgcggcttccctttcccggggcctggggccgcaatcaggtggagtcgagaggccggaggaggggcaggaggaaggggtgcggtcgcgatccggacccggagccagcgcggagcacctgcgcccgcggctgacaccttcgctcgcagtttgttcgcagtttac

SEQ ID NO: 40620 - DNA, 164 bp, Homo sapiens
  chr4:79473033-79473197
  hyper
cgtccccgcgagcctcgcccacagccgcctgctgacgggtggcttggggaggtcgcggcgcctcgcccagttcccccgcgagtgcagctcgaccctgggcagggctggcggctggcgcccgcgcccggccccaacccagctgcgtgggtggggagctggaggga

SEQ ID NO: 40621 - DNA, 30 bp, Homo sapiens; identical to SEQ ID NO: 3364
  chr4:81105152-81105182
  hyper

SEQ ID NO: 40622 - DNA, 970 bp, Homo sapiens
  chr4:81105508-81106478
  hyper
atgcccaccgcccaccgcgaccaccccttccccatttttctcagttctaactgtactcctctctcgtttcctttttgcttctctctctctctcccccctccctcgtcctctcttcctctctctttctctctgcgcttgttttcttacttccccctccctccccgcttgcaccccggtacttttccttttcttttctgatcactggcggggggagggtttgtcgcccgccggaaggtagtgtggaggggatggatgtgtttcacgctcaggttctggctctggctcctctccataggtgcctccctgggtgctcgcgaaagcagccctgagaatggcagctctcagaggttgaagtcattcttttcgggggacggggcacggcgactgtttgattggggggtgagttatgcacttggggcagcgcttccctggaatgcagagctggggatttcccttgctagacggatgcttaaagttcagtggctttgtactgagcccctttctcccctcgaaaagtcatgacagtcaaaagtatctctctttctctctcccccgccccccacttctctccaaaaccctaaagacagcctccccggacagtcttcaccgttttttttcagaagcagttgcgctgggggtggggaaagggagggaagggacattgaaaggccgcagtggctggcaactccgcgcccgtccgatgtcctctctaatcccccagtgttctggcgcgtacccacagtgcccccagaccctccgctcgcccgtgcgccgaggtcgttgggttttagacccagagagcacgttccgtaagctcccggcccaaatcccctcggaaaaattaatcacaaccaccagcggatgcaaaatgtgtgcctgtgttgagtctgtcttttaatcccgaacgtaattctaaaaagcagcatcagacaagagctttattaatcccttacacgagcaaatgcgatct

SEQ ID NO: 40623 - DNA, 888 bp, Homo sapiens
  chr4:81123015-81123903
  hyper
gtgtgtgtgtgtgtgcgtgcgtgcgtgtgtgtggtgtttgctcactaagcagggtcgtccccttacacatgcctggaatgcagccaacgtttccagtttgagttcccctatgtggcgcatctgcgtttccgctgccccaagagacttcacagcgctgatataagtccccaagacgaacaaggcggcggcgtgggcaccaaggaccacgggggcggcggcggcggtggcaaagaccagcagcagcagcagcaggaggcacctttaggcccgggtcccaagttttgcaaagccggccccctccaccactacccatccccctccccggaaagcagcaacccatccgctgccgccggcggcagcagcgcgaagccatccacagacttccacaacctggccagggagctggaaaactcccggggaggcagcagctgctccccagcccagagcctcagcagcggtagcggcagcggcggcggcggcggccaccaggaggcggagctgagtcccgacggcatcgccacgggcggcggcaaaggaaagaggaaattcccggaggaggcggcggagggcggcggtggcgctggtctggtagggggccggggccgcttcgtagagcggcccctcccggcctccaaggaggatctggtgtgcacaccgcagcagtaccgagcctcgggcagctacttcggcctggaagagaacggccgcctcttcgcgccgccaagtcccgagacgggcgaggcgaagcgcagcgccttcgtggaggtgaagaaggctgcccgcgcggccagcctgcaggaggaggggacagccgacggcgcgggagtcgcctccgaggaccaggacgctggcggcggcggcggctcctccacgcccgcggccgcgtca

SEQ ID NO: 40624 - DNA, 782 bp, Homo sapiens
  chr4:81124121-81124903
  hyper
gcagccagcacgctctttctcgcagctgtccccgctggtgctgggccagaagctgggcgcgctcgagccatgccaccccgccgacggcgtgggccccaccagactctatcccgccgccgcggaccctctagcggtgaagctccagggggccgcggacctgaacggaggttgcgggtccctgccgagcggcggcggcggcctgcctaagcagagccccttcctgtacgccaccgccttctggcccaagagctccgctgccgctgcagccgcggctgcggcggcggccgcggggcccttgcagctgcagctgccctcggcgctcacgctgctgccgccctccttcacctcgctgtgtctgcccgcgcagaactggtgcgccaagtgcaatgcctccttccgcatgacctccgacctggtgtaccatatgaggtcgcaccacaaaaaggagtatgcgatggagcccttggtgaagcggcggcgagaggagaaactcaagtgccccatctgcaatgagtccttcagggagcgccaccacctctccaggcacatgacctcgcataattgactcggaaaggaccccagctttccacgcgcgcgcaagcacagttaagccacctgcaggaataaacacgcgagaacatccaccgcttccttgcaccccgaaaccctgcacaaagacacatacattcaccgcccccccgcccccccaacgcgcacacacacgtcctctcctcccaggaacctcattcaaatatttacccgggacacacacccccccccac

SEQ ID NO: 40625 - DNA, 1569 bp, Homo sapiens
  chr4:81186746-81188315
  hyper
ctcaaggaaattttcccttctcgggtttcctgaggttgaaatccagcgcgcacgtcattaatcattcactgaggtcggtccctcagtcaatggcaggtctgggtaagctaaagcgagcagttagctaacccttcctgccacggggatcctggggcgaaagaggacaactgggcggtcagttacatgtgctggtgtccagccgctgcctctctttccccggtcggagcgcgggggtgcgtgtgccctcactctcacgaatacagacggagagcttcccagaaggaaaaacaaattcgtcataatgttcagcgcagccgagagtttccaacaagaaagcagctccagtcgtggcatgatgactcagggtggcgttttaaacgctgaataaacccattccttagctctttaataaatcgctaataacagcaaaaacagccttctccccgaaccgcgccacaccaaaggcttcccaagttgggctgcgaatccctgtttggttttccaacgccgaaagacgtagaagcagtgggatctcctggtgggacgcatttctccaagggctcccagagagaggacgagatagcagggtttacagggcaaagagaggagaacctggaaatcgtgtcctggggggcaagagtgcgttgcccagtcacaagtgtgctgtagaggtgggagaggacaaggacccatttccacatttcaaccctccgtttctatcgctgcccctggaggactcagctgctaacgccgagctcgtttccacgcggctctggtcctagtcggggaatccgggtggccgcgcgacgcgagagaactgctgggatgcgtggccctggtatgggcgcacccagcgtccggggcgcaggttctctcagcccagcttctcctcccactcactcgctcggatctcctccctccttcacatcccccgcccccgggaccgcgaggctccctccccgcaccggccagtgagtacacaaagccgcgggtgaggggaagcttcgcaggcgtgcacggagcagtgagatcactggcgttataaatatcccggtgccagcgcggagatccgctcgggtggcctctctcttcccctctccccttctcttccccgaggctatgtccacccggtgcggcgaggcgggcagagccagaggcacgcagccgcacaggggctacagagcccagaatcagccctacaagatgcacttaggacccccgcggctggaagaatgagcttgtccttcctcctcctcctcttcttcagccacctgatcctcagcgcctgggctcacggggagaagcgtctcgcccccaaagggcaacccggacccgctgccactgataggaaccctagaggctccagcagcagacagagcagcagtagcgctatgtcttcctcttctgcctcctcctcccccgcagcttctctgggcagccaaggaagtggcttggagcagagcagtttccagtggagcccctcggggcgccggaccggcagcctctactgcagagtgggcatcggtttccatctgcagatctacccggatggcaaagtcaatggatccc

SEQ ID NO: 40626 - DNA, 105 bp, Homo sapiens
  chr4:81188384-81188489
  hyper
cgggagggacagcaggtattcgccgggacacaggctcaccttcctgagcccaggccactgggaccaagctgatactcagaaacagccgggcgggttgggtggaga

SEQ ID NO: 40627 - DNA, 513 bp, Homo sapiens
  chr4:81256777-81257290
  hyper
aaactgcaacaaaccgccggggggtgggattaacgtccaaagctcacaccggcttcaactgattggcaggaacgaagtgggtggagcctcctgaccctgccctcctgcttccgttgctagggacgcttcggccgaggataccgcaatggatcaggaagaggggctgaaggccttggacaatattgtcactcaattcaacgcctatgaagatttcctggactcgcagatcactactgtggacttgtactacctggaggtaagggcggagcgcggcagagtagccgccgccgcgcgtccctcggtccctcctcgagttcccgcttcgtgggctggtcgccccctggcgctggacagctcagctgtcaggcgccgcggtttcgggaccgcgacactaaagccgctggcgaggtgaattgccgcgtccttaccgccccgcgctccccggtccggacagaacttgggcccctagagtcacccagcgcagaaacgcgcgggcacactcacactggggag

SEQ ID NO: 40628 - DNA, 87 bp, Homo sapiens
  chr4:81951400-81951487
  hyper
aggaagctatgatgacgggctgcaggtgcaggggcccgcagtgtccgtcagaagaggctcgggaaagtaagcgagaatggtgttcac

SEQ ID NO: 40629 - DNA, 43 bp, Homo sapiens; identical to SEQ ID NO: 3373
  chr4:81951826-81951869
  hyper

SEQ ID NO: 40630 - DNA, 383 bp, Homo sapiens; identical to SEQ ID NO: 3374
  chr4:81951928-81952311
  hyper

SEQ ID NO: 40631 - DNA, 568 bp, Homo sapiens; identical to SEQ ID NO: 3375
  chr4:81952363-81952931
  hyper

SEQ ID NO: 40632 - DNA, 207 bp, Homo sapiens
  chr4:82135680-82135887
  hyper
ccctagcaactacccagagctcgacgaagcaaagccgggagcgcaagccctgacagcaccgccaagcccctagctcggagcaacagcctccaccgcttctcctcgctaaacctagagaaccctgaggactccccactggggctgagcccctcccgccctcaacagaacctctaaacacaagtagcctttccctgcctccaggagctc

SEQ ID NO: 40633 - DNA, 285 bp, Homo sapiens; identical to SEQ ID NO: 3377
  chr4:82135919-82136204
  hyper

SEQ ID NO: 40634 - DNA, 312 bp, Homo sapiens
  chr4:82136243-82136555
  hyper
cgcagcgtgggcccggggctgccggctcagtcgctccggctacgtgtgagccgggggcgcgggttagcgcgatgcgggcaggagctgcggcggcgtcggtgctgccgcctggctccgcggcgggggccggtgcagaggagacacgcagggagggagggaagagaggagggaaggaggagggagggggtcagccggggctactgcctggatagttgggcgccggcttccctaaaggtggggtcacccgcgcccgcacgcacactagcccgaacctttactcccgacacagccgcagtctgcactttatacccc

SEQ ID NO: 40635 - DNA, 225 bp, Homo sapiens
  chr4:82136759-82136984
  hyper
cagagctcaaacaggcgcacgtaccctggacatgccctcctctgtcacaccaatgcctttctacgaagacatgtgaccccgaagcagctcgtcgacgcgcccctcccggactctggggccataacttacatctagtttgccagttcacgtgatgctgggggcaggggttgaatcgagtttcgagggacagagattataccttccgaatctgcaggtctttgggaa

SEQ ID NO: 40636 - DNA, 805 bp, Homo sapiens
  chr4:82965101-82965906
  hyper
gaagacccccaggcccgccaggggtccctgaggggacacaccctccacctacctcaaacatgggagaggcgcccttgctcggcaacgtgcagcccaggagctcggcgagaaactttgccatatacaagcggtgaggcagggtccctcccgatgcgccgtttctgtcctttccccttgccagagcccgagcgccaggatcctgcccgcagcccgcccgccagccggggccgtggctcggggctgccccgcggctgcggcggaggggctgggccgggcggggagagctcggcggccgcccgccccgcggcgtccagcggtgcgagtgcgcgcagccccgtccgcagcccgagcctccgctctgcgggagccggggcgccgtcgccgcgctagccttttcctctgaatgtcactattaccatagtaaagggaagggccccgccgagggggtggcgggagggccaacggcgcctcaggatgggcgccaagcgtgagcaagggcagccggcgggcgcagcgccttggcgcagacaccggcccgacccacgcctgggcagggccactcttgcaacactgccgggcgggagcagacgccttaagctccgagggagagcgggcggccggggcgggggagggtctgtggatggaagccgccgggctgacccacttccccagttttcccctcggcagcactcacggaggtggaaaggcgggcgcctcgctctgctgactgacccgggagagtcgctgctgccagatgccagtggcccgcaggagctcctgcactggccggcgccgccccaccctt

SEQ ID NO: 40637 - DNA, 30 bp, Homo sapiens
  chr4:83293905-83293935
  hyper
accaacaagaaactcggagcatttcaccag

SEQ ID NO: 40638 - DNA, 30 bp, Homo sapiens
  chr4:83482911-83482941
  hyper
gccccgcagccgggcggacccagccgcccc

SEQ ID NO: 40639 - DNA, 185 bp, Homo sapiens
  chr4:83483205-83483390
  hyper
ccggggcccgcccccgacttattctggggtccccgctgctaggccttcggggagagttgatcccctgggtctcgggcttctgccacccccccggggcccctaatagtcacccggggcaggagccgggtgtgggcgggcgagccgcttccttccgaagcctttgtggacgcgtttgcctggcgctc

SEQ ID NO: 40640 - DNA, 1 bp, Homo sapiens
  chr4:83718966-83718967
  hyper
c

SEQ ID NO: 40641 - DNA, 31 bp, Homo sapiens; identical to SEQ ID NO: 3380
  chr4:83719233-83719264
  hyper

SEQ ID NO: 40642 - DNA, 30 bp, Homo sapiens; identical to SEQ ID NO: 3381
  chr4:83720225-83720255
  hyper

SEQ ID NO: 40643 - DNA, 30 bp, Homo sapiens; identical to SEQ ID NO: 3382
  chr4:83821902-83821932
  hyper

SEQ ID NO: 40644 - DNA, 30 bp, Homo sapiens
  chr4:83931887-83931917
  hyper
cgccattttcacctcgtcatcaccatcaca

SEQ ID NO: 40645 - DNA, 30 bp, Homo sapiens
  chr4:83956187-83956217
  hyper
gaggagtggagctccgcatcactcaaccct

SEQ ID NO: 40646 - DNA, 30 bp, Homo sapiens; identical to SEQ ID NO: 3383
  chr4:84030839-84030869
  hyper

SEQ ID NO: 40647 - DNA, 257 bp, Homo sapiens
  chr4:84205957-84206214
  hyper
ccccggcaggcatgcgcagtggcacccgcaggatgcaatcctagtctgccaggctgggcggcggtgtgggcagaacctttcctcatccttacttgtgaaattggggtcatcgtggtcgcttactctagggaggaatacttaatgaaaaagggatttctattggcaaaaggcaaaaaaattacaataaatttagttgtaattttttacaactcgatcttgattgactttgtggttccattatcgggcaacactcagaa

SEQ ID NO: 40648 - DNA, 86 bp, Homo sapiens
  chr4:84292569-84292655
  hyper
tctgcctctgtgatcacgtgatattctcccgctgtgtcttcacatcatcttgtcaacctaaaaatcatccaaagggtcagagtcta

SEQ ID NO: 40649 - DNA, 30 bp, Homo sapiens
  chr4:84376735-84376765
  hyper
tccgggcacgagctcggccgcggtgggagc

SEQ ID NO: 40650 - DNA, 30 bp, Homo sapiens
  chr4:84377094-84377124
  hyper
ctcacctactctcgcgggtcctcagcgttc

SEQ ID NO: 40651 - DNA, 211 bp, Homo sapiens
  chr4:84456994-84457205
  hyper
caaacaagacctcaagcgtcccagatacgtcagcagttcattctgcgggtgaagaaaatattgacatttttcagatgaaaactctcctcctgaaaggacctttgctgagtgctgggggaggcggggcgcggggaagaacggagaccgcccaggaggctgcggcactcctgggctaagtactgccagggagctcccccgttgggtgacggag

SEQ ID NO: 40652 - DNA, 164 bp, Homo sapiens
  chr4:84457807-84457971
  hyper
ttccacctggctgacgctggttctcggcttcatccttttaccttcggtcttcggagtgtctctgggcatctccgagatctacatgaagatcctagtgaaaactttagaggtgagtgccgggagggatgcagccagccccacaccgctgcgggctgagaacccgg

SEQ ID NO: 40653 - DNA, 416 bp, Homo sapiens; identical to SEQ ID NO: 3385
  chr4:85402822-85403238
  hyper

SEQ ID NO: 40654 - DNA, 15 bp, Homo sapiens
  chr4:85403458-85403473
  hyper
gggcgcggtggctca

SEQ ID NO: 40655 - DNA, 62 bp, Homo sapiens
  chr4:85403865-85403927
  hyper
tggatgtctgtgtcccgggacctcggggaagagggcccgcaccggtctgcgaattgcaaggc

SEQ ID NO: 40656 - DNA, 29 bp, Homo sapiens
  chr4:85404111-85404140
  hyper
ggggcgcgtgtcagcgttggagagcctgc

SEQ ID NO: 40657 - DNA, 251 bp, Homo sapiens; identical to SEQ ID NO: 3386
  chr4:85404224-85404475
  hyper

SEQ ID NO: 40658 - DNA, 458 bp, Homo sapiens
  chr4:85416759-85417217
  hyper
ccatgtgtgcacgcgcgcgcgacaggggcggtacctatccctccaggtatgcaaggtccactcaccttgacctgactctctgtcatccccaacgaataggccaaacgagccctctcgggccccgccaagtattttgtttgttcgaaagtcttctccagggcgaagatctgctgtccggaaaaagtgggtctcgtgtgttttctcttcccgtctttgtccaacaaaatggatccttgatctgtgagaaccaataaacaacgagagagggggaaaaacaatcggttacaagcggctgcactagggggaaaaaacgaactcgaaaaacaatgttttgtggggaaagaaagctcagtctgtggcggacaccagaagtgtagtggcgcttccagactaacggcacgtctccctttgcttttttacatccacctgttttttaaaagccgcgtgtttggcgcagc

SEQ ID NO: 40659 - DNA, 520 bp, Homo sapiens
  chr4:85419120-85419640
  hyper
cggggggctgccgagggatgagagcccccccgtggccgggggcttcaggccgcctgggttgtgggtgcccagaggcggggagggcgacgaggaggacgacgacgaggacgaggaggagggggggccggcaggcagcgggggatacgcggcagggtacagcggggtcttcatctcggccatgctgtgcagggcggccaggggagggctgctgagcaggaatgcgctctgccgggtgccctccattgcccccaccgctaacatcccacggccacgccggagaccgtagccttgcagcgagggcgctggctggtgccccccgcggggctcagaggagccggaagcgccgagggcgcgagcggagaggcactcggcgcgcccggaggcgagctgccaactgaaccaaaaatgccgctgccgggagttgctcgcctagctgcgcagcagagatgtccaaaccctccacgcgggaggcggcagctcgccgagaaaagcaggcgtcccggcgggctaggcagtcctt

SEQ ID NO: 40660 - DNA, 841 bp, Homo sapiens
  chr4:85419661-85420502
  hyper
cgatccctggctattctctcttcctcacttttcctagctgttcaaagtgcgctacttctcatcttctgcccccgggaaataagcaaaacaaaacccaggctggctccggagagtttgtagcaaagttagttgccgaatctccactttgaagttggagggtgggggtggcttgctttctttggggaggttcaaaggacgccttgtgcagcccgtggcgctcctctgatcttactgggatgctctgctctttcggtcgcgcggctgattcgcattcgacgctcactgtgcccggggagaaagcgcatccagcccgcgggagatctagcctctgtgcgggcttcctccgcccacgctgccccgggctgctgcgccagaaagggcagtgccacggatccccgcggctcccaggtcctcacctccacccgccttgccctctggcccacggggcactggagttgcaatattgaaaagaaaaagggggaggaaaaacacagaaaaacaaaagactaagtgtgaaaagtctgacggctgggtttcggcgccgctcgtcagtccacttctgcaaacgggcccggcgacccccgccccacccccgctccctctctccctctcactctcagcctttgactctcctctctggcattttcttcgcggcttcccaggcttcggtcttctaagtcctgtcctctggccaaactgaccctctccgcggctcctccgctctttctctcctttcctctctccctccgggcctgacagttcagatgaagctctcaaaggtaataaaacatttgcatcactccctacccctctttagctgggggacgaaagggagggggaa

SEQ ID NO: 40661 - DNA, 30 bp, Homo sapiens
  chr4:85421035-85421065
  hyper
gagcaggcagccggcgcagccctggcctgg

SEQ ID NO: 40662 - DNA, 30 bp, Homo sapiens
  chr4:85422393-85422423
  hyper
ctatgtctctggcttcgttacaaacgaaac

SEQ ID NO: 40663 - DNA, 63 bp, Homo sapiens
  chr4:85422865-85422928
  hyper
aattatgacaataaaaaattccggatccgtgtaccttgatccctggtagtgagggggtgagcc

SEQ ID NO: 40664 - DNA, 79 bp, Homo sapiens
  chr4:85422972-85423051
  hyper
cgctgggcagcacgggaaggcaggccggtgcctcctgccaggtgctagttgtagtggatctgctgcctgtctacagctg

SEQ ID NO: 40665 - DNA, 385 bp, Homo sapiens
  chr4:85503525-85503910
  hyper
cagtactgagtttctgggagacggcgctgcggttgtgatcggaattgttggccgacgcacctctggacgcccagtgaggcaaaagcatctcctgttttcaaggtgatgacactgggctggaatgccgcggggccaaccagtccgtcctgccagacaagtttctggtccagtgagcctccgacccgccgcgcgtgtcaagctgacaaggccggggaggcgtttgaagcagcagtgttgagcgctgttaacatttagcgggcgtctttgagtagctcctccagccctcgcagcggcccagggactagcctgcaagttctcaacgctcacttccagcccgcgctggccccgcctccgcctcccagctcctcagcctcctcccgcccca

SEQ ID NO: 40666 - DNA, 909 bp, Homo sapiens
  chr4:85503985-85504894
  hyper
cgtcacctcacggggaggcggggctgtgggaaccgcagtgcagcgcagaggggcggggcctgcggcgcgagacctggtgcgggaggcccgggcagggagaagtgtgcggggccgggacaagccggctccgagtccggctccggggggcggggcgggaggggcctgcgcggcggcgggagcccagagccgcgctaaagcgggtcaagcgtcctccttttctccccgccccttctcctcctcctacctgggcctctgcgtggagacgcgcacctggcaaccggaggccgcgtctccgccttctctgctcgcgcctggcgcccggagcctgcccgggacctccgccggagccgcgctcgctgcaggcggcctcgagcgctctctcgttgatgccgttttggaggtgaccggcgcggcggccgctctatggtggggccgcgttagtggctgcggctccgcgggactccagggcgcggctgcgaggtggcggggcgccccgcctgcagaaccctgcttgcagctcaggtttcggggtgcttgaggaggccgccacggcagcgcgggagcggaagatgttggagctgaggcaccggggaagctgccccggccccagggaagcggtgtcgccgccacaccgcgagggagaggcggccggcggcgaccacgaaaccgagagcaccagcgacaaagtaagtggagccgagagaggcggacgccgcgccctggctgggtcctggttggaagcgggacacttgagagcaagggtggggcccgtccagcgtcaggtgaggctgcacgctgccggtgcaccttcctccctgcctggcactgcttcctccttctccagagggggtcgggacccgggatcccagtggcggtgaggttcccaggatgaccgcggccgctgcccgg

SEQ ID NO: 40667 - DNA, 150 bp, Homo sapiens; identical to SEQ ID NO: 3390
  chr4:85886792-85886942
  hyper

SEQ ID NO: 40668 - DNA, 640 bp, Homo sapiens
  chr4:85887144-85887784
  hyper
aggccgcccaccctggcggcggcggcggctcccggccaaggcggaccctggggaggacagcagctgggccgcggcctgtccctagggggagcgggcgcagggccgcgagtgggcagcgcctccgccccgcacgaacaaagcggccaggcgcgccgggccgaggcagcaccgcctctccgggagcgcggggggcggggaggatggcgggggtactcacctgagggccggcggagggcgcgggcgggacaggcccaggagacgggaccgcggcgggccggggctccgcgccgagggcgcacgggctacggggaaggggcgaccggcgcgacgtccgcggcggggcccgggagccccgcgccgcgggccgggggccggggcccgagctcgattctgcggccgcgaggtatgggaaccggtccgccgggccaggcagcggtgctaggcagcaggggcagcgacgccgccgcctttcccttctcctgcccccgtccctgctccgccgcgtcctcgtcctcgctgggtccccgccgccgccgcctcagcctcggcgctcctcgggtttcttctctccatcaaggccgggccgacccgcagggaccatcccggaaagtgaggggttgttgccgtttcccgcagctgt

SEQ ID NO: 40669 - DNA, 476 bp, Homo sapiens
  chr4:85887986-85888462
  hyper
tgcctcactctcagcggctgccttcgcccctgtctgcagacagcgccgctggatgctcccagctggacttcaaccccactcctctcagtccctctccccactgccttccagacgcgcctcttccccgccccgcgcccctctctcctctcccacccctgcccctctccgcggcgctcaccctcctcagtcccagtttctgaaaggactcagctgagaaaggacaactgggttccgctttccttaaccctacaccctttagctggatgctgtcagaggcgatggagaaacgcaaaggtgcgttaattttactctagccagagtataaaagaactgcccacgccagctattgtactacgcagcttcgaaactcctgcacgctctcctgtgtggctcccgtccgtgatgggactgtagttgaggagctcggtctcaaatggtgccttccgtcagtgaccttgagtcggttgcctaagatt

SEQ ID NO: 40670 - DNA, 47 bp, Homo sapiens
  chr4:86396142-86396189
  hyper
ggcggggctcctgccggcctcccctgtagtgcggctcgagtcctgtg

SEQ ID NO: 40671 - DNA, 56 bp, Homo sapiens; identical to SEQ ID NO: 3393
  chr4:86851384-86851440
  hyper

SEQ ID NO: 40672 - DNA, 399 bp, Homo sapiens
  chr4:87281208-87281607
  hyper
aacctaccagaggagacggacagagggcttggggaatggggttgctatggcaaccgaaaggagcacacatgacgtcaaagcccagagaggtctagggagggggatgagggggaaacagaaagaggaagcgtctatgtgcagctacagctactgtgttttccggtgaaatgaggaccaggcaaatgtaaaggaataaggttcgtcggcagccaacatcagcaactacgacatcaaggcagccagcctgcacaacctgaagaaaagatccattcgatgcagttctggccctttgcacagcagcacggaggagcaaataccagcagagcaaaacaccactggaaatgcaacctctgcttttcaactatctcttgtagtatctctaaacgtcaaacaagtaag

SEQ ID NO: 40673 - DNA, 857 bp, Homo sapiens
  chr4:87515169-87516026
  hyper
caccacactgcaggcgctaggaactctgccgctcggtcaccaacctgagcctctggctagtccgaagaacgcgaaaagccaggcccaaggcactggttgtcatggcaaccggggcgctggtctccctggcgacctcgtccctagggaggaggtggagctggatgccaggcgggccaatgaggtcgaggggagctcggggtgggagatctgcggtcctcccagtgccggggaatggttgagtgacaggaccgggggggcggagccggcgcggctgcccgaggtggagccccagtggtgcgagtagctccagcggccacgctgaggcgagggtgacacaccatgctcacggcccctggagaccgtcgtgctggcgagccgtgctccgtagctccccggtccgcctcggcagcggtcagagtcgcctacaggagttgagccgcccgcgccagaaggttttggcgaagctcttggagaggcgtcgagcacagtagggcggcgggggtgcgttgagcgctcgggggtcaggcagtcggccgggatcgccgctggggagcgtttccgaggcgaggaggaggaggaggagatgctgctcctcttctccccctccccaggctccttctacagctccttcagcccacgcccgcagccgcttgtgggagaagtggtggtggctctcggcgcccgcggcggctgccggcggcccgccccgacgccgcgtccctgcagccctcgcccggcgctccagtagcaggacccggtctcgggaccagccggtaaggacgagagccgccctgggctctgcgctgcatgtgcagaagtgcaaaacaaagtacattgcgctcgttctcttcctcctc

SEQ ID NO: 40674 - DNA, 46 bp, Homo sapiens
  chr4:87516266-87516312
  hyper
gtgacattgccccgtcgtgcttgcacagctccgctctgtgcgtgct

SEQ ID NO: 40675 - DNA, 822 bp, Homo sapiens; identical to SEQ ID NO: 3396
  chr4:87813017-87813839
  hyper

SEQ ID NO: 40676 - DNA, 30 bp, Homo sapiens
  chr4:87855922-87855952
  hyper
gtcaccctcgcgaccggggcggtcattgcc

SEQ ID NO: 40677 - DNA, 623 bp, Homo sapiens
  chr4:87856810-87857433
  hyper
cttctctcctgcaccccgggacccttccctgtgcctgtcgtggagagagatgagggcttcccgccgcgtctcgctgagagcaggagggaggcgtgtgtcggtggtccgtagcctccggggaggagttggagccaccttctgagacttaacttcagggacagagggagaggcgtctttagtatgggactggttaatttctcttgataatgcttttttccctcgggtgtcccatcctctgtggccgtcgcaaccccaccctccgacggtgcgagcgccggagccagcgaatgagaggggagagaaggtggagagtgtgaatcacacgttaccttagtgtaatggtagttgcattaatggagctgcgacgggcctgcgggcggttcgataccgtccggctagttttctcttcccggagcttctccaccaccagcacccgcaaattgttatgcagatcatcccgggaaggcacttggctttggaggtggagatgtgtccgaatctcccttgaaccagtctctgttagggggaaaggccttgcagccaagtgatttgttttaagggtggagccggagataattttaaacaccctcccccttggtgcacgttgcggggtgtgactcacc

SEQ ID NO: 40678 - DNA, 30 bp, Homo sapiens; identical to SEQ ID NO: 3399
  chr4:88141302-88141332
  hyper

SEQ ID NO: 40679 - DNA, 137 bp, Homo sapiens; identical to SEQ ID NO: 3400
  chr4:88886999-88887136
  hyper

SEQ ID NO: 40680 - DNA, 235 bp, Homo sapiens
  chr4:89079572-89079807
  hyper
aggatctcaggatgcgtgcgctcggaggcagcgctttaacaattaaggatgtaaatgttgggatgagtcacccggaccttccaaacaaactctaaagcagcagtttccacttaacaagaccaccaagcatgtgcacggtgcgttcctaaatcctacccagttcctccacaggctgcctccttgccgcgtctctcaatctcagtgggagtggcgggcactgcctcttccctcctgc

SEQ ID NO: 40681 - DNA, 512 bp, Homo sapiens
  chr4:89079844-89080356
  hyper
cgcgcgcggcacaaccccttcccccaaccacacccggcgcgcccgagcgctcccctcgcgcggcggccggcgtgggaggcgctgcggctggaggtcacgatgggagccggcgggtggccgcctggggagacccggacatccaggggacgagctcaggcagcgctgacacgaacttcctaagccgcgcttcgggctgtggaccgccagagctgaacgcagtggcccctccccagcgccccgggtttccccaggtcggggttcgcgggcgggggtgaggcgtggccccgactgccgggccgcgataagcgccctgcgacccggctgaaagcgcacacgtgtcctgccgcgctgagccgccagcaggactggtaccaccgccctccctcggggctagggtcaccctgccgtgacacgcagggacaagccaaacactcccgcctccgggatcgaacggaatgaaccagagtgattaactacgagaatcaccaggcgctcattgggctgatcagtac

SEQ ID NO: 40682 - DNA, 30 bp, Homo sapiens
  chr4:89204772-89204802
  hyper
tcatctacagaaagcggctgctgaaaaaga

SEQ ID NO: 40683 - DNA, 30 bp, Homo sapiens
  chr4:89205669-89205699
  hyper
gcaagcagtcaaagcggccactgccttgcc

SEQ ID NO: 40684 - DNA, 334 bp, Homo sapiens
  chr4:89299894-89300228
  hyper
cttgaagttcaggcagcgagagttgacatggggccagggctgcgcccctggggcgggttgaagacagggtgagtctcttgatattcaggaaatcatcgcgcacccagtcaccagcgttcgggagcctgtcgcagcgggaccgacggaatccggagcaggcgacagggcgcagaagcgggatgtacttctgttggggcgccgactccagggagctgcagcgccggaggacggcgggcagccccggggctgagctactgcaggcggccagcggggagcgccactctctgctgctgctgaccaaccacagggtcctctcgtgcggagacaacagcag

SEQ ID NO: 40685 - DNA, 843 bp, Homo sapiens
  chr4:89377923-89378766
  hyper
acaacgcttaacaaactttggcttccgttatccctccctctggaaatgcgtgtgtcagggtgcctcctagtggaactgcagcgtttcctcgaaagccattccgtccaggagttaaggtggccgctgcccgcccgggacactttctcagtccagcccatcggcctttaccccagccaacgacctgttgcctttggccgcctgccaagtcactctcattacagtttccttttccttttcgattccgccccctaaaaacaacaacaaacattatgtttcgttttccactggagctgcaggccccgcccccaaacagcacgtggggggcgtggcgtcccggcaggggctcagtagctgaggctgcggttccccgacgccacgcagctgcgcgcagctggttcccgctctgcagcgcaacgcctgaggcagtgggcgcgctcagtcccgggaccaggcgttctctcctctcgcctctgggcctgggaccccgcaaagcggcgatggagcggaggtcgcggaggaagtcgcggcgcaacgggcgctcgaccgcgggcaaggccgccgcgacccagcccgcgaagtctccgggcgcacagctctggctctttcccagcgccgcgggcctccaccgcgcgctgctccggagggtggaggtgacgcgccaactctgctgctcgccggggcgcctcgcggtcttggaacgcggcggggcgggcgtccaggttcaccagctgctcgccgggagcggcggcgcccggacgccgagtgagtggggctggtgtgtgagggctgtgagggctgtgaggggtgagggctgagggctgtgaggggcgggcagccgggggt

SEQ ID NO: 40686 - DNA, 25 bp, Homo sapiens
  chr4:89378831-89378856
  hyper
cggcgcacctgagctgtcttttatc

SEQ ID NO: 40687 - DNA, 30 bp, Homo sapiens
  chr4:89444419-89444449
  hyper
ttcccgcaggctggcgttgcgttctgggag

SEQ ID NO: 40688 - DNA, 90 bp, Homo sapiens
  chr4:89445079-89445169
  hyper
tctggtgagtgccccgccgccttaccagactacaaactaaaccagtgtttaagtcaaggtgtctgggttttcaccggggcctgtccaagg

SEQ ID NO: 40689 - DNA, 30 bp, Homo sapiens; identical to SEQ ID NO: 3403
  chr4:89513527-89513557
  hyper

SEQ ID NO: 40690 - DNA, 30 bp, Homo sapiens
  chr4:89513907-89513937
  hyper
cggggaggttggggcgcggcgcccttagta

SEQ ID NO: 40691 - DNA, 30 bp, Homo sapiens; identical to SEQ ID NO: 3404
  chr4:89744925-89744955
  hyper

SEQ ID NO: 40692 - DNA, 30 bp, Homo sapiens
  chr4:90031844-90031874
  hyper
ggcggtgacccttccgcagatgtctccgtt

SEQ ID NO: 40693 - DNA, 514 bp, Homo sapiens
  chr4:90228670-90229184
  hyper
gaccgaatcccttccgcatccctacagagcacaccaccaggctccggtcccccgcgctggccgccaggcggaggtgcgcagggggcgtctcctacctgctctgcccggctccgcggcgcggcggggccactgcctgcgctgtggcgggggcttcccgtcgcatatcccaagcaccgtctctcggcgccacaccgatggctccggcgggcccgcgagctgaggtccttctcagcccggtcccggagcgagctccgtgcgttcaggaactgaaattactatgccaagagcagaggcggcgcgcagcagtcgggcgtagaccgagggggctgcccccaccgcggggctgcagacgccgccgccgcccccgccgggcgcagagccagtttggaggtgagagttcacttgcccgactgttcatccgtcaggcccggggtgtacccatctgtccagcgctgcccagcctgagcatccgagagaggggcgacagctttgcaggcggcggcggcggcagcag

SEQ ID NO: 40694 - DNA, 1451 bp, Homo sapiens
  chr4:90757407-90758858
  hyper
cccgcgccagccacccgagggggcgttctcagcctccaccctagcggaccccgcgccagcacttgttaacccgttaccacctgttgacttggcctccttgcacttccatttcattatttgccaaacgcagcttgcttactttacagagaaaaaccaagagagcgggcagacagattttatgtgagagaaaagttggatgctcacgctccatggagcatcctcgcgtttcccggggaaaagcggatcccggagaagcagcctaatctctcagcccttgtggagaagggaatatcagaagcaggacgaaagccaggtcaagtctctttccttaggctccccaaagggacaagtactcacctcccagagacctggcccagcgggtcctcatggcagcaccaccccctcccggtgcccacgaccattcgtctcccatccggcgttctccaggatttccaaagacgcccgtttagatccacaggtacttacctgagtccctctgcttctccacaactccgactcctccccgcctctctctttttttaaaaaaaaaatttaaacaattcccaaataatatttaataggaaagaagaaggaaaaggagcgcacaggaagggcggaggcggcacccgggggggactgtccccagaggaggccgctgtgagccggcgacgcgaggctgggggagtgggaggcaaacccgctaacctgtcgtcgaatggccactcccagttctccgctcacgagggtggaaaggcagaaggcttgaaggcaaggcgtgagggagcgcccaggacgctctcggaggggccgggccggggtctgcgctgcagcccgcacgcacctcacttccgcgtcgcggcgctcggtcgctcgccccctctcttgggccccttctggtcgtcgccgtcctcctcctcctagtcctcctccttctccttctcctcggctctccgcccccaccgctgatttgtcagcgcttctgcccgcccctctcccggcgctcgctgctttccctgcagcgtgctcctcgtccctatctcggatggggatggggcagggggcgcggggtgagccatcaactccagccgcctgcctggccgcgcaaggcgggaaagtgggggcgcttttgcgcctcacgttaagtttagggtcacgagcactcttgtggagatcgggagcggttgggctagggatgatgcctcttcctctttccccttcccctcccttcttgtccccgcctttcctctgggtcctcccggggaccaccccctacccctcgtcagagtcgccctgggagagccgagggcctgagggtcgaccaccaagggcagagcctatcccttggggagctgctggaggagacaggcagcgccgggaggtggctcacaccgcaccgccgagagcgctttgccctcgcatcgctgaaatttaatcacggtcacaggttacaa

SEQ ID NO: 40695 - DNA, 30 bp, Homo sapiens
  chr4:90759188-90759218
  hyper
gtgatttagcctaccggaccatcatatcca

SEQ ID NO: 40696 - DNA, 30 bp, Homo sapiens; identical to SEQ ID NO: 3407
  chr4:90823115-90823145
  hyper

SEQ ID NO: 40697 - DNA, 327 bp, Homo sapiens; identical to SEQ ID NO: 3408
  chr4:91048332-91048659
  hyper

SEQ ID NO: 40698 - DNA, 51 bp, Homo sapiens; identical to SEQ ID NO: 3409
  chr4:91048894-91048945
  hyper

SEQ ID NO: 40699 - DNA, 158 bp, Homo sapiens
  chr4:91049201-91049359
  hyper
ggcccgcgactcccagtgcgccgcgtggccatttcctccacgctgctgcgtggtttgctgcctgcggccgcggcggccgctccagggcgatgcggagcgctggccaaggcggcgagagttggcgcaggcttcgggtcgctccccttcctcgccactcg

SEQ ID NO: 40700 - DNA, 77 bp, Homo sapiens
  chr4:91049560-91049637
  hyper
cctgcccagaggcagcagtaacggcagcgacttagattgaaccacttgctttgtggtggagcgtcaagggccccagg

SEQ ID NO: 40701 - DNA, 6 bp, Homo sapiens
  chr4:91049696-91049702
  hyper
gtgggt

SEQ ID NO: 40702 - DNA, 170 bp, Homo sapiens
  chr4:91760070-91760240
  hyper
gcttctcctgttcaatcgtttctttggaaggcagtggatttttctcttgcgtctctgtcttcttcagtttcggcttatcgaatttctcgatctcagccatatcgggtttgtcagacatggttgcggaggaaaagcggagcgaggcgcgcgagtacgagcgaagtctggtc

SEQ ID NO: 40703 - DNA, 164 bp, Homo sapiens; identical to SEQ ID NO: 3411
  chr4:92905821-92905985
  hyper

SEQ ID NO: 40704 - DNA, 292 bp, Homo sapiens
  chr4:93224880-93225172
  hyper
tttccccctctctccgcctgacagcaccgctctctcgcaggctcgctccttctcctaggtgatccatttctaggcaacgtggggctggtgctgaagctgccaggctcgctccttgcttcctgcatcccgccaggcgaaacgctccaaaagcatcctgcagcctgcggcggcttccctcctctggcccggccccgctgctcgcgcccggcgcaacccccccgccaccgcgccccagcaaaccggctccccgggcccgcctcgccaagctgcgttccgcgcctcacgcagaaag

SEQ ID NO: 40705 - DNA, 30 bp, Homo sapiens
  chr4:93225550-93225580
  hyper
gcaaacaactctggcgatgccaaaattccc

SEQ ID NO: 40706 - DNA, 30 bp, Homo sapiens
  chr4:93225945-93225975
  hyper
aaatgtttccccttcgctttccccctctcc

SEQ ID NO: 40707 - DNA, 246 bp, Homo sapiens; identical to SEQ ID NO: 3413
  chr4:93226457-93226703
  hyper

SEQ ID NO: 40708 - DNA, 299 bp, Homo sapiens; identical to SEQ ID NO: 3414
  chr4:93226728-93227027
  hyper

SEQ ID NO: 40709 - DNA, 1607 bp, Homo sapiens
  chr4:94749481-94751088
  hyper
gagtggcttctgggcgcctggcgggtccagaatcgcccagagccgcccgcggtcgtgcacatctgacccgagtcagcttgggcaccagccgagagccggctccgcaccgctcccgcaccccagccgccggggtggtgacacacaccggagtcgaattacagccctgcaattaacatatgaatctgacgaatttaaaagaaggaaaaaaaaaaaaaaacctgagcaggcttgggagtcctctgcacacaagaacttttctcggggtgtaaaaactctttgattggctgctcgcacgcgcctgcccgcgccctccattggctgagaagacacgcgaccggcgcgaggagggggttgggagaggagcggggggagactgagtggcgcgtgccgctttttaaaggggcgcagcgccttcagcaaccggagaagcatagttgcacgcgacctggtgtgtgatctccgagtgggtgggggagggtcgaggagggaaaaaaaaataagacgttgcagaagagacccggaaagggccttttttttggttgagctggtgtcccagtgctgcctccgatcctgagcctccgagcctttgcagtgcaatgtcccgcctgctgcatgcagaagagtgggctgaagtgaaggagttgggagaccaccatcgccagccccagccgcatcatctcccgcaaccgccgccgccgccgcagccacctgcaactttgcaggcgagagagcatcccgtctacccgcctgagctgtccctcctggacagcaccgacccacgcgcctggctggctcccactttgcagggcatctgcacggcacgcgccgcccagtatttgctacattccccggagctgggtgcctcagaggccgctgcgccccgggacgaggtggacggccggggggagctggtaaggaggagcagcggcggtgccagcagcagcaagagccccgggccggtgaaagtgcgggaacagctgtgcaagctgaaaggcggggtggtggtagacgagctgggctgcagccgccaacgggccccttccagcaaacaggtgaatggggtgcagaagcagagacggctagcagccaacgccagggagcggcgcaggatgcatgggctgaaccacgccttcgaccagctgcgcaatgttatcccgtcgttcaacaacgacaagaagctgtccaaatatgagaccctgcagatggcccaaatctacatcaacgccttgtccgagctgctacaaacgcccagcggaggggaacagccaccgccgcctccagcctcctgcaaaagcgaccaccaccaccttcgcaccgcggcctcctatgaagggggcgcgggcaacgcgaccgcagctggggctcagcaggcttccggagggagccagcggccgaccccgcccgggagttgccggactcgcttctcagccccagcttctgcgggagggtactcggtgcagctggacgctctgcacttctcgactttcgaggacagcgccctgacagcgatgatggcgcaaaagaatttgtctccttctctccccgggagcatcttgcagccagtgcaggaggaaaacagcaaaacttcgcctcggtcccacagaagc

SEQ ID NO: 40710 - DNA, 182 bp, Homo sapiens
  chr4:94751320-94751502
  hyper
gttccaaacttcctacggtccatattgtttgatgaaaactttctgttaaaattgtgtcctttccgcccaccttctgctccccctttagatagatacggtataattgtaggtacccgtatatggcatcattattctagttccctgctgccaatacgctgctaaaacgtcgcatcttctctgtc

SEQ ID NO: 40711 - DNA, 328 bp, Homo sapiens
  chr4:94753273-94753601
  hyper
aaagagtaatgcactagggagcgcaggttctggtctccttaagtaagaaactgcagaaccagctttttactgaccacctgggtatctgtggctttcagcggaagccgaccaagagatgcagagaacgtccgccagctctctgggagaagcgagcaggcggctggtgacactttccagggcagaaataatgcacctgtcccttagataaccttttgcacccatcgagtttgccgtgctcacgataaacatcaggaatcttcgggctgctgaataaatcaagcgattgcttctaacacatttccatttcgctctcaataagcagacccaa

SEQ ID NO: 40712 - DNA, 30 bp, Homo sapiens; identical to SEQ ID NO: 3418
  chr4:95293542-95293572
  hyper

SEQ ID NO: 40713 - DNA, 71 bp, Homo sapiens
  chr4:95678883-95678954
  hyper
cacacaggcggcggcgctggggccgctccaagtgcgttgagaagtgtaatccctccgctaagtacttggct

SEQ ID NO: 40714 - DNA, 133 bp, Homo sapiens
  chr4:95679690-95679823
  hyper
agggccagcccaggcgggacccgcaggcacccacctgccccggacgcctcccgagacccagccttgccgtgggggaaagtgcgcagcgggctggtcccggcgccttggactgggctccgtctctgcttcagtt

SEQ ID NO: 40715 - DNA, 30 bp, Homo sapiens
  chr4:96114894-96114924
  hyper
tctctgccagcttttcggcgacgctgctgt

SEQ ID NO: 40716 - DNA, 2030 bp, Homo sapiens
  chr4:96469208-96471238
  hyper
tggtgggaagcaggcatgaagcggggtatgtatgagtgcagaggcatgcacatcccgggcctgcctccagccgggtacgcggattcgggtgagctgtgtatttccacagcacctgaagcagcaggcgagggggacgggtgcttttgagtccttgacagtaatggacacatttccttagctgagcgcccttcggggtctagtgtgctcagagactcagtgaagatcctgctaccccagtcttggcacagcgcggggagcctctgcgcatcatgcgcttcggggtgcatctacggtatgtcacacagccacccgcaccgagagtctttccaaacctccgtgtgtgcaatatgcaacaacgtgcgcgtgcggagctgaaagggcacaagacactccaggctcccacacgtatggagacggatcggctgcgtgtccacaccccgttcgtccctggtccattcgtgcccatctcagaagatagattaaacataataataataataattattattattataatcaaagcttcttgactagttgggaaagtggaatttagagtggtttccagttgaaagcaacgaggcaaattgaggaagtcaagagaactggggaggaggagaggaaggagggaaggaagaagctaagggaggtggccgcggagcttggcggacccccttaccttgggcggcggagccagtgccgctggcgctgagcagggccagggcaggtagcacgagcatttgcagcaagtatcccagtcccagtccgcagcgggccgctgtcgcccgcagacctttcctcatcgtagacagaggtgtgccggggggaggggagggggacagagagacgcgcaaacagctgaaagccccactgggcagaagctgaatccgtgcaccgcgaagcagtccgaagaaataacgacaaccaagcgccacactccactttctccaaaggcaggggccaaaagggggaggagaggagacgccgaggaggagtttgaaggtccctctttcccaatgccttctaactgacgtctcccgcgagcgactgctctgcccccacttgggaagtccagggaggcgcaaggcggccacctccgccgctccccccagcagcaggagcagccgcagctccgccgcacgccgaagtctggactgctctccgggtcccctcgcctgtgaggaacacacacagacaccgggggtgggggtgggggtgggggttgaagtggggggagttggaggaggagggaacggagggaggaagcttgggcaccgtcaggcgctctggtctccaatctcagtgttctcacgccggcggagagatgtcccggctgtcgctgctgggtggccaaggaggttcacatcctagagtagggcgcacgggtgcgcgaaggcgctcgccaaggaggcgtagagggcgcagcacaactcctctggggggtaaccgggggcgggagcacgcccgcccgccttatgtaagcaaggattgcagggagatcagcgcccaggagaccagctgtgggtttgcccgctgaagccgaggcgagacagaccaggggacgaagcggctgcggagagtggcagcgcgcctgcctcccgcggtgcgccagacctggacgccgggagtgcagcgggcgcgccccgggccactaggctgtgtccagtggagctcagcctgccgcctgccaccttcttcgccgcgccggcaaagcctcagccgaattccctaggactggactcggtctacgacttcgggtctcgcggttgacgaagccggtgcgggctcgaactgaagtccttcttggttggggaagaaggcatgaagcttttgcactgccccagccggctgctgtcctggggttgtcagcgccagtcagactgctttatgttctgagcgcgtatgacccctttgcagtggaacagaaactaaaagctcgacggaaactcattctgcaacagtgctttctttgcgtgcatgttggtggctgacaagggtggtgatgcgataccgagagaaactctcttagaaaa

SEQ ID NO: 40717 - DNA, 30 bp, Homo sapiens
  chr4:99181378-99181408
  hyper
cccctgaaggactccggtcgctgtagcctt

SEQ ID NO: 40718 - DNA, 30 bp, Homo sapiens
  chr4:99388926-99388956
  hyper
agcacctgaaggtccgctccgtatctgaaa

SEQ ID NO: 40719 - DNA, 30 bp, Homo sapiens
  chr4:99578705-99578735
  hyper
gctgaagaggagagcgtgcaggaaacgtta

SEQ ID NO: 40720 - DNA, 30 bp, Homo sapiens
  chr4:99580128-99580158
  hyper
tggagggacgcgggcgagagggtcgctcct

SEQ ID NO: 40721 - DNA, 30 bp, Homo sapiens
  chr4:99850236-99850266
  hyper
aatactcaccggttcgacagtcgccatctt

SEQ ID NO: 40722 - DNA, 30 bp, Homo sapiens; identical to SEQ ID NO: 3421
  chr4:99850525-99850555
  hyper

SEQ ID NO: 40723 - DNA, 30 bp, Homo sapiens
  chr4:99916496-99916526
  hyper
cagagagtgcgccgcgagagggcggctcct

SEQ ID NO: 40724 - DNA, 30 bp, Homo sapiens
  chr4:99917593-99917623
  hyper
ttgtgctttactaccgtgctttgacactta

SEQ ID NO: 40725 - DNA, 30 bp, Homo sapiens
  chr4:100010196-100010226
  hyper
aatttcactgaaagcgcctgagaaccagta

SEQ ID NO: 40726 - DNA, 30 bp, Homo sapiens
  chr4:100239303-100239333
  hyper
acgtggtcatctgtgtgacagattcctaca

SEQ ID NO: 40727 - DNA, 50 bp, Homo sapiens
  chr4:100484870-100484920
  hyper
agctgggtaggccgcggggggcgcctgtcatcgacgtcatttccttcagc

SEQ ID NO: 40728 - DNA, 56 bp, Homo sapiens
  chr4:100485193-100485249
  hyper
agtggaggctacggcggttgcgtcttacgtcatcgaactgcggccatttcgaaccc

SEQ ID NO: 40729 - DNA, 233 bp, Homo sapiens; identical to SEQ ID NO: 3422
  chr4:100729522-100729755
  hyper

SEQ ID NO: 40730 - DNA, 231 bp, Homo sapiens; identical to SEQ ID NO: 3423
  chr4:100867971-100868202
  hyper

SEQ ID NO: 40731 - DNA, 30 bp, Homo sapiens
  chr4:100870308-100870338
  hyper
tctcttaggcctctcgccgcgttcagggcc

SEQ ID NO: 40732 - DNA, 30 bp, Homo sapiens
  chr4:100870672-100870702
  hyper
ccccccatatttatcgtatgggcagcccaa

SEQ ID NO: 40733 - DNA, 32 bp, Homo sapiens
  chr4:100871519-100871551
  hyper
acccgccctcgggacgcgtccttgagacttca

SEQ ID NO: 40734 - DNA, 1062 bp, Homo sapiens
  chr4:101111125-101112187
  hyper
gccagttgcaaccatggtcaacggctctgtttccttcgcgaggcgcaacggcctttcctgagcgctggaaaaaatgaggcgagaagagacggatttgcaaaagcaggcgagtcgtgcagaggctcctaaaatgcccggcgtcccgggagcgaactagcggaggaactcctttgccaaaggggtggaaccggcctctgcaactcaatttgacaaagccctgggagcggagccgcaacctgaaactaactcaacagttcgcaaaacttggaagcgacctgccccgcggagcgccccccggccccgctgcccccaccaaggccgcagcttcgctcacctgccaggagttcgcgggggcctgcgcgctcgctgccgggtaaacacaggcaggtggcttcttaggagtcccctctcctggggactcggtgacctgcagaccccagcagccagcggcaccctgctcacccctcccgggccaccctgcgccggctcctcgcagtagcatagcctccggggcagcgagaactttataggtccagtccccaccctgctcaggcccgcccacctgcaccgcccctccccggccagcgccccgcccctcccctccagagtctggtcccctttcaacctctacacttccagggagcccgagcctagccacagggagttgaggataagcctgtggtagagcggacacctgttgcttccagggtagatctcgggccactgggaccgcaattccgggtgcacgactcgtcaaagcctgaacctgattgttcagtgcgacccctccccgagcgtccgcgctttcacactcaggctgctcccggcagcgggaagctttaagcgatctgtgcatttccttgtcctggggctttgctgtgtcatcctgaacacttggcttaaatctgttgcaacgtccactgagcatcatttatgcacttatttctggcctctaacccagtcaactctactctgcctcccagggtttctgtatcctcctctgctgcaagcggtcagatctagttttcctttcccgcatcgaaggctcgccagcattttaag

SEQ ID NO: 40735 - DNA, 30 bp, Homo sapiens; identical to SEQ ID NO: 3426
  chr4:102268230-102268260
  hyper

SEQ ID NO: 40736 - DNA, 30 bp, Homo sapiens; identical to SEQ ID NO: 3427
  chr4:102268607-102268637
  hyper

SEQ ID NO: 40737 - DNA, 30 bp, Homo sapiens; identical to SEQ ID NO: 3428
  chr4:102269410-102269440
  hyper

SEQ ID NO: 40738 - DNA, 30 bp, Homo sapiens
  chr4:102269764-102269794
  hyper
cttggagcccaaagcggatccccacacttg

SEQ ID NO: 40739 - DNA, 126 bp, Homo sapiens
  chr4:102711751-102711877
  hyper
aagtgttataagaaaccaaagcggccttttgagaagggatgtaagagcaggcccctgagcagtttcacttcctctgggcgcccagcagagcggagccctggccttgcgggcatgagccccggggct

SEQ ID NO: 40740 - DNA, 58 bp, Homo sapiens; identical to SEQ ID NO: 3430
  chr4:102712137-102712195
  hyper

SEQ ID NO: 40741 - DNA, 30 bp, Homo sapiens
  chr4:103265568-103265598
  hyper
tacggagggctgcccggacctggcggcctt

SEQ ID NO: 40742 - DNA, 30 bp, Homo sapiens
  chr4:103266028-103266058
  hyper
aggggagcgataggcggagtgggccccccg

SEQ ID NO: 40743 - DNA, 30 bp, Homo sapiens
  chr4:103266892-103266922
  hyper
cgcatgcatcttttcgtgatcttgatgaaa

SEQ ID NO: 40744 - DNA, 30 bp, Homo sapiens
  chr4:103422181-103422211
  hyper
gggggcttccctaccggctccagcccttgg

SEQ ID NO: 40745 - DNA, 382 bp, Homo sapiens
  chr4:103681574-103681956
  hyper
acgcttcagtagagaacgactgcagtaagtaaactgctagtagcaacactgttcccctatctaaacttcccctttccagagttactgatgtcccaacatgggtcggtcgctcagtctccgtcaagcccgtaccccatagcttgggcatttccccccgcagatcacaagatgcaaaggggaagttactaccaaaccgacgagaatggcccagagctgggggctgccaggcggttcctgggcccctctcagcaccagaagaaggcgggcgcaggctcgccgcgggtcggccgcacgccatacctggatcaggccctgctggaacaaggcgctgtgcacgcagccagggaccgccccgggcagctccagcgagccgttcccattg

SEQ ID NO: 40746 - DNA, 30 bp, Homo sapiens
  chr4:103682329-103682359
  hyper
tcggcgcttcttcccgccgcctcagtacat

SEQ ID NO: 40747 - DNA, 30 bp, Homo sapiens
  chr4:103748278-103748308
  hyper
tgtgtcacccctgacgccaccgtacactca

SEQ ID NO: 40748 - DNA, 30 bp, Homo sapiens
  chr4:103748655-103748685
  hyper
ctacggggctcacgcgcacgacacagccac

SEQ ID NO: 40749 - DNA, 30 bp, Homo sapiens
  chr4:103749360-103749390
  hyper
acagccttgtctcacgcgcccaatcaggag

SEQ ID NO: 40750 - DNA, 30 bp, Homo sapiens
  chr4:103749951-103749981
  hyper
ttaaagtatggagacggcagttatgctctc

SEQ ID NO: 40751 - DNA, 30 bp, Homo sapiens
  chr4:103789947-103789977
  hyper
ccagcatctacagacgttaaaggcccaaga

SEQ ID NO: 40752 - DNA, 808 bp, Homo sapiens
  chr4:103997330-103998138
  hyper
ggcctctcacctggcagtctccggcgaagtcgaccaggctccgtctgaacgattaggaaaggggctgtgggggaggcggcggagcccggtctagccaccgcgctctggggttcccgattcgcgcatcttcccaggctgagccgggaggctgcgttgactgcagataaacggtctcagggcgcggcaccgcgtgtagtcggccccgcctttcgcacgaacccgctgggcgacaccgcgcagggaggtccgacccgtcggcgccggtacaggctccggagtaagcatgggttggtccggggcccgcagcggcagccccgtgtgccctccgccgggtttcaggtccggcggcgcgggtgcagagccgcgtgcgatgcctggtgcgcgtggcttcccccggaaaggtggcgccaggccgaccatgggcccacgtcccggggcctcggagcggcaccgcgcggtctttcagctgcttatcctccctgggcgggtccgcaggcttctggggccaggaccagcgagctcccgggaaagcttcccggaaagcttacccagagagcgcggacccaggcgccgagtcttcccggagatgacgagacaccgcgagaggagcacagcgcaggctcctcgggactccgcggcgcaggccgggcagcccgttacttgttttatcgttcccgaaaccaacctctaagttgtctatcagtcctccaccttttagctgtacctcttagaagtgtcttctcagctgcggtgggaagataggattctttcttaaggtgaccaattaaatggccggataaaagacttg

SEQ ID NO: 40753 - DNA, 30 bp, Homo sapiens; identical to SEQ ID NO: 3432
  chr4:104020934-104020964
  hyper

SEQ ID NO: 40754 - DNA, 30 bp, Homo sapiens
  chr4:104119181-104119211
  hyper
ggtctgtatgtcagcgagactgagttaaat

SEQ ID NO: 40755 - DNA, 30 bp, Homo sapiens
  chr4:104119456-104119486
  hyper
acggctccttcctccgccatcctatcaggc

SEQ ID NO: 40756 - DNA, 30 bp, Homo sapiens
  chr4:104119835-104119865
  hyper
ttggaacctgtagacgaaactaggtagaga

SEQ ID NO: 40757 - DNA, 30 bp, Homo sapiens; identical to SEQ ID NO: 3433
  chr4:104251138-104251168
  hyper

SEQ ID NO: 40758 - DNA, 204 bp, Homo sapiens
  chr4:105412284-105412488
  hyper
ctctgcttcagcagcgccgcatttgagcttgttcatgcattcccccgccaaaggtctgcagtgttcaggggataaggtggagaggaaattagtatttgccatttgcaacgacggctctggcgggcagccagctttccccagcctctgggagtcgtttcggtggtgcatgctggtcctgctgccgccgccgccgccgccgccgcc

SEQ ID NO: 40759 - DNA, 471 bp, Homo sapiens
  chr4:106067030-106067501
  hyper
taaacagaaggtgggccggggcggggagaaacagaactcggtcaatttcccagtttgtcgggtctttaaaaatacaggcccctaaagcactaagggcatgccctcggtgaaacaggggagcgcttctgctgaatgagattaaagcgacagaaaagggaaaggagagcgcgggcaacgggatctaaagggagatagagacgcgggcctctgagggtaaggtgggcgcaagcggaggtgtggtgcggggagaggtgccagtgggtggaggcgggggccagagcgagggcacgtgcgggtacactccggaggaggtgggtgcgcgcgggggcgtgtgcgcgggacctcgaagtggtggtggagtgcagaccagcaaaaagtttcaaagggaaatcttagatgtcacgtctttgtccaggcacccgtgccatcccaacctcccacctcgcccccaaccttcgcgcttgctctgct

SEQ ID NO: 40760 - DNA, 296 bp, Homo sapiens; identical to SEQ ID NO: 3435
  chr4:106067840-106068136
  hyper

SEQ ID NO: 40761 - DNA, 278 bp, Homo sapiens; identical to SEQ ID NO: 3436
  chr4:106068587-106068865
  hyper

SEQ ID NO: 40762 - DNA, 30 bp, Homo sapiens
  chr4:106084762-106084792
  hyper
tggtgctattactctcctcactttactaag

SEQ ID NO: 40763 - DNA, 147 bp, Homo sapiens; identical to SEQ ID NO: 3437
  chr4:106111515-106111662
  hyper

SEQ ID NO: 40764 - DNA, 4462 bp, Homo sapiens; identical to SEQ ID NO: 3438
  chr4:106155052-106159514
  hyper

SEQ ID NO: 40765 - DNA, 241 bp, Homo sapiens; identical to SEQ ID NO: 3439
  chr4:106159633-106159874
  hyper

SEQ ID NO: 40766 - DNA, 181 bp, Homo sapiens; identical to SEQ ID NO: 3440
  chr4:106160113-106160294
  hyper

SEQ ID NO: 40767 - DNA, 121 bp, Homo sapiens; identical to SEQ ID NO: 3441
  chr4:106161133-106161254
  hyper

SEQ ID NO: 40768 - DNA, 2722 bp, Homo sapiens; identical to SEQ ID NO: 3442
  chr4:106161373-106164095
  hyper

SEQ ID NO: 40769 - DNA, 231 bp, Homo sapiens; identical to SEQ ID NO: 3443
  chr4:106164711-106164942
  hyper

SEQ ID NO: 40770 - DNA, 178 bp, Homo sapiens; identical to SEQ ID NO: 3444
  chr4:106180761-106180939
  hyper

SEQ ID NO: 40771 - DNA, 108 bp, Homo sapiens; identical to SEQ ID NO: 3445
  chr4:106182910-106183018
  hyper

SEQ ID NO: 40772 - DNA, 162 bp, Homo sapiens; identical to SEQ ID NO: 3446
  chr4:106190751-106190913
  hyper

SEQ ID NO: 40773 - DNA, 377 bp, Homo sapiens; identical to SEQ ID NO: 3447
  chr4:106193707-106194084
  hyper

SEQ ID NO: 40774 - DNA, 3102 bp, Homo sapiens; identical to SEQ ID NO: 3448
  chr4:106196197-106199299
  hyper

SEQ ID NO: 40775 - DNA, 1602 bp, Homo sapiens; identical to SEQ ID NO: 3449
  chr4:106199358-106200960
  hyper

SEQ ID NO: 40776 - DNA, 173 bp, Homo sapiens
  chr4:106629825-106629998
  hyper
cccggtggtcccttcggaaacggttcccgcactggccggctccgaaagcaggaaaacaaaggttcccacagtaggggcgggggaaacgtttggcagtgcgacagtaggaagtgacgttacttccctttttccggtccgccggattatgaatgacggccggcgcgagtattttc

SEQ ID NO: 40777 - DNA, 15 bp, Homo sapiens
  chr4:106816366-106816381
  hyper
ctcccaggctggggc

SEQ ID NO: 40778 - DNA, 30 bp, Homo sapiens
  chr4:106816755-106816785
  hyper
cccaacctgttcctcgcgcgccactgcgct

SEQ ID NO: 40779 - DNA, 30 bp, Homo sapiens; identical to SEQ ID NO: 3452
  chr4:106817000-106817030
  hyper

SEQ ID NO: 40780 - DNA, 30 bp, Homo sapiens
  chr4:106817677-106817707
  hyper
ttacagactaggctcgtcccgggtgcagat

SEQ ID NO: 40781 - DNA, 30 bp, Homo sapiens
  chr4:107237976-107238006
  hyper
ctacagaaaaatatcgatccctaagcgtat

SEQ ID NO: 40782 - DNA, 480 bp, Homo sapiens; identical to SEQ ID NO: 3453
  chr4:107955311-107955791
  hyper

SEQ ID NO: 40783 - DNA, 1195 bp, Homo sapiens
  chr4:107956414-107957609
  hyper
ctgtatctggggccacgctccgaatgttgcaagatgcaatggcaaaccgctagcccaagagagctggcccctgcctcttctgtctgaagaatgtgtttgggggttttcctacctgccccaggtttttgcccttcttactgccgccgaatgccagtccttggtacatgcccgcagatcgattggcggcctgaccaggcgtctccccgcccagagaggacttgatggagttgagtttggcccgcgaactgccgatctgtgagctctccaccatcagcaccgcggccagtaggagcaggcagcaggacgaatccttgctccgcatcaacgcggccatctcccggcgagggggtccccaggaagacgcaaagcccggaggggtgggaatgcaaagggagggaggaccccaacacggggcccctcacttgggtcgcgggggcttgcagattgtgttccctcaacccttcctggttcggggacccaggaccctatgaactcagtctcacgcctcaggacagaaattagcggaacccaagcgagacccgcttctccaccaggacaggaagttctgcaataactggaagcaatcaaatgcgaggcgctttctcgccaaggaggcgtgacccaaggtgcaagaaaacccagccctgtggatcgcaccgcttccgttccttcttgccccgcacctccttggtcccgccgggatctcggcggtttaactctcctcttaattgatcaggaggcccgcatcagctccttctccttcaactcagttgcttttctctcctctcttttcctatcctttatgtgtcaaactttgcaggacacagtgctccttttcaaagttagcaggcgctttagtaggggatcaggagacgtccccggaccgaatcctcgagatctgaagagaatcgaggtcccccacacgcgcactcacagttgccccgaagcgttgtcccctgactcacaagagacagcgaatcgctgccagcgcagcgatgcctagggagcggacttgcgctacgctcgccgcgggctcccgctttctctctctctgctctctccccagtcctctttgctttttatagcttcccacagtgaggactttttttttttttttacctccgcccccaattcaagagtgacaaagagtgaaaatttttctctcactccccaccgcttccgcccccctcctctc

SEQ ID NO: 40784 - DNA, 30 bp, Homo sapiens
  chr4:107957926-107957956
  hyper
gaagtgagcatctgcgcatctgctcattag

SEQ ID NO: 40785 - DNA, 67 bp, Homo sapiens
  chr4:107958465-107958532
  hyper
actgggacgcgctggcgcttgggggcgccagtggcagccgttcagcgagccacggaattgctgcagg

SEQ ID NO: 40786 - DNA, 457 bp, Homo sapiens
  chr4:108745572-108746029
  hyper
accctctgaatcaacgctggcgctcccaagcccactcacacgccgtcaggaagcagtttccgaaacaggccgggtgcgggggtgggggatcccgttccagccccacccctgaaagttgctgggagtggcacccaaagaactttcccagattgatctctgttgccgctcagggaggtcagctccaggccctcagcctttcggccgggagccaaactgccctgcctgccaagcccctccttctctgcaccttaaacagccgcgaggggagagtcggctgggattttcttcttaagaagtcgcgcaggtttttcgagctccactctgcgccaggagagccacggcagcaggaacgggcactgctgccaccgggccgacgggtgagtcactgtttggaaatggagtgggcgggcgagggtgtgagagaatgaatgatgtcaagagcgcgctgggcgcaggg

SEQ ID NO: 40787 - DNA, 415 bp, Homo sapiens
  chr4:108746295-108746710
  hyper
gacgcccggggctggtcgcggcggctgcggcagcgggctccatcccctggcaaatccccttcccgggagcaagtgccttcagctgggagtgtctggagccctggccaccagcgggtaaggagcgcgcggaggggccaggaggaggatgggctggggagcggagagtcctccgaagcgcgggaggggaaaggtggattgcgaagcggggacgtggctctaatccggcccccaccctccccgcccagggcatgcttcctcgattttgtggtctggaggagagatgtgtgccttagtctccttcctctgagcagtcatctcattcatttgcaacccatttcgggtaccccggtcctggcgttggaagggcacaggttaaaccccagattgtccagaaccactccggaggtcagggctg

SEQ ID NO: 40788 - DNA, 30 bp, Homo sapiens
  chr4:108852944-108852974
  hyper
gctggctgcggaggcgccgggcgcggggca

SEQ ID NO: 40789 - DNA, 30 bp, Homo sapiens
  chr4:108853189-108853219
  hyper
agcgacttccacagcgtgcgcgaggcgctg

SEQ ID NO: 40790 - DNA, 30 bp, Homo sapiens
  chr4:108911062-108911092
  hyper
ctcgctgtcgccgccgctgccacaccatgg

SEQ ID NO: 40791 - DNA, 30 bp, Homo sapiens; identical to SEQ ID NO: 3457
  chr4:108911506-108911536
  hyper

SEQ ID NO: 40792 - DNA, 30 bp, Homo sapiens
  chr4:109088764-109088794
  hyper
gatgtcagctaaatcgccttcctcttcggg

SEQ ID NO: 40793 - DNA, 531 bp, Homo sapiens
  chr4:109089486-109090017
  hyper
agaagataacgaaacgtccacttcctgaagggtgggaaaaaaagaaaaagaaaaaggagccacccacgctggagatgtccgttttagatcttcttattttcttccctttcgcttcggtttttcttctcgaggctcatttaatctgctagagaaggaggaggagcagaagatgggggccgaggaggaggggaagagaaagagaagtttgccaagaataaagtttttgccggcaagcgcggggactccgcagtggagggcactgcggagtctcggggagtcacagcgggggcctcgggcccaaatgcctctgcccggagctcgagccgacacacacactcagtccgacccctctttgttcccggctcgagtttctcagcctggctcgccggctcgccgctctgcacgcctccgccggccagctctgtcaaagcaaagagctgcgccccttgagttcgcccggccgaggggaggggacgccccgagcttggccgcgtgcgaggctccgggcgcgtcctggttcctcggcccgag

SEQ ID NO: 40794 - DNA, 1973 bp, Homo sapiens
  chr4:109092612-109094585
  hyper
cttccccctcccttacggattcagtgtagttcctggcataagcaattctgtcaccgggcggtcttttctaattcgtgtgggggctgatattaacataagcagccgcctcttcgggtgcgagtgggatcccaggtccgggatgtggtgggtgcggtgcgggagaggcacccgccgcccccttcactcggatgttagaggcaagttgttcgtgtgaactcgagcgaacgactggaggttggctgttgtaggttcactccttcaggatgtgggtttcagggggcgttttgatgtgatttaattccgaccgtgaaaacaattgctaggggctggctggattgctgttggtttttcccctcctggtggctttgcttggtttgggtttagtttgggaacaaacttgttttatatcaacacttccttctacatcgggcgccgtcgcctcaactgcgcgtggggggcgaggcgcccaccccgcacaagaacagaggagcgggggagaagagacggcctcgctgctcactgggtaagcggagcccagccccgctcgggagcgggcaggagagacagggtagtgacccccactcacaccagaaaacccctccccccggcgattttgctgccaactcgagtcggctacagacagtccagtgagtccttaattacaaggacgagagaaaagcacggtgcccctcgagtcctctccgccccctcggtcctaacccccgcccaggctccaggtcttcccctttgtgtggcctggactctctcccagctacgactttggtgggatccaaaaggaaggaggtggcggggcctacggaagaggatacccaggagccagggagaagggctagaaaacgaataatgtgactccagaggcggaaccccgaccccctctatttcccaccccggcttcacccggagacgaaagctgtgggcatcttcagtttaacggacttcgcggaaaaggagagaaggggggcgagggaaatggcagtttgtgtcccaggggttcttccccttcttcttgccgcctcctaaagacaaacaaactcaaccccccaccctccggggtatcagggaactcgtgggaccgtgaaaaagtcgttcccaaatccggccgcctgcggacgtcggacttccgcggggccggcgcccgttggcgtctgtagctcggcgcagccacgcggggctccagcgagcggggtccgccacccctcgcgccctcctgcggctttcccagcgctgggccagtgcaggccgagccctgcgtccctgcctcgctgggtgggggtccggggcgcggctgtccacagggccgcctcctcctgcggcccgcggggaaggggcgcatcccaccccgctctgcaggccgcccttctgccagctgggaggcgagggcacacgtcctaaggctgcccaagggggagaggaatcgcgccggtaggagagcgcacgggaaccaggaacgcaaggcgggcacaggggagccgaaggagccagacagggcccggccacgcgccctcctcgctcggctgcgctccgtgacgggaacccaggctcccacgcacggggaatgcctagaacggagctagaatggaggtgggagctggagtcattttgcgggccacaggactgctcatttcgtgggcaggacgtgacattcttgtccctcctttctgaaaaacttttctcaggcgcctgaacttggcatggggaccggcctcgaaaagccggcgggtagcacggccgcggtatccaacccttcgccctccttcccaccggccctccgcgtccctcggcccgccccccgggtcggggacgcgcgcggaaaggccgctcgcgcgctcgagccgtgccttatatcggctgagggaggcgcctgcgcacggccccgcgcggcggcgcggcctttgaagtcgcggcggctgccgctttcatcctttcttttttccctcgcaggcccctttgtg

SEQ ID NO: 40795 - DNA, 30 bp, Homo sapiens; identical to SEQ ID NO: 3462
  chr4:109541580-109541610
  hyper

SEQ ID NO: 40796 - DNA, 79 bp, Homo sapiens; identical to SEQ ID NO: 3463
  chr4:109571438-109571517
  hyper

SEQ ID NO: 40797 - DNA, 119 bp, Homo sapiens
  chr4:109683715-109683834
  hyper
ccaacccctctagccggccggcagcccccgctagtccgccggctgcagagcgagccggggactttcgagcgggcaggaagcccagcgttccgggttccaggagcgtttctgggagtccg

SEQ ID NO: 40798 - DNA, 246 bp, Homo sapiens
  chr4:109684062-109684308
  hyper
ggtgcagggcgctgcgaaggtgcaaggtgcaaggtctgcgcgcctcctacgcgagcctgggactgccttggcggccccggccggccttcctcccgttatccctcctggcgttctcttgcccggggcgtcggaggtcaccggtggcgtcaactagctaggatcatctcccttttaagtctggctctggcgttgccctttgccaagcccctcctcctcccccgccggggccgcgggcaggtcgccggg

SEQ ID NO: 40799 - DNA, 304 bp, Homo sapiens; identical to SEQ ID NO: 3465
  chr4:110223123-110223427
  hyper

SEQ ID NO: 40800 - DNA, 150 bp, Homo sapiens; identical to SEQ ID NO: 3466
  chr4:110223578-110223728
  hyper

SEQ ID NO: 40801 - DNA, 359 bp, Homo sapiens; identical to SEQ ID NO: 3467
  chr4:110223944-110224303
  hyper

SEQ ID NO: 40802 - DNA, 143 bp, Homo sapiens; identical to SEQ ID NO: 3468
  chr4:110343713-110343856
  hyper

SEQ ID NO: 40803 - DNA, 30 bp, Homo sapiens; identical to SEQ ID NO: 3469
  chr4:110355510-110355540
  hyper

SEQ ID NO: 40804 - DNA, 529 bp, Homo sapiens; identical to SEQ ID NO: 3470
  chr4:110481808-110482337
  hyper

SEQ ID NO: 40805 - DNA, 30 bp, Homo sapiens
  chr4:110624734-110624764
  hyper
aagctcctcccagtcgctccggagcccgcg

SEQ ID NO: 40806 - DNA, 30 bp, Homo sapiens
  chr4:110651358-110651388
  hyper
ggcctccatgcccacgtggtctccgcggca

SEQ ID NO: 40807 - DNA, 212 bp, Homo sapiens
  chr4:110651656-110651868
  hyper
cccctcgcagagagcgctgcgagaggtccagctgagtttccggcttgaagacgtggttccattggcaatgtgggcagagtccggctgtcagctcgcagagcagggcttttcctccttgcgtcctctcccggtcctccagatctgctgtggccgcggttgggggagcgggatctggaagatgccaacccatgccttggcggtgcctgactcta

SEQ ID NO: 40808 - DNA, 30 bp, Homo sapiens; identical to SEQ ID NO: 3472
  chr4:110686397-110686427
  hyper

SEQ ID NO: 40809 - DNA, 111 bp, Homo sapiens
  chr4:110736535-110736646
  hyper
tctggccgttagggcggcaaccaaacagaaacctgccccgcctctgggagagaaggcggatccctaacgccagctatctccaagagcaacattgccgcagcacttccggga

SEQ ID NO: 40810 - DNA, 81 bp, Homo sapiens
  chr4:111117164-111117245
  hyper
gtcattttcagtcccacgagggctgagacctgtctggctcagtactgagtgaatggagagaagaggcgggaaatggtacct

SEQ ID NO: 40811 - DNA, 30 bp, Homo sapiens
  chr4:111118476-111118506
  hyper
aggtgacactggatcgcctcccacacaggg

SEQ ID NO: 40812 - DNA, 30 bp, Homo sapiens; identical to SEQ ID NO: 3474
  chr4:111119282-111119312
  hyper

SEQ ID NO: 40813 - DNA, 383 bp, Homo sapiens
  chr4:111119901-111120284
  hyper
cagttttgtttacagcgaaggtggttggaagagtgggggaagggcgcagagagaaaggaagtggcctggaggtcatccagatcccctaagcccaacctcgtgggccgccttgctttgaatgaagtttcagcttgcagggcgcatccccgcggcgcgtggacccgagagcttggcgagtaaacgattgggaaatagtaaaacctgccagctctcttgcaagagaactccgggcaaatctacgttgagatcaccagtgaagggaatacgcttcccacctcctcgccctacctctgggaccacccccacccctacccccacccccacccgggagctctggcttagattcacgctaacccaggccctgcggacggcagagctcctta

SEQ ID NO: 40814 - DNA, 30 bp, Homo sapiens; identical to SEQ ID NO: 3475
  chr4:111532395-111532425
  hyper

SEQ ID NO: 40815 - DNA, 292 bp, Homo sapiens
  chr4:111532719-111533011
  hyper
ggcccggagcagcggcgcgtgcgggggcgtgccgagcgcaggctctagggcccctgcttcgccccagctggaccccgcgggcggtcggtgcagctcgagcgtgtgggctgcgatgccctgcctgagacttcgggctagggatgcgggcgggaagtgggggtgcggcggcagctgcagattagattccttttttttttggccggagggacgtgcaaacttctagtgcccgggccaagagggcgaccccggaggtgcgtaggtggccctccgggttcccgcttctcctagtgcc

SEQ ID NO: 40816 - DNA, 14 bp, Homo sapiens
  chr4:111536491-111536505
  hyper
tcggttgagtggaa

SEQ ID NO: 40817 - DNA, 413 bp, Homo sapiens; identical to SEQ ID NO: 3478
  chr4:111536561-111536974
  hyper

SEQ ID NO: 40818 - DNA, 519 bp, Homo sapiens; identical to SEQ ID NO: 3479
  chr4:111537066-111537585
  hyper

SEQ ID NO: 40819 - DNA, 30 bp, Homo sapiens
  chr4:111539228-111539258
  hyper
cggagttgccccatccggcaaggtcctagg

SEQ ID NO: 40820 - DNA, 48 bp, Homo sapiens
  chr4:111540595-111540643
  hyper
gtttggctttgcaggcggccacccaggccggccggcttccacccgtgt

SEQ ID NO: 40821 - DNA, 228 bp, Homo sapiens
  chr4:111540782-111541010
  hyper
cgccgggcccagccgtgtaatccgctttttctctttttcctttcattcttgatttcctttttatcccccttcctctttgcacccgactgctataaaaagcacgcctcactcccacttggctcgacaagcagccgccctggaaggagaggcagctgcaaggagagcccagcgccgcggctacaaagcactagggtggagctgcggaatagcgggcggggtgggagggcg

SEQ ID NO: 40822 - DNA, 51 bp, Homo sapiens; identical to SEQ ID NO: 3480
  chr4:111542041-111542092
  hyper

SEQ ID NO: 40823 - DNA, 872 bp, Homo sapiens
  chr4:111542473-111543345
  hyper
gggtcctcggcgcccacgtcctcattcttcccctgctggcttttatctttctctgaaaacgaaacacacacactttcccgtcagcatgcccacctgcaacgcggacgccaactggaccggcggcagaagccgtggaagagctgggctgcctggcgccggaggagggtgcgcgcggcggctccgggccgcgaggagcgctgcgcctgtggggtgtgcaggcgcaagtgtgggtgtccgcgccccatttcctcccctcccccagcgccgcacgttttatttacatgtttatctcactgcagcggcacattcacttttatagcctgtgctttcaagtatatttatacacctctgcgcagacacaccaaatctcctgggacgcgcacacgcgcgtggtttacagacccccctccccctcgcagaaagctcagatttccatgcggtttgggaaggctaggaaaagatgtggggattcggttgggcaccgaagttcgccggccctttcccaaaaaaaaaaaaaaaatgcctcttcgcgaagggcatttctgagtggtttcaggcaatttcctaacgagtggagctcctcgggagctgaaagccgagaggaaaacagggacagaggtcggcggcctctgaaggtcctcgaatcaagatgctgggatttttgtgacccaggaaacagaagggaggccagggtacgaatagagagggcggcagaattgctcgcgcccttagcgccccaggagccgggccggtcgagggagaactaaagggatgcggggtagtcaaaattccggctcccggaagttctgcggggagccaggcgaacgaccactcccaccacgcctccccccggaggggctgacttccttggg

SEQ ID NO: 40824 - DNA, 292 bp, Homo sapiens; identical to SEQ ID NO: 3483
  chr4:111543403-111543695
  hyper

SEQ ID NO: 40825 - DNA, 460 bp, Homo sapiens; identical to SEQ ID NO: 3484
  chr4:111543720-111544180
  hyper

SEQ ID NO: 40826 - DNA, 292 bp, Homo sapiens; identical to SEQ ID NO: 3485
  chr4:111544298-111544590
  hyper

SEQ ID NO: 40827 - DNA, 418 bp, Homo sapiens
  chr4:111549794-111550212
  hyper
attcagtcaatattaggaagacgacaaagctttttacataggattaagaagacatcagattgttccattagtatattcctgctcacgaataagctttcgttatacatttccttttcccccgagccgctctaacaactgctgcatatattagcagcgggcggtgaggaataacagccgaaccagccttaagaaactttgtgtaccgagtcagcagcgaggaacgcgacctgtgaagaccacttttgcgggcagggatccgcagggactgactactttcggacaactggtacaatttcccctgggggtgaaaaaccacaacgcggcggggcacctttcaagtgagctgcagatttgattggcgcggggggtgggggaggggaggggagaatgggatggcggaggtcgggcggaggaaaga

SEQ ID NO: 40828 - DNA, 308 bp, Homo sapiens
  chr4:111550536-111550844
  hyper
tgattgaatgagaggcgcgggggcggggcggcggagaggggtctgcggccgccaaggccgccagggttaacccaggtccttcgaagaaggttgggaccgagctgctgccgcgtgtgaaggtgtgtgtcgcggctgggggtgccacaacgggccatggagcccacctcccagagggaggaagtctgtgcacaccagcgacttgggtcgaacactttcagcccatccactgggccaaagctatttaacaattaatgcgttcctgggggaggccgggggaagtacccgccccttgtcgggacgcaaagcca

SEQ ID NO: 40829 - DNA, 30 bp, Homo sapiens
  chr4:111551627-111551657
  hyper
ttaatggcattaaacgtgtttaggcagcaa

SEQ ID NO: 40830 - DNA, 316 bp, Homo sapiens
  chr4:111552035-111552351
  hyper
actgcgagcccgccccgcgcgaagcgagattggggagctcctctagtctggccggagccagggctgagcccgcgcaaagcattctccccagaagtcatcgctgctcttgatttttaaccatatcccaaacatactacggtctaataatttatttttactaccgattatcaaacagaagaagaatttaacacaatctaaatgacagaaatcacgcgacgttatctctgcattgcccccatttaaccccatggggttaatcccggacaagtgagcgtttaactggcccagcagggcgactggcggtgtagtgcagtgt

SEQ ID NO: 40831 - DNA, 76 bp, Homo sapiens
  chr4:111552419-111552495
  hyper
cggggaaactccaatgcaagacctttgttttcttcttagtaatacggtttgtttttttgaccggggtcccaaatcg

SEQ ID NO: 40832 - DNA, 1411 bp, Homo sapiens
  chr4:111552988-111554399
  hyper
ccagctcttcagggatgttgtcggccccccgcccctcccccaaccagccaaagcaaaccttcgccaactcaagtttcccttgcttgcctcccgcgatgaaccgcgcacccacaagtctgggtggggcgtggctgagagcctgagtgactgagtgggccctggtggtgctgcgcgcagcgggatataacgagcgacagaggtcgctgttggaccacttttccacgccagcctagacgccgaggtttgctggagcgtgcgcaggggatcagaccacagggagcgagcgagagggagagagaggtgttgggtctcaggagtgcagtataatttggggaaaggaattaacgtccctgggacggctgcttcccgtcccacccagaggcggagtgtctaagttcaagcagcaggcgcgtcaggtctggcggcctcgccttcttgcgcttcgcccgaggcccagagtcccggaggcgggtgcccagcgcgcggcctgcgcttccctcccggccttaccattggcgccaggatgctgccgcgggaagaacttgctgctggctgcctcttttcggctctcaggagagtccgtgaactcgacctttttgatttcggagtctttggagaagagacattcaacggccgccggctgcacgcctgggccacgcgcgcgcccgccccacgtgcggagagaggcgtcccggaccgcggccgaaaggagccggggacgggaggagggggaggggcgaggcaggccggaggagaaagagggacaaagagcaaagacccagttagaggaaagagctgacggcatccccgtcccccggaccctctggcaacccggggcaggatggcgtactctttctgcgcctccccggttgccggcggttccagccgggaggagtaggctggggggcttcggtacacagcgcgccgctgcttcctagtccaccgccccgccacagggagaggccactggcgatttggttctgatttccttcctgcccaggctggcccctcggggaagcgcccctcgctggggcctcgccgcagggccagtgccctcttgccgccctcacgtggcgcggcctcccgtccgatgacccgggcaggagaagggggttcttacctaattgcacacacgccgacaccagtttgcggcagttggtctccattccccgttatctgcaaaacagaagagaaggaaggctgtaagaagcggcggccgtcgagtgagcagggctcagatgagactacgttacactagctgttaggcgcctactgtgtgctaggcttcaggcgtgtttttccgacctgacagcctctggctgtgcagcagcatctccagcctagcctcgggcccaggacatttatttatcaagaggggatctccctccagagttgccgcaaaagtgcccag

SEQ ID NO: 40833 - DNA, 30 bp, Homo sapiens; identical to SEQ ID NO: 3489
  chr4:111554652-111554682
  hyper

SEQ ID NO: 40834 - DNA, 65 bp, Homo sapiens
  chr4:111554899-111554964
  hyper
actgcccgccaaggacggagaaatagctctggtataactgctacccagttctccccctttctctc

SEQ ID NO: 40835 - DNA, 280 bp, Homo sapiens
  chr4:111555193-111555473
  hyper
cgacgaccggagggcccacttcgcgcgggtgcggggatcggggtgggagcaagcgttgtcgggttggcggaggcacagaggcggggcagggagctgcgggcctgcctctggcctgagtaccgtttccctgcgtctcggcctctcctgaagggagctgggccctggggagcctctggccaaggtcgctgcctacaggaggggctgcccggcgctgtggcgtggggatccagggtggggacggccaggcggttcccccacccgctagcgagaacgcgggcgg

SEQ ID NO: 40836 - DNA, 820 bp, Homo sapiens
  chr4:111557622-111558442
  hyper
tgagaatgctaatccttggcccgaggatttgttcctgcagtgttggcaccgagatttaagggaagatacctcgttttaaatgccagccacggtctggcttccctctcgacttcagcaccctgtagattgttagtgtctgtggcgggggacgaaaggaacagggctttgcaaggtctgtttgccgactgcgttaccttgggcgaaacttagccccaaaagccacaaatcacctacggtgaagattctccgaagtggaacaaatttccagactcgcattatctcacatccctgcgggatagatggcctccacttaccggctaccgggagagagctgctgtctccgcgtcccactgcttcccggggcgatttccagcgagccgagcctccggctgcacggcaagcgcccgaaagccgggcctgagaggactgcagggctcctgagggtgccaagttccgaaggagtccacgggtgcactggggcctccgaaatctagccgccactggcagtttctttctgctcctctccagctttctcgctcggtctcgcactctctctcctctccctccctctcatccctctctcttccctctgctcctactccgtgtggggagtgacgtgacgtcagcagagattccaccaaactccactgcacagtggcgcgcgggcggccggccgagcccggctgcgcggctggcgatccaggagcgagcacagcgcccgggcgagcgccggggggagcgagcaggggcgacgagaaacgaggcaggggagggaagcagatgccagcgggccgaagagtcgggagccggagccgggaga

SEQ ID NO: 40837 - DNA, 83 bp, Homo sapiens
  chr4:111558498-111558581
  hyper
cggactcccactgtggaaaggaggaccagaagggaggatgggatggaagagaagaaaaagcaatctgcgccaacccggcagcc

SEQ ID NO: 40838 - DNA, 43 bp, Homo sapiens
  chr4:111560180-111560223
  hyper
aaatgagggggaaaatgcccacgtgctgtttaattgtatttcc

SEQ ID NO: 40839 - DNA, 300 bp, Homo sapiens
  chr4:111560442-111560742
  hyper
gtagagattaagaggcgctcgtagcagaacggccttgccttcagctggtggcgaggataggcaatctcatggaaaagttggaagagaatgagaaaaccaaagacagaaagattcagagatccgcggagagacacagggagagggaagggagttgcgctgaaaagacgcaaagatacgcgcgtgcaactccctcccctttcaggtttcagaggtttgcaaaccagggctgagaggaaggggctcgggaagctcacgttcctctcgccccccttctgtctggagtctcgcccgccagaggct

SEQ ID NO: 40840 - DNA, 30 bp, Homo sapiens
  chr4:111561337-111561367
  hyper
aaacaactccagtgcggattctctggaatg

SEQ ID NO: 40841 - DNA, 30 bp, Homo sapiens
  chr4:111562255-111562285
  hyper
ccaattaaaacgtccgggcaatgctgggcg

SEQ ID NO: 40842 - DNA, 62 bp, Homo sapiens; identical to SEQ ID NO: 3493
  chr4:111562498-111562560
  hyper

SEQ ID NO: 40843 - DNA, 31 bp, Homo sapiens
  chr4:111562880-111562911
  hyper
ctgttgtcatctttggcgacgcagaaggaca

SEQ ID NO: 40844 - DNA, 30 bp, Homo sapiens
  chr4:113067350-113067380
  hyper
gtgtgggtggattccgtccacgggcagcgc

SEQ ID NO: 40845 - DNA, 605 bp, Homo sapiens; identical to SEQ ID NO: 3494
  chr4:113430613-113431218
  hyper

SEQ ID NO: 40846 - DNA, 69 bp, Homo sapiens; identical to SEQ ID NO: 3495
  chr4:113431455-113431524
  hyper

SEQ ID NO: 40847 - DNA, 50 bp, Homo sapiens
  chr4:113431804-113431854
  hyper
cacacatttcttttgcagattcggaggccgggactttcacgctcccggga

SEQ ID NO: 40848 - DNA, 239 bp, Homo sapiens
  chr4:113431915-113432154
  hyper
cgcttgggagcccgagggggctcggggaagaccgaggctggcggtgaggaggaggcgcttttaaccggttccaggtgtcggtgcccagaagtcacaaccagctcaagggtgtgcaatgcaggggggtgtacccagcgggtgggggcgccgcagctcccagcctcgccctcaagcccggccctttagcagcctgtgacccagactggcgggtgggcagctgaagccggccttgggtctaa

SEQ ID NO: 40849 - DNA, 277 bp, Homo sapiens
  chr4:113432226-113432503
  hyper
cgcccagggccttcgcctcagctgggacaccaggagcgcccatccggctctggtccaggtgctgcgggcccgggaagcctcagcccctcctcctgcctccggctgagcctaggtccggctcccgtggcgggcccagcggttggcagtccgcctctctactttttttttcctccttcttggcactcagatggatgtatttaaaatctagtgaaggaaaaatgagccgtaacaaggcctgagcactttagaacaaataaatacagccagtcccggaacg

SEQ ID NO: 40850 - DNA, 71 bp, Homo sapiens
  chr4:113432518-113432589
  hyper
cgacgctccaatgagaacaggacccaccttcgcgcctctccgcacttaggaaaacgcgccgcagcgcgcta

SEQ ID NO: 40851 - DNA, 1938 bp, Homo sapiens
  chr4:113435423-113437361
  hyper
cctgtgagattcacacgaactgcaccaagtccttcggcgttaaagagaaaggggaggagcgtcagtccgctctgcaaactctttagatatgccaccatcatctcttcccagggtctttttcgtctcaagaagcgcccccaaaacgccacccttggctttgacaataagctccatcacaccttcagtaaatcagagcccgtctgaatgaaggatacccaaagccaagaaatgcaagaaacaaccgaggaatcagaaaggctacacctgccctgtgaagtgagatggtttccagggcgtggaaaggaggggcaggggaagggaggagggctcgactggggacaggaaagggaacccactaaggcctggcgtgggtagcagaaatggcagctctagatacaatccctggctatggggaggtgaggtgcatagcggtgcttgtcgggaggtgggggctgccaatagtccatgtctgacccggccgggctggcgggcgataaagtgcagctgtagggggaggtggaattggaggacacggaggaggacggcgcggggctgttggtgcaactccacgtggaggcgggcgaggggctgtctccgctgctgctcagggcggcgctggctcctcccgggctcagcaacactgcctcggagaagagcgcccccggcaggcccccgccgccgcccccgcagtgatccgccaggcgcagggtctcggtgagtgcccagatgtagttgtgggcgaagcgcagggtctcgatcttggtgagcttggcgtcctcggggaacgtggggagcacctcgcgcagcgcgtccagtgccgcgttgaggttgtgcatgcggtttcgctcgcggttgttggccttcagtctacgggtcttcttgatgcgctgcaccgtctcggccgtcttggcgcctcgggagacggcccgcgcccgggaagggcgccgtttgcaatcgtgtaccagacccagcagccgtgcgggccggcagccctccgcacccgcagccacgccgccccgcgccccctgcccggcctcagccccgcgctgccgacgcgccccgcctgacgcgcccggctcctcctcctcttcttcgtcggcgctggatgacagcggggtcagggccgccaaggcgggggaggccgatccgagcagcactaacacgtcctcttcctccttcaactccaaggtctcggatttgacgaacatcctaccgaagagagaaaggggaaaaaggcagtgaggtgtaaggaaagaaacagaggcgcgatcttcgtgtcacaggggcgtgctccggcgcgcacccgagaagaccagctccgaatggcgcggagcaggaaggcgaaggaagaaacccaggcagtgctaaccaaggtcaggagcgccgctagcgctcgctgtgaccctgctgccagtcagccgggtcctgccctccgcgggcggtcctgcgttccctccccgagaagggactgcggcctccgcgacaaagattctgcgcggagcagagggcgtgcgggtgtggttggactgagtgcggggaaaccacctgcgtagttggaagcggtggctcgaatacttacttagttggctctaactgtgcctcagcgttgctgtgactttggcctgtgccgggaatctccgcgcagctgcgagcgcagcgccgggtccttcgcccggcgtgaaagctgcaagcccggcgctactgtggcgcagctccgcgggggacctctgcgaccggcgagtttgccaagagccccggcggcggcggcggcggcccgcccgggtctcgtgtgttgtggtggtggtgcgtgtctgtctgtcagtcagtccctggccgtgcggctcctggcacgcgactcccaggcactccagttaacgcgaagctgcttgtggttcagtggctgcgtgtctggcacacgactctccttaaaacccctta

SEQ ID NO: 40852 - DNA, 1064 bp, Homo sapiens
  chr4:113437616-113438680
  hyper
ctaaagctcctgttggagctccgggctgcggccggagctggcgaagccgcagcggccgcagaggctcaagctgcggctgttgtcgccgccgctgtccattgtgattggtggctcgcgctcggctggagcgtgccgctaatttattaatgaatggaggtcgcgaggcgcagctggccaatcagggcgccctggactccgggaggcctgcgagccacgcgcaccggagcccgctccctttcagcagctcattaggggcccgagcgctgggggcggatggggggacccgtgctaccgcccccgccttcgtcctcgctgccgccgaggctccccccgcccggcgcgcgcgcaggcaccgcacccggcgctgccggccctcctaactcccgggtgatgggaactaggaattagttaatgggggtcagaatcccggggaaagcagttagccctgtggtgctgccgggcgtctcttggcaaagcctcttaggggttgtatcaaatagtaaacgattttaaaatggattcatttggttaggggaggagaatggcgtggatggagagatgtggacacctcgtgaacaagtgtgtttggggtccgtcgaaactggcgtgggagagtgaagggagaggacactggggattcaaacaggcgtctcttgggaggggaggtcggataggggagcagttgatgagcttttagaggatgtgagaatgaaatcactcacatgttagagctgaaaggatccccctcattttacatacaggaaactgaggctccgggcactgatgcaggttttgctggggttaacccagtttatagcctggagggacagcaaggaggcttcctgcgtgggtggcagcgaaccgagcgggaggagcggcagagctgctgctcctgcaagcaaatgcgctgcgctgacatttctgtgacctctgctccgcgctggggggcgttgtagggacaaggggcccatcttcccaattctgcttttcaatgagaaaaaagagctgaagggctactggacctcgggggaaacttgttctcaattgctcgttagccctcccca

SEQ ID NO: 40853 - DNA, 592 bp, Homo sapiens
  chr4:113441593-113442185
  hyper
ttgcaggtgactgtcgggggcgcgaaagagggcgcccttccctgagaggacaaaagccaaggtttggctatccagcgagcctgtcccccaattcacagtaaaccaccgtcggccaaaggagatggcgtgtctactctctgctaaaataacaagatgaagtacctgacaagggggctttgtaacccaaatcctaatcctccgagtgagttctcagaaagatggaaagatggcgggaaaaagttggtaaatcctaaacatcttttacatcaacggtctctagttcttcgctgcaggctagaaacgcagcttccagagcaggagagcctggtatggaaacaattagctttctccgcagagcaccccttgcaacgctaggattcgttattgatagtggtgagcgctgggaatgagtgtgaattcggagtttctgacggtcccctatccgggagccaaggaagccaaggagaaaacaatgtaaattcgccccgatccccagttactgcatcccacatggtattctcggtctcccccacgttttccccttgaatcctgtccggggaggattcggcttgaacctagccctggagaggtc

SEQ ID NO: 40854 - DNA, 478 bp, Homo sapiens
  chr4:113442246-113442724
  hyper
cgtccgaggaatcggcatccaccacagcagacagaaggcagggaagatcatcccccaggccccaagccccactctagagaccctggccccaagcccgcacgacgtgctctggtgcctccaagccaaacattccgggattcggcttgacacacaaggtcagtcagcttgctagcgcggaatcggccccgcaggtgctaggaggctcacttccttcttcgcagacgctataccctatccccacctgctctggggaaggcaaagctccgcagacttcttatccctgaggcaacccgctacccaaatgtccctcttctttcccacgaaggaaagaaattaccgtaggagattttgccaatccatgccagctttctgattgttttcttcaggtaaggggaaaagaacagccagcgcgtgaatggagagctgagggcccactagggagagaacctcttccccacccttcggtgcctgcaaaaag

SEQ ID NO: 40855 - DNA, 16 bp, Homo sapiens
  chr4:113443738-113443754
  hyper
tgcctgtaatcccagc

SEQ ID NO: 40856 - DNA, 462 bp, Homo sapiens
  chr4:113443993-113444455
  hyper
gtgtctacagaaaaaaattgttttatatatcagaaaaggatacgtgtatgtaacaataaaactgtgtaatgcaatagtgttgggagacgggggtatggtttattttcagggatctaaagatatactttagaatctaaaacattgggggttgacacttattgctgatttatccattctttctttccccccgaagtatttctcgagcgcctaccgagtgccaggcgcctagcgaggcgcagcgttagcaccaggcgcgaaccagacagctgtggcctgcctggtagaaacgaccctgcgataacgcagttgctagtacagctctcggcggaggagccagggccgggtctccaggccgggagggggcggccgcggtgcgcccgggcagcgctccctgcgcaagtagttcttctatgtctttacacgcacttccaaaaaaacttcgcaagtcacagaaacaattca

SEQ ID NO: 40857 - DNA, 572 bp, Homo sapiens
  chr4:113445001-113445573
  hyper
aacacaaaacaagatcttttgcgagagcggtgtccgagggagccggagcgctgacaggtgtgcaggaggcgccccctacagcctgctgcccctctcggggttacactcccttcctgccgcacctgagcgttttcaggacgcgctctggtcctggagggccgggcccgcccgagggcagccgattcacggcgggcgcgctgcgaagtcggggcgccccctggtggggcacggaggtcgagggggtatcctgagagcaccgcggggcttcggggccgcgggggagctcccaagacagccggccaccgggggacagtggatttggggtctcctcgaggtcggtccggggacgccctctgggaagcttcacctgcggctcaggttacaaacgcacagtgcccagccacgtcctcacctgcagtttcaaaagccgaaagaaacaaacacaaaacacctcccctagggttctgatagttgccaagtttaagaacaaccggatttaagccccacgggtttcgttttcttttgttttgaggatttagcaaatcagctagaagtgacgccaagacccaata

SEQ ID NO: 40858 - DNA, 30 bp, Homo sapiens
  chr4:113558572-113558602
  hyper
gcacttgtagttcccgttttcagacagtaa

SEQ ID NO: 40859 - DNA, 169 bp, Homo sapiens
  chr4:113627406-113627575
  hyper
ccccattgtcctcgcgtcccccaagggcggggacctcaaccccaatgcggcggctcccctaggagcggggccgacacgagccaacttggctacatcgcccggcccaggaccattctctaaacctcttttctcagtctcacttcacacacagacacacatacagacacac

SEQ ID NO: 40860 - DNA, 62 bp, Homo sapiens
  chr4:113739332-113739394
  hyper
agctgggggctctccgaattgccctgctccggggcccctcctgctgcgtgactcacaggcac

SEQ ID NO: 40861 - DNA, 921 bp, Homo sapiens
  chr4:114682534-114683455
  hyper
aagtactcaagaagagggggccgggaaatggaaaaacagccaggcacgggacgagtggcaagcagttgcgaaacgatccgcactggagcaggaggagtagaagcagaggggagggagtccgagggggcggaggtggagtgcagcggggccgaggccgcggagcccagagcggacagcctgagcccagcggccgctgtcagcaggctcaggcgcggggcgcgccggggctccgacgagcgtgcgcgcccgaggccggcttccctccggcgggcggcagcggctccggcgaagcgaggcaccttggcggcctcgcgctgctcacgagcccgcgcggcttcaagacggcgcggcgagagaaagagcgctcggctcaggcgaagcctcttctgccgtccccaggcctccgtctcctcctccggcgcctcctcccgccgctccctccgcctgccagcaccccctccctggcgaagccccctcctcgctggtcccacacctccctctagcgactccaagcctgtcccttcgtggatctctcgcactccctcctttggttgcacacacgagcacaccagtctagggagaaaccaggtgggtggaggaggatgtgcgggggagaagactggaggtttgggtgaatgaggcgagaagtcacagttacccatttaaacccgcacagagaaggctgcctcaatctggggctgactgagcgggaagatgcagggcaactcgaggatggcccggggcagccgccctgggtcgcggaagcccacgcccctgttttgggcgccgggcagcagggacttctccaggccggttcccgggccacgacacccggtgggccgagcaagggagagcaaccacttcatctccacgccgctcagagttgacacagcaggggccggatgtgggctgttcactgct

SEQ ID NO: 40862 - DNA, 615 bp, Homo sapiens
  chr4:114900587-114901202
  hyper
tttgccaatctccccgacactcaccaggcggcgaagtgaggaagaagccgtttcctgatctccctccacctccgcagaaactccgggcagcaattccttttccccgctgctagggagcctgaaggccaaagccgggtccctagccccgcggccggtccgcgcggagcccgcttggtctttgcgtagttggcgcacccggcgcaggcgctgcaaactgcgtgcgttttctcagctaacttatttagctttggcactccgagttcttttgcctcctccctcttttctctccagtgaatcacagaacggtactttcttcctgagctcccccgggaagagggggtgggggaaaaggactgtttagaggctcgatctttcctttttcttttccgggaggtggatggccaaggcagaggaggctttgccagagagagagctgcgtgctgctccagcccagcgggattccgggggatccgcctgggctaccgcgtcccaagagtgtcgcctcctgcccatcaccccgctagagggaaaggacggcggcgcgaatggggaagggtaaagcgggcacttcttttcgtggggctgttggtgaagagccccgtctcccatccctaa

SEQ ID NO: 40863 - DNA, 187 bp, Homo sapiens
  chr4:115519421-115519608
  hyper
gcgcgacatcaacacgcagagctcactgagccgccttgatgataaaaggcgggcacagggactacgtgggtggtggcagaaagggcgcgggacacgcctcgcaaagagggaagagtgggcggggccacgtgccgttgtcagagttcgcaactcgagcgcccagagggctcgcgaaaagtcccagcct

SEQ ID NO: 40864 - DNA, 117 bp, Homo sapiens
  chr4:115519970-115520087
  hyper
ctccttagccaacacgctaactccgaagcctcccttacgcccccgaaccaccgaaggcggcgacacctgattcagcgcacaaacacaggtcccttctgtcccggatacaattacgcg

SEQ ID NO: 40865 - DNA, 292 bp, Homo sapiens
  chr4:115520702-115520994
  hyper
ggcccgccgtttccgcgtgcccgcgcgactctcgacaatggacagtgtacagtggtggcagggtttcacgggtccccgcgccgatttgggaatggtacggggtgcccttgcattagagaagcctgtgcgggcccccgggattagagaagaggtgagcgcctgcgggcggggagagaaggacgcgctgctggcaaaaagaagggcgccttccatggactggaggagcggcgagggagcctggtatgtgtgttttggatttgaaggaggcaaaccgcatcggagagtgcaagta

SEQ ID NO: 40866 - DNA, 842 bp, Homo sapiens
  chr4:118954371-118955213
  hyper
ttgaaaaaaactggcgaacagaggaaactcttgcagcctcgcagccgccctggtccagtgccaacggcaggagcaccacaggaagggaccgcgcgggtgcgccccacccttccagcgtcgcctcggggactcgcacccctttccctggccgcacaagacgtttcatccttggcggccgccgccaacccgccgggaggggcggtcggaactggcaggccggggcggaacccccggggtctccttgtcgaggcccgggcagccagatcctcagggccggtccgggcgggagcccggtcgatggaggcggctcccgtcctcagctcccgctccctccccttccccggggcgggcgcgcgcgggccgggagctgggaggcggcggctcccgcccgggaggcggtggcgagggcggcggaggcgcggccgggcgggtcccagggccgtggttctccagcgcaggagtccccggcgcacccgctgcgctcgccccgcagccgcagcctgagcggccgaagtcgccaccagctgtgtccgcgcagatcccgggcgcggaggggagaggtcgcccgcttgtcgcccccgccggaccccgggcaccgcgtagcacccaagcgccacccggacgaggggccctggggagcggctgaggccgaagacccgagggaaggaggagcccgcggacggctgcagccccaggtaatctccatggaggacggggccggtctcctcgcccagaaacccgatccgggcgccttggaatgcggactccagaggcggcatctcgaccagacaagtttctcgcggcttggaatgagggagtcctgaaaccgacactcgttttat

SEQ ID NO: 40867 - DNA, 47 bp, Homo sapiens
  chr4:118955469-118955516
  hyper
catctgtcttcccccgaagtggtaccaaagccggtcccttggcgacg

SEQ ID NO: 40868 - DNA, 305 bp, Homo sapiens; identical to SEQ ID NO: 3509
  chr4:119200549-119200854
  hyper

SEQ ID NO: 40869 - DNA, 1022 bp, Homo sapiens
  chr4:119273334-119274356
  hyper
cccgtccggagtttccgcggccgccccgaggccactaaccgtgtctgcagtcgcagtagccccagtccaccttgccacgggcgtctccgtagaaacaccagggtctgcccgcgccgtcggggctccgacaaaagttgtggcgctgtcctcgcagctgagcccagctcgctgggggcgaccgctccaggaagggtggcacctccgcccaccgcagacacggggcgccgaagtccgtcacgctgacccatggctcgccggcggggcagccccaggggtgcggccggggcgtgtgcccggcctggagggcgtgcgggcgctgggcagggagcgcccgcggggggcgcgggaagcgcgggagaggcggcggcggacgcgtcctcgggggccgctgctgggtgggaaggtaataggggtagtgcggacccgcagggggcgaatggcggtggctgtggtggagggaatcattgaggacagaatcaaagccgaccacttcggggagcgcccctaacatcagggctagcacgaagcgggcgagcgtcatggtgccagcgctgcggggtctggtccatgctccccagcttctcgggcttggagcggagaagaggagggggcgggggcggggctgccgcgtccctcgaatcccccagccccctcccgcccccgcacgcggaccgccctcgcctccccaaccttgcctcccgccgctggtgccctgccgcgcctcggctcctgtcccctggcggcggccgcgggtggggaaatctggagctcagccgagccccggccggcggagaggaccggaaaagagaaggcgcggacgcagcggggagcggttgggcctgagccccaggtagcggcgcaggcacgagcccgggaactctgccccctgggggcgggcgccggccgcgcaagctgctccggacctacgctcggcccctgccaggcccaccgcagtccgcccgcacggcactgccagctgctgggaccgagcccgagggtgcccgcgcggagcacggtcttgg

SEQ ID NO: 40870 - DNA, 30 bp, Homo sapiens
  chr4:119606569-119606599
  hyper
gaggatactctgttcgtaagctcccggtga

SEQ ID NO: 40871 - DNA, 30 bp, Homo sapiens
  chr4:119756854-119756884
  hyper
gcaaaaggtgggggcgggtaaaaaatgccc

SEQ ID NO: 40872 - DNA, 50 bp, Homo sapiens
  chr4:119757720-119757770
  hyper
ctggcacgtgtacacgcacatttgatgacgtacccgtgcaatgcactaca

SEQ ID NO: 40873 - DNA, 76 bp, Homo sapiens
  chr4:119809910-119809986
  hyper
cctcgaaggtgggccgagcaaaggagagtgacgcaagagtgggctgtgtcctggatgctgcgagcgcctctgcctc

SEQ ID NO: 40874 - DNA, 30 bp, Homo sapiens
  chr4:120133568-120133598
  hyper
cgatctcgcgcctccgaggaagccaactgt

SEQ ID NO: 40875 - DNA, 37 bp, Homo sapiens; identical to SEQ ID NO: 3513
  chr4:120221340-120221377
  hyper

SEQ ID NO: 40876 - DNA, 51 bp, Homo sapiens; identical to SEQ ID NO: 3514
  chr4:120221610-120221661
  hyper

SEQ ID NO: 40877 - DNA, 30 bp, Homo sapiens
  chr4:120548322-120548352
  hyper
ggcaacatagcaaacgtgggaagttcgttt

SEQ ID NO: 40878 - DNA, 334 bp, Homo sapiens; identical to SEQ ID NO: 3515
  chr4:120549977-120550311
  hyper

SEQ ID NO: 40879 - DNA, 31 bp, Homo sapiens; identical to SEQ ID NO: 3516
  chr4:120970718-120970749
  hyper

SEQ ID NO: 40880 - DNA, 30 bp, Homo sapiens; identical to SEQ ID NO: 3517
  chr4:120987394-120987424
  hyper

SEQ ID NO: 40881 - DNA, 30 bp, Homo sapiens
  chr4:120988003-120988033
  hyper
gtcctttgcgcaggcgcgacgagcctttaa

SEQ ID NO: 40882 - DNA, 1196 bp, Homo sapiens
  chr4:121843109-121844305
  hyper
aggagggaaggaaatcctgggcgtatgaatgagattctacggcctgcgtggagcggcgctctgggctgctcctcccatccccgcatggaaagttaggcgtttctagccacattaattcatcctaaaggaaaagaggcgacagcggagcagcgtgcgcgcgggggaaaacacccgcccacgcgtgccttcgccaacgcaaagacgcagctcacacccgtaaccgaggaagagggaggctcccgccgcgctcacttcctgcgggagagaggaaagacatcttgcggcagggaggccggtggcagttccgcccctggaccggccggcagcggagcgcaccccgccgccacctacgtggcgctgcctgctcgggtggcgcagcgagtaaaggccacccccgccgtgccccgcggtccccggccttcccacggacgcctggcccggcccgggcgaggggcgaccggggtgaagcccgccgcgccccgggccctgcggcagggcgactccgggaggcacagggcgcgcgaggtgcaggggcgcgcaggccgccgccgggtcacccacctttcgcactctgcgggccgtgtagagccccatgccgtcctgaacccgggaggacttcagggagaacctgtccggcacgtacatgcccagcattttcccgggcgcggcggccgccgcctctctcaacaccggcgcttagcgcccggcaggcggcacatcgaaatttggggtgccagggtagaggggagaaaccggcagggaaggaggaaatggagttttcctcccagaatccccacctccctgccgattccaggatcccccgcggctcagcccctcctcgtcccgggtcgggctcggcccggatccgttcctgccattcctgctgcgggggcgcggggggcgcgggcctgggcgctgcgggcgccgggacgccgctcgctgattggcccgaagttggcggctctgacccgcgcccgggcgcgaagcccggagcagggctgaccccagggcctcaaacccggaggcccgcgagctgcgcgggccgtcagcacccctagccccggcgcggcggcgtgcgttcccgcctttgtccagctctgggttttcaaaccttgccccgctgaaccattactccctgtaggggagtctcgcttgcttctcttcagatgcaaaacgaaatggaccttcacacagct

SEQ ID NO: 40883 - DNA, 675 bp, Homo sapiens
  chr4:121992096-121992771
  hyper
gatgcggggcgggtccggggaactgccgggagctctcacgcctgggcctgggatagggtgcgggcagaaaggtgaaccgagagcgcacaatgcaacgaaaccgcactccaaattcagcagtttgcaaagtgcctccaagaaaacagctgggacctgcaatcactcgttcggactcctaggttatcggggccgcggcgactccgctcagttagaaaggtagcgcgggtgagagcgaaccccaactcacgcacagacaggacgagggcacgaagccgagtctcctggctggggccgtagggggcgtcacctcggtggccgctctgctctccggaagaaagtatgagccggtcccaggccacctcgctcagcccaaggaagtttctataacgatgctcgcctaccacgcagaggacaaatgaggagccagagcggttgggggtcgggccaaccgaactcccggccccggctgcgcagctcccagacgcccaccaagaactcgtgcgctgcctggacctctagcttttcgccctacacgcagacgccctctgcaaaaccccagtcccgcagactttccctagcggcgggcggagggcatgaacctggaaagggaggcaacagccctcttggcaggcgggcaaagtaagtgtccaggctaagtccgggataaaggctccg

SEQ ID NO: 40884 - DNA, 744 bp, Homo sapiens
  chr4:121992973-121993717
  hyper
tcctacggatagggcgcccttgagaagcttcttgggccttgaagatttgggggcgcgtgcctcgagcccccatctcggatgacccttcgggcgtgaacgctccttgtgctaggtctcagggtggcgggctaaggcgtcgggtctctggggcattgctttcctctccccacttaccttaaaaagatctgtttttcgtagggaaaatagaaaaaaatccctccccgtggtgtggtgtgcgaaatagtccacgtccccggaccctgccaagatgctaagcaccaatatccaggaacgagaagcctggagggcggggacggaggcagataaaagagaaaaattcaatccgctgaagtgtcccaactttgcggtcggcacagcaaacttcaaaggcgggcgagggcgggcggcgcgcggtcgccgaagttgctgcgaagtggagtagggagccgcgcggggctggggaatcccggggcagcgccgagaagcggcgggaggtccttttaaactgcagggagcgtgcgggggctgggcggcgggaggatgccgcagcgacccgcggggctggcgcgggcttcgccggccgccgctagtcgcacaggcgcctggctggagcgccgcgcggggtgctgggagagccgggcgcacggggcggcagcggccgtggcgggtgcgctgctcagttagctccactctctcgcggctggaagtggggagtgtgtgttcgctcccgagtgtcactgctga

SEQ ID NO: 40885 - DNA, 443 bp, Homo sapiens
  chr4:121993961-121994404
  hyper
cacacacaccaccctgctcagcgacccagcgctccccaaacaggaccctcgcgggcggcatcgcgagggacacgctgctgtcctaaccttagcgccactcggggagaatgaaggaggcccaccgagcccccgacaaagctgcaaaacccaggagacgcgcacgcgggaccatcacactgtcaagcagaccggggtgcacaatagagggaaactctggggttgatctgggggcagggagggggacgtgttaaatccagaaggttggtggttggaggcggaaagcagagtgtgcaaactgtgcattcatgtcccacttttcacccgaacgcctgcctatcacagccttcactcagggagcgcttccccctcggcgcagaccgagcctcctccgatttgaaactcagcagctgttttaacaattgaaaaagcggccctacaggacc

SEQ ID NO: 40886 - DNA, 296 bp, Homo sapiens
  chr4:122301416-122301712
  hyper
agagggttaagagagaaggagcgaaggagcggggcgcgactcttaccccccagccagttgtcggaaatgttctggagcatggtgacgggaatgcagaagaaggtgatgagcaggtcactgagcgccaaggagcagataaagatgttggtgacggtgcgcatggccttgctgcgggtcaccacgtagaacaccagagcattgccaaagagcgccagggcgaagatgagcacgccggtgagcacgagggccagcttggcgcgtcccggcagctctggggtgtagacgagcggtcgcag

SEQ ID NO: 40887 - DNA, 390 bp, Homo sapiens
  chr4:122301962-122302352
  hyper
cgggaaaggagagcagctcagggatcaaacccacgataaagaggcgggaagccaaagcactgggagactcgatctcagtgaccaaaaaatgttcgcggttcaaataaagttcttcccttgctcttccctaaggcgaggcgccgccacggtctggggtgctggagcgccacgcgagggtcctggcgcctctggctccccgccttctggccatgcgatgcggacgccggacccgcttggggagcggtggagggtggggctgaactcggtgacgcctccctcacacccagcttcagtggcgccaacgccgcttccccgcaccctcagggcgagggaagacttccctggctcaccaacttgctgccgcccagcgcctttctcagggcatggccc

SEQ ID NO: 40888 - DNA, 30 bp, Homo sapiens
  chr4:122617992-122618022
  hyper
ccctccccgggctgcgaccactcacccaga

SEQ ID NO: 40889 - DNA, 123 bp, Homo sapiens
  chr4:122685767-122685890
  hyper
ggcgaattctcttttcgccatctctcccagccctggaacagcttagggtccctctcgaagagcacagcgccagcccagaccccatacacccaccgtccctggcacccgaacgcgctgcgagcc

SEQ ID NO: 40890 - DNA, 510 bp, Homo sapiens
  chr4:122686113-122686623
  hyper
cgagaggcgcccgggctggagcgccccggccgtgttggccacggagttcttcagctgcttgatgaccacgaagagcaggaggaaaagtaagaagagcaggaagaagaagagcgccaggtagagcagcaagttgagttcccactccatgctggaggcgccggcgctcgctggccctgcgcgctcggcgcgggctgcagctggagggcgagcgcgccgcccgcacacccacctcccgcactcccgcccctcgcgagggcgtcccgctatgggcgccgactccggggtccgtgctttgcctcccccggctccgaggaaacgcgccaaggagctgaggaaatccggcgcagactctcccagctggcaccaaagccttccgcttcgccgagatcctctcaggtgctcttgaggacgcgagcgacttccctaggagcgaacttccgcgggcacggacgccagaagaggtaacagctcagtcttccaggggaggtcgggactggtgttttgtaaatg

SEQ ID NO: 40891 - DNA, 30 bp, Homo sapiens; identical to SEQ ID NO: 3525
  chr4:122745091-122745121
  hyper

SEQ ID NO: 40892 - DNA, 1902 bp, Homo sapiens
  chr4:122871294-122873196
  hyper
ataactgaaccacatcgggatgcgtcgctcatttaaaatcagaactcttccctatgggatctactcccagccactgattgtgttcctgtgttctaccggcaggtccagcctgaccaggcgcagactctgcgcgcgcggagcagcgcgcgatcctggggatgcaggggtcatcccggaggtctcggcctcgggcggtgggcctctcgccggcagcagggggcgctgcagaacctcggtccccatcctggagaaccacctccccggctcagccggtctgcgccgcccgccaccatccgaccccaagttctctacctagttctgagcgttcttcctaaaaaagacagtaaaccctgcggcactcccagtgttacgtgacagaaaaaatacagagcatctcaccctgtgaaaccgatcaccctctttttatcttctctgcgtctcgcactgattaaaagctgtctccaagattggaaattaagaaaagttgctctttctcatgcattagcgcgccgaccgctccttcgtttagaaagagagagagggaaagaaagaaagagaaaaagagagcccgcgcgccggggcgcgagccgctgaccctgcaccgcctgggaaccgcagtcaaagttatcactaaagcggttccccggctgcccgatgcccactctctccctcaggggaccctatagggcttcggttccagttttaccccaaatgtgactgaaccacagagagacgaggcgcctgggcaaaccttcaacccacaccctgtatcgcactgtcccctccctactccccacttctctgcccccgcccccgacgtcccagagcgtcggaggggacccaagtccacgctgggacgcccgggaggagttcagggttcaagtgcgcgcctgggtctgtgcacatcttccccttcctcggcctccctgggtaagctcgggaccccggggtccgtcttccaaggggtgcccagccctggcagcagtcgtgcgagctcctcggctctaatacagggagtggctgctcgccaggatgcttgtctgaagtcagtgtgcccgcctgcgggctgttccgtgtgcttgagcctggacagagcccctgccacgcactcggcagcccctgtgtccctccaccgcgcgggaccgagggggcgagcctccggccgaggtctgtcccctccaaatcactccaaatcgaactgcctggccgtaccatgtgggtctcggaggtcccgggctcgacgtggagccgcccggcgcgcgccttcccgccccccgcccggcaccgccctccgaggcgcgggccgcggccgggcccggtactcacaggtccggcccgtgggagaagggcggcgggcagtagccgtgcggctcccgctgcgagggcgccgagcgcggctccagccccccgttgacgcccctccagccccggcggcggcgctgcggctccgcgccctcgtcctcgccctcgtcttcctcctcctccggcgccgggaaggtcacccttgcttgttctttgcacttcctgaccttggtggacatcgcgccggctgcggtccgagtgtgggggtgccggctgccggcctcctccgccttcgcggcagtgcagtcttcccgcggcgccccttcaccacctcccgcggcttccggggccccgggcggcccagggcgggaaggcaggagcggagagcgtcgcggcccgcgatccagcagttagaggctagcgccgaagccgagctgccgccgcccaccatcaaaccgtgggagcagctgccgcggccgtggctgcgacgaggaagcccggggccgagcggggctctggtgctgggagaggctctccagccccgcggcggcggcgatgcctcctcggcgcccgtctcctgtctccgacagcatcacttgc

SEQ ID NO: 40893 - DNA, 30 bp, Homo sapiens; identical to SEQ ID NO: 3528
  chr4:123653963-123653993
  hyper

SEQ ID NO: 40894 - DNA, 1323 bp, Homo sapiens
  chr4:123747725-123749048
  hyper
atgccaaagccctgccgcggcctccgacgcgcgccccccgcccctcgcctctcccccgcccccgactgaggccgggctccccgccggactgatgtcgcgcgcttgcgtgttgtggccgaaccgccgaactcagaggccggccccagaaaacccgagcgagtagggggcggcgcgcaggagggaggagaactgggggcgcgggaggctggtgggtgtggggggtggagatgtagaagatgtgacgccgcggcccggcgggtgccagattagcggacgcggtgcccgcggttgcaacgggatcccgggcgctgcagcttgggaggcggctctccccaggcggcgtccgcggagacacccatccgtgaaccccaggtcccgggccgccggctcgccgcgcaccaggggccggcggacagaagagcggccgagcggctcgaggctgggggaccgcgggcgcggccgcgcgctgccgggcgggaggctggggggccggggccggggccgtgccccggagcgggtcggaggccggggccggggccgggggacggcggctccccgcgcggctccagcggctcggggatcccggccgggccccgcagggaccatggcagccgggagcatcaccacgctgcccgccttgcccgaggatggcggcagcggcgccttcccgcccggccacttcaaggaccccaagcggctgtactgcaaaaacgggggcttcttcctgcgcatccaccccgacggccgagttgacggggtccgggagaagagcgaccctcacagtgagtgccgacccgctctctccgcctcatttccatttcgtgggttctcgcccgctctctcccctccagcctgcaccctcctcccggatcttcactgcgaccctagcgctccgtgtggtttctggccgcgcggccctcggcggtttcgggttcaccactcaccccctcctttccgggctgcggcgtaggcccgggtgtcccctgggctttggggtgtgccaatttgccctgtaaaccagtacccccggcccggagccgcggcgcgccggggcctcgcggactggctgtcttcccgcggacaacctgtcgcgtcggggatgcccgcggccccgccatgcagctctggccgcttctatctgctgcgtgctgtcccggggacaaagacaggaaggaccgcagcagaacgaaacggtctttactggaaaaacacctttctagagtcctgcccttaaattccgactcgggacgacccgaggcatatggcacactactctcacccactctgttttatatttttccgaattgacgaaagctgaaagag

SEQ ID NO: 40895 - DNA, 658 bp, Homo sapiens
  chr4:123843157-123843815
  hyper
aattccaggagttcttatcaccggggtctgtggaagaggaaatggtggtttacggcaatttccgaatgtcgcacagtagaaagtggaccagcaaccagggttgcagatcccaaagtccgggatcttcaccatttcacccaaccgccttagagacctcccagcaaaaggtctaagcacgaatgctccagaaaacaggtccaggtcacgcgtgccttctccctttccctctgggctcgacagtggtgcacagagcgactagggagtgggggccgcggttatttcattagaaaagctctggagccccgggagcccttcgtcccaggcgcacttgccctgcaagcccttctggaaggcggcagcgtccaggcggtccagcgcatcgagccgcgccaggcgcaccgagatgcccccgaatctgtccagctcgccctgcagatcgcacgctccaactggcggattccgcacgtaaccctgtgcgcccgaggcccagcggtaacccgccgaaggcccggggccgtaggttcgggcaagcatcgcgcgccagcggccccagctcagtggctgccgcatctccacgccgcttaattcgtccgttgcccaaatgacccctccgcgctccagagcggagatcgcggccgtacattttagaagagtgcca

SEQ ID NO: 40896 - DNA, 30 bp, Homo sapiens
  chr4:123844549-123844579
  hyper
ttttgaaagttgggcgtggcatgggtctga

SEQ ID NO: 40897 - DNA, 1572 bp, Homo sapiens
  chr4:124317730-124319302
  hyper
cagaatttttagaggcactcccgaagttttaagaggatgtttattacacgagtctgtagggcaacatttccaagttggtacacataaacgaaagaggaaacgatagttaaggaaatcctgttccaggttttcgggcagcccgagtgattgacacatgatatcaccggaggcgtgtcctggagtggaggtggaggtggaggcaaggagctgaaattctgcgtagccggagtgagaccgctctgcaaaccactgcgtgctttgcagagtgattatcagcacagttccctgccctggataaggaacagctacagtcgctgttaaatgtgcctgaaaagcaatttgcaatctttgcattaggtaagtaccgtttccttccgtagacattttaggaaagataaggtgagaaatgttgacttttgcaaggaactgaacatttatttatttgaacttgctttccagctaaggttactggttgcatttcaaaacaccggtagcattcccactgctaaaactaatgctcttaaagtaaatgctaccgctaaaagaaaaagcagggtccctttcacctttccttaaccgaacagtagacgtttaaagtctgaaacgatcgaatttgtgaaacacagagccgttaatgcctttatgcgaagaggggctagcactcggtgtgtggaccaaatgcgtgtttgtttaggcattgttggcgaccgaatcccgagtgaagcattggtttaaaacctgaatttcccgtctctgtgtattgattcctaacgcgcagaggcgttgcttgaacgttgtttgaactcctaggcattccagggggcaaaagcacctcggcaaaaacgtgcaggactgcatgttactttggttcgcggctgacacgccgactgtgcgccggcctgtcaatcaccgggagcagcaacagggagcacatggcaacgggctgcgggcgagctggccagcggcccgcccggggtcccagcccttcgaagaaagggacattcacgagcttctatctctaattctctgtcgcaggcatttcggccgtggaaccccaggctcggaggactgggtgtgagcgctgcccgggagaggctgacctgccgggaccggagtgcccggggacgctgtgcccccacttgcccaacgtgcggaatcggctaagcgcgtcggcctgcgcggggcacaagggacgacgcccgcctttctctctccgagaaggatccccaaacctcactctcttcactcctccccgctaaaaaaaaaaaaaaaaagaaaagggtaaaaaaatccccctccccctcccggccgcggcagcctctgcctggcaggcgcgtgctccgaggtttcgccggggtactgcgcggctccgtgacccacccgccgacggcggttcgggccccgacccgggcgctgcggagtctcgaacgcccgtgacgtggatttttcgctcgtcaggaagccgccatcccttccttcgttccttgcgaggagcgactagaacccgagttctctgagcacaccgtgccgtcagctggcccgtcacgcactcgactccgccactcccctact

SEQ ID NO: 40898 - DNA, 142 bp, Homo sapiens
  chr4:124319559-124319701
  hyper
gccgcctcgccctccccgccgcggttgatgcggcacgtgcacgccgccgcccgcaccaggacctgggccgggtcgcacggcttggcccccggccaccgcttcggcctaggtgagtgtgtgcggcggccgccctcggcccgct

SEQ ID NO: 40899 - DNA, 30 bp, Homo sapiens; identical to SEQ ID NO: 3531
  chr4:124320663-124320693
  hyper

SEQ ID NO: 40900 - DNA, 488 bp, Homo sapiens
  chr4:124426728-124427216
  hyper
gagttagggcaattataactacggcaaaaaaaaaaaaaaaaaaaaaagagttcgcagggacgcagcgctgccgccgccgccgccgaggccgcgaccacggcccgagccggccaccgcgcgtcaaaggagccattcaaggcccggcgaggcccgggggttgagaagttaaggagcgggaggtggtgcgccggggccgcggccgcgccatttgcatttcaatgcgacccgcttgttgactcagtgcccggcgcttccgcagctcccaccagaatctgcctttgttggttttagctccggtcaagtccacttcttgcatcgggggagccgcgcgcattgagtttgtgtagtcaggcagaacgctcgacaggaaggaaggaggaaggggcgctctgcgcggccattgtctgggcaaccgggcttaagcagccgagtgactatttaatctataaggtgcacttgaatccctcgcaaatcctctcagtgtggag

SEQ ID NO: 40901 - DNA, 197 bp, Homo sapiens
  chr4:124778303-124778500
  hyper
gtttaaatgccccagcgggacatccagaggctgcaaaaacgggaaaaattatttggaacaatttgctttcgttcaagggcaaccattttacagctggtttattgctattcttgtgctgtttaagctgtctttcgtgtcaaaagtcctttcctgcttacagatcatcaggaagcattctgctgcgtgctgtttgccta

SEQ ID NO: 40902 - DNA, 96 bp, Homo sapiens
  chr4:125633238-125633334
  hyper
cacctcagagaggccacgagcgaaggtgcagcctccacaccgaggtctgcccttccagaggctgggagcgcctctgcaccccgccccgcaccgaga

SEQ ID NO: 40903 - DNA, 442 bp, Homo sapiens
  chr4:125633625-125634067
  hyper
gccgccgtggccgccgctgccgctgttagggactctcagtctcagacacttgcttcgctgagaagtcgctgccagcagcgctcccaagactccactccaactgcagccgcctcctccgccgggcccggggcacgctcccagctccggatcctcctcttggcccccggcggctgccagttccagctttcccagcagaatcggtcgtgctcgccccagcccccaccggccaaccgccgccgccgccgccgtcagggcagtaactgtctcaggcagcccccggccggccggctccgccccgcccgcccagcccagaccccgcccccgcccccgcccccgccccgccgctcggcctttctttgcccgccggctccgcctccgcgtccttcccctcccccaccgcgctctcccgcagcatcccgtgcctgggcgtgtgcggccgcct

SEQ ID NO: 40904 - DNA, 477 bp, Homo sapiens
  chr4:126235779-126236256
  hyper
ccccatctattctgcggcagccttttgctgttattgctctgacgccggccaagatttggccgaaaaggaaaaaaaaaaaaaaaaaagaaaagaaaaaaaatcacccccctttttagcgcctccgcctcgctgtgctcccacaccagaccgcctacagccctccgggaggctgaagtgattagcatcccgagaagccagtcggaggccgggcaaggcggagggcgctcgcggtaggagtgccggtcggggctgcttcagctccggcccaatggggctggggcgagggaggggcagaaggtgacaggactgggagctagggggagtccaggcgaactaaagtgcggggatcaatgagtgtcgagcaaagtttctgagtgctgctccagctcgcggtcttccctccccctctgtttgtgtttcggcgacgcgctgtgtgtgtgtgtgtgcgtgtgtatgtgtgtgtgtgtgcatgcctgt

SEQ ID NO: 40905 - DNA, 771 bp, Homo sapiens
  chr4:126237310-126238081
  hyper
tcacaggagtgtcccgcggaatgccctgccgcttttcgccacagcatctctcttgcactccgcgttcaactggctacctagagtcttttgctgatgctacttgcttttgccggactggaggttctttgaaatagcagaggtctcagaccaagccgtcagctgaatctttgctggcgctccttaatccctgtaaatatcattgcgtttgcttcaccccttccttctctttatcacatcgttttagggagccaggaccatggacttagcaccagacagggctactggccgcccgtggctcccgttgcacactctatcagtatctcagctccttcgagtgttttggctactgtcattgcttccggggcaggcctgggtccacggggccgagccgcgccaggtgttccaagtgctggaagagcaacctccaggcactctggtaggcaccatccagacgcgccccggcttcacctacaggctcagcgaaagccacgccctgtttgccataaacagtagcaccggagccctgtacaccacctccaccatcgaccgcgagagcctgcccagcgacgtgatcaacctggtggtcctttccagcgcgcccacctaccccaccgaagtgcgagtgctggtgcgggacctcaatgacaacgcccccgttttcccggacccctctatcgtggtcactttcaaggaagacagtagcagcggacgccaagtcatcttagacaccgccaccgactcggacatcggctcaaacggtgtggaccaccg

SEQ ID NO: 40906 - DNA, 30 bp, Homo sapiens
  chr4:128544527-128544557
  hyper
gtccgcccctgtagcgagtctccagtgggc

SEQ ID NO: 40907 - DNA, 46 bp, Homo sapiens
  chr4:128554020-128554066
  hyper
ctgggaagcttctccgtctccctggcaacgcgacctgccaccaatt

SEQ ID NO: 40908 - DNA, 138 bp, Homo sapiens; identical to SEQ ID NO: 3539
  chr4:128703234-128703372
  hyper

SEQ ID NO: 40909 - DNA, 30 bp, Homo sapiens
  chr4:128886792-128886822
  hyper
cgctaagagctccccgcgcctcttagcgcg

SEQ ID NO: 40910 - DNA, 131 bp, Homo sapiens
  chr4:128887029-128887160
  hyper
gctaaatgcaaaggcgccttacctggagggcttgtcagagccaggactgaaggtgggatctgctgcttgtaacctgcaggtccccggatgcgcaccccaacggcgcctgcgcctacgggggcctcagcctt

SEQ ID NO: 40911 - DNA, 30 bp, Homo sapiens
  chr4:129209587-129209617
  hyper
gcttttcaccagggcgccgtcgcttttgtc

SEQ ID NO: 40912 - DNA, 30 bp, Homo sapiens
  chr4:129210004-129210034
  hyper
ctcaactcgtttgacgaactcgtttgacgt

SEQ ID NO: 40913 - DNA, 30 bp, Homo sapiens; identical to SEQ ID NO: 3541
  chr4:129731320-129731350
  hyper

SEQ ID NO: 40914 - DNA, 30 bp, Homo sapiens; identical to SEQ ID NO: 3542
  chr4:129733013-129733043
  hyper

SEQ ID NO: 40915 - DNA, 30 bp, Homo sapiens
  chr4:129733872-129733902
  hyper
cgtcatccggagaccgtttaaaaggagctt

SEQ ID NO: 40916 - DNA, 317 bp, Homo sapiens
  chr4:130014785-130015102
  hyper
cttacgccatcgcgcgtcctagagtcctagcacgctattggctggctgtcaagcaatgggaggagtcgtgagaacctggatgacagcgggctgagccaccggcttggcgcggcggccaaactggtgggacagtgtctccaggtagtgaggcccaacctctttaaaacaaacaaacaaacaaacaaaaaaccaaaatgcaaacgtgagtagagaatgaaatacacagtttaaatgccctcactatctttgggttactaatatactaagcctttctggactaagtaaaagatgcaggttcctgcggctagggatagaag

SEQ ID NO: 40917 - DNA, 30 bp, Homo sapiens
  chr4:134067367-134067397
  hyper
tttccgctccagtaacggggggattgagga

SEQ ID NO: 40918 - DNA, 285 bp, Homo sapiens
  chr4:134067732-134068017
  hyper
cccttggctggagctatctagcgggaggcggaggaccaggctctgttctgttcggccgggaagaagaccctaccgtcactccgccggtccctggctggcgccacaaagactagaagtcggagaggcgagacctctagggggcctgggctcagcgacgctggtgcggacacagacccctatgacccaagaaatcttgtagagcccccaaaaggcgagctctccaaagcaaaattctctggcctgccctatgctgatttcgccgctaggagacgcctgtaacccacg

SEQ ID NO: 40919 - DNA, 640 bp, Homo sapiens
  chr4:134068266-134068906
  hyper
catgtctcccacatgcaaacacgcgcgcactcgcgcgcacacacacaagtgtttccatacgtacaaatgaacgcattagaaaattaccgtcattttttaaaaggctccaggattctgacgagtcagcttgaagagctcaaaacatttcatttcaattctgcagatctgaagaaaaagaaaggggggaggggtggaagtacagatgcaataccgtattaatattcagatacactataatctccttttcattgatccacaggtccctttatacactgccgctccattctcagccgcagacgtgatgctaaaatcattttaactgcagcggttttcgcttggctttggccagtcttcaatttactgcagctggaaaaggattagccatttttgctggaatcctttccttctaagcgctcaaaggcaggacccatcttcatgaaagagccaagtgcgggggccggggggacccggcgttgcggggagttggggcgcggaaatcagggcagtagacgtgcattcgcgggactctcagaagcacgtctcaggctactatcacgcccatggacactagccctccttaactccttgccaggaggaaatggcaacgtatctccaggtcggaaaacgactctacttttcc

SEQ ID NO: 40920 - DNA, 1321 bp, Homo sapiens
  chr4:134069141-134070462
  hyper
gaactagctatgtggatgtgccgcgttgcccctgcgcctccggaaggggcactcacagctggtcaagcgcgtccttcggaactcggggaggctccgttggggcttacacagagctaagccctgggccagggaggatggatgcaagtaccgtgcatgtgcaaacgtgttcgcagatacccgcagcggtgcacactcgggcccctcgtgtgcacgggccctgcccaccaccccgcccgcgttcgccgccgccccactgtcctcatcccgcgggctgaccccaggattggcagaaatcagtggtctaatctagcatggtgggtaaagggatcgatctccaattgccaaaaaaaaaatagaaaatagccggtgttcccagccgctgcgtggcacttggccgcacaaggcgcagggatatcagaggcgctttgcagcgcttggcggtgctgtgtgccggatgccccagagcccggcgttaggatggcgggcttgtaggaagcggctcaaatcaactcctcagtcactgatgaacgcgctcacggctcgaagctaggtcctcgagtgagttaatctacttggtaagtattttgtgaatatgtattttgggaggaaagaagcacgtcgaacgcgtctgcccgtctgtaagcgctgtcatccccacatcctttagcgtgaattcctccgctttttaggagtcacctccaccccctactccgtatgcttcgcgcctttcctcacggccccgtcagaccccctcacctttagattgacacatgccatataatactcacttttaaaatgccctgccagtctctgctagggtcccttaattaggtaacccttgccaattagtgggccctgcgctactttttcccttctcgatgatttatttccatgatgcgtattagggaaaataccttaaaggaaaaagaatgttagcatcattggaaatcccgctcctaggagaggatatcgcagctgttgctattatgttttcgcatttgctgatgcaaacaggggaacctctctattccctccccattacctgcggctggggactgggaactttccgcggcattgtccccagccagcgcctcgggacctgcggggctgttctcgctctcacactcacactcaccccggccgctcgggcgagagttctgtcccgccccgcccggctgccgcgtgacgtgtctgtttggcggccagtttggccaatcatcggcagctcggtgggtggtgctcctgggcgattggttggcagaatgagggcgctgcgcaaaaacggagaagccgagcgctcggagctcagaaactgccagcc

SEQ ID NO: 40921 - DNA, 533 bp, Homo sapiens; identical to SEQ ID NO: 3548
  chr4:134072077-134072610
  hyper

SEQ ID NO: 40922 - DNA, 404 bp, Homo sapiens; identical to SEQ ID NO: 3549
  chr4:134072676-134073080
  hyper

SEQ ID NO: 40923 - DNA, 344 bp, Homo sapiens
  chr4:134073127-134073471
  hyper
cgagaacgcccggctcacttacagcatcgtgcgtggcaacgaaatgaacctctttcgcatggactggcgcaccggggagctgcgcacagcacgccgagtcccggccaagcgcgacccccagcggccttatgagctggtgatcgaggtgcgcgaccatgggcagccgcccctttcctccaccgccaccctggtggttcagctggtggatggcgccgtggagccccagggcgggggcgggagcggaggcggagggtcaggagagcaccagcgccccagtcgctctggcggcggggaaacctcgctagacctcaccctcatcctcatcatcgcgttgggctcggtgt

SEQ ID NO: 40924 - DNA, 30 bp, Homo sapiens
  chr4:134074354-134074384
  hyper
acgatgcttttagtcgcgtgtacaagtaag

SEQ ID NO: 40925 - DNA, 30 bp, Homo sapiens; identical to SEQ ID NO: 3551
  chr4:136732789-136732819
  hyper

SEQ ID NO: 40926 - DNA, 30 bp, Homo sapiens
  chr4:138453702-138453732
  hyper
ttccagccaatcagcgtgcttccaaatcaa

SEQ ID NO: 40927 - DNA, 50 bp, Homo sapiens
  chr4:139773347-139773397
  hyper
ggtagggcaggtgcctcctgccgagactcgactcccaccccagctttcag

SEQ ID NO: 40928 - DNA, 30 bp, Homo sapiens; identical to SEQ ID NO: 3552
  chr4:139814386-139814416
  hyper

SEQ ID NO: 40929 - DNA, 30 bp, Homo sapiens
  chr4:140005145-140005175
  hyper
ccctttcccccagccgccccagtgactgtg

SEQ ID NO: 40930 - DNA, 30 bp, Homo sapiens
  chr4:140005728-140005758
  hyper
ctgaggctgggaaacggctccgggagccgc

SEQ ID NO: 40931 - DNA, 103 bp, Homo sapiens; identical to SEQ ID NO: 3553
  chr4:140097253-140097356
  hyper

SEQ ID NO: 40932 - DNA, 30 bp, Homo sapiens
  chr4:140099386-140099416
  hyper
tgcgcggtccgcaacggagaagtaactcaa

SEQ ID NO: 40933 - DNA, 187 bp, Homo sapiens
  chr4:140187862-140188049
  hyper
attcatcagaggtttcgttctttgttgtatctttatcattatcgatggtgacagcttcatccagggcagcatttgtaacctctggggttgtttcagggtttacttccgtggtttccctcgccgctgcatctgtgacctctggcccggtttcagcactgactgctgtggtctccggagcagcctccac

SEQ ID NO: 40934 - DNA, 146 bp, Homo sapiens
  chr4:140200592-140200738
  hyper
caaaggaaagtgtcccgaaggccgcttcctttttgggggttgtggatctcagagccaggcgctcgcggggttcaggctgctgagaccctgccaagggttaggtttatttaccccacgaacattcgcccagcgtccactgagcgggc

SEQ ID NO: 40935 - DNA, 113 bp, Homo sapiens
  chr4:140201043-140201156
  hyper
ttccaaagtctgcaggagcttcgggacgtcttcccgggagtctcccccagtctcctcgacctccaatccaggcttctgctgctctgggtcgggtttggccaactgggtgccgg

SEQ ID NO: 40936 - DNA, 277 bp, Homo sapiens
  chr4:140201192-140201469
  hyper
cgcccgtcctcctctccgggctagacctccttactcaccgtcctttccgagcggcgcggggttggggggcgccctcagcggcagcgccagagtcttggagaccgccctgcggagatacatcgcgcccgctgtccgccgcgcagcagcctcggtacccaggcgcaggctgcccttccacagagaggctgagagcctggcagcgccccgcccggaggaggcacgtcgaccttcatccagccccgcctccgcggcccccgggaggtggggagacctttgt

SEQ ID NO: 40937 - DNA, 191 bp, Homo sapiens
  chr4:140222470-140222661
  hyper
cttcgagggtaccacgcactgaaatgatgggcggggcctgccccgaccctcccggcctccacaggcaggccagcctccaggtttcccggcaagctccgaaacccagaggaggtggggaaaggaggtcaccgcgcctgcgtgttaggaagcgtgacccgggtgggaaaaccctccgcgtccgccattttggc

SEQ ID NO: 40938 - DNA, 30 bp, Homo sapiens
  chr4:140374428-140374458
  hyper
ggccacaaggatcacgcggatattcttggg

SEQ ID NO: 40939 - DNA, 30 bp, Homo sapiens; identical to SEQ ID NO: 3558
  chr4:140478720-140478750
  hyper

SEQ ID NO: 40940 - DNA, 30 bp, Homo sapiens
  chr4:140587132-140587162
  hyper
tttatcttcccgtgcgctctacaaatagtt

SEQ ID NO: 40941 - DNA, 90 bp, Homo sapiens
  chr4:140656999-140657089
  hyper
gcgggcaggggcggtgcggcggcgctcgggagacccgcgaggggccctggaggtcctcggcccgcgcgcgccgctcgggagcccgcgagg

SEQ ID NO: 40942 - DNA, 30 bp, Homo sapiens
  chr4:140969977-140970007
  hyper
gacttcctcacaagacgatatacggaatac

SEQ ID NO: 40943 - DNA, 178 bp, Homo sapiens
  chr4:140970238-140970416
  hyper
gggggcagaaagaagcgcatctgctgctctgtgattgcacaagagaagctaccactccttttcttcacaaagaaaaaaaaatggcatttatcgcaagtacagcaaggcatattaggattcacctcccccattctttcttccctcttcctcctaccatctccctcgccgcctccctttc

SEQ ID NO: 40944 - DNA, 833 bp, Homo sapiens
  chr4:141071487-141072320
  hyper
ggcttgcttccacctgcgagtgtatcacaaaccaggcgcgcgcacccgagccctccctccaccagggcggaaaccagagaacacaacccaaacaccgaaagtttctggtcgcaaactctactcatcttgccgtgtccagagacccggcactgggaacggcactggcttttgttccagggtcccccagctggcgaggtaaacgccacagcagtccttgatccccaaaggttgtgagagattctgtggcacgggaattttggagcctcccgaaaggagcccatttctccgcaatccatgcgcgtggggtgtacaaatacacgaaaagaggacgcggggtgggcaggcatgaaaccttcagtgcctcttaaattctcagtctcaggttcacaaagtgaatctcctcctccgtggaagggcgctaggggggcgggggctgggagagaaataggttggagaaagggaccggagctacagtcgagatgcgggaccggccccgcctccggctacaatcagaaaaactacagtgtgtcagtggttttcggtttcctgtttgtaaagcgagaacctcccccgactcgaactgtcgttcttcctcaaaaccaaccgagacggccccttcttcgcgctcggggcaggctcagccgcagggggagcggagaggagggacgcgggggcatggggggcgcggcggggcggggacagccgcgatgaagcgggcagggccacggggcgcagcacccctcccagcccagcggccccggggtctgagctgggccgcgaggcggacaaagcgcctcccgctccctcccccacggccacgttccaaaagggag

SEQ ID NO: 40945 - DNA, 175 bp, Homo sapiens; identical to SEQ ID NO: 3561
  chr4:141072547-141072722
  hyper

SEQ ID NO: 40946 - DNA, 1220 bp, Homo sapiens
  chr4:141073195-141074415
  hyper
tggtggggcctcttggcgcaaaccctgggtattgctttcccctcccgccccctccaggccgctcccctcttaaccctcccagccgctccacctgccgggctagccccgagtcgcgagcaaagagcggagcgcacccgcgccccgcatccgcgcgcgctcccgcgagcacccccgcgcgcagccaccctcgctcgtttctcacccacttcaaagttcattcacaaaactctcagactttctcagcccaaagggggtgagctggggagaggaggcgagaggctctccttccccgcttcccccctaggggttgagggcctggtgcccgcccagaacctgcgacagcatcaatatttccacgcacccggcggatgtgctgagaggggtgggcgtagggggacgggtctggggaggcgaggcggcgcggctagaggtggggtggggagcggcgaagaggaggagcaaggtttcaactcaggggttcactctttcaaatcggtatcttaagaaagggaaggggggaaacttttccagcacctcactccgacgctcctctaggctccctccgcccctcgcagtcgtgactggcttctcccctctcgccccctcctccccaaatctgacaaccctgacagattaacaggtagcgacgacggcagctttttccctaagaaaagttgacgttaacccttaggcttcagcccacctcacccaccgtgcaaatcagacccttgtacccccatgtaagaagctccacgcgccccccaccaccaccaccacccccaacgcgcgccgcaagcccgctgcccgtgcgccctcaccatgatcagcgtgtggttcctctgctccgccgaggcagcctccgcatcttgctggggtttgctcgggtgctgctgtttgccggtgccggcgcccgatttcttggccctctgctccagggtccgctggtagaggctcacggtgtcccggcgctccagctccagctgctccacctgagcctgctggtacctgttctcgcagttgacgtggtgccgacggcagccctcgatgcgctggcggagccgctccaccacggtgctgtgcttgggaacggccgccgaaccgccgccggggcccccggagccgccgcatccaccggctgccgggtgattgctactcggagcagcgggagtactattgggagtattattcacaccgatcccggccccgccgaggctgctgtt

SEQ ID NO: 40947 - DNA, 772 bp, Homo sapiens
  chr4:141074619-141075391
  hyper
gacggggcgaaaaaaacggggggggagattttggggtggtttttgtttcctttttttaaactgtaaaagctcaaggggaagaaaaggggggaacgttatcggaataccatcagacacctatcaacaaaaagaatcacaacaaactgagccagcagcaaatcgggttgcaactcaaggggagatccgctccttgcttgccttctttttataatccattattttctaataaattccaggagatttccggtggttggcaagcattttctccctacataccgaaaaacacaccccatgtacacacacaagcatatgcctccagtgcggacacgcgcgacacacactcactccacaccgcatcggaaaacggcaagcttgcttattgcattttccttccacaaaaaagttttggtgtttatgccgccccgtgttctcaaagtactttggctgctcagttgcatttcacaggaacctagatatcgaatcctcgggctgggggaagtaaacacatggacagtccgaggcgactgcaaaagtagatcggtgaagtcctttgcaaaacgccgcgcagagagcagcacctaacgctcggctgggctgccgctgccgccgctgctcctgccaccatcacaatgatcaactgctcgccgccgccgccgccgccgcctcctcctcctcctctcgctcctccacctcctcctcctcctccatgccagcggagtgatatcaggacgcgcgagctcagtaaacacggcagcggcggcggctggaggcc

SEQ ID NO: 40948 - DNA, 30 bp, Homo sapiens; identical to SEQ ID NO: 3566
  chr4:141075709-141075739
  hyper

SEQ ID NO: 40949 - DNA, 62 bp, Homo sapiens
  chr4:141173820-141173882
  hyper
gcaggaactgacagcgttagccccgacacagagggcatgggccccgcggctccaccgggaag

SEQ ID NO: 40950 - DNA, 577 bp, Homo sapiens; identical to SEQ ID NO: 3567
  chr4:141293943-141294520
  hyper

SEQ ID NO: 40951 - DNA, 796 bp, Homo sapiens; identical to SEQ ID NO: 3568
  chr4:141294545-141295341
  hyper

SEQ ID NO: 40952 - DNA, 1036 bp, Homo sapiens
  chr4:141348028-141349064
  hyper
caacccagccctttcgcccgccccccggcggcgcacaatgggctctgcgcgggtatcgagggagcggccaacagtccctggccccaccgccgtgaagtggggtcccttcgcttccacataggtggagactgagacagccgagcctattttgatctcgtttgggtttctgtaaggagcagtcagcagagtgagcagcgcccagacgcgccccgggccccctctacaaccattgggagagcgccccgggctcaagcgtggaacggggctgcaatggcaaccgctggaataacggcctcggctcccggtggctcctcaagcccgcaggggaggccggccgggctaggcacctagctgtccccgtgctcgtccgccccagcccgggcgcagcaggtggatgcggcggtgctgaagacacaaagggtcccaggtggcaccacctcctgcgtccacccacggggccgccagagcccagtcaagaccctagctcgctgcagccccatcgccagactcaacatccaccctcacttggccccgaccggttcagccctctggcggcaaagtaacggggtgcctgggggaagcagcaacgactccgcttcctcaccccaatctgcgcgcaaagggcagcgggacagcgggaacgcggcctgctgctcacgcacctctcttgcggcctgttttcggcagtgacagctcagatgtccaagtcgttgccacttggtccccgcgtctcttcagaccagtcccgccggcggccgcgcagcagcgactactaaccgcgcgtgcgcgtgcggtggcgggcgggaggcggtggcggcccgaggtgtgtgctacgcgctcctgctccgaggggctcaaccgcctccagggggagccgcacatggagcctgtgccgccgccggccggttgtggcctggaccccgctcccgggttagcccaggaggaattccccctgcaagtccgaagacttttcctcctctgagctcccgccctctctgcagaccgtgctacctcctgttgcgcaatgattgggtcc

SEQ ID NO: 40953 - DNA, 30 bp, Homo sapiens
  chr4:141419261-141419291
  hyper
ggaggagggcccgccgcttactggtttgag

SEQ ID NO: 40954 - DNA, 30 bp, Homo sapiens
  chr4:141445044-141445074
  hyper
acaaggtgtcaacccgcgctaaggacctga

SEQ ID NO: 40955 - DNA, 30 bp, Homo sapiens
  chr4:141445754-141445784
  hyper
tctgcactgacctgcgggtacttcgaactt

SEQ ID NO: 40956 - DNA, 265 bp, Homo sapiens; identical to SEQ ID NO: 3570
  chr4:141488864-141489129
  hyper

SEQ ID NO: 40957 - DNA, 306 bp, Homo sapiens
  chr4:141489784-141490090
  hyper
cgggaaggtgatcacgtccgccaagcacgccgctattccagctgagaagagctggacccccagggtcgggtgtacgtccgaggctgtcaggccccccatcttcactcagagactggagatgcagaggaaaagggctccagccccgaaggtggaggaagttcctttcccttgctcttcacgcctgtccgccgggcagcaaacccgatttctgttttttgaaccgaccgccgggcagcggcggtgcagaggcggcggctgcagacggagcgcggtgttgggggccgagtccccgcgtcccctcctacc

SEQ ID NO: 40958 - DNA, 33 bp, Homo sapiens
  chr4:141490336-141490369
  hyper
gggagggcgcaccgcggcggtcagcacccgcgc

SEQ ID NO: 40959 - DNA, 707 bp, Homo sapiens
  chr4:141677254-141677961
  hyper
caccaccgcgacaggcgcgcactcctgggcacacgcgcgcccgcccgcccgtccgctaggtgcggcggcggcggcggcaggcgacttcagggggtggcccgcggcgtccgggccacaacaaagccccagcaggcggcccgggaggacggtgaggacgcgggcgcggcaagcagcatcctccccgcggcgtcgccgccccgcgagagcccgcggccgcagacgcccggcctggcactctgcagcccggctcccggcccacggcggcgggaggagcgggaggaggaggaagaggaggaggaagggagcgggaggaggaggaagtggtatagctcagtcccgggatccggctcagcgccaggcagggctaagggccacccgagcggattcggccccgcggtcagggccaagctgggctccggcgctgctgctcccgcggcgccgactggagctccagagcccctcccgtctctacctgctcgagctcccgaagtcgccgcgccttaacgcgccgtgtcggggccgcaggcgccactagggaagcccagctccccgctggaaggacgctccggacactgcgaatgaatgacgacaacgcggctcacttggagcgggtccgggtttgtgcggactcggtaccaccgcgggctccgcgcgccgagctgagcagctgtggctggcttcgggggaaccttcgggggaagctcctg

SEQ ID NO: 40960 - DNA, 31 bp, Homo sapiens; identical to SEQ ID NO: 3573
  chr4:141678190-141678221
  hyper

SEQ ID NO: 40961 - DNA, 1702 bp, Homo sapiens
  chr4:142053231-142054933
  hyper
gaacccctgtccaagcggcgctatgccaagctctccggcagcctctcccctacccaatacagttaatcttctcctctttgtaaaccccccaagtgacgcggagcaaaacttaatcggtccagggaacccagacacgtcttccgcgccgcacggacttcccagaaggagcctggaggcaggcgctggatccctctaggcacctccgtccccgccggctcccctcccccgcgcccgctgggccactcacccgcgtggggcatggtgatggtctcgttggtgttggagcccacgttgaagatgaccacggctgaggcgttctgcaggaacgcgttccggatcttatccctgtacgtgcagttgcccttggggatgagggctatccagttcttgccgcgggtcggggcggcgaacttggtgttggggtcgcaggccaggcggtcgtgggccgagctggccatgaccacctccccgcgggcgtcctgcttgggcgagtgctctccgtagcgcccgcactccgtcttctccgtgtgcagctccgcgccgccgccgcccgccgccccggccccggggtccggcgcgggctcggcgtaggtgatgttcacgaaggcggtgtaccattcctccttctcggccacggtaaagtccaggcagagcagatgcacgaaacaaaaggaaagcagccatgttgagagagccagactgcagcacgcttggatgagagacattgccatctttatccgccggggccccctccccgcccccgcgccctccctccgtcccgtccctcctccccagccccggccaaccccgggccgctgcctctcctcctgctgctgctcactcccgggccggaggggccgcggccgggacgcgcagccgccgcggggaccggattccgggcgagcggatggcgctggccccttcccctctcagctgtagcgcggtggttgcattttgcttcttgggcgcccggggggcgcgggaacagagggcccgcggggcttgcggaggagtcctgctgccgagcgtcctgctccttcgcccggcttcgccttctctcataagggtggccgggggcccacgaacttgcagggtggcggccctgcgccctccagccccggcggggacgggcacgattgctcgtagtctggggtgctgcggtgcggggtgctgcccagggtgtcccggccgccgccactgagcgctggggcgcgcgaatccagctgcagccgctgctgccctgcgccggttccctcaggctgcgggcgctgcgctcctgatctcgccggtggctgcgcctgggcacgcacttgccgcgggcggggcgggcttggggacagtgggagcgagcaggcagagcggagtaagcggtccgtgtgtgtgtgtctgtatgtttgtgtgtgtgtgtgtgtgtgtgtataatgtgtgcgtgcaaggaggagcttagtgtgatgtcaaagcccctgggattctcttgccatgttcccttggtctctctttatgggcagcagcgacccctgtcgggtctcaaattcaacctcaatcggcgacttaatctaggtggaggtaaagaggaagcgacccctcgacctttgagtacgggaataacttcctgagcgttacatttagcaaatgtatgtgcctctcgtaaacgaccctcccgtttgctggaagtactgccgtgagctccctgattacctgt

SEQ ID NO: 40962 - DNA, 30 bp, Homo sapiens; identical to SEQ ID NO: 3575
  chr4:142141999-142142029
  hyper

SEQ ID NO: 40963 - DNA, 30 bp, Homo sapiens
  chr4:142142423-142142453
  hyper
catttggtgacacacgcagtgcatgcaaga

SEQ ID NO: 40964 - DNA, 776 bp, Homo sapiens
  chr4:142557305-142558081
  hyper
cggggaccaagaggccggtctagagtagccgcccagcatccagatccgacatccttttccctttcctcaggaagacttggatgcgcgccagcccagcccgggtctccaggttcagctgcggaagcttcccacatggtgcccgtcgcttgggatgcggctatccttgtgccttctctgcaggtgtcccggcaggtagaggaggagaccggtggctggtgttcctgcagggcggggctggggctcctcgatgtccttgcgcttgccctgcaagttctgcgccccaggccccggcagggacggaaacaggccgggaagcagtgacacctggggcagtcagtcatccaggagccgccgccacccgccccacccccagtctccgcgggaggtgtttgtcttcgcctatgctcccggctctttctctttcacttttcttttcgccaggggttgggactccgggtggcaggcgcccgggggaatcccagctgactcgctcactgccttcgaagtccggcgccccccgggagggaactgggtggccgcaccctcccggctgcggtggctgtcgccccccaccctgcagccaggactcgatggaggtacagagctcggcttctttgccttgggaggggagtggtggtggttgaaagggcgatggaattttccccgaaagcctacgcccagggcccctcccagctccagcgttaccctccggtctatcctactggccgagctgccccgccttctcatggggaaaacttagccgcaacttcaatttt

SEQ ID NO: 40965 - DNA, 30 bp, Homo sapiens
  chr4:142558436-142558466
  hyper
gatgtctgtgcgtgcgcgtctatccctacc

SEQ ID NO: 40966 - DNA, 594 bp, Homo sapiens
  chr4:143766790-143767384
  hyper
taaaacaaaaaacaaggcaaccgggaccaccaacatcagtcaccctcactccccaccactgcctctattccttaaggacttcttcccaggccggcggcggcggcggcggcggcggcggcagcttgcgatcatcaggattggaagtgagagcgagtgcccgggccaacctcagcgtctctcagggacagcgcaggtgggcgcagccttggaaggtcagcgaggccagagctcagagttccacgggggcccggagagtgtgcgtgtgtgagtgagaatgcgaaaacgcgcgcgcgccgggcagaggggcgctcggcgagagggtaggcgcggtgacaggggtaccccagcagccgaggagagacagcccaccccaccctttaagctaaagagctggaggggtgatggaggctgcaagacggagaaacttgatgcaaaacagacaggctcccccctccaagacgtgccgccacgctctcagacacgctccctcgcctcccggattacccaccatcaaccaccccaccctgcaaaattcccccaccgagccctaggatcccaggcgggtaattacctctcccggaggcggagtggggg

SEQ ID NO: 40967 - DNA, 284 bp, Homo sapiens
  chr4:143767433-143767717
  hyper
cgagcgtgtgagcgtgtgcgcgcccaggaggagctgtaacctgctatttatagaccgaagcctcagtacccggggctgagaacccggaggaaactagcaggcggcggcgacggcgcagggcgccggccgcggcttcgcgaggctccagcagctcccccagcctctggcttcggccgcgctccctgctcgctcctcgcctaccagccccgcgcgcgccccagagaagttgtcaccagcgcggctggctctccggctgctcacacgccccctggcacaattgctac

SEQ ID NO: 40968 - DNA, 559 bp, Homo sapiens
  chr4:143768065-143768624
  hyper
cagagaaagaacccgcgggaggaagaaagcgccccagaccccggcctatggcagcgcagtccctagaccgagggtttttggaaggggcttgggatccctgctgtcactgcctgcgtctaggcatccattcacgcctgctggaccccagtctgcagccgcgctgggacccctgtctcttgcccctcctcccccttgccccgggcagaggtcgggctgaggagaccagcttagagcagccctcggccacccaccgccagttcccacgtcgcggcgggtgactgaggccgagatgctcccaactagcgtatgacatgcctttgatatcccgggtgcgtggggacaaatccgccctgaatgtgttggggtatcaggaaaacggggtatgtaagcaagcagtctggacggagactaaaactcccccacttcctagcccctaacaagcccacaggggaaagcacgcaccctggttattccgggctgtgtagggtgtggggcaaatgactctccccatctgcgctttacaggtgccacctggcggctctctcggaaaggttttgat

SEQ ID NO: 40969 - DNA, 482 bp, Homo sapiens
  chr4:144257017-144257499
  hyper
aagtaaagaaaaccctcgaaactcctgatctcgagcacagcacaagctccgagctggcaccgggctgagtcaagatggcaagccccggactgaacattcgaatgtccctcagtcttccccgcgcccaagccccggtgcctctgccctagccgaggcctctgcggtcttcccgggcgaggagccgattgggggccgccggacggcggaggaccctgctcctgcttcccgaactacagatcccagggtgcctctcggactcgcgctccctccctcccttgctccctcccttcgtccgtctcctcccccggcccttgttgttttggctggaagcactccggcggagtttcagagaaagtctgggcagaaaccggagccgggcctgaacgtgggaaggggaggaggagagggaggaagaaggagcccggcggccgggagagggagggagggatcgggatctggggccgagccgctcaggacctgcc

SEQ ID NO: 40970 - DNA, 190 bp, Homo sapiens
  chr4:144257936-144258126
  hyper
agcgctgtgtctgtttcggaaagcgctctggggaggtcttgtccctagggggcggagcgcaaaggacagaagctccggcaccgagtcggggcagagtcccgctgagtccgagcgctgctgaggcagctggcgagacggcacgtctggaggcgaggcgggcgcactgaaaggaggccggcgcgcccgcggc

SEQ ID NO: 40971 - DNA, 301 bp, Homo sapiens; identical to SEQ ID NO: 3583
  chr4:144258374-144258675
  hyper

SEQ ID NO: 40972 - DNA, 35 bp, Homo sapiens
  chr4:144434399-144434434
  hyper
cgagaaccgtgagccgttacgaaagcctaaaacac

SEQ ID NO: 40973 - DNA, 30 bp, Homo sapiens
  chr4:144480191-144480221
  hyper
caggctcaccttgacgctctgattggcggc

SEQ ID NO: 40974 - DNA, 215 bp, Homo sapiens
  chr4:144480520-144480735
  hyper
taaaaaaatactttccctctgcgcgactggcgcgtcacgtcgcgcgcgaccagtccgcagggctcctcccgcgctgctgataggcccgcagacggcggcccagcagaggagcggaaagcatggtccggggggcggcggacgcctggtaggcgctcgggccgttgttgtggggctgcgcgctggcgctgcagggcgggatgctgtacccaagagag

SEQ ID NO: 40975 - DNA, 344 bp, Homo sapiens
  chr4:144621095-144621439
  hyper
aagcctcacagtctacgcccttgcccctggggagaggggcccccaccgcgtccaccaagcgcccgtacttgggcagggggccgtcctcgtgaggaagtggggtaagccggcacctgcgggtggccgtggctccagacttcagggaggcgaagtccagcactctcctgtctatggcgcggctccagcttcgcagcttctccactaccaaaggcctgttacgcgtcaccagctccagctgggagaagaccaagtccaccgccagcgtgaagggcagcaccagagtgtgagtcggggcgtcgtagcgcagctgcagcagcacccgggcgcgtccggggctgtgggag

SEQ ID NO: 40976 - DNA, 382 bp, Homo sapiens; identical to SEQ ID NO: 3585
  chr4:144621514-144621896
  hyper

SEQ ID NO: 40977 - DNA, 347 bp, Homo sapiens; identical to SEQ ID NO: 3586
  chr4:144621981-144622328
  hyper

SEQ ID NO: 40978 - DNA, 782 bp, Homo sapiens
  chr4:145567031-145567813
  hyper
gcggcgaggcgggcgcgcggggttcagcaccctcgaggctggttccgaaggctcgcggccctccccctccgtccgccgccgtcgcggctagccgcccctccccgccgcagcagggaggccgccggggcccgggggacgcgctcgcgcgggggccgccccctccccttccctccaccctgggcgggggcgcgcgagaagcggtgacgtcaaggggcgcgctgtggcagcacctccccgcgcgctagttaaaaagaagaagaaaagagggaacgaaacatgagaggctgtgtgagaagctgcagccgccggcagaggagacctcagcatcatctagagcccagcgctggccctgcctccgcctgccccgccgccgccgtcgccgtttctgttcctgctactgtcccacctaaacaactcccgttacacggacaagtgaacatctgtggctgtcctctccttttcttcctcctcttccaactccttctcctcctcccacttcccagccgcagcagaaagcccccaacccaactgacactggcacaactgcaaacggtgtcatccgcacaactttatctcgctcctcgggctcccctaaggcattggacccatcgccgcgtcttttattttttgcaaagttgcatcgctgtacatatttttgtccccgccacctccctctgtctctggagtgccctacagccccgcaaactcctcctggagctgcgccctagtgcccctgctgggcagtggcgttcccccccatcctcccgcgcccagcccctgct

SEQ ID NO: 40979 - DNA, 30 bp, Homo sapiens
  chr4:145568291-145568321
  hyper
cctcccccagagtccgcggtcgggatgctg

SEQ ID NO: 40980 - DNA, 172 bp, Homo sapiens
  chr4:146018849-146019021
  hyper
ggtgagatctagggcgagactattcaacctgcaaccatcattactaactgaatgtcctgttacctaaaaaaagatagaaataaagcccatctttagggcagaattcaactgccggacttgggactggacgccaccaagtggataaaatatggagctcggaaaagattggatt

SEQ ID NO: 40981 - DNA, 30 bp, Homo sapiens
  chr4:146019659-146019689
  hyper
taggccttaggtggcggagacagcagcagc

SEQ ID NO: 40982 - DNA, 210 bp, Homo sapiens
  chr4:146098923-146099133
  hyper
ctcgagtctcctccccgtctttaaaaactgccacttagattatttactttgattccttcttagaaatgatgagtatttgtgattttataggagaaattgttggcaaaaaatataaattattggtacacattttaaaagggaagcctgacgctggtattacttcctttttcccacacacacacactttgcctttggcgatgatggctataa

SEQ ID NO: 40983 - DNA, 30 bp, Homo sapiens
  chr4:146102031-146102061
  hyper
cagggacacggcggcgcagtgtcggccctt

SEQ ID NO: 40984 - DNA, 31 bp, Homo sapiens; identical to SEQ ID NO: 3587
  chr4:146102129-146102160
  hyper

SEQ ID NO: 40985 - DNA, 508 bp, Homo sapiens
  chr4:146402703-146403211
  hyper
gttaggaaagcctgaacgccgccacactgttttttctccaggaagaaacggggcgtggggctgccggtagaagggggtggctccggccgctcccccgcgccgtcctccggccccggccgcgctgcgctcacgccggccgggccgggaatttggagaggatccctggtcgcgcggcagcggcggcggcgcgcgggtgagcgggtgagcgtgtgagcgggcgggcgggcaggcgagtgcgccgggtattggcagctgaggagtggaggctgggcagctccgactccctgacgccagcgcgaccagatcaatccaggctccaggagaaagcaggcgggcgggcggagaaaggagaggccgagcggctcaacccgggccgaggctcggggagcggagagtggcgcagcgcccggccgtccggacccgggccgcgagaccccgctcgcccggccactcgtgctcccacacggacgggcgcgccgccaacccggtaaaacgaaacagacccgaa

SEQ ID NO: 40986 - DNA, 295 bp, Homo sapiens
  chr4:146403592-146403887
  hyper
cgtgctgccgccgggccgaggcccgttcgcgtggcccgcggacccattgtgtcccccgcgccggcggggcgacccctgcgggagctggaggacgaccgctggcgctgctctccaaggcgcctggtggagcgggtctcgcgggcgggggaccccggcgccccgggcccctccacatcccgcacgggttttcttctcggccccagcaagcctctttggggtcgaggtcaaggaaagttcgcaccgagatcccctctaatttattcaaaggtttggcggcggcgcgtaattttttccc

SEQ ID NO: 40987 - DNA, 30 bp, Homo sapiens
  chr4:146540561-146540591
  hyper
gagtatggggagtgcgcgcggcgtccagga

SEQ ID NO: 40988 - DNA, 1009 bp, Homo sapiens
  chr4:146857460-146858469
  hyper
gccttctccttcctcgcacaaaatttccctacacacgcagccgcctgcgagtgattttatgtgcatatatattacatatgtgatattatcctcagaacctctagcgggcaggcgaagaaaggactgcacaggggcattttttttttttaaaggaaggggaaaaaagcacaacccaagccctttgcgtcgactcctgcgtaccgggaaggggaaagaaagaggaatgtttgcggagcggactgcttgcaagtgcccttgctcgccacttcggctgcggcccgggtgacacggaggcgcgggggcgcctggcccgagcagcccgcgcccccctcccggtcccctgggcaggcaccgccgcggttatttcgcgagggggagatcgatcgccctgcctgtctgcagcggaaaagcacaagctcacacacagcccgagcccgagacaccataaccttaacccttcccccaccctccgtgaacttcaggtgaccgaccacgtcggcctgacacccgggcgggcgggcgctccggctccactcccgcccccagcccgggttttgcaggatcgggctccgagcagcgccaaaccgccgggagaggggagtagtgtggggggagagaagagaaattgaccctccgtctcccccgacccctccctccggcgcctcccgcgtcccctcctccccgtcaccccgccccacgccttctcccctgccccctcttccctgcattcaaggagccgggcggccccgggggatatttttagttgcttctttctccttcacttttagctttagcagcatctcgaaacactcaaagcggagaaagactggggggttggggggagctggagagggagtgggggaaaagttaagagtcgcgcaaagaaaagccggagggagggcggagagggaccgggggcgcgggtggaggaggggaaggggaccgggccgtgccggcgggtgtgtgtctccagttggcgtgtgtggctgccgccggggagggctgtgat

SEQ ID NO: 40989 - DNA, 30 bp, Homo sapiens
  chr4:147097428-147097458
  hyper
catcggggtggctgcgcctgaccacaggaa

SEQ ID NO: 40990 - DNA, 30 bp, Homo sapiens
  chr4:147442774-147442804
  hyper
ttcacccctatggacggctccagtttagct

SEQ ID NO: 40991 - DNA, 44 bp, Homo sapiens; identical to SEQ ID NO: 3591
  chr4:147443080-147443124
  hyper

SEQ ID NO: 40992 - DNA, 307 bp, Homo sapiens
  chr4:147558074-147558381
  hyper
ccatgtccaggtttcgctgagctcacacccggcaacactgctgctaggagttcccttcggctactatttattattttcctccacacaggggaagagaaagggaagcccgagaggatccagggaaagcagaagggggttaaggaccatggacagagcccgtcgcgcgctcgttgctgccgccttccccagcactctggcggctcctgaggacagcggtcccatcttgaaaccgctattccgcccggctgaggtcaggggtggacaggcggtcccctactctccaccgccgcttccgggagctgaccac

SEQ ID NO: 40993 - DNA, 183 bp, Homo sapiens
  chr4:147558476-147558659
  hyper
cgccttccccaggcgcccagtgcctgcacctgctcccggtcaacccccgtccggattgggccacccgcgggttcctgcgtcggggtcccggggccttctcaccctcgcctgcaccctgctccttccgctctctagggaggtgacagcagcccccaacaccgcgggaagtatagagaaaatggg

SEQ ID NO: 40994 - DNA, 746 bp, Homo sapiens
  chr4:147559332-147560078
  hyper
gggccgtggggggctcgtagccgaacgccgacctccgctcgtattgggctgggagttcagagccgcgcgcagaacccgggttggccgcaacgtctgtgttctcagcggtggccgggaacctgggatcagggtcacctgagctgacggggtgggggcgggccgagtggggttggaagcctggaacttagtggtaagcaggaggcgtaggaggtggcagccaggtaagaggcactcttacctacccaacgctggcttgggccgcaactttatttgggagtttctttttccggtgagacagagacccggcagaagaagcgggaggggctggaggctggtccttaggtaggcactgcccggcgactggagcgcggacctggccatttgggtggggttgagtgggggcgcgattgtgagtagcagccgcgggacgctgcgaaggggcggcggcaacagagcacgggcgggggcagaaaagaggcggcggagggcgcggtgggggagcgcgaggcgagtgctgagagagcagaaaggactcaagcctgaggggagtagagaggaagaaggggcaacgcgagaaaccgaacaggagccggcgtttcctggcaagggagggcggaggcgcgcgggagagagggagagagggagggcggggggcgcgggggtaggcgcggggagaggggagtataactcgccggccgcgaggagcgggggcagtttcgggtgccgaggtctgcagctagcggcaa

SEQ ID NO: 40995 - DNA, 285 bp, Homo sapiens
  chr4:147560133-147560418
  hyper
cgagatcaggcgtacagagtccggaggcggcggcgggtgagctcaacttcgcacagcccttcccagctccagccccggctggcccggcacttctcggagggtcccggcagccgggaccagtgagtgcctctacggaccagcgccccggcgggcgggaagatgatgatgatgtccctgaacagcaagcaggcgtttagcatgccgcacggcggcagcctgcacgtggagcccaagtactcggcactgcacagcacctcgccgggctcctcggctcccatcgcgccc

SEQ ID NO: 40996 - DNA, 326 bp, Homo sapiens
  chr4:147560459-147560785
  hyper
cggcggcggcggcggcggcggcggcggcggcggaggccgaagcagcagctccagcagcagtggcagcagcggcggcgggggctcggaggctatgcggagagcctgtcttccaaccccaccggtgcgtatttctgcataatcaccgcttaaaggcacattttgacagccccctttatctgcttgatgtttttttcatgtctgcacagcaaatcaccccacacctccaaccaattttcccctctctctctcttaagtattcagcaggtcttgcctttcatattaatttttatgacctgggatgttgcctgtgcgcgtgttgtgttgtg

SEQ ID NO: 40997 - DNA, 588 bp, Homo sapiens
  chr4:147561361-147561949
  hyper
ctgtggtgtccacgccggctcacgcgccgcacatggccaccatgaaccccatgcaccaagcagcgctcagcatggcccacgcgcacgggctgccgtcgcacatgggctgcatgagcgacgtggacgccgacccgcgggacctggaggcattcgccgagcgcttcaagcagcgacgcatcaagctgggggtgacccaggcagatgtgggctccgcgctggccaacctcaagatccccggcgtgggctcgcttagccagagcaccatctgcaggttcgagtccctcacactgtcccacaataatatgatcgcgctcaaacccatcctgcaggcatggctcgaggaggccgagaagtcccaccgcgagaagctcaccaagcctgaactcttcaatggcgcggagaagaagcgcaagcgcacgtccatcgctgcgccagagaagcgctcgctcgaagcctactttgccattcagcctcggccctcctctgaaaagatcgccgccatcgcggagaagctggacctgaagaaaaacgtggtgcgcgtctggttctgcaaccagaggcagaaacagaaaagaatgaaatattccg

SEQ ID NO: 40998 - DNA, 114 bp, Homo sapiens
  chr4:147561999-147562113
  hyper
cgctcttttctctcctctcttctgcctcttttcacttttggcgactagaaacaattccagtaaatgtgaatctcgacaaatcgaggactgaagagggagcgaacgagcgaacaa

SEQ ID NO: 40999 - DNA, 30 bp, Homo sapiens; identical to SEQ ID NO: 3600
  chr4:147568700-147568730
  hyper

SEQ ID NO: 41000 - DNA, 30 bp, Homo sapiens; identical to SEQ ID NO: 3601
  chr4:147576532-147576562
  hyper

SEQ ID NO: 41001 - DNA, 30 bp, Homo sapiens; identical to SEQ ID NO: 3602
  chr4:147867143-147867173
  hyper

SEQ ID NO: 41002 - DNA, 757 bp, Homo sapiens
  chr4:148402157-148402914
  hyper
gtctggagctttgggaggagacggggaggacagactggaggcgtgttcctccggagttttctttttcgtgcgagccctcgcgcgcgcgtacagtcatcccgctggtctgacgattgtggagaggcggtggagaggcttcatccatcccacccggtcgtcgccggggattggggtcccagcgagacctccccgggagaagcagtgcccaggaggttttctgaagccggggaagctgtgcagccgaagccgccgccgcgccggagcccgggacaccggccaccctccgcgccacccaccctcgccggctccggcttcctctggcccaggcgccgcgcggacccggcagctgtctgcgcacgccgagctccacggtcggtgcaagtctttcttatcggggactgggactggggcgggtgcggggatggcggagacgctgcctgggcccctcggtcgggagaagacgagagctgggaacgttctggcccgaccgccctgcagcttgggcgacccgtcgcagcaggggctggcacccacttgccccagggcgcgcggggaggcgggcgccttccgtgaggggtgcgctgcggacacgtgtagagttcggggaacttcacctctccacgttagggtttaggattcggagttttaggaagaggaagcccaatagttttccctgggtgaccccttttccccaggcatgcaagaactttgaggaacgccaagctctgtggcttgctccagcgccttcttgtgaagt

SEQ ID NO: 41003 - DNA, 34 bp, Homo sapiens; identical to SEQ ID NO: 3604
  chr4:148538934-148538968
  hyper

SEQ ID NO: 41004 - DNA, 30 bp, Homo sapiens
  chr4:148653434-148653464
  hyper
gcagcgaccgctgccgtcatggggctgcag

SEQ ID NO: 41005 - DNA, 254 bp, Homo sapiens; identical to SEQ ID NO: 3605
  chr4:149362787-149363041
  hyper

SEQ ID NO: 41006 - DNA, 30 bp, Homo sapiens; identical to SEQ ID NO: 3606
  chr4:149363700-149363730
  hyper

SEQ ID NO: 41007 - DNA, 127 bp, Homo sapiens; identical to SEQ ID NO: 3607
  chr4:149364526-149364653
  hyper

SEQ ID NO: 41008 - DNA, 662 bp, Homo sapiens
  chr4:149365596-149366258
  hyper
ctgccttgcccggggccgcccctgcgctctccggaccccctctcgccgctgtcagcgcaaagtgactgtcgctgcactcaccttttctaggacatggtggggaggctggggcgggggaaggggaacggctagactcccgccgccgctgctgccgccgccaccagcaagtccaatattggctgatcggcggtgaggatggagaggatgataatcccggcagtggcagtcgccctgctgacggtgggtagagcaatagtgctgttaccctacaagaggcggcgaggcagcggcgccaaatcgcgcagagggggacgcgggcacccgcccgcccccagcggcggcggccgggcctctggcgggcccctctcccggggctgcgcgtccgctcggcgttgacagcggcgtccctgggagccgggaagtccggcaggaggatcccgcgcccgccgctccgcagcgccactctccgcgccccctccccgggccctgggtggccggtgacagctccggcggccgagcgcgtgtgtgagggggcggtcgcagggggagcctgcgcccccctccccgggtcacgccctcacgagcgggaggaggcggcaccgcgtccggccacccgcgggtgggaaacgggcaggggcgccggcagccgccctcccactacg

SEQ ID NO: 41009 - DNA, 30 bp, Homo sapiens
  chr4:149366982-149367012
  hyper
tgtgcatgtgtgtgcgcgcgtgttcacgcg

SEQ ID NO: 41010 - DNA, 905 bp, Homo sapiens
  chr4:150999235-151000140
  hyper
gtagtttttggcctgcgcggttacgtttcccaggcggaggagcgcgcgtcgcggctgcgcccattaacgcgcggcgccgggcaggagccgtcaggcgggcggggctgcccgggacccgcaggagctgctcctcccgcgccggcgctcggccccctcctccgccccctcctccgccccctcctccccttctccgcggtttggcatccccggggccgggaagcctcctccagcgctgacagcctgtcggcggcggagggaggccagagcgcggatgcttgccagtgggccgggcctgaccgctgcgtgggaggcgggctgcattatttcccgctagggccgcgctccagggaaggaaggggccagacacggccctctcagccccgaacggcgcgcgctgcccggcgggcgggatccgggcgcggccgaggcggcggcgctgcaccccgggcctgggcccgcgcgactcccccgggggcctctcccacgctccgcgccccgccccacccttccttccttcctcccctcggcgctcccgggagcgctcggcagacgcccgagctttgtgggcgcccgcgggcccagcgcgagcctcgggcggcccaactttgcctctcccggtcggctcccgagcgggacttgtgaggcgtggccgggtggaggaggcgcttgcgggggcgtggggctccccggcaggcgggaggcacggagcaagtcgcactggacaatgacctgggcagctcggcgctgcggacacttttagctgagggcgcgggcgggtcggctcctccgcggctcctcggccccacctgcgcggagagggcgggatgccagagccaggtgtcccggcgcgttaagggccctcgcagtcagacgtccctgcaccggcgctcgcacccttagtcggc

SEQ ID NO: 41011 - DNA, 410 bp, Homo sapiens; identical to SEQ ID NO: 3611
  chr4:151000246-151000656
  hyper

SEQ ID NO: 41012 - DNA, 30 bp, Homo sapiens
  chr4:152021299-152021329
  hyper
agtacatgccattacgtgccagcaaagtta

SEQ ID NO: 41013 - DNA, 911 bp, Homo sapiens
  chr4:152246042-152246953
  hyper
ggtgtcgttgtccaccgagacggccattgacctctgactcatccagagataagtcatcaaccaggccacaagtcccaagccagcagctcctggatttagtgtgcacggaaaatttgagtttcagctgtacgaccactagcagttaaagacgggtctgaatttcctcgggctcggccggaaagtgaggatggcgatggaaatgccaccctccccgagtctggcctctgagagttaaagaagccggtcccatcccggcgcgtgaaggagctgccgctgtgtggggcaggacccgagcggccccagagcgcgcagctctgggtccccgccgccccgtcccccgcgcctctcacctgcggccgagtggcccgagagcgcacggccccgggcgcggcgctggccaccaagttcgcggcgctcgcgtagctcttcctcctcgtcctcccgccgccggccctcagccatgggcgaggcgcggggcgcagccgcgggatggccagcgagctgcggccccggcgccccagaacgcctgcacccggcgccccacgccaccgccctcgggccggggggaaggcggctcccggagaggaggcgtcggcggcggctgtggaaatggccacctccgcgaactccacctgcagccggccgggcagcggcagggcgcgggccgagccgattccccgcctccttgcggcgtcccggcggcctcttaatccctggcctttcccactcccactcccgctctcttcccccttcctctttgccttccccgccccgtagagctccaccgcggatcgggcgggttcggggctggcctcgcctcctcagggaggggttatcggcccctaaggccgccccacagccacacacgctggaaacaccagctcgacccaaacaaacgtgtgcaaaataaa

SEQ ID NO: 41014 - DNA, 1079 bp, Homo sapiens
  chr4:152329808-152330887
  hyper
gaaagcagagctgggccggggcgccggtggccgccgtcaaacctttgggaagcaagaaatccgaaacgcccgtgacgtgcggcgttgtccgactccttccactaggcagaacccgagagacgagcctttggcgggacggtgaacgattgtgctgtgtacggcggtgtgcgtgcgtgagtaaagagtgtgtagctccggccaaacgctagcccccaagggcgcgagtgctacactgcgcccagctcaagtttctgtggaaactttccctcagaggctcctcctccttcaccttggaaaccggcgcgggccgtgcggcgcggcactgcctaagtccccggcgcacctggcggcggcgtgtcccagcggcagaggcggggccggcggcggcgggggcggggccggggcgcgctccccgaggcctccaggcaggttgggccccacccccgcccctgccccgccccggcccccgcccccgcccccgccccccccgcgctcactagggagaggctggggggaggcagtgacccacgcgcctcagcccgcggctgacgcaccttcgaaaagttgcgctccgaccttctcacgacctacattcttcccgggcactcctgagtttgagccgggcctggaggacctgggccaagactttcgagcggcggccgcccgaggtgcgaggagccagcccggctttcctcactgggtcccgcgcaggcgtccccgggaccgcagagcaaactttctggactatctgaggacacttgtccagcgagccccactgctcggggaggaggagccacggccggggacaggtaggtgctgtgctggccggagatttgcgcttgagggattcttttattttagagggttgaaggaggagggagagtcgaaatgtcccttctctgcatccgccaactgggcagggggtgcgggcattgggctgagggagcaggcattgggctgggggccggctggggatgttccaaacgaggtcgctgcgtcgggcgggggcgcaggggggaggaggtgacttctagggtttcgggctccgggacggggcgtaacgcggtgactgaccctgg

SEQ ID NO: 41015 - DNA, 30 bp, Homo sapiens; identical to SEQ ID NO: 3615
  chr4:153249370-153249400
  hyper

SEQ ID NO: 41016 - DNA, 30 bp, Homo sapiens
  chr4:153457998-153458028
  hyper
aggaaacaggggtgcggcttgagtacagag

SEQ ID NO: 41017 - DNA, 30 bp, Homo sapiens
  chr4:153589912-153589942
  hyper
caccagagtccccatcgccagcctaagcag

SEQ ID NO: 41018 - DNA, 516 bp, Homo sapiens
  chr4:153600920-153601436
  hyper
ttttctgggtgtcaccctccccggcagagttctgtagcctcgggcaccctaccagcttttgcgatcctccttcccaggagtaggaagtggaggcggcttaccccggccgacgggaacgagcgcgatcaccagggcgaagactagggctgcgcggggagcctgcatgtccgctcgcctcggcagaggcgcgctcaggatgctgcgccgggctgcagcctctctgaaacgtgaacatttcctgtttcctgcttgtttgggtcggtgctgacttgaaggagaggtgtgtgcctgttttttaggaagtgatgtaattctgcaggagcctgtcagaccagcaaggattgcaaaagagaagttgctgttgaagcactggttctattatcacgcctctccagccctttggagtcccggcctccagcttttgaaaccgtccccggggcaacagagtcccttgctcagatgtcgttcggtatctgggactgggaggggtcctggaccacacgcattctcactctg

SEQ ID NO: 41019 - DNA, 30 bp, Homo sapiens; identical to SEQ ID NO: 3618
  chr4:153857098-153857128
  hyper

SEQ ID NO: 41020 - DNA, 30 bp, Homo sapiens
  chr4:153858194-153858224
  hyper
ggagggggaggaagcgggtgggctggggat

SEQ ID NO: 41021 - DNA, 31 bp, Homo sapiens; identical to SEQ ID NO: 3619
  chr4:154048774-154048805
  hyper

SEQ ID NO: 41022 - DNA, 185 bp, Homo sapiens; identical to SEQ ID NO: 3620
  chr4:154073355-154073540
  hyper

SEQ ID NO: 41023 - DNA, 726 bp, Homo sapiens; identical to SEQ ID NO: 3621
  chr4:154143757-154144483
  hyper

SEQ ID NO: 41024 - DNA, 118 bp, Homo sapiens
  chr4:154387145-154387263
  hyper
tggcaaaagtgggccgctagtccccgcggacagctctaagcgaccccgtcccagccgaggaaagcgcccgggccccgcagagtgcgcgctgcggggcgggcccgcggccatgtgctcc

SEQ ID NO: 41025 - DNA, 240 bp, Homo sapiens
  chr4:154387494-154387734
  hyper
gccagcgagctagcggcgagcgcggcgagcaacggagaggagcgcgagcagcagcatggcggggctccgacgcccgcagcccggctgctactgccgcaccgcggcggccgtgaacctcctgctgggcgtcttccaggtcctgctgccctgctgtcgcccgggaggggctcagggacaaggtcagccttgcgccgctgggctcgctctgcctctccaccccgcccccgctctttcttttag

SEQ ID NO: 41026 - DNA, 83 bp, Homo sapiens
  chr4:154388113-154388196
  hyper
ccccccacccccagcacgagcaccccgagcctgcctgcacgctgtcgccttcgcgtccgaggggccgccggctcacaccccac

SEQ ID NO: 41027 - DNA, 48 bp, Homo sapiens
  chr4:154605243-154605291
  hyper
cctgctgggaagcacggccgcgggggctcgctcggggccacctgcctg

SEQ ID NO: 41028 - DNA, 30 bp, Homo sapiens
  chr4:154606036-154606066
  hyper
agggtcgctctccccgcctcctggcccctc

SEQ ID NO: 41029 - DNA, 30 bp, Homo sapiens; identical to SEQ ID NO: 3622
  chr4:154607110-154607140
  hyper

SEQ ID NO: 41030 - DNA, 187 bp, Homo sapiens
  chr4:154680894-154681081
  hyper
gagccccgggaccccggcctggcgtcccccacgcccgcgcccccgcgccagtacctgctcctgctgcgggggggcctccagcaccggcgctgccttccgcgccgccgtccccgcggccatgcctgagccactgtgccttctccagggcacagcgcctgccggggagggtcccgcagagtccgcagaa

SEQ ID NO: 41031 - DNA, 31 bp, Homo sapiens
  chr4:154709168-154709199
  hyper
ctatttttttttaaaccgccgttcagttctt

SEQ ID NO: 41032 - DNA, 140 bp, Homo sapiens
  chr4:154709470-154709610
  hyper
agagggaaggcttaccttcctcggtggctggcaggaggtggtcgctgctagcgagggggatgcaaaggtcgttgtcctgggggaaacggtcgcactcaagcatgtcgggccaggggaagccgaaggcggacatgaccggg

SEQ ID NO: 41033 - DNA, 792 bp, Homo sapiens
  chr4:154709758-154710550
  hyper
cggcctgctccagcacctccttcatggtctcgtggcccagcaggttgggcagccgcatgttctggtattcgatgccgtggcacagctgcaggttggcagggatgggcttgcaattgctgcgcttgtaggagaagtcgggctggccaaagaggaagagcccgcgcgccgagcccaggcagcagtgcgaggcgaggaagagcagcagcagcgagccagggccctgcagcatcgtgggcgcgcgaccccgagggggcagagggagcggagccggggaagggcgaggcggccggagttcgagcttgtcccgggcccgctctcttcgctgggtgcgactcggggccccgaaaagctggcagccggcggctggggcgcggagaagcgggacaccgggaggacagcgcgggcgaggcgctgcaagcccgcgcgcagctccggggggctccgacccgggggagcagaatgagccgttgctggggcacagccagagttttcttggccttttttatgcaaatctggagggtggggggagcaagggaggagccaatgaagggtaatccgaggagggctggtcactactttctgggtctggttttgcgttgagaatgcccctcacgcgcttgctggaagggaattctggctgcgccccctcccctagatgccgccgctcgcccgccctaggatttctttaaacaacaaacagagaagcctggccgctgcgcccccacagtgagcgagcagggcgcgggctgcgggagtggggggcacgcagggcaccccgcgagcggcctcgcg

SEQ ID NO: 41034 - DNA, 30 bp, Homo sapiens
  chr4:154710885-154710915
  hyper
ctttacatggaaaacgaaatactaataaaa

SEQ ID NO: 41035 - DNA, 729 bp, Homo sapiens
  chr4:154711997-154712726
  hyper
aaagaaagagctaataaagagcgtgagctctgagagatgctacgacttgggcctgggagtgggataagggccctctcgctttcacgcccccccaaccccccgccggccccggccaacccctaaatccccaacgccctccgctggggtcgcctcctccccgcagagccccttgttgggagttcaaggagcccgaagctggtctggctggtttgagccccgcgctgccgcacgcccggaagtggctggcggcccccgcgctccgcgcgccggctgcattgttttgggagccctcgctgcccggcttgccgccaggaggtgctgggagtcgcgcctgagtctccatccctgccgtgcgcagtgtccacctctggccagcttgtttgcccggcccgcggcgtcccctgcggcccatcgctgctcctcccggaacccacgccacttagtctggtcccgaccctgcactcgctgctgctgcctttcccacctcaagtcgctctccccactcccttctgcttttgggctaagaccggtccaattgatcactggggaacagggcaataacctcccgcggaggctgggacgcgggcacggagctctgcccatatgagcagcgcagggatgggacactgggtgcccatcccagcgcgcctccccagactggtccctgggatgctcacacgtggcgcggcaccgcggcggcgccttcacgaacccagactcttctctgct

SEQ ID NO: 41036 - DNA, 467 bp, Homo sapiens
  chr4:154713480-154713947
  hyper
acgttacatgtgcctcggtgaggtgaagtgactaccgggctagccttggggacctgtcgcgacttgtcgggtgtctccaaccgcgttgccgcctggctttcagccgtgcgctggccagccgggcgggtgacgtcacctctccccgggtccgtgcacccaggccttccctgctccgggtgagtattttttcatgggattcagccatctgggggcgccatttcccaaaacagagattgtccctttgaggttgcaagtcaggttcctttacgctgagatcccttacatttttacttttaggaaggttttttcgaggggtggggggatgacctcattccttcgcctttggccctccctctacccggccccacaacgaggacgcccctgcagctggctgggccgcttcctcttgccacgcggggggacctgtgcccgcggccgtgcacctccgtgtacgcttctgctcctcg

SEQ ID NO: 41037 - DNA, 30 bp, Homo sapiens; identical to SEQ ID NO: 3629
  chr4:154714151-154714181
  hyper

SEQ ID NO: 41038 - DNA, 478 bp, Homo sapiens
  chr4:155254115-155254593
  hyper
aggatgggctgtgttcgcgtttctcgataacgactgtcagcaccagcagggctgcctgaggatgcacgccttggtcctcggccctgagagtcagcgtgagctcccgctgctcgcccgcgcccaggctgccgttgaggaacagcacccccagggctctgtcgatggcaaagacgcctggctgcgggctggcgatggagtaccggatgagtccgttccgcccactgtctctgtcttccgcacgtgcgaggtacaaggctgtgccagggggcgtggtctgggatattctaatctcatccgaggtcctgaggaacgctgggtggttgtcattgacatccatgactgttatgttgacctcggtgctgctgcaggctggggcgctgccgagctgcgcctgcaccgtgagcacaaccacgggctgcgtctcgtgatccaggggcttccgggtgcgaatagtgcccagccgcgggtgaatggagaa

SEQ ID NO: 41039 - DNA, 30 bp, Homo sapiens; identical to SEQ ID NO: 3631
  chr4:155338151-155338181
  hyper

SEQ ID NO: 41040 - DNA, 91 bp, Homo sapiens
  chr4:155411402-155411493
  hyper
tccacactcgcaccacgccgctcagctcctccaccgcgaagtaggccgcgtcgcccagtgccccgccgccgctacccgccccaggcacttg

SEQ ID NO: 41041 - DNA, 543 bp, Homo sapiens; identical to SEQ ID NO: 3632
  chr4:155411850-155412393
  hyper

SEQ ID NO: 41042 - DNA, 30 bp, Homo sapiens; identical to SEQ ID NO: 3633
  chr4:155413454-155413484
  hyper

SEQ ID NO: 41043 - DNA, 30 bp, Homo sapiens
  chr4:155471469-155471499
  hyper
gtgtatcccacctccggcagggaagaaact

SEQ ID NO: 41044 - DNA, 30 bp, Homo sapiens; identical to SEQ ID NO: 3634
  chr4:155548258-155548288
  hyper

SEQ ID NO: 41045 - DNA, 406 bp, Homo sapiens
  chr4:155663514-155663920
  hyper
ggcaagcagggagacggggacagatcgctgacggcagattgagggtggcagcaaaggcccggcctccaaggataatggggagccgttttccctcacgcctggtctctatggcccccttcgtcttccaggtaaaatgaatgttccttcatccatcatccgcagagtaccctcaggcgtgcgtagaatctgctgatgaaacctattagcgccgactgggcagctttgtggagccacccgaggctctccattgtggcctttgtctgcagaatttaagcatttacataatgcattagcacggaactcagcacccggtggggacatcgcgtgccaagcctggcgcggccaacgcttcagcggctccctcacccggcagctccctaggaccaccctcgaggaggcattggag

SEQ ID NO: 41046 - DNA, 178 bp, Homo sapiens
  chr4:155663970-155664148
  hyper
cgccttccttggccgtctccgggaggttatgcttaaaaacataaaaataaaaataaaaataaaaataaagggaggcggacaaagtttcggtgggtgaactgaagctgggtccatgtgaccctgaagccggagaaataaacttaacatgaatcttgctttcctggcgggcgttgggacc

SEQ ID NO: 41047 - DNA, 137 bp, Homo sapiens
  chr4:155664189-155664326
  hyper
cggccacaggtgcctaggagcgcagagaggcctcgggttcaaatcaccggcgcgcagggactggactcgcgggtagcgacccccccaacccccccccccccgccctacacacacaccctcgcgccggctgaaagcat

SEQ ID NO: 41048 - DNA, 116 bp, Homo sapiens; identical to SEQ ID NO: 3638
  chr4:155664919-155665035
  hyper

SEQ ID NO: 41049 - DNA, 348 bp, Homo sapiens; identical to SEQ ID NO: 3639
  chr4:155665292-155665640
  hyper

SEQ ID NO: 41050 - DNA, 232 bp, Homo sapiens
  chr4:156129154-156129386
  hyper
gcaggatctgaactcgctttaccttctcgtttggagcacagggaccgcccagctagaggagcaccagcgcactgcgccccagccctgggcgagggtgcggaggatttgttctcggtgcaatcctgctggcgcttttccggggttctgcgcggatccagctccccatctctgctcctacacacacaaaagaaaacaactctcgattggaagttgtggaattttctcagcccct

SEQ ID NO: 41051 - DNA, 556 bp, Homo sapiens
  chr4:156129443-156129999
  hyper
cgctcgcctgccttgctagggaccgcagtccctcagccgcagctgggtctgtccgccccgcctttgccctcgccttttcccggggcggatttggtgaagtcggcctcaagtccaggaggtctgtcttcgccgggccagctctcgcggaactggggggtagagagcaaagggagagattcgtggaagggaagggaggtaggggtggcgcaaacgcccagagtatcaaacttgggggtggcacagtaggtgacagcagcagctgcaggtggtggctggggacccgcgagggggcgcccctctgggtagggtctggctgagcgggcttgcaagcccgggaggcggctgagagaccctggacactgttcctgctccctcgccaccaaaacttctcctccagtcccctcccctgcaggaccatcgcccgcagcctctgcacctgttttcttgtgtttaagggtggggtttgcccccctccccacgctcccatctctgatcctcccaccttcacccgcccaccccgcgagtgagtgcggtgcccaggcgcgcttggcctgag

SEQ ID NO: 41052 - DNA, 259 bp, Homo sapiens; identical to SEQ ID NO: 3641
  chr4:156297474-156297733
  hyper

SEQ ID NO: 41053 - DNA, 193 bp, Homo sapiens; identical to SEQ ID NO: 3642
  chr4:156297941-156298134
  hyper

SEQ ID NO: 41054 - DNA, 1437 bp, Homo sapiens
  chr4:156587869-156589306
  hyper
gatttctgttatggcgattgggcggctgcagagaccaggactcagttcccctgccctagtctgagcctagtgggtgggactcagctcagagtcagttttccagaagcaggtttcagtgcagagttttcctacacttttcctgcgctagagcagcgagcagcctggaacagacccaggcggaggacacctgtgggggagggagcgcctggaggagcttagagaccccagccgggcgtgatctcaccatggtgcgttttggctgctactttctttttcagtctttcggtgcggagaaggggaggaggcgggcagaggtctgaaaaaatcgaatgccttatggaaaggaactgcaagggttcctttggggtgatcaaagagggagacacagacacagagagacaaaggcaaggaggactgtctgggagccacgcgggcgatacagtttccgaggcacgccgcgtcccgcctagcctgttgaacaggtagacatgagcgacccaagcgtaagtgccgctgccgcgagtgcccagggtgcactcgcgcggggaccgacaggtgccactgcagggtcccctctcccgctcactgcctgccacccctgacgcctgctctctttctccattcgcagtgcggatttgcgaggcgcgccctggagctgctagagatccggaagcacagccccgaggtgtgcgaagccaccaagtaagtggtcgctgcatccccacgcgggtcggggttcttcagacaggcggtccctcttccgggacccccgcttgggctgggtctccttcctctcctgagaaaccttcggtacgctcccagttgcccagccctgggaagccagcatcgggttcccacgctggggaggagcgagaggaaaggagaggacgcccgaggggccggcccagggcccgggggacccgcggcgcccgagggaggagcacagacgggggtgggcgccgagcagcgccgcgccggctgctgagctcgcggggccgggccgtgagaacgcgcggggcgcgccggggccgctggtctcccacggccagggcgcctgggccccagagcccatcagccgcgtgcagcgctgcggcctccggcgcgccggcaggcaagcgagcgggcgcagctgggggatgcctggaccccggaggcagcagggctggaggcggtggcgggcttcagggcaacttcacccggccggctgcggcgtgggtaagaggcgcgtcctcctccacagcaaaagctgcgatcgctgggctgcccagagaaggcagccggctaactgcccagcggctccacgaggtgtgcgcgtgtgtgcgagagagacaaatgatttactgcttagcagtcccatttctgttttcgttaggactgcggctcttggagaaagcgtgagcagggggccaccgcggtctccgcgcctgtctgcaccct

SEQ ID NO: 41055 - DNA, 1148 bp, Homo sapiens
  chr4:156680200-156681348
  hyper
cggttgcgctgtagccgctgccgcctctgcctgggtcccttcggccgtacctctgcgtgggggctgcctccccggctcccggtgcagacaccatggtaagtgctctcagccgggtgcggcccgaacctcacccctcctcggccggcctggcagcgagggaactggccgcgcagccggagcttggctcgggggccctgggcgctcactgccggccacgggagcagcctcactccttgcccgcgcccagtcaggggaggtgggaacgccgcgagtcgtggcgggggcgatcggtgcctttgcttcccaggcgggtttgccgctccacaccgcagcttcctgagctcgggaaggggaggtgcggcggaggcgtggggtcttcccggctctggccggccccaccagtgtgggaggctgagcgccagcggaagggaaggctccgggttcgcgtccccgcgctgcccccgatgcccagcctctcccggagcggtgacaggtgaggagggtgggaagatagcgtgggggtggggcggatggtgacggggagaatccaccagggattggggggttgcgcccccacgatccgactcctttagtgcatagtacccctaagggagaggagtcaggggcggggtgaaaggttaagccagcgccatgggagcagaggcagcagcctcgcccccaagccgcttctcaggtacagcgggtccctgacgctcaagtctctccctgtccccgcagtacggatttgtgaatcacgccctggagttgctggtgatccgcaattacggccccgaggtgtgggaagacatcaagtaagtggccggctaccctggctgtggcccaggtcggcgcccagtgtgggaggccccccgcgcctcgcctggtcctcagcctgctggccgggtcgcgggcgcgcatccttggaggtgcctccgcgcctcgctcccggctcgctgcagctgcgctcccacgctccgggactggaaccaggaggggaggggcggctggggcggggctgcgagggcgagaaccgcggaaaggagcccctaggggtcaccacggcttcccgacccggcctgagcgtgggaacgcgctgccggcgctcccaggctcagcaggccgggcagctcccacgcgtgcagagcccc

SEQ ID NO: 41056 - DNA, 30 bp, Homo sapiens; identical to SEQ ID NO: 3645
  chr4:157892072-157892102
  hyper

SEQ ID NO: 41057 - DNA, 306 bp, Homo sapiens
  chr4:157892474-157892780
  hyper
actggaagccaagtcggcggcgagcagtttctgatcaataacaaagctgccaatagatgcggctctccgggcgcccctctcccccgccccaccccccacccccgaagggggagggggaagaaacaaggcgagggcgccgcggcgggtcccacgggccggggcgccggagcggggccggggggctccgggccgacggcggcccgggcgcaggcggagagaggccgcggggctcccgctcctcagcccggagcgcagttggccccgggttcggagcgccgcagcacggattccggcacctggcttgag

SEQ ID NO: 41058 - DNA, 29 bp, Homo sapiens
  chr4:157997158-157997187
  hyper
gaaggggacgatgccgtgacgttgctctg

SEQ ID NO: 41059 - DNA, 254 bp, Homo sapiens; identical to SEQ ID NO: 3648
  chr4:157997511-157997765
  hyper

SEQ ID NO: 41060 - DNA, 223 bp, Homo sapiens
  chr4:158141433-158141656
  hyper
cttctacacagcagccggagatcagctttgctgcatttggtccaggttggagcatctccgcagcagctgcaacagccgcacgaaggtagctccgggcggggagcgaggcgctgtcctcggtgctgaaaggccgaggcgcgcggtgggcgcgacagccccggagacccgaggtctcgcggagggacagcggctacgggccccgagctgtgctttctcagcgccg

SEQ ID NO: 41061 - DNA, 31 bp, Homo sapiens
  chr4:158141754-158141785
  hyper
gggactgcctgcccctctctgtgacttgcct

SEQ ID NO: 41062 - DNA, 37 bp, Homo sapiens
  chr4:158141844-158141881
  hyper
agaggagagagggagaagagagcgcgagagagggtga

SEQ ID NO: 41063 - DNA, 205 bp, Homo sapiens
  chr4:158142701-158142906
  hyper
tattcggcctattcgcgtgaataagagactcttggatttttgggcgctagcgcgcgcccctcctttccctcccggggcactgacactgttctcttgcttgctgtttgttctttgcaggggggctatttcctaggggcgccgatcaagaatacagtgcatttcgagtagggatggttcagttttccacttcggagttcagactgac

SEQ ID NO: 41064 - DNA, 258 bp, Homo sapiens
  chr4:158143609-158143867
  hyper
cggccgggtggcgtgggggtggggcggggaggcggtggaaagggggagcgctgtcaatttctcctgctcagttgcgcttccgcttaagttggagggggcgaggccgccaggggcgccgcggtcagcttgccagcccggcgcgctttgttctcaggtagctgggctccagcagaggcagccggggaaaaggactgggaagccgtgggatctggccgagtttgaaaatctggagaagtcgctgatcagccattttagtct

SEQ ID NO: 41065 - DNA, 30 bp, Homo sapiens; identical to SEQ ID NO: 3650
  chr4:159094019-159094049
  hyper

SEQ ID NO: 41066 - DNA, 30 bp, Homo sapiens
  chr4:159593504-159593534
  hyper
ccggcaggtgatggcgccccccgcggccta

SEQ ID NO: 41067 - DNA, 738 bp, Homo sapiens
  chr4:159690016-159690754
  hyper
cctcccgccggggttacgtgagcccggggcgggcggccgccgggccaatggccgccgccggggccgccgcgctcctcccgcgccgccgccgccgccgtggggctgcgggctcctcccgcaggagataactgtcagcgcgcgaggcggtggcgggccggctcagtcatatgaccggcagccggcggctccggcgccgagcagagttactcagtcgcagcggccccgcgctcccgcaaggctgggcggccgcgccgccgcgatggccccgccaccgcggccgccgcccccggctgcgcgctgagccgccggccccccgagcgccacggccggagctgcggcggcggcatcatggccccgaccctgctccagaagctcttcaacaaaaggggcagcagcggcagctccgcggcggcgtctgcccagggcagggctcctaaggaaggacccgcctttaggtgagggggcgccggggggcaattctggcgcgggacccgagttggcttcggtgctcgccggggaggggacgggtaggggaaagggaagggactgtccaggacggcgctgcctatcgccggcacctggtcccgggcttgtcagcgtggacgcgcctgatccgagtgtggctccggaccctccgtgacccttcctcccgctctttctccacaactcagggtccttccccatttcagagttctcttgtgttccttggggttcccgggcgtgcgctgtgcttggctg

SEQ ID NO: 41068 - DNA, 30 bp, Homo sapiens
  chr4:160025376-160025406
  hyper
cccccaggtgagaacgcggcggccgcctgc

SEQ ID NO: 41069 - DNA, 590 bp, Homo sapiens
  chr4:163085147-163085737
  hyper
tcactgaaccaggctgattctcgctcctcctccctaggcaggagctgctgccactcaacccgggggtgccccgcccccaccatctgacgtaactattttgcatatcaactcgccgagaggtgaggggccgcccccttgactgggcttctgctagagtcagctgcggcaatcggggcaacaaaattcaggcttaacgtcagcgtgggcatctttggacttcaggatgtattctcaaccagtccagtagaaactaaacgctttgacggtgctggagcctttgccttcgcggggactgccgtttctgcgcactctaagatcgctgcgggcacagctctggaaggaagacggggcggagagagggggcagtggagcacggagaggaccgagtgggaggcgggtggggaggagacggagaaatagaatgaatctattcaaccattcttgaaaacatctccaatccttttcatcttcctgcccaaactttgctgcctctccctgccatttggttatttgaacggatccgtatttggtgttcctactcccttccctcggttcacggagcctctggagggagtcgctgctgcagaaac

SEQ ID NO: 41070 - DNA, 30 bp, Homo sapiens; identical to SEQ ID NO: 3653
  chr4:163811945-163811975
  hyper

SEQ ID NO: 41071 - DNA, 1221 bp, Homo sapiens
  chr4:164252933-164254154
  hyper
agagttccctgattagaactccgatgattaaaagcttcgggtgtctatcggggcgcagcgccacactcgaagcgcccggtactgcggagcgcggctcgattgcagccgagaagcgcggaacccgcaagtgggggtgggcttgcgcgctggggtccgcgccgagggctactcccacctccgccagctcccagcccgacacctgccgcgggacccgtgcgacgctgggcgacgcgccaagcccacccttctccggctcatcccagccagttactccgcgaaaactccggtgcggccagagccagcgcctccagccagctcaagacacgtaaggaaaatgagcgggtgtgggataggcgaactcgggcgccttcccagtgcctcggccttttaaagagaaccggggtaaaggaaaacttggatccccatccagaaattccccgggagcaggtggtgggaaagcccgaactccgcgtagggtaccctctcctttcacccgcgtcgtccccatacccttcggcaggagcccgcgaacggtccggtgatttggagcaacctgcgacctgcctgcactggagaccccaccttggtcccccagagccagtttcggacactcgcatcgtttttcttcccctctcatccttcaccttgtcaatgagagatttcgcagaagtctctggaaaggcataaactcgcaacttaccctctttggaatttgtctttttcgctcctgcttattaaagaaggaagggtgggaatggaagggagcagagtggggaagatccgctggtatttctcctgctcagatcctaaagattgatgaagctaggaagagacgcctccttaaagccgaactccacctcatcccggatcacgtgacggcgtcccgcgagtagcgcctgaagctcccccaaccccacaaacacctcacaaaggtgcacacctcggggaagcattgcctaggaattttggaaagaaaagcaatccaacagaagccacacattattcgacacagacctcccgcgcaggggaaaggaagccctaatccccacagtcctcgactccggggaaggcagggcagtttcccgaggcttgaaaaagtcggtgccactgtgcttttctttgtttgcaggtcagtgccatcttgtggccgaagtcatacccggctggagagctcgagcgccagcccaaaccaggaatcaaagggctcgctgggaaacatga

SEQ ID NO: 41072 - DNA, 72 bp, Homo sapiens
  chr4:164264780-164264852
  hyper
tggaccggcaaaactcgatttgcccatcaagttaacttggtcggcctgggacccgaggccagggtgaaggga

SEQ ID NO: 41073 - DNA, 664 bp, Homo sapiens; identical to SEQ ID NO: 3656
  chr4:164265192-164265856
  hyper

SEQ ID NO: 41074 - DNA, 30 bp, Homo sapiens
  chr4:164465774-164465804
  hyper
tttatgaatccccacgcagaaatgcagaag

SEQ ID NO: 41075 - DNA, 633 bp, Homo sapiens
  chr4:165304243-165304876
  hyper
gggataaaacttgggcgtctctctgcctcgactggtcactccacttcctggagctccagaaactccctcagcacctggataactgcgacactcacccgtgagcgcaggaccctcctggcgtcttaagtcccagctctcagtcccgctggccgcaggaacacaatgacatctctcgcccaggagggcggttgcagggaaccgaaatcggacacaacagttgcagtgaacccgactcagggttgagcgcatcagcgctaaacccaagacaaaggctgccctgtgtcttccgtactcagcgctctcctttggtaatcggtccccgtccccttcaagcccacactaggagcgcgtgagcctgtgaagtggctgtcatcgactccgcgctttccgaggggtgcggctccgtgactagtaccacgccggtgtaaacagcgcgccgcgcactggggatccgccagaaacggcgcgcgcgcagagcgggcgctgggggccaatagtagcaactaccccaggctgcgggctggagccgcctcctctcaccagagaggcgcctactgggcgagcccgccgcccgcaggttgggtggcagcacccgccgcgaaccccagccacgctccccagtggacccaccag

SEQ ID NO: 41076 - DNA, 704 bp, Homo sapiens
  chr4:166299999-166300703
  hyper
tgtcatttcacctgcgtcgtcccggacgccatttggctgttgacgtggttccgagccagcaaataacgccagcagccctcccagatccacgccggcccgtctctccgccggccccctcctcgcagtggtttctcctgcagctcccctgggctccgcggccagtagtgcagcccgtggagccgcggctttgcccgtctcctctgggtggccccagtgcgcgggctgacactcattcagccggggaaggtgaggcgagtagaggctggtgcggaacttgccgcccccagcagcgccggcgggctaagcccagggccgggcagacaaaagaggccgcccgcgtaggaaggcacggccggcggcggcggagcgcagcgatggccgggcgagggggcagcgcgctgctggctctgtgcggggcactggctgcctgcgggtggctcctgggcgccgaagcccaggagcccggggcgcccgcggcgggcatgaggcggcgccggcggctgcagcaagaggacggcatctccttcgagtaccaccgctaccccgagctgcgcgaggcgctcgtgtccgtgtggctgcagtgcaccgccatcagcaggatttacacggtggggcgcagcttcgagggccgggagctcctggtcatcgagctgtccgacaaccctggcgtccatgagcctggtaagggcgctgccccctgacag

SEQ ID NO: 41077 - DNA, 32 bp, Homo sapiens; identical to SEQ ID NO: 3659
  chr4:166414896-166414928
  hyper

SEQ ID NO: 41078 - DNA, 30 bp, Homo sapiens; identical to SEQ ID NO: 3660
  chr4:166513760-166513790
  hyper

SEQ ID NO: 41079 - DNA, 1909 bp, Homo sapiens
  chr4:166793755-166795664
  hyper
cagcttcccttcctgcgcccacgtgagccatagcgccagcccatcggcaaggtctcagcgtttcctgctgctgcaatctgtaactcgattttggattttttttttaattgcagttctgaggatcttagttcttagcaaaactttgttggttaggagaccaacagtagtctgtttattttcttaccaaaatcgtgaagactcgcacacttttcctccattcctgcgctgctctaaggttaaacagcagcaaaggaaagaaatacacactcgctgtttatttggggggaggggaaatatggatttgcagctaagttatcacgatccttcgctccacccccggtctggcactctcaactgacacgtacatcatctattaattgctgtttgcgtacacagatacataatatattcatttttatctttggtaaaatataaatggaattgtcagcgcgctcctgtctgtttgtttgtctaaggctatcaaaagaagtcaagagaggaggctgtggtccggatcctgaccctgattgtatgaataagtaagcaggatgcaagtgattgggttagatggtgcgaatatttttttttttcaagttaggaagagggtaaaaagacaggctggcggggggaaggcaaacagtgcatccccaaatcctcacacttttgctctcttgcagtcagttgctttgctggcttctgcaggcttttaaggtctcgcggcgtagaaatgcctggcccccacccccttcctcggtctcccctttcaattcagatgtgctgatgtgcagaccggattcatcttctcggagctgcggcggcggctttgggctcaggcggcggcggctcgcgctcggccgcggagtcctggcagcagcggggacgcggcgcgggagtccgagctctggtggcagctgagcccgcggggcgccgctcgccgagccgcggccgcgggaagttcggcagccagaaggacgacctggcaggctgcgagcgccagcgccgccagagccgagtttgcctgcgccctccccgcctccgagtgcagagttccttacctgccctccgcccacccgtgggcccctagccaacttctccctgcgactgggggtaacaggcagtgcttgccctctctactgtcccggcggcatccacatgtttccggacacctgagcaccccggtcccgccgaggagcctccgggtggggagaagagcaccggtgcccctagccccgcacatcagcgcggaccgcggctgcctaacctctgggtcccgtcccctccttttcctccgggggaggaggatggggttgggaacgctttccccgaggatgctcgtgtggctggtggcctcggggattgttttctacggggagctatgggtctgcgctggcctcgattatgattacacttttgatgggaacgaagaggataaaacagagactatagattacaaggacccgtgtaaagccggtaagtggctctccaggttgggacggtggcgcgccgggggccgctgcgctgggtttcccatgggtggcggtgggagctcacctgtttccttccctcccgcgtcagcccctccgccgcccctccttctctccccctccttttccttcccttccccacccgcaagtggcagccgctgcggccccagttgactagagttctgtgccagtgggatccactgccaagctcccatctcccagtttgggaataaggtcctagagtttctgatccctctcccctcccccagcaaaacgaaacaagtcgtaaatatagcttgctgctgtaggttttaaattccaacactcagcgggctttatgcatatggaagggacaccgtcttctttcccctctcccccagggcgcggtttcccagcgcttgttcgagagcgagttggcagggttc

SEQ ID NO: 41080 - DNA, 29 bp, Homo sapiens
  chr4:166795963-166795992
  hyper
aggtccttcccctcccttctacgcctctg

SEQ ID NO: 41081 - DNA, 40 bp, Homo sapiens
  chr4:166796117-166796157
  hyper
cggctcgtgtccgggcttcgggagctcctggttccttgct

SEQ ID NO: 41082 - DNA, 314 bp, Homo sapiens
  chr4:168154955-168155269
  hyper
gaaccagctgggagggggcagcggaactgtgaacttctccagcagccctgcgccgccgcgtttccctaaacccctctcctcagaaaacggagcccactccccacccacatccggcggccgcggcccccgcctcggagcagcgcgcgcgtgtgcccggggatgtgggtgcgcggaacttacgtctcggaatttgttccactgtccgacttccttgtcatactgagagattgtggtgagccattgtttatcatccagaaaattaccgccgtccgaccgccccccggctgcagccaccgccgcggcagctgcgagag

SEQ ID NO: 41083 - DNA, 300 bp, Homo sapiens
  chr4:168155478-168155778
  hyper
tttacccccaaaagccgggcactcacacacacgcagacccagaggaggagaggtgggtataaggaagcaagccccagccgcagcagcccgagcgggcacaaaaccgcttcctggcacatcaccttgttgtgagccagcactgtgctcgcagctcctgctggaaatgcagccctgctctgccaactcgctgctttctggagctgctgcacgcgccgccgtctcgagccgtccactcagctccctgcgcccggcgcgctccccccatctccaccctcccttcgcgcgcggatctccagctta

SEQ ID NO: 41084 - DNA, 30 bp, Homo sapiens
  chr4:169401168-169401198
  hyper
ggaaaaaagggaagcggcttgctgcctgtc

SEQ ID NO: 41085 - DNA, 30 bp, Homo sapiens
  chr4:169402283-169402313
  hyper
aaatggagagaaatcgaaaccggaagttct

SEQ ID NO: 41086 - DNA, 83 bp, Homo sapiens
  chr4:169552542-169552625
  hyper
gtggctttagaaatcgccggtggaacttgcctgttaccttcttacaattccccccgcccctgggcaacgcaaaagccgtccta

SEQ ID NO: 41087 - DNA, 116 bp, Homo sapiens; identical to SEQ ID NO: 3665
  chr4:169552931-169553047
  hyper

SEQ ID NO: 41088 - DNA, 563 bp, Homo sapiens
  chr4:169752942-169753505
  hyper
acttaaattctttcccgttattagcacttctcgatcgttccaggaaagcccgatttgtagcttggctgccccaggaaggggcctgcgaccagaaagatgcaaagggcgggacaaggttacgagtgggtgcggggaagcctccctaacctgggggccgcgtcccagagctgcgagccacgcctcctctctcccgcccgccgcgccgccggactcttattttgaagggcggcgggtgaaggctcggagcctcctgagtcacccggcgggcgaggtataaagcccgatacctgccccgcgcccggtccgcggagcccgctgcagctcccgctcgctccggacgcggaatcgggcagcagcgggaggcggcccggagagccgaggtaggcgcggggaatcggccctgaggctggtggaagaaatgtgtgaattaaagggagtgcagcgtgcagggtgggccgcgagtcgggagtgcagggctcgggacagggtgggggcggggaggacaagagactcgtcagcgcactttccacccggccggttccttcccgagccctctccctccc

SEQ ID NO: 41089 - DNA, 768 bp, Homo sapiens
  chr4:169753535-169754303
  hyper
cggagctccagataggaatgtctgcatcatcttggcagggcccagacgggagaagatgctctgctgccacggacgatccctcccgctctcctaactcttctctgaacacctcgcacccccacggccccccgcccctctcttaatcttggccacgctccctgaggggtcagacctggggtgggagagcagagaaagcggggctggcagagacaggggtgagggccgggagaggcgatgacatcattccctggcagctggcggggagagggtggggacggaggggtccccccgacctgagccgagccctcccttcccaagcccatcctcctttctttgggatggttcaccccacctgggcgccattcaaaggaagtttgcgcgtaactcggggcgtcctttccccggccgggtgctgtgcccggcccgcagtcggtgtttcttctgggcctgggggcggcgtggagccggcggctcagtcccctcagtcccaggccttggcagccgctttgttcacgccgggcgcgggccgaacccgaacctcagctgcagcactggcagcgcgcaccggccacgcgtgggttcccggccacggccgggccaacaagggagggtcccgtgagcagccaggctggccctccccgggcctgggtgagctcccaaagctggagcgcagggctctaggccggccccgccccggggctgggggcttcccgcccgtttgtctcattttaacttttgggggcagctctgtcccgaatggtgagtggt

SEQ ID NO: 41090 - DNA, 30 bp, Homo sapiens
  chr4:170191343-170191373
  hyper
gttcttgacaaagccggagcgggggagccc

SEQ ID NO: 41091 - DNA, 74 bp, Homo sapiens
  chr4:170192273-170192347
  hyper
gccacagcgccttccccgggagcgggcgcggcacctctcggagccacccgccgccgcgccggcctcccgcgctg

SEQ ID NO: 41092 - DNA, 41 bp, Homo sapiens; identical to SEQ ID NO: 3669
  chr4:170192664-170192705
  hyper

SEQ ID NO: 41093 - DNA, 30 bp, Homo sapiens
  chr4:170533366-170533396
  hyper
ccacacctgacactcgtcttcagttgatac

SEQ ID NO: 41094 - DNA, 283 bp, Homo sapiens
  chr4:170946851-170947134
  hyper
ttcagtagcgaggcggcggctcgcagcacccacagccgcccgcactcctgcggcatcaggacacggcgccctcccgacgcggaacccgcattcacgttctccggagccctggccagcgcacgctcctccctgtccgggtaaactgaggcacagcgatgagagagatccagagcccagcgaaagcccccacggctgttcggcgtccccttcccccacgacacctaggaggctcgccggcagctggcagtggattccgcgctcctcgccctcggaaggttacggt

SEQ ID NO: 41095 - DNA, 864 bp, Homo sapiens; identical to SEQ ID NO: 3671
  chr4:170947173-170948037
  hyper

SEQ ID NO: 41096 - DNA, 772 bp, Homo sapiens
  chr4:170948089-170948861
  hyper
cgctgtaagtcttaaacgtctcttaaagcaaagtccacagatggaagagtctggaaaaaaacccagcgggccgttccctggtgactttctgagtggtggggttccaggaatttttttttcattttctttaaaaatattatttgtaatttccacgttttttctaatgaaccataagttgattttttaattaaaaagtagagtactctaaaattattaagtacctacagaagtttcgctacacgatcctgcaatgttagtggcttcttctcctccttatctccctttttttttttttttttttaattttaaaagagaacagagactctcaatttctggggcgggaccaggctccttcccccggctttttagtgcccgccctcttggccacaccccactccggcctttttactcccgtaccgccctcttcccggtgggttgctgcgaaaacccggaaaggtggactttccacattgacgctcccggcggctccggcagccagactgggcatgttccgccgccgggtcaggcattgctgtgccaagagaggagctttagcaactctcagtctctctgctcctctctgttcctggcaaactggcaaagtagtgcctctgaccccacgccccgaggtcggacctgcagaagtgggtcaggacccgactgagcatgctccgggcagtgccaggctgccgcacgcggctgcatctggttgcccaaggttgatgtagccgcggtctctcgtcacgacatcgaagctcgggaaacggatgga

SEQ ID NO: 41097 - DNA, 30 bp, Homo sapiens
  chr4:171010713-171010743
  hyper
ccttagaggctgtgcgaggaatgccccacc

SEQ ID NO: 41098 - DNA, 30 bp, Homo sapiens; identical to SEQ ID NO: 3673
  chr4:171011084-171011114
  hyper

SEQ ID NO: 41099 - DNA, 195 bp, Homo sapiens
  chr4:171011380-171011575
  hyper
ggaccggaagtgcccgtgatcctaatcctcgggaaccatctggcggcgacttgggtccactgcagggggctcccgagctgcgcccagccgggagcggccccaccctcgttcccgcgcgctccgctggcctcctctcagtcactgggactgtgcattttgcccgctcagaccatggctatgctaaatacccatctt

SEQ ID NO: 41100 - DNA, 472 bp, Homo sapiens
  chr4:172733675-172734147
  hyper
catctaagtccccattccttccggagttgtgagctccagatccaagagtgcccagtgcacggtgctgggcacgctgtcccttggcgaggctgccacaggttcctgagtgtgcggtcaggggcgttggtgcattgatacgttaggcggagggaggagtaccatctgccagagtcttatctcgagtcccacgttttctggccatcgcggaggagtgtgcgaggacaggtagccctcgcagtgacaaggcgcgcggagtgcggtcgtgcaaggcgggggaggagcggggtggccctgccgaatcttaaccggggccccgggtgtttgcagacccaaataaagccgccttgggtctccacggtgtcctccagaagctgctgcctgagaactctgagcctcagctctgtcttgcttcgggatcctcttcctcctccttccccaccccctacctggcctgaacggcggaacgcgcggc

SEQ ID NO: 41101 - DNA, 203 bp, Homo sapiens
  chr4:172734188-172734391
  hyper
cgcctccacctcccgcagccgccgcgccccggctcgccgcgctcccgccggcaccatggaggaattcctgggacaaccgcctgcagccggcgacttttccccaggaatctctggcctggcgccctttgggtgagatgacggggtgctggcatccctgtcggtcccagattacccggaaaagccctggcaggtaaagagaggac

SEQ ID NO: 41102 - DNA, 268 bp, Homo sapiens
  chr4:172734591-172734859
  hyper
ggggagtggggcgcgggcgaccgtgtgcagccgcggcgcatctccgccttccgctcctcctcgcagcgccctcgtccgcttccaagcccagcacagacttcggtttctccgcctccatcccctttacgagaagaggagatcaaaaaatattgccctttaggtgctcgtgatggtcctgtgggttcgttcagttgccagaaaagaatggtaacatgaacagcggagcgtgagagcgtcaccgggggaagggacgagattgatgggcaga

SEQ ID NO: 41103 - DNA, 122 bp, Homo sapiens
  chr4:172735016-172735138
  hyper
cgcgcgagggtccggcacttcgtggacctccatccgaaccggagttctgcccggatcccgagtccctggatcccggtggagcccgccggcaagctggctccggagggagttgaacttgagtt

SEQ ID NO: 41104 - DNA, 31 bp, Homo sapiens
  chr4:172735202-172735233
  hyper
gttccaatgtcaaaagcggacacttttcttc

SEQ ID NO: 41105 - DNA, 1516 bp, Homo sapiens
  chr4:174089921-174091437
  hyper
aggagggaggggagagcggtggcggcggctgcgccgggctgtgagtctctcgccgccggaggaagatgaggctgaagattgggttcatcttacgcagtttgctggtggtgggaagcttcctggggctagtggtcctctggtcttccctgaccccgcggccggacgacccaagcccgctgagcaggatgagggtgagtgacccgcccggccccctccggcggcagcgaccggcaacttgttttgtttgcccgcgtgtggagggagcaggggcggcggggtcgcggcacggcgtgggcaccgcagctccgcaggtggtgctggcgcagcgcgggccgagggggtgccgagccccgcgcactccgacctccctggccgccgccggcccgccccctcgccgccccttcctccgctcttccccgccccgggctccgtcgccgacacccgcgctgccgcggcagcggctcgggcggccgctctccgcgccgggactgcgggcggagcgggcggagagccgggtccggggggctgcggccgcccggcgtcccgctctggggggccgggaccgcagcgctcacggcccggggacgcggggttggtccaggctgcggcctgtggcgcgtgcaggcctgaaggaggcgagatgccgatgccgccaccgctggtccggtggaccaggccccttggtccagcctcccctcccgcagccgcccgtctgggggtgttcgcagccccgggctcccccggcccgcccgccggggagtgggagggcgatggcgccccgcctccggctcttacggagagcgcgcctccccctcaactccggcggcggggagccggggtgcgatgcgcggccgaggcctcgcccggaccgccggtccccctcgcgtccctgggcgagggaggggcggttggccggagatggcggaggggcgtccccgccccgcctgcccgccgcccccagccctcagcgcctggggaagcccctgctgtggcagtgctcgggcgctatccgggggaagaggagcagttcctcttccttggctgcggcagggctgcttgggccggaaaactaacttgtgtcggcgcccggccgccccgcgccggctgccggctagctcaggccgacgccgaggggagcggcggcgcggagctcgcggcggctccgctgggacgcatttgtctgccgcccagggcgcgagtgttagcgctgacattccttggatttggagggtttagtcaggcgcctcggaacattagttacccggagccgcgccgcgcggggaagggaccgcgggcactgcggcttccctgacccggcagcgggcggcgcgcaccggcctcgcccccgaccctgacctgcttccccccggatgaaccgttgcaccacctgcttcctcctccccgctgggacagccaactgggccggctgccagtgggggtaggagagggtatgaggggctcacgaccgccgaggcggcggggctgcaggaggagtcgagtcgctctctctgttgta

SEQ ID NO: 41106 - DNA, 30 bp, Homo sapiens; identical to SEQ ID NO: 3679
  chr4:174291092-174291122
  hyper

SEQ ID NO: 41107 - DNA, 30 bp, Homo sapiens
  chr4:174293367-174293397
  hyper
ggagatctggctagcggtaaatgaataaca

SEQ ID NO: 41108 - DNA, 267 bp, Homo sapiens
  chr4:174415416-174415683
  hyper
ggctcttcttcccccgaatcaaaacccactgtaaacaccgcgaagaaccaggaaacttcacggctttaatcatttcctttccccaagctccatgtggcacacaggacattccgttttcctttagggttgccgtcatcctgcgacaggtgcggaagaagaaaaaagcaaatctatgtttccaaagagcggaggaagcagagacaatgtgccaacacggggtgcgctcttcacctttacgctccactcggagcaagcaaggaaatcctc

SEQ ID NO: 41109 - DNA, 30 bp, Homo sapiens; identical to SEQ ID NO: 3680
  chr4:174427131-174427161
  hyper

SEQ ID NO: 41110 - DNA, 161 bp, Homo sapiens; identical to SEQ ID NO: 3681
  chr4:174430392-174430553
  hyper

SEQ ID NO: 41111 - DNA, 280 bp, Homo sapiens; identical to SEQ ID NO: 3682
  chr4:174430793-174431073
  hyper

SEQ ID NO: 41112 - DNA, 367 bp, Homo sapiens
  chr4:174437943-174438310
  hyper
gggttccgactccaccgcggcgccgagggggccagaggctcccagttcttccccgcatagttcgacaaagccctactttgcttccctgggtctgggatctcaacgtgaagggggccgagagagcggtgataaggtgctagaaaggaaacggcaagaggaaactaaaaaagtggagagaaattttgtgcgccgtagtgcttagcaagctggggaaacgaggagaaaacgagcaaagtctacaggggagggagagagggaggaggcagggaaggagaggaccacgaggctcccggcgcccaggccgccacttgggaggtcccggccccaaagcaggccgggccaaccgtccccccgggaggctcggggc

SEQ ID NO: 41113 - DNA, 820 bp, Homo sapiens; identical to SEQ ID NO: 3683
  chr4:174439797-174440617
  hyper

SEQ ID NO: 41114 - DNA, 41 bp, Homo sapiens; identical to SEQ ID NO: 3684
  chr4:174440652-174440693
  hyper

SEQ ID NO: 41115 - DNA, 588 bp, Homo sapiens
  chr4:174443466-174444054
  hyper
ctgccctgacgtcagcgaggctccggccccgccgcggcaagataggcgagcgcggccgggcgcgggtgcggcactaatcactcccagatgtccctaatagcggagataaagacggacagagcggccgggaataaatttgtaatcagggctctaccatctgatcatcaaagcggcccaaatgccgggagaatttgaagggaatgcgtgtgaggggggtcgcttgggggaagaggtgagggtgcacttcgcgatgggaactggcttcggtagggtagagcagggagaacagggcgagagatctgtaagttcggtgcacgtaagtcggatactcggtgctctttaacctccattagccctcagaccgaagccgtttagcggttccaggctgattggagctgcgcagttgctgtgcgggaagcacgcgttgcgcagcggctgggtggtaaggcggcgcgatgagaactgtccggcccccggaaacgtgggattggtttcctctcccggagttctcccctcccccttctttctaaacatttaaaaaacacgtagtccgtctcccccaacccccattcccggtagacttaatcc

SEQ ID NO: 41116 - DNA, 389 bp, Homo sapiens
  chr4:174450337-174450726
  hyper
agcggctggcggcggcggcggcagctgcggcggcggcggcggcaaacgggtagccctcgtggtgcaccaccgggtggtggggaaaaccacctaccagactcatttcgccctccgcgcccctccacgcgccccagcgtgcgcgcagccccgccgcgccctcggcccgggcccctgcctcagcgctcggcgtcctcccccaccccccaccccccagcccccgggcgcccgggcccgcccggcagccgcagagggggctgctgcagcccgggccccgtccccccgcctggccagccgggcccgcctcagcagcgctgcggccgccggctccccatggggcgcggcgagctggtcctggcaccgtgcgcccctggccgccgccgccgccgcct

SEQ ID NO: 41117 - DNA, 724 bp, Homo sapiens
  chr4:174450751-174451475
  hyper
cgcgcttcggctcctgcttcccgggctgctgcgcggaggcagaatcctctcgtgctcatacaaaggtgccggggctcccgcgaggctggtacgcggagtctcgggaatccaagcccgggccgcggtcctggcaccgaagctaacccggaatccaggggcgagtctgagccgcggctggaggagccggtccagctgtgccggggggcggcggggtcgactgctcactgcaaagctacctccgtgcgaccctccccttcccgcctcttcccctccccccaccagcccgatctgggttcttgggcgcttattgttttaatgaaatttttggttgttgttgttttggtccttaaatgtgattttagctgcgagtaacgtgtcctcgctcctctcgcgctctctcggagggttttcagagaggtctcagtgcatccattttctcagatcctctcctttcggggcaaggatctggggccctgaatgagccttggagctcgaagaccgcggctcgggctctcggagggctctgcgcggtggccgaggaagctccggggtgacggcggtggttctcctgggctggacgacgtgaggggagcaagcggattttcccagcaagatctccatgtacagctacatctttagggccgctcgggttaatatatgtcgtcagaggctcctcacgccaatcccggggcggcaggggcggcgcctcgagctctcggcaata

SEQ ID NO: 41118 - DNA, 102 bp, Homo sapiens
  chr4:174451939-174452041
  hyper
cccgtttacaggctcgaaacgccggtctcagtggctattgagttacccaccaagttaccccggttagagctgtttggggtggctcacgttattgcggcaaac

SEQ ID NO: 41119 - DNA, 376 bp, Homo sapiens
  chr4:174458998-174459374
  hyper
actctaggcaccccacgattagctgagtgatctagggcaaggacctaggcgtctctaagtcttagtttccccatctgaacaatgtggataatgacacgtacctggggtgggcaggctagagtaaatgggaaaatcaaagcgccagccagagcgggtcgcactgttagttcctgtattttctcctcctgcctctggtttcttccgttccgttctagctgcctgaagacccagcccgacagcgatgcctgtcagcccgcgtcgcccaccagggcagctgctctcccaactcgcatggggggcaccaccccgcctcggtgccctagagctgagcgcagccgcggctccacggggatcgccagggcctcagccctcgcgg

SEQ ID NO: 41120 - DNA, 750 bp, Homo sapiens
  chr4:174459527-174460277
  hyper
cggttccccacacccaggaggccggttctccgccgctcaggctgggagaggtcaccgctccgggcagggtggacccccagctccgtctcggaggacctttcgccggaggcgagcaggaaggggttaaccatgagcctcccaccctcacctcccagaccctggtgccgggctaaggcctccgcttccctcctgaggtctcattaggaaaccctcaccgctattttcaacatttcctcaatcaagtgcctttaaatagagctgcacaaacagattggcggcaaaagcgtagatcttgtcacgattgagaccaatccagtatttcagccttgtttgctttgcaattacgggttggcttgtggctacggtgccaccggggcaaatctgcagccgctcgctttctcctctgcgctccgggcgggtggaggaagcgacccgcggagtcactgcagggaggagagggggacgcgcgcggggggaggcggcggagggcggaggagactcgcttgcaccccagggccgcgggcacgcagagctgtgttgaaggacatacttttcaggttcctgacagtcactgagctatacgcaataataaagtgcgtgattcgcgtgtggaaaccagtgtcgtgtccttaccagcttccttttctgtccaccttccctctctcttctacctccgtttcgcttttcttcagtgcatgttagcggtttgctggatttcccttctccctcgctgttcaactgctagcatga

SEQ ID NO: 41121 - DNA, 382 bp, Homo sapiens
  chr4:175132784-175133166
  hyper
tcagggaagtgaccaccactacgctctcagctccgcaagtcgctggacagtcaatagcgctcacacggtgtctaccggatctggcacggtcaagacacaggaacagccgtactttcctgcgggtaagaggcttttcttttgtgcatcacgtgcagaagaagccactccgaagtgcaaacacctttctaaagttttcagtgcttcctaaaatgcagacatcgacgccttgctgagttatccgatcctttgatgatcaaataaaattaaggccagctccctgctgtttgatctgtggctcagtttctctaagggctgccgcgggttccgcaaagactcactccagaatccccagctccctcgcgtcagcgaatgtcccgctggt

SEQ ID NO: 41122 - DNA, 30 bp, Homo sapiens
  chr4:175135134-175135164
  hyper
tcctccgcgttttccgggtctcttgggagt

SEQ ID NO: 41123 - DNA, 30 bp, Homo sapiens
  chr4:175135750-175135780
  hyper
gtgttaaactggtacgcgggtggggcaatt

SEQ ID NO: 41124 - DNA, 30 bp, Homo sapiens
  chr4:175135982-175136012
  hyper
ataattaagcgagtcgtcaggaaattgctt

SEQ ID NO: 41125 - DNA, 30 bp, Homo sapiens
  chr4:175137235-175137265
  hyper
aaaacagaaaggtcacgttactaccgagtc

SEQ ID NO: 41126 - DNA, 78 bp, Homo sapiens
  chr4:175137709-175137787
  hyper
ctcgtctctctccagcgtttctctaagtccgagcccccatctctcccagtcctcccggctcagcgaggaattcctttt

SEQ ID NO: 41127 - DNA, 707 bp, Homo sapiens
  chr4:175138121-175138828
  hyper
agctttgtgtgacctcgtgcaatgtcactttaacctggatagcgtcaggtttcctcacgcataaaataagatcagatgatgccctcttggattctttgactgcaggacaatcattaggccatagtgaacagatgcgcttggttgccagaccgcgccctttgcgggtctatcaaaagggcaagcgcatattctggagctgtctcggagacttggacagaaagattcgaggcaaatattctaggctgggaaatttcgcgccgagcccccccctcagttagcctgtctaaaggctggtgtggccagagcgaggcagagagctctgcacctactgtcggggctgacaatgatttatgcgcttgtgacccacgtagaccataaacctagtttgctagacgtacagggaactgcgccgcagttaatgcagaggacttatcctctgacctgcaatgtctccccacctggtgctctacagctccagagagcagggatttcagcttttcctccctcattggatccaatttcaatcccctcggttaactgaaagtgtgttgacttccacccagccggcaggaccctaagggcgcctggagcagtctggtgcgggtcctggctgcagcatgcccagcagagctccgggtgcaggaggctgcaaagccaccgccgcgtccaggccccttgagcggaggtgggaacgatccgccttagag

SEQ ID NO: 41128 - DNA, 114 bp, Homo sapiens
  chr4:175139066-175139180
  hyper
aagcgcttcccttgcggtttaccgctctccgcaggctgcttctccgaagccagcggtggtagcgcccactcggttgagcccacgcctccgccaggcagcgcctccgccaggcag

SEQ ID NO: 41129 - DNA, 464 bp, Homo sapiens
  chr4:175139428-175139892
  hyper
ctttacaattcacgacgttactaccaactttgccattgagtggttcctctccctgcccgaattcctggccatcttcgttccagagagcgatgcaatcatggccttgaaaccgaacggggcgtaacgtgccattcctctccagctcccgagccccactcccacccttgccgttgaaactgtgaaaaagccgccaaagtttgggcacccagcctggcagtcggaagacagtgagataaagaatgcgatagtaagtccttaagtgcttcctagagataaggtcccggaatcctggaaaaattcagtctggcctccctacttcagcaagtcgcctcctgcttctgtcagccccctccccacacacacctggagggagaggcggtggccacaggggtagctggggcagaccctccgctcctccactcccggtggccaggggtcctaaggccacgcggctggctttcttc

SEQ ID NO: 41130 - DNA, 30 bp, Homo sapiens
  chr4:175204112-175204142
  hyper
agctagcaatccatcgtgatcttaactata

SEQ ID NO: 41131 - DNA, 30 bp, Homo sapiens
  chr4:175204864-175204894
  hyper
atttctgttgtttacgattcgctatagatt

SEQ ID NO: 41132 - DNA, 30 bp, Homo sapiens; identical to SEQ ID NO: 3696
  chr4:175205407-175205437
  hyper

SEQ ID NO: 41133 - DNA, 30 bp, Homo sapiens
  chr4:175443228-175443258
  hyper
gaggagaggaatcgcgggcctgcgcagctc

SEQ ID NO: 41134 - DNA, 30 bp, Homo sapiens
  chr4:175443554-175443584
  hyper
gccctgagccgcgccggtcaccagcgccac

SEQ ID NO: 41135 - DNA, 30 bp, Homo sapiens
  chr4:175444081-175444111
  hyper
gtgagttcccatctcgtaatcagtggggtt

SEQ ID NO: 41136 - DNA, 893 bp, Homo sapiens
  chr4:175749937-175750830
  hyper
tccgaaagtgtctcacgtgggccatgatacggagagatattcacgatcctgaaaatagtcttatccaaggcatggggaaccagaaagacagaatgaaaatgtacaatctaaccccgcatggtgttggtgtagactgatgcttgggaagcttcagcaccttagacagctccccgcagtatgcggaccccttctcagcattgagcagaagtggagagtcacagtgttataaatgtgcaggtgatttttacagtgaaattacaaaaatgagtgagatgaaatgtctgaagtgcctaggtgctgggcaacagttctctaaagctccagcagcaaaggaagaatgttcgttcttccctgactgagacccaggattggaggaagaagagcagcaacagccggaaagaggacgcctctccacctgctccaagcgccgcccgccggaatccagctctccaccttgggttaaaacccgagacccggagcgcggcaaagggaagcgggggtggggccggacaacccggtcctgtcgaccaatcacgaccgcacagcgggacggagtgacaggccacttacgacggtaggcggggcttagcgcttcaccctttaacaaaacccaaacaaaccaaacggcgactggagcgaggtgggcggaaaaagccacctgggaaagtcagcggttttgtggattaggtagtgtaaccccgcaggagggaccctttagtattcccttccgggaaaaggcacactttaggtcttctcggatgtgacactgtctgttacactctacaccgaaatacaagagtcagcagtaaacccagaccctggcggagggctggggaagagaagacaatgtggtgcgtgaacgcccgtggaacggaagaaccagctgcttctag

SEQ ID NO: 41137 - DNA, 30 bp, Homo sapiens
  chr4:175846410-175846440
  hyper
gtgttaatattggttctttcattgtgaaac

SEQ ID NO: 41138 - DNA, 80 bp, Homo sapiens; identical to SEQ ID NO: 3699
  chr4:176922587-176922667
  hyper

SEQ ID NO: 41139 - DNA, 967 bp, Homo sapiens
  chr4:176922729-176923696
  hyper
cggaccctgcctggaaacttgagcgaagctgaactgcgccgaactccaccgtccagtgacccgagccagtgtggacgcccttttaatcacgctgtttacccaggtggaatttaggaagaatcagccttcagcctcaacctcaaaccttttgtgcaaatgggcacttcgtttggaaagggactagaaattgtccccagtctggccctgcaccagcaccttcctctgctcaaacctgtacaaagtggaagttttaggaagtttccatttctcgtgccccgtttcaacttgctccccaaagagaacatgaaaacgtgggaactcgggaggacagagatctccctgtaatcgcctcgctattcggatcctgggtctcttagtctttctttatttcccaaataccgcccccagcacggtagaccggacccccaggcttgggtcctggggccggcgcagaggatcagcgcccaagcgcagccccccaccctcccgacccactgtaaacagtcgggcaccctccctcgcctccaggtgccaccccatcgccatcgcctctctcccagaaaaaaaagtccggagacaagagggcggggggcgggggacgccaggcgcggggggaacagagctgggaaggacgcagtctgaggccgaggaacattcattttctttctataatgcccattcccgaggccgagcctttgggcgaggtgtacgcgcccgcccgcgcactcacccatggcccgaggtcctgcttctctgcagtccccagaggagagcgagtgaccagacgctgcgcggggccaagttctccaagccgcgctgaggctcctcgcgccctggcaagtgacagcctcgcccctcccagcggagacaactcgcagggcgcctggcgactctgcgggcgcacagacccctccctctttccacctgcctcctctgcgagaagcccgttttcctccccttcactgtg

SEQ ID NO: 41140 - DNA, 57 bp, Homo sapiens
  chr4:176986728-176986785
  hyper
ctagaaagtgcagactcgctataaaatgtgttaggtggtgagaacgctgatggttca

SEQ ID NO: 41141 - DNA, 324 bp, Homo sapiens; identical to SEQ ID NO: 3702
  chr4:176986855-176987179
  hyper

SEQ ID NO: 41142 - DNA, 174 bp, Homo sapiens
  chr4:176987206-176987380
  hyper
cgctgcagccgcctcctcctccaggtaagaagccggtggggccgcagagataccaaggcaagctcaggattgatgtgggtgatgctggaactgtcgcggcgtcatgcgagaggggctctgacctccctgtgatcgcggaccagggtaatgtacgtcctgcagggctttgcacac

SEQ ID NO: 41143 - DNA, 100 bp, Homo sapiens
  chr4:177240752-177240852
  hyper
ccttaacttgctgccggtttcaagtgaaaataaatggtacataagtaatcaagaagtcgcagtcccagacctctgaccaaagaaccgaaaaaggacagcg

SEQ ID NO: 41144 - DNA, 30 bp, Homo sapiens
  chr4:177241836-177241866
  hyper
tggaggccacaggacggggttgtctttgtg

SEQ ID NO: 41145 - DNA, 1132 bp, Homo sapiens
  chr4:177713158-177714290
  hyper
gaagatttttctccaaagcagcgtgcactgagctcagtaactttggatcccacgtacacaagcttaaagcacacacactttcccccgcgcaggttctcgggtccgccgcagaccctaacgcaaactctcgggttctccgcaaaccctaacgcagacctaccgtggcctcgcccgcgtcgggctccgcgtccgagaggtcgagtccggactcgaaggcggcggcggcggcgggcgcctcgcgaggacccgggagcagcgcagcggcgagcagagaacacgccacagagaagaagcccagcaagtgcatggtggaaggaccgggggtgggggaccggtccgctggcgggggcaggggtgggggcgcgggcgcccctgcgaggccgcgggcccctcctggtccctctcccccgggctcctcccggcgaccccccctgggcgagccggaggcggcgggagcgggtccggggctccgcgttcccaactttgcagggcgccctcccagccagtgccggggaaaggcggcgggtgtcaggtaaaagcctcacaggaaaccggacatccgagctccccgcattcggagcccgcgaggtgaagcgagggcgagggaggacgccgccgcggtccgcgtcggtgtagctttttggagaggcggggcgggggacaccagaacaccccgcgatgttcagcccctccaaacccgccagagccctcgtccccctcctccctccccttccccgaagtgagaggagccgggccgcgggcgctgcggcgggggcgctggcggcggtgccgggggcgggaggagggcggcggggcggctggcggcggcggggcccgggagcgccgcggcgcaggatcctccagagcgcgccgggctgagcggcggcggcggcggcggcgggcgcaggggcagggcatgactgacgcgccctctgcctgcgcttatgtgagagaaagcggccgagggagggagcgtgccgagcccgggctgccctcccctctcactctccctcggaagccgtctccctggagctccccgtttccctcgcctcctccccggcggccccacctcccccggcccccctctggatctctccctccccgcccctgtcccctgcggggagcgggcggc

SEQ ID NO: 41146 - DNA, 103 bp, Homo sapiens
  chr4:178230843-178230946
  hyper
tcctccacgccccccgccccacgcgcgtttgcgttttcttaataaacccacagcaagacctagggcgggggtgaaccacagcgcatgcgccgtagggagcgac

SEQ ID NO: 41147 - DNA, 93 bp, Homo sapiens
  chr4:178364002-178364095
  hyper
atgagtgtaggtgaagcgtgtttgcttaggaccggattgattttagattttttttccattcatagcgtccgtcattttcgcaccacagctttt

SEQ ID NO: 41148 - DNA, 30 bp, Homo sapiens
  chr4:179699959-179699989
  hyper
tctgaaatacagtttcgctcagttcatgtg

SEQ ID NO: 41149 - DNA, 30 bp, Homo sapiens; identical to SEQ ID NO: 3708
  chr4:180978694-180978724
  hyper

SEQ ID NO: 41150 - DNA, 650 bp, Homo sapiens
  chr4:180978996-180979646
  hyper
agccaaaacaggtttacctaacgggaagcctggaagggctggcgttggagaagccgctcggaagcggggcaggtagcagagagccgcccgccggtctccgggtctacgcccagggctctttccagcccggcctttgggtaactggtgtgggggagggcggccggctttcaggtcgcctctcccgcaggtttgggagcccggtaggccgtgactgaaagaccgtagcaacagcggtcaattgccgttttagagctcattttggggcgaatggtagcagcagagccactgccgccctggctcttgtaggtgggtctggagtgtcacgtaggcaccccaactcgcgccgggggccgtggtccgcagactcccacttcattgccccggaggcctgagcccgccccgcccggctgtggctgcacctttcccgagagtcggggcagcggcggctcgaaagtggaggcagcctaaccgcgtagcgctgaaaccaccattcacaaatgcaaacccctgtcttctgtggataaacggtggcggcgcgcgtccgagcgtccccgaggggctgtggggagcccccggggagagcaggaaaggaagcggggtggcggtggctaggaagcgactgagccttctcgcccggccggcggaagagg

SEQ ID NO: 41151 - DNA, 1010 bp, Homo sapiens
  chr4:180979965-180980975
  hyper
aggaggaggaggaggggaagccggagagggaggcgcggggaggagggatggagccgggaggaggaaataaataaataaaacaatcacctccgcgccaataagagcgagggagagagcaagacgcgaccagagagccaccggggcccgctcgcgcgcctctgagaggctgtccgcgcgcgcgcgtgtgtgcgtgagtgtggatttgccgggactggagctggaaagttcaaactaaacgtgttgctctcgccgagtgccgaggccgcggcggaggctgcccaacttccccgggccaagtgagtggcgttgcccagcgcctttggcgaggcggcggccgctcggccctgcgcccggccgcggcggcggcggctccgctcgccccgggagggagcccgcggccagggctggactctcgccccgccacctccaccgactctctcctcagcctccgcgcctggcaccgcagcaaggtacgtggcgcttcctggcgcggcttcttccctagcacaccccgcgcggatttttggctgcctagattcttccccttcccggagtggtcatcatttgtcaaactttacctccacctcgcacatgcgggcggccgctgcagccgccctccctggcggcatgggctccgctcgctgatgggaaccgagaggagggtgggggggaggatctgctggcagcggtggttctcatctggattaagatcgtatttcggaataactcgcaggtcttaccttccgggggtgtccttcattatgatgttccctgtgatgctggtaatggttttccttgctccttctgcacggaaggacgtacaagtttgcaggagaaggtacatgaaaagcaggtgaagtttgcagccacttgactccaagagaggagtaaccctttctttgcagtagccgctatggttttgaagcagcggcggcggcggcagcggtgacagcggtgacagcagcctggccggtggcggcagctgcacgttgtcccgtctgtgactggaa

SEQ ID NO: 41152 - DNA, 30 bp, Homo sapiens
  chr4:182872676-182872706
  hyper
aaaataaaggaagaacggcaaagtccatat

SEQ ID NO: 41153 - DNA, 30 bp, Homo sapiens
  chr4:183062731-183062761
  hyper
tttgtccaccagcgacgcctggcatagagt

SEQ ID NO: 41154 - DNA, 242 bp, Homo sapiens
  chr4:183063454-183063696
  hyper
gagccgggtcgggttcgcttactaccaagacttctctacttaacgcgctgcgctcgggcacttagcaacttcgggaacacgggctgtgggtctgggcacaccacctcgagtttagggattctcctcacttctagcccaaactttggataaactaacataaaggttcaggctttcctaggaggcgtcgtccttgttctcccagtgctcgatctgtttctggttctgcacggtagttaaaaatg

SEQ ID NO: 41155 - DNA, 30 bp, Homo sapiens; identical to SEQ ID NO: 3710
  chr4:183064348-183064378
  hyper

SEQ ID NO: 41156 - DNA, 392 bp, Homo sapiens; identical to SEQ ID NO: 3711
  chr4:183064610-183065002
  hyper

SEQ ID NO: 41157 - DNA, 30 bp, Homo sapiens
  chr4:183065504-183065534
  hyper
ccttcctcctccctcgcctccccggtcctc

SEQ ID NO: 41158 - DNA, 143 bp, Homo sapiens
  chr4:183066209-183066352
  hyper
gtccggaggctgggcgcccagtgggggcggggaggggagcccgccaggtcctcttcggcccccgatgtgtggcgaggccccgcgtcttctgcgggggcgtcttaacaggatcctggggggcttccagcgagcggaaagccccg

SEQ ID NO: 41159 - DNA, 338 bp, Homo sapiens
  chr4:183369219-183369557
  hyper
ggtatatcatggagagtggctcgggccacttgcacacatgccttcagcccctggtaccgtcttctctccccgggtcgcgacactgactcgtcaacgttaatgggggtccgcgactgctgcggggacgagggcgcagagcagcccccgccacgggccggtccacgcaggggccgagaaagtggcggagaggcggtggccgaggcccaggggcgagcgcgggctgagctggtccctgctgcgttcacgagcgacacccaccccttcgctgcggacgccccgcgggcgccaggctgggggccctgcgaccgacccctcccgcccccgaggtaccgccgggc

SEQ ID NO: 41160 - DNA, 712 bp, Homo sapiens
  chr4:183369579-183370291
  hyper
cgcgagctggagggccgagtttcgcggggccgtggggcgtgtgggtgaaggcgacacctcggatgcgggacgcatgaatggtggcagagcaggggtcgggatccgttcatgggttgggagagagatgcttttgtgagcacgggaaagtagcgctgccggagaacagctctgaggcgggatcaaaagccgccggcgaagccccgccgaggaacacggccgctgcccggggcggctcgcgagcgtgcgtgtgtggaggggaggatgccgccccgcggggtcttcggagggtgccgggagcgggttctcagtgcagttcccccgtcttcgctgggggcacggctgctcacaggccccggcccgcgtgtgtggagcggggcgagggggtgaggcgagggggtgaggcggcggccgagccggggcgctgggcgcggggctggcgggaggcggcggtggcggcccggcgcgaaggggttaagcggcgcaccgccccctcggcggccgggtgtaaacagaggagcctcagcctatcatgtctggccgccgcgcgcagcccgagcccggagccaggcgctgtaacacgatacgctccagacccaggcaacttggcagcgctgggctcggttcctcacggccacagcgagggcgcgccgcggcaaggtgggtgagcggcggcggcggcggcggcctggggcgggctggcggagcgcggctc

SEQ ID NO: 41161 - DNA, 400 bp, Homo sapiens
  chr4:183370318-183370718
  hyper
cgctcgctcgctccggggaccgcggcggtggcggtggcggtggtggcggcggcggcggcggcggctccgctcttctcccttgtggtgtcggaatgggaggaggctcggcgcgggtttgaatcggtgcggaggcaacattcgcatctgagatgaggtggctttttaacccctgagggaccacatttaaggatttcgaagagatggaggctgaactttctcgatgactcttcgtcacccggagtggtgcaggtagccgcggggagaatggagtcttttgttcccggtatttttaattagatggattttttttttatgagtagtgtactgtcctaatccgtgaggcaaagctgcccttttgcctgcattcggtgacttttacgaattcgttgggagctagtct

SEQ ID NO: 41162 - DNA, 314 bp, Homo sapiens
  chr4:183727528-183727842
  hyper
tcccctggggttcctgggactcggcttctgcggacatggaaaagccgtcccaacatccggcggccccgtgggcaggggtcctgggacgccccctcctgcatccccgggcgggccctgcaggggatggcggcgatttcaggaagggctccggcgccccctagtgacgcgcggctgtggtagggaaagtcctgcacgccaaaagggcagttcccgggccagaaaccgaggtgaaaccgaagagaaggcgccgccgctcgccgctcgccactctccaccccaaccgcggcggggccggctctctgaccctctcttcc

SEQ ID NO: 41163 - DNA, 31 bp, Homo sapiens; identical to SEQ ID NO: 3713
  chr4:183796433-183796464
  hyper

SEQ ID NO: 41164 - DNA, 30 bp, Homo sapiens
  chr4:183839311-183839341
  hyper
ctcctggtaatgctcgcccacttatatagt

SEQ ID NO: 41165 - DNA, 2057 bp, Homo sapiens
  chr4:184019260-184021317
  hyper
ttggcgtccaggccccgccagcgctgcacccggcattgtcccgcctggggcaggcgtccggtccctcggcagtgcgggccagcacgtacgtagtagctgctgaataaataaatgcctatgcaacagggaacgtcccggcccaccccggccgggccagggcctaggaagggcgggcgtccggcgccgccgtgggtccctccggcgtggccgcccacacctcctggccacggcggggctgcggtggggggacatcctggggcgggcggctggacggaagggactagagtcggggcgcgtccacggccaaccgccccgaaccaagcaggggaggccagggaccaggagcttccggggccccgcggctggagcgcccggacgcgaaggggcggcgggtgacggggcgcggtgcgggcggctacagggccggacgggagttcctccgctttccgccgcgcggctcgcggtctcagccgaggtcatcgagggccaggagccctggcggaggccccgccgtcccggacccaccgacgcactcccagggcttggcgctttcccaccaccccggaccgcccttggggtgccggaggggctcggggcgcggcgtggggagcctttgtgccctctccgcttgttgaggttttttctccggaggagagctccccgcccgccacccctttcctctcgaaagttttgtggtttccctagaagacgaaagaggttgagaaggttgcggagacttttgcaatcttccccgtccagaaactctaaaacctctcggcgtttggcccaggggagctatctggggtcaaggggagggagctggccgcacattccttcgcccgccttcctcccacctggagccgcggccccgcggggcagtgcgtccgagctggtgcggcgacgccggcagcggcggggttaagctcaggaatgcggcgcgaggaatgcgcatgcagatgaggcgggcgggcgcatgctaatcgcatgcaaatgaggggcccgccgctgccgcggcagcgccgcagcttcccggatccgagcccagacggcggcggctccggcagcctgggcgccgcgaccctcggcggccagagggggacggggcggaggaggaggaagaggcggaggcagcggcggcgagggggaggagggttcgctcgccggctccgacgcagacatggtggactgatccgcagcggggccgcgaacagcgtttcctgaggcacctcccgcgcgtggttccgccgcgccccgcgccctgcgcccctcagcccctcgccggcgcccgcgtcgcgggttggcagcctagcccggcagccgcgttcccgccgcgtcccgcgcccggtacctatggaggcgccgctcgccggcgaggccgccgaccatgcctaggagggccgggagcggtcagctgccgctgccccggggctgggaggaggccagggactacgacggcaaggtcttctacattgaccacaacaccaggaggaccagctggatcgacccccgggacaggtgggcgccggccgcgggggcgcgggcccgttcggacacggcggctgttgtcccggagacccggccgcgcggggggctggggcggcgccggcccgcggtgccccgaggggtcccgggagggatgtggggctggctgctccggcggggccgaggagccgcccgtacccgggctcctccgcccaccggcttcccgacgcccctccggggacccggccccgaggcaaggctggagtcgctgccccgggccgacgccgcgcgccaggctaacggacccgaggggccacctgagccctgttaggaacttccctaggcttcgaggtgcccacgtggaggctgcaggacaccttcggcctctgggcggcgggggtgggctagggcctcactgccagttggggaacgagccctccgggccacctgtggcatccctcaggccgtccttggcgcgggagcctgggctgcgagctcttggcgggggcgcccagactggccggaggtcccgagctgggaaggggctcccgccccccgccgggccctgctagtgg

SEQ ID NO: 41166 - DNA, 188 bp, Homo sapiens
  chr4:184328289-184328477
  hyper
ggcccgcgccccttccgcgcagtctccttccgcgtcacctctgtgaccgctgtgcccagtcgggccccacagaagcggcaagcgacgtcctcaaccgcaatctcggctcctcgggcgccacccagtggcctcggggcggaatcgcgggcgagctcggaggggctcggggtggcggggcgcagcgcggc

SEQ ID NO: 41167 - DNA, 30 bp, Homo sapiens
  chr4:184365605-184365635
  hyper
cgggagacgcccgacgcccgcccacctcac

SEQ ID NO: 41168 - DNA, 30 bp, Homo sapiens
  chr4:184366221-184366251
  hyper
ggtgagtgaggcagcgtccctaaccagcac

SEQ ID NO: 41169 - DNA, 30 bp, Homo sapiens
  chr4:184426744-184426774
  hyper
cgctgcagacccagcggctgcagctgccgc

SEQ ID NO: 41170 - DNA, 30 bp, Homo sapiens
  chr4:184580372-184580402
  hyper
aagttccgggacagcgattggtgtagagcg

SEQ ID NO: 41171 - DNA, 1746 bp, Homo sapiens
  chr4:184718200-184719946
  hyper
cattaaccagtcagcgaatccacttgttccagcgagaggtgggaggtgggggcaggggtggagcgtggggaggagcgacactcgccgctccggaatccgtgccttccaagtgtcgccgttgcgtcccccgcaacccccgctttctgatctccctcgaggcccaacacccaaaggctcacccctaggccatccgcgctccccgaccacctccctcataggactccttgggattcctcaggccgcgtccagccgagggggttcccgggcgcggtgcgcactgcccgccccctcactgcctcctcccgcgtctccgcccccgcggggccgctgggcgcccggggaggcgagggtgccgaggccggaaaatgagcgctgcccgaagggtggcccggagctgcaggtaacgcggtccagagctcaggccggagcgggccccgcacaccgtcccttccccgcagcgacccgcgggctgcgcccagggactgcgccgggcgcccgggctgcagggacgcgggcgcgggggaggcgcggccagccctgccctgggggacggtcgcgctccccgctggtcttgcagccacgtcccggcggctgttcctgggagcggcgggaggcggcctcggtgagccaggtcggcgcggcagatgcctgggaagatggagaagtttctgcagatcgcgcctcactccctggccatcgtcctgggcccggcagaggcgccggcgggggaaaggccaggggcagcccggcccgcgcccccggcccagccccgccagctcgcccggcaccacatcggctacgagatcttcgccgacttcaaagccgagaacatgcagcacttctggaacaagaaggtcacggccgcggtggccgagaccttcttcctgggctggatcgacgagcaggtcctgctgatccagggcaaggaggaacatctggaggcgctgcgcgaaggctggacgcgccgggccctgcggccgccctcgggcttccacatccgctgcctgggtgagtgcgaccgccgcgcgcccgtcccgtcccttcccaccggatcgcgtccgtgccgtgcggtcgcgggtgccccgccctgccccagcccgccgcgggcaccgccgaggctcccctgggtgcccgcgtccctgccgggggaggagccgggggccctctgcgagcgtgggattggggaacttcctggcaccgaaaggagggagccgtcccattcccggtgcgccgcccccgcctgcccgcgggagcctccccggtggcgggcggtgcctgaggccggccaggtgggcgccgcggctcggcgggcggctcggagggcgcggcgctcggggcgcgtgagtgtccccctcccggcactgctccgcggctggagtgcgcgggccgggcggaggtgggcggggaggattccggggctcgggtcgcgcggggctcccagctggagcggcggctcaggtgcgcccgggacgcccttccctgggcggcgactgcgggggacgcgccgggaagctagggttgaggctgagtgttgcgcgcacgcatttctcaacgaggcaaggctgcagagttcgtcttaaatgtctcacctgcagcacatctctcaagtcgttttgtgtgtctgagggaaggaagagacacaaagaggccggaggaaaaaaaatctgatcctcaacaaaagagagcaaaacgtaaagaggggcagagtcgcccagaggtgaaggtcgccgccgcgtttccagtgct

SEQ ID NO: 41172 - DNA, 1449 bp, Homo sapiens
  chr4:184826162-184827611
  hyper
gcaccaacatgtcaaatgcagcgctgaaaaaggaaatcgggcttatttttgtcgttgtttactgtaccaaagcatttttgaaaacccaaatcgaggagataaccgtttttgaatgaacggcagtgcaaagcgtggtcggggttagcagcaacgtggctgggcgcctttaactcggcgtgacctccgggtcccaggcccgcgtcccgggcccagcgcccaggcccgggcggcgcattggcccctcctcccctcgcgcgccgcgcgcattgttgtcctttagcgattggttgttggaccagaaacagctgtgcagagccgtgccatctaaagagctgtggacctgaatgcagcgtagcgggctggcggtgacttacaccgggactccagagggagagaggaagcgctgcaggccacttgcattgcgtcttccaggctgcgtggacccggcgccccggcgtgtgcggttgtgggggagctcgccgtggcctcccctccctctggctttagcttcctttggggttggcgcaggtgggccaggcagcgcaccgcagatctccccgttcccacgaaggctggctcgctgtctctctccgagcgggagggaccatcctaaaaatatgtaaatatccaagcgctggctccaggctggggcagctgccaaggtccccgcgccgccgccgggtgttttacatgaaaatgagaagcctgatgggaaccgcgttctaacttaaggcagcctggtgattagcatgagactgggcggctgtcctgcttcctgcccttcaatagccgttccgcgcgctcgcgccggagcagcgctgccgccgcgcgggggtcgatcgcaggctcggcgtccttggcagccatggctccggcgccgcctcggccagtaagtaggagcatgcatgtgtagggggcacatgcgtgtcggcgcacccacccagccatccacccgcgcgcacgcacagcgcccggagcctcggcaaggggaagattgacgaggcgctgcagtcgcggggacgacgcgggctcttcctggattccgcaggagcccgcccgccgcagctgctgtctgcagagcctgctcggatcctgtgcacacgcgccccccgctcgagcctctgtgatgaagactgtctcccggggactgcagcggaggcagagccagccagcgccggggactgcgggccgtgcggctgataggcccgcggggacacgactcggacactgtcatccccacgcctcgcgctgagctgcccggcgcggagggtctgccgccgcccctccggcctcccgcacgcccgatcccgggtcagccccggaggcctcggctgcctcatttgtttgggtcttttgtgccgtggctcccagttggccaagcactcctgcgctgaatcgggccattgtctgcgctcccattgccttcacgctgcaagtctcggcgccccc

SEQ ID NO: 41173 - DNA, 225 bp, Homo sapiens; identical to SEQ ID NO: 3717
  chr4:185089642-185089867
  hyper

SEQ ID NO: 41174 - DNA, 30 bp, Homo sapiens
  chr4:185305512-185305542
  hyper
ttccacggcacaacccgggttcttggatag

SEQ ID NO: 41175 - DNA, 31 bp, Homo sapiens; identical to SEQ ID NO: 3718
  chr4:185311056-185311087
  hyper

SEQ ID NO: 41176 - DNA, 30 bp, Homo sapiens
  chr4:185395538-185395568
  hyper
gtgtgcttttttcacgctaccaatacaatt

SEQ ID NO: 41177 - DNA, 30 bp, Homo sapiens; identical to SEQ ID NO: 3719
  chr4:185396093-185396123
  hyper

SEQ ID NO: 41178 - DNA, 31 bp, Homo sapiens; identical to SEQ ID NO: 3720
  chr4:185396653-185396684
  hyper

SEQ ID NO: 41179 - DNA, 30 bp, Homo sapiens
  chr4:185747360-185747390
  hyper
tcgagaggctgcggcgggcgaacgccgctg

SEQ ID NO: 41180 - DNA, 360 bp, Homo sapiens
  chr4:185747617-185747977
  hyper
ttccttgacactgacgggcgcggccccacagggtttcccccacgctccctggccggaagaccttttctgtctggtgtctgcagagcctgacgtgggcagcgcccgcagctcgcgccggtgcaggggagctgagggccgactgcgcgctgcaccacggcggccacctgctgtgcggttctgagggcttccgcggttctgagggcttccgcgtccctgccatgcccatcttggggcttcagaagccaacacgatggttttcgggctcacatcccaaaggctgctcttccttttagcacctgggacctaccaggaacctcaacctctaacaacattggtccccgttaccgtggagtttgcgcc

SEQ ID NO: 41181 - DNA, 576 bp, Homo sapiens; identical to SEQ ID NO: 3722
  chr4:185937253-185937829
  hyper

SEQ ID NO: 41182 - DNA, 30 bp, Homo sapiens
  chr4:185938238-185938268
  hyper
gtgtgagcgaggcccgtcctgggggaggtg

SEQ ID NO: 41183 - DNA, 30 bp, Homo sapiens
  chr4:185938705-185938735
  hyper
ctccctttgtgagccgtgcgctttggcgtc

SEQ ID NO: 41184 - DNA, 217 bp, Homo sapiens
  chr4:185939324-185939541
  hyper
cctgccgggatgtccggacaaataaagcggtgtaaacaaaaaggggggagaaggacgtgtcaccaagtcgtgtgagaaaagcctgggaacaaacggggcgcctccgtctccaagagctctcccttgaacccggcggaacagcctattaaaggcttacttaattactttaatgactctggacaggctttaaaacgcactcggcgctgggacggcgggc

SEQ ID NO: 41185 - DNA, 1104 bp, Homo sapiens
  chr4:185939958-185941062
  hyper
tataaggcagccctcggagttgggaggctgcagtctacctgggacactcgaggaggcacacgaggcggaaaagtggacgggtgccccgcgccaccgcctctcccgagggcgcgtactgaccaggatgtcagacaagctcaaggaacgcaaagtgagtcggctgagcccaaatggcacttgcgccctggtggtggaggcatctgactcaccgacccgccacttgggtggaccgatggcagggaagtgcccgcacgggactttgagtgtggaggaatctcgagtggtttgggaagggggtggggtagagagaggagggtgctcaaccaggtagaagtcctgcctggaggctggcggccacctccccaaaggcctgggtagggtggctggaaggggagcgcgccagcgcgggcgtcagaaggcagagctcacctggcccgagcgtggcgggccaggagtcccttcctagagcgaatctgagcagtgtgcgcggctggagaggcggcttgcacccagctgctagagccgcgcctttgacgacttcccgggcaaagccatcctaaacatacaaccctctcttcgcagagaacccccgtttctcataaagtgatagaaaagcggaggagggacaggatcaaccgctgcttgaacgagctgggcaagacagtgcccatggccttggcgaagcaggtaacgttggcgacccggagccgggtgccaggcgttgggaggcctctgcggccactctgcggagacgcccgagcccgcggacacagaggacctcacttgcgggcccctcccaggcggggggcctgagcgcagggcgaacctcaggaggctctggcgcagatccgcagccgcgtccgctcgctggtcctctccagcgccacagtgcccgaccagcaggcgctgggccgctgcgaggggcccttcctccttttgcagagttccgggaagctggagaaggcggagatcctcgagatgaccgttcagtacctgagagcactgcactccgctgattttccccggggaagggaaaaaggtgggcacaggttagggaatgggacgcctgggccaggcgcctgcgccacccagagaccctggggc

SEQ ID NO: 41186 - DNA, 562 bp, Homo sapiens
  chr4:185941353-185941915
  hyper
cacccgctttgggctcgcgtggggaaggggcactcagggtgtgtccgtcctacgggctttctcgttcctccagcagaacttctagcggagtttgccaactacttccactatggctaccacgagtgcatgaagaacctggtgcattacctcaccacggtggagcggatggagaccaaggacacgaagtacgcgcgcatcctcgccttcttgcagtccaaggcccgcctgggcgcggagcccgcctttccgccgctgggttcgctcccggagccggatttctcctatcagctgcaccctgcggggcccgaattcgctggtcacagcccgggcgaggccgctgtgttcccgcagggctctggtgccgggcctttcccctggccgcctggcgcggcccgcagccccgcgctgccctacctgcccagcgcgccagtgccgctcgctagcccagcgcagcagcacagccccttcctgacaccggtgcagggcctggaccggcattacctcaacctgatcggccacgcgcaccccaacgcccttaacctgcacacgccccagcaccccc

SEQ ID NO: 41187 - DNA, 30 bp, Homo sapiens
  chr4:185942231-185942261
  hyper
tctgagggagggggacgttaaatggaggtt

SEQ ID NO: 41188 - DNA, 30 bp, Homo sapiens
  chr4:185942731-185942761
  hyper
gccgggttgggagacgccccttccccaccc

SEQ ID NO: 41189 - DNA, 151 bp, Homo sapiens
  chr4:186049911-186050062
  hyper
tgcgaggccttcttcgcgcagagatatcggggttctctgaaccccagaaatgggcctggcaggggaaggaagctgcaagaaaggagttaatctgcaggatgctcaattctttctatgacaaatcgcttcactccccgctcggcaggtcaga

SEQ ID NO: 41190 - DNA, 30 bp, Homo sapiens
  chr4:186064210-186064240
  hyper
atgtgccctttaaacgtcccaagttgcagg

SEQ ID NO: 41191 - DNA, 30 bp, Homo sapiens
  chr4:186124744-186124774
  hyper
ccggcatgtggtcgcggcccaatctcaatt

SEQ ID NO: 41192 - DNA, 69 bp, Homo sapiens; identical to SEQ ID NO: 3724
  chr4:186130482-186130551
  hyper

SEQ ID NO: 41193 - DNA, 30 bp, Homo sapiens
  chr4:186317129-186317159
  hyper
acaaaaagcagtgacgcacgcccgacagca

SEQ ID NO: 41194 - DNA, 30 bp, Homo sapiens
  chr4:186347341-186347371
  hyper
ggaatggattctcccgtacccggggcaaca

SEQ ID NO: 41195 - DNA, 30 bp, Homo sapiens; identical to SEQ ID NO: 3725
  chr4:186434978-186435008
  hyper

SEQ ID NO: 41196 - DNA, 883 bp, Homo sapiens
  chr4:186455991-186456874
  hyper
gtgccccgcgaacagcgcgctgctgaacttttcatccggacgagaaaaacgctcagatgcgcgccagctccagggaatgccggggggtgccagtccctcgcctctcccacccgggacccatcatttgttacggaagggcgatggggtgtgttttatttctgttatcacatataaaacatttaaaacctaaaggggaggaggcactcgagcctggcagcctcgccttccctgagcccagtggctctcctcggaaagtcgctgcggacccagaggatgggacacctttagagcggactttgtcaaatctctgagccgctccgcagccacttgacggagttgccgccgcccccggagctgggcgccgaagcccgggagccagcagcgccccgtccgcccgccctcgcgcgctttctggccgccctcggccccggggcatccactgcgtccccccggacgccgccggagtccccacctcgcagcaaaagcaagaatgccgacacctaccctggtgatgaccaaaggctggttgaagtctatgccccctgagagcctgaagccccagggcgcagggcccgggaggatcaccgtctggggcatgccgccttcctcccgcccaccgggctctaagtgtccccgcgcagggcagccactccgcgccgggcggcgtcctggccccgacccgggcgggggcgctttatccccgctgggggtgacgtcaccgccccgccgtcctccccgccccctcccaccccggagagctccaactttggaagcgagagccgcgccagccccgcgggagtgcgcagcccggccggctggggcagcctcccgggccgcggcgggcgcgggggcttcgggttacagcgtccgtcgctctcttgaa

SEQ ID NO: 41197 - DNA, 210 bp, Homo sapiens; identical to SEQ ID NO: 3726
  chr4:186706013-186706223
  hyper

SEQ ID NO: 41198 - DNA, 238 bp, Homo sapiens
  chr4:187026655-187026893
  hyper
gaacccgctccagcctggccccggagagcgagagctcggcgcctgcgtggcccccggggctggccccagaaccctgttccttacgctgcctgacatcggcgaggagggggcctcggacggcgactccggggatggcgaagcgtgagtagcagcgtggtccgggcgcgtgtaccttttgccgggacccccgacccctccgcctgccgcactcaccttcgcaggtgcacttcaggaaatg

SEQ ID NO: 41199 - DNA, 31 bp, Homo sapiens; identical to SEQ ID NO: 3727
  chr4:187066081-187066112
  hyper

SEQ ID NO: 41200 - DNA, 30 bp, Homo sapiens
  chr4:187639298-187639328
  hyper
tgtacagcaagaaaacggaaatcttcaggg

SEQ ID NO: 41201 - DNA, 643 bp, Homo sapiens
  chr4:187644580-187645223
  hyper
tcggtcccgcgcggtcgcctccttttcccgctccgccgccgggacccccctagccagtgctgaatttcccaactgggaaggaccgagtcactccaccctccgggaagtcgcgcgctcatccgttttcggcagcgccggagcccgagccggggaccgggcggacacccacagagtccgcaccgcagcgcgctgcacgctctcgcccccgcccgccggcccgcgccccagcgaactaaccgcaaagttggcccgaagtggcgacggcgctctcgtggagctcacccgccgtctcagcgcgcccccgagcagggaccgggcctgccggggccctcgccgggctcgcgcgtccgcatggtacctgccgcacgagccgctcccgcgccctctccccgcgcccggccgcccagctcggcgccggcgcctcacgctccccgagcgcaggagatccctccgccccggccccgcccgccggcgccggcgctcatttctcgggcgcggaaactcgagcccactttccccggctgccggctctgggaccgcgggctcggccacgcagtcccgcccggacccaaagagccccagtccctgcgaacaccaggtccgtgctgggagacgagaaggcgcccagcggggtctagcgcgg

SEQ ID NO: 41202 - DNA, 566 bp, Homo sapiens
  chr4:187645504-187646070
  hyper
ggaatgcagctaggtcggaatctacttcctccttcaatccccagaaaatggaaacgcttcccccgcgacctttttctgccgagttagaccccaggccctccccgccgcgggcgcctggcctcccccgctgacaccccggacgcccaggcctgtgggacaaaaggcagtcgcggcgtcccgcgggcttcctagcccgggagtcggccccaggggccccaaagcgtgaccccaggccgacaactgcaagttcctaggcagaggggaagccccagcgccgagaagcccgctccgagaactccccgcgccgggcgcccagcctgagcgtcccgggcgcggagcccatccccggtgcgggcagggctccagccgcaggctcggcgcagggcggactcggccgaagcccggagggccggaggcgctgggacgcagcccggacaagagggcggacttgatctcggaaagtttgtgggactcaggcattttaacactgggaagacaaagagatccgatttccctgggactggtgaggggagcttggcggggaggggaacggcagggcagtcaag

SEQ ID NO: 41203 - DNA, 177 bp, Homo sapiens
  chr4:187646284-187646461
  hyper
ctccatcatccaaagacgtgtttgtcccggccataattgctccaagtgcttacaggtcaatttcatacatggaacacctcgaaagtgggtgacctgatctccaagcccaaccggcttgtgccgcttgccgaattgtaaatctcagcaaaacccaaacacaccggaactccagccgtt

SEQ ID NO: 41204 - DNA, 30 bp, Homo sapiens
  chr4:187646715-187646745
  hyper
gtcgccacaggagccgccgagagccaggga

SEQ ID NO: 41205 - DNA, 1340 bp, Homo sapiens
  chr4:187647033-187648373
  hyper
ataaagaatgggcccgggtgggtggtcagtgaagactggggtgagcaagcgcccacgtcgccgagcgccggggaggtccaggttcgcctccgcacagaaccctgcaaggagcgcgcctcgccaggtgcccggactagagggcgctgcgcccctgcaaatctcgcggccccgatgcgccctccctaggcaccattgctataataagttacattcaaaataatgcacaaacagcatcgcctctcaagttctttttaacagtgctctatatgtattttatgaactcccaaagctatgcatacgaatctttcatcgccgatccgcacaaagccagagggatgcgcagctcctggagccgagaacccgtagggcgcacacgcttccccgcactcgcttagagccacacaccccacgtaatttcattaacgtttaaacttaaatgccaaaaggcatgcacgatttgaacaaagaactcaccagtctagccgagtcctcggccctgggctctaaagtcctcggcagctccgtgatcccctcgcggtgtagatatgtgttaagagccgggtttgaagtaccaactttgcctccccgggatcttcagcatgtccctaaccagagtgccaacgtccgtgccgccgggacccaggcggccgcatctccggaggcttccgaccagggcaaacttaagcaccaaacgcaggcgaaaagagagtgcgcggggccggaacgagggcccgggagcagccaagtttgtcaggacgtgcccaggcagccagccgccgagttgaggagttgcggccgccggctgcggcgactcgctgcctctttccccactccctcccccttggaggcggtgggggaggggaggtgacgtcagcgccccgcctcgccccccgccccgggcgcggacgggattctccggctgggcgcgccaccccgacagtggcagcagcggccgtggaggctgcgggggtcccggcctctgcggtctctctggccggccgcagctgtggcgcgggtgaaacgcccgccctcctccttcggctgcgtctcccgggcgccggcgagcgcgggcgttcctcgcactcagcgcctggagccgcctggagccccgctgcgcgcacttccccggctcgcggagcccctccggcggcgtttcccacgccgcggactgcaggtgatgctcttcctcttctgcagccgaaattcgtcgcgatgtgtcgcctgccagatttttgctgggcggaagcatgaacagtctctgcagactggcctggacgacttgtactttgtggccctccaacttctggatgtgaattttttttcacgacttattattatgc

SEQ ID NO: 41206 - DNA, 31 bp, Homo sapiens; identical to SEQ ID NO: 3733
  chr4:187855389-187855420
  hyper

SEQ ID NO: 41207 - DNA, 87 bp, Homo sapiens
  chr4:190123534-190123621
  hyper
ttgcacactcgcaacgtggccccaggggagccgcggcctggcaacgcgcgcatcctgtggtagttcaggagcgccacctgtcgtgga

SEQ ID NO: 41208 - DNA, 30 bp, Homo sapiens
  chr5:53530-53560
  hyper
ttggggttgggcttcgcgagcccaagcgga

SEQ ID NO: 41209 - DNA, 165 bp, Homo sapiens
  chr5:54113-54278
  hyper
gagaccgggggcggcgcctggggacgccggagatccgctgctccccgggacactcacctgctgcccggcgctgcgggaggagagcgcggaaccgggagccctggaaccctggcccgactgctgagcgccccgtgggtcctacgctcccgcgccttctagggaagc

SEQ ID NO: 41210 - DNA, 30 bp, Homo sapiens
  chr5:91993-92023
  hyper
ggaaaccaggggcccgtccgggtgcaacgt

SEQ ID NO: 41211 - DNA, 229 bp, Homo sapiens
  chr5:92361-92590
  hyper
gcagacggcgggggcggcccaggcgcccgggtaagagggggcacggggactgcggcgggtgggggcgcgagcggacgcgggagtaggggcgggtgggggcgcgggggtaggggcggggtgggggggggcgccggagtaggggcgggtgggggcgcgggggtaggggtggggtgggggcgcgagcggacgcgggagtaggggcgggtgggggcgccggggtaggggcggg

SEQ ID NO: 41212 - DNA, 30 bp, Homo sapiens
  chr5:188656-188686
  hyper
ccgcgtgtgaaatgacgagagcttttgtgt

SEQ ID NO: 41213 - DNA, 30 bp, Homo sapiens; identical to SEQ ID NO: 3736
  chr5:321305-321335
  hyper

SEQ ID NO: 41214 - DNA, 442 bp, Homo sapiens
  chr5:343970-344412
  hyper
gcgcgttccggtgaccgggtgcccccttgtcttccaggccgaggacgatgatcccgccgggggagtgcacgtacgcgggccggaagcggaggaggcccctgcagaaacagtaaagtatcccgccttctgcttgtgtgggttgttgcacccatggaaggggagggttggggtttgccttgaaaacggagttttaggaacagggcgagcgaggaaggcttcgggagccgggcgggccggggctgagctccggcgcgggcggcgcaggagtcgtctccccgcagcgccccggtgcccggagcccccggcgaggctcgtccctgcgccctcggggccctgagcggtggagcgaggcggcgggcaccgtgaggcgctgaggccaaggacgcgggcggagctccgggcggcagaggcggaggcggcggggccacggcagcttcccagg

SEQ ID NO: 41215 - DNA, 83 bp, Homo sapiens
  chr5:368380-368463
  hyper
cctgggcgtgcaccgcgcactgtatcctgcctgagggtgtgggccagggcgctccctggctgtggccgcgtggggttagtggc

SEQ ID NO: 41216 - DNA, 30 bp, Homo sapiens
  chr5:372537-372567
  hyper
tgaaggacaaagggacgtcctcttctgctc

SEQ ID NO: 41217 - DNA, 266 bp, Homo sapiens
  chr5:373103-373369
  hyper
gggcacagggtcgcccgaggccttggtgctgacttcacattctcgctgttccaaatgagccccttcttggttgcagtgaactctgcagccgtgggcggacggctggtaatggccctgagactctccaaggtggctgaggttctgcgcggttggcagagtgctggcaggacacaggggttgcccaggctacagatccgggttcaggcccagccgtggggactgttcacctctgagagggcagccctgccccgcggccctggccctgc

SEQ ID NO: 41218 - DNA, 30 bp, Homo sapiens
  chr5:374237-374267
  hyper
ggtcggtctgtgtgcgggtgacccaggcgt

SEQ ID NO: 41219 - DNA, 286 bp, Homo sapiens
  chr5:374578-374864
  hyper
caggtgggaagaggccgcccttgcccaagggatgcccccacctcggtggactgttcatgcttcctcggaatagtcctgctttgtggcagaagaaatggggcagtttttgttacatttagtgcagtgaacaaacatccagtttttaccagctatgggagttgagggagaaatgagggctcagagaccagggagggaggggaacagagaggccgagtcccaaggccacccggtgccaccgtctccgggcttctggctgcctcacctcctcactcgggccctcgccccc

SEQ ID NO: 41220 - DNA, 268 bp, Homo sapiens
  chr5:377104-377372
  hyper
atcctcattctgcaccgtctgcttttgcttgtcggtgagagaaccttgtacaaaattaagccttttttcccccaaaatgaaggatttggcaaagtctacactgggcttccctggtgtggtttcaatcttggggtggcctgtgtgacaccctggaagctgtgggcctgggcaggaagctctgtggtgagggggcttttcaccccatctcccccatccctgcgactctgaagtgctgagttgtcctgtgctgtaacgcggggcctgttac

SEQ ID NO: 41221 - DNA, 30 bp, Homo sapiens
  chr5:393543-393573
  hyper
ttctgggcacctccacgagtgggagaacac

SEQ ID NO: 41222 - DNA, 1688 bp, Homo sapiens
  chr5:472579-474267
  hyper
tctcacccagccagggcaccccgggcgacctccgcgccaggtgcgacagctcaggccggagacctcgtctgtggggacgggccgtgtccggggccgccaccctgagaccgggcgcgggcaggacggaacctgggggggaaacggggcaggtactggctttaggagtctaaatccccaaacgctgagcagacggaagacgttcctgccactttacctgcagttcaaagacctggcgagggcctggaaacggcgctcggcccaggccgcttgcgggcgctgggcctgcagccgctgcaggtcgggccctgagtcctggcgctcgggaggtccctgagtcggtccccgagtcagtccccgggcgcggggctcggttgggggggcccggaaccttgggctggtttcacgcaaatccgtttggggcgagcctcggtttcccggcagcggtgggaaagggcgcgagcggccagccatggcgcgcggacccttcccgccggcggcgtcacagcggcgtctcctcctgctccagcgcgtgcggcggtgcgtggcacgagggcggcagcgacgccagcttcagcagcgcggggcggcggcgcgcgcgaggccgctggaacgagcgccggctgtgcacgcggcgcgccgccgccgaacgcgcgtgcgcactcggcagccctcggcgctccggccccgcccccggcgcaggccccgcccccggctcgccctcgggcggctctgcgggcgcaggcgcggcactctcggagttctgcgcaggcgctggcgtgggcgaggcggggctcggggctcgcggtcgctgtagccgcgcggggatctggggtttctctgggacagcggcggcggcggtgggcggaccgtggcgcggggacgagcggccggttagcggcgtgtcggagccggtgtcacctgcgggagaggaaggcgtgagcggcgcgcggagcccgggcgctggggcgggaggggcgtccccgggggcctcagctgtccccgagcccggcggctctcgcctcccctcccgcggcgcaccccaggctcggcgtccgctggggcctcctcccaggacccgggttcgcggggcagaggcggaagcagcaacagcgaagccccagcccggccccgccacgtccccccgccgggggtcccgggacagcggcctcctcggcgcaggaaggtcccgccccaggccctgcagcgcgggaggtcaaggtccccaaggggacctgcttcctccatctcaaaccgccctggcgtcccccgggtgcctcccaggcccccagagggagctcagaaagcccagaccccacggcccgcccctctccctgctctgagctggaggcagagtccgggtctgcggggccggccctccctgtatccctgtgagagggtcggggacccggggcgtctgtctggcttcccccagccctgctctcagctccctgggagcgcaggatttggactcgcggactagctttcggagccacctaaaggaaatctcaggcggccctagtgccctcagctccgtgggagcagcagagacgccagagtatctctgtccgggctcctgagggaggtgcggccagcagggcgctagaggaggaagaggggctgctggagagagagagcgcgccaggttcaggtccagggaggagagagagcgagcgcgcgaggcggagacc

SEQ ID NO: 41223 - DNA, 1146 bp, Homo sapiens
  chr5:491032-492178
  hyper
gaggcggccccaacccgggagctcctctttctccatgcgtctccttggtctcaggtttcagccccttgattcccatggagaggccgggccgtgctctctcttgaaccagacggaaaatcgccaattcttgtgagtctggttcagctggtggatttgtttgaggctgagttctcagaccggtgagggcggcaggtgccggaggcctgcgctcagccgtggggcccagctggtcaaagctaggctctgcctgaggtccctggacccacctggtcaaagctgtagcatccccggcagcagcggcgggcatcagggctgcaccgcacctggcatgttgagaggcgccagccacgcgtggtctgggtccggggcgggaggcagtgcccgagagatgaagcatccaagaccaaaaccgcgcagcagttctggctccggctgtggctgcagcggtggccgagcggctccggcacacaggctgggagggacggtgcccgatacaccaggctctgcagtcctcctcctctccctgggacctggtggccggcgagtgtggacggacccctacctctgcccagtgccggaggaagagcggcagcccctggccacctgcagcccccaagccgagctgccgagatgggaactcctccccaagcagaacacgtgctgggacctggggacgcgcaggggactggccttggtcacgagggcctacggggctgccagccacgtttctcacctgacacttaccgcctggaggccagggtgcggcaccccgacctttctgagatgaggcagcgccgcccctcccggaccccaccctgatcccggccggggcaacagtggcgcagactcacccatgagcccactgaggaagacgccgtagagggacagcccggtggtggccgcgttccacacggtacccacgacggcgtacaacaggatggtccccaggttgccgaagaagaggcggttgggcatgaagtagccggcgtccagcacgatggggggcagcaggtagaagaagaagacggtgggcgtcagtgtgaaggacgcgatgtggtcggccgcccagacgatgccgcccagcaccaggcccagcacgatgagcagggcgctctcgggaaccacgctggtgaccttgtgggacag

SEQ ID NO: 41224 - DNA, 23 bp, Homo sapiens
  chr5:523779-523802
  hyper
tgctgggtttcatgcgggtagca

SEQ ID NO: 41225 - DNA, 250 bp, Homo sapiens
  chr5:524112-524362
  hyper
gggcggccgccgcgcggctccgacctgatgcgcgcggccacaacgaagcccccaggcccagcagaggcggccgcacaccccgcgggcagatccggagaccccggggccacttaccgatcttggccaagctggccacgaggatccagagcgcgatgacgtagggatcctgcacgtgggcccactcgaaggtgaccacctggaagcccccgctctcgccgtgcgcgccgccgggctccacctcgacgccccc

SEQ ID NO: 41226 - DNA, 30 bp, Homo sapiens
  chr5:530631-530661
  hyper
atgtttggcaaaaggcgctttgtaggagga

SEQ ID NO: 41227 - DNA, 30 bp, Homo sapiens
  chr5:611996-612026
  hyper
tctggaggggtccccgcgggggggtcgggt

SEQ ID NO: 41228 - DNA, 52 bp, Homo sapiens
  chr5:612240-612292
  hyper
gggggctggggtcgcgtggccagtacctgggagaaccgccattcaggagaac

SEQ ID NO: 41229 - DNA, 681 bp, Homo sapiens
  chr5:676622-677303
  hyper
atgaaagaggtgatgagtttgcggcaatgtaggaatgaaatacatcggccacaggaggacgcaggtgcaaaccaccgaaataaagccattgccacacaggcggacaggacggggctcagggagaaccgctgcttttctcgggtgcgatcatggtggggtgtcgggacatgaggtgaaatgtgctggggcgtgtgagggtgcctcagtgtgcttcccagcattcatccaggagaaaacagacaatgcgtgacacggcaacagacgtgtgcacacatgacacagaaacgcacgtgcacatgcagaaacacatgcacacatgcgcacacgtgcacacacgacacagaaacgcgcacacacgacgcagaaacatgcacacacgacgcagaaacgcgcacgcgcgcatacacgacgcagaaacgcacgcgcgcacacgacgcagaaacgcgcacacgtgcacacagaaacgcacacacgacgcagaaacgcgcacacgtgcacacgcagaaacgcgcacacgtgcacacacgacgcggaaacgcacacacgtgcacacagaaacgcgcacacgtgcacacgacgcagaaaaagcaaacggcacgatgcggtttcaaggtggtggccggagccgcctccttggtgccctttgccattttgccgcccgtgggaatcctggggcagaaa

SEQ ID NO: 41230 - DNA, 36 bp, Homo sapiens; identical to SEQ ID NO: 3744
  chr5:693797-693833
  hyper

SEQ ID NO: 41231 - DNA, 31 bp, Homo sapiens; identical to SEQ ID NO: 3745
  chr5:923798-923829
  hyper

SEQ ID NO: 41232 - DNA, 228 bp, Homo sapiens
  chr5:1004764-1004992
  hyper
aacaggatgagccccgcctcccagaacgcggagtcgcggtggaagagggtgacgccgccgagagttcacgagcgtgtcccaagccgagtgaggagcgcgcgggggcgctcttgctcccaaggccgcacgagcgccaaggcctcgcggggagaatagccacggggggagacggggcccgcgctgcccccacgaacgctgttggtggggaccccacggctgcgcccgctg

SEQ ID NO: 41233 - DNA, 30 bp, Homo sapiens
  chr5:1005277-1005307
  hyper
cccgccctgcctttcgaaagtgctgggaac

SEQ ID NO: 41234 - DNA, 30 bp, Homo sapiens
  chr5:1008894-1008924
  hyper
cccggcgcgggcgcacgcgctcagagggag

SEQ ID NO: 41235 - DNA, 502 bp, Homo sapiens
  chr5:1009129-1009631
  hyper
ccctgcacctgagcgcggggcccggcggggcgtggcggcggcgatggggaaactgcagtcgaagcacggtgagccgcgggccggtagggcgggagggcgggcgggcgggcgtggggccgcctctcactgtcgttttcctctccccgcgtcccgccgtgccgcagccgccgccgcccgcaagcggagagagagcccggaaggtgagcgggcgagccgacgggcggggcggggggcggcgacccggcccgggaccctcagagctaggagcccgcgcgcgtcctgccctggagccagcagtggggggacggggccgcgggtctccaggagcgcgcgggacccccacgcctgcccctgcgcggtctccaggcgatggggacacagcgaaggcgcagcgcccgcggggctcacggcgcgtctctttccctcctcggtgcgggtttcccgcgcgtccgcccccggaccgcaggggacagcttcgtggcgtccgcgtacgcgagcggcc

SEQ ID NO: 41236 - DNA, 220 bp, Homo sapiens
  chr5:1061581-1061801
  hyper
cacccgccgcacccgccgtgcgggatccctgagtctcacccgccgcacccgccgcacctgccgcatccgccatgcgggacccctgcgtctcacccaccgcacccgccgtgcgggatccctgtgtctcacccgccgcacccggctcatgggagttgggagcagctgtgcctgttaagcaccagtatttaaaacagcacaccagatcaggtgcggtggctca

SEQ ID NO: 41237 - DNA, 2199 bp, Homo sapiens
  chr5:1064041-1066240
  hyper
cgtccacctgggccacggtgaagatacgcatccggcacttcctccacacctgcagacagggagggcatggctgtggggcctcagaggagcccgtcccggcccgcagcacgtggggtggccgtgctccggctggcgtgtccccgtcgcacgccccaccttgtgctggcgcagcaggaagggcagcagcatgagcatgccgccgtcgtgcacgatccaccacacgtcgatgtggcccccgccgaagcgctcctggttttgcggaaacgagtcgacgttcttggccaccagcagagcctggtgcgcggcggtggtgtcgcggacggtgtctgcggagagaggcggccgtccgcaggtcatctgaggccagggtgcggaaggggcctccccggggactcacagccagtgcaggggcgggcacggcgaggcgaggggggtccccacaaagcccccaccctcactccgtcagctcctccaaggaccagccagagactcacagcagagttcagctgctggtcatgtgtccagggaatcccccagcccctgcggggctctgggagaaggggagggagtgcctggacactttcagatggccgctcccagggccagggccttcgacagcctcagagcacacaccctcgggtcggtggcctcaaggcccatcgggacctgacagcgcacaggcctggggacgttgaggggacagcgaggagacagaggggacggcgaggagacagtgaagggatagcgaggagacggtgaagggacagtgaggggacggtgaggggacagcgaggagacggtgaagggacagcgaggggacggcgaggagacggtgaagggacagcaaggggacggtgaggggacagcgaggagacggcgaggggacagtgagggaacggcgaggggacggcgaagcgacggcgaggagacggcgaggggacagcgaggggacggcgaggagatggtgaggggaccgcgaggggacggcgaggagatggtgaggggacagtgaggggacggcgaagagatggtgaggggacggttaggggacagcgaggggatggcaaagggatgcagaggagactgaggggacacgggacagtgaggggacagcgaggggaggcagagggggacagtgaggggacagcaaggggacactgaggagacacacaggggacagtgaggggacggcgaggggatgcagaggggacaccaaggggacagtggggacgaaaaggggacagtgagaggacagcgaggggacactgaggagacacacaggggacagcgaggggacactgagaggacacagaggggacggtgaggggatgccgaagggccgccagccatgcctacccacaaagttcttccaggagaaggggttgtcctcctgcttccaggatgcgggccaggccatgagcaccgtgttgtgcttcaggccgcccaggccggccgactggatcaggtgggacatgccatcccgcaggctggacgagaccaccagctggcagaagcccttggtcttctctgtgctcattagggaccgtatgttctgcgggagacaggacaggttggtgctacagcaggaatggggtgcacagacccacgcccaccacccacggtggccagggcacccgcaccacctcccctgtggacccagcaggagggaaggcccgaaggctcaacggtgtgctgcggtgctcccggccgctgtgtgtgtatgtgtgtatgtgcgtgctcacacactggggagagagacacagagcaggtgtgactgatgccacgtgcaggggatgtggagggctgctctggggacacaacgccaggcagttctctgaggcgatccacaacatcccagacccacccccagttcactcggacgctctgggccaggttcatccacctggtgcatcagaaacacccgaaaatgggccaaattagcagctcttcaaagggaggccgtggggtccaggatgcagcaccctaacagcaacggcggggggcgggggtgggggactgccgtgtggtctcctcccggggttggagggggtcactgctgtgtgcagtctcttcccaggggtgtctgatgaggctgcaccacggaacggcttgactccatggggtttgcacgtgcgtggccgaggacctgccacgcactaaagccatgcatgtgtggacgcaggcctcccaccctctgac

SEQ ID NO: 41238 - DNA, 1021 bp, Homo sapiens
  chr5:1111380-1112401
  hyper
gaaacctccagattcccggaacgggggacgggaacacggaggacgcggcctgagcaaggccccggtggctgccccctccccagccagggcgcagtccttcctgttccgcctctggggggtgggcggctcctccagggtcaggcgggggcaggacgggccggcccgggctagtgttaccggacggccgcggcgcaggggaagggagagcgcgggggacgcaggacgccccggctcccgaaccgcccgggtctccaccgccacccctgtcccactagggaccacccaggggcccgggctccctccggaggcgcgctccagcccctccccgtttccatggctaccagcagcggcgtccacacctctgcccccggtcccacccgagctgaccgtaccgggagccctggcagggcccctcgccccctagcgctgccactaacgtggggtgggggccctcgtgggggaccgagaacaggcggtgggggcgcgggaaggggcgcctcctgtacccccggccccgccgcccgcctccgctcccggatgccgggcccagacccgcgctcggggcgctcggcctttgtccggccaggtgcggccgcgctcacccgggctggggcgctcgggctcggggccctcgggggtgcccggagcctccgtccgctcggcagtctcgtccccgccgccgtcggcgtgagcctccacgggcaccacggtgaagttggtgggcatggccgcctgcagccgacagtccccgtcccggcccggcccgcgctgcgccgctcccgccgacgccacgggacttggaggcaggggcggggtccgaccgagccgccccgccccgcccgggccacgtgacttcacctgcttgccccgcggccccacgaaaagttggcccgcggcgacttcctgcagggaccccaacccaggctgcgtctgtctgaccgccgcgacccgggacgcggggctttcgctgcctgcgctcccgaccatcgcagagcccgcgaatccccgctcagtctcctgc

SEQ ID NO: 41239 - DNA, 36 bp, Homo sapiens; identical to SEQ ID NO: 3752
  chr5:1140551-1140587
  hyper

SEQ ID NO: 41240 - DNA, 31 bp, Homo sapiens; identical to SEQ ID NO: 3753
  chr5:1174065-1174096
  hyper

SEQ ID NO: 41241 - DNA, 370 bp, Homo sapiens
  chr5:1279434-1279804
  hyper
cctgggcccgcacacgcagcacgaaggtgcgccaggccctgtggatatcgtccaggcccagcacagaggcgcccaggaggccggggcgccgcgcccgctcgtagttgagcacgctgaacagtgccttcaccctcgaggtgagacgctcggcctggcggggacagcatgggagacagtcaggaaagtggatccggccaagtgcccaccccaccatagggacccaggggagaagcagcccctccccagtgtccccagccacccagacccgggacctagaacccctcccagcttcctcagaccctgtttgaaacgggttcctggccgcatgtgtgttgcacacgggatcctcatgccacacctctgtccacct

SEQ ID NO: 41242 - DNA, 246 bp, Homo sapiens
  chr5:1294070-1294316
  hyper
tgtggatggggggcccgcgtggtgctggcggcccacggatgggtgggagtggcgcgtgccagagagcgcaccctccaaagaggtggcttcttcggcgggtctggcaggtgacaccacacagaaaccacggtcactcggtccacgcgtcctgcccgggtgggcccaggacccctgcccaacgggcgtccgctccggctcaggggcagcgccacgcctgggcctcttgggcaacggcagacttcggct

SEQ ID NO: 41243 - DNA, 30 bp, Homo sapiens
  chr5:1294714-1294744
  hyper
cgttcttcgcgccgcgctcgcacagcctct

SEQ ID NO: 41244 - DNA, 229 bp, Homo sapiens; identical to SEQ ID NO: 3754
  chr5:1295213-1295442
  hyper

SEQ ID NO: 41245 - DNA, 68 bp, Homo sapiens
  chr5:1295604-1295672
  hyper
cgctggcctgatccggagacccagggctgcctccaggtccggacgcggggcgtcgggctccgggcacc

SEQ ID NO: 41246 - DNA, 30 bp, Homo sapiens
  chr5:1296240-1296270
  hyper
caagtttggatctaaggggcgagaaacttc

SEQ ID NO: 41247 - DNA, 30 bp, Homo sapiens
  chr5:1297472-1297502
  hyper
gacagtgtccacactcgcgccctgattcta

SEQ ID NO: 41248 - DNA, 30 bp, Homo sapiens
  chr5:1322071-1322101
  hyper
gacaacttcagagtccatcatggtgtgaag

SEQ ID NO: 41249 - DNA, 30 bp, Homo sapiens
  chr5:1344442-1344472
  hyper
ggcattttgtcctacgcccatacctttcaa

SEQ ID NO: 41250 - DNA, 30 bp, Homo sapiens
  chr5:1344893-1344923
  hyper
caccacgtagaccacgaacacgcccaccac

SEQ ID NO: 41251 - DNA, 46 bp, Homo sapiens; identical to SEQ ID NO: 3756
  chr5:1345797-1345843
  hyper

SEQ ID NO: 41252 - DNA, 30 bp, Homo sapiens
  chr5:1524212-1524242
  hyper
ggtctgtggggggccggggccgctggggac

SEQ ID NO: 41253 - DNA, 221 bp, Homo sapiens
  chr5:1645253-1645474
  hyper
tccccaggagctgacgctattcggtttgtttttaaacactccagctgagcaagcgtcttctcaggacgtcctgcgtgctgcccacactctcttgtggatggtcccccgggtccggcggaatcccgcctgggaaggcttccccgaagccttcctccatcctgggcagtggcggggcttgcaggaggcctcagagctctgtcggggccggacggaccgctgtc

SEQ ID NO: 41254 - DNA, 30 bp, Homo sapiens
  chr5:1654328-1654358
  hyper
tagcagggggtatccgggtggcctaaaaga

SEQ ID NO: 41255 - DNA, 473 bp, Homo sapiens
  chr5:1667628-1668101
  hyper
ggctcccggaggtgcgggcggagataggagaccccccccgagcctggggggggcgcaggaagggggcgcgcggggcgggggcgcgcaggaagggggcgcgcggggcgggggcgcgcgttctccctccgggcagcctcgtgggcggtagatgcagccaacgcgtccgtcaaagcggttcaggggcgctgggaagaggcggcggtgaccccgggacggcagtgggcccgaccgagcctcagtgggggtcccgcgtgtacgctggcctcgccctcccgcctcgcttctgggcttttgctccaactctcagccgccgtggagatcgcagggggcgtagggccaagccagggattccgctgtgccccgggctcgggagaggtgtcccgggagtctatggcagaatttccccctcatcctgcgctgggagaggggtctcgccccggatggaactccgcgttcccacctccaggttctcc

SEQ ID NO: 41256 - DNA, 30 bp, Homo sapiens
  chr5:1668402-1668432
  hyper
tgcctggaataacccgcagtgctcacatct

SEQ ID NO: 41257 - DNA, 622 bp, Homo sapiens
  chr5:1800422-1801044
  hyper
acctagattctacccttagctcgcttatccctgccttttcaggtatctacccgtaactccattcgccttcctttttgtgtgtgtccgggtgagttgcagacgtggctgcgtccactccgcgctccctgcaggccccaacgcttcatcgcagcgcccactttttccacctgacccggcgaacaccgggcgggccgctggagtttatcagctccaggacaaatctgcctctgaccaccacgtttgctgggacatctttgggaccggaggttttcatgtgcattcttgtttctcatgcctttcctcctctttatcatcttccccgccactcatccatctctagtgttttgttcttggagtcacgtggtcctcaggctctgaccacagcaaaagaaaagctggatgctggagcttaagctgggatttatacccaagtcaactctaagcaaaacgggcctttttagaggctgtatttgcatgctgtaaaatcagtcggtgtactaggctttgttgcagaaatccccaatatacgtttcctctgcggctccccgtaaccacacacaggaacgcttgccttgaacgaggagaatgcacttccagtctcgtctgctaagcagttgactcc

SEQ ID NO: 41258 - DNA, 65 bp, Homo sapiens
  chr5:1801294-1801359
  hyper
aaaagtcaaacaagcgcacagtactcggtgtaatcaggggcatttttagcgagatacctgggatg

SEQ ID NO: 41259 - DNA, 30 bp, Homo sapiens; identical to SEQ ID NO: 3759
  chr5:1851813-1851843
  hyper

SEQ ID NO: 41260 - DNA, 1635 bp, Homo sapiens; identical to SEQ ID NO: 3760
  chr5:1874671-1876306
  hyper

SEQ ID NO: 41261 - DNA, 283 bp, Homo sapiens; identical to SEQ ID NO: 3761
  chr5:1876637-1876920
  hyper

SEQ ID NO: 41262 - DNA, 13 bp, Homo sapiens
  chr5:1877089-1877102
  hyper
ggaaataggagag

SEQ ID NO: 41263 - DNA, 130 bp, Homo sapiens
  chr5:1877194-1877324
  hyper
cgatgggctcccacgcccccccccgggacacggctctgggaatttagaaagtttaaaatctaatcaaagaaatccctattttttcaaacttctagagttgggtgatgggaagtacgagttctgggtctca

SEQ ID NO: 41264 - DNA, 290 bp, Homo sapiens; identical to SEQ ID NO: 3764
  chr5:1877738-1878028
  hyper

SEQ ID NO: 41265 - DNA, 353 bp, Homo sapiens; identical to SEQ ID NO: 3765
  chr5:1878223-1878576
  hyper

SEQ ID NO: 41266 - DNA, 189 bp, Homo sapiens
  chr5:1878830-1879019
  hyper
ggcggctctgcttccagcgggtcgaagtcgtccaagtcactaagctccagctccttctcctctttgcccacgggctctgcgggagagaatgcgtggccagtggagggagagggttggtaggtgaatcagaccccctgtccccgtccaccattatgaggcctgttcccgacgctacgaaaagcactcggg

SEQ ID NO: 41267 - DNA, 30 bp, Homo sapiens
  chr5:1879538-1879568
  hyper
aagacgtcctagaaccgcagagaaggcact

SEQ ID NO: 41268 - DNA, 502 bp, Homo sapiens
  chr5:1882419-1882921
  hyper
cgccaagcctccttccccaggggttccttggggtcctaggactcccctggggcacagcctgagccttgtggttcaaacatcagggaacccgggcccggcccgtcggattttcttagcgcctcggcctttccccgggggtttggggagcaggggttgggcgtgaggggcgcgcgacccaggccttgctagctcggaagccgcaggcagtcgtaggtcggacactccccaccccccgtccccgccccatccgccctaccggcacctgcggtggcctgggcggggcggggctccgcttacctggggagccgaggagtaggggtatccaaactgcgggtaggacatggcgggcgcggcccggggcggacgggcggggcctgcagggttctgcgcgctggggccggcgtggcgcggccactgctccggagctgcaggcttctaggcgctgggagggcgaagcaggagagccggttagtccatccccgcgctccgcaaacttttctaa

SEQ ID NO: 41269 - DNA, 485 bp, Homo sapiens; identical to SEQ ID NO: 3767
  chr5:1883131-1883616
  hyper

SEQ ID NO: 41270 - DNA, 888 bp, Homo sapiens
  chr5:1883879-1884767
  hyper
cgccggccgtgctccgccggcttccccctgcccctcgcggctaagccggggactgccgggcggccctgcgcgctcggaagagcaggttcctcaacccaggccccggcccctcccgctaagctcgtccctcccggcgccccgcagggctggctgcgagggagggggcgttgggtgcctggcggaggcgccctcccctgtccattttgcccagctttctgtctggggcgcacggagcaatcggaagaggggaccgagcgcccaccccaggactccctcggccagtaccctccctgggaccttgcccaagttcaaagcggaggccagtgagcaggcggcaagggggcggcaagggggcgcccgggccatcccgaacccgttccccgccttctgcgccatcgccctccgggaccgggactcgccccggttgccctcgccccctgggccggcctcccgtggtaagttgggaaggaagccgtgcaaggcagcgttgtgcagacttgctcagaaagattcctgggttcagacctgtgaatcgccccagggtcaccctctaattaatgatgacgtcctcgccctctccccagctgcaagcctgcctcccagaaacgaaatctgcctgctcttttgacagctcggttgaaggtgattgatgactatctggagaccacagtacacatcatataatatctgctgcgtaattgctttaatttacagatgaaaatacgagttctccgatcgcgttggaccggagcgggccacgtccgagctgcttgcagagggaaaccatcggaaataatgaatagccgctccatgcaaattattcagacagtttagcgtcggtagccgcgagaaatatataaagaacacgagtcaaatgacattaataat

SEQ ID NO: 41271 - DNA, 653 bp, Homo sapiens
  chr5:1885077-1885730
  hyper
gggtgtgagcccagccgggccaagggctgggatggggagtagagacccccagaggggaggcattcagctgtggcttgtcctttcctcacctatactcggggacctggcctcggcgactgtgagcactccgccggctgagggggagagccagggcccaggggcccagccacctatgccctgcacctctgggctctagtgcaacagctcagcccacccagacctgaggctggtgcatttccttccttccagacccggcggggcttaactggagccgaagccccagaacaggcggccattcatcttctgagcagagtctgggagaagcagcctccacttcccagggcagccagtacgtgggggccctttcgggggcttcctttgaccaccaccgccaccttctcctgttctcttttgcctttccagcctgtgtgcataaatcgacgctccagtccccaccagcgggcgaccctttctccgtgacccagaaacctggcctctgaatcggctttcccaggccgccgcacacacacgctccacttcctgcccgccagcaggccccagcgcctggggtccgggcccagtcacagtcaccctgcctcgggaagctcgcaactgcccaggaggcctcctgacccgcccggcctcacccaggc

SEQ ID NO: 41272 - DNA, 105 bp, Homo sapiens
  chr5:1885971-1886076
  hyper
ggtatcagctgaacgcgtctgcatagactcggagtgctgagccttcctccctctagggacccccggtactaaatacacccgtgagcaggtgggccagaagtcagc

SEQ ID NO: 41273 - DNA, 462 bp, Homo sapiens
  chr5:1886379-1886841
  hyper
ggagggagctccttccagcccagagaagttaactccagccaaaggcgaagccgggagcccggggcaccaggcaagggcctttctttctgagacctggggccagagaccttgggggcgcctgtgcccgcccaccgctcgggacacccggctggggtgtgggtttgagaggcctcacggtcgctgacgccgcactggcgaacctcgaggttggcaggtcatttcctcacagccccgaggccccctcggagccagtggtaggagaaggagccacagggacaagcggtgaatctctggattcccaaccgccctccatgggggcccgcggccctctccctcctctctcccgctgcgcccccgccgcttgctccctgggtacggcctgaggctggacggagcgccgtccgggcgtccaggactcaggcctggccactccgagccccccaccccccgccccgcgccggc

SEQ ID NO: 41274 - DNA, 148 bp, Homo sapiens
  chr5:1886997-1887145
  hyper
cgcgccgtgtggctgccggggccgcggggagcagctcgcagcccgggacgcaccggggagtcgccgcagccgccgccgcccgctcccctcggcggccgcgcggagcctccgcctcctcggaaggggggaggggtctcggaaccccggg

SEQ ID NO: 41275 - DNA, 35 bp, Homo sapiens; identical to SEQ ID NO: 3770
  chr5:1887546-1887581
  hyper

SEQ ID NO: 41276 - DNA, 108 bp, Homo sapiens; identical to SEQ ID NO: 3771
  chr5:1887655-1887763
  hyper

SEQ ID NO: 41277 - DNA, 30 bp, Homo sapiens; identical to SEQ ID NO: 3772
  chr5:1930949-1930979
  hyper

SEQ ID NO: 41278 - DNA, 50 bp, Homo sapiens
  chr5:1931236-1931286
  hyper
agccagtgggagggcgtccccgccgcccccgtgcctctccgcaggggctg

SEQ ID NO: 41279 - DNA, 132 bp, Homo sapiens; identical to SEQ ID NO: 3774
  chr5:1931444-1931576
  hyper

SEQ ID NO: 41280 - DNA, 349 bp, Homo sapiens
  chr5:1931617-1931966
  hyper
cgcgcatcccgccgcccctcaccacgaagcgcagacacaggaggttgcagggtcagtgctgcggagaatcccagacggccccacagccgccgccacccgcggggcactcgcccgggctctgccgaggatgtgggggctttggtctccgcagagctgggactcccgaaggccttaccagaaactcaggagcagccccagccctgcagagcccgcgagggtggagacgggagacccgctgtggggcctgaggctgagatgccggcctgcggtgaagccggcgggacgttccaacccgctcagacccgcccactccgcagggcccgggcccaccccccggcctgtggcctgt

SEQ ID NO: 41281 - DNA, 444 bp, Homo sapiens
  chr5:2038418-2038862
  hyper
aaacactgcactgttgaaaagcggcatttgcccaggcgtttcctctttacagacgagtcagtgtctttgccgtttggaaccttgtcttcactatgggatggcacttgatcgaggcggccccgcagcctgttccgcggtgctggcgtctccctctccctggcgaggctgccccgaacccctctgcaccctccctccaggtaccgcccctgggaggtccggtggggaccacggcccgcgacggccgccgcacagccacctcccggcgcgtgcagtgcgggcccggagccaacaggtggcacaaacgcatttgacttgggcatcgatcgccgcgcccgcccggggccgcacctccgccgccagcgtccctccagcccggccccgatgccgcgcaggcgcagtgctcttctctccgcgggccgggccgggtcagggtcaggatctgac

SEQ ID NO: 41282 - DNA, 30 bp, Homo sapiens
  chr5:2544169-2544199
  hyper
caccacctagcccgacgcaatgcacaatta

SEQ ID NO: 41283 - DNA, 221 bp, Homo sapiens
  chr5:2738908-2739129
  hyper
agaccctccacctgaactacccgctcccagagccccagtcagggccgccagaggtcgcggagggtgaagccaatgggcctggacgccgaggccggggagaggaaggagcgaggtaatggctgtggctggagaccctcttctgactccccaggctgccgggtaggcctactgtgggatgggactcaggcgaccagacgtgctctccgtcgcctccatcccgg

SEQ ID NO: 41284 - DNA, 30 bp, Homo sapiens
  chr5:2739210-2739240
  hyper
cgaggggactcaacgcgctttgtagggcct

SEQ ID NO: 41285 - DNA, 251 bp, Homo sapiens; identical to SEQ ID NO: 3777
  chr5:2739551-2739802
  hyper

SEQ ID NO: 41286 - DNA, 392 bp, Homo sapiens
  chr5:2739860-2740252
  hyper
cgggcctgaggctgagggccagggagcgaggcgagcacccggggccagccacggaggagtcccgaccaccacgggagcagggggactgggaggcaagaggtcgggggaggccggggtcagggcgggaggaacccgatgggtcccgctgcggcttcaggcgcggggtatagggtaggaccaggaaggggactgaagcccgggaccagagctgggggtgccaggagcggggcctccagtgggagctcgggggtcctcgcgggttcttctgggtcggttggtggctacccatccccagaagcctggctgcattcccctataaggaggcttcggagggcccgactgggtttcccctccagggcaccgggtcgcaaaagcggcgtcgaaaactcatg

SEQ ID NO: 41287 - DNA, 214 bp, Homo sapiens; identical to SEQ ID NO: 3779
  chr5:2743445-2743659
  hyper

SEQ ID NO: 41288 - DNA, 72 bp, Homo sapiens; identical to SEQ ID NO: 3780
  chr5:2743698-2743770
  hyper

SEQ ID NO: 41289 - DNA, 7 bp, Homo sapiens
  chr5:2750509-2750516
  hyper
ccgaggg

SEQ ID NO: 41290 - DNA, 127 bp, Homo sapiens
  chr5:2751854-2751981
  hyper
gcgctcatctgcatattcgggggcccgcccctcccctgctccgcccgctgcagcctccgggccgcggccgggggaggggcagagagacgggagggaggcgggggagggcggaggcgacggaggcggg

SEQ ID NO: 41291 - DNA, 179 bp, Homo sapiens; identical to SEQ ID NO: 3782
  chr5:2752262-2752441
  hyper

SEQ ID NO: 41292 - DNA, 549 bp, Homo sapiens
  chr5:2752508-2753057
  hyper
cggtccactccgcccagcatggacctggatccggggcgccttggttgcgaattgccaggagggccctgaggtgagctttctgcccccaaatccgcagcgcaacccccggggccctgaacgttacgactttccactgttgggaatgacgccagggcttcagctaagaagacgccgtcccctaaagagttttattttattttgtttttctaagttgactcctctttcagatttgtgttgtcaaaacactggggggatgattgttacctgacaaaccgcctctggcaggacctgaagcctcccagtcacgtcgagaacgggcaggagctcaggttggcgccgccggtgcagtgggcattacaggtagctcaggtgacgcgcggctggagtaggggggcggttgccttgcggggctcagaagcgaggcggttggcgagggttcctaggaccccagcttcctagaaccctctccccatcacgcttctccaacccttttccactcggggatggccgaagagggcgtctggctgcccactccgaagggtcacctat

SEQ ID NO: 41293 - DNA, 230 bp, Homo sapiens
  chr5:2753259-2753489
  hyper
ttagtgatctcaggacgcagggcatgttgcggcctccctgtggtgcggctgcagcggcgcggagggagcggagcccgggttgccagtctggtccagggcgcaagagaaacactcacggcatcaggctgtctttccccaggtgcaagggaaccagttgcaaactgcagtgctgtgcttgaggatggctcctcctgagccggcaggctcccggtaggcgcggtccaggcacg

SEQ ID NO: 41294 - DNA, 30 bp, Homo sapiens; identical to SEQ ID NO: 3784
  chr5:2753731-2753761
  hyper

SEQ ID NO: 41295 - DNA, 336 bp, Homo sapiens; identical to SEQ ID NO: 3785
  chr5:2754001-2754337
  hyper

SEQ ID NO: 41296 - DNA, 14 bp, Homo sapiens
  chr5:2754792-2754806
  hyper
tccgtctcggggcc

SEQ ID NO: 41297 - DNA, 1563 bp, Homo sapiens
  chr5:2754870-2756433
  hyper
cggggtgctcaggcctgtggggtcgctggggagagcccggcacttggcttctgaggcttttcagttgccgtccgagcaggagggagggaatgagcaggcacgcagggaaaacccagtaactgctttgcaaacgcgacccctggtcacaataacccaggcgatgggggcagtttcaggttcctggtgggccctgccccctttcctaggtgtgccctaggaggtggggaaaaaattaacactgtttctatttttctttattgtccctgcaacagccaaagaatttagaacgagtctacgtggacacgcaagtttcagcgagcggggatttcctgcgaggccgagcgcgaggaacagccggccccggaggctcgggctcggggtctccccggggacgcggccgactgagaaggccggggcgctcgccgggcgcggcgccgtcctccgtgtcgcggggacggaaggaggcgacgcaggccaggagtcgtgcgcgcgggcggcgagggggcgctgtggcccgtgtctgccggcccgagtcccggcaacggtgggcgcgacccacctcctcccccggcggcttaattcggggaagaagaaaaaacggcatcgaggcatttcaataaaacctaagcgactcctgatcctttctcattgtggttccttatgagctttcggtgtctggcggggaaacagttaccgttcgggggtgtggcaaacttttttggcaattaagatgaaacagacgcttttatgtgggtttcctttaatgaagtaacattggaaatgtaagtagtttcagtgcatcaaatcacatcgctaccgtattcgcggtcaccggccctcccgttccagggctccccgcgtttgtcgagggagagagcgaggcaggaacagggggccggggacatgagaagtttggctaagaaatttttcttttctttgaaaacaaaagcgttgttataaatggaacaaaatttaagtcaacatggaacccacatctctttcaaacgtcgtttctaggtctagtactctgtgagtaggttggactggatttcacgctcaaccggcatttctaggctctcaaagacgcttccgaggcctaaatgttttcctggaaaacacgtgcagaggagcatccgtggaagactgaaaggtccccgcagctccagtcctggcaggatgtgcaaggcctctcgaggttttcaaatgggcccccgaggcctgggagatccccgagtagccacgcgggcgccacttcagggacgcggggcggcggctactgtgggccgggagggcccccgcacgggctgctctgagcgcctggacccgggaccctgcgcgcgctcttttctttttctttcgtttctttctttcttatttataatttacattctagggacctcgtattcagctaaccagctcttgcttacttaactgccctgttttcagctccggatttctgggaggtctccccatggctaacttgtccctcccggcatcctttagcgctctgcaaaatttgccttcctcccacagatgccccgcctccgacgtgcttcctgaagt

SEQ ID NO: 41298 - DNA, 825 bp, Homo sapiens
  chr5:2756673-2757498
  hyper
cggctctcacccggcataccgtggaaacggcgcgtcccgccagctgcggctccagcctgggagggagcgcagcgcggggagcctgcagcgtctggagagtgaggaaaagggacattccttggaaatggacagagccgagttccttaaagggatcgcagttgaaagagaccctcttcaaaatcagcaacgacctggcagccttagttcctcaacaggagatggttcgaagatgaaatgtttgaaactccgccgccgtttcacctttgcacacacgcgcacggcaggcccagatccgcacagagacgcagacacgcgcgcgctcgcgcttcccggagaggtcggcgcgtctcgctgaagctgttctggtcaagtggagttgtcagggctttgttttgtttttgttttgtcttttaaatgtgttttacaagacagtcttcagcagaacttagctccctcaaccctccgtccctccagcagctcctccgtggctctgcaatcttctgtttaaacaccagagcgcacctcggtgctggcctcggcgggggtgcggggtgcgggtcgcggggtgtgcggtcacccaggaggctgcgaagagtgcaggggtcagctccatcccgacgaaagcagataggactcctcgctcgcaagaaacactggagaaaagaaaataattcctcgagtgtttttacaattattttaatccaaccagcgaggctctaaagagcgtttgtcttgaggccgtgttgaataccctttgccaactgtaaattcggcgtgtgtgcccgaaactgctagccctgaccaggggctcggcagcacatggcc

SEQ ID NO: 41299 - DNA, 155 bp, Homo sapiens
  chr5:2757954-2758109
  hyper
gccctgttcaaactctccctgcggtgcagcttaaatttctatagagaaattcgggagacatttggccgcatctgaaagcgcagaaggtgcgtgctccctggcacccagcacacaggtgttggggaagcggggacgaggcagccctggagcatggt

SEQ ID NO: 41300 - DNA, 333 bp, Homo sapiens
  chr5:3121975-3122308
  hyper
gtgacaatgttcactttcagccgaggatggccaggaaacagttaatttgatttgcgaggcgaaaaggtcgcatgttttgttcagccctttctcagccccttcctccctcgctcggccccagatccatggcagcgcggtttctctctgccatagtctcggctgtgtcatggctgcatcccacgtgggcgacacacagtgccccagcgccaggcagcggggacaatggtccccagctcagggggttcctttgccggcgtcccttccccttggaatgcgctttcttgcacctcctgtttacaaacaaaataaaacggcaccaagctaaacagccaa

SEQ ID NO: 41301 - DNA, 16 bp, Homo sapiens
  chr5:3197991-3198007
  hyper
cgcccggcacgagctc

SEQ ID NO: 41302 - DNA, 258 bp, Homo sapiens
  chr5:3590399-3590657
  hyper
ggcagtttcagcttaaggctgcgggttaaggttagcgggacccgttgggaagccacagtgatcccagggctctgggtcactgcgggtgcgggtgcgggtgcgggtgcgcacagccagggatcctggcgggagccactgcggtttcagctgcatccgataggccccaagcgggaggcgattctgaggccagcgctggcccaaagaccagaggacctgagcaaaatgaaaagtcactttgttcctcacgccgtgcgcagc

SEQ ID NO: 41303 - DNA, 748 bp, Homo sapiens
  chr5:3590803-3591551
  hyper
cgtttgccggtgtacccgcgcaggcagctacacctgtactgagagaatttacatcgccttgcttcgggatggcattgatttgggacgggtgaaatacaaacacaaactaattaaaaaccgcataatggagccctacaggaacaaggcagaaaaacaaataaatacaagtgcagctggcacggcgatggtgcctctgcccccgagcaaccgtctggtgacatcaaataagaagccctgagaactctcacaccgctgctgttgttcatattggaggcataatggaaatgatctggttaattaaggggaggtttataaaatatttacgtgtgtgcacacgcatgtaattcacttccttcgacactggggacggcgtcgtagcggcactccaggccaggccactgcggtccattcctctgccctgcgtttgtgggaaatacgggcccagtgccgcagctttagggcctgggtcgcccttggtccgcccgccgcgttcccgggtggtgtccccacgctgctgaggacctggttccgcgatgcttgccgcggggggcactccccgcagcctgcgaccgtcctgcgtccttcgcttctgggcgtttccttctggggtttccttggagcggctcgagtcgactcctcccgcctgcccaactcagctccgctcgccactgggtccctgcagccctgcaccctcggggcgctcattgtagactattcttggtccccaggggccaccggtccctgcctg

SEQ ID NO: 41304 - DNA, 431 bp, Homo sapiens
  chr5:3591613-3592044
  hyper
cggccggacccaccgggggtctcaacagctgaggactgtctgactattgcctcaatgtcgccgacttgggtggcctcccagctgctgctgagggacggtgcgaagtcctagtgcgtttttaagcagactcctaagtctgcgcgcgagtcggggcgcggcgccaggtcaggccgcctccgtcgccaccgagccgcggcccagcgcagagccccgccatctggagctgacagtggccattgtgaaggcaggaggccagggccgcgccacccgttgcatcccgcggcaggtctgtgtcgcctggttctcggcgccaaaggctggtcccacagacggcttccgggagtgatgcgtccccacgagcatcctcctcttccttagcgacccccggactgcagagcttcaagaccagcgaactgtttcccaagaaataa

SEQ ID NO: 41305 - DNA, 79 bp, Homo sapiens
  chr5:3592383-3592462
  hyper
gccccctgcgctccccgagacacgcgcgctctctgcccatgccgctgcagccggaggcctgcatctgtcccagccctgg

SEQ ID NO: 41306 - DNA, 131 bp, Homo sapiens
  chr5:3592642-3592773
  hyper
cgacccctagacctggttttgtcaggctcctcgtctttgtctctggcacagtgaccagggggcagccaccgggtgcggccagctccgccaggagcaacttccggagcagcggcagggcctgcctcagccac

SEQ ID NO: 41307 - DNA, 356 bp, Homo sapiens
  chr5:3594163-3594519
  hyper
tccccaccaaccctcggcgtccccacaaacccagcccggaatctatgtaaaagcaggaaaggaaccctggaggttgtaggcggatcctggagtgtggaggggcgaattgagcgcgggaagcagcatgactagcaagacaatctgactcagagcagggaaaaatcaagcccgatgtcggagctggttattagtaattactaccatcacgggcattattgttgctaattataggcgatgtctcagtgtctgtcctcaggcccggaaaaccggagcccctcctgatgctgctgaagtccctgggcctcgaggctccgtgaagagagggaagcgaggcagggggtgaagggaccgcctgg

SEQ ID NO: 41308 - DNA, 99 bp, Homo sapiens
  chr5:3594777-3594876
  hyper
cggagctctccagccacgaggcgcagaagtggcctgccagcgccttcccaggctcagggaggcgaggaggcccgtgcacttggcatcttctcccgggag

SEQ ID NO: 41309 - DNA, 313 bp, Homo sapiens
  chr5:3595055-3595368
  hyper
cgcgttccacacaagtttcctgtctgcctctgcacacctggtggacaaaccgggcgtccaggccacaccgtcttcccccttcgcgggggcgcgggggatgtttccctccggctgccagggggctttctgggtgaagagaaagcccctccccccgcgtctcccccacccctccctccgagaacccgcggcgccgactgcgcctgcttcccccgagctggcgacttctccgcgggatttgccctcgctcaaagtttgcacaattgaaagagcccgcagagctcggccgctccccgcttccccaagggcggcgagg

SEQ ID NO: 41310 - DNA, 252 bp, Homo sapiens
  chr5:3595849-3596101
  hyper
ggcgagggcgggcgggaggcagggagggggcgggaggggagccaggggcggggcctgcgctcaaggggatgccaatcaaagcatcaacttcaaattgtgtctgaaagccccgccgccgagcggagggcggccgccgcagtcggcgcgcgattgcggatccgggcgcagccgggagccgggcgcctgcgagcaccgggcagaggagccgcgaccggcctccatctcccggcccgcccgagcgcgcccggccgg

SEQ ID NO: 41311 - DNA, 169 bp, Homo sapiens
  chr5:3596555-3596724
  hyper
cgggtcgcccgggagggagagactacgggtggacctggtccggaagaggaactagaaaggtccgggggcaggttcccggtggccgaggccgcggcccccggggacgcaagagggctgggaggccgggcgggtgacggctgggccatctcggcctgggaaagcggaaggc

SEQ ID NO: 41312 - DNA, 131 bp, Homo sapiens
  chr5:3596824-3596955
  hyper
cggccagggcgcccgggcaggcccacggggttcctgcaggtcggcccggcgtagcgtagcaggacttcccttcctggccgcgggttccactcgcgcggcctctttagttttcgaaccgagtctggaaaact

SEQ ID NO: 41313 - DNA, 43 bp, Homo sapiens
  chr5:3600074-3600117
  hyper
cgggccaccccggcgcgcacgggccctccgccggggcgccgct

SEQ ID NO: 41314 - DNA, 30 bp, Homo sapiens
  chr5:3600426-3600456
  hyper
ggctaggtgtggtagcgtggggtgcagcat

SEQ ID NO: 41315 - DNA, 525 bp, Homo sapiens
  chr5:3602716-3603241
  hyper
cgcacccccagcctgtgacccgcccttcccggcttgctcgagacccactggcgccagtgctgcgcgtggggactccgtgcatggccgaagcgagggggaaagtcggggcgctggtgtcttttcagaggttccaggaaagagggaggctcgcgttaggactaggaggtgccagtccacggctcctacccgctcccgacgcccgcatccttctacagccctccaccccgttcctggtccctgtagaggggaaggtcctctccctgccccgaggcgggaggaaaagcggcgaagaggaggctcgaagggcgccgcgtagggcaagtgggccgaggacaccgggggcgcgtcggggagcggggagtgggcggggtgggatgaggcagggaggagccgggccggagcggagtggagtggaccgcgggcggacggactcgggccgggccccggggagcagctccgcagtcggaatggacgtgctccaggcgccctctatggtccgaaagcggaatgcggccttgagcagcg

SEQ ID NO: 41316 - DNA, 170 bp, Homo sapiens; identical to SEQ ID NO: 3799
  chr5:5139753-5139923
  hyper

SEQ ID NO: 41317 - DNA, 64 bp, Homo sapiens; identical to SEQ ID NO: 3800
  chr5:5139935-5139999
  hyper

SEQ ID NO: 41318 - DNA, 424 bp, Homo sapiens; identical to SEQ ID NO: 3801
  chr5:5140031-5140455
  hyper

SEQ ID NO: 41319 - DNA, 132 bp, Homo sapiens; identical to SEQ ID NO: 3802
  chr5:5140527-5140659
  hyper

SEQ ID NO: 41320 - DNA, 49 bp, Homo sapiens; identical to SEQ ID NO: 3803
  chr5:5140708-5140757
  hyper

SEQ ID NO: 41321 - DNA, 142 bp, Homo sapiens; identical to SEQ ID NO: 3804
  chr5:5140849-5140991
  hyper

SEQ ID NO: 41322 - DNA, 30 bp, Homo sapiens
  chr5:6378277-6378307
  hyper
gcaacaggctggagcgcgggccccgccctc

SEQ ID NO: 41323 - DNA, 30 bp, Homo sapiens; identical to SEQ ID NO: 3805
  chr5:6378582-6378612
  hyper

SEQ ID NO: 41324 - DNA, 881 bp, Homo sapiens; identical to SEQ ID NO: 3806
  chr5:6448768-6449649
  hyper

SEQ ID NO: 41325 - DNA, 557 bp, Homo sapiens
  chr5:6583161-6583718
  hyper
ggctcgccgcagtcacgctgcacaccctcccggcctagggcggcgccggcccgggactcgcgtgtctccccgcggcgccgcgcaggacccgggcctcggagcccggcagcatcccctgctggccgctgggctgaggagccgcgggaggcggggaacgcggggccgcgggggctgggcgggccggagtgcgcggtagagggggcggcgcggccggggtgcgcggtagagggggcggagcggccggggtgcgcggtaaagatggggcggcgcggccggggctcgccagcaccagccctggaaccccatgggggacctcgacaacagcgcctttgcggcgtgggcccctttctgcagctcctccacccgcgcgctgtcggctccgggacactggggctttgaagggcgccagttcccagccgcacctgcacgcctaggagggcgcaggccgcgtgtccctgtgggaggaaggccccggcaacctgcaaagacctcacgtcacagaaacttgcggcgtttgcccccgatgcgcgcgtcaggtgctccgtcccttccaggtg

SEQ ID NO: 41326 - DNA, 407 bp, Homo sapiens; identical to SEQ ID NO: 3807
  chr5:6687056-6687463
  hyper

SEQ ID NO: 41327 - DNA, 25 bp, Homo sapiens
  chr5:6765598-6765623
  hyper
cccaaagtgccgtgtgccaccatac

SEQ ID NO: 41328 - DNA, 14 bp, Homo sapiens
  chr5:7395064-7395078
  hyper
ccacaacgctcctg

SEQ ID NO: 41329 - DNA, 233 bp, Homo sapiens; identical to SEQ ID NO: 3810
  chr5:7395160-7395393
  hyper

SEQ ID NO: 41330 - DNA, 1469 bp, Homo sapiens
  chr5:7395433-7396902
  hyper
cgccctcgcagggagccccggccctctcaagagggtggagaggatgggggagccctcaaccctgctacgctgaggggaagaagggctggacggcaaaccggtgcccaccgcggggaggcgggaagggtgggaaatcctctccagctccccaaaagagtgaaaaggagggagaccccgctgtcctctgacccgcgtactaaaggagggaccccccgggtcctctgaccccggctgcgctctgtgactgtgggggagggtgggagcaggccccgcagcccactaaggggtggaggaaacaggagggtggcagcgtccctgcccgctgaccttgaggtagtggagaggagctgaggagccccgcagtgctccgagccaggtggggcggggggagtggtgggggtaggactccctccctccaccccttaggctgtgttctcacttcgtagcggggagggccgtccctcccaccccacccacgctgcactcgggatagggcagaggaggtggacgacctggtggctgagtgtgggaggccggcgggcgaggacgaccccgggccggggcgcagcgggagcccctcagttcgccactccccccaccgtacagcccccgccgtccccagcctgcagccgggccgtcgggtgggggccgacaccgcccctgcacggaggccggctgcgcgcggggcggggagcggcgggcggagggccccgtggaacccgccccctcccgcgcggtggcggtggcggcggcggcgccgggagctgcccccgaggccgccgcccggcccccgcccgcgcgtcagcgcgcccagcccggggcgccgagctccgcccgcgccggaggcccctgcgcgcagctccgggtgccggcagccgggccggccgaggcggcgcgggggtgggacgcgggcggccgcggcgagcggcgctgcccgggccgggcgcgcacggcgggcgccctgtgagcggccccgatgtggcaggaggcgatgcggcgccgccgctacctgcgggaccgctccgaggaggcggcgggcggcggagacgggctgccgcggtcccgggactggctctacgagtcctactactgcatgagccagcagcacccgctcatcgtcttcctgctgctcatcgtcatgggctcctgcctcgccctgctcgccgtcttcttcgcgctcgggctggtgagtggcctccccgcgggtccagcgccgcgccttccccggccctgagaggagcccggccagccgagccgcgtcccgctccgggctgcccctcggcccgcggcagcccctcggcccgcggcagcccctcggcccgcggctccctgcttctcctgctggcccgcggcccggtggactctggcaagggctgcgggcgggagaaaagtttcctgggaaggctcttcccaaaataaagttcccgaggtgttcaccaggtggacgggcagggcgtgtgctttttgca

SEQ ID NO: 41331 - DNA, 374 bp, Homo sapiens
  chr5:7851009-7851383
  hyper
ctgtgctctttggggtccaggcgccgcggcgggatgtagctgaaggcggactgcgccgagacgggcggcggcctgggcttgccccgcagcgtggacgcggtggtctcctcctcgtcgtcctccatgccgccaccgtccagcgcccccgccttggccgcggtccgtcccgcccgcccaggggcccagtcggagtctgcaggcctcaggttgctcagcgccagcgtctagcccgcgtctgtgttcggtcgttgcctggaaaccgccgcctggcgacccggagctgccctgcagcattcccgctccagggtggagcgaccctcccctcctccctcccggcccctcgactacacctggggtctctccttccttcctcc

SEQ ID NO: 41332 - DNA, 8 bp, Homo sapiens
  chr5:7851409-7851417
  hyper
cgcgggga

SEQ ID NO: 41333 - DNA, 30 bp, Homo sapiens
  chr5:7868995-7869025
  hyper
agacacgggccgggcggcgcagcctgagga

SEQ ID NO: 41334 - DNA, 30 bp, Homo sapiens
  chr5:7869250-7869280
  hyper
gcgctgcgtcagtgcgcgctggcgcaaggt

SEQ ID NO: 41335 - DNA, 2163 bp, Homo sapiens
  chr5:9544613-9546776
  hyper
cagctcccccaacccccggcccccaaaatgaaattattgcaagatctgcctggttctgctgtttgttgcctgggactcccgcccactcgcccaggacccagcaactgcctgtggcgcctcgtcctccgagcgctcgctcgcagcgccccctgccgggaatcccgaggacgccgcaggcgcaggaaagttaaatcccaactccggccgcggcatcctggtacaaagcaagcaaagggcgaggaggtgaacgcgcttcccgccaaagccaggggaacagggatgtgaccgctccaagccaggcaccggccgccgcggggagcgagccgggggaatcactcctccacgaccgttcccacgcacatcttgggagaaaccattccctctggagcccgatctgcccgaaaccctggggtctgaaaccctgagccgcggtgtgcaaaatccgtggagcagcggagggatgcctggtgaaaggggctcgcctagctgcagcgcacctggctggtggttccccaggcctctgcatcccccgccttagtgtctttcattaaccaaggcgcttggcggagttgagcccaagtcccattgcctcccggttcccctgtaaggaaagcaggaaaacctgcccaagccggtggggctgcgaggtggccgctcccgaaccgccaagtcccgacctccgtgtcccctgcccccggctcgcggcagtgcgagcctggaggcgcgccgggggcgggcacagaccagtgtgcgcacctttccgggtgttgggcaggggtcccgtctcgcccaccgcgacactccggctccttacctctccatgctcagacctcggcacaggcgggtacacaaacttccagcccgtgcactagctcaactgtgggcgcccccggactgacggtcgtcctaatcctgtacgcgcaacccccgcccaggtgcctgctgatggatcccacccgagatcggcaccacccaccagccgaccgctgcagtccccgggtcccggccagcggcgcggcgcggcgcggcgcggtcaggggctcctgccaaggccacgcaggaatcgggcgggggtcgctcaccaggtgcgaggagcgctggtgccagtcatccagcgcctgggggccagagcggctccgaggatcctcttcagcacctggctagggaagtggaggcagcagctgcagccgccccctgccacttccccagagccgccccctactcgctgagttccagaatgggggcaccggcttgggggccacgagcacggtccccgagcgcgcggccaaccggtgggtgggcaggttcgcgcccagcagagacgaccctcgaggtggcaaagttgggtgtccaagccagctccgcggggcagtcctgggtgggagaagggagcgtcccgggatgagcgacactggccgggccgcccctgcacggggaaggtggagggccggggctgcagcgggccaagggccgcggctggcctgaggctgcgaagcccacccgcggcgggaaagcagcgctcgggagcgggctcagggagagcagccgccaccggcgccgccttcccggcaagtagatcggcgcggggcgagcgggcgcggagagcgcggggcggagagcgctgggcggggagcgggggacagcctgggcccacccccgccccgccccgcccctgccccgcccccgccgccgcgccgcctcctcctcctcctcctccccgccggggtgaaactcgagcgccccacccgcgcctgacctccccgagcccctccccgggccccgccccttcccggtacaggacccccaccttcgctcctgggagccccgctgcaccccaggagttccattccagcctccccagtgcgagtgcggccgagcgctgacttttgggggctccctcccccgtctcactgggtccctctgcggctcccccgcccgctgtcccggttcagacgtggctgcaccccggaggggggcgccggccgagacctgagacgtggcgctccctctctgccggcctcggcttcaggtacgtgcggttccctcggctaaatctggcccgggggatggggggcaggggccgtctggtcctccggaactcgaactttgtgattttgttctttctgtgtgacatcctcatccgttctgagggagaaactcctt

SEQ ID NO: 41336 - DNA, 30 bp, Homo sapiens; identical to SEQ ID NO: 3814
  chr5:10249746-10249776
  hyper

SEQ ID NO: 41337 - DNA, 56 bp, Homo sapiens
  chr5:10250263-10250319
  hyper
aagttcccgaaggccgccgattccagaagatactgtctggcgtgaaattagtctca

SEQ ID NO: 41338 - DNA, 30 bp, Homo sapiens
  chr5:10250564-10250594
  hyper
cacagggacctgctcgcggtgggctaaggg

SEQ ID NO: 41339 - DNA, 30 bp, Homo sapiens; identical to SEQ ID NO: 3815
  chr5:10250984-10251014
  hyper

SEQ ID NO: 41340 - DNA, 327 bp, Homo sapiens
  chr5:10307606-10307933
  hyper
gactatgggaagttccttacccgtgcacgcggcaaagaccttctttgccatagtcagaacacacgcgggagttcagaggagcggggcccgggcttgtgtgggcttgtgtgccccggggacgcgcacgtaccttgtcccgcggcctgagactgcgctgcaccgcgcggaggccgaacccagaggaggcggcgtggcgccgggcggggacgcgagagggacgtggacgcggcgaccgaggacgcggggatcctgcgggaccagtggctccagtcgtagcctcctgggagagccaagcccggagggggcggagaggtggaggagggaggc

SEQ ID NO: 41341 - DNA, 676 bp, Homo sapiens
  chr5:10333391-10334067
  hyper
agctctttcaagcttcctgcacgctcttagcgccagagcaccccagccgtcctgggagcccccgaagccaagcatattcgaactccgaatccgctcgatcgccggggacctgccatctgggttcggttccccaaggtcgctgccgaccttagaccgcgggggtgtggggcgccggggaaggagacagaaggacaggcgccgcccagggccgcggggacacttggggctgcgtcctgggtgggcgcgatgctcccccagaacgactggagatggagagtgtcggggagggaaacgggacccacgaattcagggcgctgagtcggcggaatgcgccctgactccccctggccgagagccggctcagaatgaaagagcgcggagtgggaggtctgggaaatggcagtatttgtattagggagagaaggaaacaggagtgggagccgcacggcttggggaacgcgggagatcgcggattgcggggatagcgcagcgcggctgcccggggctgctgggaggggccggacgaggccagggcgagcggggtaactgcggccggccggacggcggcggtaaccggctgcaccgaggtggttccaccaccgcgctgggcgcttgcggttcgtctgctccaacgaaagccgcgtcccacgctccctgccgccgcgtggttttgcct

SEQ ID NO: 41342 - DNA, 503 bp, Homo sapiens; identical to SEQ ID NO: 3817
  chr5:10354849-10355352
  hyper

SEQ ID NO: 41343 - DNA, 155 bp, Homo sapiens
  chr5:10441402-10441557
  hyper
gtttctcctatccttcgactcgaggctcttttgacagatgtgatttatttcctcctagagccagtcacattggctcaagcaacctatcgtaagaaaacaaatacaatagtgttttagctggaaactgcccactgtctaagcggctttttaaatta

SEQ ID NO: 41344 - DNA, 30 bp, Homo sapiens
  chr5:10441605-10441635
  hyper
cgaagttcgaagcccgagaagtttggagga

SEQ ID NO: 41345 - DNA, 30 bp, Homo sapiens
  chr5:10442088-10442118
  hyper
tttctcccgaagcccgcggaggagcgggta

SEQ ID NO: 41346 - DNA, 101 bp, Homo sapiens
  chr5:10563415-10563516
  hyper
ccccgcccatccccggcgccaggactgacggggagagggcaaggccgggccagaggggctgtgggcctggactgcggctgtcgcccgcggccctgctcttt

SEQ ID NO: 41347 - DNA, 30 bp, Homo sapiens; identical to SEQ ID NO: 3818
  chr5:10563841-10563871
  hyper

SEQ ID NO: 41348 - DNA, 371 bp, Homo sapiens
  chr5:10564287-10564658
  hyper
tggccaggaaggggcgcgaggggaaggccccgggggaaggcgtgtccccgcgccccgccccgccccgcctcggaaagcccccgcggtcccgcccaccccaggggctcgctcagcctccggagacttttttctttgagcgcagccgcctggtgccggtttccgccgagctggagcgcgcgggccacggcttctctggggacgcagaagcgagaagcggggacctcggcgcgcgccccgcgtcccgctcttcctgcccgcgccccggcccccggcccgcgccccggccgccggcatggtgctgctggccgggaccgggccggagggcggcggggcgcgctgcatgaccccaccaccgccgtccccaccccggg

SEQ ID NO: 41349 - DNA, 427 bp, Homo sapiens; identical to SEQ ID NO: 3820
  chr5:10564800-10565227
  hyper

SEQ ID NO: 41350 - DNA, 489 bp, Homo sapiens; identical to SEQ ID NO: 3821
  chr5:10565262-10565751
  hyper

SEQ ID NO: 41351 - DNA, 171 bp, Homo sapiens; identical to SEQ ID NO: 3822
  chr5:10988183-10988354
  hyper

SEQ ID NO: 41352 - DNA, 786 bp, Homo sapiens
  chr5:11384964-11385750
  hyper
cggatcggggacaggccggccgaggacacgacgatgttgatgggcgagctggtgctgtaggacttggccaggcggctgggcgactgcttgggcgaggagccgcgcggcgcggcgtaggtggcgccctcgggggccgagccgccgcgctgcagcttggtgggcgaaccgccctggggcgcggccagcggggagcccccgcgcggcggcgcgggcagcgtggagctggagtagtagagcgcggcggcggcggcggcgggcggcgcgtcgggcaggtggaaggcgctgcccaggctgggcgcgaacggctcccgcggcggcggcggcggcggcggcgcgggctcgggccccgccaggtggccggcgcggctggtcgtgccctgtgcccgggagaggagagaacacgcgcacttagcgagggagaagcacacggcccacccggcccagcccggccccgagagcagaggcacaccggggatgccgcgggcgcccggcggctctgcgatcccagctgcgctcggggcagtacgcgaacctgcgccccgaactctcctggggcggatttcttgtcctgacactggcacaggccagctgactactggagggaagtcacgtttgacaaatgagacctgtgtttgcttacatgtagatgttatttcggaaatagcagaagcatcgcattagtcacataaagatttttaaagccccaccccgacagggcaatcatgatctccctggtcgcaatcacaatctgtttgttttaatgagaaattcgggcagtaaatcttt

SEQ ID NO: 41353 - DNA, 444 bp, Homo sapiens; identical to SEQ ID NO: 3824
  chr5:11903280-11903724
  hyper

SEQ ID NO: 41354 - DNA, 352 bp, Homo sapiens; identical to SEQ ID NO: 3825
  chr5:11903821-11904173
  hyper

SEQ ID NO: 41355 - DNA, 184 bp, Homo sapiens; identical to SEQ ID NO: 3826
  chr5:11904195-11904379
  hyper

SEQ ID NO: 41356 - DNA, 377 bp, Homo sapiens; identical to SEQ ID NO: 3827
  chr5:11904455-11904832
  hyper

SEQ ID NO: 41357 - DNA, 369 bp, Homo sapiens
  chr5:14108524-14108893
  hyper
ctcgtgatttttcctacgtaacacttctccttcagttaaattcttctttgctaacttccatccttttatctgttatattattccagtctggtagaaaacacacacgcacacgcgcacacacccctatctttattttccccaactcctgaacgagagttacagtttcaagatttcttttaccagggctccccaccgccgcccccaccaccatccgccaccttggtcagcagggaccataaaataagcagttgcagatcgtgcccagtagggggaggagtgcccataagtcttccactaaatccgaggcctttctgaagcccaggagattttaaagaagccacgtgtttacgaaaacgtcttctaggttaa

SEQ ID NO: 41358 - DNA, 576 bp, Homo sapiens
  chr5:14142659-14143235
  hyper
tagccggggcataggcgttttgaactagaatattcgtccagcgctggtttgacacggatcttccgcaaaggaacatttcttttggcctccccagaccccgtcatcttccccattcattctggcggagtaaggactgagaaaccgtgaacccgaggttcagcagccgaaagtcccctgggagatggggatacaccgagaggaatcccattttacaggagagctttgtacccttaggagtaccgtggcctccgggactggagcagataacctgttttcgggccctctatgttcactcaacaactattaagaagccccctccccgagccagggccagcgctgagcccactagggaggcacccgccccggcccgcgtcaccccgccttgcgggctagacgacgaaacgcctcggcgctcaggggaccgcgcaccggtgcaggagccagcgccccggttgggggcgcaatgccgggcctgggaaggtccgccccggctggtcagagctttcctgcgccttccaaggcttggagctgccccggggaagcagaccgaaccaaaccgaacgttcctgcagcctc

SEQ ID NO: 41359 - DNA, 648 bp, Homo sapiens; identical to SEQ ID NO: 3832
  chr5:14143456-14144104
  hyper

SEQ ID NO: 41360 - DNA, 124 bp, Homo sapiens; identical to SEQ ID NO: 3833
  chr5:14144285-14144409
  hyper

SEQ ID NO: 41361 - DNA, 30 bp, Homo sapiens; identical to SEQ ID NO: 3834
  chr5:14144754-14144784
  hyper

SEQ ID NO: 41362 - DNA, 46 bp, Homo sapiens; identical to SEQ ID NO: 3835
  chr5:14144999-14145045
  hyper

SEQ ID NO: 41363 - DNA, 154 bp, Homo sapiens
  chr5:14205131-14205285
  hyper
gctctctgtttccaccgtggctgcagtagagacagaggccaacatttgtggtgcaaagggaagtgcccacggattcaggagggcacaggattttattgtcttaaatcattaactattgcccgaaaaatccacagaacatcgttgtgtaactgca

SEQ ID NO: 41364 - DNA, 150 bp, Homo sapiens
  chr5:14581636-14581786
  hyper
gaggtcgccggatccgcccaagtggaattcccaagatgtttcccggggagcagcctcaggaacgcgcctggaccccaggagtagcttcccgccccgctgccgagcctcggaggtctccgcagttctggggcccgcgaccccgacagcgcg

SEQ ID NO: 41365 - DNA, 30 bp, Homo sapiens
  chr5:14665151-14665181
  hyper
ctggggtggggagtcgtcagcggagggtcc

SEQ ID NO: 41366 - DNA, 30 bp, Homo sapiens; identical to SEQ ID NO: 3837
  chr5:14872919-14872949
  hyper

SEQ ID NO: 41367 - DNA, 372 bp, Homo sapiens
  chr5:15499744-15500116
  hyper
gagccaggaaacctccttcaccggggcggggcagggaaagtctggctctcctgggaccgactccctgctaagtcgccccaagttttccctccctctgtcttccattttccgccccagtctccaaacagggaagtcacaggagaatgccaacgcatacacctgaaaggtgtcagaattagacacggatgcgtgtttattttaaatgcccacgcacttaaaataggctgtacttgcagacaaactcaagggattccaaacgacgcctggaagttcatcttatagattgggggccaagcctgtaaaagaacaacagtaaaacagagccaacaggacgttgcttcgctccgaagggttcgcgcgtagcgcgctgag

SEQ ID NO: 41368 - DNA, 118 bp, Homo sapiens; identical to SEQ ID NO: 3839
  chr5:15500570-15500688
  hyper

SEQ ID NO: 41369 - DNA, 208 bp, Homo sapiens; identical to SEQ ID NO: 3840
  chr5:15500735-15500943
  hyper

SEQ ID NO: 41370 - DNA, 162 bp, Homo sapiens; identical to SEQ ID NO: 3841
  chr5:16178990-16179152
  hyper

SEQ ID NO: 41371 - DNA, 140 bp, Homo sapiens; identical to SEQ ID NO: 3842
  chr5:16179266-16179406
  hyper

SEQ ID NO: 41372 - DNA, 245 bp, Homo sapiens; identical to SEQ ID NO: 3843
  chr5:16179554-16179799
  hyper

SEQ ID NO: 41373 - DNA, 138 bp, Homo sapiens; identical to SEQ ID NO: 3844
  chr5:16180182-16180320
  hyper

SEQ ID NO: 41374 - DNA, 420 bp, Homo sapiens; identical to SEQ ID NO: 3845
  chr5:16180371-16180791
  hyper

SEQ ID NO: 41375 - DNA, 30 bp, Homo sapiens
  chr5:16187512-16187542
  hyper
caggattgaaggaaaggtttctttatacag

SEQ ID NO: 41376 - DNA, 30 bp, Homo sapiens; identical to SEQ ID NO: 3846
  chr5:16616444-16616474
  hyper

SEQ ID NO: 41377 - DNA, 293 bp, Homo sapiens
  chr5:16616790-16617083
  hyper
agcaggctccgcagcggcctcttccagctcagcagctcgtcggcgcggcagcccagccacagcaccggctccccgagcagccaggttaccgcggccgccgcccggcccgcggcctcctccacctgcaaccccgcgccctccgccgccccagcttcctgcgcttcctcctcctgctgctgccgctctgcgggggatgcctggggcggtggcggcgacggcggcgcctgctcctcggcggcaggagccgggcatccctcctcggcgtgctccggaggcgccgggctcgccatctt

SEQ ID NO: 41378 - DNA, 30 bp, Homo sapiens
  chr5:16617412-16617442
  hyper
ctgctgctcggttccgtatccaaaagagac

SEQ ID NO: 41379 - DNA, 346 bp, Homo sapiens
  chr5:16934293-16934639
  hyper
atcaggacgctgtagcgcgttatcctgatgttccccccacttgcactagggggcagagttctccccaagggggagccacggacccctgtggtgctcagacaggctacaggaggagtgagatccgtgcaaactgaatacaaatttctatattttcatcagattttctaagggacccagaacacaaaaacaacaaagttaagaatcattgccctaggggcagggcctccgttttcttacagatgcaagcaattaaacaccggaactcactgtagcccgagggtcctttaccactggacaacgtgcaactcttgcagaaagttctggtgcctttcgacaagcatgaaaa

SEQ ID NO: 41380 - DNA, 1485 bp, Homo sapiens
  chr5:16935457-16936942
  hyper
cacaggaagcccgcacgttttgcaaaggaaataccagacaagacctttcttggagaaaggcaggtccccgctgaacattttattgggcttcctgcacccgggcagtcgagcgggcggatcgccccgcccgcgccccggcgcgcgccgcctcacctggcgcgggtgtcccagggcgccccgagagccagccacccacgcaaacggaaacgcaccttcgctacctcccggagcaaaatgcgagcgcgggacaggacgaaacaaaacctgcccgggcttactcatcagagactccgcggggggatggggggtgatttcaggagactcccagaaagttgcgccttccagggcttaggaaaaagtacccagggcgcgcggcgtggtgggcagacgcctctctccctgggctccggaggccaggtcggactgggagcgcacttacctcggtgaagaagttatccattgttccagcgcagtcccggactcgccgagtgccgctccgactcgcggaagtcagcgccgccgcgggtccggggaaaccatgcgtgtcacggcgccactcccgaggacgcgcgcccgcggggctcccctgctgccatcgcccggtcccttcttgtccttctcaccttttgttcgcccaaacccaagtccctaactcgcccgtcccgacggcagcctttgtctcttcttcctccaagttcctcactactgggcgcagcgctcgcaagcggagaacagctggtggcacattcttcccccaggcgggggaaggcggcggggtgctggcgagcgcggccccctccctctgcgctccggccgggggccctcggggcgggcaggaggacagcgggccgcaaagtgagcaggagccgcgatccccgcgcgagcgcttggaggtgagcagtcccgcgccgcggctcagccagctctcgcccgcgggactacagcccagcgacctcgccccgccctcccgcagccggccccgccctcccgcagccggccccgccctcccgctcgcggccccgcccccaggagcttggccctccgccaaccacaccgtctggccccgcccgggcggagcgccccgcccccttcccgaccaggccccgcccactctaagcccgaagcagccgcaggctcgttagcggacccgggagggggccgcgtgtttccccaggtcttcccacgtaggcgtggggaggggatttaactcttccctctgcagagagagactaaacaatcacttagaggggaggagaagggactgggggcttctgtgcctttcatgtttagcagacccgggaaccggctcaacacggatctcattaatgcagcccggtagactagcaatctcgggaaggaagcgcggtcagcggagctgccggggctgcggggccagatcaaagcggaagacggaggctaatcagaatttctggaagctgcattcccgtgttgactttctgtcctgcagtcgggtttgcttaagac

SEQ ID NO: 41381 - DNA, 820 bp, Homo sapiens
  chr5:17216353-17217173
  hyper
ggctgggacgcaggcgagcatgaaagcgatccaaacacagccagagggcgccaaaatgccgcaaataaaagttccaaaggcgtcaactggcttttgcgggaaggtaaaattggcttttgtgtaatcaaagagctaccgttgtcaacgatgtcacgttacgttatttttgtatgtccctcttgccaacaggtaagcaaagtgaacgcatcttcctaccccggtggctattctgtgtcccggtgctaaaccaagtgtccgcccccttagggcacccggacaagccgcggttggccctagctttgactcgagcgctcgcaagcagcagcgtgcgggctgcctcggccaaccccgtcttctcaatattggtggcctccattaaagcacagacatcaaaaacatcgacggcccctttcccctcttctcttccctccttcctctcccaagttccgagagcatcctccgaggggcgacgtctctcgccccaccagctggacctcggcgaccgcgcctcccccgaagctgcagccttcggggctgagccccgcgggtgcgggtgcaggtgcggagccgcccaaggtgcgcaactcgtttgcagcggcgcagcccagacgcgcctgcagctggggctcaccccaacctcgctgccagccgaggtagcggaatcgtagtcgacgtcgggagcgggctggactggggtctgagaagggtagctggtgccagggggtgtcattcatcacctcgaggcagctccctaagtctgagcgagagcccgagcacttcttatccaacggttccaaataaatgagggggagagagagag

SEQ ID NO: 41382 - DNA, 34 bp, Homo sapiens
  chr5:17217232-17217266
  hyper
agtccacggacagcccaggcggcgcggcggggga

SEQ ID NO: 41383 - DNA, 232 bp, Homo sapiens
  chr5:17217632-17217864
  hyper
gaggagggaggctgggcgggcggacgcgcggggggagggcactgggcaggaaggggagggggagcgagcgcgagaaatgcagaggctgcagcggcggcggcggcggcagtagcggcagcggcgacgacggcggcggcagcgctccaactggctcctcgctccgggctccgccgtcgagccgggagagagcctccgccagcggccaggcaccagccagacgacgccagcgacc

SEQ ID NO: 41384 - DNA, 942 bp, Homo sapiens
  chr5:17217991-17218933
  hyper
cgccccgcagcccccgggctctcccttcatgcagcgggcagcagggatgtgggcccggattggacggcaagggcctggggtccctctgtgagggctccgtcgcacttcggggatcccgggtgatggggggcccagaagtgggaggcttcagccgctcgcatggtggaggggtgaggggggcggcgaggttggtaaacggagctggggggagggggctgtcggggagaggagctgcgggtgacgggaggaattgccgaatgcgaaaccccctcagtgcgttgagtcccggggagacggttctgtgggctgaagggagcgcttccgtcatcggagcccttaccagcctgggagaaagcgctcggggcgaggggcgcagcagccaaagatggagggtgggggtggggtggggcgggagtccggggagaaagaagatggggaatctggcccgatcagaaggaagtgggtggctttttgctttggcaaacgggttttctcgacccatgggactcctggatcttggttctggggccaaggaatacgaggttcacacggcgacgtgcactcagaagcacctcccgagcagatcggagccccagcctcgtcagtggcggaattgccttcctacgaacccgtgggctgcctcggagcagtttgttttttcgagcctttggttccaagaatgcgccaggcgcctccgccctgggtcccggccccggcccgggcccggggggtgtgggcttgaacctgacagcgcgcggccctaactgggctcagccccgctgggagcgtagggttggggttgagcagcttttgcccaaagcgctaaagctgaaacccggcgcccggttcctgctccccccgcccccgtcccccctccatttccagaaaaataaaaattgcggaatcctggatccgatcgcacgcacaatgcgcggctgcaaa

SEQ ID NO: 41385 - DNA, 56 bp, Homo sapiens
  chr5:17218985-17219041
  hyper
cgtccccagagacatttccgccttgaaacgaactcggtggacagcccttgcccatg

SEQ ID NO: 41386 - DNA, 77 bp, Homo sapiens; identical to SEQ ID NO: 3853
  chr5:17987027-17987104
  hyper

SEQ ID NO: 41387 - DNA, 17 bp, Homo sapiens
  chr5:17987223-17987240
  hyper
ctcgcctgccactcacc

SEQ ID NO: 41388 - DNA, 478 bp, Homo sapiens
  chr5:22853098-22853576
  hyper
ttctgtgcatgcaccctgaagcgatcacacacacgcggtgcaatcccaatcaaaaacggaagccttacctgatggcagaaaaggcagctgcaggagcagcagcaccgacggccgcagcagggtgccaacagctcagccttgcgcggaaggtgagacccttctcttctgtttcccctttccaaatcactgtgccaacacactgctttgcattttgtccgttttcattcaaagaaggttctccaggccgggcagccagtagacaccactttcttcctggaagaggctgcctctcttctcagaaaagcctggacccctctctgtggctccctccacatttacccttcagatcaataatgctctcggagcggctggagctcaactgcagcggcgagcggcgagccaatgggggcccaggattccctcctgtcatctccccgccctcaaaacaaaacacagcgtgcctttgacacatcattga

SEQ ID NO: 41389 - DNA, 189 bp, Homo sapiens; identical to SEQ ID NO: 3855
  chr5:24644973-24645162
  hyper

SEQ ID NO: 41390 - DNA, 30 bp, Homo sapiens; identical to SEQ ID NO: 3856
  chr5:28974970-28975000
  hyper

SEQ ID NO: 41391 - DNA, 122 bp, Homo sapiens; identical to SEQ ID NO: 3857
  chr5:29296853-29296975
  hyper

SEQ ID NO: 41392 - DNA, 30 bp, Homo sapiens; identical to SEQ ID NO: 3858
  chr5:30298760-30298790
  hyper

SEQ ID NO: 41393 - DNA, 447 bp, Homo sapiens
  chr5:31193843-31194290
  hyper
cgagcccgtaaccttcgcatcccaagagctgcagtttcagccgcgacagcaagaacggcagagccggcgaccgcggcggcggcggcggcggaggcaggagcagcctgggcgggtcgcagggtctccgcgggcgcaggaaggcgagcagaggtgggttcgggctccgttggctatgcatacatctccctttttttttttttaattctgtagcgttgatagaagccaatcagagagagagccctctccgcccggtgggtgccgcgccggagttgggagggatgctctcagcctgcgagcccgggtcggggcgggcgcgcgggtccggctgcgcgggcggcgctgctgccgctgctcaggaccgacgccgcttcccggggagcctgggcaccgctcctccgcctcctggtaagaccgatccgccgtggggctgggtgggggcaccgggaa

SEQ ID NO: 41394 - DNA, 383 bp, Homo sapiens
  chr5:31194311-31194694
  hyper
cgctgcctttctctacgccggcagaggctgccaggggagctctggcatttgcaaagttggctggtcaattaccaaagggcgctggtgcgtgcaggtcccgccgagccgtttggggcttgatttatctccacctgcccgcatcataagggtctgcgtggtgactgcttgggctgagttacatttcttagcttttggggtaaagcagaaaatcaggtagtctgaaaactctggaatgctcccagtaaggaaaacttaaactaaagagacgatttggctggtagaaggagctaaagaaaactgttagcttgcacgttccgggcaacgcctgccggctcatctaggacagaaatgcttaggttgcaaggaaagtccaacactggact

SEQ ID NO: 41395 - DNA, 152 bp, Homo sapiens
  chr5:31532166-31532318
  hyper
agtggcaccgcccgcgcctccggaacaggaaaccgagggaattaaaaagcaaacctgagaaagctgggccaagggagggaaaactcttcagcccaccgcagggccttgtgcgcggtgattggcgcgtcaacgaaagcgatggacgtctagac

SEQ ID NO: 41396 - DNA, 13 bp, Homo sapiens
  chr5:31639074-31639087
  hyper
ctcacccagagag

SEQ ID NO: 41397 - DNA, 30 bp, Homo sapiens
  chr5:31639684-31639714
  hyper
gcggggagtgaggacgccgaaccggggtcc

SEQ ID NO: 41398 - DNA, 1237 bp, Homo sapiens; identical to SEQ ID NO: 3861
  chr5:31854441-31855678
  hyper

SEQ ID NO: 41399 - DNA, 30 bp, Homo sapiens
  chr5:32193904-32193934
  hyper
ccataaatgctctacgtcagtaatgagtgg

SEQ ID NO: 41400 - DNA, 7 bp, Homo sapiens
  chr5:32313134-32313141
  hyper
gcccatc

SEQ ID NO: 41401 - DNA, 30 bp, Homo sapiens
  chr5:32567716-32567746
  hyper
ggggaagaaataagccatatctaaaccata

SEQ ID NO: 41402 - DNA, 1128 bp, Homo sapiens
  chr5:32709849-32710977
  hyper
ggaggcgagcgctgacgccagaagttgccatatccccagaaaccccagtttgccttttcaccgtcgcaagtgagaaccagagcgcgttaaaggcctcggagtaaaaaacgcagcgtctgggactgcggcacccgggttgagtcgggtgcaagtttctgccgaaagagggcgtcggtctgagactaaaagaaatttgtggacacggacgcctagtcaaatgaaagaccattttaacacattttcaatgtatttaaatgtgcgggacttaattgtcagaattctcccgcccagtgtagcccgttcacattgcaaatgacttggctgcagtaggcacagaaggtccagttccattttgacccgccccgccgcgcggcggactcccgcgatgctcctctggtcacggacttctccagagccgcttccctccggtctccaccgctgctgtggctatggccagtgggaggactgggtctccgaggcaggacctttcttggagtcgcggaaccccagcacagtgcctcgagcgctccagagaaggagcggttggatctttgagcactcaggttggaggggagcgtgtgtcgtacccgggggacctaccgggaacgttttgggaaagacagtccctttatttaggtacctggtttagcaaacaaagccccgaggacgctttggggatgctttccaagctttgtgacacctccagaagttgaaccattccctcgcctttgggagcaacaagtttcactttcctgctctcagtgcgctgacagagggtccgtgagctgggacactgtgacctcggcaccgctgcgattccagcgcaaacctgcgtggcccagggggagggggctggcgcggggctgaggaaggcggggtgtaggtgacgcccgggccagccgggcacaccaggtccgcgatggagccatctgcactgggaccttggtccttgttccctgaccttgcgccgagggaccaggaaggtcaggtgctcgccccgcgtcggtgcttcaggagggaatgtggccagaacgagaaaggtgagagcaagcggcacctaaggatttttgcaccgaaaccacaatttctagaaccatccctttcccccagtcctggtttttttttttt

SEQ ID NO: 41403 - DNA, 1065 bp, Homo sapiens; identical to SEQ ID NO: 3865
  chr5:32711036-32712101
  hyper

SEQ ID NO: 41404 - DNA, 812 bp, Homo sapiens
  chr5:32712289-32713101
  hyper
cgagtatgcagcagcgccagtggcccggcttgcatcgcactgggacctgcccatgctgtcggctggggcgctggccgctggcttccagcacaaggactctgagtactcgcacctcacgcgcgtggcgcccgcctacgccaagatgggcgagatgatgctcgccctgttccgccaccaccactggagccgcgctgcactggtctacagcgacgacaagctggagcggaactgctacttcaccctcgagggggtccacgaggtcttccaggaggagggtttgcacacgtccatctacagtttcgacgagaccaaagacttggatctggaagacatcgtgcgcaatatccaggccagtgagagaggtgagcaggggcgcgtcccgggccccgggccctaacccaaccgctctccgcggctctccctgcacactcgtccactctgcagaccccactccccactgcggcgctgaggtcgggtgcgcgcgggcactcgttcaggtatgcgccgtgtggctgcgacaacctttgacgaccgcccatcgcggtgtacgtagagggtcccagggaggtgaaggggttggaggagagggcgtctgtagctcctgcgtgcccaggtccaacaggtgctgtcaaacacttcgatgttttttcttcccagtttccactttgccagcgccgggctggtgattagggggcgcactcccagtgcctggctccatccagggtctgaagcatccgaggcggaaagaacttgttccccagtcctttgccagcgtgcgcccccacttagtgcggaagcgtccgcggacgcct

SEQ ID NO: 41405 - DNA, 30 bp, Homo sapiens
  chr5:33441289-33441319
  hyper
ctagtgggtgcagacgctacgctcgcggcg

SEQ ID NO: 41406 - DNA, 359 bp, Homo sapiens
  chr5:33892085-33892444
  hyper
ctgcaaagctgcccgcgatctccctgtgcttttttaagcagaaaggagctagacacctttttcccctccctcctcctaaaaggggagtgattcagctgacagtgtccgctttcggcggggtgtggaatgggccagagcgggagggcgcagcccaccccggtccccacccctccgcctcccgcatgccccgcggcctcgcagcccgcccgctcggtgcatcttcctcccggactcccacccccgcgctcctccggccccgccccgaacgccaggcccagctggccgagccggccaaataggggagacccgggagagccgccctgggaggcactggaggaagctgcgagtgagaggccccc

SEQ ID NO: 41407 - DNA, 597 bp, Homo sapiens
  chr5:33936114-33936711
  hyper
tggagaggaaaactggagtggcgggtgggctttgcctgcagctcaactctccctcgcggcgcgggcgcggctgggttcagcacctcggaaagcgcccctcgcggcgccccgggattacgcatgctccttggggcccgccgccttggccgtgcaagtgccaccgtaactggtgagagccgctggcaacccacccggagttgacaaccgcggagagacgcagacacccactgacctccaggaagctgagcgtggtggatggaactctacgatctctttctctccaaggacggaaacctcatccaagcagtcccagaggaaacggataaaggtatttgaaagggagcgagcggccccaaatcgcacaattgagcggctgggggagttatgcgccagtgccccagtgaccgcgggacacggagaggggaagtctgcgttgtacataaggacctagggactccgagcttggcctgagaacccttggacgccgagtgcttgccttacgggctgcactcctcaactctgctccaaagcagccgctgagctcaactcctgcgtccagggcgttcgctgcgcgccaggacgcgcttagtacccagt

SEQ ID NO: 41408 - DNA, 53 bp, Homo sapiens
  chr5:34008089-34008142
  hyper
gacagctccacgaccgagatgccctgcagtgccatggcgcttcccagtgcccc

SEQ ID NO: 41409 - DNA, 80 bp, Homo sapiens; identical to SEQ ID NO: 3870
  chr5:34486430-34486510
  hyper

SEQ ID NO: 41410 - DNA, 1630 bp, Homo sapiens; identical to SEQ ID NO: 3871
  chr5:34655805-34657435
  hyper

SEQ ID NO: 41411 - DNA, 30 bp, Homo sapiens
  chr5:34839087-34839117
  hyper
gttttggggcgagccggaggccgggcgcgt

SEQ ID NO: 41412 - DNA, 7 bp, Homo sapiens
  chr5:34915397-34915404
  hyper
tggcggg

SEQ ID NO: 41413 - DNA, 30 bp, Homo sapiens
  chr5:34929945-34929975
  hyper
ctgggggtgcggcgcgacgccagcgaggag

SEQ ID NO: 41414 - DNA, 640 bp, Homo sapiens
  chr5:35229836-35230476
  hyper
taaactttccccgccggatgcccgcgaggctgctgcggcggcggctgctgctgatgggagagtctcgagtccggctttcatcacatcacctgtctgcgccccttccccctccccgctctttttttcttttctttttattttgacgcaaataatttgcattctgagaatcccacaatcaacgccgaaactcatgctcaaggatacaggtgaagatgcctttgacaaaggcgaatgcgagccgagtgcagtttgtaaaagctggggttgggggcagtggtggaggcaaagcaccttaagagtattttttagcccctctgagaagggacatccgggcgggaggcgggcggatcccgggcttccccgccggctgccgactctggctcctggctggcgttctctccaggagcccgcgccggtggccccgctctccccttcagcacgcgggcctcgaacccgcatcccggagagcggccgcccgcgcagcccctgccgcgcgccgtcggaggcggcctcagctcgccatgggtactcacttttgccagggagcaaagtctgccacatcagtcgatgagtacttcctgcacgaggacatgaagctccattgtgtggaaagctgtttcgcgaacggtcggtaaaatcc

SEQ ID NO: 41415 - DNA, 30 bp, Homo sapiens
  chr5:36152120-36152150
  hyper
actacgaagcgggacggaaactacaattcc

SEQ ID NO: 41416 - DNA, 30 bp, Homo sapiens
  chr5:36152363-36152393
  hyper
tatgcacaggtaaacggattgcaaaaaggg

SEQ ID NO: 41417 - DNA, 104 bp, Homo sapiens
  chr5:36606431-36606535
  hyper
gactttcagctttccgattgtgtgcgctttatttttcaattcttcctagtcccggttttgcatttctaatgacagtgaactgacaaagcgtgaaagtggtctaa

SEQ ID NO: 41418 - DNA, 43 bp, Homo sapiens; identical to SEQ ID NO: 3874
  chr5:36606741-36606784
  hyper

SEQ ID NO: 41419 - DNA, 70 bp, Homo sapiens
  chr5:36607362-36607432
  hyper
cccacaggcgcacacgctggctgcttgcgttggcagcgacacacatccatggtacggctggttttcactc

SEQ ID NO: 41420 - DNA, 492 bp, Homo sapiens; identical to SEQ ID NO: 3876
  chr5:36690186-36690678
  hyper

SEQ ID NO: 41421 - DNA, 300 bp, Homo sapiens
  chr5:36693220-36693520
  hyper
gagtctaccagagaacaaaaccgccccttcgtgtgccagcgacctccccttctgccagaccccctcccactggcctcctccctgccctgccaagcggggacggagagccagccggccctggcccggtgggaacccagttgatggtgcgcttattagctgtcctgagcgcggggacaaactttctgtacctgggccgctgctgccaccctgcggccaagacctttctctaggccccgatgacccagagcagcccggaccagacaacgtgcaaagaggagcgcttacagcaaactcctccct

SEQ ID NO: 41422 - DNA, 30 bp, Homo sapiens
  chr5:36744874-36744904
  hyper
acaaggctttatttcgtcccggcagctggc

SEQ ID NO: 41423 - DNA, 316 bp, Homo sapiens
  chr5:36745317-36745633
  hyper
aacagtttcacacacgtcgctggagcccgtgctcgaccagctgctgtgctggggatttgctttctgcggctttgggagtgtcaggtagcaaaacgaagagagtagtcgactagaacggtggcggggaggaggaggagggattgtctgcagtggagtcgggagcctcctccggaccaggacaggtaaaaccggtctgccaggtctcagggggagcgggtggagacgtcccacctcacctggctgcgctccgactcaggctcagccggcaggttctggggcaatgggggaagggagaggggccgggcccttgtgggtc

SEQ ID NO: 41424 - DNA, 791 bp, Homo sapiens
  chr5:37248994-37249785
  hyper
gacgttctattcctccggatcctgctcgagaagctgggggactcgggtccggtgccgaggtgtggcccgagcctggcaccacccacgccggccgggtgaccccggccccttggggctcccgcgctccgtcagcaggcgacgctgggaggctggggtaggcccagagcgaggacgggcccggactgggtagtggggatgtaccagggccgggtgcggcgggagacggcccgggaggcggaaggtcgcggacctgcccgacagaagagtagatgaggggagaccgaggacgcccgggtccggggagcttacgaggaggccaggatcgcggggtaaggaatccgcgggcagttacctccgccaggggcagggtccggccagtcaggcgcgagaaggctaggcgaggccgactgcgcggggtgaagacgccaggccgacagctgcgggccctaccgccagccctgacgcgagcctgcgtcctggcgacggcggagggcgggcagggggcgcgggcgctgccacggcgcctgctcagaaccggccgggaacgccgcgggcgggtctccccggtcctccgcccctccagccctgctctcaggcctccgcccgggccctctaagctgccagccgcgcccgcctccgggctcctcgcccctcctcccgcgcgctcccctcctcagcggccgccggaccccctcagttcacttctcccagttaacgcgttcctcggacgctgctagtttgagcgcacaggcattgggcggggctcacgggggagccgcttaataaccgac

SEQ ID NO: 41425 - DNA, 317 bp, Homo sapiens
  chr5:37370925-37371242
  hyper
gggcagacaccataagcagctcggaaaggtccgggtacatgcggtcctcttgcaactgacggtcgatgagccgtccagcattttccagagcttcctgcagggctgcggcagatgtagaggccggcatcgccgcgcccaacaaagaagacggcatctcggaaatcgtagacaccagggtccagaaaaagtcaaaaaccaaggagaaacaagaaaagatccaagaagttagcttagatccgccgcctagggcgcgcgcgccaaacgagcgccttggcgcctcgacatgacgcacttccgcttcatccggtggggaactg

SEQ ID NO: 41426 - DNA, 154 bp, Homo sapiens
  chr5:37379257-37379411
  hyper
tctgagttgcgcggcgctttcccgcctgtccggtagggcggtgccgcgcagaaagccgcggtccctctgcggaaggcgccgctcttggcttcggcggcgccgctgtagcttgaaggcggtacttcctccagcatttgccgcaagttattggcaa

SEQ ID NO: 41427 - DNA, 1273 bp, Homo sapiens
  chr5:37836726-37837999
  hyper
tggcagctaggacctggggaacgcgagcttcccccctcaagccccccgccggtgccagctcccgggtgcgtgcgaaatggctggcggtccgaccggaggagcatggaggcgcggggttaatgcgccattccaaatcgcggtgcccgccagcaggaagccacagaggcactagatttcccttccgtcttaagagggttttcccttttttcctgcttggccgacggagggctttttaaattggacgtggagatcctcaattagaagtgtggcgaagctggcaaaagactacacagtggaaaactccccgcgtcgccagaggaggctcccggctgcggttcccgccctcggccgagcgccgccagcgcccggatcgagctcccctcttcccccgggacagggagggcgcattcttccctctgagcgccgccgggaccggctccagtccgaggggctctttcgttctcggtatttgctgggcgggggaaaaggggggaggttgggggactcggcacacacagcgtctactaggacgtttttcttagagtccgtgtgggctccacccctcggcttctcagtttgtctctctatcgctttcccaaaacacatctacatctgcccgacgcgcttctcctcaaccatgggcctttgcccgcggtgcaaactgctttacgcgccgccacgtgcgagaaccaagctctgctcctcaagtgacgggggctctgctctgccaggtgaccgcgcaccatttctcgtgcctggcaagctggtccccttctgggtccgggaccaccacgtcccggcagggcaaaagcagcaggccgtgggcgccggcacctgtgggtccccaggcctggggaggcaaggacgcccaggaaagccacagaagtgctcgcagaagcagccgctcgccgcgaggcacttctgagttcccggcagcagggggcaccagaaaccgtctgagccgtgtcgcgcccacgcggcccggaggctgtgttatcattttagttataaaaccggagaaccaccactccctctacgagcctcccgaaatcccattagcccgggaacctgtggaggtccttactggcatctctgcttttcaggctcccacccctccattctcgctggttttcctctccccacttcacctgagcgggtttcttggcaacctgctttcagaccatccctcaccccttccacgcgtcaccgtgacagattcgcaggaggcagcgctcccgccgtcagtgcccccgcaccttcttgtgcctggcag

SEQ ID NO: 41428 - DNA, 595 bp, Homo sapiens
  chr5:37838249-37838844
  hyper
aaaagaatttgggacacttctcgcaggcaaactgggaaagcggtctgtttaaagggccaggttccaggcccgagagcacccgaattgctagcgggaaagggctagggacacggcggacttcccagagatcggacacttgttacttgttgaaaaggcgccaccttccctgacaaagcgaaggcgcagcgaaacagtacgagtttggtcgaggccggctttgacggctttgcgggactgggtgcgtgaatgaggttggaagaaacatctcttccttgaaatacctaagcatatattccaaacactgagcaagagtcgagcgcgttctaacatctccgcagcaggggccggaagagttgcctttgtccccgcctatgagcagaagggtcgcgagctctgggatgggtaagccccccgggggcgcgcacatgggtcctggcggcggattctaccaaagccgaaactagctgggccccaggaagctggcgggaacccgcgaaagtccgtttccagcccgaagagggttcgtttttcttcgttggggcaggaaacaaaccaccagtgcggaattagcctcgaggtggtgtaaagtagtggc

SEQ ID NO: 41429 - DNA, 539 bp, Homo sapiens
  chr5:37839196-37839735
  hyper
ggcaatgatagtatctctgcacgtccagagaggacacatttcgacggcggtgggttcgaagatgacccaagccctgaatcgttctgtgacttgacggaagagcacctggccgagtcggggaaggaaactgcccctcttgggcattccgggtccaggcgcatctggggctccacagatctttgcccacgtggaaaaggcaacatgcccctccgaaaggccggcctctctccggttctacttttctctctcctcgcatagcttaggttccctctagtctttccactttctactctcaccgtttgctctggggtccagacgcacccctctgactagggcgcccttcagccggccgcacccacccgcgacgcaggcaccacccgctccctgctccccggcccgctccctcacttacctcggatcgggtctccgcagaccctaggttggacattaactccaggtgccccaagtcccagccaggagacccatccgggctgatggctggagcgcggagccccgcccaacaggtcaggggcaagagt

SEQ ID NO: 41430 - DNA, 412 bp, Homo sapiens; identical to SEQ ID NO: 3884
  chr5:37839807-37840219
  hyper

SEQ ID NO: 41431 - DNA, 95 bp, Homo sapiens; identical to SEQ ID NO: 3885
  chr5:37840267-37840362
  hyper

SEQ ID NO: 41432 - DNA, 280 bp, Homo sapiens; identical to SEQ ID NO: 3886
  chr5:37840529-37840809
  hyper

SEQ ID NO: 41433 - DNA, 508 bp, Homo sapiens
  chr5:38257400-38257908
  hyper
tcagtcaacattgtttcctcccgcgctcccaaacataggctaactgtgaagagccaggacgcccaccgagtcctggcagcgttgcaaggtggggagggggcgggcgcggtcctgtcgctagtgactgcagatttcctctgcggggcacttcctacggcctttgatctttccccaggaactgccgagggccgcgtttgcctctaagtttattccctcttggtttatttattgtatctgctttctcttctcgctggtttggaggtcagaacgccagtatgcaacgggacttgtgtcccaggcagggtctcccctctccaggcactaccgcgaaatctggcaaaaggtacattttactgagtcctagggcagcaaattcagcggcggagaaagagtctttctccattcaggagacaacccaggaagcccgatcccgggatcagaggccaggaccccgccccggccccctgccccaggcccagctgggcgccgcccaggggcttttctcggt

SEQ ID NO: 41434 - DNA, 99 bp, Homo sapiens
  chr5:38257944-38258043
  hyper
cgccaggcttaacttggagtttcatctcctccccaggagggtctcaagttgccttcctctgccgggaagggcccccactcccccgctccaggccctaat

SEQ ID NO: 41435 - DNA, 940 bp, Homo sapiens
  chr5:38258318-38259258
  hyper
ttcagggtgaggaccgcggagggtcctggacccgcagtcgcctaactcctgccctgcgtctccagtgcttgaagtcggtccctcccaggtccccaatctaggtcaccagcggggaagggctgcgctgggggtcgctagagagggtgaggggcgggctgtctgcttccgaggtgggcgaggagtgaaggtttcagggcctgtccctctcacttccactcgattgtaatttcatccccgggccggtcgagcctccctccctcccgcggccagcccttccctcccagtcggcctccttcgtcgcccccgcccccgcgaaaagccctgcagcttgcagccggcttcactcgcgcacgccgacctcccggctgcagtcctacctcttggaactacccgtgtttccgggcccagccctcgcagccccccacctcctcgccccggcccggggatccgttggggccgcgtcccccacgcgcccccggagacgccctttccgtgtgcgcccgggacttggtgaaactttgcaggcgccggctgcgaaatggatttaatccgaggcgtcttgctccggctcctgctcctggcttccagcctcggacccggcgcggtgtcgctccgagcggccatccgaaaaccaggtaatgcgctcctccgcccagagccaccacgccccgagcgcccctgctgggctccggggcgaggacacagagcgggcagcgcaccgcctccctctccccgaccaacgtctgcttaactcgcttcagctctgccaggagctgagaaaagacgcaaacctcgccctcccccgagcccgggcggcgctagggatatttatttattaaaagaatgatcaattttccagacatagtagatagaggtggtggtccccgtgtttgaccgcagagagctgacagttgggacagcgatcgtgctgtctcaatta

SEQ ID NO: 41436 - DNA, 30 bp, Homo sapiens; identical to SEQ ID NO: 3892
  chr5:38353672-38353702
  hyper

SEQ ID NO: 41437 - DNA, 267 bp, Homo sapiens; identical to SEQ ID NO: 3893
  chr5:38556093-38556360
  hyper

SEQ ID NO: 41438 - DNA, 262 bp, Homo sapiens; identical to SEQ ID NO: 3894
  chr5:38556411-38556673
  hyper

SEQ ID NO: 41439 - DNA, 787 bp, Homo sapiens
  chr5:38556773-38557560
  hyper
cgccgctcggctgggggcgcagcgggcccggccccgcccctgacccgcccctgcccccggccccggccccgccccaacccgcgcgcccccgccgatccccggccgcgcgcccgcgcgcgcgggtgctccaaggagtcggaggaacgcggccgcgcgacgggccccggacgccgagggtggtgcttcctccgagcctccggtggtgaggccgctctcagaaggtcatggaagcgcaggggagagcgaggcggccgagcccaggcaaatcctcgagaaaggccgagtgcgcgacggctctgcggggaggaccgcgcctccccgaatgcggccgctgctgccgctgcaaacagtgccttgaggagaggaaagcggggaaccgtgttttcgccgcctctgtaaccactgcacacaagaaaaccagcttctgggagagggggatgattgttgggactttgcgaattacctaaacagcccagggccgaggcgccgccgctcgcgtcctggtcctcctgccgggtgtggggctcccctgcccgagatggccagcgggcgcgccgagagtatcctggagccatctagtcttgcctcggaggcggggtgggcttatttgtgcggagaagaaacggatctcttaatggggtgagatttttcctccgtacattgttcccatttccgcagtttcacttggcctcggttttctagcagagtaatcaccaaatgaaattagctggagagcgtttgatggcgcagaatcacggtctgaagatgtttacgctgtatgccggac

SEQ ID NO: 41440 - DNA, 504 bp, Homo sapiens; identical to SEQ ID NO: 3896
  chr5:38845660-38846164
  hyper

SEQ ID NO: 41441 - DNA, 28 bp, Homo sapiens
  chr5:38846468-38846496
  hyper
cgcccccggcctgcctacctggtgggtg

SEQ ID NO: 41442 - DNA, 30 bp, Homo sapiens
  chr5:39075242-39075272
  hyper
ctgggtactgtgtccggcttttatggctct

SEQ ID NO: 41443 - DNA, 30 bp, Homo sapiens
  chr5:39394973-39395003
  hyper
agagtagagttatgacctgtatcttattca

SEQ ID NO: 41444 - DNA, 30 bp, Homo sapiens; identical to SEQ ID NO: 3897
  chr5:39424509-39424539
  hyper

SEQ ID NO: 41445 - DNA, 388 bp, Homo sapiens
  chr5:39425176-39425564
  hyper
tcgcgctgcagcggcgcagaggaccccgctcccctgagctccgcgagccccaccagctgggggcgatcgcagggacccagcgacgggaggggaaatgtgttcggggagaagtcaaaagccccagaccgacgcgggcggggggcgggtgcaaataaggacaggaaagggaagctctggaggaaaggggtgggatccaccgagcttcgtttcacagatccgttccctggattgccactgcgagtgatgtggcacacggagtcatcctaaccaacccgttggggccctttgaacaaaggactgcctttactcctgacttttctgacaagggacaacggttcctgcgcagatctgcagtttctaaagttgatcgcgcgattggatttgctcc

SEQ ID NO: 41446 - DNA, 30 bp, Homo sapiens; identical to SEQ ID NO: 3900
  chr5:39851507-39851537
  hyper

SEQ ID NO: 41447 - DNA, 735 bp, Homo sapiens
  chr5:40680492-40681227
  hyper
aaggtgaaagcaggttggaggcgggtccaggacatctgagggctgaccctgggggctcgtgaggctgccaccgctgctgccgctacaggtgagatggcgttgggctgacgttggggtcaacgggtagagaacgcagggatgcggccctcgccgaagagagccaagaagggaagagcgcgctctccaaattgcttttgtaacttgttttcagtgagcattttattgattcagaatctatcgagaatagcactagcgagctacttttcccttgagatgggtcttattcatcttggcaatggagtgagttggattgtggggaggaagaggaatgggaaaatcagtttataaatattaatgtcagcaagagtgtgctgttggcaggacgtatcgcgagcctggagattttggtggccgcagttggtaagtggctacaatccagaaagtaggatcgagttgctccccttgtcttatcagtgtatcgtttctcgggcgcgggtctaacaccttacaagtggtaatttccgctcacggcagctttgtctctcttctaccatccccagacccagccttgcactccaaggctgcgcaccgccagccactatcatgtccactcccggggtcaattcgtccgcctccttgagccccgaccggctgaacagcccagtgaccatcccggcggtgatgttcatcttcggggtggtgggcaacctggtggccatcgtggtgctgtgcaag

SEQ ID NO: 41448 - DNA, 578 bp, Homo sapiens; identical to SEQ ID NO: 3902
  chr5:40681261-40681839
  hyper

SEQ ID NO: 41449 - DNA, 31 bp, Homo sapiens; identical to SEQ ID NO: 3903
  chr5:40797553-40797584
  hyper

SEQ ID NO: 41450 - DNA, 30 bp, Homo sapiens; identical to SEQ ID NO: 3904
  chr5:40798439-40798469
  hyper

SEQ ID NO: 41451 - DNA, 30 bp, Homo sapiens
  chr5:40835227-40835257
  hyper
agaggcacaaaggacgaggatggaacgcga

SEQ ID NO: 41452 - DNA, 506 bp, Homo sapiens
  chr5:41510363-41510869
  hyper
caaggctacccggcacgcgctcgcctggcctgagacccaccctggaagacgagtttccctcccgcgggcatcgtggcaagttaccacttagtggcagataaagcagggcggggcaggtggagcgggcgccgagcgcctagcccgcagcccctgcgcgcctacctggaatggctaaattggtgagggggatgctgtgcatgctctccggcagagttgccatccagtcggctaatttcagctcgtttttcccctgagacgaggccatcgtgccagtcggcgtgcagcgcgctggtcccagcactcctcgggcaggctggcaggctgctgccgctaatccaatgtttgctctagccccgctagagtttacactcctctctgcgccacacccacaggatggcgcagacacatgctaattttaataattattcaaaacaccccgtgctcccttagtgcctccgccagactccgctggagcttttgttcctgacgtccgtgctcagctctct

SEQ ID NO: 41453 - DNA, 623 bp, Homo sapiens
  chr5:41870188-41870811
  hyper
gcaaaggcggtcatccgaggggccggcgaggccaggaacgcgtcgccgcgtgtccgtgaccagggcaccgcgccacggatgccagatcccaggctggagagagcgggtaggggcagagaagaaaacgcgggcaccactcagggtttggtccacgttcttcctgcccatggccttcctcttcccccgcactttaccttgtaccaggttgccccagatccgcgggcagaggcgcagagccgaagcccggaggagaggagtttgagagccgccatcttcgggcggtgaggcaggaggaggctgcgggttggagcgcgcgtttgagcgtcggtgcgcgactgcgaaggaaacccgggcgggctggaggctcgacagcgcgtcgatgacgtcctcccggcctttcgagccgcacgccaccggcgcgctgctggctgctgcttttaaaagaagtgaggctgggcggggccccggcggggagaagaggctctgtgcagccggggcggatcgcggggaagttcctctcagcgcctcaggtgtctgggcgtgtgcagctgtgttggcgcacacttgccgctacagcccttctgtcagccctttagcttcgatggggcgctggtggccgcctc

SEQ ID NO: 41454 - DNA, 30 bp, Homo sapiens; identical to SEQ ID NO: 3907
  chr5:41904441-41904471
  hyper

SEQ ID NO: 41455 - DNA, 30 bp, Homo sapiens
  chr5:41925700-41925730
  hyper
cctgggtctggctccgtccatgcagccatt

SEQ ID NO: 41456 - DNA, 74 bp, Homo sapiens
  chr5:42423455-42423529
  hyper
tgctttcatttggaacgggcaggcggagaggaaggaagtgtattgcaactaccaatattttcctctaggaggag

SEQ ID NO: 41457 - DNA, 517 bp, Homo sapiens
  chr5:42423573-42424090
  hyper
cgccgggaagacttcatcccagcaactcggaatgcttggcccgggcggcactcggcctctccgcagcagttctcgaactggcctccttgaacgtccgcttcgccttcgcttctgcaacctggatctgggggactgcgggccaggcgcggcgtgacccctggtgaacggtggccgccttttcccacccctgccctcccatcctcccttcccgtttcaccccgccccctctctcctccccaagcctgacagcccgcgagctgccaagcagggcgcagccatgggaagaggaggagggctagggagcggcggcggcggcggcagcggcagcagcagctgctacagtggcggtggcggcggcggctgctgctgagcccgggcggcggcggggaccccgggctggggccacgcgggccggaggccccggcaccattggccccagcgcagacgcgaacccgcgctctctgatcagaggcgaagctcggaggtactggagtggggctccgggagtctggcttta

SEQ ID NO: 41458 - DNA, 772 bp, Homo sapiens; identical to SEQ ID NO: 3910
  chr5:42424336-42425108
  hyper

SEQ ID NO: 41459 - DNA, 31 bp, Homo sapiens; identical to SEQ ID NO: 3911
  chr5:42949384-42949415
  hyper

SEQ ID NO: 41460 - DNA, 31 bp, Homo sapiens
  chr5:42950136-42950167
  hyper
ccgagatcggctccccgcgtcctgagcatgc

SEQ ID NO: 41461 - DNA, 30 bp, Homo sapiens
  chr5:42950732-42950762
  hyper
aaaaaaaaaaaaaaccgcattcgctggtac

SEQ ID NO: 41462 - DNA, 331 bp, Homo sapiens
  chr5:42950980-42951311
  hyper
agccagggccagaccggtgtttgtcctaagtcggaacttgattgggctgagaaatcacattgtgactattccacgacttgaacaaggggtagaaatcgcaggcaccgcgaaatagaaacttcctaggaccaagaagccaacgacgcccgaaaccgtggggtcctgtcacagaaaccccagcagcgcagccaccggactgggttctggaggccgagccgcagtccgtgcggcggcgctgggaagagaaggcgccccggcagctcccctgccaccggccccgaggagcggctggctcccccagcccagcgccgccgccgcccggtaactccag

SEQ ID NO: 41463 - DNA, 692 bp, Homo sapiens; identical to SEQ ID NO: 3913
  chr5:42951419-42952111
  hyper

SEQ ID NO: 41464 - DNA, 370 bp, Homo sapiens
  chr5:42991871-42992241
  hyper
agtaattagggatcacggatcagccaagaaaaatacaggttttcttaagcctgaagccactgacttgaggagggagcgtgggagtaatgtcagtagcagttttttatttcgttttcgtttttattttctagtcactaggccaccaaagaaagttccacccaacggccagtcgatccgtcgcagcgactctcttttccctgaacggagggtttatggctgacacctccacttgtttctcagagccggggctgactgccggctgcatctttgaatggcgaccaaaaaagacatgcatttgtctggcaaagtcgctggcgttcgcctggtgcccgcgcttgccgggtcctagagcagccagattttcacacca

SEQ ID NO: 41465 - DNA, 222 bp, Homo sapiens; identical to SEQ ID NO: 3915
  chr5:42992375-42992597
  hyper

SEQ ID NO: 41466 - DNA, 251 bp, Homo sapiens; identical to SEQ ID NO: 3916
  chr5:42992782-42993033
  hyper

SEQ ID NO: 41467 - DNA, 241 bp, Homo sapiens; identical to SEQ ID NO: 3917
  chr5:42993332-42993573
  hyper

SEQ ID NO: 41468 - DNA, 355 bp, Homo sapiens; identical to SEQ ID NO: 3918
  chr5:42993812-42994167
  hyper

SEQ ID NO: 41469 - DNA, 372 bp, Homo sapiens; identical to SEQ ID NO: 3919
  chr5:42994610-42994982
  hyper

SEQ ID NO: 41470 - DNA, 476 bp, Homo sapiens; identical to SEQ ID NO: 3920
  chr5:42995072-42995548
  hyper

SEQ ID NO: 41471 - DNA, 981 bp, Homo sapiens
  chr5:43007503-43008484
  hyper
ggtggagttggcaaacgtcctgcaacccatgaagagccgctatggtaccactagcggttctaggacccaaaaactaacgaaactgctcaggagaagctgcaggcttgacccaccagaggtgctgccaccgagatcaattctgctcggacgaatgagcggtgctatgactcagaaagtgccagtccgaggaaccagggatactgggacatagtgaaaggagttagccagctttagggagactgtaagggaagggtccccagagaacctccgactggtgttttgtgcagataagggaacttgcacaagggacttgcctaagcatgcctgctgcggattaagagcgcgcatgcgcactgggggaatgggatggagccacccgggattctcgccttatacaaacagggaacccagcctccttagctttcatataaaagcctttgtattcagccgttaaggagcaaccggcaacctgctttcaggacccttgttttttatgagagctttcgtttacgcttaataaattctactccactcactcttcgatatccgcgtgcccacttcctcctgatcgtgagacaaggacccggatatagctgagcttagaagcaaaaatcctgcatcaatagcaaatgcggacactgaacgactagcggagtacccagcggcaaactttagtttttggtgcagttaaggtattgccactaagaaatcgtcgtctctgagaaatatcgaggcttggaaggttgtacagtgcttccaccgagaaagcacctacccaatgaaacgcctgtggcagaaaaaccgagcccaagcccttccagcgaaagtgctgaaagagcgcctcctcggccaatcactgggctgagaccgtgagacagccagcccggggaaagtggcggcgctaggagaggggaagcgttaccacaaagcacttctgagtcttgtgaacaagaaacgttctgggttgttttgtttttgaga

SEQ ID NO: 41472 - DNA, 220 bp, Homo sapiens; identical to SEQ ID NO: 3923
  chr5:43008723-43008943
  hyper

SEQ ID NO: 41473 - DNA, 898 bp, Homo sapiens
  chr5:43017278-43018176
  hyper
ttagagaggaggtgtatgtctcgctgtcaattctacatccaacgctggaatctttcagcccattttcctccccggctgtttttgaactactatccccaaatatcgaggatatctgacagagtgaaccatcagaataaggagcgattgccacagagttccatccagtaggggagggacttgatgtgcggggcaagcctgatgcccgggtcaggcgactgtgcctttcattctccacggagatcttgaacctagagtttccaagttccgaagagatgcggttgtcgacagctctcctagaatctctgatggctctgaacggggacaaaggtctagggcagagggatggtgtggaaggacccagccacggccattggaagagcagtttcctgcaatgtaatgctgtttgcgaccagcataagctttagctctctcccaggacgagccacatccgccccattcacggtccttattccagctcctttccctctgcgaatcacactgggtgggtcgctgggggcctcggtaattacggattatggcacagccaagaaaaatacaggttttcttaagcctgaagccactgacttgaggggggagagtaggagtaatgccagcagcagttttgtatttggtttttgtttttatattctagtctctaggccacaagacaatgttgcacccagtgccagtcgatccgtcacggcgccgcaaactttccctgaacggagggtttgtggctgacatctctagtttctcagagcctgggagtgatcactggctgcaccgctgatggcgcccaaaagaacgcgcatttgtctttggcaacagcgctgggtttcgcctcgtgcccgcgcctgaagggtcctagcgccgccagattctcacactcgcgggtcca

SEQ ID NO: 41474 - DNA, 372 bp, Homo sapiens; identical to SEQ ID NO: 3925
  chr5:43018326-43018698
  hyper

SEQ ID NO: 41475 - DNA, 390 bp, Homo sapiens; identical to SEQ ID NO: 3926
  chr5:43018997-43019387
  hyper

SEQ ID NO: 41476 - DNA, 1005 bp, Homo sapiens
  chr5:43019588-43020593
  hyper
tttttttctactaattttgagcgtctcagcttcctgcttctttacttacattctctcaggatccggggagccgagctcggtctcagtctccctgctgtcaggtgccaggttgtgtctggtggctctccttcgtatgcggagctgatggttttgcatcagcgcttttgccagtagagccgactagcgttttctcagttacggcaccgttcttagcgcccagtgtgacgtttcccattcgccaggtccttatgttctctgtgctgtcactttcttggttctcgcaccgctagtatctgctaaagaacttcctaaaccatgttttactgtgcagaacggtgattgcacggagccgctgtacgcactagtaatttcatagcaccgttagctggcgctttttctgtcacaacacattaaaacgggttaaaatactgcaagcggattaaacacattaagaggattaaaacattaaaatgtctcaacacatttttctgacacaacacatttaaacggagtgggttcattcctccgaagaggatgtttaggcgtggaagcaccgctgtttcccaagagcacggtttctctctggcagcaccacttatggcaccaaaacaggtattttttggcaacaccagcactattcgctaggtgccggcgcttgctgagtcccagcgccgccagtttctctttcggtcgttaagtagctcagagccctagcggacagttttcaggtggcagtaatgctcatttcctggaacagatggttcgtggcccttgaagcgctgcgatctgtaaagctagttctctgcaaggtttgcttagtgtctgttttatttcggtttcttttcttgctatgtttatctgtcggaattacagtttgttttggttctatgtaatctctaaaatgttatcgtttttcttttgactactaatttttgtgcattcattactattgagtttcataatacctggcttgcctccgcccacggcctccggaaagcataaatg

SEQ ID NO: 41477 - DNA, 485 bp, Homo sapiens; identical to SEQ ID NO: 3928
  chr5:43040738-43041223
  hyper

SEQ ID NO: 41478 - DNA, 30 bp, Homo sapiens
  chr5:43041793-43041823
  hyper
ttaaacatttcctgcgcagctaaagcaagt

SEQ ID NO: 41479 - DNA, 1455 bp, Homo sapiens
  chr5:43042086-43043541
  hyper
gagggtggaaatcccaggcaccgcgaaatcgaaacttgctaggactaagaagccaacgacgcgcgaaaccgtggggtcctgcgacagagacgccggcggcgccgccacaggactgcgttctggaggccgagccggaacccgtgcggcggcgctgggaagagactgtgcccctgcagctcccctgtcaccggctccaaggagcgtcgggctccccccgcccagccctgcagcacccatccggcaacgccagactcggcgcaacgggggcagctgcgactttaaatctctcagatccgcggcctgagggctgccgccaccgagaaatggaggcacagagctgtgaacaagagaccacggctcgccgaaatggcggtgccaggagcctgaaagggaatgcagccggcggggttgtcaaggacaacatttgttttggcgcaaccagcggtgccgtcaccaagaaaccgtcgactctgagaaaaaaagagaagttcggctaccgagaaactccgtgcagcaagtgctgtgacagcaaaaccgccggcttcgcgccgctggcgaaagagccaacggaaacgccgggtgctgcgaccgcgaagccggcactagagggcctcggatggagaaagccccgcaccgagacgaggaaactgtgcacagcacgactagcagttgacacaaacagaaaagtgtctcgtctgctctctgggagaaagcgtggatcaaaaccagcaactcagtggagagaaccccgcagccactgaagaagttgcccacgtggcggtggggccagagaaacaccgcgatttcgacgacagccgtagggataccacagagaaacatgcgcggccacagaagtacatccagctccgcgcaatcagtggttctgcgatccagaaaccgccagctgggctagactagaaacttctaaaaaactgtcgtcccatagcagctttcctaaccacgacagacagtcgcctttagagagcacctaacggtgctgagaccggcctgggccagcaaaagcgcagagcggtgccagtgccaagaaacgcccgacttggtgaaaccaaccttgtgaccaccgattccactggcttcgcaggacgcaacgggcgaaggcgcggcggagaaaccgcaggctcccttcaccgattatgctgcgggctggggatggtggggggcacccgcgaaattgtgaaaccagcggcgctgggacccagcgatcagctgcccgtagcaaatgtctgtgcagttgcaaaagataatttttggccgtgagaaggttgccgccagagagcgtccgataacgctgacaaaggcgtggcgttgccagtgagaaacagccggcgctgggaaaggaacggtgcagcgaccgaccaactgcgcgctcggtgccaccaaagtgctactggctctacccactctgtcccccacgggcttagggaagtctgatgt

SEQ ID NO: 41480 - DNA, 373 bp, Homo sapiens
  chr5:43067190-43067563
  hyper
ggacaaatactgcttctggctcgatggtgctgcccatgaacatccgccggctctgagaaacgagctgcactgtcagtgagaaaccgtgggcactgagaaacgagcggactgcaactgataactgcccacccagtgccactacgacaaagtgctgctggcactactcccaccctccgtcctcaaatcagtcccctcccgcctaagaagacctttatttttcctagcgaagtcatactgagggccccatcaaccgatcccttgcgatgcgcatgggaaaaggaggcagtatagggaccgagaatcgggcggattgggctggccctggtaacaaaagccatccgggtcgccaaccgtcttccactgcaagaaacaa

SEQ ID NO: 41481 - DNA, 30 bp, Homo sapiens
  chr5:43120912-43120942
  hyper
gagcccagcaagcacgtgctgcggcagggc

SEQ ID NO: 41482 - DNA, 33 bp, Homo sapiens
  chr5:43121557-43121590
  hyper
gttcccttgctggtcggcgcccggaaggcgtcc

SEQ ID NO: 41483 - DNA, 1327 bp, Homo sapiens
  chr5:43191848-43193175
  hyper
ctgcagaacctaaaccctgcccgactcacccggaggagctgtcacggtggtttgctggaaaccccctttctgttgggaggattactgggtcacggtttcccaaggacatggaaacccttgctgaagcgctggaaccgctcggcacgaggcgtacgtcggtgggagctgtgtcagcccgctttcggccgtgtagctgctcccatccagactctagaaggggtcctctttgcgtcaggcccaatcacccccctccccgagcgactgcactgggtgtccctgcgccgcgcgtcccctccctctcgcccctccctcctggctgccatagaaaccagcttacaaggtccaggccggcgtccgggtgcactacaggccccccgtccctccttccccacgccagcccctcgctccggattggtccttcaggaaacgctgtggggcgtctcggtccccgctgcggagccggcctaggccggagggcggggtttgccctgggccgctgccggtcaggtcggccgcccctgacagctccgggagcctcaagcgcgacagcggcgccctcacctcgggacatccacacaccgaccgctcctgctccagaggcaacaacccagcgcgcctagcctggcgccgtgcagcgaagcccaagagctggcctcgccacgaaggtaagcgaggggctgggggactcgccgccagcacccccaccccgccacccttcctctgctaggctgcagacctgggtggctgaggaggaggcgcctctcctccccgcgacccaaggaagaaaggaagccctgccacggggtgtctgcgaagtggggtcagaagaaggttaggcgctttctggggcgtacccccacacctgcccaggccgatccgcaagcgagaggagggggcattagagccagggcgagagcgtgctcgcgcgtgtgtgcccgtgtcatgtgtggtgcccgtgtcatgtgcggcgcccatgtctatgtgcgcgcgtgtgtgcacccatgtctctgtatggtgtggacactcgtgtctgcgtgcgcgtccacacgtgagccgaggagcgcagcttagcgcctagcgttgcgcacagcgggtgcgctggaccagagccctaaggcaccagaccaaatctggagcgtttgttacaagggcagaagaccggcgtgatctccccacgcgcgccggccggtgctgctggtggagagaactgacatctaacgcatgtggcccaggagaacaaaaccttccattgcaccccacgccgcgactctccccagcgaaaggtgcttcttttggaagaccgcacgaagtaaggaagagcctcttt

SEQ ID NO: 41484 - DNA, 307 bp, Homo sapiens; identical to SEQ ID NO: 3932
  chr5:43396922-43397229
  hyper

SEQ ID NO: 41485 - DNA, 125 bp, Homo sapiens; identical to SEQ ID NO: 3933
  chr5:43397305-43397430
  hyper

SEQ ID NO: 41486 - DNA, 173 bp, Homo sapiens
  chr5:43484115-43484288
  hyper
ctcgagtttctcctcgcccaccgtaggccccgacccctaaaaaggaaacttttgggacgtcagagtgagaggagaaaagtgtctttttagtttagttttgtcaaacctgaggattcgtttttcagtttagccggagctgtgccgcaaacgtagctgccgacatccccacgacg

SEQ ID NO: 41487 - DNA, 30 bp, Homo sapiens
  chr5:43484710-43484740
  hyper
gctaggtcccatcccgtctctgcctcagag

SEQ ID NO: 41488 - DNA, 30 bp, Homo sapiens
  chr5:43514973-43515003
  hyper
aatgctctggaagccgcagcgtcggcgcct

SEQ ID NO: 41489 - DNA, 30 bp, Homo sapiens; identical to SEQ ID NO: 3934
  chr5:43556676-43556706
  hyper

SEQ ID NO: 41490 - DNA, 247 bp, Homo sapiens; identical to SEQ ID NO: 3935
  chr5:43557518-43557765
  hyper

SEQ ID NO: 41491 - DNA, 30 bp, Homo sapiens
  chr5:43602365-43602395
  hyper
atagaaataaatgacgttactgacacttca

SEQ ID NO: 41492 - DNA, 30 bp, Homo sapiens
  chr5:43603628-43603658
  hyper
gtctcctgctggggcgatgtcgaagggagt

SEQ ID NO: 41493 - DNA, 1176 bp, Homo sapiens
  chr5:44388245-44389421
  hyper
gatgtgaagggagcgcgcttaggggaggggatgcggcagcacaatgtatacacgggggttggggggtgaattagtgtgaaagtattccacttaatcattttacaggggttggggacgtaaatatttagctggccacatctggaacagatttttcccccccgtgtgggctgggggtggataattggaaggaggggagcatgcatttgttacttactgtacgggcagttctccttcttggtcccgctgaccttcccgttcttctcaatcttgagaaagtacttggtgaaagagaatagctttctccagcggacatctccttgaaggtgattgtagctccgcacatgccttcccgcgctggaaggagaggagaaggaggaggaagaagagttggtggcctctggtgacaccatgtcctgaccaagggcttggcaggtgacagggacggaagacaccaagaacagcaacaaaaagcagcagcagcagcagccgggcaggtggggaaaggctgaggcacaatgtgtcagtatccatttccacattgtactgaaactctcggcactggaaattgtctcatcagaaggaacatactggaagggtaagacccgatgcaaggcaaggagagagctcgaggtggtggctgctggttagctccctctgggcgcggatctggccagaagtgaatgcaccaacatccataactcctcggaaaagccggctgactcccctcgctcctttctcggatccgctgcctacgcctctggagcctcccggtaaatggtggacgtgggtggccgcagcagcaggagctggtggtggcgttggtggtgttggtcaccagcgctcttcgctcccccaggagttactttgttctcttctttactcctttcttcaccatgttagatgccaaaaaggtctgaaaaacagatgacagcacggtgaacaaaacccaagggaggtggggtggggaatagggggagatatctgcacccctctgcggttggcaccttctggtctctctctgcggagccccagcctgcgagccacttctacaagtatatccctttggagttgtcagaagtggaggcagctgcccagtcgccgttgttttcttccctctcttcctttctgtttttagtggtgcctgccgatttgaaggctgccgaaagtcactttttg

SEQ ID NO: 41494 - DNA, 82 bp, Homo sapiens
  chr5:44389781-44389863
  hyper
cgccggcgcctctagctctgtctaattcgctgctaaagcgtcctatgcttgcagcgcgggccacggcgctgacggtatcttc

SEQ ID NO: 41495 - DNA, 235 bp, Homo sapiens
  chr5:44390200-44390435
  hyper
aatcactgatttctcgcttccgttgctgaagtaaaaagttcacactttggccctctctgccttttaagctcagggagatttatcgtcacccttaaaagttgcctctctcggcgcaaatgaaatcagggacccaaataaccgatttctaattgctaacatgagcccttcactgaatcatgcgtgcacttcaaagcaaacgcactttatggcgatcgcaaagattttaccatataat

SEQ ID NO: 41496 - DNA, 30 bp, Homo sapiens
  chr5:44706482-44706512
  hyper
tgctttttattgactatggaaagaacacag

SEQ ID NO: 41497 - DNA, 49 bp, Homo sapiens
  chr5:45695190-45695239
  hyper
cttttgcctgccggccgctgtttctgagtaaacacagcgaggataacca

SEQ ID NO: 41498 - DNA, 294 bp, Homo sapiens
  chr5:45695313-45695607
  hyper
cgctgtctccggttacccagtcttcttctgagccccagaagcctccttttccctcctggttgagaccacacttgagggagccgcgcgaggaagggtggcttcccgcttcctcacgctctcgtctctgaagtaaaagtttcccttgtacaacttcgcctcctcccaggagggtgaccgtggcctccatccttccctgatctgtccccgaagttcaggaggccaaggaggagagcccgtccgggattcccgggcaacaggagcacatcctccgagcccctcctgggtggaaactac

SEQ ID NO: 41499 - DNA, 315 bp, Homo sapiens
  chr5:45695648-45695963
  hyper
cgccggcagcgccaccccccgcccgccctcctagtccccgggacgccccccacccaagggcggggaagcgcgtttcagggcgcgcctgaagggagggtggggcggcgaccgggagccctcacctgaaatcactgtaagggtggataatccagaagcctgcagttttaaccctttcctgctccttttccaccgccttctggctcccaaacatgcggagggagaatttgttgaccccgggctgcagcatggaggtgaactgcctctgcatgaagccgtactgccgccggggcccctcggcgtcttcgaagccccccg

SEQ ID NO: 41500 - DNA, 493 bp, Homo sapiens
  chr5:45696137-45696630
  hyper
cgctgttgccatcgtcccggctgttagacgaagagttgggcttgccgcctccttccatgcccggaggacgcggccggcgacggcgcgggctccagactcgccggccgcccggcgccggagacacgtagccgagagggtaggggcccgagccggctgccggcgagcccagctgcccgtcgcggcggcggcggcggcggcggcggctgctgcttcccgaccgcgccgctgctagctgcgcgcctggctcccgccgccgccgctgcccttagtggctgcggtccgggctccggtgcggctggtgctgaagctgaggctgccggagctaggcgaggctcagctcggctcagccctcgcgccccagcgcctcccctcggctgccctctgttggccagaaagggtctctccccgtccgctctccacacatgctcgttactcttgctctacttctgcccagcgtgacattgaactcaagagccctcggaggagacattca

SEQ ID NO: 41501 - DNA, 391 bp, Homo sapiens
  chr5:49736586-49736977
  hyper
cagactctgccctgttacctacgcgcccgactcgcggggcgctgttcgttcaagactcgccccaaagagcgcaggaacgcgagccgcagcagtttcagggttcagcttaggtgacacaaacgtagctaatgggaggccgccgccgactctcccacccgcccttaccagcatccccgcgcctctccccgccacccttgcccggcgcgccggcgatgccctctgcccgcggggacccgagcctcgcgcgccctccgccctccctaccctggaccctgtacccatcacacctggggcactgccgtccgccgagcttgggcgcgcggcagcgagaaggcactggaggaggagcagccggggcgtacgcgccctggcctccagcaggccggggagg

SEQ ID NO: 41502 - DNA, 222 bp, Homo sapiens; identical to SEQ ID NO: 3944
  chr5:49737098-49737320
  hyper

SEQ ID NO: 41503 - DNA, 30 bp, Homo sapiens
  chr5:50259429-50259459
  hyper
gggcccctcgatctcgcgccgcagactgcg

SEQ ID NO: 41504 - DNA, 265 bp, Homo sapiens
  chr5:50263432-50263697
  hyper
tcccccactcttcctcgtctcccgcccccgccccccatctttctccagctagcctcgccccaattaacgccctacagccagtcagccttacacctgctggaaaaatcttggtggcagtggtgggaggtggtggttttggtttttagcagagcgcgggagcaccctgtcacaccctcctgagaccgccctaggaccgtcctctggaatatcttggagccaggagccagggaggctttcctcagtcccagtcgttgcctgtcgccgc

SEQ ID NO: 41505 - DNA, 30 bp, Homo sapiens
  chr5:50264141-50264171
  hyper
gactgctcgatgcacgttataaatctgata

SEQ ID NO: 41506 - DNA, 30 bp, Homo sapiens
  chr5:50264501-50264531
  hyper
aggaggggctaaggcgagggtccaggcatt

SEQ ID NO: 41507 - DNA, 30 bp, Homo sapiens
  chr5:50264821-50264851
  hyper
gagaccaagagatccggagtcaggctgtga

SEQ ID NO: 41508 - DNA, 65 bp, Homo sapiens
  chr5:50265100-50265165
  hyper
tgaacgcggcagctccggaactggacaacagctgcgtggtgcagccaatcccggggcctgtggga

SEQ ID NO: 41509 - DNA, 481 bp, Homo sapiens
  chr5:50265190-50265671
  hyper
cgggcgagagcaaggagcctcccggccacacagccacaggcgctgcggaacccagcccggactctccccggctggagtgtgcgaagggcttcccgcccaggggcccagggtggtcttagtgaaaaagggatggcgctgcagcactgaccacgttgccctggtttctccatttctccttcccaagtctctgcctctgtttccccatgacccggaggacgcgcctacggaagagacgtctggtcgagggggtgccggggagcggaagggggaggggaaggtctcatccctgggacgctgacacccccctccccgcggcactccagctccgaagagcgagcttcggttccgcccgccctccagaccatttgcttattctcactattgttttaatttattgtgcagcctgttgcgccgcgggcccggctgagccatttggggccctctagatgccctgcagggcgcctgtctccggacgaccacc

SEQ ID NO: 41510 - DNA, 30 bp, Homo sapiens; identical to SEQ ID NO: 3947
  chr5:50673738-50673768
  hyper

SEQ ID NO: 41511 - DNA, 315 bp, Homo sapiens
  chr5:50674560-50674875
  hyper
ggggtaaatggtgtccgtcctttcagaaagaatgatcaactacatggaggtaacttgctctgggtttcctgagatctcgggcggacccgtccgtgttttgccagattcagtgcaaatgtagatttcagctgaaccggtcaggacttgagagatagctgtttcactctccggactgcaaccacttccgcgagaatctgatacatttaatgaaagctttgccaaatgtacgggtcagcgcgtccttgggccaccaccacttgggtcagcacactgcactcactagcgccaacctgggctccacgcagcagaactcgg

SEQ ID NO: 41512 - DNA, 30 bp, Homo sapiens
  chr5:50675099-50675129
  hyper
tttcgcagctgccccgatgccgggagcatg

SEQ ID NO: 41513 - DNA, 324 bp, Homo sapiens
  chr5:50677749-50678073
  hyper
caagcccagccaatgcggccggccaggatttacagctcttatcaagggttagattttgcgaaagatataaagaaaggagtttcctaacacaccgggtcttctcacagcaacaagacaccgaaattaagccttctatggtttgtgtctgtaggactttttagataaaactggcagccccattagataagaaatggctttttagaagctttgggggaagcgcgggggttcttcgtggccttcctgtgactgtctttgggagaccgtaacagatgatgggaacatgtaagaatgattgaagaaggttaccggcgagttgcacctaac

SEQ ID NO: 41514 - DNA, 33 bp, Homo sapiens
  chr5:50678433-50678466
  hyper
gacaaaaagtcagtccgcggagtcaacttcggt

SEQ ID NO: 41515 - DNA, 491 bp, Homo sapiens
  chr5:50678904-50679395
  hyper
acaggaggcgagggcgcaggcggcgcggccgggaaggaacgcgggaggggacagaaggaagaggaagaggaggagagggaggccagagccagaacagcccggcagcccgagcttcgggggagaacggcctgagccccgagcaagttgcctcgggagccctaatcctctcccgctggctcgccgagcggtcagtggcgctcagcggcggcgaggctgaaatatgataatcagaacagctgcgccgcgcgccctgcagccaatgggcgcggcgctcgcctgacgtccccgcgcgctgcgtcagaccaatggcgatggagctgagttggagcagagaagtttgagtaagagataaggaagagaggtgcccgagccgcgccgagtctgccgccgccgcagcgcctccgctccgccaactccgccggcttaaattggactcctagatccgcgagggcgcggcgcagccgagcagcggctctttcagcattggcaac

SEQ ID NO: 41516 - DNA, 30 bp, Homo sapiens
  chr5:50685186-50685216
  hyper
gacacgaggaggggcgagtgctgcgtttca

SEQ ID NO: 41517 - DNA, 30 bp, Homo sapiens
  chr5:50685683-50685713
  hyper
ggtttcaaaacaagcggtgcaaggacaaga

SEQ ID NO: 41518 - DNA, 30 bp, Homo sapiens; identical to SEQ ID NO: 3951
  chr5:50694089-50694119
  hyper

SEQ ID NO: 41519 - DNA, 581 bp, Homo sapiens
  chr5:50694659-50695240
  hyper
gatgttatttgtggatttgaccgagttagctacttaattttgcgcgttgtcccattggttctacccccaggtgcgttgcccacgtccagcgggcagggcagcgcagcgcctgtctgcactcaggttaggggtgggaagtgctgggaatgggggacccggacactggtctaaccagccccgccactcccgcgggcaagtcagcccttgatcctttaaagcagggacaatcgacgtggtccgagagaggaaaataagggtatttctgggcccttctctttcaggagttgatcaggttggcagatctggagggctaatccaaacaaggcgcttgacttgtgaggtcgcgagtctagacagagctggtggctcggcggctccttatctttccctggaatcagccgaagaggcgctccccggcccactccgctcggctcgcccgggtccggagccaccgctcgacgcagacggcacaacaaacagcacctgaggctttatagctcgctttattgtttaatggagaatgcggcataacattcatttgtcttcttggttccgcgacctggccgctttgcagccacaga

SEQ ID NO: 41520 - DNA, 305 bp, Homo sapiens
  chr5:52083829-52084134
  hyper
gtttgcttctacagcccgtggactttagcctaaacacggacccgcgaagctggctttatttgtccatgtctcggacagagcctgggaagctgccagtgagatttcagagaccaagagcgcgaaggggcgggcgatgtggcaatccgtctgggatgtgaaaagcgtggagcgcatttagaggaattcgacgaaaacacaggaaatcactcctctcccgctcctgggcgccgctgccactggggcagaggactgggaaccgcggcagcgggataagtggcccagccagagagcgcagctcccgcgcc

SEQ ID NO: 41521 - DNA, 30 bp, Homo sapiens
  chr5:52084398-52084428
  hyper
aggcaggagtttcgcgttctggttttgata

SEQ ID NO: 41522 - DNA, 30 bp, Homo sapiens
  chr5:52095797-52095827
  hyper
tgagggagttcattcgtccggagcgcctca

SEQ ID NO: 41523 - DNA, 475 bp, Homo sapiens
  chr5:52284770-52285245
  hyper
tgccaggagccgggcgctgccaagggctgcggaggggccacgttctcccggggactggggcatctcctgcgtgctggcgacaggctgcgggggcggagtggtgccagggcgggcgctcgcccgtcggatatgcccacccgtcccgtccagggcaggaaagcctgccagggcgccatccccatccccaccgcctccaggctgccggggctgggccgctgtacgggagccaaggtgcggtgccccgcgtgtggacgagccgaggtgcagcccgcggggccgcagggccggggtggggcggggcgcggccggagcagatccggtgtttgcggaatcaggaggggcgggctggggcgggccctcggcgctgcaggagctgcccagaaacttttccctgctctcaccgggcgggggagagaagccctctggacagcttctagagtgtgcaggttctcgtatccctcggccaagggtatcc

SEQ ID NO: 41524 - DNA, 75 bp, Homo sapiens
  chr5:52285752-52285827
  hyper
ggctcagacaggtgccgcgcctgccagagaccagggaaatccggaatccattgctgatggcggcctgcagctccc

SEQ ID NO: 41525 - DNA, 30 bp, Homo sapiens
  chr5:52405503-52405533
  hyper
tccgcacccaggcccgcacgcacacccgcc

SEQ ID NO: 41526 - DNA, 345 bp, Homo sapiens; identical to SEQ ID NO: 3956
  chr5:52776320-52776665
  hyper

SEQ ID NO: 41527 - DNA, 554 bp, Homo sapiens; identical to SEQ ID NO: 3957
  chr5:52778336-52778890
  hyper

SEQ ID NO: 41528 - DNA, 30 bp, Homo sapiens
  chr5:53606114-53606144
  hyper
aaaggcttaccagccggctgcgggagaaag

SEQ ID NO: 41529 - DNA, 239 bp, Homo sapiens
  chr5:53606415-53606654
  hyper
cgaaagcagccgactagccggagattacacaaggggcgcggcgattggccaggcgggcgggcagaaggaaagaagcgtgctcattggctgcggcgcctataaaaggcaggccccagctggtggcaggagagaaacgcgggagtggtgggggatgtgggttcctgtgtgctgagcggaggagccggggtgggggcggtgcaagcggaagaaagagccaagagagcggaaaatcggctggt

SEQ ID NO: 41530 - DNA, 233 bp, Homo sapiens
  chr5:53813365-53813598
  hyper
aaacctccttcagccgcgctcactacggcgcccggcttcgcggcaccggccactagagggcagtggccgccgcaaagccgacgcgggcggtgggctcggcggctcggccatcgcttgctctcgcctggcaaggggctctcggccgtggattagcgcagctggagacgtgggaggccgcgggccccgcccccgaccggcggcggctgcggcggcccagcgcggcagtcggcgct

SEQ ID NO: 41531 - DNA, 108 bp, Homo sapiens; identical to SEQ ID NO: 3959
  chr5:54469035-54469143
  hyper

SEQ ID NO: 41532 - DNA, 30 bp, Homo sapiens
  chr5:54469485-54469515
  hyper
atgtgaggcgtgttcgtcagctcttcgttt

SEQ ID NO: 41533 - DNA, 552 bp, Homo sapiens; identical to SEQ ID NO: 3960
  chr5:54472200-54472752
  hyper

SEQ ID NO: 41534 - DNA, 352 bp, Homo sapiens; identical to SEQ ID NO: 3961
  chr5:54516328-54516680
  hyper

SEQ ID NO: 41535 - DNA, 138 bp, Homo sapiens; identical to SEQ ID NO: 3962
  chr5:54516831-54516969
  hyper

SEQ ID NO: 41536 - DNA, 53 bp, Homo sapiens; identical to SEQ ID NO: 3963
  chr5:54518579-54518632
  hyper

SEQ ID NO: 41537 - DNA, 155 bp, Homo sapiens; identical to SEQ ID NO: 3964
  chr5:54519133-54519288
  hyper

SEQ ID NO: 41538 - DNA, 185 bp, Homo sapiens; identical to SEQ ID NO: 3965
  chr5:54519382-54519567
  hyper

SEQ ID NO: 41539 - DNA, 30 bp, Homo sapiens
  chr5:54522996-54523026
  hyper
cggaggcggcggcccgggctggggcagcga

SEQ ID NO: 41540 - DNA, 30 bp, Homo sapiens
  chr5:54523712-54523742
  hyper
cttctcggcagtggcgcgtgagcacagcct

SEQ ID NO: 41541 - DNA, 313 bp, Homo sapiens; identical to SEQ ID NO: 3966
  chr5:54527322-54527635
  hyper

SEQ ID NO: 41542 - DNA, 22 bp, Homo sapiens
  chr5:54527844-54527866
  hyper
cgcagttgatctaactactgtc

SEQ ID NO: 41543 - DNA, 496 bp, Homo sapiens
  chr5:54528084-54528580
  hyper
cagcactgaatcgtgcgcgctggaaagacgggcggccagggagtggcgggggagtttggctgcgtccccagatgccgcgtgtacctgtttgataccccaggtacctgtttgcaagcgatgagcaaggaggtgaccccaagcagctggaagcagtctgcagccaccggcgtggtggtgaggaagcggtccagagtgttcaccgtcaggcacagcgactcgaaggagaggccgaattggcggtgcaccgggatcagccagctgagcagcttacagcgggattccgccgtcacctgccgggaaggaggggggaggcgggcccgctgggcttagggtggagagggactgtggaagggaaggaagggccaagaagaatcggggagcttcccaggagaggggcaagaagatttcagaaagagaaacgcaatggaaactgggaaacgcgtgggccgtgctgagccggaacaccgggattgggacctggcgctgtgcagagagc

SEQ ID NO: 41544 - DNA, 207 bp, Homo sapiens
  chr5:54529890-54530097
  hyper
gatcctgagttccaaacgaaagtcgggctagaattctgtcgacacgggaaaagttttcttcagtgacccaaacaagcaatagtgttaattcggttgcgtttgtcggttttgtttcggtgggtaccggagtagccagtgcccttccttccgccagcctcggggagcagagcctcagaagggccgtttgtgctgcggaatagattggag

SEQ ID NO: 41545 - DNA, 30 bp, Homo sapiens
  chr5:54603414-54603444
  hyper
cagaagatccttcgcggcccaggccccgac

SEQ ID NO: 41546 - DNA, 30 bp, Homo sapiens
  chr5:54603780-54603810
  hyper
actgtcttcggtcgcggggcatcgtgggta

SEQ ID NO: 41547 - DNA, 30 bp, Homo sapiens
  chr5:54831104-54831134
  hyper
tccgaactcggcctcggtacccccactagg

SEQ ID NO: 41548 - DNA, 30 bp, Homo sapiens
  chr5:55007903-55007933
  hyper
agacggttccgatgcgctgcaaagaactat

SEQ ID NO: 41549 - DNA, 30 bp, Homo sapiens
  chr5:55008197-55008227
  hyper
atgcgccaagcccgcggtcgctgtcaaacc

SEQ ID NO: 41550 - DNA, 30 bp, Homo sapiens
  chr5:55291157-55291187
  hyper
cgggtgctgcccgccgcccgctgcccccgc

SEQ ID NO: 41551 - DNA, 30 bp, Homo sapiens
  chr5:55776706-55776736
  hyper
tgatctgcagacaacgcttcttccttcctg

SEQ ID NO: 41552 - DNA, 30 bp, Homo sapiens
  chr5:56031868-56031898
  hyper
cctgctggagaaaggcatgtgcaaattaag

SEQ ID NO: 41553 - DNA, 293 bp, Homo sapiens; identical to SEQ ID NO: 3971
  chr5:56110247-56110540
  hyper

SEQ ID NO: 41554 - DNA, 108 bp, Homo sapiens
  chr5:56204902-56205010
  hyper
taactttgggaacacgggttcacgcagaagaagggctgctgtctggggaggactgaaactcgggttcccgaagtcgggctgctctggggccacggagagaaggggaga

SEQ ID NO: 41555 - DNA, 30 bp, Homo sapiens
  chr5:56206198-56206228
  hyper
gggatggtgggtttcggattggggtgagtc

SEQ ID NO: 41556 - DNA, 649 bp, Homo sapiens
  chr5:56246407-56247056
  hyper
acattacccactgggaaccaccgaagacgtaagaaaataggacaaacctgggctcgaacttccaaaagaagcctaggagagagagaagaaaacgtgaggttagatcgcacagccagggaaagaggcagcgccggcaacagggcgcagaggaggcggagtcgagcgctcctccgcagctgccaaaagtgcaagacgtagcttcactcgaatcgctcccggcccctttcgggccccctcttggctgcctcgccttcctccccgagtcccaagtgtacaaactcacagacccgggacgaagcccggagtctgagaggcaactccaagtcgcttcttggagctcagcaagtttccaagcagagaagcaaaacccagagcagtcggctggcaccatcagtcccccatccctggcatctccggagtcctccaaatcccacccggctctccgaagccccaaacaactcgaaacgtaacacccttttctggaacgaactcgcgttctgagcacctagttcgcccctggggcccgggagccccaactccgaagccgatctcttcccctgcagcgtaggccagctcgaatcggacactcgcccccaaaccaaagcgcgagccccccatcctctctctcgagtccagagatgcagctcct

SEQ ID NO: 41557 - DNA, 82 bp, Homo sapiens; identical to SEQ ID NO: 3973
  chr5:57755374-57755456
  hyper

SEQ ID NO: 41558 - DNA, 221 bp, Homo sapiens
  chr5:57755844-57756065
  hyper
agccggccgtggtcctcgcacccttgcctctggtgccgactagcacccaacaccccggtccacttgtgcgagtgagagcgctcggcgaagtcttatatacggggaggcgggaagggggcggagactcgatacgcgacatcacgtcacggcctatgccccgccccacggccggccgagcgcgcgtggccgggaagcaagtcttgtcccgccacccgggtctc

SEQ ID NO: 41559 - DNA, 116 bp, Homo sapiens
  chr5:57756488-57756604
  hyper
cgtgggggtgaaaggccgggattcgtggagccgggcattcgagcccatcgcgctagggcagacacgggcccgcagccgggatcccgggccgatcggccaaccgtgccaggatccca

SEQ ID NO: 41560 - DNA, 1548 bp, Homo sapiens
  chr5:57877869-57879417
  hyper
atcagctctgcagcccgcggccagcggcagtgtgtgcgcgctaatgacggcggaaggtgcctgggggagggcctggggaggggctggccagcgctatcgcgcccctggcacttcctaagagactgagccctttctctgcagctgcagcttggattccacgctttccctccagaggaaagaagccctccatctaaatcagctgtcttctccacatccctcctttttctctccgccagacgccacccctaccccttctattgtgttgtgccttttcattttagccccgcttcctacgtagagccctaacctcctttgtagcgagggcacttgagaatttctgaacctcgagttgtaatggagctgtatggaaaggtaagcaggcgaaaggagttccttggggtgcttagccagaaatctcgctttcacgcacttcggtgtgcgggttgtgtgtgtgactatgtacgcgcgcgcgacttctcagtgcaattatgcggataaaccactttccttatgtgtgtaccgttaatcgtctttctcccctacgtttggtgaatgagattgtaaaactgccccactctgcctaaggaaacgtagaaactttcccgattcggatggggaggggtagggcggagagtcccagagaccagctctggcttcgtttgcattggaaattagcacaaggtagtgttgtttcctaatcagaaaatcaccatctacttccgaaggcgatagttagcaaagaaaaatctccagctgagataagctggggtcacattcgcctgcccctggcgaggaaaagagcaggggagactgggagaggtaacccaggagcgtttggaaaggagtagggaggctccgcggccgagcccgactggcggatcgagcctgtttaatggtttgcttgcttgccgggagttgtagttcaccgctcgcccgtttgccgggaacacccggagggcgagactacagctcccaggagtgcacggggctcctcggcagtacgcgtgtgcggcgccaggagaggacagctccagtgctgatgttggagccggttagcgaaccccaagagtgcagagtgtggagcgtggagcgccgggactgtgcacgcttgaccggaagcccagaccagtgcggtcctagccagagagaaaggacatttgccaacaatgagacacgaagcgcccatgcaggtgggtccataaagaaagagtggcctcgggaggaattgaaagagatgcttttccccttgctccgcgcacaagcagttcaacgtaaggaaaggtctaggcggtcacccgcggagatgcggctctgtgacatgaccctgggaacagagttgggtttctttacgctctgtgtggctgtgattggggctgtcttgatgagggatcgggctattcgcaatctttctaggctctgtaaagaggataagagtgtctgtctaaaatgaaaacccaagcaaacaaaagtcagaggagcatgcaatctcgtgttggcattgatctcctctcttggcatccggggtttgagatcgcggtgaaaactcac

SEQ ID NO: 41561 - DNA, 30 bp, Homo sapiens
  chr5:58184045-58184075
  hyper
acttttgggtgcaaatgatgtctggacagc

SEQ ID NO: 41562 - DNA, 1101 bp, Homo sapiens
  chr5:58334874-58335975
  hyper
cctgccataccccgccatgctcggatgcccggtgccggcacatgagggctgctccttcatattgcccagcccggcagtgcaacgggggcggaggctgtgctcgcggggcggccggcctcggggaggcacggtctctccagcttggcgtctcgggtcggcctccagggagggcgtgcaaagagcggcgagccaactttcacacagcgacgcgagcggaaaaaccactatgcgacttttcaactgtgcggcgggcccgagtcccagtccaggagcccggctctagcggatggcgagggggtggcgagcgcgcttgggtgcccgccccgcagaggagcgtctggtccacagccggatctcctcggtccccaacccggagccgcggccccacgcccgccccgcctgccgagccttctgcacggcacttgaagtgaatgaatcagccgcggccgggtgcgcggccaccacgtttcctgttttctttctcaactcctcgggcggcaggcgcagcgcggctccaacgccgcagctttccgggaacactccccctcacgcccctctcggccctcggcgctgcctggctcctcctcaacccccttacgaaaagattccgaattgcaaaagcctgtccctgtccgtgccacccgccgcgtccttcccctcgagctctgccccgggggccccgccacctcgcagtgccatccccccggcgcagccgggcgccactcgctttgaagtgcagacgaggaggcgcgggcgcgagcgtgtgtgtctgtggggctgctgtgggactgtctgtgctaggagagcggcggaaaacccggcgtggagcgcctgcagtccgccgtccggggtcgcgcccgccgcggggctcaggagggaccggcacgcaggcgcgcacggccgcgcacctgtctcgctagaaccccgcgcgccccgccgagccactgccctccaggttgcccagaccgctggagcctctgcgactccacgaccggctgcttcctgcgaagtttcacaaacaaggttatttaggaccctcaaggtttctgagggtttaagttttagggtttctgggggttcgtttctaaaggcttaggattc

SEQ ID NO: 41563 - DNA, 30 bp, Homo sapiens
  chr5:58337465-58337495
  hyper
cctctgaggttcggctttctgtggctcctc

SEQ ID NO: 41564 - DNA, 30 bp, Homo sapiens
  chr5:58407755-58407785
  hyper
tccacatggtagtttccagtctagtacagg

SEQ ID NO: 41565 - DNA, 244 bp, Homo sapiens
  chr5:59187967-59188211
  hyper
gttatcaggaaagggaccaaacgtgggccccacatccacctccacgcctgagttaagaatctggagctgactcctcagaatggctgtaattggtcctttactcatttccttggagaagcagcggtcaacttctactaaaactcccggttgataggcggcttccctgccctgtcttccggagcacttacgttaaggggaaatcactataatcaaatctctacgtcttgcctgctgctaaaacaag

SEQ ID NO: 41566 - DNA, 59 bp, Homo sapiens; identical to SEQ ID NO: 3979
  chr5:59188275-59188334
  hyper

SEQ ID NO: 41567 - DNA, 98 bp, Homo sapiens
  chr5:59188959-59189057
  hyper
ttgcctgaatgggggagggggcgctctccactcaccgcctgagtccctggaacgaggagggccaggacatcctggatttcttcaggccgggccggtgg

SEQ ID NO: 41568 - DNA, 969 bp, Homo sapiens
  chr5:59189188-59190157
  hyper
cggcggcgggggcggcggcagggggggcggcggcggcggctgtagcggacactggggctggggctggggcgagggtggcggcggcgggggcaggtggtgatggggatgcaggaggcggaactggggctgccggagcgggtactggtggtgctgctcgtgcctccagagatgcttgggggctttgagcgtggccccgccggcgctgtcgctgccctctccgctgcccgcccgggccggcgcgctgctgccctctgcctccatcctggctcgcggctccgcgacctgctgcccagcccgggttcaccgcgctggcccgagcgccttcctgatgctgctgctgctgctgccgccgccgccgcttctgcagcccagcagaggctggtgcttagcttctcacttgaaggcgccagagcctcagggctaccgagagggggccctgccagcgggaggggtcacagaacgcggcagggctccttccaccgaggctatggcagagacacgctcccgggctccccaagtcaccaagactagggtgcgcggtgcccggtttcgccagaggttggtccttcttcctccctttcttcttcccttcctttgggcgccggcggcgagagcagggattgtcagcaactcgggctgcagaagcagcagcaacggcggcggcggcagtggtagccgcctccagggcaccggaaccctgatcccggagctgctgaaaagttggacagctccaggctggcacgcccgagctgtgactttcaccaaaaccactccagccagtcaggagtcagacctgtcctcttgatccttcccctcgccgtgcccgcgcctccctcctccacactgctccccactgccccggagccttcctcttcacctccgcttgcctcagtgctcttagagaaatggagtttggcgattcctggctggttctcagagcttgttgacgatgagccccatgctggtgct

SEQ ID NO: 41569 - DNA, 31 bp, Homo sapiens; identical to SEQ ID NO: 3981
  chr5:59506983-59507014
  hyper

SEQ ID NO: 41570 - DNA, 30 bp, Homo sapiens; identical to SEQ ID NO: 3982
  chr5:59995339-59995369
  hyper

SEQ ID NO: 41571 - DNA, 30 bp, Homo sapiens; identical to SEQ ID NO: 3983
  chr5:59996225-59996255
  hyper

SEQ ID NO: 41572 - DNA, 30 bp, Homo sapiens
  chr5:60458334-60458364
  hyper
agccgccagccgggcgtgagtaagtctagg

SEQ ID NO: 41573 - DNA, 31 bp, Homo sapiens; identical to SEQ ID NO: 3984
  chr5:60626140-60626171
  hyper

SEQ ID NO: 41574 - DNA, 30 bp, Homo sapiens
  chr5:60628015-60628045
  hyper
cgcgacggcgtgtgcgtgtcgcgcttccta

SEQ ID NO: 41575 - DNA, 31 bp, Homo sapiens
  chr5:60840110-60840141
  hyper
actgatgatgttggttcgggagaggtttggt

SEQ ID NO: 41576 - DNA, 30 bp, Homo sapiens
  chr5:61603107-61603137
  hyper
agagtgggggtgggcgaccggatgttgata

SEQ ID NO: 41577 - DNA, 30 bp, Homo sapiens
  chr5:61699401-61699431
  hyper
cgctcacgggagcgcgtcctgaccggcctc

SEQ ID NO: 41578 - DNA, 43 bp, Homo sapiens
  chr5:61708412-61708455
  hyper
ggctctttatactgcgcaagcgcactgcgcaagcgcacacaac

SEQ ID NO: 41579 - DNA, 299 bp, Homo sapiens
  chr5:63254943-63255242
  hyper
caaaaaggacaagagcgtgaattaggaggaaaaattctacatcgtaaggataaaattgctctttcaggttttactgggggagccagctggagccttgggcacgcgcgccctggggaacctttcctctttgccgcccctgcgtgtcgcccctttaaagccttcttggtctctccaatcccaagagttccgcggcatcttgcgccactggctaaggcaaaaacctcaggtgtctacccgcgcttcagggcgccccagagcgtaggcggaggaacccagatcctgtaagtcagcagccggga

SEQ ID NO: 41580 - DNA, 387 bp, Homo sapiens
  chr5:63255315-63255702
  hyper
cgcaaacagcggccggctggcgcctcccgcagtaagtaagtggcgatgtcaggtcgtacacactcgccagctacctgtacaaacagcgtccgctctctccactgtatgattgtcagtttctttggtgagtgctgacaccaaggcaagcataaacaaagtggtctgcacaccctcctcctccttgctctcccccactggcccggccttgtacttacaagtccactctaaaagataccttctagccacttgctttgagtccaaggaaacaaaggaaataggggttgtgcactgcacgagagagttaatctcaagtctgcgagaagacggggaatcccgggggcaccgctggcacggggaaaagcagcctcttccgcctctccggaccag

SEQ ID NO: 41581 - DNA, 30 bp, Homo sapiens; identical to SEQ ID NO: 3985
  chr5:63257539-63257569
  hyper

SEQ ID NO: 41582 - DNA, 158 bp, Homo sapiens
  chr5:63257798-63257956
  hyper
gctccaggatctcccggcggcggagaggtggctggaacgtctgtctgtcgctgtccattttactttgccgctcccgaactggctgccggagctggagtctccccactagcaaacagtctccaatcccagaaatatctagaaccgagaagccccatcct

SEQ ID NO: 41583 - DNA, 325 bp, Homo sapiens
  chr5:63461427-63461752
  hyper
caagggagaaaaactttcccacggttccgtctggcccgcggcgcttgtctgcctgcgcggggtcaaagcccggcgccgcccacgcgcggctcgggtgggaacccgcagacgtggggcgagcagggccgctggctgtggcgggcgagcgccggggcgccacgtccgaggccgcggggtcggggctgcaggcacagctcgagcgctttccgcggggtttggctcctgtcgcttcccgtctcgccgaaccggcatcgccgccgccggagccgcagcgagtcctcagagcctggctgctggcggccgggagcgccgggacggggcgcga

SEQ ID NO: 41584 - DNA, 30 bp, Homo sapiens
  chr5:63462172-63462202
  hyper
gtcttgtttaatttcggagcttgtggggac

SEQ ID NO: 41585 - DNA, 433 bp, Homo sapiens; identical to SEQ ID NO: 3988
  chr5:63801871-63802304
  hyper

SEQ ID NO: 41586 - DNA, 553 bp, Homo sapiens
  chr5:63802339-63802892
  hyper
cgcgcctcaggtccgggctccggctgcttggcggcggcgcccagggcaacaaccgggccgcccgcgccggggcgcactgcaccagcggcttcggcttggtggatgtgtatgcatgagttctgcaccgaatgggcgcaaaaagcgccccagccggtccacccgctcctcgatcttccagatcagcaagcccccgctgcagagcggagattgggagcgcaggggcagcggctccgagagcgcccacaaaacccaacgagccctggacgactgcaagatggtgggtgaaaactgcgcctctttttttttttttttaattgagagggggtggggggagtcatgtatgttaatcatttgcctgagtgccagccactcccccaccctcagctcctcaatgccgatcacgtggcacatgcactatttttaaatctgcagtcccccaaattcagggtgacaccctggtcgtaataaccctgcagaaagaagtgtgacagcaagggtcttggggatcagcggctgtaggttgtgcctgtaccccctcgaagaatggtggatg

SEQ ID NO: 41587 - DNA, 412 bp, Homo sapiens; identical to SEQ ID NO: 3990
  chr5:63986115-63986527
  hyper

SEQ ID NO: 41588 - DNA, 464 bp, Homo sapiens; identical to SEQ ID NO: 3991
  chr5:63986569-63987033
  hyper

SEQ ID NO: 41589 - DNA, 30 bp, Homo sapiens
  chr5:64067736-64067766
  hyper
ggtgtaagttgcctgtggccaaaaaaccac

SEQ ID NO: 41590 - DNA, 30 bp, Homo sapiens; identical to SEQ ID NO: 3992
  chr5:64331502-64331532
  hyper

SEQ ID NO: 41591 - DNA, 146 bp, Homo sapiens
  chr5:64398968-64399114
  hyper
gccattgctgcggccgctgtttgttattaaactgcccagagaaagggcttcgagtaaaaacaccaactttccagtcggggcggcgcaggtccccgggccctggaaagttctgggacggccgaggtctccccggacacccgcaccca

SEQ ID NO: 41592 - DNA, 159 bp, Homo sapiens
  chr5:64777663-64777822
  hyper
ctagatctcactaccggcccccagccaacttgaattgcagcaggagaaaattttggcagcttttcctcggaggcagagcacactgacgtcagtctgcagatgtgcctgggctgcgtcgggtgcgcatgtgtcctgggtcgtcacgtggagggggagggg

SEQ ID NO: 41593 - DNA, 30 bp, Homo sapiens; identical to SEQ ID NO: 3995
  chr5:64858833-64858863
  hyper

SEQ ID NO: 41594 - DNA, 163 bp, Homo sapiens
  chr5:65017233-65017396
  hyper
tactacaagccgaccggcgctccctgcagaggctgtgctctcgtggacaagctggaagctcccggtcatgttcattcacatggaatactatcgcatccaaacagtggcgcagggccaggcggcattcatggctgatttccaccaaatcgcatcatccatctgc

SEQ ID NO: 41595 - DNA, 426 bp, Homo sapiens
  chr5:65220753-65221179
  hyper
tctctccgcaataaacgcgaaccctgccaggctgaattattagggccagcgcaattcaacgactgcaccaccaccgaaccgctggggttggaagcctgcgtcgcatcggagcgtacccatgtttcttctaacaaaggcacgatcttgaggccatttcgcgggcccttttcccactcccagcgccagctttgtctccccgccggtatgaggctgagacttggaggaggctgagctgcgccgctggggaacaagctcgaagggcgggcgtgggaagctgcaccgcgctgccgctgtggtttcctgcgacctgaccgtgccattagaggaagttggagtgctgcagctgcaagagatacctgctgccttcaaatcagggctggactccaacaacccctgtgcaccgattactgtcgtacaaagaaactc

SEQ ID NO: 41596 - DNA, 30 bp, Homo sapiens
  chr5:65221749-65221779
  hyper
ctcggcccctgccgcggccccgcaagctcg

SEQ ID NO: 41597 - DNA, 30 bp, Homo sapiens
  chr5:65439855-65439885
  hyper
agaccggaaggaaccgggtagacatgagca

SEQ ID NO: 41598 - DNA, 202 bp, Homo sapiens
  chr5:65892978-65893180
  hyper
cgagcacgggacaacgatagttaggagcccccctgtgggttattgacttccctgtggctgttacccccgtgtgtgtgtctcagtgtgctgcctgatggtgtgtttttaaaatgtcagagaagcaaactccttcgtgtttgtatctgacttggttgatctgtgaaaggatgcgatctggacatctggcgtgtccccacaactc

SEQ ID NO: 41599 - DNA, 190 bp, Homo sapiens; identical to SEQ ID NO: 3998
  chr5:66124998-66125188
  hyper

SEQ ID NO: 41600 - DNA, 1080 bp, Homo sapiens
  chr5:66299575-66300655
  hyper
ccctttcaaggtctaacgtacttgaaggggcaatacttgtagcatttgccacataaatgccaggtagtgtctttccacatcggggctcaccattacctagatctgtagttgccggccatgaagccaaacaggtgtgcaccgtggtcattgatggaacagatgtaaactcataaatttagtttactgaggttttcggtgagtgtggcttcccgtccgcgtgcttttcctatacaaccagcggcgtcctggcggaggagtcactgtggacttccccggagcgttgtcactgccatccctcccgcggtgaatcacaggtcggcctcaggtgcgcgcagcacacacccggagcagccgcgggtttatttatttatttccgggacggatccattccgggctccggggagggggagcggcggcccaggctgcggggctgtcccggcaccggctggggtcgcgccgcggccgcctgctccctttcccgtgagcccccgctcctcaggcgcggccggggctggtggggggtgggggatgcaggaaagctgggggcgcggccaccaagctgtccagggacaaggccctgccgcctcctcccagccggaccctggaagggtccacaaaggtgtcaggttcaagtcctccaataggcccattttttaaaagtgcttttaagtttccgcttttttcaggaggggagggcaagagcagctttttctattcaaattcttttccttgtatgtagataccaaaaggaaactcggcactgggcatgttcggatgtgaatggttttgctgataagcaacagcctccggaaccaaagcctcaaaatagtcgtctcccccgcccctcgcagaagcggcgagtggtatctgccaaacagatgacaaagtacctccgactgaatcccacagacagcgctttgagcagaacgcacggctcaactcatgtaattactgtttatagctggccgagcctgactaggagagggcagacccgagaggaaatcagtttcccggacctttgagaggaggctgtgtgttaattaaaggctaggacgggacgggtacttctcagacatgctc

SEQ ID NO: 41601 - DNA, 179 bp, Homo sapiens
  chr5:66511672-66511851
  hyper
aatattcagagagcccgtgcccttgccctgcttcagccccacagccccgcctgggttgctggtctgacccggctgggcagggtggctgtgagctgccggtgtggccccaggcacctcaaagggtcctcggtgttcaacaacaggaagtgctggcaggcttccctcgctagggaactgaa

SEQ ID NO: 41602 - DNA, 438 bp, Homo sapiens
  chr5:67583957-67584395
  hyper
cctcgcttcactgtcggctacttgagccccgcgagccagccagcgcgctcagcagccagtgagactattttaggtcccctcacaatggccttctcatttcccaggcgaaaatgagcaagttggtcttgcattggccacttgtcagccgatgacaactttgacttgggctcccctccccctcccgaaatccctagctcagcaaatatttgaacctgcccaagttaatcatgaagctgcgatctttatctaagggagacgtgcgagcgcctgggctcctttcctccccgatacagtagcgaaatccagttggcttctcaatgaggagccggcagtgagcggcggtggcccggacgcactgccgggcggggcgtggggcggagggacgagccgagccgagccaagcggagctgggccactgtgcacgcccggagggtcctg

SEQ ID NO: 41603 - DNA, 102 bp, Homo sapiens; identical to SEQ ID NO: 4001
  chr5:68179310-68179412
  hyper

SEQ ID NO: 41604 - DNA, 30 bp, Homo sapiens
  chr5:68463026-68463056
  hyper
gctggtcgggcctccggtgttctgcttctc

SEQ ID NO: 41605 - DNA, 31 bp, Homo sapiens
  chr5:68485209-68485240
  hyper
cacatccgacgcttaacgaaagctattccaa

SEQ ID NO: 41606 - DNA, 294 bp, Homo sapiens
  chr5:71015382-71015676
  hyper
gcgcggggagctgagcgcaacgcccaggcacccactgccatccgaagagcgtctcgagctcacgggctcctggcagtctgttgagcgaatccctcatcccggcccctctgagcaacagggaccccagcggctcagagacccgcggtcagtacctgggacagcgtccgctaagtttccacccctcgaccattccctgtgtccgcggagtcccaccgcagagtgcgtgtgggtccggggctccttataactagggctggaagtgcgcacctgggctgggctcgcagccaaggcggc

SEQ ID NO: 41607 - DNA, 789 bp, Homo sapiens; identical to SEQ ID NO: 4003
  chr5:71403030-71403819
  hyper

SEQ ID NO: 41608 - DNA, 740 bp, Homo sapiens
  chr5:71404178-71404918
  hyper
gcccgcctcgctaccgcccttggggccttggctgcagctctcagaaaggacaatgggaccccaagttgcggggtggggctgctgcttttagaagtcccagcctcgggagtggtagcttgaagggggtcggtgagggagacgtcagcgggtagggtcagctcctcgcccggtgctcgcaccagtggcgcgctctgcggaggccgaatagcggtacgccggggaccctgggcggggccgtgagggtccggcgggcacagcctcgggcgcacagagagaccgcccccagccccacccgagctgccgcagtgcctccggaccgcccgccacacctgcccccccacactgcggcgcccccgtcgggcacggctggctgggcttgcgctccgcccgggcctcgggctggcgggggccgcgcgcccccacctctcagtttgcctggctttgttgccctgggagtccctgggtgggcagctctggtctctgcctttccctttatccctggcgtcccggccctcccctcgctcctgacagaggtcgccgggtccctccgcagccccagcccgcgctctattctcctggggtggtgctgaagcgtttctccgggagacaccggttggtgggcgtggtgcagtccgcactgcggtctctacggcagcccgaggcggacaaagggcgttcacgcagccctcgttccccactccccctccccaataaaagacgaaagaaaaaccttgttttag

SEQ ID NO: 41609 - DNA, 31 bp, Homo sapiens; identical to SEQ ID NO: 4006
  chr5:72113362-72113393
  hyper

SEQ ID NO: 41610 - DNA, 30 bp, Homo sapiens
  chr5:72251713-72251743
  hyper
ggacagggcgcatgcgcacaccgtggccgt

SEQ ID NO: 41611 - DNA, 30 bp, Homo sapiens
  chr5:72252780-72252810
  hyper
actcaggtatctttcgtgaatcccatttta

SEQ ID NO: 41612 - DNA, 56 bp, Homo sapiens; identical to SEQ ID NO: 4007
  chr5:72415866-72415922
  hyper

SEQ ID NO: 41613 - DNA, 306 bp, Homo sapiens; identical to SEQ ID NO: 4008
  chr5:72416022-72416328
  hyper

SEQ ID NO: 41614 - DNA, 170 bp, Homo sapiens
  chr5:72416592-72416762
  hyper
gggcgcggggagccgcggcagcgcggaggcgctgggtatccgagcccaacctgcgtccctgcgagcccctccggctgttgcttgcgctcgggctccctaaaagccgcaaaccgatttcgcacagaaggcatttgcctctcgtttcgttccccaaacgcaccatagctttg

SEQ ID NO: 41615 - DNA, 296 bp, Homo sapiens
  chr5:72497764-72498060
  hyper
gggctggatagtcctcgtctgcagaagttcgccctttgctggcccctgtccaggctctcctctcgctggcccacgtgatcctttcctgccagtctcccctggctccagcttcctccacgcccagggctctgccctccgccgggccgacttcccgcgaaactgcagcggctccccctacaggacaaaggaggaaacgctagcggggccccagagccctctccaatgggacccaaagggacacatcccggcacagaccctccccactctaaggcagagcctttcgcagggcctatcac

SEQ ID NO: 41616 - DNA, 481 bp, Homo sapiens
  chr5:72511899-72512380
  hyper
ccatcctcctcggagcgcagcttttcctccctgcccaagtgcggtgcacccgcgcaccacccaagcgcccagcatcgagggcgcggcggcggcggccagggcggccagggcccttgagcacccgcgcggttttccccctatggccgcatgggggcaggagagaggagctgtggcgcagagcacgcggagagggacctggagcgcgggagccaggacggcgcaggcagctggggaggccgcggggctgcccagcgagtggagtgcccaagaattggccggggtggaaaggtccgcgggagacgatccccgacctccgggaacaggcctgcggtcggccgccttggcacccaggctctgccgcccccggagactcggatcgagcgctggaagtggccgcaagggacgcgagggagagcagagctgtgaatcagccggaaagtcactccaactccagggaattccgctccgggaagaaaggtgg

SEQ ID NO: 41617 - DNA, 458 bp, Homo sapiens
  chr5:72529367-72529825
  hyper
gcggctcgcagggggcgccaggtccgcgcttccccttgggtcttcgagaggcgtgtgcgcaggacgctgccctctgttgcccaaagcccgcaccaggctcctgggcttccgcgggcttccgcaggcctcaggcgaggggcggggacgccacccgcacgctcccgagcgcagggagggctgtcgccgaagcggtgacccacgcgtggaccccgcccgcgctgggccgggccggtcccctgcccacccgcagccctgctcggccgcgttcccagcagccgggaaagcttcctccctcggtcaccgatccaggccgctggtccagctgtcaaaacagggggtgtctctttcattctggctcacaaagtcccaaaggggaacagggggccttaatgcttgtgtttggacacaagcaattatccctaattattctttttcttttgagcctgcccgtcccgccg

SEQ ID NO: 41618 - DNA, 312 bp, Homo sapiens
  chr5:72529889-72530201
  hyper
cggcccgaggctcgggcgctttcatgtcactgcgggtttagagctgattcaaactcattgcgatgggggaattaaccccggggcccgggctttcaggggcctctgataagagattatacgtgttgatggcaagcttttcttggcaaaatgttttcaaagggcttggagttgttaaatcaaagcgccattgaattgctcgggaccaccccctcccccgcctcttgcccttcccccacctccatctttttcccttcatccctcctcccccatcaccgcccaggactgcccaaggcgagcggcccagcctccggg

SEQ ID NO: 41619 - DNA, 30 bp, Homo sapiens
  chr5:72530456-72530486
  hyper
tgcctcccccacccccgaaaggtcatcgga

SEQ ID NO: 41620 - DNA, 8 bp, Homo sapiens
  chr5:72594501-72594509
  hyper
ggactgtc

SEQ ID NO: 41621 - DNA, 72 bp, Homo sapiens; identical to SEQ ID NO: 4011
  chr5:72594764-72594836
  hyper

SEQ ID NO: 41622 - DNA, 149 bp, Homo sapiens; identical to SEQ ID NO: 4012
  chr5:72594867-72595016
  hyper

SEQ ID NO: 41623 - DNA, 675 bp, Homo sapiens
  chr5:72595046-72595721
  hyper
cgcccaaggaaagggcttcccagtcaccctgcggcgacgcttctccctcccgggaatgacaccttcgctcgctttcacacagccaagccgttggagaggcagaaacagtgggtcccgagcccgcaggagaagttcccatcccgcccctctagccctcgggcgttggcagtggagtaacaaagacgctgccgcgccgttgaccccgaagaagctctgatgaaaaggagggcgggccgcgggataggagtttctacaattagttttttctgcctttacgttcccaagaagaagccgaggaagtagaaaggagagagatctgggaaaggcaagatccagaaatcaggagccattatgtttctcattttggagaaaaactgtaaaacagctcggcctcttgtccaccttgccccgaaggcaagtctggatatgaaaagaaaaaggcgggcaacggaggagatttatttttcattttaactttcctctcccaggcttcctcaccccctgcccccttcgattcctaggaggggcggccccagccctcggagccgattctcggcgctgcgctaggacatcagaggcgatacaggttcgatgttaaatgaaccttcaggccgccggacaatggcgcagacctcacacgggggcaccgcgccttcccccagccgtgctcggctc

SEQ ID NO: 41624 - DNA, 41 bp, Homo sapiens; identical to SEQ ID NO: 4015
  chr5:72595773-72595814
  hyper

SEQ ID NO: 41625 - DNA, 30 bp, Homo sapiens
  chr5:72607563-72607593
  hyper
cgcctgccactggaacgcggtctcgcgggt

SEQ ID NO: 41626 - DNA, 11 bp, Homo sapiens
  chr5:72676924-72676935
  hyper
tgtaaaccaat

SEQ ID NO: 41627 - DNA, 149 bp, Homo sapiens; identical to SEQ ID NO: 4016
  chr5:72715198-72715347
  hyper

SEQ ID NO: 41628 - DNA, 105 bp, Homo sapiens; identical to SEQ ID NO: 4017
  chr5:72715590-72715695
  hyper

SEQ ID NO: 41629 - DNA, 368 bp, Homo sapiens
  chr5:72715730-72716098
  hyper
cgcagtactgctctcccgccccccggagccgagcctcttcgcgttcgcaccgtgaaaggaggggagcgaggggttagccatctcgaacatttttaactaatcaaaatatttgctgatgagtatttatttttacaagaactcggtttggctggagacttcccgagcaacaatatgggctgccgtattaggtttgtgacggagccaagtgtggttggggcttattgaatctgcgggccggagatcgctcgctccggagacgtttctccgttctggggaagcagctttcccaaaaccgtccttctgcagatggctcttagaacacaaccacatgtcccctaaagcacgggaagcttcgtgttttatgtttg

SEQ ID NO: 41630 - DNA, 40 bp, Homo sapiens; identical to SEQ ID NO: 4019
  chr5:72732869-72732909
  hyper

SEQ ID NO: 41631 - DNA, 774 bp, Homo sapiens
  chr5:72733012-72733786
  hyper
gctcgccacagccggcgggaggcggggaagggagcagcccgggtggcttggagaacactgaacctttaattgggctataaatcagacaggggagtgcggtggagtttatgcaggtgtaaaaacagaggggaaagcccgggccgagcagccaaagcgcccgggcaggtcagaacctccagcaaactaacatcttgataagtccgctgacaacaaaataaacagtggagaaggctggagggcggggggcgccgtggcccgcggctggttcgcagcagctcggcggccttctgcgaggggaaggcgggccgctctcggctttgtgcttggggctttaggaggggggcggttggaggagagagagaagccgaattatctccctttccgcgtctcattcccgtggatggagggccccgggagcgtttgacgatggcagtttggggcgtgcgcgctgcctcgtcggcccctacgacgtcaggcgccggagctgccggggccccgggcgagcgggcagcggcccccgcgtccctcccggacacagcgccaccgagaggccgagcctcccgctcctgttgccatttcaagggctgacgcctggaaaacaccgccaggcccctggccgaaggaggtaactaaccgagtcgaaacggcgatcagaaattaattcagtgccctgctcaggagcaaaaccgtcaaaaccccatcgagatgttggcgcaagcggattcacacacaaaggaaaacaataaaagtctcgttagatcatttttctggaca

SEQ ID NO: 41632 - DNA, 390 bp, Homo sapiens
  chr5:72739971-72740361
  hyper
ctacaaagaaaaggggaccagcgctggatttgcatgcgaatgaggagccccaggaggagacgtccttgcccatcaaaggccgcggtagcctggcggccccgcagcctttgttccagcacctgctcgcctgcacggcctgacggggcgcgccccgcgctcctggctcgcccatccagggtccacggctcactcgtccctcgcctgccccgcggcccacacctctcgcagctcatacctcacccgccccgcggccctgcttcccccagtctcatcctctcgggagcaggcccgcagggtctgcaaggccaagaacggaaccccaaacgcagagggtggggaggtgagcggcaggacgcaaaactcggaatcgaggcggcttgggtttacacg

SEQ ID NO: 41633 - DNA, 2926 bp, Homo sapiens
  chr5:72742463-72745389
  hyper
agttgtttttcatctgccaaacgtcaagggagcctctagtgcctggacagggcggactcccttccccggcaccctcttcctccctaccccaggtcgggggttggggggctgtagcataggtcggctttgcataaatagagggacccgcagagccaaaaggcgcgcccgggctgttgacagttttgtccgagaattcgcagcggcgaaaatgggcgcgcgaggtcgagaggggccgcgcctggaggagcgaacaaaacaccgaaccaccaagacgagaaaaggagccgggattcctaccttcttcctcgagcgcgctaacatagcgttattaacaattggaaatcctagcagtaaagttctcgacactggacagggcagtcccttggtgcagagtccccaaggcggcggacgaggagactgaggaggcggcggcggccgcggcggccacgagggatcgggtgagcgcggccgccgggcccacggccgcctgcgccgcgcagcctcctccgctggatccgggagctggcggcgccgccaccggcgagggcgagggcgaggcctgagcggcggcggcggcctgcgcggcggcggcggcagcggcggccgggcccaagctgcccccgatgatgctctcgatggagaagggcgagcgcgccagcgctgaggcgcccgggccgcccgccttggccgcggaggccggcagggggccgggtagggcggcgccgagcgggtgcggccggtagccgaaggcggtccgggccagctcggcggccgcgccgtgcggtggcgggggcggcgggggcgagtgcgggtggaaggcggcggcggcggcggcgcgctgcggcggcgaagagggccgagggcggcgcgtaaggcggcagctgcaggccgtagccgcagccgtaggggccgtagccgtaggcatgcgggggcggcgggggcgcgggcgggaagagcgcggcggcggctgccgggtcgcccgcgccccctgcggctcccgcgccgcgcagcagcagagactcggcggccgcggcgttgggtgggagcagcggctgccgcttgaagcgcttcctccggcgcaggaagctgccgttgtcgaacatgtcggcggactccgggtccagcgtccagtagttgcccttgcccgggttgccgggctcgcgggggatcttgacgaagcagtcgttgagcgagaggttgtggcggatgctgttctgccaggcggggaacttctcccggtagtaggggaagcggccgctgatgaactcacagatctcgctcagcgtcagccgcttcttggggctctgcaggatggccatagtgatgagcgcgatatacgagtagggcggcttcaccagcgggttcttggcgccgctacccgcgctcccgccgccgcccgcgccgccgccgccgccgcccccaccggctcctgcccccgccgccggggccgggcccgggggcgccggggagcccccagcaggcggggccagcaggatgtcatcgtcgtcctcctcctcctccagatcctccagctcgtcctccccggcgtacgagcgccgccgccgccgccgctgcgcggggacagccagccggggcccgccaccgccgccctcgtcgtcgtcctcctcttcctcgtcttcttcgtcctcgccctcccccaccacgtcgatgtctgtttcctcggcgaggccagaggcatcggacatctcagtgctcagggtcatagctgtggcgcggcggcggcggggcggcgcatgggggcgccgggctccgggctccctctgcgccccagcccgggtcccgggcggcaggcccggccggggggcgccacgctgggggcgctgcgactgcggctgccggagctgcgccggggctgccgggtggcggcggagtctcgcgcgccgactttataactcctgcgccgccgcggtagccgcgcggatgctgcgctccctgggctccgctcgcgcccggcccgggcggaggacttgaccttctcctctcggagcagcttttgccccgtcagctgaggagggggtggcggggcccgggcgggcgaatcagaacgccaggcgcccaggaacgtgcgggacgggtgagagtctaagaacagagctcggcgaggccagggctgagtccaggagagggcggaccttcctcggcttatagcagaagggggcctgtcacatggtgtgcacgtcagagcgctgccgagggaaggaaagcaagcctaggaaatcagcccttctcgggagagaaaattcacccgtaggagggaggcagcagctgagaagagtggggaggagaggggacctcactatttcttgccaaagaggctgatgcccgaattacgcggctgtctgcaccgagggccgctgcacgagttagacttcccagcctcctcaattagtcctccaccctaacctcagaagcacacccgcgacactctggtttgacccctcgacagcctgtaggagccttccagccgggggataaccaccccatcctctgaggtggcccctgggggacgctctggggtcggttgggggtgtccagcccctccagatcgggcgagcggccccccattggatctgatgcgaagccccccaatttaagcacgataataattgtttattgaccctttaacccattctcttcggttttactccaaagacgtttgttttccgccatctgttaataaaaacgctgtgagactggcgttttactcacttctctgcgattgaatgccctagagacttgacagttaaactaagccactctaatgagacgatctgacaaatgtcatgggaataaagaacgtaataattgaattcggagaagaaattgaaatttttagtgaaaacccaaatacacgcacaaaaattgcacctagaaactactaaaaagttcgaccagcctggccaac

SEQ ID NO: 41634 - DNA, 46 bp, Homo sapiens
  chr5:72745568-72745614
  hyper
aaaaaaaaaaaaaaaacagaagttcgttcataatggggctatatag

SEQ ID NO: 41635 - DNA, 1008 bp, Homo sapiens
  chr5:72746975-72747983
  hyper
gcaacctttagctccgcagtcgcgaaattccccgagcgcggaaactcaagcgattcacgtcttgcgcgacccccttgtctcccccatcgtcccctaccccgggcctccttctctacagcgctcccagctttcggccccagctggtaactctcccccggctccccgcccccaagctggtacaagggaccaaaacctttcccagaggcgagccggggaagcgacgcgaagacccccgtccggcgcaacccgctcgcgtggacgcggaaagtggcgggcggcgggtcccggtggtgcctgcgtagggcagagttgccccctggcggcggtgcgacgacctgcgggccctcgcgcccgggccggcaactccctgggagctcggcccgcgcggggaactcgcccagcagcctgtgtttctcgagtgtgggcagccggctcccgggcgtccctcccaccggctgcgggggcccgggactgggcggtagtggaggcaggtccttggactgcaggctgaggctttttccccccacgagcggtttgggccctccaggagcccctgcgcgggggtcacgtggattacgctaggtgagagccggagaggctgcgccaccgtcgggaggctccctgcctccgccctttgtcctttgcccctgaccatgagcgccccaagcccagggacctccttagggggatgaaggctggaagagacctgggggctcagacttacggggaaggaacctaggctattccttgtgcatcccaggattttacccatgaacgtgaacatgaacgtgttttcaaccccagcggttcccctggcgcctcgaccctcctttgaagagtcattctagaaggctgtattgcgatagtgtttgtacctgtcactgtgagccctgaaaagagacagaagaaaacgcgagtgcctggcctgagggtgctccgtcccgtgggtagccaggtaggtagttattctgcccgatgatgaggtcctcctgacgcccccgcgaaagg

SEQ ID NO: 41636 - DNA, 1144 bp, Homo sapiens
  chr5:72921422-72922566
  hyper
cagcttgcaaagctctcggccagggaacatgagcttcaaataagagggcaaatgctgtttttaaaaataatatttcctattgtaatagacccgggccgtattatgtcacgggtgtggtggcttttggctgggaacagcctgagcctccctcgggcctggcacaactcctttcgcgagcgggcagcccagcgcctccctcgggaggcgccaaggcgtgggggcgcccggggcgcaactggcactcctgtggcccgccaggtccgcgccagcctccgcgcctccgatctccggaggccaacggccgcagccccgcagcgggagggggctggcggagacagcgcggtaggggcagcttcaggtttcctcctggagccggtgtcgggcgcggccggcgggcgggcctcgccatgtgatgcggccgccgcgagccgggccgggaggtgggcaggcggggatccagtggcagcggggaggcgcggggggagcggggggagcgggggcggcacccgctgctggcgcagccagccgggcccgggcgcgcggccgcggctccaccccctaaaccttggcttcagcccggccgccgccaggcgttggcatcgccggggagagccttccggactccgggcggcggctggctgggggcgcgttccgaggcgccctcaggcagggcgcgggggcagagcctcgcctgggttctggaggctgcggggccatcgctccaggtaaatgctctttgggactccatcgtctgcgtttccctgcagctctgggcggaaaagtttgtccacctgagttcgcatccgcagggccactttctccagggtccccagggatgcgagggtcagcagaggtgaccggggaaccgctgcaggcgctgcggcgcgagggctgggcgccgcctcccgctccctcgggagcggcaacaagtggagagggcggcgcagcctcgtgcggcggcggcagctgcggagcgcggggtcgctcgggcgcactgagagccgggggctgggcgggtgaaagccccgccagtgtccttcgggagacagggaaataaacagcactcctgcggtggagaagggagaacgtcgagagttggtgtccgcccttcccatccatgcttcagctccgggactgagggtgc

SEQ ID NO: 41637 - DNA, 194 bp, Homo sapiens; identical to SEQ ID NO: 4025
  chr5:73843884-73844078
  hyper

SEQ ID NO: 41638 - DNA, 264 bp, Homo sapiens
  chr5:73935723-73935987
  hyper
gccggggaggatgcaacgtgggccaaccatcccgcgcgctcggccctggaggctgcggggagcgacgcagcgcgacattcacccccaggaaagcgctgctttccgcagaggagagaggctgactgtatccttagctcggctcctcgcttccccagcggctcgccccagacattgcaccgcggaggggaggccggtcgacctctccggcgatgcccggcttctgcctgctgtgggagggcagcggcgggcaccgtgatctccgca

SEQ ID NO: 41639 - DNA, 516 bp, Homo sapiens
  chr5:73936032-73936548
  hyper
cggagcacgctcacccctcgcgaacacacccctgcagccgaagcagcccctgaagcccgcagcgcctgcaacaggtccggggcagtgggggaaacttacagcagtggcgactggccgcaacgcacaactgagttctagcgacggtcacgggcaaggaggcgacgaaccggtcgtctcagcccagggaagcggtggcgaatgccccggagaaaggagggccagccggggagaggactgcgccccgaacgatggctcgcggaccggctaccgatggcgttcgcctccgtctgtcgtccccacgccgcggacccggtgtccaggacccgcagagcgtctccggagcgcgtcacggtagggcagagcaagcctgccactgcaggcgccgcggaaggaggcgggctgtgcgctcgggggagggagctagaaagcgccttgtgtgccggcggccgccaggcgtctggaccgggtctccgcagcgccaccgccgcaccgcctcctctccggctgccagagcag

SEQ ID NO: 41640 - DNA, 286 bp, Homo sapiens
  chr5:73936773-73937059
  hyper
gtgcagagagacaaagcggacgcactgtctcagccgctggcagctgcaaccccgggaaccgagaataaaataagttttcccgggttcgagtgtctgcgcctctttgggccagcctggttaatggacagccccggatctgagggacccaccttaggggagcgcagcccggggctgtgcgcttggtgatgccagagcccgcgagatgctctaaaaagggctgcaaggggcgagctgggtatccgcaggacaggccctgggcacgcatagacagcgccttgggtaggac

SEQ ID NO: 41641 - DNA, 30 bp, Homo sapiens
  chr5:73937315-73937345
  hyper
tcagccaatcgccgcggccgcttgattcaa

SEQ ID NO: 41642 - DNA, 30 bp, Homo sapiens
  chr5:74063348-74063378
  hyper
aacaacttcacattcgagacacagacggta

SEQ ID NO: 41643 - DNA, 363 bp, Homo sapiens
  chr5:74161899-74162262
  hyper
gcgggtctggtgctggcgggggcgcggggcccggcgcggccgtctcggcctcacccagcggtccgcgccggggagagggagcgcactcacctcagacgcgccccgggagccgctggaagagcccgggaaaggaggcggagccgcgcgaatgaatggagccggcggctgctcgctggcgacctccggccggtcccaggccgcacagctcgcggctgccagggcgagtgcggctgcctcccgctcgccccggacgcccggctcctcgtcgcgggtcggccgcggcccaccgtgccctccgacgacgtgacgcactagcgccgcagcgcctccagccttcgcttccgctccgcgcccgcgcccacc

SEQ ID NO: 41644 - DNA, 204 bp, Homo sapiens; identical to SEQ ID NO: 4030
  chr5:74162515-74162719
  hyper

SEQ ID NO: 41645 - DNA, 544 bp, Homo sapiens
  chr5:74348350-74348894
  hyper
ccacctcgcaggcagacgatcccggcccgctctgcggcacaaaaaacttgaccttaaaaagcccagaaactggtctctgggaagggcgcggcctgggaggcgcggcccgcagcttccgcccccaaagaacaactcggaggccccctccagccccggttgccctggcgcagaagccgcggtagcagtcctttcaggcgccccgcgtccctgtcccgaagcccaggggcgggggctcgggcagcatcgcttgtcccctctggtccagggctgcggagaagcggcaagcggctccgaaaggcaagcgtcacgaagccgggctcagtagctcccccgggccccctgcgcctcgcagcggcgcgggccaggctgggcggcgctgggctctgaagggccaggacggcgggatgcccctgctcccggcaagggcgcgcccacgagccgcttcttggcacttggggagagtcccgggaaagcccggcgccggcgcgctcgcgactccagcctggcggctccactccgcccgcgagcccaggaagccggctcc

SEQ ID NO: 41646 - DNA, 1050 bp, Homo sapiens; identical to SEQ ID NO: 4032
  chr5:74348906-74349956
  hyper

SEQ ID NO: 41647 - DNA, 30 bp, Homo sapiens
  chr5:74633512-74633542
  hyper
tggctgcacggtcacgaaaatcggggcgga

SEQ ID NO: 41648 - DNA, 389 bp, Homo sapiens
  chr5:75377859-75378248
  hyper
cggagagatgtgtgtgtttgagttccaatcactgcagcccgtattggcgcggcgctttgtctcgctttgggtcaccaccacaggagcaacgatttcggggacggcacacgcctgtgtgaccgcttcccactccacttgggttccgtgagcgcgcggagccggaggagtcagggacgtgaggatgccctacttcccgcagcatccggatggcagggtctgcgtcggaaggcccgggagggcgacgccctccactgctgccgcggggtgggtgcgccaggcctgggtgtggcctcacgggagcgagtttctctccagccgcctggcccaccgctttggaacagtgaagctcgagttggggtctcctgcacgccaaggggagaaatgtttgt

SEQ ID NO: 41649 - DNA, 2296 bp, Homo sapiens
  chr5:75378678-75380974
  hyper
gttgctccctggaagccaagtcgaagtgaacaagtcagtcccaggcccggaaatagaatacaaaccctctttttgtccggtgctaacagagtccagcagtcagaactccctcgcgtctcacgctggacctgacccggggcgccgccaagtgcgcaacgcacagtcacagttggtgactaattaaggactgccgcccctctccttcacctgctacaaactcagagccctgacttctccagaagtacctaccacttggaggtggctctccttccccgccccctgccccagtcccacaccgcagcagcgcctcagcaccgcgacttgccggagcaccgcgagtggcgcgcgggtcccgcctcccccgcgcgccgtgactccctgcgcaccgctggtactctcgccacgccgccgcccggcactgcagcaccagggggaggaggcaggcggaggagaggaggaggaccgcagcgtgcaagccgggagccactttcccgcccctcctctcgccgctgacacgctcagaggagtcaccactccgcgcgctgcaggcgagagtggcagacggaggcagcccggggaagcgagccggagcggcgcccgcactgaggcggctgcagtgctgacaccactcagggcaagggtgtccgacggctggagcggtgagtgggggaggtgaagcgggcatccgcggggagactttcccccgctgctggatttctcttcccgactggtggccgggcgctgcagcctggggaagtttttgcagcctttcggaagcgcaactttgccccgcctgcccccggggaagcggctgcaggtgcccgctgctttgtaggcgcctttgttggagagggaccaggaaagtaggggtaaaatagatgcagtgaccccagggttcgctagggtaggtctggggactgggtcgcactttatctgggattcccagaggaggtgggtgggcagcagcggggatgcaggggccgcatctgcagcgaccgccacgctcttttttgcttgtgtggtttgaccggcagggataggcagattcaaatctagcagcctagagccccgggctgggtacctggacctataccttcatagctgccttaggctcaacttttcggcggggatccctctgcagacgtgcaggtggcgggagagcagaggtagccgcagtaagtgctgagagagcctgaaagaaacaccatgaattttcaaactctcccacatacattcccgaagcgcctgtctggcgtctaagagagagcaagagagggctggagagcaggggagcccgcggggctgaggctctttgtcagcgcctgcacttcctacgttacaacgccttcattcagcaaaaaccttttgggcgcctgctgtgcgccaggccaggcgaagcagacccgaggctgtgaagctcagaggggagagggaccaatcgcagtaaataagctaccgaggtaatcttagatggcgatgagggcagcaaaagccatcagccgaccctctgaccctttctcttagtgggcttttccccttccgcctgggttctagaactgggaagacttttctccagagcgtcgcggggagcgccccgggctgggcccacggggactgcggaatacggggatgaacttggcttggggcagccagcaccccacggcagatgaacaatcgggagcagatctgtgggcgtgcggggaccttaggcggcgcgcgggggcggggggaggggctgagccacgggggctagaggtgccgcctggacggcctgagctgggggcgctcgcgtcaccttctacgtgtgcgagtgatgcaaatgcagacccgcgaggggcgggcgggggtggcgggcgggggcaggcgacggagtctccgtctgggagcgcgcgtgtgtgcgtcaaaagctctgggttgatggatgccccgcggcgcgcctggcgcggagagcggcgacccggcggggcagaggggggcgggaggactgcggcggcgcggggcggcgaggaaagccccgcacggcctgggctggcgggcaggcggctccgcagtgcgccgcagtgccgggaaggagccgcagctaccgggcgctccccgggggaccgaggagatgaggcgtcttttaaggctcatgagagccttaaggagatgagaccgggatgccgtgatggtctcctctcccgctgaacctaatcccttcatacttagctgactgctagcgcggtagcttccgtttaattcttatccttaattctgaagaatgtggcattaatctctcaggcgttcactcattttc

SEQ ID NO: 41650 - DNA, 31 bp, Homo sapiens; identical to SEQ ID NO: 4035
  chr5:75566956-75566987
  hyper

SEQ ID NO: 41651 - DNA, 2020 bp, Homo sapiens
  chr5:75698193-75700213
  hyper
gtgagccgccgcgcccggctctaaataatttcttatcgccctccctcagtttgtttttcctgttatcgggtcacccacacattccacaattgtcaaataggtgagggcacaggtacggaagcgtcccgcattccctccagattttatcacgctgagacacaaagagaaaaatagctcctggcgaccgcatgaaaaccccgatttcaaaacagccacatgcagtttaatttccttaaaagcttagccggaaaaggtttctgtggcttgcgaccccagctgggcttgagagaaggctctgcacactggggcgggggcgggcacaaggtgatcggagggagggggatgactcgcagttgtgttttgagtggttgccttgggttatcttgttcctccagcacacacacactcagtttcttgtcataaggggaaccctgttattttgtagacaaaaagtgacagaagcaactttcgaagcaaaaaaaaaaaaaaaacaaaaaaaaacaaaaccaaaaagacgaagaagaagaacaaaagtcaacgtgaaatctccccagaggaaaaggaaccgcgctgtttgtccctcagtaactgagcaacaccccggacacgaagggctccctgtgacttctgcggtttttcttgcacttctccgcgttggttcacttccaccctcgaaactctccagaagcgagaaataaggcggggtggccgccacccccaggccaccagctgtgcgggggccccagctgcagggggtcccggcccagcgtccctctcggccccttccctctcccccgggggagaaggggcgggtccacgcggcctgggcgctgcgcccgacacgcggtaggggtcgctgcgtctcggcgcgcgctcccaccgcggtgaataacggggcctggctggaggagaaaggaaacctgctgcgggaggcggcggcgaccggccagggagcgagggaggagagttcacttttacttcagtgtcagcgcgcggcggccgtggctggctctggcgagagagcaccgagggagtgggtcgcagatcttcgggcggctaggggaaatcggcgagaggcgggatccgagcgcgccggcggggcgcagagcccgcgagcctggccagcgagggtagccgcggggggcgcgccccgggcgggcccccggagacgcgcaggatgccacacgaagagctgccgtcgctgcagagaccccgctatggctgtaagtgcgccgggcgcgcggggttcctgctggccttggggagctccctccccgaggacggcgttggagaagccgagggagccggttgcgcggcgcagaggaaattggaaggcagcaactgcgcggctggcaaagttgggagctggagttgcaaagggcagtgaatcgcgtccccccgctcctcccgccccccaattcctaatatccagctggcaacccagaccctccactccgcatacccaaacggggtgcgcgggcagtgcggggattgcgctctgggacagaccaggttgggattttaggggtatcaggtgaggagtccgcggagctccgggtcgccgccggcttgggccagggggtggcgtaaggcaccggattcttccaacccagaaggggaggaaagtttgtttgctgtggctacaggtgggcaccgcaagtagggcgccggcgcactctgctagtgcaaagccggcttgactggaagggcgggagtctcctcctgtcccgcgccctcgaacttcacctgacccgctagagccattggcctcacaggtgtaagtccctcccctctgaaaccccccaacccctttcccccccgctcccctcgcgcgggaggattgctgtgtggagaggacgcggcactaggctccggggaatccggcgggagcccgcgtgacttgaacgagatggtgtcgattacccagccaggggctgccctcggaaataggttgctttggccgatcgtgagtggatggagccagattaacaccaaccacgtggcttcatgtgcagagttc

SEQ ID NO: 41652 - DNA, 1598 bp, Homo sapiens
  chr5:76011052-76012650
  hyper
aaactgtaatatcgttcaagaacgtgtgaaggacacttggaaagttaccaggccatttctctcctgggcgcccgcggccctagaacgccggcctcaccggcagacgcgcgccctcctcccagatgcgcaggtgaccccggcgggcggcgcgggaaagggaagagctccgcgaggccgcgcgggggggaagcgggagaagccgctcttcctattccactcgcagtctgcgtgtgggggaaacgagtgcccggcgtatgaaacgcctaacttcgcgaaataaagagagacgtataaaagttcaagaattctgtccagactcaagggccctttctcatttaggggcaaccctgtcactacatcataaacttttaaatccgtgatccccacgttacaaaagcagaagtcccttttagacttttagcgaaaactgaactttgccggtgtcccacacggagggagggaggacgggaggccacgccagggctgcggggctgcagggcgtggacgcatcctggccggggcgtccactgtcgacgtctccacatcccaggagggtcgagacggccgcgggaagcagcctgcgagccgtgcggccccattccaaggaccccgccagtgtgagtcactgacagcttcgcgaatcaacggtgcccagaggaaaaaacttctcatttggacttctaggcccggcagtggccggcggccagggccccccagtagggcagggcggggcggggcggggcgcacagagccagaggggcttgcgagcggcggctgagggaccgcggggagggggcgccgagcggctccagcgcagagactctcactgcacgccggagggcgcccttcctcgctcgcgcccgcgcgaccgcgcgccccagtcccgccccgccccgctaaccgccccagacacagcgctcgccgagggtcgcttggaccctgatcttacccgtgggcaccctgcgctctgcctgccgcgaagaccggctccccgacccgcagaagtcaggagagagggtgaagcggagcagcccgaggcggggcagcctcccggagcagcgccgcgcagagcccgggacaatggggccgcggcggctgctgctggtggccgcctgcttcagtctgtgcggcccgctgttgtctgcccgcacccgggcccgcaggccaggtgagagatgcacgggaatggggtgcgcgggcggagggacgccgaggggagactgcgggggtcactgttgcgccttctcctcacccctgcctcagtttcctccgaaagccaaactggcatttgggctgagatctggagttttttccagtcacgtttaggtggggcgtgccacccccttcgcgggcccagccgatgcccctttggactcgatcttggagggtgcagcccgcctgccacggggtgttggatatggaggaggatggagcggaagccccctgggggagcctgcagtcctgcgttgcacttgtcattgtgtttctcccaggaccacccccaaaaagaaaagctctcacgttgctccaccaataaacgtttcgatctttaaaatataaagtggcgaaccgctgccgctgaagttttgctttgttgg

SEQ ID NO: 41653 - DNA, 1171 bp, Homo sapiens
  chr5:76114443-76115614
  hyper
cgcatccctcctcctgcagggtccaccgcaccgggaagccctgtctgtatcagttaccaaccacaattgcagtgagtacgaatcgtggctttcccacagtcaggaaaggcaagggagaccgacgacccgcttctctaggagtaagtaaagattaaaggtagttcgcggtatagcctaggcagggattaacccgtggtcccagcgctcctgctatttgcattccaaagcagacacctcatgcgctcaaccccgcccgcaggcggctcccgcagtctaagggacctggcgcgagtccgggaagcggagggcgcagctgcgcagggaagggggccgggggcgggaccagggcgcgcgttccggtcccggggcgtggcctcccgcaggtgagtacgctgctccttcggtttccctgaaacctaacccgccctggggaggcgcgcagcagaggctccgattcggggcaggtgagaggctgactttctctcggtgcgtccagtggagctctgagtttcgaatcggcggcggcggattccccgcgcgcccggcgtcggggcttccaggaggatgcggagccccagcgcggcgtggctgctgggggccgccatcctgctagcagcctctctctcctgcagtggcaccatccaaggtgagaaacctggccaaggagggctcttatctctgaggagctggggtcctgggcacgctgggcagacggtgggatccgggcaggtgtgcgaaggctgttctgctgccggcacccatctctacgaatcccttagcctccccttggtggctttgatgtgaggtctctgcgccaaggaggcacccaggtgggacatgcgggagcagctgaagtcagcggagccgggcagaggcagagatttccccaaagaccccacttcccgtagaggctgtcatgctgggcacctccaggccccagcgtgggttcggggaaagggagggaaggaaggagtagctgtgtctaaagggtacgcagaggacctagtcccctccccgggcttggttgctttgtaaacactaagtcattaagagctttttgccaactccggagacttcctccgctggccccgcggggccggtggggttagcgagctgattgcgcagggcagggcggagtgggtgggaacccgcggcccgggagccttctagg

SEQ ID NO: 41654 - DNA, 30 bp, Homo sapiens; identical to SEQ ID NO: 4041
  chr5:76249487-76249517
  hyper

SEQ ID NO: 41655 - DNA, 145 bp, Homo sapiens; identical to SEQ ID NO: 4042
  chr5:76249761-76249906
  hyper

SEQ ID NO: 41656 - DNA, 30 bp, Homo sapiens; identical to SEQ ID NO: 4043
  chr5:76326225-76326255
  hyper

SEQ ID NO: 41657 - DNA, 30 bp, Homo sapiens; identical to SEQ ID NO: 4044
  chr5:76382524-76382554
  hyper

SEQ ID NO: 41658 - DNA, 182 bp, Homo sapiens
  chr5:76383032-76383214
  hyper
ggaaaacctccgcgcgtgccccttaaagacacagcgctgcattcacacgtctgcggggaaaggggggccgtcacgtgtggccttcgcccgaaagcggtaggggagtcgctctgaaaccgccaaggatcgcgagcgacagatttgtgttggccagggttttaagatgacgcaatagctgagtg

SEQ ID NO: 41659 - DNA, 687 bp, Homo sapiens
  chr5:76506316-76507003
  hyper
gaaggtgcaggcaggcgggcaggcgggcgggcgccctggcccagggccgcgggtgcgggagcccggcgaggtcgagctgggcggcggcgggggccgcgccgagggaggaggggaaggcggaggcgcggggagcgtgtttggggcgccgcggcggggagggtggcggccgctggtgcgcgcggggcgctgtgtatgcgcgctcccccgctcggggaggaagatggcccaaaagggaaagttggggtgacgcgcgcggtccccggaggctcggcggggggcaccgcggccagcccgacggagcggcggacacacaggccggggggcgcgcagtccgggcgccgccgcggccgccccctcactgcaggtggcagcgggtgcgctgggtcccggcggccgcgggcgcgggcgggcgcgcgggggagcccggccgagggatgggctgcgcccccagcatccatgtctcgcagagcggcgtgatctactgccgggactcggacgagtccagctcgccccgccagaccaccagcgtgtcgcagggcccggcggcacccctgcccggcctcttcgtccagaccgacgccgccgacgccatccccccgagccgcgcgtcgggaccccccagcgtagcccgcgtccgcagggcccgcaccgagctgggcagcggtagcagcgcgggttccgcagccc

SEQ ID NO: 41660 - DNA, 231 bp, Homo sapiens
  chr5:76507082-76507313
  hyper
cgtgaaggtaaatgccccgcgctggcacacgccgtgggggccgtccgccccgtcggcggggctcgcacgggtagggggctccggcggagttgggtgaccgtgaggcggttggtttggagaggttgtcactaaggaggagtttacttttcatttgtggagatgatgggagcccaggaaatgtggtcagaaaaaggcccctggaggggtcctggaagcgtccttagctggtcc

SEQ ID NO: 41661 - DNA, 30 bp, Homo sapiens
  chr5:76787377-76787407
  hyper
tctattcaattattcgggcccatgaagaaa

SEQ ID NO: 41662 - DNA, 30 bp, Homo sapiens
  chr5:76787705-76787735
  hyper
gctgaccagctgagcgtccctgagccagga

SEQ ID NO: 41663 - DNA, 30 bp, Homo sapiens
  chr5:76788272-76788302
  hyper
ggtgcggcggccgacggcgggggcggctgc

SEQ ID NO: 41664 - DNA, 245 bp, Homo sapiens
  chr5:76923778-76924023
  hyper
gcagtcccctgagcacgtgcctgaagtcgaggttagtacgcagccagcagggaccctgacaggaaaccagagcagccccggggttgggggagccctggtaggtgctggtcgtcccggacacgcctcttctggagaagcgcgtttgtcccttacttgggaggtcccgggtatctgaagcggatcccgggtctggggacatgaaggggcgccgtggccttagggaaggccccaaagaggcctaggcc

SEQ ID NO: 41665 - DNA, 213 bp, Homo sapiens; identical to SEQ ID NO: 4048
  chr5:76924086-76924299
  hyper

SEQ ID NO: 41666 - DNA, 64 bp, Homo sapiens
  chr5:76924416-76924480
  hyper
cgaagggcccacgcgttccaactggcgcgaatataaccattcccaagaccggcccctcccctcc

SEQ ID NO: 41667 - DNA, 183 bp, Homo sapiens
  chr5:76925470-76925653
  hyper
gtgtctgtgcgcgcgcgtgtgtagcgtctgagcgtgagcgagagtgcgagtgtgtgtgtttctgcccacaaaccagtccattggtgtctgatttcagatcctgagtcgactccctggtacgtaaaatggcgggaaggatactttttgccgggcgcgggaggagggtcgcgaagtgtggggaaa

SEQ ID NO: 41668 - DNA, 1361 bp, Homo sapiens
  chr5:76925861-76927222
  hyper
ggagacgggggaccgcgggcgatcgaaatcaggcggaggggaggcctcgcgggctggggcttggggtgagcccgagcgagtggaggagagaggcgaggacgaaacgagacggggcgaaggccggggcgggacggggcagggcgccggggtccgggtgcgcgccggaagggcctcggggcggcccccggggcggtgctgggggcggagcgggccggggcgcggctgcattaagtgaagctcatagagactgtgtgctctagcgccttgcggcggagggaggcgatgctggtgccccgccacacgtcgctgctgtccggggagctgcagagctggggcgaaccggagacgttgctggggccggggagggaggcgggcaccatgccggggaaggcgggctggtagaggtgcgactgcagccccgcgccgttggaacccgccaggctgttggacaggcccatggagttgggcggcggaccggccgccaggctgcactgggacagcgactgcgccatggcctgctgcctgcccagcgccggcggcagaggcagctgtgacacgccaggcatggcggccgccgcccagcgggtgtcgttggcgtggaaagagcacaggctgtcgcccatggcggcggcagcggcggcggcagccgacgggaactgaggcaggcctggcgtgggcagcagtgtgccgggcgcacggaacacgttggtcgtctttttgcgcttcttccacttggcgcgtcggttctggaaccagacctggagcgggcggggcgggagacagacagggagctattagccggcccggcggctggggagttggggcttgagccccagaaacccgcctcggatacagccgctctgccctgggaggaacaagtgccgtaggcccgacaagcccccatacccagccggagactgtggctccccaccaactcctggcaactggcgccccctgcacccaccaagcgcggagtcctgcgctcctaagagctcgtgccccgaagagtttacgcactgtgcaaacacaccaaatgtgtgcagtcttcaccacgcccctgcacattctgtgcactgcacagattcacaggtctgcagtcaggcatgtgtcaaagttcgacccacaggtgtacaaatgaagataaacgtgtacccatgtagcttaatagcatgccttataacactgatgtgctatagaattttcagaaacgctggaaatttggaaattgatgacaggctgtggatgacatagtttcaaaatcgaaagacaaaggaaaacccctaacgctacggttgacagagcggagaggttaatacagtgatctgcgtgggaaagtgaacgccactgagctacagtgttgt

SEQ ID NO: 41669 - DNA, 333 bp, Homo sapiens
  chr5:76928249-76928582
  hyper
tttgaccacgatatccgtggaaaaaaacgttgtgcatccgttaatctaacctatttagtgtttactctgcaagctaaagtatcaggggtatggacatacctgccctcggtctcggtgagccagcaatgttcagcggtgtgttcatgcccaggcaagcgtagacgcactctacgcttaccagtgtgaacggtgttgcagtctagaatactcccccagcttggggccggccctcgcctttctaccgtgcctgcgccgtcgcctaccactttcttcctgtggtttctaccccattttgcagattgctgcgtatcccagtgtcggcgatggataaac

SEQ ID NO: 41670 - DNA, 30 bp, Homo sapiens
  chr5:76928811-76928841
  hyper
gtgtctgtgactaaacggttcccacacctt

SEQ ID NO: 41671 - DNA, 30 bp, Homo sapiens; identical to SEQ ID NO: 4050
  chr5:76932940-76932970
  hyper

SEQ ID NO: 41672 - DNA, 322 bp, Homo sapiens
  chr5:76934331-76934653
  hyper
actcacctagcctggcgtccaggaggtcggcatgagacagcatcgcgcaccgctccagggcgaaagctgttcccccccaaattttagcggctttaagttatttaaaatagatataagctataagctatacgatatagatatatatagatcacctaaatgaaagaaaattcggtttgtggttaaaaagggggcttcttgcattataatgtcctttagagagacggggaggtgcttaacagttgaatgaacccgtgagcagctcggcgaggggaccaatcaggagggcagcctgcaaatgtcagcgcccggagagtcccccact

SEQ ID NO: 41673 - DNA, 35 bp, Homo sapiens
  chr5:76934676-76934711
  hyper
cgcctgaaggaggcggcggcggcagccctggcagc

SEQ ID NO: 41674 - DNA, 783 bp, Homo sapiens
  chr5:76936252-76937035
  hyper
acaccagtttcttctgagctgcggagaccgcttcccgggaagctccgggccggactgggtttcagcggctgctgcagctgctaccaacgcggcctatgtgggactgggcgccggggtcgtggactcaggctcgcggcgtgtctgggagccgctagggtttttggcaagcggccgcagcccttctgagaaacgctttgcctgggaggagaattccgagacctaaagcaaacaaagtctccccaataaaagctttctttgcccccaaacaaaacctcaaatctagaagctagagcgctgggagcgcacagcaaaaggaggccagacagcagcccagggaggggcggcgtgagctcaggacggtgactcgggagtacgcaccggcccgcgcacgtccagggactcgcaggaggtttctgcccacctgggtggggcttgcagggtgtccacaccggaacgcagggtcagaagtggggggaaagtggctaaggaagagacagggagacctggctccagaaccctgctcccagaaataggcaggtccgccaggccgcacagcctggctccacacgctgtctggagggagggagaaggggccgcgacctggggagacaaggataagggcgcggggccgcgcgtctccacgtgcgtgcacacaagcgctagtgtccccatcccacagtcgcccccggaacggcgccggctgtgcagcgatctcccacacgcactcgctcgtatattctgttttgttgtatctttcaggtcgataaatgaatgtgtaatagt

SEQ ID NO: 41675 - DNA, 63 bp, Homo sapiens
  chr5:76937359-76937422
  hyper
gcagagcgagaaaaacgacaatagcctggatgtaaaaagctcccccctgctcccggttccctc

SEQ ID NO: 41676 - DNA, 2 bp, Homo sapiens
  chr5:76937510-76937512
  hyper
cg

SEQ ID NO: 41677 - DNA, 30 bp, Homo sapiens
  chr5:76937947-76937977
  hyper
cacaggccagggaatcggctcctgactcca

SEQ ID NO: 41678 - DNA, 107 bp, Homo sapiens
  chr5:76938269-76938376
  hyper
aattctgattgtctctctaatcgtatttctgcgtgcattgtgaatcctttgtagacacagaaacagacagaataaaaatatataccgggtgttgtgggaagaattgg

SEQ ID NO: 41679 - DNA, 481 bp, Homo sapiens
  chr5:76939435-76939916
  hyper
cggagccaaatgccaagcaacgttcaggatccacacttggggctttctttctgttttttaaacgccggtagcaggctgcgtgtgcatgacacgtgtacttgtgtgtgcttgtgcgagcagtgcgtgttccttgcctgttcactcacacggagggggcatgccaggcgctgcggaggggcagaaacctgccccaaagagtctcatttcctatcccacccagaagcctttcgcaatacacgagctcgacatatacacttttttcttttctgcagtaaacagtttcccacacattcgagtttgcaaacttcaaccagacagtccacccgcctgacttttcgtgggtgcaagggccggtcccttgctcgttttttctcccatctttcccttctaactactggcgctcacggccctccacacagaaagctcgacacaaaacaatgacggattagtatccgccccctgactgcgtatcttgcttctc

SEQ ID NO: 41680 - DNA, 447 bp, Homo sapiens
  chr5:76941027-76941474
  hyper
ataagttgttgtgtttgagcccgggcccccgccccccgcccgcgcccctccccgcccgggggcccctcggccgcgcccgccgcccgggcaccccctaccgcaccccccagccggcccgcgccgccgccgccgtcgccgcatcccccgccgtaattagtgctgctgccctccatgtgggctcgattaaaccgtgatttagccgaaagaaatataattatggctgcaaataaaataatcagcattgaagagcgatttccttaatgagatggagcggttgcacgtcacggagtaaaggggtctcattaagaggtggtaatgaggcttgggtggatggtgcagttacaaaatagcccaactcctctgcaggccgggcccgtccgcccgaagtggccgccgcgtcgccttccagcggtccggaggtgccgcggtcccagaggggactcgggc

SEQ ID NO: 41681 - DNA, 30 bp, Homo sapiens; identical to SEQ ID NO: 4052
  chr5:77140528-77140558
  hyper

SEQ ID NO: 41682 - DNA, 80 bp, Homo sapiens
  chr5:77147569-77147649
  hyper
gtgcaagtgcgcgcgcgtgtgtttacacttccagaagtcaaatcctttctaggactcccccttgcttcacccggaagtgt

SEQ ID NO: 41683 - DNA, 772 bp, Homo sapiens
  chr5:77147911-77148683
  hyper
cgggaggaggaaattccctgcaaaatagcaatggttccgagaaaaggatcacaacaaaatattgaataaattcccttttaatttatttgatcattccacattacggggctatgaattgctcaaatttgataacaagtactcaattcaactcattatgtaagttaaattagacttcgataaaatttcagtggcgcgcagtggttcctcgaatgaaatgtaatttgtgcaagaatttgttgtatctgtcacaaatatttccaattagcgaccgtaattatttgatagtttctgcaattatggcttaaacgggtgaatttgggactgtggaggaccctaattggcctaaatttgatattttgcatatttgcataatgaggaaattggtagaaaattgtgttcattcatttgtgaaaaatcctatgaattttatgaatttgaaagctctgtttgtgcagactgtgactttgcctgctgatccctgaggagctgacgctgaacgcctgaatgggcagcgcgccaacttcgctgctccaggaggggggtggggagggagaggaggaggaggaggatgaggagagaggggaggtggaaggctgtggtaacggtgggcggaggcgggaccatggcgcatgctccgcgacgtcccgggccgcgggcggaatcccccggctaacctccttgggggtgagactgggtgggatgggggtcggtgggggaagttgcatggggtgttatacccgcccggttacaggccgctgccctgtagcataac

SEQ ID NO: 41684 - DNA, 18 bp, Homo sapiens
  chr5:77253986-77254004
  hyper
cggcgctggtgcccaccc

SEQ ID NO: 41685 - DNA, 667 bp, Homo sapiens
  chr5:77268309-77268976
  hyper
tgatttttattaggttaaagacgagttcacagatggtaaatcgcgtggagagaaatgagctggagagttacaccgagtcaacgcgggacacggctcccggcccgggccgggccaggggtgggaggcggttccctaccgcaggcggcgggactcccatgcgccgagggacccaagtctccactccacccacacgcccacccggcgtcggggcgctgcggcctcgcctcacgagcccagagcaggccgcagcctgggctggggatccggcacctgggcagggtgagcttggccggacatcctcctccaggactacccgcaccccacagtcgcgtcaaaagcgccccatccccctgtctctcgccgcgcaggtttcccaccgacgcccgctcggaaggcgagagcccccacgtggcccggcgcggcgcggcccccggggaccgcgagcaacaaaagcccggcccgcagcccctgctcctcgccttccttttcaattctcccctgatctcaggtggaattaggaggattaaagcagcaagtaaatgaggcgagtgtgcaaaatgactcctttctgaaccaaacggcatgctccgtgctggggaaatgagatgcacatttaaatctcatccatccaccgcctgcggccaccgccatgtacctgcctacttag

SEQ ID NO: 41686 - DNA, 42 bp, Homo sapiens
  chr5:77269195-77269237
  hyper
ccatcctggagggagcgcgagggcccggctcctctgggagtg

SEQ ID NO: 41687 - DNA, 172 bp, Homo sapiens
  chr5:77269263-77269435
  hyper
cgccagcaccaggggcgggctggagggggaccggcgatcagggaaaccttactcctcgcaggcttcaacctgctggggcgtgtttacgtccgcaaagtccgataatatattttgtccccacttcttaggagctgattcttcttaaaatgcattgccacgttatctctaacgt

SEQ ID NO: 41688 - DNA, 20 bp, Homo sapiens
  chr5:77806025-77806045
  hyper
acatgacacatattgatgtt

SEQ ID NO: 41689 - DNA, 95 bp, Homo sapiens
  chr5:77806301-77806396
  hyper
ggcccgtgcccgcagaaccctgccagcaagccccgggcctggctagcatgccaggcggttgttgcactggctgcgtttgtttcaagttcttcctg

SEQ ID NO: 41690 - DNA, 30 bp, Homo sapiens
  chr5:77943771-77943801
  hyper
cacctcttccagcccgcaccccaaatcact

SEQ ID NO: 41691 - DNA, 31 bp, Homo sapiens; identical to SEQ ID NO: 4058
  chr5:77944026-77944057
  hyper

SEQ ID NO: 41692 - DNA, 30 bp, Homo sapiens
  chr5:78279826-78279856
  hyper
agaaatatgacaatcgtattcagattgagg

SEQ ID NO: 41693 - DNA, 123 bp, Homo sapiens
  chr5:78281719-78281842
  hyper
acagtctgattgcacggtgccctttggaaggtgcggttactttcaagttgccctgggaggatttggagtgttgcgtggtcattgaataaatagctcattcgcttgtccggatatgaccccact

SEQ ID NO: 41694 - DNA, 131 bp, Homo sapiens
  chr5:78407643-78407774
  hyper
cgcagcgggaaggctcgcctagtcggtccgcatccgtgtcgaccacctgtctggacaccacgaagatgccacccgttgggggcaaaaaggccaagaaggtgagtctccaggggacccgagggcgctctcct

SEQ ID NO: 41695 - DNA, 217 bp, Homo sapiens
  chr5:78408057-78408274
  hyper
caccctctgagccctccctgacggctgggtgtccccagaactccgagccttccaatatcttctgaatctggcaccccaagaccagaaaactccctagagatactgctcctagccccgcaggcgcgatatcccgtccccacggagcccctccgcatctgtgtccgaggccgccgcgagcgccctctgcacccggcgcgcccagaacagggaggagtgc

SEQ ID NO: 41696 - DNA, 91 bp, Homo sapiens; identical to SEQ ID NO: 4061
  chr5:78408297-78408388
  hyper

SEQ ID NO: 41697 - DNA, 210 bp, Homo sapiens; identical to SEQ ID NO: 4062
  chr5:78531491-78531701
  hyper

SEQ ID NO: 41698 - DNA, 1562 bp, Homo sapiens
  chr5:78531953-78533515
  hyper
agtcgaatggcaacattgtggcgatgctgaggcgcagagtttaggagacgggttcatcagtcaggccggctccgggctttctgcagcagcaccaggggcgggggcggggatcttgacctgggcgagcgaccgggacgcatacagcgccggcctgaccccgcgggacccgcgcctcaccaccggagcgccgcagacgcagctccacggcctcgcgcggggggcggcgggcggccgcgaggcgctgcggcagcgcggagcttgtaaacagatccggccgcaggtgaccatgtgaactacctgctcccgggacgcttattgtccttctctcgatccgcgccacaaaggagctcggcggtcggggcgcggagggacaggcgaacgagccgggagagccggccggcgcactaagatggctgaaggcgcccggcgagggtgagcggggggcgcggcgcagccagcggggagtcctcgggcgggccgggccggcggcccttccccgcggcgagaagccggagccaccatgtcgttcgcgctggaggagacgctcgagtcggactgggtggctgtgcggccccatgtgttcgacgagcgcgagaaacacaaattcgtctttattgtggcctggaacgagattgagggcaagtttgccataacctgccacaaccggacggcccagaggcagaggagcggctcccgggagcaagcgggggcgcgagggggcgccgaggccggcggagctgcgtccgacgggagccgcgggcccggcagcccggcgggcaggggtcggcccgaggccactgcctctgcaactctggttaggagccccgggccccggcggagctcggcctgggcggagggcggctctcctcggagcactcgcagccttctgggggacccgcggctgcggagtcctggcagcaaaggggcggagagtcgtcttaggagcccagtgcgggccaaacccatcccgggtcagaaaacatctgaagccgacgatgcggcgggggcagccgctgcagcagcccggccggcgcccagagaggcccaggtgtcctctgtacggatagtgagcgcctctgggacggtctccgaggagatagaggtgctggaaatggtgaaggaggacgaggcacctctggcgctctcggacgcggagcagccgccgcccgccaccgagctggagtctccggccgaagagtgcagctgggccggactgttttctttccaggacctgcgcgccgtgcaccagcagctgtgctcggtgaactcgcagttggagccgtgcctgccggtgttccccgaggaaccttcgggcatgtggactgtgctgtttgggggcgcccccgagatgaccgagcaggaaatcgacactctgtgttaccagctccaggtctacctgggccacggcctggacacctgcggctggaagatcctctcccaggtgctcttcaccgagaccgatgatcccgaggagtattacgaaagcctcagcgagctgcggcagaagggctacgaagaagtgcttcagcgggccaggaagcgcatccaggaggtgagtgagt

SEQ ID NO: 41699 - DNA, 31 bp, Homo sapiens; identical to SEQ ID NO: 4063
  chr5:78807882-78807913
  hyper

SEQ ID NO: 41700 - DNA, 31 bp, Homo sapiens; identical to SEQ ID NO: 4064
  chr5:78810400-78810431
  hyper

SEQ ID NO: 41701 - DNA, 30 bp, Homo sapiens
  chr5:78908115-78908145
  hyper
atccggctgtcttgcgcctgcgcattcaag

SEQ ID NO: 41702 - DNA, 30 bp, Homo sapiens
  chr5:79286882-79286912
  hyper
cctggaccccgcagcgcagcgggaaactgg

SEQ ID NO: 41703 - DNA, 30 bp, Homo sapiens
  chr5:79316411-79316441
  hyper
agggggaatgtggatcgctgaccctgaaaa

SEQ ID NO: 41704 - DNA, 46 bp, Homo sapiens
  chr5:79330928-79330974
  hyper
cgactgcccatcttcgcccctaccctcgcgcgtcggggccgtgtct

SEQ ID NO: 41705 - DNA, 292 bp, Homo sapiens
  chr5:79551151-79551443
  hyper
ggctgagttttcccttcgcccagacctgcgcccggtagtttggaagtcaggcttcgagacattctcaaaggtacagagcccacgctcgactacgagatgccaagcgcaacctgcctgggttgtttgacccgagttttattcagggcatagcaaaggagacggtgcctaaacccacttttcttcctggattcatccgacaagcagagtggagagggctacggagctcagcgctattcaccagtgctcggcgcaagaggcgacacgcccctggagcagtcgggatcctccgccc

SEQ ID NO: 41706 - DNA, 429 bp, Homo sapiens
  chr5:79551987-79552416
  hyper
cggagcaggctcgacccgggctcgcacttccgctggcgtcaggcgggtgggctgctgcgatcacttcccggttggggcgccgagctccggagtcggccgccagcctttgggccccacgctccgggtctggtgcgcggtctggccgcgctcgggccctcgccaaatgagagcgcagcgcctctccgccttcggatccagagaaagagcttgttgctgcctctaaaaggttggagccttagtaagcggttcctgcctttcctgcacagaccagaccgccgggtgctggtctgcgctctgccgcgcgccgactgggacagcccacccacgagatccttgttcctgaaatccctttccttccctcatctgccaagaaaactttcaacttttgggctctccgcgcctcccaagcttcctcgaatccctgggccc

SEQ ID NO: 41707 - DNA, 30 bp, Homo sapiens
  chr5:79703710-79703740
  hyper
tagtgcccttggctcggaacctgcgtcgta

SEQ ID NO: 41708 - DNA, 30 bp, Homo sapiens
  chr5:79704428-79704458
  hyper
gcactgtccattcccgcacccatgcatttt

SEQ ID NO: 41709 - DNA, 317 bp, Homo sapiens
  chr5:79783887-79784204
  hyper
ccggttagcaggggcgccagcctgggcgcctgcgcggacggcgggcgtcgtcaccatggcagcatccgctggaggcccaggtaagcgccgagcgcgcggcctctgcctggaggtggggcgctttgagaggctccgccggccgtaccctccctttgcgggctcccgcggtcttccttgctagggacctgggagcgcgccgcgcagaaccgggcggctgggcttggagcccgctctgcactcggggcgcgcccgcgatcgcctggcaaggaccttggtttgccgggtgggctctaagggacaggcgttaggggaggtcg

SEQ ID NO: 41710 - DNA, 474 bp, Homo sapiens
  chr5:79864970-79865444
  hyper
gggcaccgatgggggcggggtgcgcgtttcgtcgcctcatctctgagccagggcaggcagctggcgggctaaggcgatcaccatccatgaaaacgggttctgcccacagccgctgcggagcggtccctgcgccgctcgcccgccggccggacgcggccctcccttgggaaatggtgcgtctgaggggcgcagccactgcccccatcccggagcaggcgcacctctgcacccggctctctgctaagggggtccggtatcctggtgccaaggctgtgcgcacctgagaagggcgggaaccggctgcccgcccctgtgtggctcctggaagcaggagctcctggaagctgcaaagggctccgcagtccccagcccgcccccagcgcccagccggcacctcctgctgcccagctgccgaggcacctgcggagacgcgcccaagtcagcccctccggagacgcgcccaagtcagcccct

SEQ ID NO: 41711 - DNA, 180 bp, Homo sapiens; identical to SEQ ID NO: 4068
  chr5:79865522-79865702
  hyper

SEQ ID NO: 41712 - DNA, 89 bp, Homo sapiens; identical to SEQ ID NO: 4069
  chr5:79865744-79865833
  hyper

SEQ ID NO: 41713 - DNA, 356 bp, Homo sapiens
  chr5:79866099-79866455
  hyper
gcagatctcggtagatgccgcccagtccccgccctgcttgcggaaagaggcgggcgactgccgcgaagcgctggagctgggacccggagcgcacacctcgccagacgcccgggcagcgaggcgcttccgctgggggtgacgcgtcggctccaggctctgcgcaggtgagggcggcaaggctcctctggacccaggggggccagcagctgctggaagctccgccttctgtccccgtaagtcccacccccgtcccccgcttcggccaccgcgcttcggccacggcgacttggccaacaacagcggcagcagggtctccccattgagggaagcacgcacccctacgtcacgggctttgg

SEQ ID NO: 41714 - DNA, 166 bp, Homo sapiens; identical to SEQ ID NO: 4071
  chr5:80255908-80256074
  hyper

SEQ ID NO: 41715 - DNA, 57 bp, Homo sapiens; identical to SEQ ID NO: 4072
  chr5:80256312-80256369
  hyper

SEQ ID NO: 41716 - DNA, 379 bp, Homo sapiens; identical to SEQ ID NO: 4073
  chr5:80256428-80256807
  hyper

SEQ ID NO: 41717 - DNA, 139 bp, Homo sapiens; identical to SEQ ID NO: 4074
  chr5:80256887-80257026
  hyper

SEQ ID NO: 41718 - DNA, 197 bp, Homo sapiens
  chr5:80597536-80597733
  hyper
aagctgcagggtctcgtcgttcgttccctctggcctggcggaacttgcgtgggaagctgggaggacagaaggcttagccgctgggtccctgagctggctggagcgcgggctgtctaggggcggcgacctcagctgttgggctccggctgctgggggctgtgcgtccagccgccctggaatccgcctgtgggtgggcc

SEQ ID NO: 41719 - DNA, 30 bp, Homo sapiens
  chr5:81046743-81046773
  hyper
tgcgtgagtgtgcgcgcgtgtgaaggcgga

SEQ ID NO: 41720 - DNA, 30 bp, Homo sapiens
  chr5:81147828-81147858
  hyper
gccgcctcccgccgcggctgccgcgctccc

SEQ ID NO: 41721 - DNA, 30 bp, Homo sapiens
  chr5:81267512-81267542
  hyper
aggactttttgtagcgtaagcatgctggca

SEQ ID NO: 41722 - DNA, 30 bp, Homo sapiens
  chr5:81538030-81538060
  hyper
taagaaataatcagatcttttagaaaagta

SEQ ID NO: 41723 - DNA, 30 bp, Homo sapiens
  chr5:81574424-81574454
  hyper
ccaatcccagaatgcgttttatgggacccg

SEQ ID NO: 41724 - DNA, 30 bp, Homo sapiens
  chr5:81658875-81658905
  hyper
ttggatgatctcaatcgtgaggaaaaatta

SEQ ID NO: 41725 - DNA, 30 bp, Homo sapiens; identical to SEQ ID NO: 4075
  chr5:82372852-82372882
  hyper

SEQ ID NO: 41726 - DNA, 122 bp, Homo sapiens
  chr5:82373321-82373443
  hyper
tttagatcacgtcccgcaggccggcggaagtagctgatactctcattggttgcaaaaccttgatctgtgaaagcgggcgttttggaagataccggaagtagagtcacggagaggtaggatcc

SEQ ID NO: 41727 - DNA, 30 bp, Homo sapiens
  chr5:82453282-82453312
  hyper
atcctgtaataaaaacgcagtgatcaaata

SEQ ID NO: 41728 - DNA, 30 bp, Homo sapiens
  chr5:82766936-82766966
  hyper
tccctctaggtccccgaaggatctcgtttt

SEQ ID NO: 41729 - DNA, 718 bp, Homo sapiens
  chr5:82767265-82767983
  hyper
ccctgaatggggagcgctgctgtccccaagccgattggtacttcttgtcaggaagaaacgccaagaggtgggagtgcctggggagggaggcaggcggtccctaccgcaggcgcggggagctgcctttccgcccctccgcctgctttccaagcctggactcttaggagtggctgaagctgcggagcgcttttggagcctgtgaatgaaccctcctcctctccctcctccttcttctcgctgagtctcctcctcggctctgacggtacagtgatataatgatgatgggtgtcacaacccgcatttgaacttgcaggcgagctgccccgagcctttctggggaagaactccaggcgtgcggacgcaacagccgagaacattaggtgttgtggacaggagctgggaccaagatcttcggccagccccgcatcctcccgcatcttccagcaccgtcccgcaccctccgcatccttccccgggccaccacgcttcctatgtgacccgcctgggcaacgccgaacccagtcgcgcagcgctgcagtgaattttccccccaaactgcaataagccgccttccaaggtaatcacgtttcttttgttccccccttaaaaaacaaaaacaaaaaacttatagaaaaaaacccgcgagcttagaaaaaagaagcaattggtagaaggctttaattaaggcaaagagctgtaaggcgaagttaagaaaatg

SEQ ID NO: 41730 - DNA, 2251 bp, Homo sapiens
  chr5:82768278-82770529
  hyper
acaagtccccgaagccgccttggtgcaggccacctggtttcccagcccctggtgtgtggtcagtgcctggtgttcctggaaagccactcccgggcagctcctgacagtgcgacccggcgcccaagcagcctgggaccttgcgcggacctgaccccttcagaccgcaggcagtctgggaggaggtccggccgggggaggtgcaggatccccgccgtgtctctttgacgacttggggactgtcacggttctctcccggcgcccctgggttcttttgtcctgcacgcggtgcgaaggggccagcagggaaggagcagaggatggggggtggggttgttggagccccgcggaggtctgggaggcccctgggcgggaaaagcctgttctgaatcggcagggatgtgcaacaatttttctcaccctgaagagtgaaatagggtctgtcgctcccatctcaacaagcaaaccggcacccagagcgcactgcagacaaaggtggctcggggacccgaatcaggggcctctgggtcagtcctctcgcccagactacaggagtcctccgtttccttacatattccccaccctctcctagttctccgctctagttgagcaactttactggcaggtctagcggcagcggcgcgcgcgtgtgccgggagccccgggggacgtcctcggctggagcgccccaccgtcctgcagaggcgtgggcgctgtagggcgacatccctggtgcgtgcagacctagggcatccgggttgttctggcccgcggtctgtgtcactgggcgtggagcggtctgggtgttaggcagaggagagcggggtagaaaaatagtgtcatagcctaaactatttgctctccaatccaactgcgtctcggcaagtcctgcatgtccctgggagatgctgcgggaagggggagaaatctacacggcgcctggagagttgtcctgccgcgcgcacacccgcggcagagtctctctgggtcgcgttcctcatctttgtgtctccctctgtctccatcttctctgcctcccttcccctctcccagcctctgttctctctctctagcttctgcgtcccctcccccacagctgacaaatgaatggctagtgtgaaatccctgcctttcccgtgctccaaggcagcagggagggaggagcgagggaggcggtgcgctccttcggatctgcccccagttcagctcacaagacttgcagaacctagatgtctaggaattgggagttttgcggcgggtgtgggcgccccctgatggagaagtcccgcacaggcggagaaaaacaagccccccagaccaagcgagcatctttcacaaccttgtgttcaaggatggaaggccctagttttcccttaagtcattcattttgcactccacaatctgcggcgtacatctaggagtttggaggaccctgaaaaaaggtcttggtctgtgcaaagtgcagagatgccttctcgcgagtcggctggaacgcacgcggcgccctgggtccagttcgccgcttagtggacgaacgcacatggccagggtggagccaggtttcggaggtctagacgcgccaccctgggcgtctttaagaaagataatacacataccgtgctctcaaaacccatgaccacttgaacccaacgctagggccccgccccaggatattgcaaaagaagggctcctaatccaaaacttaaacttcctcaacttcagggcgggcgtcggacgggaaagtggagagaaggcgggcagtgggaggaaaaaagaaagggaaggaagggaagtggaaggaaagaggaccgtggaggggaggaaaaggagaaaggaacggagatggggcagatggcattcaaacagccaggaacggaccggaagggttcgtttcggggtttgggtctgaatttcgagactcgttttaggatactcttttccctttcccagcggcaacaaatgtgactgcagaggcgtgccgggatggaagggtgggaaagaactagacaagcggaggtggtccagccccgcccaaaggggctgggtctggggcccgcccccactcgctcacctcgcgccaagggaggacccgcaacgggcgctccccgcagcggctgggttagccagccgccacgtgggttggcgcttcggctcccagccgagacgggtgtgacttcctgggctcagagactgcagtacagccgcacaggcggccggcgcagccgaggcccccacccaccgaggccaatggggg

SEQ ID NO: 41731 - DNA, 107 bp, Homo sapiens
  chr5:83018265-83018372
  hyper
acaatgcaggtggccggtgtgcagatgagccagcgcgcggggtgcggccgccgggatgcccgatccgagtcgcgcgggtggcggcgagcggcgctattgtcttaaag

SEQ ID NO: 41732 - DNA, 30 bp, Homo sapiens
  chr5:83678126-83678156
  hyper
agctgtgccctcggcgcgggtatcttcagg

SEQ ID NO: 41733 - DNA, 1956 bp, Homo sapiens
  chr5:83678708-83680664
  hyper
ggcccaggcaaggcgcggccatggatctctactgccagagctgcgagggcatctggccagcaacacccggcttcttgggcgaacagtcgcccaagagtccacaattttcttgtgactcaaatagatggataggtgcatggatggatggtgcagaatattcatactctgtctaatctcaagtggactggagtcaacgcatttttaaatccatctaccttttttagaggcacagcatttaaaaccctgtagttcactcagctttccacttgaagctgcctgcagaggattctattacccgcggatccctcacaaggggccgcccgcatctgtgagcgcaggagtggcacagctcccccaggcacagctcccactcgcctccccacacaccctgctgcccccgctgcccttttccggcgactacttcagccccggccagcggtgagacccaggtcagcacaagggtttgtatggacaagctgcacctcgcaggggacctggaagtcgcctaaactactccagcaggacactcgtcgaagtcctgcgttttcttttaaatgcttttttctttttaatttaatttgatttttatttttctgtttttattttttcgtgcaattcacagaaggcatcaccctacaagctctcacaacttttccgctcctgtgcggggacgcgaggggtggcttgccccgcactattccccattaccaagagttaacactggtactcggagggggtgcgcagctaagctccaggcccctggggtcagactaggagaggcgggttcctggggtttgctgtaatcgatgctgctcctctgggatggggaggcaggagaaagctgaagtgacctgtgagactcctctccacctcacccgcggccaaaacgcccagcgccgggtctgggtttgcgaacggctcagcccaggccctgcgccagagcaccgcacccgggggcggacggccctgcagctccccagcctcttcccgcatcaactagctgacgcccgggcgcactggcttcccccgctcccgcccgcacgaaagccctgcccgacgtctgcagtcagcatcgcccgcactgcctagggagggtttgcgccgagacccagtggccgagtgagccacagagtcgctggtcctggggacgctgtcttctaccgctccccaccgtcctcctctttcctgtatctcaccccggtaccccgcacccttctccccgctcggccccgcgcactctgctcagactttacaagcactttctcggggcacccaggactcgacgcctcctccgcgccgccagcggcgctcgccacccttggcacgccggagggaccgcctccggccccctgcgcggcgtttctcaggggactcccagcccatccctcacccagctgtccgggtcccgacgccttacctttgccgaactgggggacaccgaggctgagcccgaccaagagccagacggctaccgagcgcttcatgatcccgtctcccggacgtgaccccggctggtcaggggtcgtcgcggagggcagtgtagccgaggtggcagcgcagggcagcagcagactccgcccctactaaagaattcaagaagacgttctctttcctcagcgctttgttaaacaaattcttggagagggcgagagtggtgactaaagagaggagcctttcctccccttttgcctgcgctccggcgcgcggaggtgggtgagctccggggagccgccggcgggctcagccctccgctgcgggtgggtcccggcagaggcgcggcgggcggggcgcgggctcccgcggccgccccgggtctgctgcgcgggcaggcagacccaccggcagacaggcggaccgggcgctcggctgtcgctgttctccgcgcggcggctgcggggcttctgacttggagaacaatgaagcgtgagctggaggggagcgagcgggccgccggga

SEQ ID NO: 41734 - DNA, 73 bp, Homo sapiens
  chr5:83680693-83680766
  hyper
cgtgtgagtctgagcctggcaggcgcgctccccactcccccggcgcccgcccgccctccgcccgccctgttat

SEQ ID NO: 41735 - DNA, 30 bp, Homo sapiens; identical to SEQ ID NO: 4081
  chr5:85913691-85913721
  hyper

SEQ ID NO: 41736 - DNA, 30 bp, Homo sapiens
  chr5:86708839-86708869
  hyper
gagacgtaagtgggcggagcctagagaacg

SEQ ID NO: 41737 - DNA, 997 bp, Homo sapiens
  chr5:87436528-87437525
  hyper
ataacagtaacaaactattcccggatcttgttttttcttttcttttcatgggtccccgtttgcgctcttagtcggcttacccgtcctgttccaggagccgacagggaacagcccacctggagcaggtcttgggccaccactcgccccgccccccgtctctactcctcactcgctctccccgctcctattaagcagccaacgctgggtgatctcctctccagttcttcgtggtttcattgtagccttgatatacaagacaaatgcacactttactctgggcttaaaaaaccatctatcatcatcctttgggcatgacaaatacattgtgtgtttcagagaaattaatctggtatttagggggagaaaggcatttccaaccagtctccgtgcagaaccttcccgcaaaccctgtagcggcatttttcgacacttttctcctcctttcggcaagcctcaaacttgaccttcgagaggattttaagggtagagccttcctccctttccctcgtctgctccaagagctcacgtaggccttcttctgggaaacagcggctcaggaccagagctcggagaactgcgcgtccaggagcgcgggcgcggccggggaaaagggaggaggcggcaggagggggcaggaggtggagggaggaggaggatcggtctgaatatgcatgaggcacccagcactgccctcttccccggcagctgctcgggcgggggcgaaggagggaaggggaggggaggggaggaaatgaggctggggcggggtggccagagcagccgcagaggctgacgcgggtttggagaacggaagagatgatttgcatggcgcctggtgattggctgatggccgggggctgggtctgagaggcggcccctgaatggtttaacggaggaaattacaagattcattcgactaaagaaagccggggcgggcctggtcggcgcaatatgcagcctgtccgcaagggggcgcgatggcctatctttgttctgg

SEQ ID NO: 41738 - DNA, 30 bp, Homo sapiens; identical to SEQ ID NO: 4084
  chr5:87437944-87437974
  hyper

SEQ ID NO: 41739 - DNA, 80 bp, Homo sapiens
  chr5:87439123-87439203
  hyper
accctttttgaatgccaatttcgttttcaggcaattgcctctttgccagccaaaagatcgggattggatcaccagggcta

SEQ ID NO: 41740 - DNA, 315 bp, Homo sapiens
  chr5:87955349-87955664
  hyper
aaaacagtaatcagaccgaaagtagttgaggaagcctatgacaggaagttgttaataatatccttcgaaatttacctgtgaaatacagagcttgactacttttgtaaaagtggaattgaaagtaaacggcctctgtaatgcaaatcgaccagcagcaagaaagccactacctttggagtcccacgacttcacctgagcttgcaatagaccttgtgcgccctttggttcatggaatcaaaactgttttgacatgttggccagtgcccttcggtgtcactgaagctcagcccgcggacggcggtgtgtcagtgtgca

SEQ ID NO: 41741 - DNA, 91 bp, Homo sapiens
  chr5:87955839-87955930
  hyper
cgcagagccggacctgtgccgggcgagttggatttagcccagttagagttaagatggtatcattagctgcgcacagcgtgacttcccgcta

SEQ ID NO: 41742 - DNA, 469 bp, Homo sapiens
  chr5:87956193-87956662
  hyper
cgagcaaaacttccccgcccccgccccccacccagcttccccgcagggagaccctttccgttagcagcttttcactaagttaataacggtgtgtgtgtggtggtggcggggaggggggatttgggggttacacaatatctatatcaatgatattgatcacgtccagggaagaagcctgggcaaaactagagacaccgagtgtcagcaaaagaaagcttcttaaccacaagttgcgtgccgcctgaggaaggtgccctgtggcagggggtggccgctgggagatgcctgcctctaaccgacgtccaggcgtgactaaacctcgacgccacccccattcacaagctcaactcagggattcccaagcaaccgcagaccggaggtggcgcagaggcagtgaccgaggtcgctgattaggggccgagaggctggcaaataataattttaaaaaaaaaaaaaaccggaatagcct

SEQ ID NO: 41743 - DNA, 615 bp, Homo sapiens; identical to SEQ ID NO: 4087
  chr5:87956679-87957294
  hyper

SEQ ID NO: 41744 - DNA, 812 bp, Homo sapiens
  chr5:87962609-87963421
  hyper
tttctggtttttactgtctctcggctgtagtctttcattctcacacgctccccggcgatcttgaaggagtttttactttcggttatctagctttatgaagaccaatacactcatacagctagataaccaaagataacaactcgcttcccacacaggcctctgtcttcctcttgccagactccaggtcctgatcctttctggcagtaccgaagagtggtcgtccaggatacttgccgcgcttaagattcctccttttatgtaaatatgacctggtttctgtttgtgtgtgtgcgcggctaaaacatccaaacgagatctgttgccttcagagtttattccgaacttttctttttcctttcagcaagtaatctccggcagcgttagccaacaattcatctattaatatcagaaaataaaaccagctattaaggtgcagcaagctgttacgagtgagcagcagcatccgtcccttcacaggcctctatttgcattgtaaattgcttctttctcacgcaagactctttagcctctctctatagagatgtataaagccaacggcaatttccagcgcaggttaaggaggaaggaaaaaaaaatcccattctatagaagtgacagctgattcaaggatctgttcctgatcctttttggttaggcaccatggctttttaccaagcggtggcagcttgattgcacatatcttgtgtgtatgtgttttagggggaagatcctcgatttcacagggcttctaggctgggaaggagaagatgccgtcttgctggcctgctgctgcccccggtctgaaagaagga

SEQ ID NO: 41745 - DNA, 303 bp, Homo sapiens
  chr5:87967830-87968133
  hyper
tccaaaggggcccccggccgtggccgtgacttgacagagcctccggtctaacttctgatcaattccactgctctcctgacccctcaagacagtcccccattcaagcaccgcgggtacatttgcaagataaaacgccgcagacactaatgcaaatacattgcccgagttcccatcaccctgggttcctgcagataattccaggccacagaaaggagttcttgccttcctcagccgggtctagactctaagcaaaccgcaaagacctagctccgtttggataccagaagcgtcttaagctgaacc

SEQ ID NO: 41746 - DNA, 30 bp, Homo sapiens
  chr5:87968829-87968859
  hyper
aggaaccgaggcgccggctgaaagacaaga

SEQ ID NO: 41747 - DNA, 2271 bp, Homo sapiens
  chr5:87969871-87972142
  hyper
aaatgtaccagggacgcgccataggggtcatctatttgaggaggaagaaaaagcgggtgtgtgtgtgtgtgtgtgtgtgtgtgtgtgtgcgcgcgcgcgcgcgcgtctgccttccacggaaagagagacggagagatgtgggagggtgggggtggaagtatgcagacagagaagggtgggggcttcgaggggaaggtgggcttcctgcaacacaagcggagaggctgtcaggggtgtgggcacgggggtgcggggaggcggtgcaggaatccgtcccgccgagtgccgtcggcccctgtgggcctgtttgcgcgcctggggctggccgcattctgggcgcgggtgtctgcgtgccggggtggtagttccgagcctgcgcgcgtgcgaccgggtacgggagggggaagagtgccgtaaaaattcagacgagtggcccgtatgtaaatgcagcccgcggggagcagggaggcggtaatgacagccgctggcgctcagccccgccggcggcccctagctttcccgccaagtgcagccggaggacagacagccatgcgtgtccttggcgggagagcccccacccgccgcgcgcgcccgacccccgcgcacacgcacacactcccctcgcaggcgtggggcccaatggccacgaacatgtcaggaaaacaaagctggggctgcgaggtggaacgatgaaacggcacacttggcggccgagggcagagcggagaagtcgccaccacagccaccggcgcccctttcttgcctgctcgtagatctgccctccggcccagaagaggccgaggaccatttcttagctgccccagaggagggggcgagcagaggagggggcggatgtgcacagggaggtgccagcggtccggtgcgcgggcacgcacacgccggcgcgcagggctgccgcgggcggaaggaggggaatgacaaggcctcggccgcgtctcggagaggcactacctccgcgctgaggccgctgagtttcaagtgcaaaacaccaggccaaatccggcaaggcggcggctacagaatggctcacacttcaagcctccttcctcaaacaatccgatgggaaggacctggctgttcaggggaagcctttgctggcctctctttttacatggggtgaagtcgaaccccaatctaggagccctggcctagatggctccgcagatgagtcccagacgtggccatggaaagactgatctctctctgctcagagcgcctgcctcggtgctcactagcgcaagcacctcccaacacacatacatacatacacacacacacacaacacagcactcccatcacattaaaacgcgcgctcatgatcctgccgttaatgaagccgaggcgcataatgagtgcacaggtaaataggtaccgaaaccagaagacttcaccagtcggctgggcgatttacctctccctacagggagcacttgtagttatcgtgttttaggagtgatttgctgttgtctgtggtctctcgctcctcttcttgtggagagaagccaaaaaatatatatgttccgtggtcagagtcttctttctgataagctacccgagcattggtctaaaacatctgttttatctgttgattttggtttgttgttttggggagtgttgcttttctgagggaagcaaaagaacgtgtgtgtggtggggctggaagctcagggcaagagtctgcgtgtgcggccggaaggctggcgagtctgagagccgcgcggtgcagaaagaaggcggcggcttgtcctcccccggggccggcactggtcccttggcaccccggcctgggctcggctactgccgccgccgcccgcgctctcgggctccgccggctgccgctccgtgttttcccccatcccggcttcacgttcaaggtttagctgcgaggtcacgtccattgacgtcagctccctgtctccctctacgtccggctacatttacatacatcaaggaaattagggcattaaaaaaatatgcaaatcctgcgcgaagaggagcgggtgcattcctggcgcgatcgccttttattgaagcttttaattaaaggggccagttggcgagcccctgaaacaaccgccaaaaccccccaaaagagaaaaataaacgctgtagccttcgagaacggttgtttcggctcctgttctgtgggcggctgaggaccgccggctgcccggctcggagaagaacaggttagaggaggcagctccagcccatgcataatcagggctccgcggcgcctccattctttcc

SEQ ID NO: 41748 - DNA, 125 bp, Homo sapiens; identical to SEQ ID NO: 4092
  chr5:87974354-87974479
  hyper

SEQ ID NO: 41749 - DNA, 618 bp, Homo sapiens
  chr5:87975970-87976588
  hyper
tctttctgtagctagctcccacgaagctgggattttcaacctcttgtttattcgtaaagcccatatggaaccccggttgaatctcccctcttcggattttaccaggaggccctcagtgccccaccgccgcccatggcacgtgaagagaaaggagggagagttgggagccacgagagaagccggctcggagccgcttccgtcggggcccatgtttcgccccaacagacccgtctctcctttctctccccgaaggtacttccttaggccggcagtgtcgctacggtggtagccaggtgagcacgggcacagtcccggggcgggggcgggtagagcggccctctctcgggagctccggtgggtctgcgaacctgccgggagcggaaggctgagtggcgctgggggcccgcgcggggctcctggctcccgccggcaggggaacagcgacacctactggccgcatgggtaccgcgcccgggccgtcagggctgccctgggacggggtgccgggctccgtggacttgggaggccgcgggaaacttcaccgaaggctctgcggactgctctaggactcgtccgccctggagaagacaaagccacgctttctggagacccctggga

SEQ ID NO: 41750 - DNA, 43 bp, Homo sapiens
  chr5:87976874-87976917
  hyper
gcagcggttggcgccgggcacacgaaccggccgagccctcctg

SEQ ID NO: 41751 - DNA, 378 bp, Homo sapiens
  chr5:87979426-87979804
  hyper
cttgagccatctgccgcaggtgtaatggatggcagggggccgacctaaccacactccagtctcttctaggtcgtcaccgctctgcaccaaacaaatgagtcctgtttcaccactagggtgccgaggtggatggtggatgctggcccccgcccctggcagcgctcagcccttagaaaccagagccagctgacaacacgcgaaacacacaggcacagcgaaaacgccgagccgacgctcattccctctgccccctccctctgctctctgtaacaaggaggacacgtacacagcctttacacacttaaaagcccttgcgactccctctgaattcttagttacttatgacggccttcctcactgcacatagcccctggggtg

SEQ ID NO: 41752 - DNA, 14 bp, Homo sapiens
  chr5:87979863-87979877
  hyper
gcgcgcacgcgtga

SEQ ID NO: 41753 - DNA, 325 bp, Homo sapiens
  chr5:87980170-87980495
  hyper
gagggagctgtcgaacgcgcgacttaggaagggaaatcggatagctggagccccacgcagtcgctcggaaccttggctggaggcacaaggtgcccaggggcaagagcccggggtccaagcttccaggcgcacatcatcctctgggccccgggccctccggctggagcactccctcacccgcatcccatccccgttccattttgatcattatttgaatagcccaggtaagggtgcccatctctcggctatgggcgggggctggaccctgacaggtacggactccgcgggaccccagtgtgcttacctcgagcgaggccctggcaaa

SEQ ID NO: 41754 - DNA, 215 bp, Homo sapiens
  chr5:87980867-87981082
  hyper
ctgggatgggacggcgaggaataaattgctccccacccagctgcggtgcgacgcccccagcgtcccaggggagccggtgcgtcagctcacggctggccaaggcggggccgtacaaaagctagcgccgcgggacccccttcatgggcttctaccctagcagaccgagcgctggaggccgctccacgcgcgagctcgaaccacggagggctctcagc

SEQ ID NO: 41755 - DNA, 30 bp, Homo sapiens
  chr5:87983605-87983635
  hyper
gcaaatggaattcacgaagaaactcatgtg

SEQ ID NO: 41756 - DNA, 128 bp, Homo sapiens
  chr5:87984846-87984974
  hyper
ctcctcgtcccctgcgcctgaaattcaggtcgcctgcagctacggcctcaggtgagtggctcagggaagggtcgctgaggctcttcccagggcccccgggcctctcttgggccgctccctgggagtgc

SEQ ID NO: 41757 - DNA, 40 bp, Homo sapiens
  chr5:87986627-87986667
  hyper
acggagccgggccccgccgaacctgcgctcgcagagaatg

SEQ ID NO: 41758 - DNA, 446 bp, Homo sapiens
  chr5:87986872-87987318
  hyper
tcgggtgttaattaacgcgctaatttgagcttcaggagcgggaggcggccggtagcaccgcgagccgcgaggggccagtgacctctagtggacatgaggagatatgcagcgcgagtgagcgtgtagcagagaaaactctttcctgagcagctgctcgcgtgtctcctctgaatccaatgcaagggagggacacaagtccccaatttaagggagaaagagccgtcagcaagtggtgtcgaccaaagaccttagctcttctgatgtatctgaaatctaaacgcaatttaagcgcgcgtgcacacacacattgttacttatcagtttttccagcgagagaagaacatatggaaagggtttgagaagtgagcgtgaataactttggtttctgaacctagagaaaagcagggctttcaaagctccggaggcaccagcgattcaggggaagg

SEQ ID NO: 41759 - DNA, 174 bp, Homo sapiens
  chr5:87987933-87988107
  hyper
tcttccctggcactcttcctccgaggccagaagtctgaattactagcagctaccagccgcttggagcgggaacgtggaggtgatcccctccccgggagtagcctgtccgtcccagctctcctcccttctgtgcctggcggttttgcggtacccgaatctgtcctcaagggttgg

SEQ ID NO: 41760 - DNA, 30 bp, Homo sapiens
  chr5:87989175-87989205
  hyper
ccccgggaagtggcgcgaatcactcttggc

SEQ ID NO: 41761 - DNA, 336 bp, Homo sapiens
  chr5:87989954-87990290
  hyper
aaccccccaccagcccccacccgctgggaacaggaccgacaatctttcccactttcttgtggaaaattttcacacgtacacacaaaatctggagtccgagataataggtgatgagccgtcctgggaacggtgtcgcaggctgaggatgtccaagacctggcgagtctcgggtcagaggagccggagggggcgacccgaggccccgcgccccggctctgcgctggggggtggtgctggctatttctctctgctcccaactattacatttcttttttccttcatcttggctagagttatacgttttatgtgtggggcgatttagaaaataaaattgga

SEQ ID NO: 41762 - DNA, 30 bp, Homo sapiens
  chr5:88178385-88178415
  hyper
gctaaatcttaaggcgtctacttcaaggtc

SEQ ID NO: 41763 - DNA, 238 bp, Homo sapiens
  chr5:88178898-88179136
  hyper
tcaaacatgcagccacggcgacccacacagaaccttcaaagtcaatccaatagcagcccgaagatgtctgggtgtacgcgtgtgctcaagtgtctgtgactgcgagcagagcgagcagagagctggagacgatgtgtgcgtgtgtgcgcgcgcgcgaggggagcgcgcgcgagggggggggcgcggggccgcgcattcgcgcgcgccgaggccgctcggaagaggaggaggaggagga

SEQ ID NO: 41764 - DNA, 368 bp, Homo sapiens
  chr5:88179187-88179555
  hyper
tcagcggccggtcggattaaaagtaaccagactcgtccagaaaactgcgtccaggaaggaagtgacagaagacgaatgggaaaaggagaacagctcacagcgtttgaaacatcgcgtaaaaaagactgggggtggtgggggcgggggggattgaaggatactgggaggggaggcgggggtggtagggaagacggagcacgaatggttggggttctaagcagcacgtccgatgaaatgtcttttgcctccttttttccccctttatttaattttgtccttgcctttgcttcgcgctgcctttttctctccgtctctctctcccccacaatcccaaaccgttgactctttcctcgcgagctggagaaatc

SEQ ID NO: 41765 - DNA, 618 bp, Homo sapiens
  chr5:88179791-88180409
  hyper
attttgctaattttagttttacggtggggtaatagcacatgccatacgcaaacctaatgacaattctttattgcacgaaatgaagacaacacggcgagctgcggctccctgctcctctcgcggcgcctctgcggaggacgctcggagagaacctagtctcccgctgcggcgcgctcgcttgctctccggggacgctgcgagccagccagcaggaaagtccttctaaagtcgggatctttcctctgaccaataggagcgcgaccctaatagttgctcttgtgacttttcccccttttggacacgcgttagccacttctctcttccaccggtcggtgcgctcctccgttactcacgcgtaaaaaccacggtccaggatgtctgcagcactcgattccagcgtgcttttcctgcacgcccagaagtcgcggttttcaccctgagaggttggagcgctagaaagcgagccgaaaggtttctctaatgttagtaatgtacgaaataataaaataattaccagtatttgagatctcgacttcatcgcggggccatgaactttctaatcagtttggaaatatttaccgaggaagcagcttcctcggagttccccccctcccccca

SEQ ID NO: 41766 - DNA, 31 bp, Homo sapiens; identical to SEQ ID NO: 4098
  chr5:88184852-88184883
  hyper

SEQ ID NO: 41767 - DNA, 411 bp, Homo sapiens
  chr5:88185372-88185783
  hyper
gctggacctgggtgcgacgagtgggcggccacgctggtttggcgcggggaaggaagggggtgtgccgacttgtatttagttgggggttgtggaagtcacggctgggggaaaagcgtccggtggtttgttggtaaagagggtgcgtgatgggctctggggaatggaggagggcgcaacggctgtgggtggactgtggaaacgggcggtggcagtgccggggtagttgtcctgctggtctggttttgggatcctgggctggagaaatgcgatccaaaagagctcgggatgggctcagagcgacccacgaaaataccaggggccaagtaaaatgaacccaccctttaacagtgcacaaagcgctggcacacggtccacgtctggtgacgcaggctgcccgaagcgctccaacca

SEQ ID NO: 41768 - DNA, 30 bp, Homo sapiens
  chr5:89705879-89705909
  hyper
ctctctcgtaaagccgtgcggtctgtgggc

SEQ ID NO: 41769 - DNA, 30 bp, Homo sapiens
  chr5:89770436-89770466
  hyper
ggagactcaggtggcgaccgtttcgccacc

SEQ ID NO: 41770 - DNA, 44 bp, Homo sapiens
  chr5:89770670-89770714
  hyper
ggtagggctcactccgcggtcctggtgccgcgtgcaggtcggtg

SEQ ID NO: 41771 - DNA, 30 bp, Homo sapiens
  chr5:89825479-89825509
  hyper
ggcgggggaggacgcggagggcagcccaaa

SEQ ID NO: 41772 - DNA, 784 bp, Homo sapiens
  chr5:89854216-89855000
  hyper
tccatggtgagttccttgtgccgaagggggcaactagaaagtttagccaaaggagacgattagaaagcactgaccgcgcacttacattgggacgcccaggcagaggcaagactcgcgcgctcctaagccgaggcaggtcagcctaggcgcctggctgctggaagagtccattagggatggccaaggcagggtgttcccgacgccagagcgcggacctggctgcccgctgcggagagcagagtgcgcagcccggggcggccacccccgctccgctggtcaggtgagcgctgccccgggagccatgggtcctattggagcagagcgaggatgcagagggaggaggcaagggagggggagaaaggggaggaggatggagccctcctcctgatcctgtagtggtagtaagaatcagcagcgcgggcaaggagtacggacgggagtcagaggcagagcgagggtgtgtggagggccggcggggaccgccgggagcgcgcggatgtcggtgttcctggggccaggtaggctatggctgaggggtggtgctgcgagcatcgctgagccccaggggagcgcctcagcatcagcacctgttgctgcaggtgggcggcgagggcggcgcggagggcgggccacagccgggcccagggaggctgggcgcgcacccggcgccgcggcctgcgggtaatggggcatagctgcccgcgtcggttctgtccaaggctgcggttttgcagggagcgttaggttcctgcaccccctacccgccctttccaaagatgtctga

SEQ ID NO: 41773 - DNA, 30 bp, Homo sapiens; identical to SEQ ID NO: 4104
  chr5:90676234-90676264
  hyper

SEQ ID NO: 41774 - DNA, 50 bp, Homo sapiens; identical to SEQ ID NO: 4105
  chr5:90678445-90678495
  hyper

SEQ ID NO: 41775 - DNA, 96 bp, Homo sapiens
  chr5:90679119-90679215
  hyper
tctccttacaaagacgggcggctaaaagctgccagctcactttaagagcagctttgtgaaaaacaaccccagtgcgcaggcgcaggccgcggctgc

SEQ ID NO: 41776 - DNA, 29 bp, Homo sapiens
  chr5:92908610-92908639
  hyper
ggatcctccgcttcccgcgactgccggag

SEQ ID NO: 41777 - DNA, 105 bp, Homo sapiens
  chr5:92908770-92908875
  hyper
cgtcaaggggaagtgactccggagttgtgccaggaagaacaccaagaacgagctgtgcgtttttgcgcagagaagtagtcttcgcaagaccgcagctccctgccg

SEQ ID NO: 41778 - DNA, 30 bp, Homo sapiens; identical to SEQ ID NO: 4106
  chr5:92915566-92915596
  hyper

SEQ ID NO: 41779 - DNA, 30 bp, Homo sapiens
  chr5:92916136-92916166
  hyper
aagttcaagagaaacgacaaccattatgtt

SEQ ID NO: 41780 - DNA, 149 bp, Homo sapiens
  chr5:92916459-92916608
  hyper
tggtctattttaatcgtgttcgtttcaccttttaactgaccagaagacgggagcgcgtttgcgcgtttatttgggcatagggacgagggcaaggagcccctgctacccccagtcgcctcctcgccatcagctgcgtacaatgggccacc

SEQ ID NO: 41781 - DNA, 30 bp, Homo sapiens
  chr5:92916847-92916877
  hyper
ctctgtcaatacagcgtggccatttacttc

SEQ ID NO: 41782 - DNA, 31 bp, Homo sapiens; identical to SEQ ID NO: 4107
  chr5:92917347-92917378
  hyper

SEQ ID NO: 41783 - DNA, 63 bp, Homo sapiens; identical to SEQ ID NO: 4108
  chr5:92918895-92918958
  hyper

SEQ ID NO: 41784 - DNA, 30 bp, Homo sapiens
  chr5:92919632-92919662
  hyper
cagcgagagcccggcgccaccggcacaaca

SEQ ID NO: 41785 - DNA, 84 bp, Homo sapiens; identical to SEQ ID NO: 4109
  chr5:92939752-92939836
  hyper

SEQ ID NO: 41786 - DNA, 59 bp, Homo sapiens; identical to SEQ ID NO: 4110
  chr5:92940177-92940236
  hyper

SEQ ID NO: 41787 - DNA, 650 bp, Homo sapiens
  chr5:92943193-92943843
  hyper
tcgcctgtcaggaggcgtctgggcagccttgtaaactcagagtgacttctcatatcgtgctatgttttcccagcgatgcgctttcctctgcgctgaagccctgggaatcatttcagcccaaggtgagcctttcaggcactgctctttgtccccatttggataagaaggtgcaaaactagttagacactaggctgattttggggaggtggtaggaggggatggagaagcggcctgttctaattaaagacaataagcaatcctgcgaggagctgtcctttagccttggctggaggcagaaacggtctgtctcacctcagttgttaggtttatttgagctggtcggtgaggcgaagagcagaaacttgcaggtagctctgggctcaggtgagactgggtggatggttaaatcacagcaagtgatctcgaagtccccctttacctccccatcccctgtccttctgtgctctgtgcttgactcaggcatactttgattctaactttgcttgctagatggcgctcggtgtctcaggactttctgtttcagaattaaagcggctttttagcaccgttgttctgaactatttgtgggcatttgatcagtacagtgctggtaatgttattattgcccttgttttcgtcacactttttct

SEQ ID NO: 41788 - DNA, 44 bp, Homo sapiens; identical to SEQ ID NO: 4111
  chr5:92946750-92946794
  hyper

SEQ ID NO: 41789 - DNA, 84 bp, Homo sapiens
  chr5:92947803-92947887
  hyper
tgcctgggcgcacccgagccagtccgacagctccagccactggcagagccgtgggaccaagggccggacgggtatggacttaga

SEQ ID NO: 41790 - DNA, 30 bp, Homo sapiens
  chr5:92948202-92948232
  hyper
tttaaagtcactgtcgctttaggctcagat

SEQ ID NO: 41791 - DNA, 135 bp, Homo sapiens; identical to SEQ ID NO: 4112
  chr5:92957178-92957313
  hyper

SEQ ID NO: 41792 - DNA, 30 bp, Homo sapiens
  chr5:93953851-93953881
  hyper
caagagtggccaaacgctgccaatgggaga

SEQ ID NO: 41793 - DNA, 30 bp, Homo sapiens
  chr5:93954404-93954434
  hyper
gctgcagcggcagtcgtcgcccctgccgcc

SEQ ID NO: 41794 - DNA, 47 bp, Homo sapiens
  chr5:94619387-94619434
  hyper
ctttgctaaaccagagcgagatgttttctttcgactgtttcatctac

SEQ ID NO: 41795 - DNA, 1219 bp, Homo sapiens
  chr5:94619850-94621069
  hyper
cgctgctcccgaggccgccgcgggcccctttacggcggggagcaaatgctcgcggatccggcggcgtagcgtggacccctgctcggctctgccggcgccgccgggctccaggggctccggcgacgagcagcacaggttgggctgcgaggaggagaagactcggtccagcacttgcttccgcttcttgaagccgctccacctgctgcctgcaccactccccctggccggtgcattccctgtgcccaccgggggtggcggggagggcgacggggtgtccgcagtgcggcgctctggacccccagcgcgcccgcccccgccgcccttgctcctgcccacccccagctgcaggttcttccagagccgggcctggaaggaggaggacgccgccggcggctctggctcgcccgccgcggcagcccggggctccatcctccaccccctgctcctcctctcccctcctcctcctcctcctcctcctgcttctcctccctcttcggctgcacctcctcccgggtccccgcggcgctggcggtggcggcggcggcggcggcgggcgcagcagcagaaaccgggagtgcccagcgacttcaggccagctcgggggaaagaagcggccgccgccgccgaggctctctggcctcgggactccggcgctgcctcttcctcccgcacctgctggggtgggctggagccgtaaccgaatcccggccgcggcgcctgcaaagtttttccctcgaagctccgcggctccagtccactggcgtcccccaggccgcgccctggctccctcttctctctgaccgagctcgggaagctgcacgcaccggggcgtgcgcgtccagctgcgccagggaccgcacccggcgccctctgggcagcacctgtcagcggcgggggcggctgcctccaaattgggcgcgcacgcggctcacacaacaaggcgcgtctggctggagactccggggaccagcagtccccctggggcgccccgggaccatcctccagctcctaggtgggagggccggtaggagccgggtggagctaggtagggcccgaagccagcttgctccctaggatccggccacagttgcccaggcagctcgctgtgcgctggccgctggccgcgctggcgatcgtctgggtcggatgaagcgagctggagtggaaactatgtgccctcgatgggtctcgtgggggcgccgatcgtccacactgagcg

SEQ ID NO: 41796 - DNA, 30 bp, Homo sapiens
  chr5:94890795-94890825
  hyper
gttgcgcatgtgcgcgctctccgcctgata

SEQ ID NO: 41797 - DNA, 1626 bp, Homo sapiens
  chr5:94955638-94957264
  hyper
ggtccgcggcttccgcgagggtagcgtcgggggccgctgcagagattggaagagtacccgccgggaatgggagggaagacgcggggaaggtggagaataggaatcatgtgtgttcctcgagtgtacaacccacatttgagtgacaaatcacgaggacaatcgacaaaaacaactaagcgcaaagccgcccgaatccatctccctctctgtgcgtgtgccttttcaactaactttgggaactcgtatagacccagcgtcgctccccgcgccgcctcgcctccactttggtttcccgcgtcctgcccgccctcttcggtgcctcctcttcctccgggacaaggatggaggatctctttagcccctcaattctgccgccggcgcccaacatttccgtgcccatcttgctgggctggggtctcaacctgaccttggggcaaggagcccctgcctctgggccgcccagccgccgcgtccgcctggtgttcctgggggtcatcctggtggtggcggtggcaggcaacaccacagtgctgtgccgcctgtgcggcggcggcgggccctgggcgggccccaagcgtcgcaagatggacttcctgctggtgcagctggccctggcggacctgtacgcgtgcgggggcacggcgctgtcacagctggcctgggaactgctgggcgagccccgcgcggccacgggggacctggcgtgccgcttcctgcagctgctgcaggcatccgggcggggcgcctcggcccacctcgtggtgctcatcgccctcgagcgccggcgcgcggtgcgtcttccgcacggccggccgctgcccgcgcgtgccctcgccgccctgggctggctgctggcactgctgctggcgctgcccccggccttcgtggtgcgcggggactccccctcgccgctgccgccgccgccgccgccaacgtccctgcagccaggcgcgcccccggccgcccgcgcctggccgggggagcgtcgctgccacgggatcttcgcgcccctgccgcgctggcacctgcaggtctacgcgttctacgaggccgtcgcgggcttcgtcgcgcctgttacggtcctgggcgtcgcttgcggccacctactctccgtctggtggcggcaccggccgcaggcccccgcggctgcagcgccctggtcggcgagcccaggtcgagcccctgcgcccagcgcgctgccccgcgccaaggtgcagagcctgaagatgagcctgctgctggcgctgctgttcgtgggctgcgagctgccctactttgccgcccggctggcggccgcgtggtcgtccgggcccgcgggagactgggagggagagggcctgtcggcggcgctgcgcgtggtggcgatggccaacagcgctctcaatcccttcgtctacctcttcttccaggcgggcgactgccggctccggcgacagctgcggaagcggctgggctctctgtgctgcgcgccgcagggaggcgcggaggacgaggaggggccccggggccaccaggcgctctaccgccaacgctggccccaccctcattatcaccatgctcggcgggaaccgctggacgagggcggcttgcgcccaccccctccgcgccccagacccctgccttgct

SEQ ID NO: 41798 - DNA, 30 bp, Homo sapiens
  chr5:95066553-95066583
  hyper
gaaaacagctgtagcgcatgttgacaaatg

SEQ ID NO: 41799 - DNA, 148 bp, Homo sapiens
  chr5:95158101-95158249
  hyper
ctctgacaagaaaaggcaatccgggagcctttccctagccgtttaaaatgaaactcaccgttcttgctcccgtgagctgttgcaaataatcttgaatctcgttagtgtggttggtggctgtgatatcgacaaattccagaagcccttg

SEQ ID NO: 41800 - DNA, 40 bp, Homo sapiens
  chr5:95170783-95170823
  hyper
gagctgtgaggagccgccagagagcgcagcgcggcggccc

SEQ ID NO: 41801 - DNA, 30 bp, Homo sapiens; identical to SEQ ID NO: 4116
  chr5:95194673-95194703
  hyper

SEQ ID NO: 41802 - DNA, 81 bp, Homo sapiens
  chr5:95769978-95770059
  hyper
gggattgaacctggcgggagataccagtgcctagtattcagcaccgaggtctggacagcgacacacgcaggactgccgcag

SEQ ID NO: 41803 - DNA, 30 bp, Homo sapiens
  chr5:96271807-96271837
  hyper
cggagtaggaagctcgggcgctccggctgt

SEQ ID NO: 41804 - DNA, 107 bp, Homo sapiens
  chr5:98105058-98105165
  hyper
gggatttggctccccgccctctcccctagatggcggagaaatcgggctagctggaagggcgcagctcctctcccagagctcattctggagtcggagaactgggagag

SEQ ID NO: 41805 - DNA, 96 bp, Homo sapiens; identical to SEQ ID NO: 4117
  chr5:98107031-98107127
  hyper

SEQ ID NO: 41806 - DNA, 209 bp, Homo sapiens
  chr5:98108683-98108892
  hyper
agctgccagcgaattccggcggcagttcgcgggtaccttcccagcccatcctatctgctccggaccgcgggtgacattcagatttccaacaccgccccgagcttgctttaccagacaccctcaaacgactcggaacgcggttccgcagatgtgattggctgaaaggggacctgccgcgcggcgctctgtaaaagcgcctgcttcctcca

SEQ ID NO: 41807 - DNA, 448 bp, Homo sapiens
  chr5:98109212-98109660
  hyper
gattggcaggctgagtcgggctgacgtgcggtcacaaccaatggggaggaagggagggacacggcgggggattatggcgtcgtggattggcgggcacagggcggggcgggacggcagtgcgggactgagattgatcgaccgcgggggctgccgcgcagagatatccgggccgccggtgggtggtcgctagggctgggccagcctcttggaggtccacgcccgccgagcccacgctggctggggccggggtgccggcgcgctcgggactcgtctcagcagtcgctcacggtctttgtgtcttctcttccgcccctttccctgcctgccgcctccggccgccacgatgcccctgcgccccgctgctgccgccgcggactggctgcgccggctgcgcgctgcttgctgcggcggtggtggcgccccatctgctacacgggcctgaagaagg

SEQ ID NO: 41808 - DNA, 696 bp, Homo sapiens
  chr5:98109926-98110622
  hyper
cgaggggagccagccccggggcctagggctttgttcccaaatagccccaggtctcgaaggcgctcgccggggcggaagggcggcgtggcgcaacgggaaaggcctcccgagcccctgacacgcacctctgtcgggctccgggccacagtaacgcagccacccaccgggcggccgccgggcgcagagacgagccttctctccaccctccccgccttcggctcggaccgctgacaaatctcccctccgacagccgcttatcaaacatttagcgggcgggggccgcgcgcccgagacaaatgttccggatgctttattgctctctgcgctggtgtttactgaaagtcaggctcggatcaggtttccgccgtcgcagccgcctcggagggagacaaggagccttgtgctgcttttctggagttgggggtggcggcgaggcgaaggaagtacaccagatggaaagatttttaccagattttgcaaacctgggagttaatctcgaagtaacgtcaacttttttgagcagggatttctttcgttttggcaaaagctgcgtttgttcagcgatcagcctcccgggaaaagctcgtgttttgtgactagccgggtgtcttcgggctccgtgaggggttgacagataaccatgctgccttctggaggtcggcgcttccccagccttgaggcgtatgttccaaggga

SEQ ID NO: 41809 - DNA, 30 bp, Homo sapiens
  chr5:98262998-98263028
  hyper
ctacaagccatccacgaataaacaaaggag

SEQ ID NO: 41810 - DNA, 1360 bp, Homo sapiens
  chr5:100236034-100237394
  hyper
accgggatctggagccgaacctccattccagtttactcaaaactcaaaactggcctctccacgtggcttgggtagaaagacagtcaatgagatgatttgatggttttatgagtcaactcctccaccagaagcgctgtttgggagttgaaacgaaataatgagctcgggtcacaagcttttccacgaacctttcatcctggagaaaaaggaaagtgctcagggagcctagctgccctcgcattgttcctggcagctccaactccttgcacagtcttggtctctcaggagaccaaggcagtcaggacgctacagggcacgggtgtaagcgcgacgttcgcggccagccctctgccttgccccactgtaattgcgggttttgattaagaaggaggagccagttgccgactgagctttgaaagtgactttgggtggggggtgggggtggggtgggggtggaaggaggggagggaccaaaagagcctgagtcctgcaataaaggtttccccctatcttctcactcattctttccccctcgccgccggcgctctggcagcaggggataaccccggtgcgcgcctctcttcctgtttggtttactcaagcgcctgccccaacgccttctcagtcaagctgggaggaaactgcttcagcttgaaaaggatgcgggcaaaagcccagcccgactagctcaaccgccgcgccagtgcccgcctcctcttccttaacgcctagggctgcgcccaccagccggcaacgtccaggaaagggccacaggagaaatgacacccgtgcaatgcggagtgtcccggctccgcttccccgcagggactcgaggtgcgctccttttcctggccacggtttagggaggctcggagatggacacctcggcagtatctggcgaccctcttctcactcgctccgcccactcctgctctccagggtcccagccaagggcccgaaccctcggagtcctagtgagccttggccgctttgtctgggatcaggcttatcctcctagcccacggcccgggagggaacaaagagcctcgaccctcaagctctagcctctgcctctcatcggagccccatgcgcccattcatcacctttctaaagacccctttgtctgcctggcaagcacaggtctgcaagggatgcccacgcccctgcccaaagtcctgcttttctaacaactgagctagattggattttcaagccacccagtcttgtgtaaacgacctcataccggtcttttttaccccctcagaatagaccatgtatagattcgttgatgcatgacgaccattccagcccattccttgctagctttttcattctcttccagtccgctttgactgtgct

SEQ ID NO: 41811 - DNA, 30 bp, Homo sapiens; identical to SEQ ID NO: 4122
  chr5:100237687-100237717
  hyper

SEQ ID NO: 41812 - DNA, 937 bp, Homo sapiens; identical to SEQ ID NO: 4123
  chr5:100238182-100239119
  hyper

SEQ ID NO: 41813 - DNA, 1010 bp, Homo sapiens; identical to SEQ ID NO: 4124
  chr5:100239134-100240144
  hyper

SEQ ID NO: 41814 - DNA, 281 bp, Homo sapiens
  chr5:100240232-100240513
  hyper
cgctcagaaatgatgaggcccaattccaatcttccctcccgccggaagtaagaaggggaattctgagttgcttgtcgcctgacagcttaaaatagcaacgaaaacagccagcatctttgcttaaaaacccaaggttcccgccagtgtttaccatacttcctctagagtttaagaagttaagaacttccgagatcttgaatttcctctttgcagcacagcgaacggggtcgggtataaaaatgctccaaggagcaagtaattacgaacgtttattgacacta

SEQ ID NO: 41815 - DNA, 1095 bp, Homo sapiens; identical to SEQ ID NO: 4126
  chr5:101631421-101632516
  hyper

SEQ ID NO: 41816 - DNA, 30 bp, Homo sapiens
  chr5:102090122-102090152
  hyper
gtgatcggtgtgtgcgcgctgggcactctg

SEQ ID NO: 41817 - DNA, 50 bp, Homo sapiens; identical to SEQ ID NO: 4127
  chr5:102090423-102090473
  hyper

SEQ ID NO: 41818 - DNA, 30 bp, Homo sapiens
  chr5:102091650-102091680
  hyper
acgcgggcgaagggcgatctccaaggcaga

SEQ ID NO: 41819 - DNA, 30 bp, Homo sapiens; identical to SEQ ID NO: 4128
  chr5:102201406-102201436
  hyper

SEQ ID NO: 41820 - DNA, 2608 bp, Homo sapiens
  chr5:107005046-107007654
  hyper
cggtactattaataaatagcacctaggagggcaccgagaccggcacacagctggaagctagcctctgtcccagagaaagcagtgcggtatgggcctagcggggccgacttctgtgcacaggccgggaagcaataaaggttcggaactgctccagacccggaggaccccgccgggcactctggataacctccccactccacttccagggtccgaaaacacgggacgtctgcgactggccggtgtccagcacgcgcactaggaccgcccccggcgcccacctctagtctcccgcatacccggcgggcttcgggacgcctacaaatcggttccaggtaatcgcgcgcgttcctccggcagcacatcgccaggccgcgggcgaagggctcccacctcctggctcggccaactctggcagcttgttctgcacacatgacgtaacccggcattagatcaaactttctggcaccttgaacccactggggtgggtggagggatggagaagatgggagaatcctctccactgccaggcgcgccgggcccagactgactcaggggccgaatgatttcctcgcagttgaagaggaaaataaaaacctaaagcttccgcttcccagcccccctcacttcccccagcccgtgcgctctctctgcgcgcaccgggaaaagagaagggaaaattaaaattaaaaaaaaaaaaaaaaaaaaaaaaactttgggggatgtttggcgggttctctccgcagtccctgcggacccacgctccaggaaggagctcccggctgcgcacactgggggctccccgcgccgggaaccggatgccagccagatgccggggctgggaagcagagaagtccctactccccggctcccgcccttttccgagtctcccggcgccccgcagaagcagttggtctaggcagccccggggactcccaggggtacctggcctttccgcggcggcttaacaaagaggggcgcgacgcgagcgcttcccgccgacgcctcaagccatcagcgcccgggcgacgcaggctccgagggtgcgcgccgccagcggttggtgcgcgccgatccccgccgccgctccttccgcagggccccgaggcccgggtagccctggctctccgcctgttatcggcttacctggggttgctgctgttccagtagacagcgtagcggtcggcgacggccttggagcccgggtcctggctgaacacacacatccagagcaccagaaacaccagcgtcaacatctccacgtgcaacatcacgcctggccagcggcggagcccccgacgcgccactccggggagagagcggggatccggagggagggaggcaggcaaagggacagagagagagcgggcgccaaataaatatgaataaataaaaatgaaagtgggcgagaaaggaaagaggcgcccaccaagctggggaggggtaggagagcgagaagaaaagaaggcggtgggatggggggtgataaagacaaactcgcacccccactggagggttcaggaggaaaaaggaatcacaagatggagagaagcgtgcgtgtgtgtggtggcggcggcgagggcgggggaagaggtgccaagctgtgtctcgggcggcggcggcaggccggtcaccccgggagagggaggtgcgcgccgggccgggcggctgcagcgcgggtcggggcaggcggcggcgcgcgctgcacagtcaccgggagttgcgcgccgcagccgcggggagacatacaccggcccgccgggcccggctcagcgtcggcgcagcaggctacgcacggctccgccaccgcccggggccctcgcactgcgccacgcttcgctccaagttactttggcggccggtgggaaactgcaggagaagggcgacgtgctgatagagggcttcgcgcttgtggtcccgggagtctgagaacccctttcctcagcctcctctgtgccttagcggggcgacccccagaaatctcagaggagtcgtaagtgctgcggtaccgggcggtgcgccgagaagggtggggatccggagccgcaacccagccttgtcggtgtcctggaactggttaagcggcagctgcgccggctttcgaagcggtcttgcctcgaaaacctcaaagaaaagtttggctcttcgcgtcttccggcaggtcccccagcagagtcggaacgcggcggtagcggaagagggcaccccgggggctggccgagcctcggggatttctcgcgcgtgctttccttggctgggtgtgggtgcaccacagtgaatgaagagcagaggttaagaccagccggcctggcagagctgggattcctaaacctgcaagacgacgccaacccaactgttcggctggagagcgggaggggaaacaatcactttcaaatggatccctccaactcctggatgggccgatgtcagtctccgatcgccttccgagagggagactgagcccccacacgcggtgccaagagcccggggtgagctctcagaagtgtccctgcgactccagcgggtccaagcctagcaacttgtagagatgcatcaatcagtttgaaatgggaaaagaggaaaaaaaaaaagcgcacgagcgagtggcacc

SEQ ID NO: 41821 - DNA, 103 bp, Homo sapiens
  chr5:107007962-107008065
  hyper
gacttgcgtggaaagccgacagcggcggcgacccagtggcagcagcctcagcagagcgcgaggccgcacgcgtgaacgtggacgtgggcggggggatggggct

SEQ ID NO: 41822 - DNA, 55 bp, Homo sapiens
  chr5:107008368-107008423
  hyper
ctccacgagaaagaggcgttttcctaatctcccttccccacgcctcctaccccct

SEQ ID NO: 41823 - DNA, 30 bp, Homo sapiens
  chr5:107009542-107009572
  hyper
gtgggcctgcaatccgcacccagcaggggc

SEQ ID NO: 41824 - DNA, 30 bp, Homo sapiens; identical to SEQ ID NO: 4132
  chr5:107141292-107141322
  hyper

SEQ ID NO: 41825 - DNA, 207 bp, Homo sapiens; identical to SEQ ID NO: 4133
  chr5:107359032-107359239
  hyper

SEQ ID NO: 41826 - DNA, 74 bp, Homo sapiens
  chr5:108064126-108064200
  hyper
aggtggggcaggagcacggagaagtctcgaagaagtggaggaagcacgcactggctgccgcgggaaaagctcag

SEQ ID NO: 41827 - DNA, 31 bp, Homo sapiens; identical to SEQ ID NO: 4134
  chr5:108313516-108313547
  hyper

SEQ ID NO: 41828 - DNA, 30 bp, Homo sapiens; identical to SEQ ID NO: 4135
  chr5:109024882-109024912
  hyper

SEQ ID NO: 41829 - DNA, 293 bp, Homo sapiens
  chr5:110074562-110074855
  hyper
cacctattccctaacgacaacaaacttttaaggtccaggttaccgccgcgtctccctagcaaccgtgccctttaatggttgccggaagaggctataatcacgtgctccgaagacttccgggtttccaacgtgacttccggttgtcagaatttacccctgacgcggcggcggccgacgggaagctgtgtgtgcttaggtcgtggtggccccggtggtggtgggctccgggcgggctcgcgtcatcctgcccccgctgcgatgcatccgcggcgcccggacggatttgatggctt

SEQ ID NO: 41830 - DNA, 31 bp, Homo sapiens; identical to SEQ ID NO: 4137
  chr5:110075104-110075135
  hyper

SEQ ID NO: 41831 - DNA, 551 bp, Homo sapiens
  chr5:110408730-110409281
  hyper
gctccgggacgccgccgccgggggaaaggggacatctgggctgtcagagcggggctgcgcctagcttgggacaacacttctgttccaatttagggagaggaagtctctatccggaggaaaggcaaattgggaactgggacgagggaacgttgttaggggcaccacctgctggggtccggcgcctccgcgctcgggctcggaattttggcagcctccgccccctggagacttgggaggagcgagcgtgggtgacagtcttttcgcgacgagtgccctccgccaccctcgccacgcccctgctcccccgcggttggttcttccttgctctactcaaccctgacctcttctctctgactctcgacttgtgttccccgctcctccctgaccttcctcccctcccctttcactcaattctcaccaactctttctctctctggtgttttctccttttctcgtaaactttgccgcctatgagcagccacattgccttactgaaatccagagcctaaccttcaatcccaccgccggctgcgcgtcgctcgccaaagaaa

SEQ ID NO: 41832 - DNA, 22 bp, Homo sapiens
  chr5:110427839-110427861
  hyper
gtttcccgcccttgcggttctg

SEQ ID NO: 41833 - DNA, 30 bp, Homo sapiens
  chr5:110428254-110428284
  hyper
gcgcgctcaagcgccggttctatgtaacaa

SEQ ID NO: 41834 - DNA, 570 bp, Homo sapiens; identical to SEQ ID NO: 4138
  chr5:110559548-110560118
  hyper

SEQ ID NO: 41835 - DNA, 436 bp, Homo sapiens
  chr5:110560138-110560574
  hyper
cggcggcggcggcggcggcggcttccggagtcccgctgcgaagatgctcaaagtcacggtgccctcctgctccgcctcgtcctgctcttcggtcaccgccagtgcggccccggggaccgcgagcctcgtcccggattactggatcgacggctccaacagggatgcgctgagcgatttcttcgaggtggagtcggagctgggacggtaaggcgcgggctccggctggggaagcccgcggcgtgcactgggggttgtccctctcgcagcgacggctcggagggtgcgggagcctgccttcgtgcccttcgatttctccctacctagttagtgtcttgagagagagctaaccttcattcaggtgcggctcgagtccttcccaccccaccagagcgcctaggccggtgcagctgtaggatcagcccgactccctcccacc

SEQ ID NO: 41836 - DNA, 30 bp, Homo sapiens
  chr5:110614706-110614736
  hyper
tgtatggctcaagggcgccccctggagcac

SEQ ID NO: 41837 - DNA, 1031 bp, Homo sapiens
  chr5:110847624-110848655
  hyper
tttggcatcacctccgcgaagcctggtgggacgcggctgcccctgcgctgtctgtgcacctcctaagaaccaggaagcgcggtgacctccaaagaacaggactgtcccaaatcaagcgggattaccaccgcccctctcccatttaacagctgaggacactgaggtctaatggattccaagtacttaaataggtgagcggcgcgcaggggcgagttgcaagccctgggatccttccagctcgccgcttcccctcccaggggctcaggtttctctttcatctgtgaggtcctctcccgcccggacgccggggcccgccatccccaacgtccaccgcgagctccccagatccatggtctggagcaggtccagaagacgcacctggcaggacgccccgggcgccacagtcgccctccacacgggccaccccaatcctgccgcggctccgtggctctccttacctttacctgaggtgaagcaaggacgtggaagcagctacggcgcgctaccaagcacctcacaccgctctcaacagtactgctcagcctcccggcccgccgatgcgcaggcgacagcagccaacttgtaagtcaccgctggtcgcagccaactggaaggcacccagcgcctcagggcaaggcgggccgagcccccagccccgccccctggcccgatcccgggggctccggggagggggggctgagaggaggtggccggaacaacgtgcgcttgttcggattggctggcgcgggagcgtgtggagggctgattggtggccgataaatggaatgattccgcgtgggtgtgggctggcccgagccgcgccagggttccctggatgtctggggttgcctgcaggtttggattggttgggttgggttgtcctgtgatcacttaattgtgaaagaattttgtcaagcagtaaaccgactgggagaaattgaaacagaaggcgaagtgaaggatcacagtgagggataaggtccaaattcatcccgcttgtggatatcctagtatctcgcaactacgctact

SEQ ID NO: 41838 - DNA, 30 bp, Homo sapiens; identical to SEQ ID NO: 4142
  chr5:111093898-111093928
  hyper

SEQ ID NO: 41839 - DNA, 30 bp, Homo sapiens; identical to SEQ ID NO: 4143
  chr5:111496618-111496648
  hyper

SEQ ID NO: 41840 - DNA, 30 bp, Homo sapiens; identical to SEQ ID NO: 4144
  chr5:111497158-111497188
  hyper

SEQ ID NO: 41841 - DNA, 30 bp, Homo sapiens
  chr5:111754281-111754311
  hyper
ccacactggtgggacgcagctggtataacc

SEQ ID NO: 41842 - DNA, 30 bp, Homo sapiens
  chr5:111755143-111755173
  hyper
gaaaaccctggaagcgctgcacctccctcc

SEQ ID NO: 41843 - DNA, 30 bp, Homo sapiens; identical to SEQ ID NO: 4145
  chr5:112175624-112175654
  hyper

SEQ ID NO: 41844 - DNA, 30 bp, Homo sapiens; identical to SEQ ID NO: 4146
  chr5:112258111-112258141
  hyper

SEQ ID NO: 41845 - DNA, 30 bp, Homo sapiens
  chr5:112312936-112312966
  hyper
ctattttgctttcccgcaggcgtagccgct

SEQ ID NO: 41846 - DNA, 1377 bp, Homo sapiens
  chr5:112629390-112630767
  hyper
ggagcccaggaattgcaaatgcgcttgcctcaaagactcaggagtccagatccgggcaggaaataaagttctaaagcggctttgaagtgctttctccccagacccctccccagcgcgggtcattcatctcagcctagggaagagaccaccttgcctgaacgtagccaaacgcatcgcacgtgggagccaagtgggagatgaaataatccaatgcgtccccctcaccaccaccacccccaccaaattagttaccgtcggcttaaactcatcgggaatgtccgtgtattttaccgatcagggaaataaaagggtgtatataaattagtggaagcgggtgggaaggaacaagggatgcagactgtcgtgagtaaaacgcctcgcggcttggtgagaggttgtttcttttttaagccactcatttcagactgaaatatcaagccagttcaggtcatttcctgagtagcactacaagttaaaacaagatccagaaaatctactaatcttcaattgcgctgcctccagactgggagcacagggggatagggtgtagggctgtggggaggtcgaggggagggggatttgtggaaaagcaaacgcccgagaaaccctagctcccgacctcagctgtttcttacctcactcagctcggccgaggagtcgtttccatatttcatggcaactccggaattcatgatgcacttttcagagctgggctctcagtcccccaggtctcggagcttaagagttggacttcacaggctcaatatccactgcttggtcccttctgccacattttagtctagacagccattttcacccaggacagttgcgaagcgcaaacggaggatgcaggcactcttaaaaagagcagccgtggctcgcgtttcacggacgagccattgctgcaggaggctcggtggcgcggcgcgctcgcagctgcggcagcggcggagcccgcgcggggaccctcccgcgcgcacccagcgccccgttccggggcagtgccaccctgggcgccgcctcgccactcctacggtgcctcgccgccccccattaccaggatggagggcacttcccagcacgagccgacaccctagagggcaccggcgagctcccgaaaaaactagggcggtggggcgaggaagatccgcgcctcggattccagagaaggaaagaaagctagagggagccggagcggagctgcacttcacgccgaagtttccccttcgaatcgtctggagttgtaagtggtttctgattgaacacagctgtctagctgctggccacggggtgcgcggaggaggcggggctagagggagaaaagggtgggggcgagtagcctggaggccgagcagaggagaccgtgctgggagagca

SEQ ID NO: 41847 - DNA, 562 bp, Homo sapiens
  chr5:112823741-112824303
  hyper
gcacccccgcaaggcgaacagagcagtcccctcggccttcgtggccgagccggctacgcgctctcggagtcgcggccaacttttcccgcgagcttctgagcaacttgccgcaagttggggcgagggggcagagcaggggtcaagggcgcgcggagggactgatctcgctcctgtcggtttcctcgtacctccccgcgtacctgctgatgtatccgtccccgtcgccgtcgcacgtctggaagaggcgccgcatcctctcctcctcgccggtgctggacgtgtcgctgctgctgctgctgctgccgctgccgccgccgccgccgccgctgctggagctccccgcagccgctgccgccgcggccgccatcatgcgcccgctccctacttgggaggaggagtacgcgcgaccgcagctggaatccgcgcggcgcgcaagctgcctgcagccccgaacttgcctgacaacggagcatgcccagtggccgccggggcgctccgggcgagggattccacctctccgggttttgcccggactgggaagatgggcgctctggaatcgccc

SEQ ID NO: 41848 - DNA, 233 bp, Homo sapiens
  chr5:113028781-113029014
  hyper
ggtaaccagggtacccgcagatttccatttttactttatttccgattcaggaaagcctcgtttcatacagaggaagggaagaacacctctcccccaccccgcttatttaggtctaactaataacattcacctgttggtagctaaaatgtttcagaggacgcagttgtttttaaacatttaagctgttagaaaatcaacaggaaacatcgggatgaaaacgggagggtggtaac

SEQ ID NO: 41849 - DNA, 763 bp, Homo sapiens
  chr5:113391110-113391873
  hyper
agctataaatagagcggggagggaagcgccctcctgaggggagcgggcgggagattcccggctctcccctccgccgccgcggcgcgttctacgccgggggaagccggctggcgggcgcgcggccttaacccgtgcgacgccgggcagctcctgcggcagccggggagggcgtgatggagaccacgctggaaatgggaatcaaggcacgtttctaaccttgtactggaacgatacatagtctgcgatttctctccctccctgtctttcctctgcagctccccccggttaacacccgaaattcggccttagaatacacacacacgatggaatttgttccatatctttttttttaaccttcgataggcataaatccaaacctaaaattaaaatcatccccaaatttggttttgggaatcatgttggttttcacccttgagcggcgttccctccccagtgccgcatgctgcttaaggactgttactttcttggggagggaagtatcaaatggaaacggtgtgtgtgtgcgcgcgcgcgtttatttttggcgcatgcacacccctcggtagcctcaaggtcggcgataccctgagcattcgggcccccgcctgcaggactcgctcctgccagccaaggactcaagaaggagggagtccccagtcccggcggggcgcctgggattcggttcaatatttagcacagtcagtaccgaagcaggggcagccaggtgggagctgggcgcccaaaagttggaccccaatcagca

SEQ ID NO: 41850 - DNA, 115 bp, Homo sapiens
  chr5:113391904-113392019
  hyper
cgcccgcgccccggagctctccggctggctctctgctccccgaagctggggagccgggggcgctctcccgggccgcaagcaggcacggaatttgacgcccgagaggcagatggtc

SEQ ID NO: 41851 - DNA, 20 bp, Homo sapiens
  chr5:113562586-113562606
  hyper
gactccgtctcaaaaaaaaa

SEQ ID NO: 41852 - DNA, 1851 bp, Homo sapiens
  chr5:113696412-113698263
  hyper
taaataaataaataatgataccgaactccaacaaaactccagcactgtccgtgggcagcgactattcagcccaagctatcattcttaatttccctgccaggctgcgactaccggggtgaatcagcccgcgccaggcccctttcccacccgccgctgcagttaggacttggcaaagatgctcgatatttgcgtatttgtgaccggtctttgctttgtgtctgcgctgcaggtgaggaggaggaagagaagcagaagagcagctggaggccggcggtggctgagcagcccccacacctttgagcgagccgcctgcctctccaccggcaaggaagccctgggacctccggattcgggctgccggagggcctgagcgccagagcccaggacccggcggccgggggcgccatcccctcatgttctggagaaggcgcaaatgtgagctggcggtagcggggaaagccctccgcccccgccaggggggacccgggaagcccggccggctctgtcggcagactgcggggatcccctcctccggccccgcccccacccacccccggccggggtgccgaggcggttaaccctacccgcgccgcagcgcacttgggctagagcgccgcgcacccaatccagattccagagcctgccggctgggaaagatccggtctcggggtcggctatgatcccgcagcggccaaggcagggctcaggccccgggattctccccacacgctgctgcactggcgcagccggtcgccaaactttttctccccaaagccagtgcccccgcagttacttggcgggcagccggcagcccactctcggcgggatgatctgggagaagcgggcgtgggacgagggggctgctgttttgcagccctgcgaggcgtgcagtcggagaagtggtcggggttccacaccgtccctgagcctgcccccggccaaggtggcccgacgtgctgcagtggctggcgcaggtgatccgggcagcgcgtccggcactagtcaagggggcagcggcacgggagggaggggcgcctttctcttttctcctccccctgcagcccagctgcactgcgtgggggctctccatctccacgcaatcagcaggcggaatccctgccctggagcgccctggctctggactgcacccccctagggtttgtcctgcagattcccctccccatctttctctgccacacacgcttccctaagccgcgcgcgccgcaaactcagtctcggtccccgcaggtgatgtcatgcccattgttttggtgcgcccaaccaatcggactcgccgcctggattctaccggagccggcatgggcccttcctcgcaccagcagcaggagtccccgctcccgaccataacgcattgcgcagggtgcaccaccgcttggtctccctgcagctttaacagccctgacatggaaaccccattgcagttccagcgcggcttcttcccagagcagccgccgccgccgccgcgctcctcacacctgcattgccagcagcagcaacagagccaggacaagccgtgcccgcccttcgcgcccctcccgcaccctcaccaccacccgcacctcgcgcaccagcagccggccagcggcggcagcagcccatgcctccggtgcaacagctgcgcctcctccggtgccccggcggcgggggcgggagataacctgtccctgctgctccgcacctcctcgcccggcggcgccttccggacccgcacctcctcgccgctgtcgggctcgtcctgctgctgctgctgctgctcgtcgcgccggggcagccagctcaatgtgagcgagctgacgccgtccagccatgccagtgcgctccggcagcagt

SEQ ID NO: 41853 - DNA, 253 bp, Homo sapiens; identical to SEQ ID NO: 4153
  chr5:113698330-113698583
  hyper

SEQ ID NO: 41854 - DNA, 174 bp, Homo sapiens; identical to SEQ ID NO: 4154
  chr5:113698669-113698843
  hyper

SEQ ID NO: 41855 - DNA, 427 bp, Homo sapiens; identical to SEQ ID NO: 4155
  chr5:113698951-113699378
  hyper

SEQ ID NO: 41856 - DNA, 32 bp, Homo sapiens
  chr5:113699589-113699621
  hyper
gactgtgttgcaggcgtcgctgtattccttag

SEQ ID NO: 41857 - DNA, 30 bp, Homo sapiens
  chr5:114506052-114506082
  hyper
tcttcactcgcggttcgaagccccgcttcc

SEQ ID NO: 41858 - DNA, 292 bp, Homo sapiens
  chr5:114506294-114506586
  hyper
ccctgactgggcaccgagcagtcatatcccgctttctgcttctatacccccaagtcgcgatgtcaccgcacgttcttgcccagtagcgcggggaccgcctgcagggtggagattcctctcccggatgctggccagggactgaagttaaaaggccgcggcaagggagagaccccccgccacccgggcctacgctttccttcctgagggccaggacagagggtcctgagcggctccggcacccccgcacccccgcggggagtgctgctgaacgttaaggcgcgcgccagctcaa

SEQ ID NO: 41859 - DNA, 30 bp, Homo sapiens
  chr5:114506853-114506883
  hyper
tgtggcaagttccgtcgtcttcccacagcc

SEQ ID NO: 41860 - DNA, 570 bp, Homo sapiens
  chr5:114515009-114515579
  hyper
cgttcctaaaggctccaggacaggtgtggggctgaaatcccgctcctccagcatcttcccctccctaccaaaagaaggctgctttaaatattcccggcctggagcagcagcagctaaggacctggaaagaggcccgaaaaggccagggcagggcgaacgaacgtgctgtccctatttaccggccacacgctctgactgcgggctgaccctgatcgcacacttcgagcctgttcactcgctgggcggaccctccctccacgctccgcgcccaggcaggcgaggtcacccactcgaagtcaccacgtttgagtagccctggttggtggggcagcgcccccttggccaacgccccgccctcctctccatcttccgacgctgggctctcgcccttcggcgtccgagagcccctattgctgcccagctggccccaaaagcgtccgaaagtcccctcttggcttatttcagagatgccacgcaataaagaaaaggcggctactttgcattccgcagctgctgggacgcccgggctgcgagcgcggctcctggattccagcctcccgcccttcccag

SEQ ID NO: 41861 - DNA, 117 bp, Homo sapiens; identical to SEQ ID NO: 4158
  chr5:114515610-114515727
  hyper

SEQ ID NO: 41862 - DNA, 570 bp, Homo sapiens; identical to SEQ ID NO: 4159
  chr5:114515769-114516339
  hyper

SEQ ID NO: 41863 - DNA, 241 bp, Homo sapiens; identical to SEQ ID NO: 4160
  chr5:114632074-114632315
  hyper

SEQ ID NO: 41864 - DNA, 31 bp, Homo sapiens; identical to SEQ ID NO: 4161
  chr5:114879309-114879340
  hyper

SEQ ID NO: 41865 - DNA, 30 bp, Homo sapiens
  chr5:114880781-114880811
  hyper
cttagggaatctttcggtcccatctcagag

SEQ ID NO: 41866 - DNA, 90 bp, Homo sapiens; identical to SEQ ID NO: 4162
  chr5:115151267-115151357
  hyper

SEQ ID NO: 41867 - DNA, 735 bp, Homo sapiens; identical to SEQ ID NO: 4163
  chr5:115151649-115152384
  hyper

SEQ ID NO: 41868 - DNA, 117 bp, Homo sapiens; identical to SEQ ID NO: 4164
  chr5:115152616-115152733
  hyper

SEQ ID NO: 41869 - DNA, 30 bp, Homo sapiens
  chr5:115297473-115297503
  hyper
ccttcttgtggtaacgcggtcctaaccctg

SEQ ID NO: 41870 - DNA, 377 bp, Homo sapiens
  chr5:115298204-115298581
  hyper
cgatacaagagaggaggggcaggggtcgcagcactgaacaccctggccggggttttgacagctgccacagtctctgagctccagcctcgcgcctgaacccggtccctgccatggggcccccttccagctcaggcttctatgtgagccgcgcagtggccctgctgctggctgggctggtagccgccctcctgctggcgctggccgtactcgccgccttgtacggccactgcgagcgcgtcccaccgtcggagctgcctggactcagggacttggaagccgagtcttcccctcccctcaggcagaagccgacgccaaccccgaaacccagcagtgcacgcgagctagcggtgacgaccaccccgagcaactggcgaccc

SEQ ID NO: 41871 - DNA, 64 bp, Homo sapiens
  chr5:115298781-115298845
  hyper
cgaggtgcggggacccctttccccgggcactgggaacgccacagtgggccgcgtgcccgtggac

SEQ ID NO: 41872 - DNA, 30 bp, Homo sapiens
  chr5:115420567-115420597
  hyper
tgggctgccctctccgccctccaggactgc

SEQ ID NO: 41873 - DNA, 147 bp, Homo sapiens
  chr5:115421020-115421167
  hyper
agctgaggtctgtacggaagcgtgtggtctgcaagcgtggggtctgcgtcactgttcgcggagtttggtatcagaagttcccgggtgctgccttcagtgctgccgaatcacgtggaacggtattccgtttccgatttcagttccggt

SEQ ID NO: 41874 - DNA, 30 bp, Homo sapiens; identical to SEQ ID NO: 4166
  chr5:115908468-115908498
  hyper

SEQ ID NO: 41875 - DNA, 30 bp, Homo sapiens
  chr5:115908916-115908946
  hyper
acacagtgaggagtcggaacagagccctag

SEQ ID NO: 41876 - DNA, 30 bp, Homo sapiens
  chr5:115909906-115909936
  hyper
gccggggctcggagcgaactggtacagcgt

SEQ ID NO: 41877 - DNA, 30 bp, Homo sapiens
  chr5:115910244-115910274
  hyper
cttggtggtgtctgcgccgattaacaagtc

SEQ ID NO: 41878 - DNA, 30 bp, Homo sapiens
  chr5:115910714-115910744
  hyper
gaccaactggccagcgccgcttccttccac

SEQ ID NO: 41879 - DNA, 186 bp, Homo sapiens; identical to SEQ ID NO: 4167
  chr5:115911051-115911237
  hyper

SEQ ID NO: 41880 - DNA, 263 bp, Homo sapiens; identical to SEQ ID NO: 4168
  chr5:115911446-115911709
  hyper

SEQ ID NO: 41881 - DNA, 196 bp, Homo sapiens
  chr5:115911925-115912121
  hyper
tccagagctgtcagcaggggccgctatccccacctttctcgggcaaaggcctctatagacctggggtagtggggggcgcggccctaggtgcgcgcgcagcccccgcggcttcaagagccagcctcgggagggggttggggagtgtggggcggtgggtaggattgcgctttcccgcgggttgggtgggggccggctc

SEQ ID NO: 41882 - DNA, 352 bp, Homo sapiens
  chr5:118406921-118407273
  hyper
aagtgtgtggacagcgcggccttcctggccggtgagtcggccccgggtcgtggccggtgaggggaccctgagcttcacctgggctagcgcggggagtgacaggtgcgcgaaggagcgcggcgctccgccctctcgccgacccgccccctccgggcctcgccctccggggctcgggatgagtcgcgggccccagctgagcggctccggctccaggcgcctgtcgctgcttctgccgtcgccaccgaagagcggccgccgcccctgagggaaggagggagggaagcagccgctgacccgtggcatgagctggatgcggtgtccgttgcaggactagggcgccgacatgaacctg

SEQ ID NO: 41883 - DNA, 286 bp, Homo sapiens
  chr5:118604722-118605008
  hyper
tgagtgtgagtgggtgcgtttgaacaacttgtttaggtgggtgtgcgtacgagtgtgtgcaggagcgcacagcctcggaaactccgcgaaattttactcggttccagtgccgcactgaggatccaagaccccttttaggaacccttacctattcagggcgacctcttaaccacctcctgccgtgagcctcattccttccctccctttgtaactgggttcccgctatttgtcacgtcctcctgtaaccgcacatactggcgaaagcactgcccgggttatcagggtg

SEQ ID NO: 41884 - DNA, 1748 bp, Homo sapiens; identical to SEQ ID NO: 4172
  chr5:119799800-119801548
  hyper

SEQ ID NO: 41885 - DNA, 30 bp, Homo sapiens
  chr5:121263545-121263575
  hyper
aatacagcatgttctcgcatttaaatggga

SEQ ID NO: 41886 - DNA, 1602 bp, Homo sapiens
  chr5:121412624-121414226
  hyper
tgtacatggacatcttctgcacgtacgtggacgcctggatgtagtaggggtcggccaccaggtctgggagacctaaacgtcagcaggcgacgggcgcagcagtgaaacaacccggcgccccccgctccaactccctacccctctaggtcccttactcctcacccttcgcccaccgggactgcagagtggagcggaggacagcaagagaactggggacgcccgggactgcaaagcaatgtgaaaaggaagcaggaggggccagacgcgcggtttgcactggattccagggctgccactgcaggcgcgtgggggagggatcggatctgcgaggaccggggcccgccgcgcccaggcagccacgtcgagaagccacatagctggggaccaggtgcacgggtgcttccagcggacttgggggtacttaccgtactggaagtagccagtgccgtatccgggccggtacctgcccccaggtctgggcctttcataagtatcgtagtagttgtaataagggttgtcgtcagagtacttgtaggggttgtaagggtcgtcgcccaccatgccgtccacgcggctgggcggccgcaggttactgagcgcaggaacttctcccggcgctgtctggttctccgcgcgcgaggcgccagcttcgcgggctctagatgtcgagtagccagcttggaaccagtgacgggcggtgggcctggggcggccagcggtgactccagatgagccggccgtccgcgttcgcgccgcggcggtgcggttgtcgcggatcagcaggatcggagtgcggggctgctgggcggaggcgttggctgcaccagggacggcggcgcccgggtcccggcggcgctgaggctggtactgtgagcccaggctcagcaagctgaacacctgcccgttgttctcccattggatctgctggcgccaggcgcccggagccgccggcggctcgcgcgggggctgctgttggccggcggcgggaggggcgcagtgcactagcgcgcagagctgcaaaggcccgagcaggagcacggtccaggcgaagcgcatcactccttttgccagattgaccccgctcgaggaggacgtggctcacagaaaataaaaacggggctcaaatcacgtgagggaaggagaaatcttcaaccaaggaggcgagcggagcacgggtatctcagtctccaccaagcaatgccaagggtgggattcagacccttccccagtcaaggcggctgctcggacgtggcacccttccctttcccctttctcagtcctggaaggcaacggggagcggcgcggcagtcccggagagcgggcagtgtctggagtgaaggaaggaggagagattttaaactttctggcacgtttgcaaagttacacaagccgttctggcccggccgcccctcagctatttgttcacgtaatgcgattggaaacgtgcaaggcggacagctcctcgcctctgcccctccctctctcccgtccctgccctcctccccccagacacgttgcacagggagcgttaaggggaaagaacaaaacggaacacacatcctgagacacactggcttaatctggggcgaacatgcaggaatt

SEQ ID NO: 41887 - DNA, 1042 bp, Homo sapiens
  chr5:121647527-121648569
  hyper
tccctggtgaggaagcggcgagggaggggcgtgggccgagccgggggcgccgcggggagggtcgctgtcagtcaggccgagcggggctcgctggcctgggggcggccgcaggggcgcagcgcagcctgagggcgcggcggccccggcagcctccgcagtggcagtggtggccgcgcccccgtccccggccgggcgcccgcgctgcgttccttgtcccccagcgccggcttcgggccgcggccgcccaggctgcccccgcccgcgcgcgcccgttggggggcccggggagcggcgcccgcggccgggccgcattgtgacgtagcggggccgcggcagcgcctccaccgcccgcctacttcggctgaggctgttctgctcctgccgctgcggtccgtcggtcggtcagtcagtcccttcgcgctcctgagccgccggcgcgccgggcgccccgggtgagtccaggtcccaagcggacgccgcggggaggcgggaggcgggcagccagcggctcagcctttccaagtttgcaccaggcgaccccggcgggtgtcgccccgtgctccccaagccccgggacccctttgtgccgcgagtctcggctgctccgggcagcagaggcgcctctgcagaaagggtttgagggggaggtctctatagtaacagtaacagtggtggcggcagcggctgctttactggggaaagggggaaacaacccccgcctcggtttccaaaggattgttcttttcatttgcccgcctcatgtggttcttattcttgctgtcacccgggatcttatcgcaggcagggatgggcagttccgcggctcggaaaagctgagataaggaggggcgaagtaatagtaatagcgacagtactaacaacggtaataatagctgtagaaaagggacgtctggtgttgctgccgcccctcgctcatcagcaccagctccccgactgccctgtccagcccgggctccgccagcctccctctagtgctgttctgcgtcccaggctggtccgcgtggatttcagaggggaatgt

SEQ ID NO: 41888 - DNA, 30 bp, Homo sapiens
  chr5:122110544-122110574
  hyper
cagcaagtcggtggcgaaaagagggccacg

SEQ ID NO: 41889 - DNA, 534 bp, Homo sapiens
  chr5:122110892-122111426
  hyper
tctccaccctagaggtgagaccgcgtcgctgcgggtgctgcgctgcgtagctgccgcgcgtctcacctttcccctgccccgacttgtccctccccatcccccgtgtttgcaaggaccgtcttggggtgacacctgtgacgcgagccccacctccggtgcctgtcagagggatgtgcttgggctgagcgcagggcctcctcaggagagcagcctgcggcccgcgggtgccgacctaatcctcagaggggccagaaccgaaccgagcattgcagcggcgctttcccagctcagctggccttcctcggtgtctcttgcacgtcctcctcttcaagccggagaagggcttgctctgcatcccagtaaacctccaccgagctcttttgaaggggtgctcgcttttcctttccagagggagggtgtgccgctgccaggggagcgcaatgaagtgagcgctgaggggccgagggtctgtggggaacgaatgggtgcactttcccaggaatggcccttcacggactgctggttcctcttgag

SEQ ID NO: 41890 - DNA, 30 bp, Homo sapiens
  chr5:122180949-122180979
  hyper
aatcaagctccagccggagtccgcagggca

SEQ ID NO: 41891 - DNA, 30 bp, Homo sapiens
  chr5:122181428-122181458
  hyper
gcctgcggctgctgcgcccaggaaacaccc

SEQ ID NO: 41892 - DNA, 135 bp, Homo sapiens; identical to SEQ ID NO: 4175
  chr5:122371730-122371865
  hyper

SEQ ID NO: 41893 - DNA, 102 bp, Homo sapiens
  chr5:122372078-122372180
  hyper
ctccagtccccctgcgcccgggaagcctccacctcgcccgccctgacaccgaggtcccagtatccaaagcgcccccagggccccgcccgcaacaggggaagt

SEQ ID NO: 41894 - DNA, 32 bp, Homo sapiens
  chr5:122372464-122372496
  hyper
gcggggacccggggcgcgttcctcccaagttc

SEQ ID NO: 41895 - DNA, 250 bp, Homo sapiens
  chr5:122372707-122372957
  hyper
gactctcgggcttccgcgtccgcccggcagctagcgctccgcgggactgggaactctgcagccggtcccggtgtgattgctgccgccttgggagcagcctccgccgcggccgccgagttccaatggcccattggaaccttttgctaggttttggacgcttagcagaactttgacatcgctggaggcgtggagccctgttgcactcgaataatggcctctctttgagatgattcacgtctagggaacactg

SEQ ID NO: 41896 - DNA, 30 bp, Homo sapiens
  chr5:122422935-122422965
  hyper
cagctaatcttattacgagaggaaccctcc

SEQ ID NO: 41897 - DNA, 129 bp, Homo sapiens
  chr5:122423302-122423431
  hyper
tcttctcccgtggcccgacaagccactcttcggcagttctgcgagcagattaattgaaacgggcctggaacttcatcctctcctcccgatggagttgctggaggtctgcggacactgcctggttagcct

SEQ ID NO: 41898 - DNA, 879 bp, Homo sapiens
  chr5:122423764-122424643
  hyper
gtatggccagaaccccggcgatgggaaagtacctcctgagtcggtcaatttcacacaccctgcctgtgccctctaccatctactaccgaaaatgccaggaagagctggggggcaagtgcctccttcgtgggtgcgagactgcatcgaagggctgccctggcacaaagtctggggagaggacatggtggaggtggggctgcactcccaccctgcccctctaacaccaggttttgggtagagaaacctatgcgtgacctcctgcggcagccgcaggcagctgaccgcaaacagcctcgcccgtgtcccggagcagttgtgccaccagacgtaacactggatacttgtctccgggccccaagaaggagagggaaagagccctccagaagacaacccgagaaggggtcagcagagcgctgggtggagtgcagactccattgcagccgcctcccagccccacggccaagcttgagtccctccaggaccagctgctctcggtctcaggaccctcggtcctacgcctccctgcaccgacaagcctccctcctgggctgcagacagagggtttcactgcagcgcgcaacccgtcccgctccgcccccaacttttctccccggaggatttatgttagaggttgcgtggcgggcgagtggactctggcacccagaagcacttcaggaaaaactgagccgggcaaaagcgcaaacccggtcctggcggcgcgggcttgctccagcgcggacaccacagcgtgtgcggagatgcattcccgttgccgcatttccactgctttcaagatcagggcactgagctgggacccagaaaagacatatcatgggcagaaagagacaacaggctagcggcagacgtcacgccaaaaaa

SEQ ID NO: 41899 - DNA, 756 bp, Homo sapiens
  chr5:122424884-122425640
  hyper
actcactctattttgtgctgtcgtaaaacccacgtgtccagccgggaagctgccagagcgtggaaccaaggagccaggacgcggcagcggccaagcgcagcagcccacggcggttgagtcgggcgcccaggtccgtccgcactctcgcgccctccgcgggcctcccaattttctcgcttgcaggtcgggaggtttccgggcggcacaatctctaggactctcctcccgcgctgctcaggggcatgtagcgcacgcagggcgcacactctcgcgcacccgcacgctcaccgagacacccgcacgcacccaccggcagcaccgagttttcaggtaaggtgaggctggtctgggacttaagagtctagggcttggtagataggaaggttggtggtcctaggttgggggcgggcggcgagactgttctgcctcctggcgcctgaggccaacgcggctcgggcgctgcgccacgccggctcgggtcggctccgggcgctggctgagggcgggggctgcgtcctgcagccgagttctacggggcagcgccctcctgtcgggccccagcattgctggatgggagctggacgctgcgatcggggaggcagagcagggtgcacacagctccctctgtgcggcgccgcagcttcggagtaaactttgcgcccaagcggagttgggaagagggagccgcggaaccgggcggccgccggctgaaccaccggctcgggcactttctccagggtcccagtggccctcttc

SEQ ID NO: 41900 - DNA, 254 bp, Homo sapiens; identical to SEQ ID NO: 4180
  chr5:122425701-122425955
  hyper

SEQ ID NO: 41901 - DNA, 656 bp, Homo sapiens; identical to SEQ ID NO: 4181
  chr5:122426004-122426660
  hyper

SEQ ID NO: 41902 - DNA, 265 bp, Homo sapiens
  chr5:122434262-122434527
  hyper
cgcccactaccgcccggcccggagggtgggggtccctctcgcgcaggctgctttggagagtgtcggagagagacagctttatctacagcttcacccattgtatagcacaacagaatcgcatttagcctggagaacagccgtcggggcaggagttggtgccttctctaacaattaggctgatcgttaaatttgctattcctttcttccggcgtctagggagagcgtgcacaccaaaccctccagaacagcaccccggtcccccacc

SEQ ID NO: 41903 - DNA, 557 bp, Homo sapiens; identical to SEQ ID NO: 4182
  chr5:122434605-122435162
  hyper

SEQ ID NO: 41904 - DNA, 101 bp, Homo sapiens; identical to SEQ ID NO: 4183
  chr5:122435201-122435302
  hyper

SEQ ID NO: 41905 - DNA, 30 bp, Homo sapiens
  chr5:122759272-122759302
  hyper
actactgctgtaaacgcttcctgaagctgc

SEQ ID NO: 41906 - DNA, 30 bp, Homo sapiens
  chr5:122847736-122847766
  hyper
tcctttccggtcggcgatccgaccaatcca

SEQ ID NO: 41907 - DNA, 1224 bp, Homo sapiens
  chr5:124082316-124083540
  hyper
ggcgtccgctagtaacgagacagaatgtgctaacatcgggataaattagtgaaagggaagaaagaataagaagaaaggactgaaaatctgggctggattccgcctgttagtcgggaagtggcatttttccgcccgtcctgacagatttgatttcttgaactaacttaagagaaaaggagggggggagtagagggaggaggaggagaagaaagggtgggatgagaaactgggcaagaggagaaaaagaaaggtgtggaggaggagacagcagatgattcagtgagctgataaaccagttataacagcattcgctcggggcggggggcggggggcttggggcggtggggtggggaaaataacggcgtttaaaatgggctcagtcttcgaaacctaaaggatgtgatgttttcctgtcttatgttgttttaagaaaaaggaactgagttcctagtatagctcccgaggggagtggaatcctctgtcgctcaggtcagccagtcatgtggtaattcgataattagagtcaaaataaggtttttgttttctttttttttttttttaaggcgacccttttcgggagtttttccctcttatactcgcagcaaacggtgtgtctcccttttatttattttttctctcctctcccttcgcccagcccctcctgtgtttagtcagatggccccggagcttggcttagtatttttaattagctggcgtttggaagctaaaagcagtaatgaattgttgatggattggaagtggagagtcgctttgctggaaatgtcggggctgggagagggggatgggcgagttagtaacaaccaaccatctaaaaggagcgattttgttacagtgcaagcctttcacatcacgtgaggatcaagggctcaattggttgtcgtgagaacaaaaatggtgacaagcgtatcaagaaaatactgatctggtctttaaaaaaaaaaaagctgaaagtctctcccctccccctgcacacactcccccaacctcctccccccgcccccccgcagtgggcgaagctacaagttatgaatgtgaaacatttctcggagatctaggatctccgaagttcggaaggagcgaaatgtaatgagcacaagagcaaagcagatgttttaaagaaacactttataaacctttcctcaacttatctccaatttgtcggctttcccaaggggccagggacggggacgcctgggggaggga

SEQ ID NO: 41908 - DNA, 61 bp, Homo sapiens; identical to SEQ ID NO: 4185
  chr5:124083786-124083847
  hyper

SEQ ID NO: 41909 - DNA, 165 bp, Homo sapiens
  chr5:124084137-124084302
  hyper
ctcatttctatgcataaaactcgcacattcccctgcatgaagtccccgctaagtgctatatagagacacaccacgcaaccgtacttacggtctgtattggatcgagttgaccttttccttctaactgcattgaatgtgtttggttgcagccgctttattttggaa

SEQ ID NO: 41910 - DNA, 417 bp, Homo sapiens; identical to SEQ ID NO: 4187
  chr5:124084645-124085062
  hyper

SEQ ID NO: 41911 - DNA, 747 bp, Homo sapiens
  chr5:125930480-125931227
  hyper
gctccaaaatgacgtcgattctgcatagcacacaaggacctaaaatctaagtttttgttttaaaggcaccctacacgagaaaacttttactgtggagcttcaaaatctcccatgctactaccgcatccagcgccagcggggagtcggtaggtcagtgcccgcccggcctcctcgagcgagccccggcggctgcagagatttcttgagcgcccgcgtacctctccccggcctccccagcttccattatacacgccctcgttttcctcgcggagccccagctctttcagccacgcatactggggctgattgatgaggagagtggacatgaaggcggcaggcctgctccaaggtccagagagcttgctggtctttgcagcgtgcacacacagcgcgcgaggaaggcgccacatactgagcccgggactcgggatgagcccaaggccctgagagctgctgaaatagagccccgccccccgcccgggagaacccattgggcagacccgacccctcccactgggcacgaccccgccaccgccccgtctgcccctggtcttccggaggagcctgcggctgaatcctgcctggaacaatgggagtgctacagggaggagtgggctgctgccatctggtgaaagactccgggagccacagttccagctgggaattcttttcagcaaaatattggcgctgaagtacagtaggctatagcaggggttctgaaactgtaaaatgcgtgtaatgacctgg

SEQ ID NO: 41912 - DNA, 20 bp, Homo sapiens
  chr5:126338839-126338859
  hyper
gaggtggaagcttggtaagt

SEQ ID NO: 41913 - DNA, 19 bp, Homo sapiens
  chr5:126339398-126339417
  hyper
gccagaggagtatacaacc

SEQ ID NO: 41914 - DNA, 30 bp, Homo sapiens
  chr5:126365588-126365618
  hyper
ctccagttctctggcgctgagacccacctt

SEQ ID NO: 41915 - DNA, 30 bp, Homo sapiens
  chr5:126626283-126626313
  hyper
cgctcaggcaggggcgactcacgatcgagg

SEQ ID NO: 41916 - DNA, 120 bp, Homo sapiens
  chr5:126626542-126626662
  hyper
tgggcgactgggaacgcgttgagacgttcctctttcccgcttctccacctttacgcctgaaagaagactcccaaagattgctttcttctgggacgctgcttggacgctaaccgcgttgat

SEQ ID NO: 41917 - DNA, 30 bp, Homo sapiens
  chr5:127418907-127418937
  hyper
ggggtggcagctgccgcgggagcatcagct

SEQ ID NO: 41918 - DNA, 30 bp, Homo sapiens; identical to SEQ ID NO: 4192
  chr5:127420204-127420234
  hyper

SEQ ID NO: 41919 - DNA, 335 bp, Homo sapiens
  chr5:127536981-127537316
  hyper
tttgacatttctcagatttcacgataagagggaagcgaagaaaaaagcacgtgacttgaaaatgtttttctctttttaaagccacatctttctgcttcattttgatttcagtgtaactcgccgagtgaggactcttggcccacgctgggagcccgcagccggcatccgccaccgccgggcaggtgtgcgctgggcgggcgcgcggactcgcctttgcccggcccgcggctcccccgtgtggcctgagtaggtagtgatgcgaataacatgctttgagaagtcagaaggctggcgtctcttcctccggagctcacggaggagtctctctggtttcc

SEQ ID NO: 41920 - DNA, 344 bp, Homo sapiens
  chr5:127872835-127873179
  hyper
agagggctttccgcccgctgagctgcggggttgggaaggaaaagggggacgcgctcctgggggtctttggatattctggcaaagggggctgcagctctaggctccagctaaagggtctgggacggagtgggccagaaagccgccaaactgaggattcccccctcccccaagccggagccctaggtgcggagccgcttgcccacttaccctcggagcacgtcctgctgtcctcgccggcggacgcggctggccactgcggcaccctcctcgcgatactcgggcgctagaaacccgccttcagagcctgctgtagcggaccgaacctgttgcggcggcggctgggg

SEQ ID NO: 41921 - DNA, 253 bp, Homo sapiens
  chr5:127873552-127873805
  hyper
gagcggtacacgttgcataaccggcctaaagccccgagcgactccaggaccgtcagcgggcgggggaggaaattacaaaagccctggcgtaaaatttcaaaaaatgtgaacctcaaaagaaaaaagggcctgcacgcagagctcggcggattcccgtgcgctccgaagacggatattggaaagctgcaaaagtcaccagaaagaaacaggcaagcaaacaaaagtcgcccccagaagaagaggagggttccct

SEQ ID NO: 41922 - DNA, 497 bp, Homo sapiens
  chr5:127873980-127874477
  hyper
gcggggcgggccggcgggcggcggctgtcagtgggggcgcggccgtccacacgtggggctcaacccggactgagaggccggcgcagagtgggcggggacagagtaagggagagatcgggactgaggaacgaggggaaccagggttgggtgaggggaagaggaaggaagggggggagggcgaagggagggaagaggacggagattggggagaaggggggcgaacccgagaggaaggccgggctggaagagggacttggaaagagggattggcgagcccgggtgcgagaggaaatgagcgggggatgggggcgaagttagggcaaagagagaagtgggaaaggagagggagggccaaggtccgggcgccgagaggaggggcccggggggccggctggagggggcgaggcgctaggcggctttgcttcccgtccccgtcaattggccgctagctctgttttgactgcctgtacaaagcgagtagacggcgggggatgggg

SEQ ID NO: 41923 - DNA, 384 bp, Homo sapiens
  chr5:127874705-127875089
  hyper
cgcagtcagccaggaatagaggctcacggggctgttggttgcagcctcaatccaagaaggaggagacctcccctttgccctcctacccccaccgccccaccgggagcggcgtcagtctgcgggaccaaattaggggctgggagtttccagattgaaatgcgccctccaccaccaagagggagctcacgcggccgcggggggccgaggcagccagccggcgccgcggtcctggggagtccgtgcaggggtgtgctctggtgtgaaacctggcaggactctgcctgggcttgcatgcagggaggggttagagactctgaaatgtactagcgggcagggtggtgacaaggcgggtaaatgaggctcggggcatgcccttgcttcctg

SEQ ID NO: 41924 - DNA, 45 bp, Homo sapiens
  chr5:128300649-128300694
  hyper
gttcaatggatgacctttgtgcgacactgttataccttatcagcc

SEQ ID NO: 41925 - DNA, 161 bp, Homo sapiens
  chr5:128300712-128300873
  hyper
cgcccaatcccagcaactctggttctcctgtgaccccaagccttccagatccctgggtttccccccacgggactgtcacattcttccccgccggagacgccagtcgcggggcctcctccctggggtgtgagcaggtcggcgcgccacacttctctaggtgg

SEQ ID NO: 41926 - DNA, 423 bp, Homo sapiens
  chr5:128300900-128301323
  hyper
cggcggggcccaggctgttccggctgcggcacgccaggggatgtggttagccctgagcctggaggccgaaggtgggcaggcaacactcccaccatgtttcggaggagaatacactaggctagcctaacgacactcggagtgcgagctgcggctggggtaggggcacccctttccagcgggcgcgtgggtcaccaaggagcagttctccgggacccgttgcgtcagagggactgggcggggctgggcggggcaggacgggggcggcgctcaggaaccctggaacccgctggccctgaggccacggaccgagacgtggtgctgagcccctgcgcggtttctggtgcgtagagactgtaaatcgctgcgcttctcagtcatcatcatcccagcttttcccggctcgaattcagcctccaactcaag

SEQ ID NO: 41927 - DNA, 1894 bp, Homo sapiens
  chr5:128795583-128797477
  hyper
tgagactgtgacaccagcctccgcccgttccgcgcgggtgcaggcggcgagcctcggctcggacaccacagctctcctgcccgcgccgggcagtcctctgcctgtccagaggcagcactcccggctctcggctggctgtgggtctgtcttgtggggctccagcactagcctgctcggcctcggaaactcctgcagcgtccagaacacagaaaatagactcatctcctaattcgccagggagctcgagggctgcggggccgcggggctgcctcccccgctcctcccccaacccgaccccaccccacccccgccagggcttcggcggcctcccggagtcacacagcctacccccccaccccaacaccccctcccccggcagacaaagggcctgggcaaattcgccgcccggcctcctagcgctccggggaggccgctgcgccccggagtggatcgcgctggaggcgtgcgccgggcgagaagccgcggccgcgggagcgcagtatggggaagaaccgcgagatgcgcctgactcacatctgctgctgctgcctcctttaccagctggggttcctgtcgaatgggatcgtttcaggtaagttcttccgtgactttctcgcttcctttccagccatcccagcggagaccgcgaacgtacgggtcggcagggctggtgcaaccggtgcgtggagagcagggctcagtgggtagcaataaaaatgagcttgaggtgcaggttaaggggtcaagttcggaaatgaagcacacttctgccggcctcgttttaaccgtatgtggaatagtttccttctaattagagcaataatatttgcaaaggtacgtttacagcacctggaggaaaattagaacgtacctaagttgatagcaacgctctgctctagcatacacttcagaaatcgtttactcgtgctggagtctttgcatcggttttcttttcaacaatgaagtgcggtcaccaaactttgattccccctcccccgcccctaatataatcgtacttttactctgaaaatgctggggtctgtaatctgatcgcaaggcttctggggttgcagagtttcagggtctagacgggtggtctccattgcattcaacgcgagcgccctgtatctatggactgtgagcttggaaatgtttgtgctactggaaccgcggcactttaagccccgcacttctgtctgccccgcccgcagagctgcagttcgcccccgaccgcgaggagtgggaagtcgtgtttcctgcgctctggcgccgggagccggtggacccggctggcggcagcgggggcagcgcggacccgggctgggtgcgcggcgttgggggcggcggaagcgcccgggcgcaggctgccggcagctcacgcgaggtgcgctctgtggctccggtgcctttggaggagcccgtggagggccgatcagagtcccggctccggcccccgccgccgtcggagggtgaggaggacgaggagctcgagtcgcaggagctgccgcggggatccagcggggctgccgccttgtccccgggcgccccggcctcgtggcagccgccgcctcccccgcagccgcccccgtccccgcccccggcccagcatgccgagccggatggcgacgaagtgttgctgcggatcccggccttctctcgggacctgtacctgctgctccggagagacggccgcttcctggcgccgcgcttcgcagtggaacagcggccaaatcccggccccggccccacgggggcagcatccgccccgcaacctcccgcgccaccagacgcaggctgcttctacaccggagctgtgctgcggcaccctggctcgctggcttctttcagcacctgtggaggtggcctggtaagcgccttctttccctagctctcc

SEQ ID NO: 41928 - DNA, 30 bp, Homo sapiens; identical to SEQ ID NO: 4200
  chr5:129196622-129196652
  hyper

SEQ ID NO: 41929 - DNA, 1132 bp, Homo sapiens
  chr5:129239802-129240934
  hyper
cccagacacgagtgtcgggaggccagcggaggggcgggacgggacgggaaatgggacgaagagcaagagctgggggaggagggaagagggggcgtcggcgctgcaagccggaggcggcccgacagggatcgtttccttccggagaggaggccggctctggactgaggcgcggacggggggcgtccaagggcgggtgacggggaaataccgcggcccgcgcttctctccggctggcagcggtgccgcctgcggctcctcctccgggccagctcggagcccggcggcggggggagcgggaggcgggagtgagggcgggggctcgggaaggagggaggagggagggcccaggcgcgccactgacagggtggcagcctaggagcggacgcgttgccgccgccgctgctcctcctcctcctcctgcagctcctccagctgccgctgctgccgccgctgccgccaccgccgccgccgggagaagtttcactcccgacccttgctcggagccccggcccagagctgagcgggagcccggcaggcagctgcagcccgcggcagtcgaggcgtccgcggcgcttcgacctccagccggtgtcggcgcctaggcggccggctgcggccgcggctgggggcgcaaaggcggaggaggggcgggtgtgagccggggaaaccgcgtgccgcgccgcgacagcccagcgagcgtccgcgcccgggacagccgcgatggctgtgcgctctcgccgcccgtggatgagcgtggcattagggctggtgctgggcttcaccgccgcgtcctggctcatcgcccccagggtggcggagctgagcgagaggaagagacgtggctccagcctctgctcctactacggtcgctctgctgctggcccccgcgccggcgctcagcagccgctcccccagccccagtcccgaccacggcaggagcagtcgccgccccccgcgcgccaggatctccaggggccaccgctgcccgaggcagcacccgggatcaccagttttcgaagcagcccctggcagcagccacctccgctgcagcagcggcggcgaggacgcgagcctgagggcgcgacggggcttcccggtgctccagcggccgagggggagcccgaggaggagg

SEQ ID NO: 41930 - DNA, 635 bp, Homo sapiens; identical to SEQ ID NO: 4202
  chr5:129240962-129241597
  hyper

SEQ ID NO: 41931 - DNA, 30 bp, Homo sapiens
  chr5:130501064-130501094
  hyper
ccagcgcgctagagcgcctcagggacctcc

SEQ ID NO: 41932 - DNA, 56 bp, Homo sapiens; identical to SEQ ID NO: 4203
  chr5:130970374-130970430
  hyper

SEQ ID NO: 41933 - DNA, 116 bp, Homo sapiens
  chr5:130970642-130970758
  hyper
aaccagcctcacctcgggagtccgctcgggtggcttcttcctcaacgcctgcctagcgccagggtccacgggtgagttcatggccacggcccgggtactccgcagcctgcccttag

SEQ ID NO: 41934 - DNA, 30 bp, Homo sapiens
  chr5:130971545-130971575
  hyper
tgtaactaaatgcccggggcagccctccct

SEQ ID NO: 41935 - DNA, 30 bp, Homo sapiens
  chr5:131131877-131131907
  hyper
atttggtcttccttcggcagtaaccctaaa

SEQ ID NO: 41936 - DNA, 198 bp, Homo sapiens
  chr5:131133197-131133395
  hyper
cgtacccgtggggccgcggccaaggctggactttgagcccaggaccccaggaccgcccttagaaggctgcgccggcccgcgagaggtctgggatctggacagcgcgggggctggctcacagggactggtgaaggaaactgccgggacccctgccacagccatggctccccgcaaagacgacctcgagcaggcactgcg

SEQ ID NO: 41937 - DNA, 30 bp, Homo sapiens
  chr5:131347424-131347454
  hyper
gggggagggcgcggcgcgcactcgcaaccg

SEQ ID NO: 41938 - DNA, 490 bp, Homo sapiens
  chr5:131563040-131563530
  hyper
ttgggagggtgcagaacgggcttagccaatatgaagaggcccctcagggccaggcggacgccgcgcccccgctcccaacagccggcagcccggggtcaggccgccacttcccgggagcctgacagggaagagcggccaagttcccagccccgcccgacagccgagggaactgcacgaagggcgccgctgacctcaccaccctgagctcgggaaggcttgcgggcggcggcacaagaacccagacgggtgcagaaacagggcggagggtgcagggtggcggcccggactgcgctgctggcggctagcggcgcgacccccggccccggatccggccccggcccctaactctcagccccgcgcgggcagaacgcaccgcctggcgaccccagcccgcgccccagcgctaaggttgatctggcggctgagcgggcggggcgctcacctggacactcgcagctcccggcgtttccagaacctcccgcggcgtcgc

SEQ ID NO: 41939 - DNA, 278 bp, Homo sapiens
  chr5:131563558-131563836
  hyper
cgactccgcctcgggccgctgccggggctccgcccacttgagccgccgccacgtccccacctcacgctccacacgcctgcctgcgtcctggtccccagctccggtggctccgccggggttcgccgtcctctgcgacccctgggaacgcccaggctacccggcctcgcgggagccggagccggagccggagccggagctggccgcccgcgcccttcatgccgcccgcagcccaccgcacgtactccgcgcccgcctggctttggcgcccccacctgcgg

SEQ ID NO: 41940 - DNA, 99 bp, Homo sapiens
  chr5:131593203-131593302
  hyper
gccggggctgagggcgggtcctcagagccccccgaagtgggagggtcgggctggccgcggggccaatccaggcgcacagggagcgggggcgggggctgg

SEQ ID NO: 41941 - DNA, 30 bp, Homo sapiens
  chr5:131630739-131630769
  hyper
tgaccctccctctgcgtcagccccccttga

SEQ ID NO: 41942 - DNA, 30 bp, Homo sapiens
  chr5:131705304-131705334
  hyper
cagaggccgggcctcgccaggtccccagga

SEQ ID NO: 41943 - DNA, 30 bp, Homo sapiens
  chr5:131705727-131705757
  hyper
ttcttcctgctcagcgccagcatcatcccc

SEQ ID NO: 41944 - DNA, 30 bp, Homo sapiens; identical to SEQ ID NO: 4209
  chr5:131746047-131746077
  hyper

SEQ ID NO: 41945 - DNA, 251 bp, Homo sapiens
  chr5:131825629-131825880
  hyper
ctgaatccattctacgccttcctgacagccacagcgcccacaacgctaagaccaggacgctaacccttccggcccggtttcccctcctctggagaagtggcccaaggaacacctgtggcgcctcttcccgcagtctccgtaggtcacgattccctccagccacctgggcagtaagccagcccttgccaccagcacagggagcccaaaacctgtcgcctgggcgcggagctgggaccgccgaaagccgggag

SEQ ID NO: 41946 - DNA, 239 bp, Homo sapiens; identical to SEQ ID NO: 4211
  chr5:131831521-131831760
  hyper

SEQ ID NO: 41947 - DNA, 30 bp, Homo sapiens
  chr5:131892708-131892738
  hyper
cgcggttgcggggtcgcattgtggctacgg

SEQ ID NO: 41948 - DNA, 187 bp, Homo sapiens
  chr5:131893129-131893316
  hyper
tggggcgggaaagacggtaagtcttcagtagccgccttcagtttacaggtcgctacatctttcggagaataaaatgggaagttgagaactctccttaggagcagaagcgtccctagggctccacaggtgtaggcccttaaagtgccttagggtgtggcctgcaggctacagcgaccttaggagtttg

SEQ ID NO: 41949 - DNA, 141 bp, Homo sapiens
  chr5:131992099-131992240
  hyper
ggagggcccggccgcgcagatcccgcttatcgggcccatctcccgttacataaggccacccccctatctccgcgggccatcgccgccgcaaccgccgcgccagcgccttctcccacgcgcgggggcgcccctgcccaccgc

SEQ ID NO: 41950 - DNA, 183 bp, Homo sapiens; identical to SEQ ID NO: 4212
  chr5:132072697-132072880
  hyper

SEQ ID NO: 41951 - DNA, 30 bp, Homo sapiens
  chr5:132073432-132073462
  hyper
gtaacctggcagcccggggttgggaggagg

SEQ ID NO: 41952 - DNA, 453 bp, Homo sapiens
  chr5:132082923-132083376
  hyper
gaagggagggggtccgccacccgcctgtgcgcgcccagtcctgccgcatcctgggtgcgcgccgcccacccgcggggcgagtgcccaggaggcgaggcgcggcccggtgcgccagaggtagctccaccgcgagcgttgtgggtggggcccgccgagcccgcctccccacctcccccggcggcgccccaggctgcagtgttccgggagctgggttataaaatgccgggttaagcggcaactcagactcaggatcccgctcacgacatggcctcgggcgctcagctcccgccgcagccgtcgagctcagaggtcagcgccgtccagagcccaggcgggcgtcccggcgccggtctggaggaaacagccctgggcgttcctctcccgccgtctccgggggaggcccctctgccccgaagcaaccggagcaggtgccctgggacccgccagcccgga

SEQ ID NO: 41953 - DNA, 30 bp, Homo sapiens
  chr5:132112434-132112464
  hyper
agaaacaccctgggcgatagggtccggagt

SEQ ID NO: 41954 - DNA, 30 bp, Homo sapiens
  chr5:132149000-132149030
  hyper
aggcgagcgcggcgcgggggatggaagcag

SEQ ID NO: 41955 - DNA, 31 bp, Homo sapiens; identical to SEQ ID NO: 4213
  chr5:132386957-132386988
  hyper

SEQ ID NO: 41956 - DNA, 321 bp, Homo sapiens
  chr5:132387333-132387654
  hyper
caagacaccccactaccggaagtttctttgatgttaagaaaaacggcggaagtaggccgcagcgcttcctcagtatagtgcctcgagctggctcgcctactttctacggtaaagggaggtgctccacatctctatgcagctgtgcagcgccgcaggttccatgcgcaggctcggttggctaaatgcgctttccagccatctttcagccacccagtcctttcccaggttctcgagccaggacgtgacgtattcagacgtactgggggcggggcctcaaggggaaaagcgcctgagccgggatatcgcgagaacatcccgttc

SEQ ID NO: 41957 - DNA, 1786 bp, Homo sapiens
  chr5:132946701-132948487
  hyper
cacaggcttgcaacaaatttacgaaggtaacagaccaagctgccggcgctgtttttcactggaggaaagctcggcggaagcgacacctagaggggagcggcgggctgtggccgcgccattcatcagtgtcggcggcccgcggccgcgagcgagggctgctggacagcgccccggcacccgctctcgagccgcgacaccgacctcgccgggcccgccccgctgacccgcgcactcctagtgcacttgccgcgccgcgcggaggctcgccgcgctctggaaaacaagaaaccccactgcctcggcggctttccgctcccgcaagagttgcgggcacaaagtcctcaggtggcaggcctggggttggcgccgctttgtcggctgcagggagccccaaagactagcgtcagctcgtccccaaactcgaggcgacaggcgccgaaagcagagtgctgtgcctgcctcgtccaggtccctcctgaaactcagaactcgtctttgttttgcgggcgcaaagagggcggagatcatccacagtgcaagctctcttaggaccaagcccccagcccgaacgctgaacgcccccaacacactgctccctagacacgttcaagcgggtaccccgggccgctcactctggaccgcggccggctacgcacaagcagcgccgcaggctgcctggagtcgggtcgtgccctgattccttcctccccagcctcacatgcggcggaccccggggaagccagggccaggcgaagcgcagcgggccctttgggctgcagcgaggagacgcaagtttccccgcaaagccgcggggaggaggtgctgagaatgcctgcccggcgccccaacccggagccaagggcaccgggcccgggccgaggggccgcgctcgcctggctccgccggggccgctcggggtcctgaacccaagaacggcgcctgcaggatttcggagccgggcgcgagctgcgggctcggcccgagcgcttctgcgtggcgccccgcgtgccaaccgggtcactccggtccccaccgtagaccccggccacgagcctcggcgtcccagcctctcctcgagtcctggccttggccggggtagccctgccgagccctggcccagcggtcccttccccgcgggcaaacttggctttcccggcgcgggcagtaaggacaagcaagcgcccgcgccgggccctgcagcaagatgcggggccgcgggcgccaggaccccagtggggtgcagcgggaccggctggtggcggcgccagcgacatggcaccctccccgcgcccgctgggagctgcgcccgcgtacctgagacggccggggccgaggggaagaccaggtggccggacttgggcgggagggagggagcaccccgtggcggcggcggcgaccccgccccgcgtccttcggctggtttctcgggctgtcggcgggtcccgggctcgctggaggctgttgaggctccagctccctgagccgccgctgcccgctgctgtgccaccgccgccgcggctgccctatttctgccgccgggaccggagcccgtgacgtcaccctctgggccccgcctgcccaatcgccgccacctgtgcgcgccgcccgcccgccagccggtcagacccgcgcggcggccacggcaggtgcgcggagcaggcgggcgcgcacgcggggcgcgatgactccggagcgctggggccatctagggcccggagggaggagggccagcgtagcgctcctgcctctggctagcgtggagctcggcaagtgacagcccctcttc

SEQ ID NO: 41958 - DNA, 30 bp, Homo sapiens
  chr5:133406793-133406823
  hyper
aacccaacacacctcgaccccgcgaccccg

SEQ ID NO: 41959 - DNA, 30 bp, Homo sapiens
  chr5:133450002-133450032
  hyper
ttggagcctgggcacgatacagttcacacc

SEQ ID NO: 41960 - DNA, 30 bp, Homo sapiens
  chr5:133451006-133451036
  hyper
tccaggctctcgggcgggaacacgctgcgc

SEQ ID NO: 41961 - DNA, 30 bp, Homo sapiens
  chr5:133512879-133512909
  hyper
cgtcaactgggtgccggaccccgactggcc

SEQ ID NO: 41962 - DNA, 30 bp, Homo sapiens
  chr5:133562079-133562109
  hyper
gggcttgggccgcgcgcaggcgcagaccgg

SEQ ID NO: 41963 - DNA, 30 bp, Homo sapiens; identical to SEQ ID NO: 4216
  chr5:133784545-133784575
  hyper

SEQ ID NO: 41964 - DNA, 30 bp, Homo sapiens
  chr5:133860671-133860701
  hyper
cgagggtcttccagcgctggagccccgggg

SEQ ID NO: 41965 - DNA, 903 bp, Homo sapiens; identical to SEQ ID NO: 4217
  chr5:133862722-133863625
  hyper

SEQ ID NO: 41966 - DNA, 30 bp, Homo sapiens
  chr5:133985231-133985261
  hyper
attcttctgggttccgcaggccctgaagtg

SEQ ID NO: 41967 - DNA, 30 bp, Homo sapiens
  chr5:134074171-134074201
  hyper
aggctccgggaccgcgctcgggggcgggtc

SEQ ID NO: 41968 - DNA, 30 bp, Homo sapiens; identical to SEQ ID NO: 4218
  chr5:134075264-134075294
  hyper

SEQ ID NO: 41969 - DNA, 186 bp, Homo sapiens
  chr5:134094357-134094543
  hyper
cctttcgatggggccggcgctgtgcgtcctccagtcgaggtggggcgctgtggaagagcggcagcttccggtcggcttttctcttccttcggctgccggcgccagcacgtcctgttttcgttggccgcgctgggatggccgccacagctgtaggtgctgctagtgtttagcgctggtctttgccgg

SEQ ID NO: 41970 - DNA, 30 bp, Homo sapiens
  chr5:134240151-134240181
  hyper
aggggattacaggccgggtttccacacttt

SEQ ID NO: 41971 - DNA, 30 bp, Homo sapiens
  chr5:134241260-134241290
  hyper
ctgaggacgaacggcgctgcgggcctggct

SEQ ID NO: 41972 - DNA, 236 bp, Homo sapiens
  chr5:134365027-134365263
  hyper
gagaagggtcagggccgctgcgggccgggagggaccccacccccttccccaccgcctggagccttccgtcggcccgctgccctccgaacgtcgtttctctccttcgaccgatatttccgctcctgcattccctccacaatggttcctttcctgtccccagaaaatactaatttctttttccgatctttatcctctcccgaaattatatccgttttcttctccgaatacggattctc

SEQ ID NO: 41973 - DNA, 753 bp, Homo sapiens; identical to SEQ ID NO: 4220
  chr5:134366512-134367265
  hyper

SEQ ID NO: 41974 - DNA, 133 bp, Homo sapiens; identical to SEQ ID NO: 4221
  chr5:134367284-134367417
  hyper

SEQ ID NO: 41975 - DNA, 30 bp, Homo sapiens
  chr5:134368667-134368697
  hyper
gcgccggccacccgcgggcccagttcgctg

SEQ ID NO: 41976 - DNA, 30 bp, Homo sapiens; identical to SEQ ID NO: 4222
  chr5:134369002-134369032
  hyper

SEQ ID NO: 41977 - DNA, 61 bp, Homo sapiens
  chr5:134370267-134370328
  hyper
caaatgacttgtttcgcctagaatcaactcccgtctcggccgcctcgaagtccccagccct

SEQ ID NO: 41978 - DNA, 129 bp, Homo sapiens
  chr5:134374376-134374505
  hyper
ccattactgcgatcccggctttggggccctgcctttgccgcgggagaataggctccaatttacgaagctggtcaatttcagaaatccgagacccggttcttgagaagcgactgcgtgctccgggaccct

SEQ ID NO: 41979 - DNA, 1146 bp, Homo sapiens
  chr5:134374791-134375937
  hyper
cgaagccacggctgaagtcccgggccacgcagaggggccagcaattccatgggtggtggggccctccatccctggacgcagcggggagcagcgggcggccctctctcctgcccacttctcctgggggtgggggagccctgtgtcacccgacgctgcgaggggctgccacgggcttctcaggttgtgcccttcgcggggccgtggcccgtgcccccgaggctgctaccctcttgaggtgcccggagccaaagcagagggttgatcccgccggttgggtgaggtagcacccggtgacggcggctatgactgtgccctgggcgcaggaacgagctcctcgcgctgcctcgaaggctcctgaccttccgcgccttgcgctgtcccgcgccgccgggtggacccacacacgccaggagcaaactgcgcaggactcggccgccacctccctgcgcccctccaccgcggagaccctgcgcccctagcccagcgtctcttaccccacctgggcagcgctgcgtctgcggctcgtgggctccgggctcgcccgccgcggactctggctcaggtttcggctccggctggggccccggatccagctctggctctggcactgcacggttcttcggcccctgctggttcgctacatcccagcgcgcgaggccggggcttcctcggctcggcccgctcctcccgccgccgccgcccgtcgcccgcggggaaggcggggacactggccgggaggcgggaagggtggggggaggggaagctaggtgttcgccgggacctgcggggagaggggcggcgcgcagtcccgccggctaggggtcctggcctccctcggggcgtaggctggggtccgcgcggctggcggccgggcctcgaggccggggagcgcgccctgggacctccgtggaggggccctgccgcatgcggacgaagccagagcgggtcccagcctggccctggggcactttctctccctgggcccagtttcccacctgactcgtgaggggctggccctacttccgtttagacgggggctggtggtcgagtttggggttttgagattggacctttcttctttctgctcagcctgcgggagggagctggtcttgcgtgttggcagggagagtccgctgcccagagcgt

SEQ ID NO: 41980 - DNA, 394 bp, Homo sapiens
  chr5:134376162-134376556
  hyper
ctgcgggcctgcgaacggtgacgcctccacccctgtggccccgcaggccgttcctggctggctgccgctgggagacgggctggacgcaagggaactgggagcctgtcctttgcccaccctcaggccacagggctccccagcgttgcctcgtggccagataaccctgtgcgcgaagcctcatggtggaaaccagttggccgaacctactcctggtaccccgaagtgcccagcctgagcctgcttgctgttgggattatgggatgggaccacagggcaggtcgggctgtggcctgcctttctcagggactggagcggctaagcctgcccgccgacggccacgggctccagagcgaccgtttccggcgcaaggtgccgggagatggcagcgcggcag

SEQ ID NO: 41981 - DNA, 33 bp, Homo sapiens
  chr5:134376731-134376764
  hyper
cgaagcgggaagccggcccgacccaagctcaca

SEQ ID NO: 41982 - DNA, 220 bp, Homo sapiens
  chr5:134463604-134463824
  hyper
tttctgaatggcttttcgggccagcctgtgaggagtcctgcctgccctgactgttgactcatcctgggtggaattatgtacagaaattagtcaacagaggccattcccgggaccacaggcagctggctgcaggcattgcgcaggcgccgtgcctgctgggagtgtcttttcggacacagagcatgggcttcgtgggtgcgcttccagggctgggatttct

SEQ ID NO: 41983 - DNA, 30 bp, Homo sapiens
  chr5:134499076-134499106
  hyper
ggatcctggcagagtccccccaaacatttg

SEQ ID NO: 41984 - DNA, 142 bp, Homo sapiens; identical to SEQ ID NO: 4227
  chr5:134527235-134527377
  hyper

SEQ ID NO: 41985 - DNA, 268 bp, Homo sapiens
  chr5:134824588-134824856
  hyper
gggcttccacccggcggagggcagaagcgtcttcttggctggctagagaagctccgccggagtggcctcctcccctcccccaggccggggaggaggccgccgagggctctccaattggagagcctttcatctctttgtttttacagtgattaacccgtccgagcgcgctccgagcgtggctccaggcagcgcagggggaggggagaggacggctgggcaagggaagggagggaggagggccctgggctttgtcgctttcagggaactc

SEQ ID NO: 41986 - DNA, 606 bp, Homo sapiens
  chr5:134825184-134825790
  hyper
cagcccctgtccggccggagggaggccggggcacctgccggtctttccacctctgcatgcatttcacactttctatcctgttaggcgtccgcacttctatgccaatgaggactccccttcccacccctgtttttttatgtcatgtggatttaatctagttagacgattttatgcttaaaattgcattgttaacagcaattgtttaaaagggggccgagagcgagggcgcccaatctttgaactggtcgggttttgcatgcctccgctccgagcccgtggagcgctgcacaaaatcgtctagcgcggagcagggcggggacggggagagacacaaaacaatcctcgggctttctcgctactgagccttcggggccgtttccccaagcgcaaacagatgcaaatgtctctgcaaacattgcacaaagctattcagagagaggcagcctctcgcggcctcaatagccctttaaacctagtccaattgcccccaagtagaggtaaagagtccacatgcattttttcactttggctggaagaggggcggaggaggcgagggccttggggagcaaggtatgagggctgctctggttcagcggttcgtgccat

SEQ ID NO: 41987 - DNA, 347 bp, Homo sapiens
  chr5:134825912-134826259
  hyper
ggagaggcccccgggacctttcaggcccacaaacgccgcgctaaatagccacgcgcacaatagcatgaaagggctcactcggaccttactgcaacacagtagattcacacccctccgaggggactaataagctcgtaactaacgcgcaacgctcagcggtgagagcgggcttgcgccctgctggcccctcgcagtacgcagactcagtctttcagcgtcactcggaggcccaagggcagccgctgcacggagggccaggcatttccttctaacctcgccagtagaggagcctggggcctgccggtgcagtccttaatgcaccccaaactcacgtggggctggcgacc

SEQ ID NO: 41988 - DNA, 19 bp, Homo sapiens
  chr5:134826479-134826498
  hyper
cgtgcgctgagggcccgga

SEQ ID NO: 41989 - DNA, 65 bp, Homo sapiens; identical to SEQ ID NO: 4231
  chr5:134827196-134827261
  hyper

SEQ ID NO: 41990 - DNA, 41 bp, Homo sapiens; identical to SEQ ID NO: 4232
  chr5:134870491-134870532
  hyper

SEQ ID NO: 41991 - DNA, 627 bp, Homo sapiens
  chr5:134871417-134872044
  hyper
cgctcagagcgctgcagcccggactgagggcagagccgccagggcgcacttacgttcccaacagcctggggttgttactctgtgccagttgcgggtgcgagagcctggaagggtgcaggggcgcacggagaacttggcctggcctcctcgcctcgcctgcaggggccacgcgcccggccggtctcctgagtgatgtcgccggcgatcagatcagctcgtgtgagcaccgagtgtggcacacgactggcctcaggaccccttaagtacccggcgcaacaatgggcgcccccctcccttgccacctccgcccccgcggcagcccgggtgaatggagcgaggcggcaggtcatccccgtgcagcgcccgggtatttgcataatttatgctcgcgggaggccgccatcgcccctcccccaacccggagtgtgcccgtaattaccgccggccaatcggcggcgtcgcgcggccccgggagtcggctcgggctaagctggccagggcgtctccaggcagtgaaacagaggcggggtcggcgggcgattagcggccgaggcacgctcctcttggggcgggctgggcgcccctcgctggggtgggacggggaggcggggcgcgagcgcgaaagtg

SEQ ID NO: 41992 - DNA, 824 bp, Homo sapiens
  chr5:134879161-134879985
  hyper
atgaattattagtactcccctcgagttaaagggggaggaaagcgcctcattttctatgcccccaagggacggaccgagcgggcagcctctaaacaatgtatttatcactttgcatctctttgggacgccggccgcgcccccacccttgccgccgccgtcgccgccgccacttcggttttgctctggctggggagacccggcgtttctggatttcttttatgcagccacaaataaaggctcctaggctggaagaaggggatttccccccaagtcttgagcaaacgaccctagcgccgtggctcttcctacggcgggggcctcggagaacccggcggggcgcgcggggggacgcgtgggcactgccgcgtgggcgccctgaccccgcgcccgcgtggagcgagagccgggactctgggccagcaagttccagttccccgatggggccggctcgcccggagccgcgtgaggggattagggccgcacgagaggcgaccgcgccgcggcctccagccacgtgagcacagacacggcttcaaacgtccccaacgcactaatccttgttatccggcaggataaccgcggccgcgccagcacccggcctgcctcctccgtctggctgcgggcggggagtgcgcctggctcccgagcccctgacacggatttggggcctgcaatgacgatctaccccacaccatccacattcctgggaccctcggggcaaggtcctacagtccttggtgaccaccacgcctgcaaaaagcggtgggaaagttgttacgcttagaaaactaccaacacgcgcatgcctgtaatcccagttactc

SEQ ID NO: 41993 - DNA, 662 bp, Homo sapiens
  chr5:134914356-134915018
  hyper
aggacaggacaagacgagacggcgacaaggggagctccccgcactcaccgtccacacgcgcggtgtacagcgccagcagcagcaggagcagcgcggccgccaggagcctcatgctgaccggaggggcgcggcgtgggagcagggacatggggagggcgctggcccgtcggagcggcggcccggagacgccacccagctctgctcggctttctctgcccggggcgcgccttccggctctgctggctccggctgcgccgtcggtggatgcccagggctgtctgtggccgtgcgctgcgctctgcgcttgtctccgcgctctctccacagcctccctccgcccgccctggcctcttttaaatccgctcctgccctcgcagcgagcgagctcattaatatgcagaaccactcggtgactcactgagatttctcaatgtggtgaggggaggagaccttcccagcccgcccgtcgcccgccccgggaaaggacccgctatcgcagcggcgcacacccggagccacgcgcgcacacgcacacacacatccgctaccctctcgctcacacaacacgccgccttcgcacacttgcacacccataccacagcgcgcacacatttccagcgtcccgctctgcctttggggagcccagacggtggagaggctgc

SEQ ID NO: 41994 - DNA, 30 bp, Homo sapiens; identical to SEQ ID NO: 4236
  chr5:135170266-135170296
  hyper

SEQ ID NO: 41995 - DNA, 30 bp, Homo sapiens
  chr5:135171027-135171057
  hyper
ccaacggggcgtcccgactggagggagcag

SEQ ID NO: 41996 - DNA, 11 bp, Homo sapiens
  chr5:135265848-135265859
  hyper
cgctcccggaa

SEQ ID NO: 41997 - DNA, 209 bp, Homo sapiens
  chr5:135265919-135266128
  hyper
cgccaggtgggcgccatcgccgcggcctgctgggggaggcggcctttgaggagcgggcgcgaggcggggccaggcggggcggggccttgggcggctgcggtctgcgcggacccccgtgcctaggcgctcctgtgcctccagtgcgcggagccggcctcgctcgggcgtgttcctgcgccgaccggacggccggactccagcaccttggc

SEQ ID NO: 41998 - DNA, 30 bp, Homo sapiens; identical to SEQ ID NO: 4237
  chr5:135335661-135335691
  hyper

SEQ ID NO: 41999 - DNA, 30 bp, Homo sapiens; identical to SEQ ID NO: 4238
  chr5:135364436-135364466
  hyper

SEQ ID NO: 42000 - DNA, 135 bp, Homo sapiens; identical to SEQ ID NO: 4239
  chr5:135468431-135468566
  hyper

SEQ ID NO: 42001 - DNA, 1157 bp, Homo sapiens
  chr5:135527841-135528998
  hyper
gctggctgctcttggctaggtcgggacggggcgcccggcggccgtggctcagtcccaagctacaccggccgcgtcttccagggcgcgcgggcgtcgcgcagcgagcggtcgtggggcagcgcggcgaaggccgaatggcgcagctggcaaccgatgaagaggacgacgagcgccaccgagagcagcagcaggaagaagagcagcaggtaggtgggcaggtcgggctttgtggccgcgccgtccctcataccgcgcgcagtggccagctccagcggcaaagcgccttctgccttgaccgtggctcctggggccagcgcgctgcctaccgccgcctcggggccgcccgtggcgttgaatatgtcgccgtacatggcccgcgggtcccgccgaccccagccggaccgcttcacttggcctggagcatactggcgcgacccggcgcctccatggcgcgcccctcccgccctgccgcgcccaactgaccgagagtcggtgccttggggccggcggggactgcaaagaccccgggacgcgtccgctcactcgcctccgcgctcagctgctttccccgccggctggcggaccccagttctcggagctggacagttctgtgcccgcgcccctcgggctcactgtttctctccgtcgccaccaggacagaggtcccagtcactgactcgcctttcggctttacaacagcccgctcagctcggaccctcagctccagtgagctccaggtgctgggcgcctctgggctgcggcggcggggagaggcactcagcaagtgcagccgcagcccggggtctctgctgagcgcccggtggcagagcgcacggagggcgggtggccagggagtcctccgcgtcctccggcgccgccgccaccgcagcgtctcggaacagtcctgcaggctctggtccctgtcgagacgcccagtgttcagcgagcttgtccccactccctccggctgctgcgctcctgttttgagcaggagactgagctttctggcggctctgagcgcgctcgtgtcccgggcgggggttcgggggaggggcgggactggcggcggctgcccgggggagcggctgcgaaccaatgagggcaagagaggacgcggctgcgactgcccccagcccggcctcacatcactcagggac

SEQ ID NO: 42002 - DNA, 73 bp, Homo sapiens; identical to SEQ ID NO: 4241
  chr5:136833977-136834050
  hyper

SEQ ID NO: 42003 - DNA, 374 bp, Homo sapiens; identical to SEQ ID NO: 4242
  chr5:136834289-136834663
  hyper

SEQ ID NO: 42004 - DNA, 174 bp, Homo sapiens; identical to SEQ ID NO: 4243
  chr5:136834706-136834880
  hyper

SEQ ID NO: 42005 - DNA, 254 bp, Homo sapiens; identical to SEQ ID NO: 4244
  chr5:136834912-136835166
  hyper

SEQ ID NO: 42006 - DNA, 30 bp, Homo sapiens
  chr5:137089604-137089634
  hyper
caaagcaacgggagcgcttggtctggggat

SEQ ID NO: 42007 - DNA, 264 bp, Homo sapiens
  chr5:137474815-137475079
  hyper
ggggctcgagggggcggtagagcgggtggtgggggctcgaggggacggtggctggtgggcaaccacacaccattacagcggcgggtgagcggcctcggccagctgcctctgtgaagcgaccctgtcccgcagggacctctctgtgcatagggtcaggctaattgaaaagcagggcctctaggtccgcggggactttccgggttgcacctgcaaattctgaatttgaccctctctaagtactcacctcagcggccgtcctcatat

SEQ ID NO: 42008 - DNA, 30 bp, Homo sapiens
  chr5:137515546-137515576
  hyper
gggagtggctggggcggaaagtgatatcct

SEQ ID NO: 42009 - DNA, 30 bp, Homo sapiens
  chr5:137549376-137549406
  hyper
tgtagtttcagggccgactctgtaccagat

SEQ ID NO: 42010 - DNA, 221 bp, Homo sapiens
  chr5:137577610-137577831
  hyper
ccagggctgcccaggcaggggcgcccgtccggcaccggactcccgccctgggcccagctccggcgctcggccagccccgtgccccgggcggccgctgatagtcggctaatgcgtatcgaatttttgtggagttcggcccgcgcagagtgcgcgcggaggcgctgcccgagcctcttaattccctttgcatcgatcctgccgttaatgacataaccttctcc

SEQ ID NO: 42011 - DNA, 30 bp, Homo sapiens; identical to SEQ ID NO: 4246
  chr5:137667606-137667636
  hyper

SEQ ID NO: 42012 - DNA, 30 bp, Homo sapiens
  chr5:137673230-137673260
  hyper
tgggggggagggggcggagagagaagagag

SEQ ID NO: 42013 - DNA, 30 bp, Homo sapiens
  chr5:137775026-137775056
  hyper
acctaaaggcgctgcgtccttatttggggc

SEQ ID NO: 42014 - DNA, 30 bp, Homo sapiens
  chr5:137801018-137801048
  hyper
gatggggggcttcacgtcactccgggtcct

SEQ ID NO: 42015 - DNA, 96 bp, Homo sapiens
  chr5:137801266-137801362
  hyper
agccgcggcgcgtccacgcccgcccgcgcccagggcgagtcggggtcgccgcctgcacgcttctcagtgttccccgcgccccgcatgtaacccggc

SEQ ID NO: 42016 - DNA, 30 bp, Homo sapiens
  chr5:137910696-137910726
  hyper
atgacactctagatcgcgaggggtgtgact

SEQ ID NO: 42017 - DNA, 30 bp, Homo sapiens; identical to SEQ ID NO: 4247
  chr5:137911537-137911567
  hyper

SEQ ID NO: 42018 - DNA, 82 bp, Homo sapiens
  chr5:138088595-138088677
  hyper
cagaagactgtgactccgggacacctgtgacactcttgaggggagcgtgcccagtacccctggtcgcgtctctgggattccg

SEQ ID NO: 42019 - DNA, 52 bp, Homo sapiens
  chr5:138089783-138089835
  hyper
gtaggtgggccacacccgtgtggacttttggcgtgaccgtccacttggactc

SEQ ID NO: 42020 - DNA, 31 bp, Homo sapiens; identical to SEQ ID NO: 4249
  chr5:138089858-138089889
  hyper

SEQ ID NO: 42021 - DNA, 31 bp, Homo sapiens; identical to SEQ ID NO: 4250
  chr5:138299453-138299484
  hyper

SEQ ID NO: 42022 - DNA, 377 bp, Homo sapiens
  chr5:138609204-138609581
  hyper
cagttactgcagctcggcgaagaatcccactgcagggcactagggaggccggtcctgcagaggtcagcagtaggagtgactggcttaatctattcgaaaacctcctggaaagatcccgaagaccgtggaccaaggtgacctgcgtgggtgagcgatccattagccgaatgacagcgctgccgcagaaagccagaaaaaggatatgcgtgggaagcgcaaaagcgtgggctgggcctgcagcaacggaaaggcgccacgctcgtgagcggaaccagcgttccgggggcgctcagtgtgggcaggcaggaagcctggctccactaggacacacagattctctcctgagcagctgcgaactatgcgccccttctaccctt

SEQ ID NO: 42023 - DNA, 30 bp, Homo sapiens
  chr5:138609833-138609863
  hyper
gctccgaacacgtgcgcgtgagtaaggacc

SEQ ID NO: 42024 - DNA, 30 bp, Homo sapiens
  chr5:138677926-138677956
  hyper
cgggtcctcagtggcgcgagggttgccggg

SEQ ID NO: 42025 - DNA, 30 bp, Homo sapiens
  chr5:138940703-138940733
  hyper
gagcctgcagaactcgcgctctagatctcg

SEQ ID NO: 42026 - DNA, 887 bp, Homo sapiens; identical to SEQ ID NO: 4252
  chr5:139016855-139017742
  hyper

SEQ ID NO: 42027 - DNA, 65 bp, Homo sapiens; identical to SEQ ID NO: 4253
  chr5:139039950-139040015
  hyper

SEQ ID NO: 42028 - DNA, 30 bp, Homo sapiens; identical to SEQ ID NO: 4254
  chr5:139047724-139047754
  hyper

SEQ ID NO: 42029 - DNA, 302 bp, Homo sapiens
  chr5:139047953-139048255
  hyper
ccggacgcggacgtgcctgcgcggctctggcggccgcgtctgccgccccggcgcccgcccgggtcccaggccgactaattaggcccggctacctcccgcgccgcccactgcccgctccaggcccgctgcccgctccaggcccgaggtgatggcggctgttcctgccgttctggggcctgtgccccagagctggccgcgtttctcggggcgggagccagctctgctcgcctggcttaacccagacgagcccaggacgccctatccctgaaccccatcgtggcgtgcaggtctgagtaggctct

SEQ ID NO: 42030 - DNA, 76 bp, Homo sapiens
  chr5:139051073-139051149
  hyper
aaaccctgggccagccgcgggtggcgggttggggcaggcacaaagagggcctctgtgcggccggctgggctgccca

SEQ ID NO: 42031 - DNA, 288 bp, Homo sapiens; identical to SEQ ID NO: 4255
  chr5:139089042-139089330
  hyper

SEQ ID NO: 42032 - DNA, 30 bp, Homo sapiens
  chr5:139090341-139090371
  hyper
gctggggcctgagccgcgagcagggcggag

SEQ ID NO: 42033 - DNA, 62 bp, Homo sapiens; identical to SEQ ID NO: 4256
  chr5:139091110-139091172
  hyper

SEQ ID NO: 42034 - DNA, 877 bp, Homo sapiens
  chr5:139126950-139127827
  hyper
ccccccagctgttaaccttcacgcttcaggcctctgcggatggcagaggagggggaaagcccagctgccagcttggcggaggtgaccgggcgggggctgggggctgtccctccctctgggctcgtctctggggagatctggggccggaaggaatgtggtggagggcgccttcggctgaggaaggctgttgccggatgggtggcctcctgaaggcttgtgctggcgaggcgggtgcccaaagggggctctgagcggtgtcggccctgcccgcagcccggccggacgtgggggccggcgtgagaatcccgcccatctgtgagccggcctcacgccgtcagacccaatttatctcgccgccaaagtttcacagccatctgctcgagtggaacggcttccagcgctggccccaccgggccccccagccagcgcggggatgttttccaatacgacagcatcgccccgccaaagcaaggagggggtgtagggggaggcggcagagcgcggtgcgcggggctggcaggcagccctctcccgcgagcgagccgaccctgaattttaagcgattgatcaggaagctcaggccgttcccatcactttgagcagccaaatgcgacggcgcagggatttcaaggggcctttgcggaggcggtaatgaggtcaccgtcactgcgccagcccgcgggcgggagggggcgaaggtctgcggacacgtgtgaacacagcctgtgaaccgagccacatctgtattcacgtgacccccggggccccagcactgacccaggaaaactcggcatttggatctgagctgattcacactcccccgcccccaccccacctacccagccagacacggttcgagaggctgagctagaaccca

SEQ ID NO: 42035 - DNA, 30 bp, Homo sapiens
  chr5:139135820-139135850
  hyper
tttcatgtctgccgcgcctcccgccattat

SEQ ID NO: 42036 - DNA, 37 bp, Homo sapiens; identical to SEQ ID NO: 4257
  chr5:139175355-139175392
  hyper

SEQ ID NO: 42037 - DNA, 30 bp, Homo sapiens
  chr5:139175643-139175673
  hyper
gtgcgggtggggggcgtcgccctcgccctc

SEQ ID NO: 42038 - DNA, 323 bp, Homo sapiens; identical to SEQ ID NO: 4258
  chr5:139175996-139176319
  hyper

SEQ ID NO: 42039 - DNA, 107 bp, Homo sapiens
  chr5:139227516-139227623
  hyper
gtcctgcttggcccgcgggggcggcccgcggctgtgtctgctgctggcccgcgtgctgtggctgtccagtgagtagtaagtcctgctgtcggccgccgggcacagtg

SEQ ID NO: 42040 - DNA, 296 bp, Homo sapiens; identical to SEQ ID NO: 4260
  chr5:139227704-139228000
  hyper

SEQ ID NO: 42041 - DNA, 14 bp, Homo sapiens
  chr5:139228242-139228256
  hyper
gggcgagaggcgcg

SEQ ID NO: 42042 - DNA, 30 bp, Homo sapiens
  chr5:139256182-139256212
  hyper
tggcggggtgggagccgctgctgtggagct

SEQ ID NO: 42043 - DNA, 621 bp, Homo sapiens
  chr5:139283488-139284109
  hyper
agggaaggcagtgacagctcccggagcgctcggcggccaggccgggcccagcgtctgatcagccgccgcctttctgtcggtatccgcggctccatccccgctcgctcagggctgctcgcctgcaggccggtaccggcgtgcagcgcctcttgcccgcccctgcgtggggacgcggccgcccggggagaggcgcgcacagccactgtcgggctcctggcacgcagccccttgctctcccggccgcgacgacccgctcgcacgcaggcacgcgcgccctcggtgcctgtcaccgcggcggccgctagcgcagcctagactcacccgcgctgcgctgggggcgggtgagcgggcggcaggtttctcccagggaaaccgggtttctgggcgcgcggaggtgccctacctttctccccgggatcgggctccctctcccgcttcctcccctctgggtgcttcttgccgcggccgcggcccctcctcctggactccgacattctgcacggggtcccaggcggtgggacggcctcagctctccgctgccgcgctgcgcccccgccgcctgcagcctcagtgcccgagcgcggcgcctttcttataggcggtcacaccctccgggggagg

SEQ ID NO: 42044 - DNA, 276 bp, Homo sapiens
  chr5:139284309-139284585
  hyper
cctgagcatgattggggagggcggagtagagatcccccagcgagggccaggctaaggacagcatgggggtggggagacagcgaggaaagggcccaggaagggaccaaaatgaagcccgctagccagcccagcggggtagcgagcacccttggctcttgcggtgggtctccacaacctcgaggcacccccggccgtacaggcgggttgcctgtgcctctcatgcctgcaggtctggcctcagccccgtgggataccgccatctggggaacaccttta

SEQ ID NO: 42045 - DNA, 637 bp, Homo sapiens
  chr5:139487906-139488543
  hyper
cattgcagacatccccgcaccctccctcttggagacccaggcggtgcagcaacgttctctcccaccccccgcagcgagaaacgaatgaaccccctcctactttcaaaagagaacaaaataacacgccccttaagaaaagaggcgatcctacctccgcaggcgctggagaccaccagtgatgcgtttgcttagcaatccctgagccccatttcccctggccgccttcgccctggggcctgggactgtgcgctagacgtggctgacactccctgcacggcaaccctggaaggagggagaggaaggagagttctataacccaggcttcactgccaacccctcctctgttcggttccccccaccccactaccaccaaatgcatacacccgcccaggatgcgttgtaaaaacaaaacaaaaccaggaaaaaaaaaaaaaaaacctttggtgctgacatcgcagatgaagccgggcccaaagatgggtggcccgaacaaggcatttttactgccccacagcgctgggtcagctccacagctcctctgcctttgtccgagggcaaaaggaacggatgtgaagctgaggggtcttctctgtgagcggcggtgggccccggaggcgggctgtgatgtttgtagggg

SEQ ID NO: 42046 - DNA, 30 bp, Homo sapiens; identical to SEQ ID NO: 4264
  chr5:139493543-139493573
  hyper

SEQ ID NO: 42047 - DNA, 307 bp, Homo sapiens
  chr5:139525365-139525672
  hyper
ctcatagttgctttgttctatcgtctctccccatgccttcaaaggcggcctgccttcccagttcccagcctcccgccagattcttgcgtgacctcgggcggcacccagtgctgctgtggacagctcattccgccgcggcggcggctgcggctgcggcggctacaacggctcccggcgtgtccccggcgccgccagggggcgaatggggtgcccgccggctcctcggactccgggcgcgccggcactgcgctccggagaggcccggccagggaagaagcaacttccctccgccgccgcagaccagccg

SEQ ID NO: 42048 - DNA, 31 bp, Homo sapiens; identical to SEQ ID NO: 4265
  chr5:139537078-139537109
  hyper

SEQ ID NO: 42049 - DNA, 238 bp, Homo sapiens
  chr5:139554292-139554530
  hyper
cctcagccccattccgctcaggtacagctcgggaagtaagcccccaaccctagttgggtctggaccaacaagacacgaggaggcagcagcccacagccgacccctcatgccacgcactgagcagggttccgcatggacgctggtcttgcctcccaggcgcctgaactagcggagttggggtatcgggtggagtctcggagaaccaatccaatctgagggggacgcctgtgggagtcct

SEQ ID NO: 42050 - DNA, 30 bp, Homo sapiens; identical to SEQ ID NO: 4267
  chr5:139554994-139555024
  hyper

SEQ ID NO: 42051 - DNA, 30 bp, Homo sapiens
  chr5:139682742-139682772
  hyper
ttcttctgcgcctgcgcatgagttggacta

SEQ ID NO: 42052 - DNA, 152 bp, Homo sapiens
  chr5:139725996-139726148
  hyper
ggagctcaggagattccgccgggcaccgtctgccgcccgcctctgcgtgcaagcctggccgggacccaggcgcagctcgctcttcttgagtgtcttgtcttgctcactcagcccgcccgcgcggccgcccgaccccgcgcgcctaggtcagg

SEQ ID NO: 42053 - DNA, 30 bp, Homo sapiens
  chr5:139726674-139726704
  hyper
cgttctcataaacccgagataaccagagtt

SEQ ID NO: 42054 - DNA, 30 bp, Homo sapiens
  chr5:139742885-139742915
  hyper
agaggcccaggtgtcgccatggttccctcg

SEQ ID NO: 42055 - DNA, 30 bp, Homo sapiens
  chr5:139780656-139780686
  hyper
tcccaaatagcccccggcaaataggttaca

SEQ ID NO: 42056 - DNA, 30 bp, Homo sapiens
  chr5:139781375-139781405
  hyper
agccagtggcgagtcgagggggcgggaggc

SEQ ID NO: 42057 - DNA, 374 bp, Homo sapiens; identical to SEQ ID NO: 4269
  chr5:139927088-139927462
  hyper

SEQ ID NO: 42058 - DNA, 30 bp, Homo sapiens
  chr5:139936767-139936797
  hyper
tggtaagcagcgagcgcctgggtccgccgg

SEQ ID NO: 42059 - DNA, 99 bp, Homo sapiens
  chr5:139944031-139944130
  hyper
gtggtgcgtgtaaacgggcgtctggatccccgaatggttgcgtgtttccgtgtgtgggtccgggggaggcccacgaacgccagcgaaaccgctgacacc

SEQ ID NO: 42060 - DNA, 206 bp, Homo sapiens
  chr5:140011815-140012021
  hyper
gggctgcacacctgccgccgccagtgcggcgcacacgcctgtgggcgtctccattcctgtgttgcgcagcgctagattctggatggccgggaacttgtggggacagagagccgccatcagtccgcgttcgcccagtccaggattgtcagacaggtctaggctggtaagggccgggaaggcgcgaacctgttcgcaggaaaaggcag

SEQ ID NO: 42061 - DNA, 167 bp, Homo sapiens; identical to SEQ ID NO: 4271
  chr5:140012125-140012292
  hyper

SEQ ID NO: 42062 - DNA, 180 bp, Homo sapiens; identical to SEQ ID NO: 4272
  chr5:140012364-140012544
  hyper

SEQ ID NO: 42063 - DNA, 30 bp, Homo sapiens
  chr5:140018896-140018926
  hyper
gtctagtggtgcagcgtctctagccctcgc

SEQ ID NO: 42064 - DNA, 133 bp, Homo sapiens
  chr5:140027366-140027499
  hyper
aagcggaaaggctgcgaacgcaaagcagtgtgggttgattctgaggtgcactgtgggaaagagcttgtcgctgcggtgttgctgttggagactcgattgttggtgacagcgaaagaacgataacaaaatgccg

SEQ ID NO: 42065 - DNA, 35 bp, Homo sapiens
  chr5:140044227-140044262
  hyper
agggaattgacggtcgcaccgtctacctagcccaa

SEQ ID NO: 42066 - DNA, 30 bp, Homo sapiens
  chr5:140070857-140070887
  hyper
accagctcctccagcgccgcacgctctgcc

SEQ ID NO: 42067 - DNA, 30 bp, Homo sapiens
  chr5:140071332-140071362
  hyper
caaagccaggtgagcgagacagaattatct

SEQ ID NO: 42068 - DNA, 480 bp, Homo sapiens
  chr5:140305691-140306171
  hyper
ggtgcaggacagacttcaacccgcagcaggatccagcgcggaaagctctgcagcaggatccagcgcggaaagccccccgcagcacttctttcggggggctcctgtttccttaagcctagaaggtgtggtcgctcacgttcaccgtcccgcctctcgccgcctccgctcggcagctccacgctgagtcccgccctctccgccggagaggtgcgccggggtcagagcgccgggacccgacgcgcggctcccaaagggcggcaggaagagcccagctgggctcagccacagttatcagcaatctgcgggcagaggatgtggaggttaagatctgggcagcctcagggcgttgtcctagaaaacaccgtttaaggagagaagtgttagtgtctcggggcgtctcccaggctccgccctgcgcccgcagccagcgtggtggtcgagaccccagcccgctgctactggagacagcacctctcgcgc

SEQ ID NO: 42069 - DNA, 175 bp, Homo sapiens
  chr5:140306444-140306619
  hyper
cgtgttggtggaacgtggacgcctagagggaggatggtgggctgtggggtggcagttttatgtttgtgggtttcctgcggcgctgcagcgggacagctcgagtactcagtgccggaggagacggagcggggcgtagccgtaggcaatctctccgcggacttgaggctgccagcgg

SEQ ID NO: 42070 - DNA, 112 bp, Homo sapiens
  chr5:140306674-140306786
  hyper
cggggtggatctacccagcggcaatttggtggtcagagagccggcggaccgcgaacagctgtgcagggccaaagctgcctgcgtcttgacctacgacctggtgctcgaggac

SEQ ID NO: 42071 - DNA, 5 bp, Homo sapiens
  chr5:140307010-140307015
  hyper
cggca

SEQ ID NO: 42072 - DNA, 217 bp, Homo sapiens
  chr5:140346091-140346308
  hyper
cagcagcaggaagccgagccgggttgagcgactcggaggcgagcggaggagctggaatatggggagtcagcgaggacggtggggccaggagcccttgggagggcctacggagggagcggccccaggcgctttctagagcgtgagcggtgggggagcaggcgcagggtggcacgagcggaggcggggcccgggcgtggggcacggctggggaagctgc

SEQ ID NO: 42073 - DNA, 353 bp, Homo sapiens
  chr5:140419803-140420156
  hyper
ctctgccaagtcctgcgcgctgctcgccttccacaacaccttcctcagcttcgtctgtatttgaagagcttagtaaattaatttcccaggggcagagaagggaggaagagggagtgtctgagggctgaaaaatgcagtcgactcgccctctgctggttaaagatccgaatttgtcgccgccaaaacaacggggaatgagaaagcaatccatatggtacggaaaaattacaacaaaaactcggcttaatttaacccacctgtgaaccttaactgcctactgttcctctttagcgctgcttacttccccagcactgagatttaattagattgattctaaacgctagcccctgaac

SEQ ID NO: 42074 - DNA, 31 bp, Homo sapiens
  chr5:140613723-140613754
  hyper
tcacaaaaatgcaactcggaaaataggcata

SEQ ID NO: 42075 - DNA, 534 bp, Homo sapiens
  chr5:140700003-140700537
  hyper
ctttcaactcacaaactctcccggaacaaagacactcaaaaaatcagggctcagcgagctctcttcgcctcgggtacttacaatccagtgacgattataagttcagtttcaccgggccggagcgaagggaagaggaggccgcaaggagccaagcgggagagagccgagcgtctccttgtcgtttccttaattcttcctgccgcttggcagagtgatccactaccgattactgatgaaagggcccgggatgggcagcgcgaaatcttgccgagaggcgcagctcgcatcaccagaccccgcacctcgccggccctccgtccgggtcgcctacccagcaaaaacggaagtgctacgtcgcgacgcggggcgggaggcggctgtgagtgacagcccctccgggcggaagggcggagccccagctagcgcaggcgcaatagcgcaattacgctgcccagcgtgaaactcatcttttcgcgagaacttgtttttccgggatggaaatgacagtgtttcggaagagctgttggtttcaaa

SEQ ID NO: 42076 - DNA, 30 bp, Homo sapiens; identical to SEQ ID NO: 4278
  chr5:140734937-140734967
  hyper

SEQ ID NO: 42077 - DNA, 92 bp, Homo sapiens
  chr5:140797157-140797249
  hyper
ctgggcgccgccgtcggccagtgcagagcaagcgctgacgccggggatccctcagcctctagcctgggattccctgcgcagccaacaacaga

SEQ ID NO: 42078 - DNA, 113 bp, Homo sapiens; identical to SEQ ID NO: 4279
  chr5:140800851-140800964
  hyper

SEQ ID NO: 42079 - DNA, 1093 bp, Homo sapiens
  chr5:140855365-140856458
  hyper
aaaggaaagtgaagttcctggcgctagcgcgtgtcctgctcagagagcccggcgctagctcattcttcgtgcagttattggctgggactctgtgtgccgctgtcggccaatgaagacgctggagatcgggcccctgcccgtcccctttctgcgccccgggatgaggcagagactgaacagccggcgagcaaatcaacggcatccagaaagccatgtcggactcggcgcccagcgcccaagcgctaacccgctgaaagtttctcagcgaaatctcagggacgatctggaccccgctgagaggaactgcttttgagtgagatggtcccagaggcctggaggagcggactggtaagcaccgggagggtagtgggagttttgcttctgcttggtgccttgaacaaggcttccacggtcattcactatgagatcccggaggaaagagagaagggtttcgctgtgggcaacgtggtcgcgaaccttggtttggatctcggtagcctctcagcccgcaggttccgggtggtgtctggagctagccgaagattctttgaggtgaaccgggagaccggagagatgtttgtgaacgaccgtctggatcgagaggagctgtgtgggacactgccctcttgcactgtaactctggagttggtagtggagaacccgctggagctgttcagcgtggaagtggtgatccaggacatcaacgacaacaatcctgctttccctacccaggaaatgaaattggagattagcgaggccgtggctccggggacgcgctttccgctcgagagcgcgcacgatcccgatgtgggaagcaactctttacaaacctatgagctgagccgaaatgaatactttgcgcttcgcgtgcagacgcgggaggacagcaccaagtacgcggagctggtgttggagcgcgccctggaccgagaacgggagcctagtctccagttagtgctgacggcgttggacggagggaccccagctctctccgccagcctgcctattcacatcaaggtgctggacgcgaatgacaatgcgcctgtcttcaaccagtccttgtaccgggcgcgcgtcctggaggatgcaccct

SEQ ID NO: 42080 - DNA, 94 bp, Homo sapiens; identical to SEQ ID NO: 4281
  chr5:140856546-140856640
  hyper

SEQ ID NO: 42081 - DNA, 194 bp, Homo sapiens
  chr5:140892329-140892523
  hyper
ctgcccgcggcggcccgtgttgtgttttgtgctgtgtccacgcgctaaggcgaccccctcccccgtactgacttctcctataagcgcttctcttcgcatagtcacgtagctcccaccccaccctcttcctgtgtctcacgcaagttttatactctaatatttatatggctttttttcttcgacaaaaaaataat

SEQ ID NO: 42082 - DNA, 25 bp, Homo sapiens
  chr5:140892898-140892923
  hyper
gcgggggcgggttggcgccgggcaa

SEQ ID NO: 42083 - DNA, 103 bp, Homo sapiens; identical to SEQ ID NO: 4282
  chr5:140904507-140904610
  hyper

SEQ ID NO: 42084 - DNA, 30 bp, Homo sapiens
  chr5:140997392-140997422
  hyper
actattccttcactcggattgaaagtaact

SEQ ID NO: 42085 - DNA, 484 bp, Homo sapiens
  chr5:141030746-141031230
  hyper
gagcggtgagggggcggggccgggggggtgctgagctctttcctctgttacttctggtttggggtctgaccccttccgacttcccgtctcctaccacaagtcggatgcccccttagctccctccgttcccccagcccgccaggagtccccattcagggccaagctcacttttcggggcggcggctgcatctccgctccagcaaggcggtcagccactggactccggaactggaggaagccccgcccactatggagccccgccccaggccaggtcaggccccgccctctgcccgcccacgacttgtccggcgacgtcgcagggcgcggaagcgagagggggccaccgagaaactaaacctgttactgctgcgaatacgccggcagggtccgggtggcggggcgggcggggcggacgcagcgtccgctgggcggtgggaagaaccccaggcatctgagtcaagacgcctaagttctatttgtagtg

SEQ ID NO: 42086 - DNA, 69 bp, Homo sapiens
  chr5:141061848-141061917
  hyper
ccgccccgcccggccggttccctccgcggggccccggccactccttgtgcaagcgcaggcctccaaagg

SEQ ID NO: 42087 - DNA, 1230 bp, Homo sapiens
  chr5:141255433-141256663
  hyper
acacccacctactcccgcgccccccaccccctacaaacacagctagacctccggcttgtcataaaaactttctgggcggccccttccctggcagctcccgagggttgacccagagcaggtgctagaagcctcgcggcgtcttcctgcacgaagcgacccaagcagccccagtccgcaccgccttggtcagcgggcgctcccagcacacacccagcgcgcggagcgactcctcccagaggacgccgagtgtgtgtgtgtgttgcggagattagggggtggcgggggggacggcggcagtttcttgggctctggcggccccacccccaccccggcagcgcccagcctccaggaacccaaggcaaggctagggcgcggcgtggtgagaacgcgcttcggctagtggggggagcccttgcgccccccgcacccaggccaccgcggggaatccctcctccccggcatctccggcctcggcctagggtcccccgcaagccggagccggcgcgagcggcgcagcgggcgccaggagggggcggggagggagccggcgccggaatcacaaagccgcgaacccggctaggcggggacattctcataaaaccgaccctctcgtggcgagcagagggggttttttgccctacgctcaatcctccaaggcctcagtgccgcccccagtctttcctggcagaagaaatagtagccgaccactgttggggaaactgaggccagaattctgacttacagagggtagctggggggaaggggtgcgagaccacctcgcctacaaattctgctcctatgcctgccgcgatctccgttctggctccagggcctgcccgcgcacacactggcctacagcggggaccaggcggagggggcgctcaggtgtgagacgaacccaggtgtgcgggacccaccaaggtgtgtgggacccaggtgtgctggagacccaggtggctcagaaaactcagctaaatggctggaagagggtcgcaatcaccgtcccaggctagcaccctctacaaaggaacctggggccccagagctccggggaggcgggatggcttggccagccaggtccagcttgttcccggaacaccagccggttcggcccgggagtgggggttggggaggcgccgactgggaagccggcaggccggcccagccttcccgctgtgccgatatttacaataataatgtcgcgattaacgtggcggggcgcttggggct

SEQ ID NO: 42088 - DNA, 703 bp, Homo sapiens
  chr5:141257327-141258030
  hyper
cgcgagaagctggaagcggctgagtgagccgaggtagttgcccaacaagtgtgtatgtatgtgttgtggacaacggtccttgcttgctccgtcctccgggagacccccaccaaactgggggccgcgcgcttccccaaacccatcctccacgccgcgcgctcctggagtctccttatccccgtctctccgagcgcgcccaggtttgggacgcggggactagggttctgctcagcaccccctcccctccctcggcttctcgccgcggacctgggaggacggaatccctcagccgcatcccctgctatgggctcccagcagcccccacctcagccccctcgcgccgagctcgtgttgggcccccgcggcctcgctccgccgagcgcccctccctcagctcccgccggccatgaccgcttcgggccccaagccgctgctgcctccaccgccgccggatccttacccgcctccgggcagcgccggccgcccgccccgctgtccatgagccgccgccggccccggcctgggctgcggctccgcacggctggggctggagctgcagttcgggctccggctccggctccggctggctctgggcgcagcagcccggcggctttgcgtccgcgccgcgctcccgctccccgagtgtgtgaggcggcggcggcggcggcggcggcggcggcggcggcggcggagccagcagaga

SEQ ID NO: 42089 - DNA, 30 bp, Homo sapiens
  chr5:141258768-141258798
  hyper
gccgcgcagtgtcacggcctgtgtcacacg

SEQ ID NO: 42090 - DNA, 356 bp, Homo sapiens
  chr5:141262786-141263142
  hyper
agcccccggggacccggtggccgccgctgaccccgtggcatgcggctctcaaaggccccattcatctctgggggctgaaggcgccattgtccccagcggggggtggtgtggggagtgaaggggtctggactcagaaggaaggaatgcgtctggagaagttgcccccggggctccagtctcaaggtccccaccagatctccatcgggaccctttcacgaccccgagccctttccccaggagctcccagcaaccttcgcgcttctccggagggtggggtctgccgcggcgcgggggcagcctcaccccacctcactgctggactccggagaaccatttctgggaccgggagctgtcca

SEQ ID NO: 42091 - DNA, 70 bp, Homo sapiens
  chr5:141263260-141263330
  hyper
cgcctggcccggatgagcttggatgcagctccgaacgtggggatccatcggtgctgagaactgacctagg

SEQ ID NO: 42092 - DNA, 30 bp, Homo sapiens
  chr5:141293770-141293800
  hyper
aggcagtggagctgcgggctcggccccggg

SEQ ID NO: 42093 - DNA, 30 bp, Homo sapiens
  chr5:141348499-141348529
  hyper
gtgagcacagggctcgcagtaagtgggggt

SEQ ID NO: 42094 - DNA, 30 bp, Homo sapiens
  chr5:141349088-141349118
  hyper
cgcacgcctagtggcgagctgaacccagac

SEQ ID NO: 42095 - DNA, 30 bp, Homo sapiens
  chr5:141488576-141488606
  hyper
cggcctgcggcagccggtaccagcaggtaa

SEQ ID NO: 42096 - DNA, 74 bp, Homo sapiens
  chr5:141703931-141704005
  hyper
ggctgggagatacacggcaaagctggcaccgtgggcaccgagctgggaggtgggcgagccgcccagagcgaggg

SEQ ID NO: 42097 - DNA, 266 bp, Homo sapiens
  chr5:141704447-141704713
  hyper
gtgtaaatcctgaagccggggcaggttagccgccgctgtactcgcagacgccggtcggaggaaccggcaaggctccctgcgctccacagcgccagctccgcgctgtcagctcagctcgctacctccgcggcgatgttgcaaccactgcctgggaaaatggcttttttatgaatgggagggaagggagcgccagtgcgcacgcgtgccgttcgcgattctatgaatgggtgggcacaacagaccctgagcgcgcatgcgctccgctc

SEQ ID NO: 42098 - DNA, 85 bp, Homo sapiens
  chr5:141705341-141705426
  hyper
agtaccccccggggcgattctggcaactcagccagaggaagcctggccctcgcctcccagcgttccccccgccccccgccccagt

SEQ ID NO: 42099 - DNA, 342 bp, Homo sapiens
  chr5:141736298-141736640
  hyper
ggaaccctcgggaggacgcccctccgccccctgcccaccccctcggcgggacatggccccgggccgggacgtccttcagattggtgcgccgccgccgcggccgtctcctcccgtcgggcggggtggggggtggtgagggacgcgatccaggtcgtggcctggcggcggctccggccacagcccccgcattccggccgcgcgcccccggaggtgacgccttgaggaagctgtatttttttgggggggagccgcagggaaccgttgggagaggggccctgtgtgtgtccctttaagagccggagcgctgcctccgcctcgcaggcgcccggagcctcacaaaag

SEQ ID NO: 42100 - DNA, 224 bp, Homo sapiens
  chr5:141931130-141931354
  hyper
gccccaaatataatttcctcccgcagctcattgcagccccgaggaaatcaccgggggagggctcgggagtgcggcgcggcagccccataatttccagggcccttctcctacactgacacgtaattgtcagattgttttatgagagcagcttcctgcccgcttcctgcctggcttccaaatgtgctcattcccgaggaagcctcacttctccttctcgcccttaa

SEQ ID NO: 42101 - DNA, 147 bp, Homo sapiens; identical to SEQ ID NO: 4292
  chr5:141931424-141931571
  hyper

SEQ ID NO: 42102 - DNA, 30 bp, Homo sapiens
  chr5:142035324-142035354
  hyper
tgctgatattggaacgggagagccagagca

SEQ ID NO: 42103 - DNA, 31 bp, Homo sapiens; identical to SEQ ID NO: 4293
  chr5:142092798-142092829
  hyper

SEQ ID NO: 42104 - DNA, 797 bp, Homo sapiens
  chr5:142781701-142782498
  hyper
tatctccccacctctctgccccgtttatctgaggcgataacgatctctaaacacgaggtatcgaatggagcccaatgaatttccatgccgcttttttgacagctgccttcaaacccgaaaccaaaacaatatttcctaaaacgaaaacgctccctcaagcgacattatcccccagtttaagttgcaaataacccagccacattaattggccctaatgaaccatgccagagggtcttaagtggtattacaaggttgcaattatcaagtctgcaaccccaaacgtcaaactagcacttgtaaaaatcgcagcacaaaaccattacggttacagggggtctttttctaaaaggggccacttagaaacctcaggcgcgaattaacaacaaacgctaaagagcaagcccttgcggggcgggggtggagaagagaaaaaagtgcgaggttaaaagagaagtacgtccagacctgttgagttctctctccgacacgcccacttctaacagataacgccggccccggccgcagtctccaagttgcgggctgtcagccccccgcgtgtgcaccctcacgcgccccgcacgccctcctcaagccaggcgccgccggggcctccccggagcccgggctcgcgctcgggcgcgccggggtggcgtgcaaatattcgggcgagtaaaattcagacgcggcttagcgttcaccacgaaaacgggtgtcgggcgacccccttggagggaaaggggacactagggggagaaaagaggccaggattcccgcgaggaatgagaggctcgaagccc

SEQ ID NO: 42105 - DNA, 30 bp, Homo sapiens
  chr5:142783606-142783636
  hyper
cgctacctccttcccgcccccgcccagctc

SEQ ID NO: 42106 - DNA, 30 bp, Homo sapiens; identical to SEQ ID NO: 4295
  chr5:142784307-142784337
  hyper

SEQ ID NO: 42107 - DNA, 705 bp, Homo sapiens
  chr5:142784568-142785273
  hyper
caaggggaagggaactcgtggtccgtcctgagaaaggagagggccgtggggcgaggggtgcccgtgcgggaagcccccgccccagctcccttccccagctcgccgcgtcgggaaggcttggacgatgccgggaccgagcctcctaccttgtgcggcacagattatgatttttgtgactctgggaaaggttgtgctgtgtgggtttagggtttggggaggtaacttttgcgcccccacaggtgacatcgcttgccagctcctgacacgggcgggggctgccgcagctccacctaatcctgctcgggcgctcggccacagccactctctcacctcccgccgcgctcagactgacggcggctccccctgctctgacatcttgaagacgattggggaagcgcgtcccggaagccgcccgccgccatcttggtagggtacagtgtcgccagcccgtccccgcggccaccatcttggcaaaggttcgcgatcgcgggtagcctaagccgtccttccttggttctcaagggtaaacggttccctgtgcattgtctgatgtgaaaggaaagaagtaggctttcagcaagcctcttgtccggagacgatctacgggggccgcctccagaggattctggagccgccatcttggcaaaggaagagatactcgccacctcggaaaagaagagggaaccaaccgtatgccaacgtaga

SEQ ID NO: 42108 - DNA, 256 bp, Homo sapiens
  chr5:143550288-143550544
  hyper
gagtatggagcttgcgcagtatctacccaacctgcggctggcccgtgccaaagaggaaagtgcttccggcagcctggttaggggtggaaccaggaaagcgcaggcgtagcaattgctgcttactcgtaggtaggaggaggagtttctcagacctaggtgatggaggaagactgggaggcgctaaaatgagacagacggagtcccctctcctgtccacaaactacaatgcctacaatgcctcggtgtcagcatttac

SEQ ID NO: 42109 - DNA, 176 bp, Homo sapiens
  chr5:143584796-143584972
  hyper
ccgccggagcgcggcgtccccgtgcagtcctggcaacctgtcaccgaggaggacgtgactcggagctgcctccgctttctccaagccatattcctttaagatgatgtaatagtcatttccctggatggtttcttgcctgcactgctgaaacaacagcatccgaactgcactgggaa

SEQ ID NO: 42110 - DNA, 44 bp, Homo sapiens; identical to SEQ ID NO: 4298
  chr5:145208532-145208576
  hyper

SEQ ID NO: 42111 - DNA, 866 bp, Homo sapiens
  chr5:145214534-145215400
  hyper
aacgtgatgccaagcacggccccttttcccgctccctgtaaagggagtcttcgaggaaatccctctcgacccacacatccctgaagcaaagcccgcagctggaaagagacactggcggtgccagcttccgcgtggatgaaggagaggagagaggggcaagcagcggaggcagcgcgggatacggaaggtggaagcggggcggtacctttcggagaaagctggcgaccacctgctcgaaggggtacttgtacacctggtgcacatccaccgagacccccatccccgcgcgccgcgggccccgcgcaccggccacgcctccgcgagctcagagctgcccagggctccgcagaggcccggaggcgcccacactcggacagccacatgggcgtggcctttttcctccgcttttcaaactttcgaaactttattggccactcggagaaacgcgcagtcggccacgcccacgcccctactgccagagtccggggcctggggttacagagcgcgggaggcgctggagcgctcccagagcacccggggccccgcggtctccacgctggcggcgccagagcggccctggtgccctcccgcggccgcgcctgccgagaaaagcttctctgcctgggagccatcacgccccgccccaggaaacctggaccttgggcttatgcgtttatggtatcaccgcctggagtcacagaataagccgtggttggcagcacgggaaaaaagtattaataaggaaggcctggtgtgacaaaggccagcattactcatgccaccaggcagctgcctctgaggcttgggtttgggcctcgtgtaaggtaaagattgcctcgggaataagaaccgcgttttagtgcacc

SEQ ID NO: 42112 - DNA, 109 bp, Homo sapiens
  chr5:145316124-145316233
  hyper
gagtggttaaagttttcaaagcggttggcagcagcggcgcttggaggaaaggaagccggttggagggcgcagcgcacccctgctgcgcggaggagggggctgagctgaa

SEQ ID NO: 42113 - DNA, 30 bp, Homo sapiens; identical to SEQ ID NO: 4300
  chr5:145583495-145583525
  hyper

SEQ ID NO: 42114 - DNA, 30 bp, Homo sapiens
  chr5:145713683-145713713
  hyper
ccctctgggcgtctcggatcctctgagcca

SEQ ID NO: 42115 - DNA, 30 bp, Homo sapiens
  chr5:145716995-145717025
  hyper
ggagggggctggctcggatggggagaaaag

SEQ ID NO: 42116 - DNA, 196 bp, Homo sapiens
  chr5:145717843-145718039
  hyper
gaaagaaaggcaagcgtggggaggaagccaccccggactgagaaggcagttactgcccctacctctaccccggagcgcggttgagggaggtggggcaggggtcacctgggcctcgttctggcagcccctcaccctctccagggcccgtctgggcgcttggaggcgcctcctcgctgcgccgcgggaccggactctg

SEQ ID NO: 42117 - DNA, 68 bp, Homo sapiens
  chr5:145718326-145718394
  hyper
gccagcggggcggggcggactgggagaggccaggccaggcccgggtataaaggctgtggagggggcgg

SEQ ID NO: 42118 - DNA, 266 bp, Homo sapiens
  chr5:145718419-145718685
  hyper
cgctagctgctgtctctcctcacctcccgggccgcccctgcgagtccccggcgcgtgagcacgcctgcgcgcgcccgggcccttcctggcaggctgcttgtaagatgagtgaagaagcaggtgggggagaggggaggcagcgagcgagagggcgaggggagcgcgggcgctgagcagcgctcacttggagagcggcaagcaagctagacaagcctgattccatgtcacccgctgccaccctgccaggagcgcgaagatgatggcca

SEQ ID NO: 42119 - DNA, 30 bp, Homo sapiens
  chr5:145718899-145718929
  hyper
tctccttgtctcccccgcgttctctcccgg

SEQ ID NO: 42120 - DNA, 619 bp, Homo sapiens
  chr5:145719134-145719753
  hyper
tttgatgagagcctgctggcacgcgccgaagctctggcggcggtggatatcgtctcccacggcaagaaccatccgttcaagcccgacgccacctaccataccatgagcagcgtgccctgcacgtccacttcgtccaccgtgcccatctcccacccagctgcgctcacctcacaccctcaccacgccgtgcaccagggcctcgaaggcgacctgctggagcacatctcgcccacgctgagtgtgagcggcctgggcgctccggaacactcggtgatgcccgcacagatccatccacaccacctgggcgccatgggccacctgcaccaggccatgggcatgagtcacccgcacaccgtggcccctcatagcgccatgcctgcatgcctcagcgacgtggagtcagacccgcgcgagctggaagccttcgccgagcgcttcaagcagcggcgcatcaagctgggggtgacccaggcggacgtgggcgcggctctggctaatctcaagatccccggcgtgggctcgctgagccaaagcaccatctgcaggttcgagtctctcactctctcgcacaacaacatgatcgctctcaagccggtgctccaggcctggttggaggagg

SEQ ID NO: 42121 - DNA, 102 bp, Homo sapiens
  chr5:145719834-145719936
  hyper
cggcgccggagaagcgttcactcgaggcctatttcgctatccagccacgtccttcatctgagaagatcgcggccatcgctgagaaactggaccttaaaaaga

SEQ ID NO: 42122 - DNA, 300 bp, Homo sapiens
  chr5:145720018-145720318
  hyper
cgcagcgtcgggagccgggagagcctagtgctcatccctcccgggttcgggggatggttatcgggaactccaaggcgtttcctaggcaggttaggctctctcctccgaagccacagactttccccctttgtcccgcctggttgcctccggccttctctctctttcctttctattcccaccaaaaaaattttggcgctgggaaaatattgcagaagggcgggcctgagtgtacttgtgctgtccgtggtgctgaaatttgccctcgcgcaggggccgcacgacttcagagcaggagcccca

SEQ ID NO: 42123 - DNA, 30 bp, Homo sapiens; identical to SEQ ID NO: 4302
  chr5:145722186-145722216
  hyper

SEQ ID NO: 42124 - DNA, 185 bp, Homo sapiens
  chr5:145722560-145722745
  hyper
cgggctctggagagaaccggaaatctgcctccatcctcttttcgaaaagttctctgccgttatttatttagtctttttttttcttttaattgacaactgcaaaagtttgggagacttttacggagaggatgagaggagctgcctcctgagcgcaaggtctgctccaagacggtccagtagcacta

SEQ ID NO: 42125 - DNA, 270 bp, Homo sapiens
  chr5:145724387-145724657
  hyper
tgggagtgcctggtgcgaatacatagctcccactgagaagcttggccccggtcagcggctccaggagcccggaacctcctccctggcggaatcccgggcaccattcagccttttcgaaggctccagacttcgcgctgctcctcctcccgaggaggggcggggcgccagagggcaaaggagaagcaagggtcttggactcctcctccttcccagcgaacatcccttccccgccctgttcccactttttggccccggcgccagaatgtttga

SEQ ID NO: 42126 - DNA, 170 bp, Homo sapiens
  chr5:145725693-145725863
  hyper
cgcgactcccagggctccccggctgggtcagggttcgcccgctcctcccggcgcctccggataggggcttcccttcggctgcgtcccggcctgaggagtcccctggaccgcgggaggggcgattgccgggtccgcgcggctcagaatcctccccacgcgttgcttatacc

SEQ ID NO: 42127 - DNA, 1869 bp, Homo sapiens
  chr5:146256761-146258630
  hyper
tttcccttcctgcccgcacagcactagtgcttatgtcagaacaagctgggagagagggagagacgacaatttcacctcttggcaaagctcagcttgctgaacccttttgctttctgctggctgttgattcagcagaaactactgctgcagaattcataatggtgatttttaaaggccccaccgatcgcgttgctcaccccacgtgtcagcctcattcgctgcccgccagagcactatttccccagccacctttttatttttgctaatgcacttccaaaaggaaagaggttcgcccgtctgcaaagggctttttggggttttgattgtctaagcaggtaacctggccggccggggagatgaatgggcaggaaatgaaaccttgccctccctgcagccactgagagacataacatcgtttcgctcagggaggggggaccaaggtcctactgggcccctcccttcttatctccccccaagacccctgcgaacatctcggggaaggggtcatctgccttcctggggtcatctttctgggcgagagccccaccctgaaaaagcctaatccctgagggccattttaactcccgtgggcgccgggtccacctgctgctgaacgccgagctcgcctcgcggagcccggatggatgcgaggtgcactggggctgccggggccagccgagcccccgccccagccctagggcccggaggagtctccgccactacgcgcccagctgcccaggaagcacagtgatccgcaacttgcgcccggccccaacggcggaatgcggcggggctggcgttaccttcggtcgcatagctgtggtcgcgcaggaaactgttgttgattttgcgggtatcaatgtcctcctccattgacagcaggcttacttgcgtgggaaccagaagccggcagacaagtatccatgatccctccccgcagccagtctcacaggagaggggggcaggggagccagtgggactgcaccatggtccgagcctgaggaggagacggggaggcggagagaaaaaaaataaaaacccggcaatggagctgtcacctcctccactcgggttctgcgaggctgcggcggctcctcccgcgcggtgcgctcactccagctccagttcccagcgaggatgctgcgcctgcctccgctgcctccgggtgccaagatacgccgtgccccgaggggtctggtcccgcccgcccgccccggaggcgctcacaagcgggtctggggagatgcccaacaggttcccctccttggcagccgctccaaaatgcaaaaaagatccctcctccccctgggagagcgggcagccgcgacaaaatggtgcctttctggacccgagctgcagtggcgagatggcagggacaggattcaggcttgcctggccggaatgagggtgctggtcccacgggagggcggctccggcaggcgggggtagggaagctggcggggagctgggcagggcgctgcagccggcgccagcgcactcaccctcacacccacacgcgcgcactcgcagctgctgctgctgctgctgctgctgctgctgcaggaggctggaggcggctggtgcattaaaggcgaggctcctcccaaccgcgtcagcagccccacgactctttcccagcagcagtggtggccgaggcagaggctgcggctgctctttgctgcagtggggcgcatgcagccgcgaatcggcacctgggcagcaagcgactagcttgcaggttcaggtggaacgcatagacgcgctcttccaacctcctcccctctcgcgccactcagctaagggccacgtctacgctagcacccagagcccctagctccctgcctttctccggacgcctgaacttgagaa

SEQ ID NO: 42128 - DNA, 291 bp, Homo sapiens
  chr5:146614283-146614574
  hyper
cgtcctggtggctccggacccggcccaagcgcggcgggacctccatccgtagccctctcccccaacgtcgccctcccggggtccttgtctagtctcagcaggcggcaaacggaccccaggcgtctggcgctcacccaggagactgcccagcggtttctggagagagcgctaagcggagacgcccgctggcaagcagatcccgcctccttccctggccaaggagccgcccctccggggtagctgtgcgctgggcggcgctcggaccccttggcagccgcaggtgcctcccca

SEQ ID NO: 42129 - DNA, 30 bp, Homo sapiens
  chr5:146832503-146832533
  hyper
tcccactgcagccacgttagctgtccagtc

SEQ ID NO: 42130 - DNA, 30 bp, Homo sapiens; identical to SEQ ID NO: 4307
  chr5:146833156-146833186
  hyper

SEQ ID NO: 42131 - DNA, 307 bp, Homo sapiens; identical to SEQ ID NO: 4308
  chr5:146888875-146889182
  hyper

SEQ ID NO: 42132 - DNA, 529 bp, Homo sapiens; identical to SEQ ID NO: 4309
  chr5:146889331-146889860
  hyper

SEQ ID NO: 42133 - DNA, 30 bp, Homo sapiens; identical to SEQ ID NO: 4310
  chr5:147534273-147534303
  hyper

SEQ ID NO: 42134 - DNA, 192 bp, Homo sapiens
  chr5:148033600-148033792
  hyper
ccccggcgcacttgccgcacatacccgctgccagaggcgagggagcgaggtgccctggcagattcgagcggccacccccagccgctgagccgagcttctgctgccgccgctgccgctgcgctcccagccgctgcctgcgccctccctgccgccccctcgggtgcgggctccagcccccgcgctggggagccg

SEQ ID NO: 42135 - DNA, 224 bp, Homo sapiens
  chr5:148033820-148034044
  hyper
cgggcgcaggaccccagccccggatcacctgggctcgccgcgcatcgtccttctccccaaccgagccggactccacgggctcaacagcccccagccccggtggtccccgctgccctgcccgctgccgcccccactgggcgccagggacagcgggggtgccgctctgccggcagggcgcacaggggagtgggcacagaggcgggctggagcgatctcacccgttc

SEQ ID NO: 42136 - DNA, 394 bp, Homo sapiens
  chr5:148206070-148206464
  hyper
tgcctcgccccttcgcggctgccggcgtgccattggccgaaagttcccgtacgtcacggcgagggcagttcccctaaagtcctgtgcacataacgggcagaacgcactgcgaagcggcttcttcagagcacgggctggaactggcaggcaccgcgagcccctagcacccgacaagctgagtgtgcaggacgagtccccaccacacccacaccacagccgctgaatgaggcttccaggcgtccgctcgcggcccgcagagccccgccgtgggtccgcccgctgaggcgcccccagccagtgcgctcacctgccagactgcgcgccatggggcaacccgggaacggcagcgccttcttgctggcacccaatggaagccatgcgccggaccacgacg

SEQ ID NO: 42137 - DNA, 450 bp, Homo sapiens; identical to SEQ ID NO: 4312
  chr5:148520918-148521368
  hyper

SEQ ID NO: 42138 - DNA, 1056 bp, Homo sapiens; identical to SEQ ID NO: 4313
  chr5:148651040-148652096
  hyper

SEQ ID NO: 42139 - DNA, 107 bp, Homo sapiens; identical to SEQ ID NO: 4314
  chr5:148724796-148724903
  hyper

SEQ ID NO: 42140 - DNA, 30 bp, Homo sapiens
  chr5:148904076-148904106
  hyper
ctaattcatgacatcaccaaaatttcctag

SEQ ID NO: 42141 - DNA, 30 bp, Homo sapiens
  chr5:148931072-148931102
  hyper
gcccacgctccgagcgtcaccctgtcaccg

SEQ ID NO: 42142 - DNA, 30 bp, Homo sapiens
  chr5:149109863-149109893
  hyper
ctcggcgttgactccgccgcacgctgcagc

SEQ ID NO: 42143 - DNA, 477 bp, Homo sapiens
  chr5:149111287-149111764
  hyper
ggcttgcaagctgactccttgcggtgaaacgcgacttggaagggacgccgcagccgagacgttcagctccgggcagcgacttcgggctggcggctgggacggcgtggcgtggcagggtgtcgccgagaggaagcccgccacgcgggaggcaggccgcccctggcccgctgcagacgccgctgcgtaggggagccgcggggccgcgtggtcggtggcgggcgcgctcgggtgggttcgcggcagaggccggaggggctagtggcgtgtgattgcgcttctcgagatcgaggggaatgtgtgatgagcgggttgcgcgcgcgggtgtgtgtgtgtgtgtgtgtgtgtgtgtgtgtgcacacgccgcgcgcgccgggcgcgtacctttacctctgacgaaactgcggtggagctcccgccgtcgtcgccgggctccgtcacacgccccgcgccggtgtctgcgccgaaggcaggtcccag

SEQ ID NO: 42144 - DNA, 30 bp, Homo sapiens
  chr5:149340262-149340292
  hyper
ttggctggtggtagcgtcgctcgcccggca

SEQ ID NO: 42145 - DNA, 30 bp, Homo sapiens
  chr5:149340846-149340876
  hyper
tcgttgatccgtctcgaacctagatatctg

SEQ ID NO: 42146 - DNA, 149 bp, Homo sapiens; identical to SEQ ID NO: 4315
  chr5:149379995-149380144
  hyper

SEQ ID NO: 42147 - DNA, 30 bp, Homo sapiens
  chr5:149380766-149380796
  hyper
gccgagccgctgggcgacctcgagttggat

SEQ ID NO: 42148 - DNA, 30 bp, Homo sapiens
  chr5:149381487-149381517
  hyper
tcagggcaaaaaagcgcagtccccacgtag

SEQ ID NO: 42149 - DNA, 531 bp, Homo sapiens
  chr5:149569479-149570010
  hyper
ggagtcccagagagggcaggtcgcttgcccaaggtcacgcagaaagccgagggtttccgtcgcgaacccccctccccactcgctcagggctctccaatccgcagctctgcgtgcgggggcgcgcgcatccccccgccgtccgtccgtcagctgtctgtctgggtgtctatgcgggcgcagcagtgcacccttccccagcctcgggcgctgcgcagggacagacaaggcattcgcagcgccctgcccgcgctccacgcccgcagccgccagacggcagcgcctgcgtccgtgcccgccccagccggtgcgcgggagccgcgggggcaaaggcgcagtggccagcggaccatctctcgtgccctcgctctctgcgctccggggcagctgagccccggccacccgctctccaagatgaagaagctccagggagctcacctccgcaaggtagggcacgagggcgggggcgctgggggtgcacctggaggagggttggagagacccgcccccaacgaggcccctggggaaggtctg

SEQ ID NO: 42150 - DNA, 750 bp, Homo sapiens
  chr5:149681824-149682574
  hyper
gctcgccagcctccccgggcccgtcggccacgaagctcggcttggcccagtcccaggacaggtagccgaagctgagcaggctgaccagggagaagccagtgagggtgtgcatcgccaagccggcccgcgcgtcccggcgcgccgggctcctggggcctcaccacctcgcgcgcccagggcgcaccaccggcccgccggctcggatgctgcgagggagttcagcgccccccggggacggtccagtgtctggtccgggactggctgccggacggctgggccggatctgctcggccgcagcggggcgctctggggaggtcaggcccgcgccgagctgcctcccgctgcctaagcgcaggccctgcgccgcctttgctccctcttccccagctcagcccggccagcctgagacgcggcgtggcagcttccaaaaagtgctctctaccatcctctgactcccctcttccttcttgccctggatttctcccgcctcctaatttctctctcctctgctttcccggcctctcgccccacccggagtccttaaaacagcccagctccctgcagggaggtgggcaggaccccagaggggaaggggagggaggcacaagttgggcgggtcgaggggacacggcgggagagaattcgaaaaagttgtaacatctgccgggccgggccgagccccaggtggaggggcgggacgcagagcagcggctccacctcccgggcgggaagccccggccctctcggcct

SEQ ID NO: 42151 - DNA, 30 bp, Homo sapiens
  chr5:149737639-149737669
  hyper
ccagaaagtgtgctcgcaggggccgaactt

SEQ ID NO: 42152 - DNA, 108 bp, Homo sapiens
  chr5:149829575-149829683
  hyper
gctagacagacttccgccatcctgactcccgccctggcagccttggagcggcagcgccccttgtgtggagcaggggaataacaacaacaaaacggccttaattaaagc

SEQ ID NO: 42153 - DNA, 30 bp, Homo sapiens
  chr5:150004493-150004523
  hyper
aggggtgcgggcaccgcgcgagcctcgccc

SEQ ID NO: 42154 - DNA, 30 bp, Homo sapiens
  chr5:150051189-150051219
  hyper
ctggaacagcggagtcggggacggtgagcg

SEQ ID NO: 42155 - DNA, 30 bp, Homo sapiens; identical to SEQ ID NO: 4319
  chr5:150051551-150051581
  hyper

SEQ ID NO: 42156 - DNA, 30 bp, Homo sapiens
  chr5:150051899-150051929
  hyper
aggctatgcggagccgctgaagggcgtccc

SEQ ID NO: 42157 - DNA, 30 bp, Homo sapiens
  chr5:150080687-150080717
  hyper
gtcatgacgtcgcccgctcttggaatttct

SEQ ID NO: 42158 - DNA, 233 bp, Homo sapiens
  chr5:150158379-150158612
  hyper
gaggagccggggcacgttccaggagctgcctagggctgaggttccaggcctgggggtcgcttccagctgccagatcccgtgcagtcctggggaccctgagaagcaccgagccatccctgacccaggaactttccgcagactcgccgccatctggggtgagtggggccaccgggggattgtttgtggggctctggcagagcggagctcttcggattcgcgacctacctctagtg

SEQ ID NO: 42159 - DNA, 30 bp, Homo sapiens; identical to SEQ ID NO: 4320
  chr5:150336249-150336279
  hyper

SEQ ID NO: 42160 - DNA, 671 bp, Homo sapiens; identical to SEQ ID NO: 4321
  chr5:150399979-150400650
  hyper

SEQ ID NO: 42161 - DNA, 30 bp, Homo sapiens; identical to SEQ ID NO: 4322
  chr5:150460085-150460115
  hyper

SEQ ID NO: 42162 - DNA, 30 bp, Homo sapiens; identical to SEQ ID NO: 4323
  chr5:150536836-150536866
  hyper

SEQ ID NO: 42163 - DNA, 404 bp, Homo sapiens; identical to SEQ ID NO: 4324
  chr5:150603147-150603551
  hyper

SEQ ID NO: 42164 - DNA, 184 bp, Homo sapiens; identical to SEQ ID NO: 4325
  chr5:150603589-150603773
  hyper

SEQ ID NO: 42165 - DNA, 30 bp, Homo sapiens; identical to SEQ ID NO: 4326
  chr5:150620960-150620990
  hyper

SEQ ID NO: 42166 - DNA, 30 bp, Homo sapiens
  chr5:150826985-150827015
  hyper
gttcagttcctattcgcagtccccagcgcc

SEQ ID NO: 42167 - DNA, 373 bp, Homo sapiens
  chr5:151066246-151066619
  hyper
aaagcaacaggcagacaggaccgagggccatgctcttaaggggagccgtgatggagccgggaggagaggcgcatcctcagcagagcttccctcccttgcacacgagctgacggcgtgaacgggggtgtcggggttggtgcaactatagaagggaaaggctgggcgggggtcacacatacctcagtggcaggcaggcaggcggcaggcagagcgcgctctccgggcagtctgaaggaccgcgggaatgtggaggggtttagagacaggcaacaggaaaccactcagagctctgggctgggtctatctcccctccaccccgtggtccctcctcctcctgtctcctccttcccccggcctcctccttctcccatag

SEQ ID NO: 42168 - DNA, 30 bp, Homo sapiens; identical to SEQ ID NO: 4328
  chr5:151138146-151138176
  hyper

SEQ ID NO: 42169 - DNA, 30 bp, Homo sapiens
  chr5:151138378-151138408
  hyper
cctccatcgactgtcggcctttttcagaac

SEQ ID NO: 42170 - DNA, 23 bp, Homo sapiens
  chr5:151150204-151150227
  hyper
cggctccccagaggccgaggccg

SEQ ID NO: 42171 - DNA, 648 bp, Homo sapiens
  chr5:151150270-151150918
  hyper
cgctccacatgcttcatttccaaaattctcagcaaaactccgcgggagaccctggtcacatgcctggaacgagaacaaaccggggcgtgtctgtgccggacggctgggaaccaaagctatttccatagaaatagggccggccagccttgagttgtagccccgccagtgcctgaaacgccaggaggaggggacgagttgccttttaaaggcgtagcgacgagaataagcccccacccgcggcaattcgaggctgaacaatagtggtgcagctcgggacgtggtgcgagggcccacactccactggagcacgcgcggaccaccgtgcctcagctgccacaaagggagcctcgccacacgcccgcggccgcctcgcagcgcccgccaagaagcgcctggcggaagggcgcactctcaggccttccaccggcgaccttccggcgggagcctgcgggcggcgcaggaacgaccctccttcctctgccccgcagcagtgctgagtaatggtgagagcagcaaggcccttggccgccgcacgtaagaaaaaagttgtaataaaaagaaaacaacccgggaaactttactagttggttcgccaggtacaaacctatgcggaaaaggcggggtacaggcctcggaggccggacccaa

SEQ ID NO: 42172 - DNA, 30 bp, Homo sapiens
  chr5:151304394-151304424
  hyper
ttggctccctgcggcgctggggaggcacgt

SEQ ID NO: 42173 - DNA, 227 bp, Homo sapiens
  chr5:152870099-152870326
  hyper
gtgtgagtgtgagggggagagcgagagagagcaagggagggagagagaggcaggctgcgaggggagaggagagggagtgggggagccagcgctccagctagcatgaggacgggcttcttttcccgtgctcagttaatctggctgtcagttggtgttaacgctgcagtttaagtgttcggattccaagggaaacagacaaacctcacgaaaggaaggaagcaagcaag

SEQ ID NO: 42174 - DNA, 84 bp, Homo sapiens; identical to SEQ ID NO: 4330
  chr5:152871129-152871213
  hyper

SEQ ID NO: 42175 - DNA, 30 bp, Homo sapiens
  chr5:153785040-153785070
  hyper
cttgaagcaggaatcgcgttcttctgaaag

SEQ ID NO: 42176 - DNA, 30 bp, Homo sapiens
  chr5:153826281-153826311
  hyper
cggcccgcgggcaacgcctccttcagcaag

SEQ ID NO: 42177 - DNA, 30 bp, Homo sapiens; identical to SEQ ID NO: 4331
  chr5:153826510-153826540
  hyper

SEQ ID NO: 42178 - DNA, 255 bp, Homo sapiens
  chr5:153852520-153852775
  hyper
cctctcaatgggcgccggctccgtctcggctcccgggttcagggactgcacgtttctgagaccgagtttagggctccaaggctctcttcccaaagagggtttggggccagcaggattgggttttctgaagaggcctggttatgccagacttggctttggcggccgctggcgggtctccctcagcaccccctcttctttccccggctataagaaagctagaccagggtgcgcattcttcccgtgcctaggatactt

SEQ ID NO: 42179 - DNA, 212 bp, Homo sapiens
  chr5:153853091-153853303
  hyper
ggacaggctcattaccgccaagtgttgccctagttaaatcgcgggcctgtttgatctggcggcgggtggcgagagggaaaaaagaaaaaagtaggggggcgagagtagagagagaagctcacacctcccccactgtttcctagcgcccataaaacaccttttattaactccttcgcgtccggaaaggcccgcgtggcctctcggcccctgct

SEQ ID NO: 42180 - DNA, 68 bp, Homo sapiens
  chr5:153853386-153853454
  hyper
cgaggccctgccccggagctgcctgaggtctcctttcttgttcccaagccgagcgctcaggctccagg

SEQ ID NO: 42181 - DNA, 30 bp, Homo sapiens; identical to SEQ ID NO: 4334
  chr5:153854304-153854334
  hyper

SEQ ID NO: 42182 - DNA, 473 bp, Homo sapiens
  chr5:153854937-153855410
  hyper
aattagagaagacggcgtcggggcggatcatatggagggacaagagagaaagagccagatagggaaatggagatagggctgaggttctaaattcgctccaaaagggtggaagagtgcgtctttgagcccttgggttcgacagtccctccttcttgcatgttgccgccaagggccgccctcggttgggctgggggtggatatatatatatttctctttctcttaatgtattaaaaaaaatcaaaggacattgcacgtgcgatccaagtgtgtggttgcagccgacgacctgccggcgctcagcagaagctccgcgggatgcgtagcaccagtcgccggagcccagagcctggcgttcgccgctgccttcctctcctcccggggcttcaggagtggctggcctggccaggtcctcggcgcgggcctcggctcactggtttaactccagcgcccagacttgctgcggccagccggt

SEQ ID NO: 42183 - DNA, 269 bp, Homo sapiens
  chr5:153855657-153855926
  hyper
cgcggagttcctgggacccgggatgggctgggcagcttcgggaggtttggtaaggaaaatgttctgcgtctggtgaaactgacgcgcgttgatttggctttaggacacctaagggagatcccaggatattggaagggaggggtggaaatccacggttctcccgctctcgctgcaccccacacacttccgccagcctcccaacctggtttaaacatcagggcttggatgcaggcttggggccccctaagccggagctgggagcctcagat

SEQ ID NO: 42184 - DNA, 100 bp, Homo sapiens
  chr5:153856473-153856573
  hyper
ccctggactgagtagaagacccgatctgttttacctcacctccaccctggactcctcagataggtgcttttcctgccccgacccactctgggccctcagt

SEQ ID NO: 42185 - DNA, 199 bp, Homo sapiens
  chr5:153857284-153857483
  hyper
cgccggccaagacggccgccaagcgcctccagccgcccggggctctgcccaggcctggcgtcaggaccataggcggtggcggctgcagcggccgcgggcggcggcccgcccgcagggaagtccggggcagcgtcagccgggctcagcagccagctctggaagtagggcctttcctgatgacagcgcgaggccggaccga

SEQ ID NO: 42186 - DNA, 159 bp, Homo sapiens
  chr5:153857774-153857933
  hyper
gtttaacccttctgcggactcccctgcggatctggcttatataagaccgcggctttgatgtcaacctctcccgggagccaatggcaggggggcggggataaggaaaagggggagtggctatcccaggttttacgctcagcccgcgccactctagtccgc

SEQ ID NO: 42187 - DNA, 30 bp, Homo sapiens
  chr5:153858570-153858600
  hyper
gacgggtttgttcccggcttgagggtctga

SEQ ID NO: 42188 - DNA, 30 bp, Homo sapiens
  chr5:153858921-153858951
  hyper
tccggcatctctcacgcatcagcgcagagg

SEQ ID NO: 42189 - DNA, 169 bp, Homo sapiens
  chr5:153859603-153859772
  hyper
gggaggtcctggtttcctgcccgaggcgggctggaaaccccccgctctccccggcgcctggcgccagcagcgctggggtagggcagagcgcggagccggaggcacgcggggagggagcgctgggggcccgctgctgcggcggctctgcggggtcccaagcctccctggc

SEQ ID NO: 42190 - DNA, 148 bp, Homo sapiens
  chr5:153862031-153862179
  hyper
taacagtaggacagctgtacccgggcaatgcgaaggtccctcaagcctggacgttctgcagtggtggggtctcgctcttgccctagcccctctcctaccctcacccctatccgcgccccccggactggcaggcctctggaagcccagg

SEQ ID NO: 42191 - DNA, 337 bp, Homo sapiens; identical to SEQ ID NO: 4339
  chr5:153862218-153862555
  hyper

SEQ ID NO: 42192 - DNA, 30 bp, Homo sapiens
  chr5:153863402-153863432
  hyper
tctgcttcgggacgcgttcaacctaaacag

SEQ ID NO: 42193 - DNA, 158 bp, Homo sapiens
  chr5:153863765-153863923
  hyper
tcacagcactcagctccaggccgcctgttaacgaagttttgctgtgcaccaggctgttttcggcatattgggagattttttttgttcctcacatgctggttagtttcctggtgctcggttgctccccgggtcgggtcgggccacttgtagccaatccc

SEQ ID NO: 42194 - DNA, 268 bp, Homo sapiens
  chr5:153990826-153991094
  hyper
aataaaatagaacatttctagcgacacacacaggcacgccaatctcagtcacactcgccccaggcacagacactgtcactatgatttgccatccccgcctccccacgctggagagcagcgccctcacagaagggccgagccgcggacgggccacacacccgcgtgtacacacagtccgagaacgcacacacgtacacacacacatgcgcaaggcacggcctggccttcaggcacagagagcccatccggtttcccactcagctcccac

SEQ ID NO: 42195 - DNA, 243 bp, Homo sapiens
  chr5:154026797-154027040
  hyper
ggtgaagtttaccctggctcccgcctgctgcaccgtcacctccggcccctcattacggaaatgaagaccactaaggagcatgagcgtcgtaaccgcccgcctggggttgacttctcttggggtgatcagccacgtgaccctagccacccgcctcctttacactacgccccaggatccccggcggcagagataaagagctggactttagactcagacgaccgcgctcttaaaccttagatgacc

SEQ ID NO: 42196 - DNA, 30 bp, Homo sapiens
  chr5:154062189-154062219
  hyper
acccacgggactctcgaagtgggggagggg

SEQ ID NO: 42197 - DNA, 30 bp, Homo sapiens
  chr5:154237415-154237445
  hyper
atggcaatgttcctcgctctgctcggtgag

SEQ ID NO: 42198 - DNA, 30 bp, Homo sapiens; identical to SEQ ID NO: 4340
  chr5:154317540-154317570
  hyper

SEQ ID NO: 42199 - DNA, 30 bp, Homo sapiens
  chr5:154320524-154320554
  hyper
cggcccagtgcttgcgatcttcgtgacggc

SEQ ID NO: 42200 - DNA, 149 bp, Homo sapiens
  chr5:155107330-155107479
  hyper
ccttgggagtctgttggttaacgggaaaagtgctttctctgagaggaaggcggggcaagccggaacaagctctcgctgggaatccgcacactccttctcccggtgtttcttaacccctttcttctcccgggagtggagagggggctcaa

SEQ ID NO: 42201 - DNA, 309 bp, Homo sapiens
  chr5:155107774-155108083
  hyper
ccgccagccggagcgcgcacaccgggactccggcacgtgggcgcgcgggaggtggcggccgctgctgccgctgctgccgctgccggagcccgaacccaagccccagctggagccggagtcggagccggcgagatcgccctccatgctgcgggagctgcggccgccttccgctcagcctctggtcccaggcgagcctggcgagccggcgaagcaccggcggggaggaggactagaacaggaggaggggcacggcggattgaagcgagctgggctgtgagcaagggacacccacagcctggagaaacagcc

SEQ ID NO: 42202 - DNA, 107 bp, Homo sapiens; identical to SEQ ID NO: 4342
  chr5:155108160-155108267
  hyper

SEQ ID NO: 42203 - DNA, 748 bp, Homo sapiens
  chr5:155108355-155109103
  hyper
cgatgcgcccccacccgggcggcgcgccctctgccaactcgccacccatgggatcgactgccctcagctgcccggcttggagtgcgtagccttcgccgcgtggcccaggagaggagcgagacaccaaggcgtttcgcggactccgcgcgcaccagtcggcttggtggccctgcgggatagcgtttatacccaggggtgagtaggccgctaatggaggccccctttacccccagctagcggcttgcatggacggcaaagagacgggagaaagttgggtctccttgcgcttaatctggcattggcagaggaatgcaacactgtttcctccaactcgattgccgcgggggtttccccagttccctccatctctaagccaaggagggagtccccttccgcttcctaaggagaaaaggggctccctagagcagatcgctgacttcctcaccaacgtgccatttggggcttttcagccgcccgcgcgttaagctagctcccagcataagcgcttagagatccgcagccgcctgggcgcgctaagagatcgtgggcagacctagcccttagggcagcctaagcgcgcttcactaaagaaaaaagactgttggtatattaaagaagtgtgtgtgtgagagagaaagagacagagaaagagacagagagacatgggtgggggcaccaggaaaggtagcccgagtaggaggtgctagtgaaatttatcttttgctgacggatccagcctccggaatgc

SEQ ID NO: 42204 - DNA, 332 bp, Homo sapiens; identical to SEQ ID NO: 4344
  chr5:155109188-155109520
  hyper

SEQ ID NO: 42205 - DNA, 30 bp, Homo sapiens; identical to SEQ ID NO: 4345
  chr5:156693942-156693972
  hyper

SEQ ID NO: 42206 - DNA, 315 bp, Homo sapiens
  chr5:156887145-156887460
  hyper
ccgggtgactcctccccggggactctcccactctgggacgcgtcactctccccacccctgggtccggaccccggcggcttctcgcgcgcgagccacgcgggggacaagtcgcggccacctgctccggagctggggagcccgggcgccgtccgcccgcgcgtcggttcgtgtgccccgggccccatggagctgcgggtcagcaacaccagctgcgagaacggtgcgtacggcagggctggggaccaggcgggctccgcgcttcgcgccctcccctccttgccaccgctctccctcgcatcctctcctcccaggggg

SEQ ID NO: 42207 - DNA, 1284 bp, Homo sapiens
  chr5:157001781-157003065
  hyper
tagtcctgagaaacacggacatcacccggcatcttagctggaaacatcgagtcagaccccttcgcttcacagaaggggaaactgaggaccaaagaaggcggccgtcgggttggcgtggaaagagagccctggtttccagtgccaccgcggacctcaacccgtggcgtggccttgggcaagtcctttcccttttgtgggcctcggtttccccatctgtgaaatgggtgcgtttgacttggccttcagtagggctcctgccagctcggggatccgaagtgtgtggctgcagatacccagcgagccatcccctagccaaggctaccacagtctgccgcgggcattttatgtcctaccccaccagtgtggcaggcaccgagcctggtcccaggaagccgctcccaggccacacgggcagggcgctcgggatgctcggcgttggcgagtgcagcgggcggtagagagaaagacagagagagaggcggagcggacacgagggaccgtgagaaaacggaggaggataagccccgagaacggcggaaagagaagccaaaagcagaaaaacagaggaaggagaaggcgagaagggaaggctagccagtgagcggaccggctgttttctggctgcgccgggtttccccgacctctgccacctcccagggcgcagaacgtgggaacaaagcccgggctcccaggctggggacggcgggggcgcaggccccgcggagttgcgggaggcgcaggggtcgcggtcccagcgctccggacccgcaaggctactcccaggtctccgggccacccagcctccatccccccgcgcctggccacttacttgtccatccaggctcccgcgccgcccgcggccggaggggctgcagggcaaacgccagcaagcagagccgggcggcgcctgcgccccctggcatggtggcggcggcccttagcgctcggcgctcacacgccctcagccatacctgcccactgcccggcggtggaggcgcgtctggaaccccccggctcgccccgcgcctccccacccggctcccagccctctgccgagacgctccgcctccagccccgcgggcctccgccaggggatggaggaggggaggctccagcccggagggggctggagggaggggccggggaggagctggcgagactcgggggagcggggctggctcaggtgagggagaccgcggggaagggagaatccgagccccccaggaggagggatttgtggtggacgcggcctgtagagggtcggggactcgggcttctaggagt

SEQ ID NO: 42208 - DNA, 670 bp, Homo sapiens
  chr5:157098064-157098734
  hyper
cattcaggaagcagccgctccgggaagccttagccaagggtcttccggaaagacaccagtcttgatcctggagcctcaatccccgctgacccagcactttggtttccatagcaattgtctcgtcgcagaaaggaatcgcctgtgctgggtcttcagacctcagctccatgccgctgagcagccccaccctggctcaacccgttacccgccccgccagcaggccggggtcactgcagtccccacgtcgaagcggaaaaggtctgctcagctcaccgcaccccacttcttccagacccgtccgtcttcacagcaacgcgccgggtctcaccacggcggatgccgagggacaatattaccgcgtccgtggccgccggactctgcacgcatgtccaacagcccccgtccccttccccgcagccaatatgtgtctcccaggcaacgcgccgcgctcggttcagggctccgcccagggactcactccgcgtcagcgcgcgcccacctaggtgggctggcaaccagccaccagtttccaactctttctccaacagggaagccgcaatgacacagccgactaggccctcggtcacctgtgaccagggatcctccacgatcggcgggaccgccgcccaggcgaccaccagttccagcgccacctcgggttcgaactacc

SEQ ID NO: 42209 - DNA, 30 bp, Homo sapiens
  chr5:157158426-157158456
  hyper
ccctttcctttccgcgtgtagaatgtgggg

SEQ ID NO: 42210 - DNA, 30 bp, Homo sapiens
  chr5:157170559-157170589
  hyper
gctatgggaggaggcggtgcgaggcgcggg

SEQ ID NO: 42211 - DNA, 65 bp, Homo sapiens; identical to SEQ ID NO: 4350
  chr5:157285887-157285952
  hyper

SEQ ID NO: 42212 - DNA, 30 bp, Homo sapiens
  chr5:157988964-157988994
  hyper
atcccagtaaacagccgttaagctaaaaac

SEQ ID NO: 42213 - DNA, 30 bp, Homo sapiens
  chr5:158244067-158244097
  hyper
caccaagaccatggcctgaccagcccactt

SEQ ID NO: 42214 - DNA, 48 bp, Homo sapiens
  chr5:158478417-158478465
  hyper
ccctcccccccgctcccgcagccccccacccccccaccccgccgcccg

SEQ ID NO: 42215 - DNA, 132 bp, Homo sapiens
  chr5:158478512-158478644
  hyper
cgctggcgacaaactggagccggggcctttccgcttaggaggaactcgctacgtgtcgctaacaacaacacaaacaccgccggcccggctcggtgctccgctgcccacagtgcgctcggcaccagggctgga

SEQ ID NO: 42216 - DNA, 187 bp, Homo sapiens
  chr5:158526185-158526372
  hyper
agagcggctggagagcgcggagccccggcggagagcggagcgcagcggctgcggactcaccccgccgcccggccccgcggcagcagctgccgctgccgctgccgcctccgcctcccggctctcccgctcgcggctcacctcggccgcggtccccgcgcagtacccacctctgcgccgccgtgttggc

SEQ ID NO: 42217 - DNA, 109 bp, Homo sapiens
  chr5:158526599-158526708
  hyper
ttttttttctcagacgatgaactcgcacttagaagatcaaggcgggctggaaagcaaatttttaaaaaatgtaaacctctgctcaaaactgagcgataacccgaaaaaa

SEQ ID NO: 42218 - DNA, 650 bp, Homo sapiens; identical to SEQ ID NO: 4353
  chr5:158527353-158528003
  hyper

SEQ ID NO: 42219 - DNA, 36 bp, Homo sapiens
  chr5:158533604-158533640
  hyper
tttagggagacgccttcggggcgcagggcccgcccg

SEQ ID NO: 42220 - DNA, 1212 bp, Homo sapiens
  chr5:158634800-158636012
  hyper
tcatcatctcccaaaccgcaaagacagggagtctactctgaatacaaaggccatctttcaacttaaggaacagagagaggaaataaaactgctacctctgccatcggccgctcagcctgggtcacgactgcagcaccgacagctcattcttttgggcatgattcaagattcagtaaaactgcacactccgtattttaaaaaataaaaagacacacagtcctctccttccctttcagactagtttcctctttactgcagactgcgacgcaaggccatccactaatctttgatgcctgctcactgcacaggccccttcctctctccccgcacctcctcccacaacgcctgcagatctcagatgcgtttgaactacagtaaccccaacccagctcgcggcaagcaggcagcgcagcagcagtagcagcagcaaccgggccgccgccgccgcggggctaagagattacgttcagcaaaaactcttccaggaaagaggctcgagagctcccctcctatctcgccaagggtgctgactctgtcgcgccacgccacgtaccaaaaggctcgcgaagaaaaacgcgggcgaagttcagcatccccgaacagaaagggaactcattccagaaagggggttcacgggtctgagggtccttgggtggggaaagcagtattggagggagaagacagaagggatggcaagacagaggaaaccacggggacaaaaaggaagggatgaggagccctcttactataaaagggactgacggacgggatgcagagcaatgggcccccctcgaaaaatggactggcaggcccttccgcacccccaaacaacctcgcaccacctgaaagcggggagcttgagtttggggctgcgtagatcaaagcagggtaagacgaagggaaagagggaggggagcttggaagcaaagtgaacaaagaggcaaaagaggcaaagttggaaatggaaacgagaaagggagctggaaaggggccgctctggaagggtcttgaaaaaggcctagaaatgggatgctggggaggcaaagggggacagccccgaggaagggcatctcaggaatgtaagggagcgctccaggccctgggaagaggaagggatgggagggcggggaggcagccgaggcccgggagctggaacagagggggctttgcgcggggcccaggaggggagagcagggtcggagggaggcgacc

SEQ ID NO: 42221 - DNA, 30 bp, Homo sapiens
  chr5:158690014-158690044
  hyper
gacactactagagacgtcacacgcctcagc

SEQ ID NO: 42222 - DNA, 30 bp, Homo sapiens
  chr5:158690485-158690515
  hyper
ctgtcctagtctgacgcccaggcccctagc

SEQ ID NO: 42223 - DNA, 30 bp, Homo sapiens
  chr5:159200413-159200443
  hyper
tgcggcggcggcggcggcagcagccgggct

SEQ ID NO: 42224 - DNA, 31 bp, Homo sapiens
  chr5:159228213-159228244
  hyper
ttttgcctgacagggacgatgtcattaccgc

SEQ ID NO: 42225 - DNA, 111 bp, Homo sapiens
  chr5:159343453-159343564
  hyper
gcgccgggctcccccgcctgatgtcaccgccgtgcagtcagcccagaagcggctcattgaaagcagaccctcttcggcgctcgctgggcggaggacgcgccgcggtccgca

SEQ ID NO: 42226 - DNA, 30 bp, Homo sapiens
  chr5:159414351-159414381
  hyper
cgtctccagcagagcgcagcaaagaagacg

SEQ ID NO: 42227 - DNA, 30 bp, Homo sapiens
  chr5:159545791-159545821
  hyper
gctgggggcgggcgcggtaccttttggaca

SEQ ID NO: 42228 - DNA, 143 bp, Homo sapiens
  chr5:159546856-159546999
  hyper
ccacttctttcaaaggcggccgaggggaggagtaacaagggaatgcgggaggggaaccgcttcccaagaatctctgcgcagagatccttagaataaatgttatttctaggcgcggacttcttgcggccgcgtgtgggcacgac

SEQ ID NO: 42229 - DNA, 145 bp, Homo sapiens
  chr5:159738786-159738931
  hyper
gcgacctgagaacacgaagtcgagaccgaaggagactgtacccagtcttgagagtgacaagggcagggagggactgaccttctcgcgcagggtgcagtggacgtccgaggcgacgcgcccttcccaccacggctcatccatcatc

SEQ ID NO: 42230 - DNA, 327 bp, Homo sapiens; identical to SEQ ID NO: 4358
  chr5:159739151-159739478
  hyper

SEQ ID NO: 42231 - DNA, 227 bp, Homo sapiens; identical to SEQ ID NO: 4359
  chr5:159739696-159739923
  hyper

SEQ ID NO: 42232 - DNA, 30 bp, Homo sapiens
  chr5:159797260-159797290
  hyper
tgttactattgtaacgggtaaaccactggg

SEQ ID NO: 42233 - DNA, 174 bp, Homo sapiens; identical to SEQ ID NO: 4360
  chr5:159826415-159826589
  hyper

SEQ ID NO: 42234 - DNA, 30 bp, Homo sapiens
  chr5:159826807-159826837
  hyper
gcgcggtctccgcccgcccgtctccaagcc

SEQ ID NO: 42235 - DNA, 30 bp, Homo sapiens
  chr5:159827149-159827179
  hyper
gtattgagcatgcgcgctagcccttcccaa

SEQ ID NO: 42236 - DNA, 30 bp, Homo sapiens
  chr5:159845883-159845913
  hyper
gcttttcggtcccccgtcctcgctccctca

SEQ ID NO: 42237 - DNA, 566 bp, Homo sapiens
  chr5:160973448-160974014
  hyper
tcaataaggaagcaggcatagcgttttcagcatcggatccctactacatttccctgctcacagaggtatgcagacagaacccttcaaagtgagaacggaaaagagaaacgctgggcacacttacctctgcgcacagacagcggcgattattaaggggaaggaccaaatcccaaagtagccccttttccgcactctccacatccctttagtttttgatggaattgagggtttcactgaagagaggagatccaacttagtctgcccagtgcagtaattctaatgtgaggcgcatgcgcacggcgtaccaaaacatcaaaggggaagcggcggctgccggggaccgagcagatttccttgtttaaaaaaaaaaaaaaaaattaaaagggaaaaaggaaaaacatgtatatgtataatacatacatatttgaataatatagaaaagtcaccccacagcagcatccagaataaaatttttgttgttatcctttcgttaagacaaaataactacagcgtctggtaagtttcggtagttgcaagaggcagttttgcaccgagcgggttgtggg

SEQ ID NO: 42238 - DNA, 857 bp, Homo sapiens
  chr5:160974540-160975397
  hyper
cgttcctgacccgctagtccgggttatttatagcaggaggggaggggggcgaggggagcagaaaggcaatgctgtctctccaggtttcggtctgattctgcagtgggaattattagtgggcagggtggggtttgcatgagggggagatgggacgtggaggcgtgagggatgcgggtgacgggcgccctagcgcaggtgcgggggactggagggcgtgggcgaccgcacagagcaggaagggcaggtggccgggtgggacgcgccccggccggtcccccagcgccccctccgctgcgcgcacccgcgcgcacacacgtgcaggcgcactccccacccgccgccatccctccttacctcgcaggcccgcgctcgccgcccactcccgcggcgtgcggagctggcgcccccggcccctcgtccgggacaggggacggggactcccggctgttcaggggctgtacctctggatacaagaagccggagcggtccctagaaggcaggcaaaatgaggaagagcccctcacctccggaggcactgtgttctcccgcggtctccgcgccacctcgtcctcttcttcccttccccgcgcccaggggactcgcacacccagaggctgcctcttcccttcctcctgaagctcaggccgcctcgccgtggccgccgggacccggaggaggcagcaagcttggggtggggaaattgggggagggagatactcaattcacaaaagaagtcttccctccgctccagggaaagagaggagccacgggcggcgtgaggtgctacgagtctggggacacaaggccgtccgaaggaaccggagtccacaccagcggctctccgggtactcctgagt

SEQ ID NO: 42239 - DNA, 215 bp, Homo sapiens; identical to SEQ ID NO: 4361
  chr5:160975718-160975933
  hyper

SEQ ID NO: 42240 - DNA, 339 bp, Homo sapiens
  chr5:160975955-160976294
  hyper
cggaagtagctccacaggcttgcgaccccggcagccctgggggctcctcagggtcctgttccgtgctgcactcttgacccacttaccttctgataacctttcccctcccccaccttggtcagagggtcatctgggggtagtttgtggggatgactccgggggaagtgtggaggcgggagggctttaaaaggggggaatccgacagctcctctgggatggatgataaacaggaaaagaaagccgagttccttcaccgaccaagggagtttctaggttaggaacaggtaaagcccagcaccatgaacatactgctgatctaccgcgcggcgctctatagac

SEQ ID NO: 42241 - DNA, 475 bp, Homo sapiens
  chr5:161274291-161274766
  hyper
gagaatgatggagctcgaggcaaaggaatgattccggaaatggagatatgattctcaaacctagaaatgatcggagtgatttattagttaaatattcttcgtccaggaacccagcacaattcagaggtaacagcgcctgcgttttctccatgataacatagacaaacagttgcctccaaaggtaaaaacccggttccggagggtattcttgctgtcctctaagctacagaagaaggtggggtggaaagcgctcccaacctgagaaagtgcgaaagactctctaaatccagtagccaatttcctacctgccagaactctttcctaccatccgtcaccattcgtgactctgcaagacacggggacttagacatatgtgtgggagtgtgtgtgtgagggagagaggcgagacgagtgctctccccacacgtgtaaccctgcatctcccagtttcagagcttgcgttcattcatatgca

SEQ ID NO: 42242 - DNA, 43 bp, Homo sapiens
  chr5:161275108-161275151
  hyper
tggcatgaagtcaccgcctatttcacatccggtttgccctggg

SEQ ID NO: 42243 - DNA, 43 bp, Homo sapiens
  chr5:161275421-161275464
  hyper
gccttaggtaagtgcgactttggaccacgatacacagacagag

SEQ ID NO: 42244 - DNA, 30 bp, Homo sapiens; identical to SEQ ID NO: 4363
  chr5:161275850-161275880
  hyper

SEQ ID NO: 42245 - DNA, 30 bp, Homo sapiens
  chr5:161494485-161494515
  hyper
tcatagttaatctgcgtgatagttaatcac

SEQ ID NO: 42246 - DNA, 30 bp, Homo sapiens
  chr5:162886416-162886446
  hyper
ctaaattctctgcccgttattctatcccta

SEQ ID NO: 42247 - DNA, 30 bp, Homo sapiens
  chr5:162886937-162886967
  hyper
gcgcgcgtgcctggcggcacctgaacttca

SEQ ID NO: 42248 - DNA, 338 bp, Homo sapiens
  chr5:162887204-162887542
  hyper
tccctttgaatggccgtttacggcaccggcaggccccggatgaaagaactgaaatccagaaaagttcacatgcaacgaacaatgggacagaattggaaccagtgaagccggaactcactacaccgtcccctaagtgacgccaaaatgcactttctaacgtctccggagggaagtgcgcttgcgcaaatgctaggttacacttgagtaactccgggaatgactgggtgggtggggcggggaacagtaacggtctcctattggatggcagcctaaactcgcaggccagctaattggacgcaatcagaacccagcattctttcttcgtgttcctgtgcggg

SEQ ID NO: 42249 - DNA, 228 bp, Homo sapiens
  chr5:162930155-162930383
  hyper
aaacttctcattgggtattttcgagactactacggggaatcagctaccagcttactgccatgtggagaactgcacgagattccgggattggaatcaaaatgctaatttaaaaggtcaagtgaagctgctcctcacgttttggcgtgcctgcgctctctgcaggcagaagcgaacaaagacccagcaagagaaggcagaggctaagacccatcccgtatctgctctcct

SEQ ID NO: 42250 - DNA, 30 bp, Homo sapiens
  chr5:162930595-162930625
  hyper
tttagttactgacccggagaaccaggttat

SEQ ID NO: 42251 - DNA, 884 bp, Homo sapiens
  chr5:162931121-162932005
  hyper
tagaaaggtaagattacatcacgtgttgcgactagaaactttaaaccgaattcccagttaagagaaaaagtagtaagatgatcttggctgctcccccggccctcttcccgccctcttctttgttgtcccctgattatgcttgtttagcgctggggcagtcctcaaggattccctaaataaagccaaactaatgaacagtaatagcctgtgtttaaaaaaaaaaaaaatcggaacataagaaacctcaggctgtcttcgattactgttctagagaaactttatgtttacacgaataaggaaatgagtttttgttgggggttgaggaggaaggaaagtcatggtgttctgacgtggaaaacttctttaaaaggctgcttagtctttagtttgaaaataaaccaaaaaggtttaggagtcggggaaaggccctaggaaaatccagacagtggtcacgtttgtggacgacgtttagagcttgctatcctgggcacacaagaacccttggactgttcggtgcaaagttggcaaatcctacacggcctgtgccagggtttactttctgcatcaatttcacaggcgtccagcctggctgaggattttttgcggtttttaactggaagggaaataagtcggcatcagcacttagggctgcttaacttttaaaaggtggtagaacgcccagccttacacgctgctgcttaaattctcggtgctcaccaaggctgggctcgtgtggcccaatcctgcaatccccgaggcggtgtttcttaaagagtgggcttgattctggttaaacccattaagaagtcggaccccgggctcgtttcttgttctgtaattatgggtaaagtccaaggatctgcgttttgaagaggtacctaagt

SEQ ID NO: 42252 - DNA, 47 bp, Homo sapiens
  chr5:162932440-162932487
  hyper
tttcttttgtgtgtcgctttaagcatcggcgcgtgggctgggggcag

SEQ ID NO: 42253 - DNA, 1223 bp, Homo sapiens
  chr5:166405637-166406860
  hyper
tcctcaggctaaccctagagccgaactgaactctgagccgcccggggttcgcgcgctcagttcctggtcttggaaacgcccagctggggttctctctgcagacaaaggggtgcacgtgtccctagcgcccctctttctcagccgtgagcccctccctggctgcgtaccccgcagccacagcagctgcagccccagcgccaccacccaaccccggcggcctgggccggtgcgcgctctcggggcccagggattggctcgcactccccattcagggaccgcgagggctagcgggcggcgcacggcgctctgtgtgtgtgtgtgtgtgtgtgtgtgtgtgtgtgtgtttgtgtgtgcgcgcgcgcgcgtgtgttgtgcggcgcgcgggcgagcgcgtgtgtgcgcgcgagagctcgcgtgcaggagtcactgggtgtgcgtgcgtgtgttatgggtttgattccagagcaggttgcacattggtcctgggtggctcgcaggctcaggtcgtgcttgggcgtcctcctcctaatcgtttccgaagtagcagcagcagcaccaccaccagcagcagcagcagcagcagcagcagcagcagcagcagcagccgccgcggcaacatcgagctcagcggcacagcaggcagaactgtgcagaagcgagcaccgtttggggagtccggggggcgggtaagagggaggagggggaaagcctgtcttggtctttgggattattttttttccccttctttccctctctctctctttcttgagggtgtgtgttgccccctcgaagtgaaggaattttgctccaaagcgagctgggaccgaagactctaggctaagttatctatgtagatggtgtcagggagcgaagctactgaccgagctgctggtaaatgtttttcacttcttactctttaatgcttaaggcttttttccccttttctttctttcttgtttcctttctgttgctcctcattctgcaatcgctcctgaatcagctgcagttctctttctctccttgcgtttgtgcagtttacaacttgtttcatggttttctatgtatttttttttcctccttcatcctcagatgaatgctggaacatttaaattcggcacttcgggaggtcatcattagttgcatgagtttcagggggggaggggaaagattgctagagcagactgttatttccctgcagaaggactgccggtttctctctaatg

SEQ ID NO: 42254 - DNA, 30 bp, Homo sapiens; identical to SEQ ID NO: 4369
  chr5:167000730-167000760
  hyper

SEQ ID NO: 42255 - DNA, 30 bp, Homo sapiens; identical to SEQ ID NO: 4370
  chr5:167001108-167001138
  hyper

SEQ ID NO: 42256 - DNA, 224 bp, Homo sapiens; identical to SEQ ID NO: 4371
  chr5:167718507-167718731
  hyper

SEQ ID NO: 42257 - DNA, 378 bp, Homo sapiens; identical to SEQ ID NO: 4372
  chr5:167718951-167719329
  hyper

SEQ ID NO: 42258 - DNA, 30 bp, Homo sapiens
  chr5:167913737-167913767
  hyper
actgtgattttcagcggaatggagggtccc

SEQ ID NO: 42259 - DNA, 70 bp, Homo sapiens
  chr5:167956413-167956483
  hyper
cggacaaccgccgggacgaccacccagagccaccagagccccctgacacccgccccgaggcaccggtaac

SEQ ID NO: 42260 - DNA, 88 bp, Homo sapiens
  chr5:167956734-167956822
  hyper
ggcggtggacagcggcggggcggcgtggccaagagcaagagccgccgcaggaagggcgccatggtggtgtcggtggagccgcaccggc

SEQ ID NO: 42261 - DNA, 13 bp, Homo sapiens
  chr5:167956844-167956857
  hyper
cggggcggaggac

SEQ ID NO: 42262 - DNA, 30 bp, Homo sapiens
  chr5:168006746-168006776
  hyper
agcccgagatgcatcgcggcccctcctccg

SEQ ID NO: 42263 - DNA, 519 bp, Homo sapiens
  chr5:168727408-168727927
  hyper
agagactgcatccagggaggccgaggggaaaggacggatctggcgcctggggccccctcggtgggacccaggtgggtggcccgcgtggggtggggcaggggtactcacaggcgctcagcgttgcgggggatgccccgaggaaccgcgcggaggcccagcccgtggcagtccacgctggcagcggagcaggtacacttggtggggcaggcgacggctggaggcccactcaggacgctcgccagcgccaaggccagcgccaggcgggcgcgcacggcggcgccgacccctgcccacccgggggccatggtgtgcagggccccgctcctggaggaggctgcctctgcggggcaagacgcgtggagcccgaggaggcgcgcggggagcgcgggcggcctggggagcgggcggcggagttagcgcggaggaggggcgagctcggtgctcaggcgcacggggcgcgggcggagcggggcgctccgggcggcggcggcggcagcaacagcagctccatcggcgggg

SEQ ID NO: 42264 - DNA, 301 bp, Homo sapiens
  chr5:168727994-168728295
  hyper
cgcgggccgggttggggacctggggcgagcgcaatggggcgtggcgcccggggaggtccggcttggggctgggctggggagcgcggcggctgcggctggggcacggggcggccgggtgagctggccggcgctcgctctctccattcagtgagcacggcagacaccggagacgcggggcccacccctccggcccccccccgaccaagaaacgccaactccgcctcccattggctgcgccgcgcgtcatgtcgactaagttgggaactttgctggagcgaccgagagcctggagggaggaggc

SEQ ID NO: 42265 - DNA, 30 bp, Homo sapiens
  chr5:169010585-169010615
  hyper
tggagccacgtctgcgcctgcgcctgcgcc

SEQ ID NO: 42266 - DNA, 798 bp, Homo sapiens
  chr5:169064007-169064805
  hyper
aaactctctgcacttgcggtggtggtctggcgagccccaggtggggactggcctctgctccctcgcctggggaggagacaaagtgggagtggtccccaagttttgcgtgaagtggggtggggtggcgtgtcttagcctacggggcaccagccttctagtgtgcccctgcccaacgggagggaggagggagcggggagccccggcgagggaggagagggcgggccctgagaggagtttgaaaagaggaaggaagtggggccctgcggcgcccagccaccccctgacggcttccccacgggaggacgcgaggccccggcccagccatggccccctggcgcaaagctgacaaggagcggcacggcgtgggtaggtgcgggccccagggcgcggcagggagcgggacaggtggcgggagagccgcgagcaggaggatgctgcggggccggcggcgcggggtgggcagggcgcgctgcctgcaggtcagagggcgcagcctgcggcggggcctcggggcgggaaagccgaggctcggggagaggacggcgggaccccaccccgcaggctaagcacagccctcgccctctcgcctgctgagggaaccttagacatttccgagatagggtcaagacctgcgcttgacaactcagttcttcgcgccaaactcggcgtccccaggagtgccccagctcgccgcgtgggagacttggccttgtagagggagctccactctcccctggctcagccttggcctgcccaccatgcatacttccaccccctccaaagcgacacccatttgcc

SEQ ID NO: 42267 - DNA, 63 bp, Homo sapiens; identical to SEQ ID NO: 4376
  chr5:169930890-169930953
  hyper

SEQ ID NO: 42268 - DNA, 25 bp, Homo sapiens
  chr5:169931353-169931378
  hyper
cgcggggagcggctagccctgagtc

SEQ ID NO: 42269 - DNA, 435 bp, Homo sapiens; identical to SEQ ID NO: 4378
  chr5:170108014-170108449
  hyper

SEQ ID NO: 42270 - DNA, 30 bp, Homo sapiens; identical to SEQ ID NO: 4379
  chr5:170288990-170289020
  hyper

SEQ ID NO: 42271 - DNA, 138 bp, Homo sapiens
  chr5:170289638-170289776
  hyper
gcctcttcggaggaggaaacccgggccgggcgcgggcgcgggcgcggacgcgaggatcgcagaggctacgaagatgggacgcgtgcttgtatatcctcgggctgctctgacatccccgttcagttattcagcaaacat

SEQ ID NO: 42272 - DNA, 157 bp, Homo sapiens
  chr5:170736006-170736163
  hyper
gctctaatatccgccgcccattatccctgctaataaatttgacctattgttcgtttgttaaaatgatgtcaccttggaacagtccctaagctcctatttccatgaattaggcctttattgaaagccgggagccaatgagaggagagaggcttgttga

SEQ ID NO: 42273 - DNA, 115 bp, Homo sapiens; identical to SEQ ID NO: 4382
  chr5:170736715-170736830
  hyper

SEQ ID NO: 42274 - DNA, 582 bp, Homo sapiens; identical to SEQ ID NO: 4383
  chr5:170737281-170737863
  hyper

SEQ ID NO: 42275 - DNA, 754 bp, Homo sapiens
  chr5:170737935-170738689
  hyper
cgtctggaaaggggttcaagacaggccctgggcgaactggatgagactgacccagcccccgggcgtcgtgcgggtggtgcagagccagcctgctcacccgcggaccccagcgaccccggttcccgcagggccaagtcagttacacataggccctgcccttgctatctggcgaaaggaacaatctttattgttggtgaagccacaatacccgggcgtgcaggtgggcggcgggcagagtcccctcctggagaccctctggcacacaacaaaaacaaatgatcctaaccggctccctggatataagagcctcgggcgtaaagcgcgggctgggaggcagacgggttctgcgcctcgaggctcccggatggcctcggctcccgggagggccggggccccgccggcggccccgcggtgccgggtgcatgacggtactgtccctctccctcccccggtgcaggcggcagacggcggaggagcgggaggcggagcggcagcaggcgagccggctcatgctgcagctgcaacacgacgccttccaaaagagcctcaacgactccatccagcctgacccgctctgtctgcacaactcgtcactctttgctctgcagaatctgcagccctgggaggaggatagttccaaggttcccgctgtcacctccctggtgtgagcccaccagcgcgcaccgtcgccacggatcgccgcccccacccagccgggcgccccggaccccccaggcgggctgcgggggaaccg

SEQ ID NO: 42276 - DNA, 1161 bp, Homo sapiens
  chr5:170738823-170739984
  hyper
cgccccaggcccgggcctgacaagaaagcgccttacgtttctccgccccccgcccgcaccccccgggccgggcgcctgtattatactttgtacttttgcccaaacgtgtaaataataaaaaagttttggcttttttctttagaaaccggccacctgcttcccccgcgggggccgctggaggaagggcagccgacccggccgctgggggaagtgccaggggcccggggcaccctgcgtttaggctgggtccactcttcttcttttccgttccttttatttaagtctttttatttaataaaaaagttagctatttcacttaacgccgcttttatttcgttttcgttccaataatgctcggcgacccccggccctgcgccccacccctgcggcggtagaagccgagcggcggcgcgcagggcgcgtccacttccgcaacgttcgtctgcattcgcctcggctgcaaccccggcccgggcccccgaggaggatgcgcggtgcaggtcagttggtgccggccacccgcagcctgggtgcgcacgggatggggactggacatgggaaaggtgctccaggcccgaaggccgcgggccagcgccggggcgggctggggagtgaaaggctgggcctgggcagatgcctaggccgtccccaggtcaaatccacctggggggtgggaggcagggtggcctcgaacttcttagagctcaagtcggaactcggagccccacttcaccccgcaactcgctttccgccctctttttcccgcggagcctcagagaggacctggctctggccagtctgcgcgcgctgtgggcaggctttgcgcgcagagccgctgcaaatcctcggtctccaaacgcctggggagcaaatgcagcgcacaaccctaggggccctctccttgtcgggtttgcgtgggaccccaggtggagcgtgacgtcatgtgacgtcaccgcagcccccgcggtgtcactgggctggagtgggcggggcgcccggaactcagaactctaagcgctggtgtggtagcgtcgtggccggggtccacccagctccaccgtggctcaagagctggaagtttcagaattgcgaggtttggagcggctgaccccttccagtcacatctaacacacaaagcccgtgaacacttcctctagttct

SEQ ID NO: 42277 - DNA, 507 bp, Homo sapiens
  chr5:170740574-170741081
  hyper
cgtgctccgagccttcgttctatgcgggctgcgggactgtattcacctgcagggctggaggaaggggagggcgcctgagaaacaccttgaacccccagcgctcccgccgtcacctccacctccaagcccagctagcctgggatctgcgcctttcaggacataaagacacccagggagggactagggtgactcagaacttcgggtctcttccgtgagtgttttcctgaaatgcttttattttctccaataaaaagcctgatgaacgccgtcatcgggttgggaaaggttggcccttcggctgaggactagagggacccttgactttgctggcggagaagcgctttcctcagagacgggtgtcgcggtccagctcccttccgttccgttttattctgttgctccataataaggcctagcggggttttttttcttaattgtttttatttcaacgcgcttttggggaacagatggtcaggtggcgtttggttacatgaataagttctttag

SEQ ID NO: 42278 - DNA, 593 bp, Homo sapiens
  chr5:170741682-170742275
  hyper
ggcgtccaggcaggccgggggtggggggccggtctggcttcggccctcggggggcgcctggctttcccgcacctagtgccttcgcggcgtttggcgtcttccagcgctttgccctcacccagccttgcccagccagagacgggctacgggtcttttcctgttacagagctgagcccactcatgtggtgccaagtagcgactatctctcggccacctccacccagagcaatgtgggcgcccccagcgggtgggagcgattgccgagcggcgcaagggcgtttaacgcctaaccccctcctcctgggttgccaagccgctaggtcgccgtttccaacgtggctgcgcgggactgaagtccgacgactcctcgtcctcagtaggagacacacctcccactgcccccagccacgcgagctatgggcagaatcggggcaacggtaatatctggatggggcaggctcccctgaggctgtgcttaagaaaaaaggaatctggagtagcctgaggggccccacgagggggcctcctttgcgatcgtctcccagccttaggccaaggctacggaggcaggcggccgagtgttggcgcccagc

SEQ ID NO: 42279 - DNA, 213 bp, Homo sapiens
  chr5:170742386-170742599
  hyper
cgcccattttacagatgcagggcagggagacaagaggcatctccgggggccgagtagaatgatggcgcgggttctcccggcgccctgatttcgaggctgcgcccggggccctacatgcaggcggggaggcctgggccgaaggcgtctgcaaggaggggcgagtctgcccggtccgggcagggagtgaggccacagtcagttctccctaggagg

SEQ ID NO: 42280 - DNA, 149 bp, Homo sapiens
  chr5:170742672-170742821
  hyper
cgccgaaaactctggggccggccgctcgcttcccgctagtgggaatggtttccggtcatccgttcccagtccagccccgggtagggagctctgatttgcaatgcacagcacttgcgaggttcgaatgcccccgcaatttgcagatggaa

SEQ ID NO: 42281 - DNA, 359 bp, Homo sapiens
  chr5:170743120-170743479
  hyper
aaaggaaaaaaagaaaaagaaagtaagcttcaaagaagctctgataatagttctgggtcgtgcagcggtggcggccccgcgctctcgcccctaaagcaagcgctctttgtactgggtggaggagctttgagtagtgagggtggagatgcagcttcggggtggcgcagccaccctgacactaggcccggggtcgcagtgggacagaagagtctgccgctctgacttgggctctgagttccaagggcgcccggcacttctagcctcccaggcttgcgcgctggcgcctttgccatccgtgccgaagtggggagacctagccgcgaccaccacgagcgcagcggtgacacccagaggtccca

SEQ ID NO: 42282 - DNA, 452 bp, Homo sapiens
  chr5:170743646-170744098
  hyper
cgcggccgggccaggcgctctggaatagcgatggggggacacggcctccaactttctgcagagaccatcgggcagctccgggcctaagcagcgacctcaccgaaggttcctgggaacctttgccaaaatcccagcctctgcctcggtccagctaaaccgtgtgtaaacaagtgcaccaaggccgcagagcggctggtgtggtgcaggcgcctgcgttctggagtagtgaaggttcctccacagggaaggcggttttccttccgtgaaattcgaaattcagccccccagttccaagcgcctgctccgttaatagcatctactctcagcgacgcccagacccaggctgtgcactgtcttggctcagacactggcaaagtcctcgagaaattgccttggtgatcggtgccttccctcgggccacccagccgccggtggcacggagtcttccgcgc

SEQ ID NO: 42283 - DNA, 30 bp, Homo sapiens
  chr5:170764137-170764167
  hyper
cgagtgccctctgccgtaacttgggaaacc

SEQ ID NO: 42284 - DNA, 30 bp, Homo sapiens
  chr5:170814525-170814555
  hyper
tggcgggaggccggcgcgcttgagcgggag

SEQ ID NO: 42285 - DNA, 30 bp, Homo sapiens; identical to SEQ ID NO: 4390
  chr5:170819918-170819948
  hyper

SEQ ID NO: 42286 - DNA, 30 bp, Homo sapiens; identical to SEQ ID NO: 4391
  chr5:170834697-170834727
  hyper

SEQ ID NO: 42287 - DNA, 30 bp, Homo sapiens; identical to SEQ ID NO: 4392
  chr5:170837529-170837559
  hyper

SEQ ID NO: 42288 - DNA, 30 bp, Homo sapiens; identical to SEQ ID NO: 4393
  chr5:170837858-170837888
  hyper

SEQ ID NO: 42289 - DNA, 781 bp, Homo sapiens
  chr5:170845700-170846481
  hyper
atggggccctggttaaaggaacgaagctgcctagtatgcaaacggaggcaagtcttagtccggttttgggaggaggccggaagagggcctcagcgtggtcgctgaccagagtcctgctggctgctccccggcgtgcagccgtccgtgctggggttgcagtgacgtctcggggccgcttggtggtagccgtgtgtttccaaagctggctcgcctacgggagagtccagctgggatcccgtgaaccgaccccagagccccggagggggcgaggggtgggaaggagagatgcccgggagcccccttcgcagcggcagggacgtaagaagaggacgggggctcacttaagtgggtagccagtcaagagggtggctgggaaactccacgatcgcagggcgggtaaaagcgacccccattcagtggagccgccccggggctgggtttgacccgcccctctcggctctccactagagcgctggtgagtgagtgcgagtagcgaatgtgggcaggtgaggacgttccgtacctaactgcgttcttggggagcatcgcctgcccaatttgggcaacgtttgcgcggaggagcggtcactgcgctcgggcgcagagctccgacggcttccagcgctcaccagcttcagtctcgcgggtcctgcccctttggagctgccggtcccgtctccgagagtctgagcgcctcccctccaaccccgagccgccaggagaaggaggaggaggcagcgagaggccgcggcaggcaggcgagcaggcagggccgcctttg

SEQ ID NO: 42290 - DNA, 112 bp, Homo sapiens
  chr5:170846695-170846807
  hyper
atgagccggcgggcgcccagacggagcggccgtgacgctttcgcgctgcagccgcgcgccccgaccccggagcgctgacccctggccccacgcagctccgcgcccgggccgg

SEQ ID NO: 42291 - DNA, 308 bp, Homo sapiens; identical to SEQ ID NO: 4395
  chr5:170847119-170847427
  hyper

SEQ ID NO: 42292 - DNA, 30 bp, Homo sapiens; identical to SEQ ID NO: 4396
  chr5:171022582-171022612
  hyper

SEQ ID NO: 42293 - DNA, 31 bp, Homo sapiens; identical to SEQ ID NO: 4397
  chr5:171533959-171533990
  hyper

SEQ ID NO: 42294 - DNA, 86 bp, Homo sapiens
  chr5:171541757-171541843
  hyper
attacaggcgtgagccaccgcacccggccggttatttttattttcttccgttttttaggaacctagagacgcgtgcccatttgata

SEQ ID NO: 42295 - DNA, 30 bp, Homo sapiens
  chr5:171615041-171615071
  hyper
gccatggccgggggcgcggtggcgccggct

SEQ ID NO: 42296 - DNA, 30 bp, Homo sapiens
  chr5:171615457-171615487
  hyper
gctccgcccgtcgccgcagggcactctgga

SEQ ID NO: 42297 - DNA, 30 bp, Homo sapiens
  chr5:171615923-171615953
  hyper
gggctccccgtccacgatccacaaacctgc

SEQ ID NO: 42298 - DNA, 31 bp, Homo sapiens; identical to SEQ ID NO: 4398
  chr5:172043001-172043032
  hyper

SEQ ID NO: 42299 - DNA, 22 bp, Homo sapiens
  chr5:172068127-172068149
  hyper
actttcaaaagatgcggcggcc

SEQ ID NO: 42300 - DNA, 225 bp, Homo sapiens
  chr5:172068482-172068707
  hyper
tctcctccgggggacccgctgggtgactctggagagctaccccacggcccttggagccctcggctcgcagcgggctggagtctccggtacctcccggacctcagctcggcgcgcgccccgcggctgggctttgcgccccgggagggcgggtaccgcgtcctggttaccttggggaccccagtcctcattctcccggctttggccagatgcgcaaaaagggccgct

SEQ ID NO: 42301 - DNA, 31 bp, Homo sapiens; identical to SEQ ID NO: 4400
  chr5:172070427-172070458
  hyper

SEQ ID NO: 42302 - DNA, 162 bp, Homo sapiens
  chr5:172197153-172197315
  hyper
acctactaacctgatcgtagagtggggtactgcaggaactgcacccagattccgcgctgtcagggacgctagtactcaggggaaggctgagccccatgggggtcgactgtttgctgcacagctccgggcaggaagccgaaaacgcttcgtatcctcctggga

SEQ ID NO: 42303 - DNA, 619 bp, Homo sapiens
  chr5:172198698-172199317
  hyper
ctcatcactaacaggcggggaaactgaggttccccaggcgaagcgactgacttgcccagaaccacactactggggtgggggcagcaaataggcgcctaagatgaagtttagagaaaaatgaacaactctgccgatagaaaagtcgtccctaccaagaccgactcgagcgagttggggcggagaggttcagggcaatgctttcctgtttcccagacttttctttaaggtggctttaaaatatctacatttgccatgaaagtgtgagcaagcaaactcccaccgggaaataatgctattcctagtcttgtggcccccggaagacttggagccaagggaggcaggtcagggggctgaaatcccggtgaggggtcgcaaggccccgcagtggattccagggtttggcgtttggaggggtgaggggcgacccgcagcgcgactcgacggcgccccccaggggccgcccgacacgtttctgtcaccttggctccagactgagcttctccatccctttctttattatacaaataggcagtatacacagtgagcgcccactaagcgctgggctgggggcctccaacccggaacagaagccggccacaaccctcgctccctgtcgtcg

SEQ ID NO: 42304 - DNA, 154 bp, Homo sapiens; identical to SEQ ID NO: 4402
  chr5:172234353-172234507
  hyper

SEQ ID NO: 42305 - DNA, 31 bp, Homo sapiens; identical to SEQ ID NO: 4403
  chr5:172359606-172359637
  hyper

SEQ ID NO: 42306 - DNA, 447 bp, Homo sapiens; identical to SEQ ID NO: 4404
  chr5:172385501-172385948
  hyper

SEQ ID NO: 42307 - DNA, 164 bp, Homo sapiens
  chr5:172386282-172386446
  hyper
ttgtactcactggcatcgccctcccggggccgccaggaatgaggcactgagatcccaccccaagccgctgggggcgccattcgacttcgctcctacggaaatggggcttcgatgtctttctgcgcttgcgcggcacggaaactcacttccggccctgcgcactc

SEQ ID NO: 42308 - DNA, 30 bp, Homo sapiens; identical to SEQ ID NO: 4405
  chr5:172410474-172410504
  hyper

SEQ ID NO: 42309 - DNA, 103 bp, Homo sapiens
  chr5:172444178-172444281
  hyper
ggaaatttaaagtcctgaaagcgtgaaaggagactgctgtagtgatatatccacttacccttagaaagtgattccctgctgggcgtggtggctcacccctgta

SEQ ID NO: 42310 - DNA, 30 bp, Homo sapiens
  chr5:172482708-172482738
  hyper
acgaccatgtgtcacggaggtttgtttgtc

SEQ ID NO: 42311 - DNA, 36 bp, Homo sapiens
  chr5:172483116-172483152
  hyper
gtgctgccgggtatcgcagacggcccacgcccacac

SEQ ID NO: 42312 - DNA, 30 bp, Homo sapiens
  chr5:172484088-172484118
  hyper
aggggcctccctcccgggatttgtttatat

SEQ ID NO: 42313 - DNA, 30 bp, Homo sapiens; identical to SEQ ID NO: 4407
  chr5:172571551-172571581
  hyper

SEQ ID NO: 42314 - DNA, 30 bp, Homo sapiens
  chr5:172571819-172571849
  hyper
tttccgggtgccgccggatctcccatcccc

SEQ ID NO: 42315 - DNA, 802 bp, Homo sapiens
  chr5:172655932-172656734
  hyper
accgcgtgatgtttccgagtcagcggtgaaacctgcggcttccgcgcgtcctttaaaaatacaggtatttagatacacaccgtggcgtcgacttaaggtgaaatctaaacaaaatgaaaggacgggagctattctgatttggccgaacctgtgcctgcgggctgggaatgacccaaggaaacgaagggacggcggagccagtgcggcgggggccgggtgggaggcggtggcctcgtgctggggacccccagccccggctcgcctttgccgggaaccaccaagctaatttttttccctttcttttttaaataaacctaccttccttcccccattttttccttttaatatcgctgtttatctccattttttttaactgcggcgtgttcttgttcgattttaaaaaatactaaaaataaaatgagtcccctaggtgcctccctggcgccctaggcatggagagctcatgcctgcgccaccctcatctccgctggctttgccacctcggaggcgccccacacttctcctttgttttgcttttctctgagccggttgagttttcttaccctgaatgcgtcgtttatacaattagcaactgaacacagaacaaatatcaccgatataattggggtgggggtcgccatgtaaacacggggtgttgttactttaggatacttctgaccctgtcccggcctgagtcctcgctccctgactcagcatccacgcaggaaagcctcgccccagccaggcaagggcagtccctgccggctccttgagttctgccgtctacagcttgccccatcat

SEQ ID NO: 42316 - DNA, 30 bp, Homo sapiens
  chr5:172659204-172659234
  hyper
gagatagcaaaggcccgggcgcccggccct

SEQ ID NO: 42317 - DNA, 488 bp, Homo sapiens
  chr5:172659537-172660025
  hyper
gatcggtcagggtcgcgccacgcgggtcccttccctaccaggctcggataccatgcagcgtggacactcccgagttgctctgcggaatcccggggctctgaaccgcattcaagtccccgacgccgaagttcacgaagttgttgttggcggcggcagtggccggctgcgctggggaaggcccggcggggtaagcggcagtgcagctgtagccagggctgcaggccgcgccgccgtaacccggataggcggggtaggcgttataaccgtagggattgaggcccacgccgtaggcaggcgcgtagggcgccgagtcccctaggcatggcttgccatcgcgcaccagcactggcaccgcgatcctgcgggcaggcggcggcggcggcgggggcagccccaccagctccagagtctggtcctgccgctgccgcttgcacttgtagcgccggttctggaaccagatcttgacctgcgtggacgtgagtttcagc

SEQ ID NO: 42318 - DNA, 75 bp, Homo sapiens
  chr5:172660141-172660216
  hyper
cgcccggggccgctccgcgttgtccgcctctgtcttctccagctccaccgccttctgcagcgcgcacagctctga

SEQ ID NO: 42319 - DNA, 30 bp, Homo sapiens
  chr5:172661472-172661502
  hyper
cccaggagcagagccgaagccgcccggggc

SEQ ID NO: 42320 - DNA, 197 bp, Homo sapiens
  chr5:172661788-172661985
  hyper
ggtcgctgtaggcacgtggatagaaggcgggggcggcgggaaaggcagacgcacacttggccggtgaaggcgcgcggcccagctctgcgcgcagctctgggaggcccggcgcagccgcctcgggcccagcgtaggcctctggcttgaaggcggccagcatgcaggaggagggcgccagggtcgcctccaggcgggca

SEQ ID NO: 42321 - DNA, 579 bp, Homo sapiens
  chr5:172664025-172664604
  hyper
cttctaggcgccagccgtcagtaacaggcctgggctgccacgccgaaatcacgcctcgagtttctgagccagggactactgggggtctggaattgttagtctagtctgtggaggatgccttttcttaaatgtggggcgttcaaggcccaggaaacctcgtccccccacctcttcacctcccaacccaaattctccttggacggagctgcatgtcagcggccttgcggcccttcctcgcctggacttttggccacgttaccgttatggctgtaaattaacctagcttgggggcccgccttgcctttgaagattgttttcgagcgcgggcgggggggggtgtcgttggagaggatgcctatcgccgaggcggtgacgtctggcaaacgagccacatccgattcaattaaatgtctcgctgaaaagagctcggaacgagggtcctgggagcgctgttaagtgaatctgctggccaggcggctcgcgatgacagtttgaaagattagtgtgagcggacgcctgaaatattaccgtttaatgggggacatcgaggctacatccgggatccctgtttttagtaag

SEQ ID NO: 42322 - DNA, 856 bp, Homo sapiens
  chr5:172665285-172666141
  hyper
aatccaaattccagggtggctcgagcgcattctccgtgaataaattattattaattgaaaagcgatcggcgcagccggagccggcccccctttcgtgcaatcagcagggctggtcgcaaaaggtatatatgattaattgaaagataagctggaactatcaccgggaatgtcattaatgcgctggggagacgtccattggagacaggcggcgttatccgcggctttatcttcaacaacgcctcgctctcggcccgcgcgggggaaacagatgggagtttctgtctgggacgctcgccccatgtttatattttgggaagaatcgcaactcgtgggagtccccggctggccccctgataaatgaacattagcactttttcggactactgtatcaacaaaggggctgcggcgctgcaataattggcgagaaagcaaacagagggccgagagcgcgactctgctcttcgtccggctgatggatgagcagctccggctgcgcgccggactcccggcctcggcctccgcctccgcctccgcctccgcctccgcgctgggcccctccgccgcccggcttccttcctggccgggagttgggggcggggggcgactctgagggccgccgacctcgcccttggctccggaagagtccaggcggcctccgcggcaccggatttttcctgcctcgggactcgcctcattcaggtggctcagctggcaccaaatccttctcatttccacgcttgttcagtgcccacggggtgtgccaggcgctctcacggatctcgtcacggatcctcttattccgactgcaggcctgaggagaatgaggttcagagacgtggagtaagttgctcagggt

SEQ ID NO: 42323 - DNA, 220 bp, Homo sapiens
  chr5:172670863-172671083
  hyper
cttccggtgtcctttcgcgttaatttcgtcctcttttcttctctgggctggggctggtggctgccacatcccaccccttctgccccgacggctgcaaaccgcttcagccaaaacgggcggagaggcggagagaatcgagacgctggaatcagttcctcggagtcccgtcgctggaggtcacagctgggaaaatcaggtgacattcgagtcagatggacaa

SEQ ID NO: 42324 - DNA, 122 bp, Homo sapiens
  chr5:172671639-172671761
  hyper
cgcaagcggtgtctgtggagagcctcccgggggcatggcacgggggacccggaggccaacaagctgcgcgataccggagcaaagtcgggatcagcagccgcctttcgcggagggcgttctgc

SEQ ID NO: 42325 - DNA, 630 bp, Homo sapiens
  chr5:172672262-172672892
  hyper
tgggattacaggcgtgagccatggcgcccggcctgatgtgctttaaattcgctaaaacgacacgggtacacacaggcgccctaagtgcacagtcactttctctgtgtgtgcgtgttttacgcgcatacggtgaaaaaaaactttccaagggcacagaagaccatactgtgggtgcccctcgccgcccccagcgtccctgccgcactctggagctgctctgggaacacacacgtttgtgcactctaagcgtcagtgtgtttttgctttccccgcgccgaattgtgcgtcgcctgtgcagaccctccgttgtgtggccttgtgtctttaggcagggaacatcttttgtctctccgcaagaagctttcctccaggaaagataaagtaatcgatagggtcttttaaatagctccgcgtttcctgtcgggagaggagtatcagcgcgcgcaccaaatctgctctggtatgtcaccttatctctcgtccccgctgttgtccccaaacgccgcctgtcaaaggagacgccacccgcattaggacctagactggggcccttccgctcggggtcaggcgcagcgccctcggcttgggccccgccgcccctttaggggtccgggagggtggagagaaggg

SEQ ID NO: 42326 - DNA, 63 bp, Homo sapiens
  chr5:172672960-172673023
  hyper
cgctgaaaccggcccatctgggagaaatattagggcgcatgtctctcccggagggcttccttt

SEQ ID NO: 42327 - DNA, 322 bp, Homo sapiens
  chr5:172710793-172711115
  hyper
ggtttgaaggtgccccatgggcgggcgcggacgtgtggttgctccagtgtttcctagagcactctcagccacgcccccgccaccccagcggcgctgcaggaaccagcccgccgccagcgcgaaggtgagaccgggcgccacgtgcttacccggcggcctccggaaccagccctgcccgccggctgtgcgcggatgcctgcagacgccgagctgctgcccccgtgtggcctggtgcgggggctcctcctgctcactgggggcgcgtcccggtaaaccagaacctcagcccatcaactcactcgtggggttactgaggaggaga

SEQ ID NO: 42328 - DNA, 31 bp, Homo sapiens; identical to SEQ ID NO: 4414
  chr5:172721108-172721139
  hyper

SEQ ID NO: 42329 - DNA, 765 bp, Homo sapiens
  chr5:172754197-172754962
  hyper
ccagctcgtgcggtgagcgcacgcacgccgccgctgccgcgttcacacggccccccaaagtcgggggaggggtcgtggagcgaaggagctgtaggcagattttctttctctttccgagctgggaaaagggccagccccgtgccctgcacgcctggctctgctttgcagcttgccggtgagccaagagccggtagagcagaggaggcgcacggttcgggtcgtgtcaccatttcttggcttgctgacctggccaggagctggggatggcggcagcaccgcggaggtacgctttgcgctgccctcacgctcccttccgaaagcagtgcccccagggggaaagttcgcaatgccatttgtctcgccggcaaagttctgggatgtcgggcatcttttgaggagggggaagacgcggcacccttactgaggccggcaggccaggaagagaagttctccgggcgcagggcgcagcccagctccggggaccctctgggcctcccgcgtgccggccgggatgaagcgcgctttgcaccggacccgggattcgggggcgggggctggcgctggcagcgtcagacgctgcttcatttcccctcgaccctggggaggacagcaacaagtcctgccccagccatttcatcaccctgctagcacgtgcagattccgggccctcggagcccggcgcggacctcgccttgcctcgcgcttccctttgcacgtcccgtgccatcccaagagtttgcgtggccctgggtgggcgcctggctc

SEQ ID NO: 42330 - DNA, 392 bp, Homo sapiens; identical to SEQ ID NO: 4416
  chr5:172754985-172755377
  hyper

SEQ ID NO: 42331 - DNA, 142 bp, Homo sapiens; identical to SEQ ID NO: 4417
  chr5:172755420-172755562
  hyper

SEQ ID NO: 42332 - DNA, 283 bp, Homo sapiens; identical to SEQ ID NO: 4418
  chr5:172755594-172755877
  hyper

SEQ ID NO: 42333 - DNA, 379 bp, Homo sapiens
  chr5:172756194-172756573
  hyper
caaggcagccctgagtcagcccgccgcggagcatcgcgtgcccggaggccagagcttgaaaggcaactttacgcgtctccaaacacactcctgcattttctcaaagcgctgctcgccaccccgctccgggttcccttttactctccagtcatccgatggaagtggtgagaacaaaaacaaagacaaaaaagctaaatccggggaagttatctccatctcctcccttttcttgttcggccccctccccaagaaccgccgggtcgggatagcccccggctactttctcacccggcccgtggagggaaggagaaagttgggcgccgcttggagcgcctcttcccctgctgtgtgtgtacgtgtgcacgctcacgtctccccc

SEQ ID NO: 42334 - DNA, 295 bp, Homo sapiens
  chr5:172756854-172757149
  hyper
ggcgacgcggccctgggtctccgcggcggggcgcactgcccgcctggttggggccgccatgtgacacggctgggggagggggcgaggagacacgcgggcaggtcatcttttggccggcgcttgacttccaaagctttcctttcccgtgtcccggctgcacgcgggagtggggaaggcggaggcggggggccaggatggccacggctggccgcagctatccggcgtgtcgagctctcctgagtcggaaggaaggagaggagggggtggggagggcgtcttcagagtgggcttcccc

SEQ ID NO: 42335 - DNA, 73 bp, Homo sapiens
  chr5:173043699-173043772
  hyper
tttgcattgtggggcgggaagttttctgtggccatctccggcgttctttataggcagcggcctagccgagaga

SEQ ID NO: 42336 - DNA, 249 bp, Homo sapiens
  chr5:173314917-173315166
  hyper
ccttctcattcatccgcggtttcacgggccgccacttcgatctccaacaccttgaccgtatgccttcgtgagcgaggaatccgttctccttgacacgtccctattgctcctcctgcaaagcccagttagggaagagaaatatcaaaggagtcccttgcccacacaaaagatggcgacctgctgcgctcactctgggtgggggaagcgggttccaggcgccgggcctcactaggcgaggcgcagacggaa

SEQ ID NO: 42337 - DNA, 30 bp, Homo sapiens; identical to SEQ ID NO: 4422
  chr5:173345560-173345590
  hyper

SEQ ID NO: 42338 - DNA, 543 bp, Homo sapiens
  chr5:173738806-173739349
  hyper
cgctgcactggacgctgggaagactttcaccgcagagcgggggctgctggaggggcgggtgggctgcggcccggcggcggcggatgcctgtctctgccgaagccgaaggaaggctgcgtgggcagatcttccagctaggcccagagggacggccgacattcaacccgccagtcaaaggagggaagggctggcggcaggagcagctcaggaggcagacccgggcgcgcgggggcgcgggggctcgggggcctgtgagggatccccggacgggcagctgcggggtgcgggccgggctgcaccgcgacaaaggcggcccagcggcggcatcggaggacgcacgctgccccctggtggccaggccgctccccgcaaacgcgagctcctttgttttgcggtcccggcttctgcggcccaggcttgctggagagagtctgaagccccggcttccagagcgggtggccacgatgccagggccgcgcagggaacctggtgagccgagggtcgagtcccagccctgcagctcgctggcggcaagggccggct

SEQ ID NO: 42339 - DNA, 513 bp, Homo sapiens
  chr5:174115355-174115868
  hyper
ggaagggatgccctaccctcccgaaagaaataaaaatgtgatcactctcggcaccgtagtctctgatgagaacatttaatcaattagcattgccgttgccaaaacttgcttcccaccgagcccaaaagccgccggcggcacatcccagcggcctccctcctcccgggctgggattcgcctctgcaagaaacgtcatgttttctctcccagacatcgttccgggagccccagatgtaaaatcagaggtctcttatctggcattattgatctctgtgctaataaaatgtcagtccccaagggaaaacttaaaaaaagaatcgtgctgtcatctctgttcctgcggggacaggcacccatttgtcggctcacttcattgctccgtcggccgggctactatttcagggctccctggaagagtaagtccctgaaatgggcagggacacgctttctatttcccctttcacaggggctctctggaattcaaggatgaacgaatgggaagaaatcaacagg

SEQ ID NO: 42340 - DNA, 709 bp, Homo sapiens
  chr5:174119641-174120350
  hyper
agaagaaaggcgagacgggcctcagaagaatttggatctgttgaaaaaggattttaggacaagaacgaaacaagacgcgttttcatgggaacgcaaacccagtaacttctcagagccagggcttcgcagagaaactgcatcaaaaggaaaagagtctggtcccaacctttatttctcccaaggcatgaaactcctgatttcaaaccacttctctttgcctctgaaagaaaacaagaaaaagatggggctgtgtagttcttccaacagtgaaaaaaagaaagaaaagagagaagaagaaaactgtttcgggtttcgaaacagaaagggcctccttcccctttatcgataattttgaaagggtcgctgtaagacactgactaatgacacgtgacctttggattctccacgaggcagcaggcgcgggccccgagcccagcggggacccctctgccagttaggggtcactctctccattcaacgctttattagccccctcaagtctcagggcgaagtcctgctgctttgagacgtttacagctttgattgaggaaagctattcagggctggggcgaggatctgtttgttttcaggaggaagcctctgtgagcctgccccctcccccctgtgtttccagagttgctggagagataaaagccatacctccttttgaccttcattggacagtaggagccccgactcagcgtggaat

SEQ ID NO: 42341 - DNA, 120 bp, Homo sapiens
  chr5:174147483-174147603
  hyper
ggggccttcagtaatctgcatcgtgcttttggcaaaagctccttctctccagccccggctcaaacccgggctcggtcctgactccggaccttagggggcgggaacaggagaacaggaaag

SEQ ID NO: 42342 - DNA, 357 bp, Homo sapiens
  chr5:174147864-174148221
  hyper
cctggcggatgttggcgcccgcgggtctgcctgcttctgatacccgggctcggtagaataggccgctaacgagctcccattaggaggaattgtcactcctctgggagcgagcttgtcccattagggcgaattgtcattcctcctggagcgaggttgtcccggctccgcgcaggctgagtgctggggccgagagcaattaacgcggctccggcgcgggcagccgcctctgccccgggcagcgggggcggggcagggcgggggcggggcgcccggcgcggctggagccggtcacccggcgcagccccttcccccggagcccgcctttcatctccccgcgcctggcgcctgcccgaagcc

SEQ ID NO: 42343 - DNA, 218 bp, Homo sapiens
  chr5:174149050-174149268
  hyper
ttttggagataaaaaaaaaaacgctggctggaggaagcaatttagagtgcccaaggtcactccgccaggaaaaggtgaataaaacgttctgaaaacgcagccaaagttggataaaatgcagacttggggctttccataaagggctagcgttgtgttgcggttccagccctttcccagcagaagtgagcccctttcccgatttgtctccacctcagcag

SEQ ID NO: 42344 - DNA, 824 bp, Homo sapiens
  chr5:174150697-174151521
  hyper
cccccattaccctccgaggcaaacactggcattcaaacacgcacgacaaacacaggctcaaacaaactcatgaatgcacacttgcactgtcttgagaaaaaggtcggatccggatcgcgctcagaaaggaggttcaggagacaagtacagagatttcaactttctaaaagtgcgctggatttgctttctagtgagagagatggggacaactgatttaaattcttcactccgaaccatttgggagagaggcactcctgaccacttctcgggctccttccggcccctcttttccaggggaaagagttgtaataataacagtgggcgcttttgagcgctggctagtggcgagttactcttctaagtgcatacatttctttcacagggatactggcctgtgagtttcagcaccgactttctggaactgtaaagtaagccaattttgacgcatagtaggggcttcgtaaatgtttctgcaatgctgtttgcgaatcttgaacttattctggcggtagagggagagtgggatgggcgcagggtcccttttaaagaagggtcaaaagagagaagaaatgggactcggcgaacttccgctttaaataatcgctcttaattaggtctcgggcttttcagtttcggcgtgattataacccttcagggatcgcctaataacaactctgctgactgctcctgtaattaactcctaatttatttcaaacaggaaaaaaaaaaaaaaaaaaaaaaaggagggggggcagccccttcgggaagagccaatcaggggcgagcgtctctggcgtcagcgccaggcccggcgcggattggcg

SEQ ID NO: 42345 - DNA, 1212 bp, Homo sapiens
  chr5:174151577-174152789
  hyper
cgtctccgcagcaaaaaagtttgagtcgccgctgccgggttgccagcggagtcgcgcgtcgggagctacgtagggcagagaagtcatggcttctccgtccaaaggcaatgacttgttttcgcccgacgaggagggcccagcagtggtggccggaccaggcccggggcctgggggcgccgagggggccgcggaggagcgccgcgtcaaggtctccagcctgcccttcagcgtggaggcgctcatgtccgacaagaagccgcccaaggaggcgtccccgctgccggccgaaagcgcctcggccggggccaccctgcggccactgctgctgtcggggcacggcgctcgggaagcgcacagccccgggccgctggtgaagcccttcgagaccgcctcggtcaagtcggaaaattcagaagatggagcggcgtggatgcaggaacccggccgatattcgccgccgccaagtgagtgcgcgccggggcaggagtaggaggtagcgcggggtactggagggagcggggggcgggtgttccagggctgagggtaccgagacccttctgcgtgcgctacactcccgggaaagcaagcccagggcctctggactcctgggtgcccggggcgttcggcgcgcccagtgcgccgtccgcatccaagacaccctctgggtaataaccgcgctgtgtgtgtctgagactccctcgacatacagattgttttttcaagagcgaaccccagctgggtttacggggtcgctcggtggtccgtttctacagccctcggccctgcgctctggccacttggcttgtttttgtttcactgttccccggagtctctgcctggggagtgaaggagttggatccatgttcagtgagcacttggatgtaccaggaacgagacaggttcaaaactcaaccctgagagttgtgcccccattttaaagatgagctaactgggcttagccagacattgaggagaaaccattttctttcgtgagtcccgcgggtgtcgaagccggatcccacgaagggatggtggcaccagggatggtggcatcagagtctggtgcggggaggaaatgtctctctgtggtctccgcagccagcacctccccggcaaggttctgagcttcgccgggagcgggctggggccagaagcgcacgggctcttcttggctcacagtaataattaaccgcattccagcagggcttgaga

SEQ ID NO: 42346 - DNA, 328 bp, Homo sapiens
  chr5:174159299-174159627
  hyper
ggagaaaagggctgcatcttgcgtggctggcgggttagactggaatccgtctggggaactgcgcaccatccccatcgctccagacgccgaaacaaaacctgaggctcggagaggggaaaaagagttgttcaggctcgaacatacgcatcccagcctcataggtggatggggttaccgagctgagaaccaagccggaggtccgcgaagccgggccgcccccttgctctgggcctcccttcaagcctgcagtctggggatgggttccgagtcaccgcggtccgggcctcggtcaggcttggtcgggcacacagggcgtttcagaggccag

SEQ ID NO: 42347 - DNA, 545 bp, Homo sapiens
  chr5:174162408-174162953
  hyper
gagcggtgcgcccagcgcagggggctcctagtcacctcgacccttccggcgcccttccctccttagctgcacctggcaagccagcaagggagtgacccttgcgcaggaagggggcgcgtcacccggtttccccatagaaccgtgggcgtcgcaggcgagaagggaagcgtccaggcgctcggccccttccgccccgcccgctgccggccgcccgtttgatgtcgcgggcccggcaggaatgcggccgggttatcaatcacccagctggatcccgaaggtctctgcctaatcacatttaattgctcgtggaggcccactctcgccccgggccggccgccgcgctcaattactccccaaatacctgccatcaataaatacgcactgacaccggcccggcccgctccaccggcacggaagatcgcagccgaccaggcgccctcctccctgccccttgtcccccatcattaaacttacacctcgacgcccaaagaagcaagccgagcagataataacagccccctgtaactgagcgcttcccaagtgcc

SEQ ID NO: 42348 - DNA, 618 bp, Homo sapiens
  chr5:174178089-174178707
  hyper
ctcctgcccccttccgaatcacagactccccgcagtcagagatggcgaagcctccaccgggtcacctcggccggcccccgggctcccccgaccccgccctggcagcgccccccgccgcgagctcccggggcggaggagccggctcggctttgattagcaacacttgcgggggccgcggcgcaccctgacagcccggcagctccgcgccaaaatggatgggtctcgggcggcgagggcacggatacaaatgcgccgccgcgttctcaggtacacaaatgcggcctcgggcgggcgctggttcccaggcgcacggaggcggcggccccttcaactcggggcgcgggcgggagcggaacccgcgttaattactgtacgtttccactgtaaagagtgtcagccggggagcggggccgccgcgcctgcccggccccggcgcacaaaagcttcatatattctgaatgaaggcgaatcgcagcctcggcctccttgaaaagagccgtgagggagacttaattctctccctttcagctgtgctcagactgtgaaatccacacaatcgcgcccttctctttaaagggagggagaagaggggccgcggccgcgcgccccgccatcagc

SEQ ID NO: 42349 - DNA, 89 bp, Homo sapiens
  chr5:174220727-174220816
  hyper
gttgaagtggggcggcggctcctcctcgcagaaaccctccgcagtcccctaccccagaaaggtttcccttccctccccttcccgcaggc

SEQ ID NO: 42350 - DNA, 205 bp, Homo sapiens
  chr5:174220856-174221061
  hyper
cgacgcgccacatggctggcaccggcgcgcccccgcgcggccgcctgcgagaagctcactctccgcggaggcgaaatctggttttgattcaattagattaagttcaggggcagggagggaggcttagtcccgggccctgcagggactataaaagagaagtttgaggctcgtggggtgggggacgggggcacgtggaggcagataa

SEQ ID NO: 42351 - DNA, 30 bp, Homo sapiens
  chr5:174728096-174728126
  hyper
acttgctgagtgacacgcaagtagatgagg

SEQ ID NO: 42352 - DNA, 140 bp, Homo sapiens
  chr5:174871274-174871414
  hyper
ttgcgggcgacagccgcacgtggtccccctggatggttctgcgggcgaggtgggcggaggacgccccggtgagtgcttgccctccctggttacctcgccagtctccggatccccgcgcagcacgcgcagggcccgcgagg

SEQ ID NO: 42353 - DNA, 30 bp, Homo sapiens; identical to SEQ ID NO: 4433
  chr5:174871621-174871651
  hyper

SEQ ID NO: 42354 - DNA, 30 bp, Homo sapiens; identical to SEQ ID NO: 4434
  chr5:174905603-174905633
  hyper

SEQ ID NO: 42355 - DNA, 30 bp, Homo sapiens; identical to SEQ ID NO: 4435
  chr5:174961182-174961212
  hyper

SEQ ID NO: 42356 - DNA, 619 bp, Homo sapiens
  chr5:175084695-175085314
  hyper
atctgcacaggtggcggttgcccggtcaagggcgggctcacaatctgcggggcggggagagggaaggagccagggagaaaagggagagaaagagggggcagtgtggcagaaaggaagaggaaggggcaagtgtcagagtcggcgagatgaggagggagggtgtaggagaaaggaaaatagaaagtgggtgagaccgtgggagagggagactgggggagaaaatgtgggcgtgtgcgcgctgagagagagagagagagagagagacttggagagggaaggaagggaaggagcgttgagagcaaggaggagcgagttgggggcggagacgaggaagtgggtgcgaggcgcggggcgcaggccgtgcgcgcgccgcccgctgcatccctgcccggagcgcagccggcgcgggcgcgggaccgaggcgaaccgggtgcggagccaatacccgcggcagcagcaccaggtaacgcggccgccgcctccccgcggggcctcggctcggggtggggtcccaggcgggcttggggacccggcgtgggctggcggagccgcccgaggggctgctcgggatccccggcggccgtcgtggccccgaacccgggttcgagcctcggcccca

SEQ ID NO: 42357 - DNA, 130 bp, Homo sapiens
  chr5:175085524-175085654
  hyper
cgaaacagtccccgttttgtctccgggtctgggtggtggcattttctcgcggcgatgtgtctgtcggagcatggagcaactttctgctaaagggaagccagcggagagcgggggctgctggggaggaggc

SEQ ID NO: 42358 - DNA, 30 bp, Homo sapiens; identical to SEQ ID NO: 4439
  chr5:175200386-175200416
  hyper

SEQ ID NO: 42359 - DNA, 159 bp, Homo sapiens; identical to SEQ ID NO: 4440
  chr5:175223588-175223747
  hyper

SEQ ID NO: 42360 - DNA, 114 bp, Homo sapiens; identical to SEQ ID NO: 4441
  chr5:175223835-175223949
  hyper

SEQ ID NO: 42361 - DNA, 461 bp, Homo sapiens; identical to SEQ ID NO: 4442
  chr5:175224441-175224902
  hyper

SEQ ID NO: 42362 - DNA, 1676 bp, Homo sapiens
  chr5:175298494-175300170
  hyper
atttcccatctggaaggggagcggtagaacgtcagggcccggctgaggggcgtgattggagggcgccttcggcagccgcccgcggcagaagccgcggctccagctcgcctggcggaattgcacgcggcggcgggagctggaatagcagaaggaaccacctcgtggagtcgggccggagccctgcagtggctcagacggttgcagggaccgccaggtcggtgctggccgagggccgggagggcggagctgggctgtgggcaacagggtcccggctctcgcctcgaggccttggggcagctcgggaagctggggagcacggctttcggggggacagctccccaaggctgcctgggcaccggatggggactgagaggcggtaaaggggacactcccgggtgcgctctccgtggtgctgaaaggacagctccttgcgaggggccgcgagcaggcagctagctgcgaactaagaggaagcgtgggccctagccggagactccgggcagagcccgaacggccggggtcccggagccaggaccgccccggctgcggcggagactcaagtctgaacccagagaacaactttgagctcgcgggagtgggggacgtcgatctaagctacttctggctgtgcttaacccgaagcccgccggagcacgcttcgccccggaggagggagtcgcccccaggggtacagtgcgcactcccggagtgagtcagagggcggcggcaggggggcggacagaccgcaggtggaggggaggagaacgtagacattgacaggggatgggggaccaaggggactatttgtccctttccgggaggagccgccgcttggacagcgcacgcccgccgcctggagtcttcgggaacgaccccttctgtgctctcgttctcgtcggcctcaatctgcccccttccccagcaaagtttgaaaccgggccgggtcttggggttggagctatgtgtgttgggggaaggggcgctctccgtggcccaccgggagatccaggacagagctgctgggggtgtgggtctccgcgggggtccgggagaggggcgccggggttcctgtcctctcttctggccgggaaacgggaacccccggccacttccgcttttcagccggagtcggctccctacctcctcccatcctccgctgcccctcccctcccccatgcgtctcccatcccgggccacggggtggggacggggcggggggagggggtggagtgacatcccctgtctctgccactgcctttggcgtagtcccctgccagaagcaaatgagtgttgaattgagttgcggtgaatatagcccagacttgaatcataaaaacagaaaaacggccataaggacaaccactgcaggttacccgagtcagcctgtcagatggcggggcccagtcccgaaaacctctaggggctcagatggtcgagcctgagtcggtgcttgggctgggacgggctcggagggagtcggagaggggaaggaagctgaaggcgcgccctgggtccccggcgcactgaaggtacggaaacctggtgctacgacggcatccctcgccgcccccggcctcccctcccccagcgcagcatcccccacccacccccactcccacccacccccaccctcaccccccttcccgcgcagggatagaccaaggcttcccgcagaa

SEQ ID NO: 42363 - DNA, 101 bp, Homo sapiens
  chr5:175300216-175300317
  hyper
cggcaacctgctggacctcagcactcccgcaggcatatggcaaaacatacacacacacacaccctgcacacacgcacgcactcacacgatgtctaagtcca

SEQ ID NO: 42364 - DNA, 31 bp, Homo sapiens; identical to SEQ ID NO: 4445
  chr5:175305777-175305808
  hyper

SEQ ID NO: 42365 - DNA, 30 bp, Homo sapiens
  chr5:175560553-175560583
  hyper
cttttcacctggtgcgccagcttgcaagtc

SEQ ID NO: 42366 - DNA, 30 bp, Homo sapiens
  chr5:175788707-175788737
  hyper
agccattgtgagagcggcggcgatttcgaa

SEQ ID NO: 42367 - DNA, 761 bp, Homo sapiens
  chr5:175792170-175792931
  hyper
cgatgcggcgttgggcgggttacttaactcctgggcctcggttttcccttctgcgtggtatcattgtaaggggtaacggagaaaagccgtgagctaacccctggtggatgctagcaagcaccgccgtctcccgtcctccccaggcacagcctctccttcctccaccctgcacctggcagggggaccggaggtccccgcgcgccggccagcgccccaccacccacgccgccgggtcccgggcggcctgccgtgacagcggcagtgcattgtggggcttgtagtgcgggactgggtctgggtgggtgggcgcggccgcagcagtcgcagcggggccatcttcggcgggcgagtgggctcggcctgtgcaacccgcacctgcgtccctcgcccggcccgatggcgccgcggccgctgggccccttggtgctggcgctgggcggcgccgcggcggtgctgggctcggtgctcttcatcctctggaagacctacttcggccgcggccgagagcggcgctgggaccggggagaggcctggtggggcgcggaggctgcccgcctccccgagtgggacgagtgggacgtgagtgccgggccgaggcctgcggaagggcgggcaggctgggctgcgactccgcgcatgtggccaaggggtgtgaccacggaacggccctgctggtgccgggagcttggggggtcgagggcttggcagccgcagcgcacaggccccgcgcgggtgggcggtcagagcccgggaaccgagga

SEQ ID NO: 42368 - DNA, 106 bp, Homo sapiens
  chr5:175792997-175793103
  hyper
cgggtgttccagcgggggccggagtttggagggcgcggctcgggagcatcccggggcccagccgggtcggctcgcgcccctccggcgcctgcgcagtgcaccccgc

SEQ ID NO: 42369 - DNA, 30 bp, Homo sapiens
  chr5:175815673-175815703
  hyper
cgtgctgagcactacgactcccaggatgca

SEQ ID NO: 42370 - DNA, 222 bp, Homo sapiens
  chr5:175875173-175875395
  hyper
agagcgacttgtaccgacagtccctcggcaatttccggaagtgttcgggataggcccgagcgtggcgccctctggcggcggccagaggtggcggggggcggggggaggttagtgggccagcgcgcgcagacgcagttgcgcgccggcggccgttcagaccggatgtggttgtggctgaggtcagttccggcgggtgacggtgcggacgggtcaggagcgtag

SEQ ID NO: 42371 - DNA, 30 bp, Homo sapiens; identical to SEQ ID NO: 4449
  chr5:175961090-175961120
  hyper

SEQ ID NO: 42372 - DNA, 30 bp, Homo sapiens; identical to SEQ ID NO: 4450
  chr5:175964497-175964527
  hyper

SEQ ID NO: 42373 - DNA, 247 bp, Homo sapiens; identical to SEQ ID NO: 4451
  chr5:175969791-175970038
  hyper

SEQ ID NO: 42374 - DNA, 30 bp, Homo sapiens
  chr5:175970555-175970585
  hyper
gcgtaagggcgcggcgcctggggcctggca

SEQ ID NO: 42375 - DNA, 31 bp, Homo sapiens; identical to SEQ ID NO: 4452
  chr5:176008080-176008111
  hyper

SEQ ID NO: 42376 - DNA, 199 bp, Homo sapiens; identical to SEQ ID NO: 4453
  chr5:176024005-176024204
  hyper

SEQ ID NO: 42377 - DNA, 31 bp, Homo sapiens; identical to SEQ ID NO: 4454
  chr5:176036591-176036622
  hyper

SEQ ID NO: 42378 - DNA, 30 bp, Homo sapiens
  chr5:176037495-176037525
  hyper
ctgaggactcgaggcgcctggatggggacc

SEQ ID NO: 42379 - DNA, 94 bp, Homo sapiens; identical to SEQ ID NO: 4455
  chr5:176038450-176038544
  hyper

SEQ ID NO: 42380 - DNA, 1025 bp, Homo sapiens
  chr5:176056802-176057827
  hyper
atcccaccccactccccagtgcgaagcctcagggccgcggagagtcctagcgtccttgaaacctggggacgcgggaggggccactgcctcggttatccgggccctgcaaactgcagccccgtcgaaccggagtgctgggttcggcgcgaatatccaggacccgcctgtacacgcacggcacagtcacacggtcatgcacacaaacatacaccacggacaagctcacgtgcacacacaggacacgcagacgctccaacgcgcacgaataccccgacccacatgggcgcggacacacgtccccacagccgcccgggcagctgcaaacaccggagcatactcacatactccggggtgcacactgacgcgcatcccccgggtctccctccattttccatccccttccccagctccctcctgtcgccccagtcccctctccatcctcatcccgttccccatccccggcgcgcggccgcctcacctggatgcggggccggggctggggatggagcggcggctgcggcgggcggacgcgggggctccgctaggccaggccggggtggaccaggggccggaggggggatagggccgggatcaggcgctcgggtcgcgggtcctgagcaggagcgcagcagtgcccgggtctcgggtgcgtagccagccaccgctcgttcctcgcgccctgcgagctcgcgcgctccggctccggctccggctccggcgctgcggcagctctgagctcagcgcccccgctggcggccgcgccgccccttcggcctgactgacagggggcggggagggtgacagcgcgtagccgatgagcctcccggggcgggcccgggacgcgcccctgggggccccggccgtaagactcgcgtagtctgttgggagttgagggagggggacaacgcggcgtgtgaagagtggggaagaaatcacgcgactggatttggagttctgctgggctcgaatctcagctgtgctttttattaaccgtgggaccttgagctactcggctctcctttctg

SEQ ID NO: 42381 - DNA, 48 bp, Homo sapiens
  chr5:176074451-176074499
  hyper
cggtccctgaggggcgggcggggcccgaccggcgctctgtgtggccga

SEQ ID NO: 42382 - DNA, 45 bp, Homo sapiens; identical to SEQ ID NO: 4458
  chr5:176074861-176074906
  hyper

SEQ ID NO: 42383 - DNA, 299 bp, Homo sapiens; identical to SEQ ID NO: 4459
  chr5:176107185-176107484
  hyper

SEQ ID NO: 42384 - DNA, 30 bp, Homo sapiens
  chr5:176170245-176170275
  hyper
gtacgcgttgggagcgcctgcttgcccctc

SEQ ID NO: 42385 - DNA, 16 bp, Homo sapiens
  chr5:176170703-176170719
  hyper
cgacaacggcaaatta

SEQ ID NO: 42386 - DNA, 434 bp, Homo sapiens; identical to SEQ ID NO: 4461
  chr5:176236563-176236997
  hyper

SEQ ID NO: 42387 - DNA, 30 bp, Homo sapiens
  chr5:176237364-176237394
  hyper
tgctgggggtggcccgcgcgcgctgcgcgg

SEQ ID NO: 42388 - DNA, 30 bp, Homo sapiens
  chr5:176237981-176238011
  hyper
gcagcttccccgcgcgctctcccggaagcc

SEQ ID NO: 42389 - DNA, 75 bp, Homo sapiens; identical to SEQ ID NO: 4462
  chr5:176264795-176264870
  hyper

SEQ ID NO: 42390 - DNA, 30 bp, Homo sapiens
  chr5:176433892-176433922
  hyper
gtctcagttgcttgcgctttgggggaaagc

SEQ ID NO: 42391 - DNA, 136 bp, Homo sapiens
  chr5:176449526-176449662
  hyper
tgctgcggaatcagcgacaggtttccgaatccacggcacacgctctgaggtaccagaggtagcaaagcaaaataagcgcggggtcccgcacggcagcgcgggtgcagcgcccaaacctcgcgagatttgttggctg

SEQ ID NO: 42392 - DNA, 30 bp, Homo sapiens
  chr5:176514052-176514082
  hyper
tgggcgcggagtcacgcaggctcgaggtga

SEQ ID NO: 42393 - DNA, 30 bp, Homo sapiens
  chr5:176514340-176514370
  hyper
gggacccattgattcgcacctccccccagg

SEQ ID NO: 42394 - DNA, 136 bp, Homo sapiens
  chr5:176560144-176560280
  hyper
caagcccccaggtgagccctgcggcaggaggggggttgccttggcctcgggccgaacccagcgggctgagggcaggtgcccagtggatggggagcctgggctgtaacctaagatggaggccgggactgacgcgggc

SEQ ID NO: 42395 - DNA, 30 bp, Homo sapiens
  chr5:176731092-176731122
  hyper
gaagagcaaaaccgcgccatctcgctatct

SEQ ID NO: 42396 - DNA, 30 bp, Homo sapiens; identical to SEQ ID NO: 4464
  chr5:176738657-176738687
  hyper

SEQ ID NO: 42397 - DNA, 30 bp, Homo sapiens; identical to SEQ ID NO: 4465
  chr5:176738922-176738952
  hyper

SEQ ID NO: 42398 - DNA, 30 bp, Homo sapiens
  chr5:176739157-176739187
  hyper
cgccggctcattggcgtctttgatctcagc

SEQ ID NO: 42399 - DNA, 134 bp, Homo sapiens; identical to SEQ ID NO: 4466
  chr5:176739418-176739552
  hyper

SEQ ID NO: 42400 - DNA, 30 bp, Homo sapiens; identical to SEQ ID NO: 4467
  chr5:176785281-176785311
  hyper

SEQ ID NO: 42401 - DNA, 31 bp, Homo sapiens
  chr5:176813625-176813656
  hyper
ggtggcaaatggggagcgtgaccccagtaag

SEQ ID NO: 42402 - DNA, 91 bp, Homo sapiens
  chr5:176827092-176827183
  hyper
aggaggagccagccgcgcccaggtcacagtttatttggcccgcgctaccagtgggcggcctggctggccggctaggcgccctgcatgcgca

SEQ ID NO: 42403 - DNA, 30 bp, Homo sapiens
  chr5:176873793-176873823
  hyper
gtgcgcgcgccccgcgcctccagcccagcg

SEQ ID NO: 42404 - DNA, 30 bp, Homo sapiens
  chr5:176882628-176882658
  hyper
ggctagggctggggcgcgggcggcccctgg

SEQ ID NO: 42405 - DNA, 30 bp, Homo sapiens; identical to SEQ ID NO: 4468
  chr5:176883196-176883226
  hyper

SEQ ID NO: 42406 - DNA, 226 bp, Homo sapiens
  chr5:176943951-176944177
  hyper
gctgcacgcatgcgcgccacggcgaaaccccgcctcatccttgcgtgagacccaatccgatgtgaagaggcgaacgacggcgcgtaggaacgacctcggagttccggatcgcgcagagggacaaatttgttccggagatactatcgcacggcgaggcatggacgctttcatgggtggttacgcgacagttgccaggaccgagggcgaaaccggctgcaaggcattg

SEQ ID NO: 42407 - DNA, 30 bp, Homo sapiens
  chr5:176944578-176944608
  hyper
agctgcctggggggcgcttccagggaagcg

SEQ ID NO: 42408 - DNA, 51 bp, Homo sapiens
  chr5:177019029-177019080
  hyper
tattctagggcacccgctctctctcaggtaaaagccgcgccccaatcaggt

SEQ ID NO: 42409 - DNA, 30 bp, Homo sapiens
  chr5:177026939-177026969
  hyper
gggcttcagtttctcgggcttccaggcggg

SEQ ID NO: 42410 - DNA, 432 bp, Homo sapiens
  chr5:177411507-177411939
  hyper
cgcggagatgggccagagtccggccatccagaagtgcctggagcgcacagcaaggccctgccctcggctccgtgaaggtgagggggtaaagtcggcccggagtccccgggggtgcaggaggggccccgcgggttccagcagaccctcgacggaacgttccaggcaggcgagatctcgcacagaatctgcccttttaaaggctcggctttgtcctcgttaaacttgcgtctggcaacgcgaccgctgcggctcccgagcaagattagagggtttccgctcgcaggggcgcgcccggggaccgcgcctccccgcctggtctcggcgccccggcccaggggtcttcagtggtgaggggcgcccagatcgctgcatcccctggagctctgcgcccggccgagccactcagagctcccgccccgcacacccacttcg

SEQ ID NO: 42411 - DNA, 14 bp, Homo sapiens
  chr5:177540224-177540238
  hyper
ggaggcgggcgagg

SEQ ID NO: 42412 - DNA, 257 bp, Homo sapiens
  chr5:177540464-177540721
  hyper
ccccgccccccacatccgggggccggggccgggctgtgggcttgccgcgcgccggtgagtcaggccgggttttccctccgcctttggggcaggcgatcgagcgccgcggagcgcgtccctccctcgccaatccggctccggcgccggcgcccgcccgcgttttcccggcgcctgccgctccgccgctccgacccggcacgcagtcccggcccgagccgacgccttgcaggagggttcaaatccgcgcgggggagctg

SEQ ID NO: 42413 - DNA, 243 bp, Homo sapiens
  chr5:177540787-177541030
  hyper
gaggggctggggacccgggctggactcggggggtggggaggggtggggcgggtcgccaaggtcttgttttcgggcgtccttggcaaagctgctgtcccgctggccgaggctcccgtctgagagatgggcgggggtggcaaggtgcggcgtgcgcccaggtgtcccctgctcccggtcaccgaggcaccggatcggggaccgaccccgatgctccgctggaggggcaggcggcaggctaccttg

SEQ ID NO: 42414 - DNA, 30 bp, Homo sapiens
  chr5:177541739-177541769
  hyper
cctgcctctgccaccgcctctagagctagc

SEQ ID NO: 42415 - DNA, 30 bp, Homo sapiens
  chr5:177558268-177558298
  hyper
agactcataggtcccggcccagcccccgaa

SEQ ID NO: 42416 - DNA, 30 bp, Homo sapiens
  chr5:177580553-177580583
  hyper
cttcaccgctgcaacgacagaagagtcggt

SEQ ID NO: 42417 - DNA, 116 bp, Homo sapiens
  chr5:177631398-177631514
  hyper
cgcgcgcgccgtggcggccaatgggacgctgaagctaggttgagtgacggacttgagcagccaatgagtgtgcagtttgttgcgatgtggcacccggctccggcattataaagggc

SEQ ID NO: 42418 - DNA, 312 bp, Homo sapiens
  chr5:177706981-177707293
  hyper
cctggatgtgtttcctgctaccgtatcccaaatgccgaagcgcctcgtacataacgagaacacagtaaatacccgctgaatggatcaacaacggtgaagggaacgattctctgaatgaacgtccatcctgctggctctcgtgcccggccagggaacactagagggcgcgcttgacctgccgaaggctgcctccagccctggcggactcttgcgctggactcccgccctcgggccacagcctgggcgatcagccaggacgctggccattgaggatgcaggcccaaaaggggcgccttcagcctcacaggcttc

SEQ ID NO: 42419 - DNA, 31 bp, Homo sapiens; identical to SEQ ID NO: 4473
  chr5:177804050-177804081
  hyper

SEQ ID NO: 42420 - DNA, 302 bp, Homo sapiens; identical to SEQ ID NO: 4474
  chr5:178016681-178016983
  hyper

SEQ ID NO: 42421 - DNA, 451 bp, Homo sapiens; identical to SEQ ID NO: 4475
  chr5:178017519-178017970
  hyper

SEQ ID NO: 42422 - DNA, 30 bp, Homo sapiens
  chr5:178053518-178053548
  hyper
gaaaacccccgaaacgctacaaacggccca

SEQ ID NO: 42423 - DNA, 30 bp, Homo sapiens
  chr5:178157331-178157361
  hyper
ggaaacgccaggcccggcgtccacggcgag

SEQ ID NO: 42424 - DNA, 565 bp, Homo sapiens
  chr5:178287035-178287600
  hyper
cagacgtcggaggagccgggtcacgaggctggagcttcctgcttgcagagtgcggcggggaggcgcggcccgggaacgcgggatcctggggaggtgagcggcatggctggctgtgccgggaggaggcggcgcctggcgccagggcgacctgaggccgcggggctccgagggcctctgtgggcgcgggggggcacccccgcgtctgtcaccggcccccgcgccaggacttggactctcgcccctcacgggccgctccggtgccgctgccgacgcccctgcctctggctcgcgccgcccgccgtgaacgcggggccaggcgtttcctcccgggcccaccctgcgcgcgccgtgtgggcctcgcggactcggggcgccgggaccccgagcgcagggcagaggcagccgggcccggtttctgagtcagtccccaggacggccactcctcctgcctcgggacacccagcgctttcctcttcaaagccgttttccgtggagtcgggagacgattcgttggcgggagagagaggaaccggctgggaaaggcttgaggcggagggaagtcgtc

SEQ ID NO: 42425 - DNA, 486 bp, Homo sapiens
  chr5:178367635-178368121
  hyper
cccgcaccgcacacgcgttagtggctgtggcgtcgccaccccagcacacgctggcccgcccgcagtgccaggctggaagtgtcgggcgcttgccaggccaaggggcaattctgttgccttccaggccttttcggcgcggtcccagtcaggaacgcgccctgtcgcctcccactccgtcttccggaccctcccgatcctctctcgtcagcgatcgggcgtcgctcccctggactaacctcccttgccccatcttcagcttttcgctgatctgcatcttcctgcgccttagtgcaaggcagagacctggttctaaagcgaacggaacggaaccgattctgtaagttgcaatgagcgcgctgaggtcggcgtggaggggtctctgggaaaggtagtttccgcgcctaaagcgccggggccgggccctgttcccgcaggcgcaaggcagcactgtctccgccgattgtccctctgggaagtggagtctgg

SEQ ID NO: 42426 - DNA, 30 bp, Homo sapiens
  chr5:178368612-178368642
  hyper
cgcctggcgtggttccgagtcctgcgccag

SEQ ID NO: 42427 - DNA, 30 bp, Homo sapiens; identical to SEQ ID NO: 4478
  chr5:178382964-178382994
  hyper

SEQ ID NO: 42428 - DNA, 215 bp, Homo sapiens; identical to SEQ ID NO: 4479
  chr5:178423618-178423833
  hyper

SEQ ID NO: 42429 - DNA, 505 bp, Homo sapiens
  chr5:178450648-178451153
  hyper
actccacagcccgaccgcgttctccgctctcggcgctgtggttctctctcggacaccgtaagtggtggtgccgcagcgacgtctgggaaatgaagtccggagggacaaacgctgcggttcagccagggaaacccgtcggctctccggcgcgcaggcgcagttgcgcccggcagcgacgggaaacgtctctgaattaggtgttccgctcgcctcttgtgcggtgtggagctgcgcgccccccgccgaggcgggcccaggtacaggctgccggtgagggcgggcccggggcgtgcggctgccgcggcgggaccaggacgagggctggcctctgcgcgtgtctgccgagtccccggctccgggcgtccgagccggggcggcctcggcaggtgaacccggccccggagggggcgtggcctgggaagggcctggcggaggccgggagggcgcttcgacgccgctggactcctgggccgcagcctgggccggactccgggggaaacggctc

SEQ ID NO: 42430 - DNA, 8 bp, Homo sapiens
  chr5:178487295-178487303
  hyper
cccggagt

SEQ ID NO: 42431 - DNA, 250 bp, Homo sapiens
  chr5:178487341-178487591
  hyper
cggcgtggggccggaggcatgccgggagtggtagttctcccgcggttggcggggtttcggggacagctcgcggcctttcgggggttctcctggcttgggccatccaggcttggctaggattgccggcctggggttgaggcgctcgcagtggtctcttccgggccggggtggatccgggcctctccagcgagtgggcggcgtgcagcctcgtctgggcttctgggaccagccctacgcggctcgggcccct

SEQ ID NO: 42432 - DNA, 272 bp, Homo sapiens
  chr5:178594123-178594395
  hyper
cgacacctcgcttccacttcattttcctaccttccggatgacgaactgcgtctcagacaactgaaaggactcgcctgagtcccacagccggaaagaggtcggggtgctgccccccgcgcggggcgggcagaggaagggccgggcccgagcggccaccaggtggcgctgctgccgcgagaacagcggcccgggccggggacgcacccggcgcccagactccgcggccgcacccgggctcccggggccccagcggccccaagacagcctctggg

SEQ ID NO: 42433 - DNA, 201 bp, Homo sapiens; identical to SEQ ID NO: 4482
  chr5:178770703-178770904
  hyper

SEQ ID NO: 42434 - DNA, 432 bp, Homo sapiens; identical to SEQ ID NO: 4483
  chr5:178771198-178771630
  hyper

SEQ ID NO: 42435 - DNA, 136 bp, Homo sapiens; identical to SEQ ID NO: 4484
  chr5:178771723-178771859
  hyper

SEQ ID NO: 42436 - DNA, 762 bp, Homo sapiens
  chr5:178771967-178772729
  hyper
cgccagtgctccgaggctcccccggcccaaggcgctcgggggcggtgcggggcgccccctgcgcgaccaacccggccccgaagttggccaacttggccccgggcggggcgcgcggagtttgcccaagtcaggctggacgacgcctggggagggggcggcggggcacgcgggacagggccaggccggcgggggtcccggggagtaggggccgggccgcacctacctggggggtcggcggcggcggcgagcctggcgttcgcgggcggcggcggcggcggcaggagcggcggcggcagcagcagcagcagcagcagcagcgcggggcagagcaggcggcgagcggctcccgccggcggatccatggcagccggactgcagccggggccccgcactcgcagccggcgcgaaagttccccgcgagccgcccagcccacatctgggggcagctggagccgcccgcagctgcagcaccgcagggcgcggggcggaggaggcgaggcgcggaggggcgggcgggggagcgcggagggaaggcggggagagggaaggagcgagcgagcgagggaggcaggcgggagggagggaggcgagcgagggggagggcggggacggcgggcgcctcagcctgcggtgacccggcgcatcttggcgcggccgccgccgccgcccgcttccctcttcgcgccgccgtcgccgcggtgccgggctcgcagcgaagcagagacaccccgaggcggcggcagagaagcgccgcgggccggg

SEQ ID NO: 42437 - DNA, 30 bp, Homo sapiens
  chr5:178772778-178772808
  hyper
cggcgccggccgaacgtccccacctagaga

SEQ ID NO: 42438 - DNA, 79 bp, Homo sapiens; identical to SEQ ID NO: 4488
  chr5:178946790-178946869
  hyper

SEQ ID NO: 42439 - DNA, 30 bp, Homo sapiens
  chr5:178977221-178977251
  hyper
ctacagaaaaatgacgaagtggaaaatata

SEQ ID NO: 42440 - DNA, 30 bp, Homo sapiens
  chr5:178977633-178977663
  hyper
ccggggccggggcccgggtcagcgcttgag

SEQ ID NO: 42441 - DNA, 30 bp, Homo sapiens
  chr5:178978219-178978249
  hyper
gtgcgggagtggagcgccggcgggtgttgg

SEQ ID NO: 42442 - DNA, 129 bp, Homo sapiens
  chr5:179050849-179050978
  hyper
cccacccataaacccgccgggctttttgttgcgcctgcgccttcccgcgaatattgaacttcggagtcctagcggtttataattatttcatgcgcatgcgtcttccttgaaaccgttctctagccttac

SEQ ID NO: 42443 - DNA, 30 bp, Homo sapiens
  chr5:179126418-179126448
  hyper
gctgcctgggcagccgcgaggtgggctgga

SEQ ID NO: 42444 - DNA, 30 bp, Homo sapiens
  chr5:179160255-179160285
  hyper
gcctggagctggagcgccaacacaccttcg

SEQ ID NO: 42445 - DNA, 30 bp, Homo sapiens; identical to SEQ ID NO: 4489
  chr5:179160697-179160727
  hyper

SEQ ID NO: 42446 - DNA, 30 bp, Homo sapiens
  chr5:179233107-179233137
  hyper
ggggggtgccctcgcgcctgtgtccctcac

SEQ ID NO: 42447 - DNA, 150 bp, Homo sapiens
  chr5:179234472-179234622
  hyper
gtgaccagcccagaaccgtaccggcttcccggggcaggggcggcccgagagcgccgctaacgggagcaacgggccctgcccccggtggtgtaggggccacctcgccccgcccagcccagcccgatattgatgggggcccacgccttcatt

SEQ ID NO: 42448 - DNA, 605 bp, Homo sapiens; identical to SEQ ID NO: 4491
  chr5:179245984-179246589
  hyper

SEQ ID NO: 42449 - DNA, 31 bp, Homo sapiens; identical to SEQ ID NO: 4492
  chr5:179279346-179279377
  hyper

SEQ ID NO: 42450 - DNA, 30 bp, Homo sapiens; identical to SEQ ID NO: 4493
  chr5:179285176-179285206
  hyper

SEQ ID NO: 42451 - DNA, 30 bp, Homo sapiens; identical to SEQ ID NO: 4494
  chr5:179334756-179334786
  hyper

SEQ ID NO: 42452 - DNA, 1296 bp, Homo sapiens
  chr5:179498056-179499352
  hyper
gcgcagccttaagtccgtgatttgaggaacctgccgcttccaaaatacaggctgagacgtcctccccatgaagtagttttgcgctcttgcaccacctcctttgtctacgctgtccctgcaaactcctagctcaatgccctccagcaaacgagctgcctgaacgcaaagatgaccgttccaagtcttttttaaaagaagggaaaaacccagtcacgctcctggagcctggttcccacgggagcaggccgggctgtccacgacggaagcctcgaccctggctggggctgtcggccgggcagcgcgggagagccagggccagagccggggccgggaaccctagtcccgccgcctacgcgggatgcagcgaccaccgcccgccgcccccgggccggcactcacctccgtggaggggcagcggcgccagcacctggccgcggacctcggccttgggggagtcaagcccgtagcgcccgcggtcgatgcgaaacgtgagcggggcgccgcggccgggctcctgcaccgtcacgttgatgagcgccgtgtagtactcctggctcgcgttgtctgcccgtgccggccacaggctgcaggtcagcagggcgagcgcggcgagccgggcagggcccgcccgccccgcgcagctcatcgtccctccggcagccgccgctgctcgcggaccgggctccggggccggcgcctagaggcggggcgggcgcggcccgggcggcggcgggagcgcgcgcgcgcggcctgcgcggggccgagcccgagcgcggccctcctggacgccgcggccccgccgctcgccgccctcacgtccactgcccgcctgtggggacgcgcccatgggccctcggcgagggcggcgtctcaggtcgcacgcgggcgtctcttcggggtcccaggagggttgtagaagcgtgccccctccatccccccgggtcggtcccaccgaatgggaggcgcctcgcaaggacgcggcgggggaggggaagggcggcacgggaggaagcgccccgaggagggtcagcggaacacaaagtccctctcgcgcggctgccgcctgaggcgcgtgtccgccgccgccccgcccccccgctggtctagcggcaacgcgcaggcctaaggcgcagtcccgccccgagcgcatgcgtgccagggcctgtccgctcccgcccgcctgcacgagggcccgggcagccgggtcagccgctggtgctggttgtttctctgtcaggcgtgatagccgcagggcgtggagcccgggagatttgcgaggacgtatggaaatgtgtg

SEQ ID NO: 42453 - DNA, 133 bp, Homo sapiens; identical to SEQ ID NO: 4496
  chr5:179779649-179779782
  hyper

SEQ ID NO: 42454 - DNA, 172 bp, Homo sapiens; identical to SEQ ID NO: 4497
  chr5:179779840-179780012
  hyper

SEQ ID NO: 42455 - DNA, 665 bp, Homo sapiens; identical to SEQ ID NO: 4498
  chr5:179780035-179780700
  hyper

SEQ ID NO: 42456 - DNA, 498 bp, Homo sapiens; identical to SEQ ID NO: 4499
  chr5:179780801-179781299
  hyper

SEQ ID NO: 42457 - DNA, 148 bp, Homo sapiens
  chr5:179867480-179867628
  hyper
aggaggaaggggatggagggtcgcattaaacaacacctcaaggcagcccagatcgggagggagggtccctctgcaggacagaaaccagctcgtgccgcaagccaaccgcgagaagggaagagggggcgctctaggttacaagagaatt

SEQ ID NO: 42458 - DNA, 1053 bp, Homo sapiens
  chr5:180017078-180018131
  hyper
tggatgagaaaataccaggctcgagctgctcttaaccacgtttattgagaggggccgggggaaggggatggacggtcctccccgcggcggggttttcagccctcgcgggtgggcagcgtcttgtcctcaggtgtagatgctccagtctcggctcagccaaacactgtcagggccccctggaaagcagaagccgagcttgagtgcccccagccctgccaccaagaactcaggcgggggcgcggcagcggccggctctgtggggagcgggagcggggcggttccgctggcgtctccgggggacgcgcacccgcgcggggccatctccgccttccccgcccctgcagctcggatgcgccccacccagttcccacccggagacccgggcttctcccagggacagggcttggaggggcaggacgggaaacagccctgacgtagggccgggacacctctggtgcagttttgaggctggccgggaagggatgcccgcgcaggaagggcacccggggtgcccactttaccagcagggccttcagggccttcacggcccccacggcctggggacccagctcagccacacacttctgggagccctctatgaggtggttcacggggatgcccaggctgctcagcaggagcttcagcgggttgagggtgccgagggggttggccagggtcccggccccggcctccgccgccgactccagcgcagcgacaggctgggccacaggcttggccgagcccactaagaaagcagcagctgcaagcgaacagggaggggtcaccgcctgcgcgccggggtccccagaaggcaggtccaggacgcgcccccgcgggaggcgcccaggaaccgtcgcgccctgcccggctccccgaccgcccctccctcctgcgccgaggcctgccaggtgcgagcccccgggacacaggcgggtctggggaggcggccccgccaggagacgctgcagggtcaccggagtggcctgagggtggcggaaggaccggtgaactctgtgcagggtccgggacaggcccccaagggaggggacactc

SEQ ID NO: 42459 - DNA, 336 bp, Homo sapiens
  chr5:180018484-180018820
  hyper
ggggaacctgcggctgcccgggcaaggccacgaggcttcttatacccggtcctcgcccctccagcgccggcctcgcccgcgctcctgagaaagccctgcccgctccgctcacggccgtgccctggccaacttcctgctgcggccggcgggccctgggaagcccgtgcccccttccctgcccgggcctcgaggacttcctcttggcaggcgctggggccctctgagagcaggcaggcccggcctttgtctccgcgaggcccaccccggcccgcaccttcgctttgcggtctgaccccacgcgcccccctgcagggctgggcccgggtgaggggagct

SEQ ID NO: 42460 - DNA, 14 bp, Homo sapiens
  chr5:180075843-180075857
  hyper
cttccgccccttct

SEQ ID NO: 42461 - DNA, 227 bp, Homo sapiens
  chr5:180076053-180076280
  hyper
cgcacccaagtccggggcccggccgggatggatctccggcgcgcgtgggtcgggacggcgcggcgcggggaccccgcggggaagcgagtaagggcgcgaaggatccgggctcagcgcgcagcccggcagggcccggctccgaggacgcggagccaccgacggagacgcggattcaggggccgggagagctacccctgcgccgaggcgcggcccggccgccctggccc

SEQ ID NO: 42462 - DNA, 137 bp, Homo sapiens
  chr5:180100736-180100873
  hyper
ctcgcagcgttaaggcgagtctgggacaggaccccggcaccccctccggatctgtggcatcctccaggactccggcgcaggacgcgctccaggagccgctccttcagggcctccggtgcgcgcagtccgggcgccgg

SEQ ID NO: 42463 - DNA, 152 bp, Homo sapiens
  chr5:180101015-180101167
  hyper
cgcagccccgcgcccctctggctcctgttcccgggcgcggggagaaggcggcggggcgcgcctgggcccgcgcgggtgcgaacgcgaggtctttcctgggtgctcccaggtcggaggattcccagggcgggggccatcagggtggcgaggaa

SEQ ID NO: 42464 - DNA, 30 bp, Homo sapiens
  chr5:180229529-180229559
  hyper
gggtcggaccgggccgctccccagccaagc

SEQ ID NO: 42465 - DNA, 47 bp, Homo sapiens
  chr5:180230098-180230145
  hyper
gcccagcctggagccgcgcctgaagtgggcccgcagtccaggaaagg

SEQ ID NO: 42466 - DNA, 50 bp, Homo sapiens
  chr5:180257864-180257914
  hyper
aaggttagagggaaggcgcagggagggagagacggcgggtgggggttgaa

SEQ ID NO: 42467 - DNA, 30 bp, Homo sapiens
  chr5:180258542-180258572
  hyper
ttgtaaattagaaccggcctatgcgccaag

SEQ ID NO: 42468 - DNA, 30 bp, Homo sapiens
  chr5:180287810-180287840
  hyper
ctgcagagggagcacgaaatggtgggtatt

SEQ ID NO: 42469 - DNA, 1489 bp, Homo sapiens
  chr5:180479641-180481130
  hyper
tgtcggcgctgcccccggccacgtcctgcctgcgggcgggtcctccctggggagccgggagggacgtgggagctgcgaggccgcgcgcacgtggttcggttctcacttcttccaaaagcgtggtaagaaccgagggagaagccggatgtttgcaaacaagcgaggagacgacttgcggaccagacggcgcgggtgcgagcaggagctccccggacatccgccgccagccaagcccctgggaccctcccgcctgcggacgcggggcgagggcgggaagacgcggggcgagggcggcgctgcggccgcagaagcctcgagccgggctggggcgcggttccctcccgcacgccccgcggcgcgcccccgccccctccgccgcgcgcgcccccgccccctccgccgcgcgcgctcccgctccacgcccgtttcccaggcggctgcggtggcgcccggagaaggtcccgcgggaggtttcccggcacgcggcgggcaggccggtctcgcctctcggtgctcagcggcgcctggaccgacacggcccccgcgggtgttttccagacgtgttcgtacccggagcctctgcgtggaagagcgcgttcgtcgcgaccctgccgctgctgttggtcctcgcggcgctggcgctgggcgtcctccggaagcagcggagaagccgaggtaccggcgcgggcggcggggcggggaggggcaccggccggtgctgaaccccggggccgcggaggcgcctccccccaggacgcggcgcgggaaggcggcctggaaggggcgggggcgcgcactcagccctctccgctcccgtttcccttcagaaaagctgaggaagcaggcggagaagagacaaggtgagcggggacagggcgttctgcacgcacctgcccaagtgccaaaacccgccgtcatctaaaggctgtgggtcccgttacgagggtttattccagcgcgaggtgtcagggcggccaccggggaacggggatcggtgaccccggtggggaagggggaagatcgttcatatggacaaaagcggaggtgcggaacggctgcattttccacggaggctagtgcacagatgtcagggttgaccggctgctgtcgttacgccctcggagcttcacatcacactgtacagagggagcggtgaccagggtctctgctgccagcgccacctcgtccaggttttcatagcgcacagggagtcgggcggatgcgcaacatctccgcacagggtcaggaagcggcggtcaggcaccgagaaaacagcccagttacgtgaggcagtgtccggggcttaacgtttccgccgagctaatagatttgggaggctccgaccctgattttcacactagcaggagggagggcgctgggtcaccctcctatgcagaagggcagccaagggtgcgcacttccccatcccctgcctggagcctcacttccagcccagcctgggcccgcagaccaccgcgggtgggagtgc

SEQ ID NO: 42470 - DNA, 218 bp, Homo sapiens
  chr5:180527480-180527698
  hyper
cgagctgttgctgtcgccctgggagcagggcacgctcttgaccatccactcgcagatctgcgacagcgcgagccgcttctccgccgagctctcgtcggccctggtgctgaggtcggcgtgggacaggctgcgcgacgcggtgcgacgggacgagctgcccctgcgctgctgcccggcggaggcggggtcccgggtgggtgctgcggcgcggcgtcccg

SEQ ID NO: 42471 - DNA, 93 bp, Homo sapiens; identical to SEQ ID NO: 4507
  chr5:180594970-180595063
  hyper

SEQ ID NO: 42472 - DNA, 30 bp, Homo sapiens
  chr5:180614835-180614865
  hyper
ggccccacacatactcgagatgcggggttc

SEQ ID NO: 42473 - DNA, 23 bp, Homo sapiens
  chr5:180615085-180615108
  hyper
cgcttcggggccgcgcgcggtgg

SEQ ID NO: 42474 - DNA, 30 bp, Homo sapiens
  chr5:180618001-180618031
  hyper
actttctacacttccgttaacagcaagaat

SEQ ID NO: 42475 - DNA, 659 bp, Homo sapiens
  chr5:180630960-180631619
  hyper
caaggagagactggggactgccgcccgagcctccccgccccgccctcacccctgcacacaccctcgctgaggctcagcgagaaaatagcaaagaaagggcccccagaatcgacagcgttggcacagtcagacggctctaggtgcgcggcttaacccgggagccccctccctggacatcttggcgaggtcctctcactcagttccacgaggtggggactttgagcagagcccgcttcggggaaagagataagagtgggggcagcggctgcgtggctgtgccggagacttcccgcgggcagagagctgcggagacgcagaccaggctagaggctccgaacagacaggaagaacatcgccaagtccgtgggggacgtcgcgcaggcggcccagtatctggcccagagggaaacgcagtgggggtggggtgggggtattggtgatgttgggggtgacagagaaccgcgctcagcccgggaaccagcgctgggcttcctggaatggagaaagaagggaggggctcacccgggcctcctgatcgacaggctgttctctgcaccccgtgcgcgggagcgcgggaccaagtcagggggtcccggggacccacggggtgggtgggggctgcgctcaccttggcctcctgcaccgcctcgtccagcggc

SEQ ID NO: 42476 - DNA, 708 bp, Homo sapiens
  chr5:180632775-180633483
  hyper
acacacacacacaaacctcagcgctctcttgtcccccagctgtctccacagccccgcagcagagctgcctgtgttatccgcttccacaccctctctcctcgctcactctggaggccacttggatcaagctttcgcccgcaccctcctcagaaaccgcccttgccaatgtcaccgggaacttcagcaattctcacccaaaggcgaagacctcgcctcacctcatctgcccccggatgctccctccttcccgacttcccttctcagggccttccaggacccagtgtccccgatcttcttgctgttcctgaaccccgtggcctctgcgctggctgttccccttgcgtggacctcttttctcccaccacctgcatgctccctcccacctcattcaggtcttgtttcaaacgtctctgcccacgaagcccgccccgaacgcgcacactgtgtaaagtcgtctcttagcgcgctcccttctcagggccggctctgtgcccgcactctatctcctctggaatgtcagctttcagatggactgtactaggtttgttcacggctgaatcctgtttttagagcagttcttggcaagctcagtaaggttttcttggattaaacttggttcgaaattcaaaagaggagccgcagttcacggtggaaagtaggcccatcgcctgtgtcccagtcctttcttcctcccgagcaatcaacttt

SEQ ID NO: 42477 - DNA, 394 bp, Homo sapiens
  chr5:180644068-180644462
  hyper
tattttttcctagagatggggcggggggcgggggcgggggcggaggggacagtctcactatgttgcctaggctggtctcgaactcttaagcccggtttccgagtcgctggggctacagtagcgcgctgacacgcccgacccttgctttgccacttagatgttgcatttattcgactttcacgtcgggcagaggtgctgggaaagaggcggctggcccctgcgtaagtgtgcgggtgcggtgtgagaaagctggaagcctgttttctaggcggggaagcagcctgcgctgccggggccgcatcatggcacgtgggtttccccgggcttactctcctgccagtagcgctgtcctagggatcccgcccacccctccggcttcttctctgaagccttt

SEQ ID NO: 42478 - DNA, 30 bp, Homo sapiens
  chr5:180670929-180670959
  hyper
cggaaatacccgctcgaccatgcaaaatgg

SEQ ID NO: 42479 - DNA, 30 bp, Homo sapiens
  chr5:180673589-180673619
  hyper
tcactaaaaataggcgattctggcagcgcc

SEQ ID NO: 42480 - DNA, 339 bp, Homo sapiens; identical to SEQ ID NO: 4509
  chr5:180673931-180674270
  hyper

SEQ ID NO: 42481 - DNA, 30 bp, Homo sapiens
  chr5:180688259-180688289
  hyper
gacaggcgcgcccgcgccgcccgctccagc

SEQ ID NO: 42482 - DNA, 802 bp, Homo sapiens; identical to SEQ ID NO: 4510
  chr6:391097-391899
  hyper

SEQ ID NO: 42483 - DNA, 24 bp, Homo sapiens
  chr6:392409-392433
  hyper
gctctcccgggcctgctccggggt

SEQ ID NO: 42484 - DNA, 371 bp, Homo sapiens; identical to SEQ ID NO: 4512
  chr6:392587-392958
  hyper

SEQ ID NO: 42485 - DNA, 348 bp, Homo sapiens; identical to SEQ ID NO: 4513
  chr6:393124-393472
  hyper

SEQ ID NO: 42486 - DNA, 76 bp, Homo sapiens; identical to SEQ ID NO: 4514
  chr6:393764-393840
  hyper

SEQ ID NO: 42487 - DNA, 659 bp, Homo sapiens
  chr6:710813-711472
  hyper
tgcaggaaatggcaggagatccgtccgaggcaccccaggccgggtcgtgggtagagagcagggacgagggctgggaggggacgcaggcacagggtgagggtggcccgtctccagggagaactgcgcgctcacaggcggggccggcttcccgcatcagcccggccgggctgcaggttctgagcgagggggcggccgtgcctcactctgggcgggacgcggcctggtgcagggacgctcacttccagtggcatttcccgtcttacacgatgagcttcatccacgttctccataaccccctccccgccacgggaagcgtcagccacctggaacagccctattctgctcggttgtaaaaagcgtcaggcgcttttgatttgaaaagcgttaggcctgggaatcgctgttgctccctcggtgggcacgccctgctgacacgccctagcccaccggggaagccactggccacgagggagcgaggcgcacgggtgtcttccctccccagagtgagtgtcagggaggaagccaggtcttccagggcgctgacaaggcagggccgggctccttccctccgttgtgtttctctgaaatgttcgaatcactggtgtgacgggagcacttaaagccgaaaaaggaaagacgaaagcaaaggattcttcagg

SEQ ID NO: 42488 - DNA, 1271 bp, Homo sapiens
  chr6:1311047-1312318
  hyper
aggtgagctcccacctactagcggctccgtcgctttttgtgcaacaaaggcaggaaaaaggaggaaactcggcgtggcagggcagcgggctggaagtgcaccttcccggggccgaggcgcccgctccctggactaatgacgccgcgtggggatcacgccccgggcgccctggggtgaggaacggtcccccctttcgagattgtccgacactggtgccagtgaggtcacagcaaaagtcccaaaggaatattggaaagaaatggccgtgaaccggtttgttcttgcccccgcccccgggaacacgccctctccgtcgttcctgttgactgtcagatcccgggaaccaagcggcggagctcggcggcatctgaggcttccgcagggacacaagtgcaggcacagcccagcaccctgcgccagacacagccgccccaggggaagaggaggacgctgctgtcctcccgcaggagtcaccagccaggtaaagaaaaaggtaaagtaagacaaagaaaagtgaaagtcggagcccatttagtgagcaagagtaaaggtcatccaaaaaggcgcatacaatttcaagcccaggagtgcattcattaaaacaagaggaaaagacaagatggtccttgaaaggagctcataggaaggggcacagcacaaggctcccgaaagaggtcactgcaagtgtcctgcgcaatttctgttcagcacctctgcagtgacgacaggggtttgctttcgtaagcagcatcgttttcactactacagaagcacatacgccgcgtgcagcttaggcccgagcaaagtccctgctcccctagacccagtcccttcaggtgtccccctaggggaactgtggcgtgtccccccaaccaggcgcactcgcctaaactgcgtccccgaactccagggcgcagggagccctcgcgggctgcccggggctggggcccacacctgaacggaggagccggctggcggagcggccccgcgcgcgcacacacgcacactcacagacacgcgcaaacccacagcggcgcgcgcgctccccattggcgggaggaggaaggcggggccggccgacccaaaacaaacaacctgcgccagcgactttgccgccgcgctgcagtgtggcctccgcctggtgcgcgcccgttggggagctggggaactggggagccgccaccacctcggccacctcgttcccccaccccttgccgtccgcgctcaggccccgcccccgcggagccgccgcagggttatattgggccggc

SEQ ID NO: 42489 - DNA, 13 bp, Homo sapiens
  chr6:1312342-1312355
  hyper
cgcggcaggccag

SEQ ID NO: 42490 - DNA, 1309 bp, Homo sapiens; identical to SEQ ID NO: 4519
  chr6:1312594-1313903
  hyper

SEQ ID NO: 42491 - DNA, 100 bp, Homo sapiens; identical to SEQ ID NO: 4520
  chr6:1314000-1314100
  hyper

SEQ ID NO: 42492 - DNA, 21 bp, Homo sapiens
  chr6:1314219-1314240
  hyper
ggactttgcactttgaatcca

SEQ ID NO: 42493 - DNA, 382 bp, Homo sapiens
  chr6:1316780-1317162
  hyper
agccccggggagtttcggtttctcagtgctgggtcggaggcagcccaggaggaaaggcgacggcacagctcccgttttctcaatgaaggcagaaagctgcacagctgcttttagttcaggcgaagctggaattccgcggagccgcacctggcggcaggcacgccggccttcggaggggccgctcggtgcggctgcaggaccctgcactcaggcagcagcctcgcggtggcggtgggacctctcgagcccaacagctccttccagcatctgcccagaaaactgccttcctcgcaggcgcgggaggagggttcggggctcactgtgcccaggcccccaggcctggccgcgcccaagtggccccccgcgccgagggcagggctcg

SEQ ID NO: 42494 - DNA, 252 bp, Homo sapiens
  chr6:1378223-1378475
  hyper
gcttcaccctcctgcgggaaaatgcaaagtccatcaccaatagtcggtctaccgcagagaagtctgcaaatcccaggggcctggaactctaaaaaggccattcaagcctcaggtggactccacgtttctccatttccctgcccttccgcttttctttccttaacaagcttcttataacatttgcgtttgatgaggttcaagaggtcacttcccctccctctccgccctcctcgctcggcggagcggccgcgt

SEQ ID NO: 42495 - DNA, 123 bp, Homo sapiens
  chr6:1379267-1379390
  hyper
cgaaaccaccccggggaaagccgtaggggcgcgccggcccacgcgggaccgagttcagaggactctgcaccgtcagtttcagggccgacgtttatagagcgcttcccacgtgccgcacgcggt

SEQ ID NO: 42496 - DNA, 397 bp, Homo sapiens
  chr6:1379631-1380028
  hyper
ttcagagccaggctgcgagcctacagggtagagtaggggtgccgggccccctggtgtcctggcgtactcggggggaagacagtcgccggccgccgggctcctgccacgctgtggcgcgcgtggaaggtgagggtcctccgctgtcccgccgcctcccacagggcggcccagagcctgcatcttttgcaaagggaacataggatggagagaaagaaagtcccgcctgaaataagcaaacgcggtggcggctttgcggtcggccacgtccgctaggaacccgcgaggcgcccttgcgagctgcgcagtcgagttttctttccactgcactttcacgttctgccggatgggatttcgggggcagaagactcctcgaatgcagaccggctgtctgtggctg

SEQ ID NO: 42497 - DNA, 30 bp, Homo sapiens
  chr6:1380883-1380913
  hyper
tggaaactgttgtacggtgcacatggacaa

SEQ ID NO: 42498 - DNA, 30 bp, Homo sapiens
  chr6:1382655-1382685
  hyper
ggcgagggggcccccgtaaatcatcctgag

SEQ ID NO: 42499 - DNA, 30 bp, Homo sapiens
  chr6:1383049-1383079
  hyper
ctccttgcctgggccgtttgacccccaaag

SEQ ID NO: 42500 - DNA, 332 bp, Homo sapiens; identical to SEQ ID NO: 4526
  chr6:1383376-1383708
  hyper

SEQ ID NO: 42501 - DNA, 320 bp, Homo sapiens; identical to SEQ ID NO: 4527
  chr6:1383859-1384179
  hyper

SEQ ID NO: 42502 - DNA, 8 bp, Homo sapiens
  chr6:1384625-1384633
  hyper
cgagcgtt

SEQ ID NO: 42503 - DNA, 30 bp, Homo sapiens
  chr6:1385124-1385154
  hyper
ttttggtctcgcaaccgaggggacccgcgc

SEQ ID NO: 42504 - DNA, 30 bp, Homo sapiens
  chr6:1388843-1388873
  hyper
gggcaatgttaagacggaggatgtaaacct

SEQ ID NO: 42505 - DNA, 143 bp, Homo sapiens
  chr6:1389131-1389274
  hyper
caaagttccgaaaacgtccacgatcgccagcggcccgcaaccctgcggcggcccccagtcgccctaacaattgtcggggagcctgcaggccctgccagaaagagagaggattggcacgttacctttgggcgtctggcaccccg

SEQ ID NO: 42506 - DNA, 1033 bp, Homo sapiens
  chr6:1389372-1390405
  hyper
cgcagcagcaccactcggcccggcgggccaggaggaggaagggggcgcggaggggcggggctgggtcctgggatgggacgcggggcttgctgcggggggcaaacagaaagaatatttcatgaagtcagaggtggtcgagttttgcgaggggtgggggtcgtccccctggcagaaccggagtgagtctgtgatccctcaattggaaagagggtgagtgagggaaaggggaggaggccgcgagaggaatgaagagcgaggagaccctggagagcggggagcgagataagagagggaggcggccgccaggtcgggagggggaggagtgagcgcggcggcgcggagcgaggagggggcagggcggggtggggggggagggagggagggagggagcgaggagggcggccggggagggcgagggagggaggaagtccgagagacagagcgaggagcgctcctgaagggagacgtcgggctcgtccccggggtccaggccgcggtcccactcgcgggcgcagtcgcccggcgccggccgctcggccccgcggcctgggaggccgttgcgcaaggcagggcccgcggctcggggagggatgcgccgggcgttgcctcccgcccgccgccgccgccgccgccagaagccccagaggagctgagggaggcgacgccgaagcgctggcccggagtggccacggctgcagcccgggcggcgggctagggcgctcgcagggcttctgggccgaccccgctccggcgcctccgcttcccgcccggggcccgccctcgcggcccggcctcgctcccgggtcccagatgaccaccgagggcgggccgccgccggccccgctccgccgcgcgtgcagcccggtccccggcgcgctccaggccgccctgatgagcccgccgcccgccgccgccgccgccgccgccgccgccccggagaccacctcctcctcctcgtcgtcgtcctccgcctcctgcgcctcgtcctcgtcctcctccaattcggccagcgccccctcggctgcctgcaaga

SEQ ID NO: 42507 - DNA, 331 bp, Homo sapiens; identical to SEQ ID NO: 4530
  chr6:1390427-1390758
  hyper

SEQ ID NO: 42508 - DNA, 512 bp, Homo sapiens; identical to SEQ ID NO: 4531
  chr6:1390955-1391467
  hyper

SEQ ID NO: 42509 - DNA, 202 bp, Homo sapiens; identical to SEQ ID NO: 4532
  chr6:1439137-1439339
  hyper

SEQ ID NO: 42510 - DNA, 30 bp, Homo sapiens
  chr6:1604974-1605004
  hyper
ggaccaccaggtcaccggcgcgcgctgcca

SEQ ID NO: 42511 - DNA, 394 bp, Homo sapiens
  chr6:1605239-1605633
  hyper
cggggtgagggacgtcggaaggaaggtcccagggcgcagggttccgcgaagggagcactcggaaggaaggctggctgcggccccggcgcctgggtccgctgcggcgccgggccggagacctgggaacagccagccacctgcaaggttgcagcccacctcaccccgccggcggctccggggctgtctgtgggtctgtctcacggggcaaagcctttcttcccacacccacagccaaggcgcgtccgtgcaggggcacacgccttctgctccagccccaggaaggcgctttcgccctgcagtcctccgacggccggctcccgccgcaccgcgcaccctggctccggcagactctggggcctggggactcgcccaccctgcgcggcgcgccccccac

SEQ ID NO: 42512 - DNA, 30 bp, Homo sapiens
  chr6:1610182-1610212
  hyper
ttaagcggctggcgcgcgagagaccgagaa

SEQ ID NO: 42513 - DNA, 983 bp, Homo sapiens
  chr6:1610744-1611727
  hyper
agcagagctactaccgcgcggcggccgcggcggccgggggcggctacaccgccatgccggcccccatgagcgtgtactcgcaccctgcgcacgccgagcagtacccgggcggcatggcccgcgcctacgggccctacacgccgcagccgcagcccaaggacatggtgaagccgccctatagctacatcgcgctcatcaccatggccatccagaacgccccggacaagaagatcaccctgaacggcatctaccagttcatcatggaccgcttccccttctaccgggacaacaagcagggctggcagaacagcatccgccacaacctctcgctcaacgagtgcttcgtcaaggtgccgcgcgacgacaagaagccgggcaagggcagctactggacgctggacccggactcctacaacatgttcgagaacggcagcttcctgcggcggcggcggcgcttcaagaagaaggacgcggtgaaggacaaggaggagaaggacaggctgcacctcaaggagccgcccccgcccggccgccagcccccgcccgcgccgccggagcaggccgacggcaacgcgcccggtccgcagccgccgcccgtgcgcatccaggacatcaagaccgagaacggtacgtgcccctcgccgccccagcccctgtccccggccgccgccctgggcagcggcagcgccgccgcggtgcccaagatcgagagccccgacagcagcagcagcagcctgtccagcgggagcagccccccgggcagcctgccgtcggcgcggccgctcagcctggacggtgcggattccgcgccgccgccgcccgcgccctccgccccgccgccgcaccatagccagggcttcagcgtggacaacatcatgacgtcgctgcgggggtcgccgcagagcgcggccgcggagctcagctccggccttctggcctcggcggccgcgtcctcgcgcgcggggatcgcacccccgctggcg

SEQ ID NO: 42514 - DNA, 16 bp, Homo sapiens
  chr6:1612300-1612316
  hyper
cgcacgtccggagctt

SEQ ID NO: 42515 - DNA, 80 bp, Homo sapiens; identical to SEQ ID NO: 4536
  chr6:1614119-1614199
  hyper

SEQ ID NO: 42516 - DNA, 119 bp, Homo sapiens; identical to SEQ ID NO: 4537
  chr6:1614286-1614405
  hyper

SEQ ID NO: 42517 - DNA, 205 bp, Homo sapiens
  chr6:1619898-1620103
  hyper
gccccgcgttccccgcgcccggcgctgccggggaaaagtggcacaacaggaaagcctcgccagagggcccttcccagtcggcttcctcgccataaaaagccagactccagccgaggtcctgaccccttccaaatatacgttcccttgcccgcggcccgccactcccgcccgggcctcgggctgtgcagcttcctcctaggcctgc

SEQ ID NO: 42518 - DNA, 965 bp, Homo sapiens; identical to SEQ ID NO: 4538
  chr6:1624812-1625777
  hyper

SEQ ID NO: 42519 - DNA, 30 bp, Homo sapiens
  chr6:2766179-2766209
  hyper
cgagagctacgacgcgccgcccacacccag

SEQ ID NO: 42520 - DNA, 886 bp, Homo sapiens; identical to SEQ ID NO: 4539
  chr6:2841488-2842374
  hyper

SEQ ID NO: 42521 - DNA, 644 bp, Homo sapiens; identical to SEQ ID NO: 4540
  chr6:2903031-2903675
  hyper

SEQ ID NO: 42522 - DNA, 30 bp, Homo sapiens; identical to SEQ ID NO: 4541
  chr6:2988708-2988738
  hyper

SEQ ID NO: 42523 - DNA, 30 bp, Homo sapiens
  chr6:2989503-2989533
  hyper
atgaggctggggcccgcgggaaaccgggct

SEQ ID NO: 42524 - DNA, 30 bp, Homo sapiens
  chr6:3118734-3118764
  hyper
gaggggacggtctacgcgggtgccggcggt

SEQ ID NO: 42525 - DNA, 30 bp, Homo sapiens
  chr6:3157151-3157181
  hyper
cagcaagactatcgcgttgtatgtcatcat

SEQ ID NO: 42526 - DNA, 58 bp, Homo sapiens; identical to SEQ ID NO: 4542
  chr6:3162904-3162962
  hyper

SEQ ID NO: 42527 - DNA, 30 bp, Homo sapiens
  chr6:3227011-3227041
  hyper
gaagctttaaagggcgtcgtgacccgggca

SEQ ID NO: 42528 - DNA, 30 bp, Homo sapiens
  chr6:3227541-3227571
  hyper
gccccctccgtccgcgaaagtcacctccta

SEQ ID NO: 42529 - DNA, 1108 bp, Homo sapiens
  chr6:3228110-3229218
  hyper
tatggtgggggcgtgcgcattgtctggggctgtggtgggggtctgggtatggggatatgggggaacagtgaagaaaaggagggtgagagggcggcgaggcgagggccaccagcgcgtcctgaccggggtgggggcagagctggcaccggatgggaacgatggaggactggagcatgtggagaagccgtcaggtgctccagtgccggcaggtgggagggctgaggtggcacaggctgctccgccacctcggactgcggctcctactcggccactggccagagtccctccagccaactgcccctggtgagaccaccgtctttttcctcaaccctggaggccagcgactgcccaggcggcgctccgtctcacagaggcctgggggaggacaggtggccccagaaggaagtcgtgcttgatggcaaccgggacacctgcggcccatgaacaccagcgcggcctccgcccccgccccagcgtgggcctgctttctcctttgtctgtcttgggctggtagctcctctcactgcgccgcagcatctaggggtgaagcgacctcggagcccctcagccctgcccgaccctctccgggagtgcataacgcccctgctggtacccaggagccctctgccccgggggttgacttttgttgctcgctagtgatggagtgggagtggccggtggcgctgcactgaccgtccggagggcagaaagagggtggggtcccgggggcggggctgtcggcggaacaaagggctctcagaaacgtgggatacgctgtgtaacccagtatttaaaaccacacgacaggcgccccacccccccaccccgccctcggattcagttcatctattgtcaagtaagagggtgggttccaagggtggcccaagcccgagtaacaaactttcttatcttccatcgcggcgacctggaggtccgaggcttcgtgctgcggttgaagggtggggaatacgactaaaaactgcagcccagcgcgcgcgagacgacccaagacccacgcgcactcgcacgagcgcgtgcacagacttggagcacagaccctcccttcagatccgcagtctctaggtactgaggcaggaactggtctctt

SEQ ID NO: 42530 - DNA, 889 bp, Homo sapiens; identical to SEQ ID NO: 4545
  chr6:3229277-3230166
  hyper

SEQ ID NO: 42531 - DNA, 609 bp, Homo sapiens; identical to SEQ ID NO: 4546
  chr6:3231723-3232332
  hyper

SEQ ID NO: 42532 - DNA, 1367 bp, Homo sapiens
  chr6:3455897-3457264
  hyper
gcgctttccatccgcgtactgggacaggagtttgggtgcaaactagtaaaggctatggtgctccctttacacccaagtaaaggcatgtggtttgggggacggaaggagattaagccaatgcggaatgccctacacacactctagcaccaccactttggggacttcggttctcccgctggctcgggcttggacctcggtctgcagggagagggttggagggactgggcggctgcggcccttaccttgctgaccacgttctggacgaggccggcgcggatgccgtagtcccatgcgcggcagtcacagttggaggcgttgtcccccttgtccggaggggatggcaggggtggtgtgtcgcctccgtccgcgccgctgctgttgctccggttgcccgcagcctcccagggggcagtggcgaagggggtggtggggaggctggtccagttgcccatgtccccgccccggcctgtggtggtgacccctgccagctcggtgcctttgccggccccgcggcaccagaagttgggctggtccaggaggaacgagtccgagaactggctgaagccgatgaacagcgccgggatccaggtgagcagcacgagggtcttctgatagcccccgcccaggcccccgaggaagggcagcaccgacccgtcatagtccagcaacaagaggctcggggccgcagccgcggagcagcagctcgggtgcgggccgcctccaggatgcagtgggggcagcggctggatctccgcgccgccgccggggcccgcgcgtcccccgaggggcgccgaggccgccgcgtccccgggcggcagggagccgttctcctcggccggggccggctgccgcccaggcccgccgcccgccgcctcgcgccgccggtctatggccatggcccgggcccgcggctcccgcagaggcgcatagagcgcggcggaggctccgcgggcgccccgggcacagcgcgccgggccaggcgcctgcagccgctgccgccgaggagggcccgcggctcgagagagagcgctcggcggctccgggtgcgtcaggccgcccccatgtcacccgccggaccccgcgccccgggcgctgcggccccgctcgggcgccgggcagaggcgggcagaggccggccgggccctcagccgccgcggctcatcagttccgcggcccgggcgccggctgccgagcccgccgctctccgctgctccgcgccggacgcggcaggaggaggagccggcgccgcgcccggcccgcgcccttgccggcggttcagggccctgcgggcggcggtgcgggcaaaggctgctgctcccggggtggccgcgctgtatttctccgacttcgggcgcctcccggaagcc

SEQ ID NO: 42533 - DNA, 700 bp, Homo sapiens
  chr6:3457536-3458236
  hyper
tcccctgcccgttgcccgtttcgcgccgggcggggcgggggaggaggagacgcgcgtagcaggggtcgccggccggcgacgggtcccggcaaagtcggcgtgcgctgagaacgtgtgggccgggtcttctctgaggctgggctcccgcagccgcgcgggccccccacccactccgcgcgcgccaggtctccgtgacctctgtctcttcagaggtgcccggcggtcccgctgcccgcgccccgctcccagtcccaagcccgagggtcttcagccttcgggaacaaccctctgcgctttttccaggagcgaataaggttgatttttgtgtccgtggagcagggtcaaggaggcgcctttgccaatttcaggtcgccagtcccccgcagtgtctggccacctgcgacccgccgcacccactcccaaatcgccatttcttcccccactcctaagtgcatgcgatgtaagcacgatgctgggatatatctccaacacaagttataatacacacagtataaacgtgatggcattccccaccccctccctaagatcttgtattcacgtttggaacgccgtgtgcacaggcgcacacatctatactctcacacaagaagacaaacctctccctcctctcctgctccagcgccaaccttgcccagccagcgctgtataaataacaccagccctgcggcaaacggctaca

SEQ ID NO: 42534 - DNA, 31 bp, Homo sapiens; identical to SEQ ID NO: 4549
  chr6:3906687-3906718
  hyper

SEQ ID NO: 42535 - DNA, 629 bp, Homo sapiens
  chr6:4135154-4135783
  hyper
ctaccacttcaaggccaccaccgtgtttcggttttgttccctatgcacagattcgtgcgggttcccgggaccccagggaggtgcagcgtgcttcttagccgttactctgtacccggccatttcactttatagcatacgtgttctccaagaagcagagtgttaagtccacacgagtgataacggcttgcgtttacctcgcttttagcaagcgacgctttgcaccccagaagcagcccggctgggaagtgcaggcccgggtgctcagctggggcggctcacccgcccggagtccggccccaggaggatgggagcgtgcgcggaggcaggcggagaccttggggactgctgacagggaaccatagccctgacctcccgacgcgcccatcctgaccactccgggcccagcggtgcaggagggcgcgcgtgaggtcgtcactttttagcactacctcaccggaaaaccagcaaagcaaaatcctgttgccacctagacaatagggaaggagggtcttccaacggcggcgaccttcgcctggacagcggtatcctgcgggcgaccatgggccgaacggccgggactccaagcttacctcggacacgaacgccgcgccagtctccaagccaagtac

SEQ ID NO: 42536 - DNA, 30 bp, Homo sapiens; identical to SEQ ID NO: 4550
  chr6:4415168-4415198
  hyper

SEQ ID NO: 42537 - DNA, 687 bp, Homo sapiens; identical to SEQ ID NO: 4551
  chr6:4775126-4775813
  hyper

SEQ ID NO: 42538 - DNA, 77 bp, Homo sapiens
  chr6:4776193-4776270
  hyper
gttccctgccccatctcgggtccgtcgctgcccgtcctggtgtgcacaaccgcgctgcgcctcgaacctcgaggtcc

SEQ ID NO: 42539 - DNA, 507 bp, Homo sapiens; identical to SEQ ID NO: 4553
  chr6:4948975-4949482
  hyper

SEQ ID NO: 42540 - DNA, 31 bp, Homo sapiens; identical to SEQ ID NO: 4554
  chr6:4949502-4949533
  hyper

SEQ ID NO: 42541 - DNA, 1292 bp, Homo sapiens
  chr6:5085036-5086328
  hyper
aggagcagaagggaagggatgcgctccccgctctccggcggcgcggaatgggcctccttccagcctctgcgtaggcaagatttccccagttgcgcgctgcaccggggactccccagcccgtgaggcagccaagaggagagcgctcagtgaccctctgggggcagagccgtcaggccaagttcatgggcaggaagactttgtgcacgtgggggtctctgaaggttgagcgcgagctctgcacccccacttcgaggcactcaagaagcggaacagacgcgagccccgccgggggtgcgggtgagggctgcagggagcccgcgaacgacagaaagtcgccccccgcattccaccggagcactcgggaacacggcttccaggtgtcccagcggccgcgcctccccgcccccggccctcccccgtcgcgggcaggttcaaccgggaggcggcgtggccccggagccggccccaggcccgcatcctcctcccacttcgccctgggcagccgcagctaaaagccggaggctccaaagtggaactacgttgtcttgtcgagcctggggcgactcgcctcggggagggcgagcctgaactgcagccctgcgctccttccacggcccgaggagttagttaagtctccagaggggcccggttcggcccgagcaagtccaggggcgaacggcgtcatggagcccataggggcgcggctaagtttggaggcgccgggaccagcgcccttccgagaggccccgccggccgaggagctgcccgccccggtggtcccctgtgtgcagggtggcggcgacggcggtggcgcttcggagaccccgagtcctgacgctcagctaggggataggcccctgtccccgaaggaagaggccgccccccaggagcaggaggagctgctggaatgccgccgccgctgccgcgcgcgctccttttccttgcccgccgaccccatcttgcaggcggccaagttcctgcagcagcagcagcaacaggcggtggcactgggcggcgagggggcggaggacgcacagctcggcccgggcggctgctgcgccaagtgcaagaagcgggtgcagttcgcggacacgctggggctaagcctggccagcgtgaagcacttcagcgaggcggaggagccgcaggtgccgcccgccgtgctctcgcgcctgcgaagcttccctatgcgtgccgaggacctggagcagctcggggggctgctggccgcggcggcagtggccgcgcccctttcagcgccgccttcccggctccggccgctcttccagctc

SEQ ID NO: 42542 - DNA, 611 bp, Homo sapiens
  chr6:5851315-5851926
  hyper
caaaacattaacagcgggggacattcctctgctgaccccaaagttcagcaggtgcgggagagggaggggcggactcttctgtctgcacagggcttggggaggcatctcctcctcggggctcgcagacagggcttctcgtgccaacgctgcacctcggggcgtgttctcccacccatctgtgctcaggcatcccttccctctcctctggattttgtttaggcctatttgcaatttcttaaaaaaaaaaaaaaatctaataaatagttggagcctgaaagagagctggccaatgaaacgccgcgttggggcattaccgcatcggtgaggccgcccattggctggcgtgccctgaggcgatggctgcgtttccccggcaccgccccgcgccggtgcccacgcgtcccgggcttcaggggagcacctgggaagcgctgggggtcgcgtgcccttggccggaggcctggtcacccgcaggccctgccatcctcggcttggccgctgctgcccgcgcgcctgtggcggagcgagcctgcctccagggcagcctcaccgcctggatcctgggcaggagacctcccaggtaataaccgtgatcacggtgttgatgctca

SEQ ID NO: 42543 - DNA, 991 bp, Homo sapiens
  chr6:5996397-5997388
  hyper
gcgatctgggactccgtggcgtgggggcttggaagcgcgtggaggggctgagagaggggagagggcgcccttcctctagggcggccccgtctgggaagcagttggaacagcagtaggagccaggggttcctagagaagaaccctgttaggagagcagaccagcccgcgctcccagtccccgccccctcgccccttctgccccgcccttagcctgcctcttcctagatcttccaggacattgatttccgagtaggaagcccgcgctgctaggggaggggcgtcctctgtgggtcgtgggggggtttcccttctctccacagtcggagcagaagggcgcctgccttttattttgacaagcaatgggcttagttgtgagcacttgtttgcccccaatatgtagaggaaaagatactgataggaggcggcgtgctacgatggcaaaaatggagaagaccctccctctttatcctggttctcctccttgttaaatagattcgtatttaagataggcacagacattctaatttgaattccaggggttgaactccagttagaatcatcctatttatacgcagaccgaaaataaccattgaaacgaaaccaacaaaatgcaactattttccaaaaccccgagcgtttgctggtgggtgaccaccccgcgcaggtagcgcggatctgctttggttttgactgagaacccgggttttgactgagacctccgtcgggaggaggggactgggtgggagttagcgggcgaaacgattccccggagtggccccgagcggcgcgtgcgtgaacgcgcggccgtaatatatgctgccattaagaatccgtgcagcttccagcgctccgggcgcagggacgcatgtgttgctggaattcaatccgtggggggaatgcagattgggctgcgactcactgggtttgatttatgaactgttacactagcaattgtttacacattgcatttcagagcccgggcccaccctcc

SEQ ID NO: 42544 - DNA, 579 bp, Homo sapiens
  chr6:5997401-5997980
  hyper
cgggcttcgtgcgggaacctgctgcagcccccttggtctctctccatcctcctcccttcccccgtcccccccccccggggcccccgcagcttcctcccacagccaccttctccaagaaatcagatttcgatttctctgaacccagagacctgcatgcagttctttctcccccgcctactccaggcctgcagtccccggacccgggtcgcctctgcccatttactccggaatgtttacttctctttaaggccatgcggggcctataaataggagaggtggaatcagccccactgccagatcaatagggcccgtctcctcgccatttcagctgagctgtcttattaattatgaaaggattcacctgatccctgccagggaacacagcctctcggcccctctgctggagcccttaatggcggttccttcgcaagctgcctctggccaccgcacaggaagaggcgaatcgtggttaggccgagcctgcgaggatcgtggttagggctccggcccgcctgaggcgggggcagacggccggccactggcattgtctgcctgtgcgagcaagcccagttcctctaa

SEQ ID NO: 42545 - DNA, 30 bp, Homo sapiens; identical to SEQ ID NO: 4561
  chr6:5999244-5999274
  hyper

SEQ ID NO: 42546 - DNA, 352 bp, Homo sapiens
  chr6:5999609-5999961
  hyper
cgggacctccgcctaccccagaagcggctgtctaaagcgggggtgggggggcgccccctcctgtctggttttcccttccagttgccgggagaggactaggcagccgggagccgggccgtgcacccgctgtggcgcgctggcacctcggcctccgcaaacagattgctcgccctcctcggggaaagctaggaaaacagtgctaagcctcgcaagctgccgcccattaatgcctcttagcttgcaagatgggttactagctctgagcacggccctcccctcggggcttcttacattctcctccccctcgccccttctgtctccctccttctccacgccgcggtactctcgcctt

SEQ ID NO: 42547 - DNA, 14 bp, Homo sapiens
  chr6:6003514-6003528
  hyper
gagaaggccagagg

SEQ ID NO: 42548 - DNA, 394 bp, Homo sapiens
  chr6:6004349-6004743
  hyper
ggaacgggaagcactggggaagggaccgaggttaacttcgacctccgctggggcagatacgtaaaccttctcaaacctccgagttcaccttacagcgaacattaaatacccttgcgactacaatactaacaaatcgaacactgacgtaaaatcttaagaataaacgaatctttgttctgatagagctcgttcaaaatggaaatacactccacacatcttcctctataacgcatgtcacaaatacagctttgcagagaagaaacgaaataaaataaagtccaatctccccgtccacgtctctccccaccccttgcctacacccccaaaactcagtggcgaaagaagcccctaaaatgcattgacattttttaaggggaattggggctcgccgggg

SEQ ID NO: 42549 - DNA, 1529 bp, Homo sapiens
  chr6:6006755-6008284
  hyper
aaaccgatctgggacgcgctagtccccaggaactgatgcccccaccctcgggggattgccggcttctccgcaccctggggcggccgcggacccgctagtccccctccgcgcctcgggccggggcaggctgcctcccgcctccagcctccagccgggctgagcggccacttacctatttgcaccgcgaggatcagtgaaatatatctgccgttcaacttaagtcccatcctacgtttagtcaaaccatttgcgaccgcagacctttaaatagttagtttagagaacgcgggggaaagccaaaaaataggcattgccaacaagttccgggagcgacagagactttatgcactgggaaggcagagggaggagagaaagagagggagcgaggaagagacagaaagagagagagagagagaaagagagagagagagagaggctgaggggggggggagagctgggaatggttcactccattagaagggggcggaggaagtacagcctcacgcccacgagcaggcctgacgtgggggatgacacggaatgattttttttttaatatagacaccttggtagagaatcgccatttatagtcatcagaagctggaattaatcagatatctccaattaatgtgcgatctgaacgaaattttgcctcccgggggtgagcactttcctattctagcggtcacccctgcctcttcctcgttccgggggccccccagccccgccgcctccctgcgcagaacaggggctccccctcccttccccgccaggagctggggagtcctggcgcgcccactcgattgtttcaacctgctccccctcctccatcagcaccacagagaatccagcccgctctctacgatgcaggggggtttaaaggagcgggagagggaaaaacagctaagctagctcgattaattcgaaagcgctcctcggccgcccgccccctgcgcttgcctaccctctttttctccaacccagcagctgagctctgggcgcagcctggagcgcgtgagcacgcagcccggccccccgcacgagcacacacacacacacacacacacacacacacaaacgcgcgcgcgcacgcccgccagccgcgccgagcgcccccatgcccgcccgcacacaaggcacgcgagcgcgcgcacacgcccaggccccgggggtttggtttgcacacgtggggccccagaaataaacaccgaatgtcctctgaattttacccacctgcgatgccccagcgggccaaaggccgcttcaagggacacagcgacacctgttttagggggcgagtagggcaccggggaaggagcctctgataagacagttttcggatactagtgatttaccaaccaactctcagcgctttaggaaatttccaaggcaagcgctggtgtgcggacttctttctaatcttgatgcgcctcttgggcttatttgttgggctacacacacacgtacccacacgcacacacgtacatcacgtacgcacacgcacacccggacccacacacacctgcact

SEQ ID NO: 42550 - DNA, 811 bp, Homo sapiens
  chr6:6008842-6009653
  hyper
ggtgtctgcaatgtgcggcccctaactcacgtcccgcgggagcctcagactcccatgcagccttcctggccctgggggcggagtcatgtctccccgcccctggttatgtcaccggcctgcgggcggggcggttgggggctcgccttccggtgtccaggggcacggtggcggccccgggtgtttcctttccccgagctcggaggctccgggaagaaccgaaaacgtgggcggacaaggggtggggcgggggctggtggcgagaggggggcgtttctcggaccctcccccgacgtcttccaatggcagggcgggaggctttccgaggggcggggcctcaggggggttgccacgcggcccggcccacggctccgcccctcgctcggggttccgcgtggggccggcccagctttcccggaccaggccaccagctgcgggcccccaacctcgctcagactcgtgcagagcccaggcttgggagtggcttaaggttttttgccctcaacgtccttgccttcctcctgcttatccacctgggatcttcacagcatcattttctgggatcctctccaacccctcccctgtaactctgagcgtggggcgctggggatgtggagtaggcagggctgagggcctcaatgaagcgggtgaacccacgcgcgtgcgcacagccgcccgcgccgcgccccgggccgatccggttcttgcccttgggacgtggctgcgcctcaccgccctaccccgggagggaacccccgctgactttttcctctcttcattttcctccccaggcgtcccaacctccctcataggc

SEQ ID NO: 42551 - DNA, 31 bp, Homo sapiens; identical to SEQ ID NO: 4569
  chr6:6320597-6320628
  hyper

SEQ ID NO: 42552 - DNA, 826 bp, Homo sapiens
  chr6:6546461-6547287
  hyper
catgaaaaattaatcagcctccgcctgtccgcggcctagatgggcgcaaagcagatgacctggcaggaaccagccgcagtgaagccaccgcaaccgcagccgcagccgcggaggggaggccgtgcacccgcccgccgggagagccgcgcgcctgagccgggcgcacgtgggaagtgggccacgagactggagtccaccgagatggaggccccggcactcgggctcaggcctttgtgcttagcacgtactgttggaatccagcacgccctgctccggcgggcgcctccgatcctgaagcgcgcacctgggaactcacgcaccgcccagccgcgaggggcttggcctggctgaaagccacattattctcgaaaacaaccgtgggaagcacacgctgagctcccggggcccctagagtatgcaaagaggccggccctgcgagactaaataagtctctccccctaggacctagtcccttgccaccggctcccgcggccaccgcgcagccagagtgcaccgtccctagggctttggcggtggccagagccagcaagtgcggcggcctggagctggggtggtgagggcggatggcaggttggagaaatgcagccgagccgcaggtttctagaggcctctacagcccctgccatctgggcactgcacagacagacgctgcgtgagacctggagctcgccacctccatgcggcgctgccagccactccgctgcgggtgcaggagcgttccatgtcggggactgagggaccagcgccggctccccagtttctctgcattgtgaagtcattttcttaaactcgggctttaaataac

SEQ ID NO: 42553 - DNA, 72 bp, Homo sapiens
  chr6:7051765-7051837
  hyper
gggcgctgcatccgccttccgagatgctggcagcccgggacggcctagcgcggccctctccttatttatcca

SEQ ID NO: 42554 - DNA, 235 bp, Homo sapiens
  chr6:7051873-7052108
  hyper
cgcccccttcctcgcgcggagcccagcggcagtcgagggcctggctggtgtggggctgcggggtgcgtgcgcggcgcggggcccgggcgtatttttcaagcctcggggcgcgtgggtgcgccccccaactcctgtcccccgagaggctgtgccacttccgcagccccagcccagtcccttccccactgggccgcacctccagtctgcccgcaaggcgccgcgcagcccccggccc

SEQ ID NO: 42555 - DNA, 227 bp, Homo sapiens
  chr6:7052331-7052558
  hyper
ccagcggagttgggctgggggcgggcgcaccccatctccccgctccgcctcgggggaggcgggtgatgcgtggagggggtggttaggatcccctctaccgagtcgccgcttgcctgcggcgcttttgcactttcctaagctgagcagctgtgcaggcgtcgcccgccggcccctgcgccctcctagcaaagcggggtttgcagaacgggaactgggcggtcttccca

SEQ ID NO: 42556 - DNA, 45 bp, Homo sapiens
  chr6:7389873-7389918
  hyper
agaaacggccagcacgggcctcgccgtgccggctactcaacacgc

SEQ ID NO: 42557 - DNA, 1811 bp, Homo sapiens
  chr6:7541427-7543238
  hyper
tgcgtggtaggtagcgtttccagtgatcaacaaaagtaaatatttgaccagtaagtctccaatcgagaggcccctccattccagctatttccgcccggggaccgaggaaatcctcaaaagccgggccacgcattcccagcccgagaggccccagcgcagagcgcagcagcccccgcgagcgcaggtcctccccgcggtggcttcgcccagggcgcttgggtctcggggaccccgcccccgccccgcccggtgttactcaggcctcggtggcgcagggcggagtcgcgggcggcgggcgcaggtggggaggggcggccggagcgcgtcggtgacacccgcgggggggcggggaaggcgcggcggccgcaccccaccctgggaagaaaccggccaggtgtggcctaggcgcccagtgccagcggggaggagactcgctccgccgccgaccaacaccaacacccagctccgacgcagctcctctgcgcccttgccgccctccgagccacagctttcctcccgctcctgcccccggcccgtcgccgtctccgcgctcgcagcggcctcgggagggcccaggtagcgagcagcgacctcgcgagccttccgcactcccgcccggttccccggccgtccgcctatccttggccccctccgctttctccgcgccggcccgcctcgcttatgcctcggcgctgagccgctctcccgattgcccgccgacatgagctgcaacggaggctcccacccgcggatcaacactctgggccgcatgatccgcgccgagtctggcccggacctgcgctacgaggtgaccagcggcggcgggggcaccagcaggatgtactattctcggcgcggcgtgatcaccgaccagaactcggacggctactggtgggtacctgcccggagagcgcgggctgcggggctcgcgggacagggagggaccgtcctcctctggacgactgggagactcgggtcccgaaggtggaaaggtttttttgccccaggtcccgaaagaacttcccggccgcgctgggagcaggaccgggtgtcctgacgcgtgcggggacaggttggcccctgtcctgcgaacagggactcggtcgtacctttctcccctcccgcgagcccgggcgggtggtcagagggggcgtcgggcccgcgcggggctgtcccctgcctgctggacacggctgcagccgcctttgtcccagcccgcgaatgggaggtcaggcgaggtggggctgcgaccacaaaacccaacctctccaaccgtaatcaaagtaaaagaggaaaggagcggggccccggtcctgtctggtggccgagtggtgctcggggctccgcagtctctaccggctcacccccaatccccagtaaccccgagaccacgactgcaacgactcctggactcctcggccacccaaggacgtttgtatcaaggctgcgcgtcccggcggcgcggggtcctgtcccgaggaggcgcttcggcttcccctgtccgggaaacgaaacttccccgccggggcggctgccgggcccgggtctcgaagttcggccgggacgtgcctgttaccttcggtcgtccgcgccgcagcccccgcgggcgagcgcacctggggccctgcctctgagccttttgtttcctcctttttaaaaacaccggatgaaagaccccagtgtgccttggatcgcagagcgccggccgcatgtctgctttgatccagaatgtgtgggcaggggagtgggggggtgggagaggacgacgctgggggcccgccctggcctaggcgccccgggaagaccccccg

SEQ ID NO: 42558 - DNA, 30 bp, Homo sapiens
  chr6:7590297-7590327
  hyper
ccagagcaaatgcacgcaagagctgagaaa

SEQ ID NO: 42559 - DNA, 1723 bp, Homo sapiens; identical to SEQ ID NO: 4574
  chr6:7726045-7727768
  hyper

SEQ ID NO: 42560 - DNA, 95 bp, Homo sapiens; identical to SEQ ID NO: 4575
  chr6:7728086-7728181
  hyper

SEQ ID NO: 42561 - DNA, 30 bp, Homo sapiens; identical to SEQ ID NO: 4576
  chr6:7728424-7728454
  hyper

SEQ ID NO: 42562 - DNA, 220 bp, Homo sapiens; identical to SEQ ID NO: 4577
  chr6:7728787-7729007
  hyper

SEQ ID NO: 42563 - DNA, 30 bp, Homo sapiens
  chr6:7910206-7910236
  hyper
ctgggcagggaccgcggggtgacatttgga

SEQ ID NO: 42564 - DNA, 30 bp, Homo sapiens
  chr6:8064728-8064758
  hyper
atctacccagcgggcggttccggaaaggcg

SEQ ID NO: 42565 - DNA, 30 bp, Homo sapiens
  chr6:8102766-8102796
  hyper
gctcctggcagacgcgagacctgcagaaca

SEQ ID NO: 42566 - DNA, 30 bp, Homo sapiens; identical to SEQ ID NO: 4578
  chr6:8825196-8825226
  hyper

SEQ ID NO: 42567 - DNA, 30 bp, Homo sapiens
  chr6:9413417-9413447
  hyper
gagcaaccagccagtcgtttccctctttac

SEQ ID NO: 42568 - DNA, 31 bp, Homo sapiens; identical to SEQ ID NO: 4579
  chr6:10125877-10125908
  hyper

SEQ ID NO: 42569 - DNA, 39 bp, Homo sapiens; identical to SEQ ID NO: 4580
  chr6:10381553-10381592
  hyper

SEQ ID NO: 42570 - DNA, 274 bp, Homo sapiens; identical to SEQ ID NO: 4581
  chr6:10381694-10381968
  hyper

SEQ ID NO: 42571 - DNA, 9 bp, Homo sapiens
  chr6:10382321-10382330
  hyper
cgaggggcc

SEQ ID NO: 42572 - DNA, 445 bp, Homo sapiens
  chr6:10382716-10383161
  hyper
acatcttattaagggagacttcgaaggcctgttagcaggtgactgcggcaggggcaggggcgcatcagctgtccggcttggaccggcgtgggcgtgggctgggggcttttccgatttgctgagtcagccgcgggcgccgcgggctttggtgtttccagcccaagcgactgtgcttcgctgactggtgtgtcaacttggtagtgtaattattgttttgttttctaatatgtaattactctttgtcgttgctattatgaatccaccgagcttgactcttgagcagcaagatggattcaagtttgaagttaggatttgatgcgtggggaaaactggcttctccccatgcgtaggacactataggggcccacgcgtgtcttccccgcagcccagcaagaaagggggcgccgggggtgccctggcggataacaggcggtcacgcctgatc

SEQ ID NO: 42573 - DNA, 542 bp, Homo sapiens; identical to SEQ ID NO: 4584
  chr6:10383638-10384180
  hyper

SEQ ID NO: 42574 - DNA, 30 bp, Homo sapiens; identical to SEQ ID NO: 4585
  chr6:10384431-10384461
  hyper

SEQ ID NO: 42575 - DNA, 30 bp, Homo sapiens; identical to SEQ ID NO: 4586
  chr6:10384944-10384974
  hyper

SEQ ID NO: 42576 - DNA, 639 bp, Homo sapiens
  chr6:10385279-10385918
  hyper
gtgaaaatttgcgattcagggcaaatgattctccgacagacgctgggctccacatcccacccctcccagcccgcgccccctccggtcctcgcgctccccggccgccacgtcccgggcagttcaggaaagcttgctaggtttccacgccggaaagcccaaggagaaggagccagcaggcctctgagcgtgtgagcgcgtgtgcgtgtcagcgcgtacatgggggtgttttcctcttcgggaagtgttatcaaacagtaatagctaccctcgactccgaatcacagcattccccccagaattcctgatcagtaaaacccaaatcgttttcaagacaaaggagcatcaatcagcgacaaagacagatttaacgtattaaatctttattaaagtgaagtcattcttattgaaatgatgtattgggtgtgcagaaagattggatttttttttttttttttttttgacaatgtgtaaaatggagatggtggcggagagcttgcgccgcgtcttgccctgattgttctgggctgggattggattactgggactgcccagggtcccgcgccaggaaacaccaccttggactacagggaagagactgatctccctcctcctgccggcccccacgttgatttcccgaga

SEQ ID NO: 42577 - DNA, 36 bp, Homo sapiens
  chr6:10386138-10386174
  hyper
tgtgtttgctcccagcggggtcgccggccgtctcca

SEQ ID NO: 42578 - DNA, 1152 bp, Homo sapiens
  chr6:10390063-10391215
  hyper
tgcttttttgttgttcgtttgcgctcgcgctcgctctcgctctctctctgcatccccctcaccccctttctcggagactgaactaagtgaaaagttgtttcaataatcgcagctctctgctccgccagggccgagggaggcgggcggaacacggagggtgttttgttaaatgctcccgtcgttcgcaggggctgggacttgataaaaggagacagttttctgaaaagatttgattgaaatggcgtgtgccagggctgatgggagccagcgagggacaaagcgccgagaatccatggacactcgagcaattatgcctccacgctgaaggtggattagcgcgctggaaagaagcatatgtttggcccggggcgacacttccccccggctgagcttagagaatgggagcgcggagagcggctggacccggaatatcaactatctgcgaagcccccccttctagcccaactccgccagcctccccgcccccgccggggaaaagtcggagtgcatttttacaaagatgagaggagaagagagggctaggggaggagcgggcagggaggggagtaggtgcctagaggtgcaaatggccctgggatcccccaggagcggccctccaggctctcctctctggcgatcccgagggcgcgtccgtccttgggtgtggaaacccagagggggtcaaataaatgctcccctatggaatttcccactgctaaggtagttcggtccaggatgcccgctcaacgcgtattggaaggtcagccgaattgttgcaatgaaacaaggttttaatgactaaagatgcaagtgcctaaaaggttgcgttgggcaggaggcgcttggagggcagcgcgggttcccagccattccttgggtccaggtcgaggaaggcctcgggagacgagtcccacagtgagatatttgatgaaatgggtcggggctggaaagctcggacaggccgcatgggagagaaagggtgcgggtgcggcagtcggatccccacgcagctctatctgcttagacacccgggcgagggatgctttgggagtttggagccagaaagtttcccagaccctgcctccagtcattaattaaagcgcccttcccgtggaaaaaaaaaaggcccttaaaactctgacctggagcctc

SEQ ID NO: 42579 - DNA, 322 bp, Homo sapiens
  chr6:10391324-10391646
  hyper
cgcgagtgccggtggccgctgcccaggccgtccacatttccctccctggctgtccttcgagcccctaccagtccttcctctccctgccgcccaagcccaggcaagactcgaaccgcccgtcccacacaatctctaccatccccccacccccacgcccaacgccagacagtccaaatcaagtagcgaatagctcctaatacaaaggggtgcatggcaggatattttcggggaattcaaatagggcagcgccctgccagcgggtggggtcctgggtggggcaggtgggacccagtgagggggtgcgcaccgcgctgcctcctcc

SEQ ID NO: 42580 - DNA, 30 bp, Homo sapiens; identical to SEQ ID NO: 4591
  chr6:10393763-10393793
  hyper

SEQ ID NO: 42581 - DNA, 30 bp, Homo sapiens; identical to SEQ ID NO: 4592
  chr6:10404348-10404378
  hyper

SEQ ID NO: 42582 - DNA, 199 bp, Homo sapiens; identical to SEQ ID NO: 4593
  chr6:10409933-10410132
  hyper

SEQ ID NO: 42583 - DNA, 2666 bp, Homo sapiens
  chr6:10410242-10412908
  hyper
cgaggatccaggcccgacagctggtgaggcagcccccggtgcgtgtgcaggagcccagactcctggctctgcctctggccgggccagcctgggtgctgcggctgcggctgggcgtgcagggggttcaggctgtaggggtcgttgacgtgggagtaaggatcttgcgactgggggtagataggctggtagggtggggggaagtatgggggctggaagtcggcattgggggtgtgggacagcggcggggcgctcgtgtagggagattgacctacagtgcccagctggggcaaccgtgccgtcccgttgctggtgccgtcgtgacggtcctagaagagagcgagaggaaaggtaaagaacaaggaatcaggcgtcgagctacaactatccacacaaaatccacttgacaagtctgcgtgggaaatcgcccgttcccgttggctggccgccgggaaaaaatcagctctaagttcttttcaggaaataccctcaagtgaaacagaccgaacaacgcagagaaactgtatatggagggggcacaagagactatttaggggtttctttcaaagagaggaaaagatagaaaagggtctcctggaacacagcccattaaactgcagcgtgaaatctctcttaagcaaaattaaaattcctcctaaatactaaacagcagaagcggccttttcttttcccccgatttgaacctgtctgccactgcgttattgtttattctcttccatttatttggagagaaaaaaatcataaacgttcaaagactgttaccgtttcatgactacttaaatagaaacatatttcgcagaggggctgtaacaaaaacacacgtttaaattaccagcttaaagaaggttttaactgcaggatcggggtctgtctttttcgcttcctctgttaggagcctttttctcgacagagtcgatttatggtttggatagggaaagggggacgtcaagtcaaggtttaaaatagaaagattcagccttattgggtttaaaagagagaggtgcaccccggggctgtggccccccccccccgccccttccaccccagccccaaagggcagaagaaacgcctgactttaggtttctctattgcaattcccttgcaaaacaagcgaagagagttgattccagagaccgcgaaccctcggcggttcggccgcaggtcccgagggtagggggcacaccgcgctgcacttttcctgcagacagtttaagcatcaaatgttgagaacatctcggggacaagtgaagactcaaggaaatcaagatgaacgtggggagaaacacgccttgggaagccgcggcgaggtaggtctgcgtgctcggagaggtcgagcgggggctggggtagggggtaatgcactcgatttagggatggaaaagagcgagagaaaggcggaaggtggggtgggggatgcaaatggagagggtgtcctgaaggaaagctgggcgtgaaacccgaggtttcgggcagctccacggcaccaggtttccagaatccaattcctaaagaaacagcaacgggggtggggatgggactcaccatggctgaaaaactgtgaactaacatctgcgaagagtctggggtaacgagtcagggtggaaaaaaacaagcaagcctggagcgcccggctgccccgccgcccgagcgcgccccacacaaaaggcgccgagagccccgcgccacccaggactccagtcacggcgccgacgctccccggagcgcgggagcccggctcggatccatccgaacttgaaccaccgattcgcgcggcgccttcagctggtcgaacccacggtctctatcctgccgcgactggttatgattcaaagttctttaaaaatgaaaaaccccaaaaaaggaaaaaggaaaaagtatgtgtgagtgtgtgggtgcgtgcgtgttccttaatccgtgtctccccctcttttcttagcggcggcttcgcttgagcttctaataaccgcgctgggcagcgttcctggagcctcctaatagcagatattcatgactattaatattacacgaatacttaataagggaagaatgcctggaaatcgagcgtgaagcggagaggcaactcgcgccggagccggctctcaatgcagtccattgacgggagtctcagtgtagcaaatcggagtggggagagggagcgcgagagacaaaaagcgagcgagagagggagcgggcgagcgcgcggggggccgcggcgcggcgtctggcgaatcacagggaaggggcaacattttaaaaggttgcagggcatgcaaaagtgaaagagaaagaggcagagagggagaccgaaggagagagcgcagagagggagaatgtgtctgcgtgcgtgtgtgagaaagaaagtgtgggcgagggagaggagccccgggtggggagaggggagggagggaaggagggagagcccgagaggaggaagggagggaaagagggagggaggaagggagggagggagggggagggggcccagccggagcgcacggagggggaggccgcgggggagggggaaggggagaggaagcgagcgaggacaatcagacctaaaaggctggggcagacctcgggatgcagcgggggtcgtgcgtagcgggtaggagctgcttgggaccgcgtccgggcgctcgtggggctct

SEQ ID NO: 42584 - DNA, 71 bp, Homo sapiens; identical to SEQ ID NO: 4597
  chr6:10413259-10413330
  hyper

SEQ ID NO: 42585 - DNA, 98 bp, Homo sapiens
  chr6:10414482-10414580
  hyper
cccgtggggtgcgtcgatcctgtagctcagagggagaagctacttagaacttcgtgaagcacagaggatctggagcgagccccgcagctgggatcagt

SEQ ID NO: 42586 - DNA, 1465 bp, Homo sapiens
  chr6:10414933-10416398
  hyper
aaaggggagtaaagtgggacacgagcttcaaagtagggaaaccaaagaagggagcatccacgtcctctctctgcagcttctcccccgcgttcttcgggcgaatccgagggacgggcgctgcgctggggaaagtttgtcccacccgcgtttcgcagctggttgcaaggagaggaggaggagagggagggtcaagctcggagcctgtgaccgcacggatgatcgagccggcgtcgcgcttacctcgcagtcctcgtacttgatattatccgtcaatttccaaagcattttcatggatcggcgtgaacggatatgcccctctcggtctcgcacccaagtggagctactctctgggtgagcgcaaagtgctggctgccggcggtgagcgcaggaggaggaggaggagggagaggaggtggaggaggagaaggaggagggagaggaggagggcaaggaggaggaggaggaagaggagggcgaggaggaggaggagggcgaggagaagggcgaggaggaggagagaagggaaagagctcccgtgtgcgctcggagatctccctctaatggtagaaacttttcccttttccagctctttaccaacagcctaatcgcctcattagcatatcaacaatagtccaattgctcgccagtaccacaatctgccgccggccgctccgacacaggtataaaggcctctctacgccgcgaacttgcttctagagcgcactccagcctgcgaactgataaaaccttcctcgagctccgccgcgaggccctgccccaacaccccctctcttaccccaattccgccacattccccttcctttctttctccgcttccttttctccagagatgccttctgcaaagcccggcactgctcaaggtccaagcgccacgcctggggcccagcttctagcacttctcccttaaccctgctaccacgatccgagctgcccttttggccccgtgcaattttattagaaatcattatccctttcgcaattaaacataaccaccaaaccaagaccggcgaagtcactccaggattttttcccaacaagggatcgcctccgctcgaggcagccaccccctcgggccgcagcgccttgggagttttattggctttgagctttcccccaggttggagattctgccaagcggctccggtggctctgctggggtttgcaatcccttaattgcagcgtgtaaaataaaagttgtaccctgaagaggttacttgacagctccaggggttaaacaatttttctcctgtttgtgtgaagctagggccaactgacagttcaaattggtgttcaggctaaggtttcctgggtgcaacgtggacacgaatacagaactcctatggaactgcacacccgcttctgaagttgagcctaaaaacagacgtgtgtgtgcctgcaagtctagataccgtctcgtgcgtgcatcaaaataaatcaccgggaa

SEQ ID NO: 42587 - DNA, 36 bp, Homo sapiens
  chr6:10416507-10416543
  hyper
cgcgaggcagagcccggctgccgcggaacctggagg

SEQ ID NO: 42588 - DNA, 336 bp, Homo sapiens; identical to SEQ ID NO: 4601
  chr6:10417193-10417529
  hyper

SEQ ID NO: 42589 - DNA, 199 bp, Homo sapiens
  chr6:10417835-10418034
  hyper
cgtcgcggggaagagggagtatttgtgtgagagacagagtcacaaagagaaagagacagtgaggggccagaacgactctcttttctccgattgtcaatgcccagtgggagccgggagcccaacaggcccagcccatcagattcggcccctccgggccccaaatccgctcgccccacccgagatccaggcctccagccac

SEQ ID NO: 42590 - DNA, 30 bp, Homo sapiens
  chr6:10418726-10418756
  hyper
tgatgatgaaatcggcgacaggcagagcct

SEQ ID NO: 42591 - DNA, 450 bp, Homo sapiens
  chr6:10418989-10419439
  hyper
tcacactccctcatccgtagcccaggcggcaaaaacccatttcaggaagtggagtgagttgctagctaaacttcgggcaaactttgtatctcctacagaaacacgctgcctccgcgacccagccatctggacccctttccattcttcacacatcctagatctcccgaaatctgggggtaccaagagagacaggtgcaccagaacctgtccaacactcaaccctggggtctagggcgaggccgcaggcgcagcaggctgaaaaccttcaccgccgcgcaccacaaccccaggccttctccctccccccttccgaattagtcatcctcccaagtttctacttgaggtgggaggggggtgggggaaacggccacagcacaaaccacaagtgacccaccaggccacctgtggagcgtgcgccggacttccccggcgccgggccccgcgggctgc

SEQ ID NO: 42592 - DNA, 525 bp, Homo sapiens; identical to SEQ ID NO: 4604
  chr6:10419476-10420001
  hyper

SEQ ID NO: 42593 - DNA, 265 bp, Homo sapiens; identical to SEQ ID NO: 4605
  chr6:10420118-10420383
  hyper

SEQ ID NO: 42594 - DNA, 73 bp, Homo sapiens; identical to SEQ ID NO: 4606
  chr6:10420681-10420754
  hyper

SEQ ID NO: 42595 - DNA, 197 bp, Homo sapiens
  chr6:10420876-10421073
  hyper
cgcctgggccaggcccagttaccctcccgggctgctgtcgccgggacttggagacgaacaaagaaccagttttaaatcgtcttctctgacatgtcaggcaaatatgtgtaaaaggtcagctccacgctgtggagcagagacctgtcccccaggcaccaaaacctcccctttctaaccgtgcccgagagcctccgacc

SEQ ID NO: 42596 - DNA, 101 bp, Homo sapiens; identical to SEQ ID NO: 4608
  chr6:10421350-10421451
  hyper

SEQ ID NO: 42597 - DNA, 1113 bp, Homo sapiens
  chr6:10421548-10422661
  hyper
cgggcccagccggacgggccgggccgagcctaggaggggctggcagacgtgtcccagggccagggtggggcgtagggagcgccgtctccaccctcagtacttttggggtgggggacctgagcgtgcggagagcgggaggcagagctgagagcggggttaagcgcgaagctaaggcgccgcatagggttgggtgggaatggacagggtgagctggaagcgaagcaccccagccaggccttaggagagaggaccgtcggcatctgtgcacatcctagcgggcggatgatgtgggagagaggcggagggaggtgaaatgcgggagctagaatttagctttgcagtgaggtcacttggggtctgcattcagctccgatatatacatgtaggggctgtgtgatcctggggaagttaccgaccttgtctgaactcctgtttcctggtttgtaaagtggctaattggtgggaattcaataggagaatgtgcgcaaaacgcttagcacagcgcctggccaacaatgcgctctcaagaaaggctgctgagccttgtccaggacggtctacaccgccccacgtccaagatgagttcacagcgcccaagacctgttcaatttaagatgatgtaaactgcattgcccttcttagacacgcagcagccaggagctggtcatctgcacctcccgcgatttcctcctcagaaccccagtcctgccagatttgcgtccttccctggctcctcaaacacctgctgcaccgctcagagcctttccccaccccgacctcctccgcagctccgcaccagcgagactgcgccccgtggcacctcgggggtgccacgattggcgggggatgggggatgcctcccagcttcatccgctctccgggttccagacaaccattccggagagccagctgctctcagtgcgggcaggcccaaggccactaactgcacttggcgacccacctccgttcccaagaggcctcggaaagtgcggcctcgggtctcttttgaaacagagacccgcggcaccccgcttctccccctgggataggagagggagagccgcgggagttccgcagccactcctggcgctgccaccacgaagcaggttcact

SEQ ID NO: 42598 - DNA, 969 bp, Homo sapiens
  chr6:10423450-10424419
  hyper
actgtggctttccagaatgcacgctttcaactgacagcagtgggtacaggcccgaggtgtgcagcaagctgggaagcccagaggccgagaagctaaagatgccctggagactggaggagcgcatcaccggtcagtgcgccccctccaggagcggcctcccggccctctcggccttaggcgacaggtgcagcagctgtctctactgcccgctgtgccagggcggctgccgagcactggtgcggaaccactatcggaacgagtttgcacttctgtttacaaagcaatcctgccatcaaaagaggaacaaaatcaccacttatcacaccctgtcataaagtaatctgccctggagggaaacccttgtggagaactgctgtgtgtgtgtgtgtgtgtgtgtgtgtgtgtgtgtgtgtgtgttgggggaggggggatggaggaaagggggattctcccaactcttctgcagagtaaatcgctggaacgcgtggtgtcccaaccggcctggaaagaccgagagtaccatgagctgtgaagctggggtgtgacagggatgcccgtccagggctggcaagagtgcagaatggctctcttggatctttggaataggcacatctgcagaccccgctccaatgtttactttcctagcgccttcgaagatactcccaagggcccccaaaatagatcagcaaaaagtgttgggggtggggggagtgaaaaagccagttcttgaagactgtaaggtcccctttcgcatctcagcatctggagtgtgcagggaattcctgaccagtggttttgctccctccaatcccttgcctcccccctcccatgttatgcacttgttcttggagagatggacgttaaagaagcgtcaagcagttctcactgcaaataaatggtgcagaaataagagagagaggatgaaagcctaggaagttataagtgatcctgacccgacccagccaccag

SEQ ID NO: 42599 - DNA, 160 bp, Homo sapiens
  chr6:10425629-10425789
  hyper
cgcgacatctcttggcggcgttgaccgtttgcccgggacactggtttagaagcacggcatagggtgtctctacatcttagaaatcaagacagcctctaggttagaataaagtttactctggactgggcataactccactccacctctgcgattcttcttc

SEQ ID NO: 42600 - DNA, 1126 bp, Homo sapiens
  chr6:10425838-10426964
  hyper
cgctactttaacgtctcagtctcgttcgctaagcccatgcgcctgggacttgttctttgaatctcaagtccgaaaagccaggaatcctcgatcatggacttcctcctgctaaattagagggagtgaaatttcgctctcctctccatcctacttccccatcccaaactcgctagattaagttcgctgaccaggcgcgcacccaatggcagcaccctctccaacattttccccaccagagaggcaagtgtcctacatttgtacgtaaaggtccctgagtggctaggtggagaggctcggatgtcttttcctggagcgggcctcggggagctgcagcagccccagcctcaggcaccacagccaagcgagcgcgccttgggctcgctgctctgcacgcagctggaggtctgggccgctgaccctctggccacgtagtcaacccgaggatgtgtgccccggggctcggccttgcctcgggtgagaaggctagtcaccattcagggtgcaggtgtcatggcctggaaatggcaatatctgagcaaacaggtgggcgtcgcttcccggcggtgcggtggccgctggctcgcagcgcgctccagctttcggcgccgccgccgcccctttgctctgcggactcagccagttcccgggtggcccagctgggtggctccgaggcctgcccccttgggctgcggcgggaggcggggactgcagtgccgagtgtagggcgccccagccgggctggcggttcacgctgcgctcgggcctctgccgggagggcgccctggcgccaaacccgggcgggcaggggggtggagagccgattgagtttattcccattcagaatttagaggctggtggagacagagagtctcctaaatggatgcaagtctcctgaaagtctgggccggaagcctcgaaactttctgccacgcaaagccccagctagtctccagggctcggtcctggttccctttgtgcaggcccggaagtgtccgcccggttttcccactgcctggaggggcccagggtcgcggatagactcggacaaggctccgtttactttcagtttgtcttagttgactaatggcgggactggttgtaatgcgtgctctgagattttctccag

SEQ ID NO: 42601 - DNA, 60 bp, Homo sapiens
  chr6:10529012-10529072
  hyper
cagggaacagccagacgagagcttcagccatcacgaggatgatttcggaacctggagaaa

SEQ ID NO: 42602 - DNA, 199 bp, Homo sapiens
  chr6:10694888-10695087
  hyper
cgcagaggatgtcccgcccgctcccttcagacgggcgtagctggcaccttcctgagatatgcctgcttgcccccgatttttttctccttgcagtgagaacctcctcatgtggcatctttacttattctcttcttggaaaatccatgtgacctccccgcgcttaaagtgtttccacgttacaggcgacttaaaggcagcc

SEQ ID NO: 42603 - DNA, 31 bp, Homo sapiens; identical to SEQ ID NO: 4615
  chr6:10723050-10723081
  hyper

SEQ ID NO: 42604 - DNA, 30 bp, Homo sapiens
  chr6:10747678-10747708
  hyper
cctggcccagcttacgtggtccagcttgtg

SEQ ID NO: 42605 - DNA, 128 bp, Homo sapiens
  chr6:10882223-10882351
  hyper
gccttgtccttggccgcggtgctgaacgttctccacccgaacggcagcatcgacctctggcagctgccccctcctttataaagatatacctccggggggctccgccctgtctcgcctacctcgctagc

SEQ ID NO: 42606 - DNA, 650 bp, Homo sapiens
  chr6:10886952-10887602
  hyper
ctggctttttaaggcggggcaaaaacttggaacagctaccacaaagcgaacgcctatctgtttggaatttcgcaaataaggaacgtttaaatgacgtagttcacatcctttgagtgctggctttctcttaaagggtgagtgcgtgcgcccaggtggtttggcctgtgtgcgctagttacttgcacgcgcttcttgagtctcaaaacacagagctctagtaaacttcagggggcggattcgtcaattacagttgcggaagaagactcgactcgaagagcggtccgccaccagggctctttcggcagcgcccccagcgggcggggctcttgggcggggaagcaggagagggccgaccgagcgcaacaaagctgagcggcgcgtcgcttcaggaacgaagaagcctcgttatgcaagcggtgagtgacccccgaagggcccggaccttctgtccacagtgctagggcgcgcgagggcgcggggtccctggggctcaggttctgccgccttgaggtgttcgctcagagaccgggtgctgggcatagtcccccgccacctccttgggtttgctcggagtgtattggcagcctgcggggagaccaggcagaatagaaacctcggatccctagctaaatagcgctcagggaaagggg

SEQ ID NO: 42607 - DNA, 1232 bp, Homo sapiens
  chr6:11043615-11044847
  hyper
gcagttcatcggacacgggtgaacacacacacacacacacacacacacacagcttactgtcaggcagttcatcggacacgggtgaacacacacacacacacacacagcttactgccgaggagaaagaagcgttactaatccagagtggaggactggcctgggaaatcgggcagagagaggagttgtcggaaagaacacaccagaagcccctccgagcccagacactgatagaaacccagccgcttcccaagccaatctgcaaacccaggaggcacccacgagtgcacagacacacccccggggtgcaggcgcggtgaagggaggagaggggcaagagcttgaccgttagggcccgaaccccagaactcccgaggcagggtgtgtgccgcgcgcgggaaacgccgttctccgctccaggcgtcggcgggcggtggcgagagcaggttcgggggtccggagggtcggagggtgggctgcgcgcgggaatggccgccgcgaaggaggggcggcttcctcgggcatcccgggcgcccggccccgtgcatgcaacaggggactgggcgcgagcgggcgcctcgaggtgccggggcgggaccggggagaggggaccgagacaaagttcccgagacccgcgggcctcgggccgacccgcgcgcccccggcccaaacgctcagctcccgctccccaggcccgcgcggacccggcccctccgagggtagcgggttccagcggcgaacccgcagcgcccgcgccggcgcccgctcggccctttcccgcccggtgcgtgggtccaggagagaaagaaagcgcggcggtgtcggtggcggcgcgcggccccactcaccatgatccgcagcggctgtggcgcggcgacccgggcgggcggcgatgcgctgtccagggtagccgggtccctctgcccggcgctatctcggcgcccgcgccggttacccccacccacacccacgcccggcgcgcgcacacccgcccgcgcctccccgccccctcgggctcgcgccgccgccgcgcggcgctccgagcctcggggccgtttcgtccccgccccctctcccacaggggcctcgccggccgccgcgccaggagggcgcgcgggggaggggcgcagggcaagtgaggcggcgccccccgcccctgcggcctcgcgcgccccctcctgggcgaccgacctcgccctcgcgtccgcggcgtcccctgccggccgggcggcgat

SEQ ID NO: 42608 - DNA, 30 bp, Homo sapiens
  chr6:11094051-11094081
  hyper
tagggggcctggggcggagaagccgctaca

SEQ ID NO: 42609 - DNA, 30 bp, Homo sapiens
  chr6:11094606-11094636
  hyper
ctgctgatggtgtgcggtgagtgggggcgg

SEQ ID NO: 42610 - DNA, 30 bp, Homo sapiens
  chr6:11217446-11217476
  hyper
aaagtgcacatcagtcgtaataggaaaatc

SEQ ID NO: 42611 - DNA, 30 bp, Homo sapiens
  chr6:11233027-11233057
  hyper
acttgtaatgtgatcgcttctttttgcttt

SEQ ID NO: 42612 - DNA, 31 bp, Homo sapiens; identical to SEQ ID NO: 4619
  chr6:11382658-11382689
  hyper

SEQ ID NO: 42613 - DNA, 30 bp, Homo sapiens; identical to SEQ ID NO: 4620
  chr6:11392177-11392207
  hyper

SEQ ID NO: 42614 - DNA, 117 bp, Homo sapiens; identical to SEQ ID NO: 4621
  chr6:11537479-11537596
  hyper

SEQ ID NO: 42615 - DNA, 31 bp, Homo sapiens; identical to SEQ ID NO: 4622
  chr6:11537919-11537950
  hyper

SEQ ID NO: 42616 - DNA, 30 bp, Homo sapiens
  chr6:11538752-11538782
  hyper
tcggagccactctgcgcgtgtcccgggggc

SEQ ID NO: 42617 - DNA, 30 bp, Homo sapiens
  chr6:11968636-11968666
  hyper
gccaggcaggagaaacgagactagaagtaa

SEQ ID NO: 42618 - DNA, 30 bp, Homo sapiens
  chr6:12163297-12163327
  hyper
tatttctaccagaaacgaaattaaagatgt

SEQ ID NO: 42619 - DNA, 30 bp, Homo sapiens
  chr6:12957903-12957933
  hyper
gaccatcgtggaggcggttttaggttagaa

SEQ ID NO: 42620 - DNA, 907 bp, Homo sapiens
  chr6:13013564-13014471
  hyper
tccagtgaaagtcaagggctacgggttggacccgccggagagggtaatttgctgtggccctggaggggagcttgcacccgaggtttcccagtgcagcgctttccgtgtgaaacattttgctttcattcggcagctttaggcgtgaagaaaagggggagggggttggcgttccgccctggagctcttgagagtgaaggtagcttcaaacccagcaggctctcagtagctggtgctgagatttccggaggggtggggctgccagaggaggatgtgcacgtgagaccccgagagaggtgggagtggagcttctcaggtaggacccaggagcgccctgcctaccccctcctccggcttcgggatccggattggctggggcagcgaggtcggcgaggtcaagaccctttcggcgccctccccgacccgccccgccgcggcggtgcttatatagagcggccggcgcgggcggggcgggggcatgctggcgaggccgaggggcgcgagtggcagcgcgcgggggccggagcagcgcccggccccgggcgcccgggggccggatggcggagcccacgcgctcagcgaagccggggaggtttgcgctccgttcgccgcgctgcagggagggcgcggtgccaggcgcgagcgccgagaaacccaaaaagaaagctttttatttgctgaggatgaagcccctgaaggagcccgcccccaacaacaacaacaacgtgtcctttgtgatccactgtcaactaggcaaggagatcaaacacatttgcagcaactgcagtcggggggaggacgcccgggacggtgagtgccggggcccgtcggggcggcggcggcgagcgcgggaggcggggaggtggctcgggctgtctcagtttgggggcaccgccggcgtctgtcgcct

SEQ ID NO: 42621 - DNA, 30 bp, Homo sapiens
  chr6:13328954-13328984
  hyper
cccgcaaaatctcgcgaccatttactctgg

SEQ ID NO: 42622 - DNA, 30 bp, Homo sapiens
  chr6:13486918-13486948
  hyper
gcacaccaagtccacgtcctgatgcagcag

SEQ ID NO: 42623 - DNA, 30 bp, Homo sapiens
  chr6:13488468-13488498
  hyper
aaccgcagacttctacggtctccttccaag

SEQ ID NO: 42624 - DNA, 147 bp, Homo sapiens; identical to SEQ ID NO: 4623
  chr6:13574017-13574164
  hyper

SEQ ID NO: 42625 - DNA, 30 bp, Homo sapiens
  chr6:13614887-13614917
  hyper
ctgctgttccaggtcgtgggttagggcccg

SEQ ID NO: 42626 - DNA, 30 bp, Homo sapiens; identical to SEQ ID NO: 4624
  chr6:13615555-13615585
  hyper

SEQ ID NO: 42627 - DNA, 30 bp, Homo sapiens
  chr6:13722507-13722537
  hyper
ttgaaacaggcatcagttatttaaagagag

SEQ ID NO: 42628 - DNA, 30 bp, Homo sapiens; identical to SEQ ID NO: 4625
  chr6:13924919-13924949
  hyper

SEQ ID NO: 42629 - DNA, 119 bp, Homo sapiens
  chr6:13925405-13925524
  hyper
ccggggcccgcgcgcggagtctccctccgggcaccacgggggccgccgtcctggcaccaacttgaggggctgtgcggcggagggcggctgcggagcgcccgcgcgggctgcacctgctc

SEQ ID NO: 42630 - DNA, 293 bp, Homo sapiens
  chr6:14117385-14117678
  hyper
tataatttaaacaggacggtactgactgataacctcccggggaaggcagggagccaagtactacagacttgtatgtttccatggaaatctaacgcgcctttgattatcacagattctggagaagagtgaggacttgggttcaccagtgcgttcccaaggacaggctgggcttctgaggaagttgcccaccctctcggaatctggtttggcctccgtaaaatgggcagatcccgctcggatggcccggttcccggcttccttttgcgggtcaacggcagcgtcacgcgcgcgag

SEQ ID NO: 42631 - DNA, 129 bp, Homo sapiens; identical to SEQ ID NO: 4628
  chr6:14211102-14211231
  hyper

SEQ ID NO: 42632 - DNA, 30 bp, Homo sapiens
  chr6:15245757-15245787
  hyper
attctaaggtgccccgggaataggcggctc

SEQ ID NO: 42633 - DNA, 30 bp, Homo sapiens
  chr6:15662749-15662779
  hyper
tgccgggaaaggaccgcagggtcccacacc

SEQ ID NO: 42634 - DNA, 256 bp, Homo sapiens
  chr6:15663119-15663375
  hyper
ctctcctcaggcctcgggctgctgctgcctctgtcgccccctgggtcccacgccgccaaccccgcgctgtcaccgcgcgccccgcactcccactaccggccccgcccccggtctggtcctcgccgccgcgccgcaaccccagccccttccgcgttcccgccccgcgcgcgccaggctcgcgcagccgcagtggactgcgccgggctcgggctgcggaaaaggggcgggtcttcccccgaccgagagggccagtagc

SEQ ID NO: 42635 - DNA, 30 bp, Homo sapiens; identical to SEQ ID NO: 4629
  chr6:15810289-15810319
  hyper

SEQ ID NO: 42636 - DNA, 228 bp, Homo sapiens
  chr6:16129889-16130117
  hyper
gatccaccccccagcgccccatcatccccccaacccagcactttcccggaagaaggcggctccgcacacctgccgcaggtatgtgcgtgatgccgcctgtcgggtccccgcggcgcctggcagtgccacccgcgtgccaggatgggatggagtggctcgaagcagtctcgggccccaggggttcttggcagacaagccgggcccttgtctcacgctgcttctcaggct

SEQ ID NO: 42637 - DNA, 30 bp, Homo sapiens
  chr6:16238532-16238562
  hyper
ataaggcagccacacgctaagtcccctctc

SEQ ID NO: 42638 - DNA, 30 bp, Homo sapiens
  chr6:16239206-16239236
  hyper
tgaaattctctacacgtcggtcccgttggg

SEQ ID NO: 42639 - DNA, 30 bp, Homo sapiens; identical to SEQ ID NO: 4631
  chr6:16761870-16761900
  hyper

SEQ ID NO: 42640 - DNA, 30 bp, Homo sapiens
  chr6:16762563-16762593
  hyper
tttctctcttcgcacgcaggtccggaaatc

SEQ ID NO: 42641 - DNA, 30 bp, Homo sapiens
  chr6:16762969-16762999
  hyper
cggtaggtgtcgggcgacatttgaccttct

SEQ ID NO: 42642 - DNA, 153 bp, Homo sapiens; identical to SEQ ID NO: 4632
  chr6:16763512-16763665
  hyper

SEQ ID NO: 42643 - DNA, 574 bp, Homo sapiens
  chr6:17101832-17102406
  hyper
tggtttctgttcgtgcgaccgtctttctgaggtcgcttttgtgccactgccttctggtgctgtcggggccgcctccacaccgtcctccggccctcaacagccgtctctgcgactggacacctgcctcgcatgccacacgatcaccttcactacagacagtgtctaaaaacaaggatgtggtccaggcaccaggggtaggggcgtgtcacacacaccgtgtcttacaaagaggaaaaataagaggttcccgcaagatgcttgcgactctggtacttttcaaagtaacgcagccaggcagcgggctttcccccggcccctcgctctggatagggctgccatttgcatcctagctgtgatttagacacctccaaccttctagttttcagttacaagagtcccatctccgcccaggtcccaggtctgcatgacgtaatttattgtggcaaccattcctggcgactgcccagaaactcagtgcgtcctgcccggggtttaagcgcgggaagtgggagaggcgggtggcgcccgagcgcagtagcaggggcgtagggcgcagggcgcaggagcgcgggac

SEQ ID NO: 42644 - DNA, 1230 bp, Homo sapiens
  chr6:17281118-17282348
  hyper
cggcgcccggcgccccaggtgctgccgcggccaatcgcaggcgtccggcccgcccccctccccagccgggcgtcgacccccggcccgcgggggaagggagcagagaggtggagagctgtcctcggcactcgtcttccagatcccacggcgggagggacagaccagagccgaagctgcgcggagttcctcgcccctggccccgccgccgcgccccccgcccgcttcggcgctcggacgctcttcccgcggaccctccccacaccccacccaaggcacctgattcctaaggaagaaaaatctacctctaaagcacccgcttcttcgcttgagaactaccctctcttttcatttttggcctccccgccgggtgagtggaaaccgcttgcacattctatagaacccgattctaatccagacgatccggagaatttgtacggtgaccggcagggggggcgggaggagagagcgaagtcaagtctccagggccgctggcgacttcggaagccgcgcgcccggcgctctcggccgcccccggccgctcgcccccgccgcgccgccgccctcgcccccgggctcgcccttggcccccggcggccgcgaaagggtgcgggagacgcggagccggaggaggaggcgcagccgctgcccgagccgcagccgcagccggagcccgagccgcggggcgggtgcgaagatgcacacgacccagaaggacacgacgtacaccaagatcttcgtcggggggctgccctaccacaccaccgacgccagcctgcgcaagtacttcgaggtcttcggcgagatcgaggaggcggtggtcatcaccgaccggcagacgggcaagtcccggggctatggatttgtaagttgcacggactgggggtgacggggagggacggagtggcggctgaccccggggatcgggagcttggagtgaggggctcggcgtgacccgtgaggagccccgcgggtagagcggcgctgccccttcgctccggggtgaactgaaactttgctaggggagagggtcggcgccagcctcgcggggttcggagaagacccagcgctgtgcgaggtcgggggccgggcagggcagagcaggggtgaaaggagagacctgtaatgacggcgggatttggggtgcggagggttgcgagggaggggccgcaaccctgaacaattgcattcccgggctggatgccggttgttaagcgcgctgttgctttgtaa

SEQ ID NO: 42645 - DNA, 608 bp, Homo sapiens; identical to SEQ ID NO: 4635
  chr6:17393824-17394432
  hyper

SEQ ID NO: 42646 - DNA, 30 bp, Homo sapiens
  chr6:17600631-17600661
  hyper
gaggcgacgatggccgaggggcccgaggaa

SEQ ID NO: 42647 - DNA, 76 bp, Homo sapiens
  chr6:17706878-17706954
  hyper
ctctgtgtgtgtcacggtctctatggagatctcccgcagaggacagcacgaacagttccccgcggtgctgaggcct

SEQ ID NO: 42648 - DNA, 202 bp, Homo sapiens
  chr6:17987164-17987366
  hyper
gcgacaaacttgaagccgtcctcctaacaataggaaagagcactcccattttcctggctcaaacttgcgggaccccgcgaggctggatcctcccagccgccctctcggaacccgctttacctttctccctgtttggtgttagaaggaggagggtgcaggaccgtttgattcccttccatctccaccacgcacttggtgttca

SEQ ID NO: 42649 - DNA, 31 bp, Homo sapiens; identical to SEQ ID NO: 4637
  chr6:17987686-17987717
  hyper

SEQ ID NO: 42650 - DNA, 58 bp, Homo sapiens
  chr6:18122950-18123008
  hyper
gggcctctgcactgcgatctgctgccccttggtgggcacgcgcggcactgtttcctga

SEQ ID NO: 42651 - DNA, 30 bp, Homo sapiens; identical to SEQ ID NO: 4638
  chr6:18155901-18155931
  hyper

SEQ ID NO: 42652 - DNA, 1475 bp, Homo sapiens; identical to SEQ ID NO: 4639
  chr6:18263765-18265240
  hyper

SEQ ID NO: 42653 - DNA, 583 bp, Homo sapiens; identical to SEQ ID NO: 4640
  chr6:18277377-18277960
  hyper

SEQ ID NO: 42654 - DNA, 103 bp, Homo sapiens
  chr6:18277979-18278082
  hyper
cgccggacccccacctcttctccaagctccactcccgacttttcttccccgcccccgggaagctctggaaacccgcacccccggctctgaggtcagggctggc

SEQ ID NO: 42655 - DNA, 124 bp, Homo sapiens
  chr6:18387298-18387422
  hyper
agagaggtagcaggcgcttaaggccaagaggtgagctgtccctgtctgggcagaagaagtgcgctaggggcagctgcctgcaccccctgctctgaattcctgcaacagcggtcccaggagaaca

SEQ ID NO: 42656 - DNA, 30 bp, Homo sapiens; identical to SEQ ID NO: 4642
  chr6:19691639-19691669
  hyper

SEQ ID NO: 42657 - DNA, 59 bp, Homo sapiens
  chr6:19691937-19691996
  hyper
cgcgggctgggcgcgcggctcccgcccccagctccttggcagaggcgccggaggaaggg

SEQ ID NO: 42658 - DNA, 176 bp, Homo sapiens
  chr6:19692142-19692318
  hyper
cgtcccgagggctctcccttttcccagagcgcataccaaaggcagactcctttgcaggctccacgagccccattcgcggtggaaaggggcgttccagactgcagggtgaggggctccggtgtgtgtgtggtgtgtgtggtgtgtgtgtgtacgcgcgcgcacgcccttaaggaaaa

SEQ ID NO: 42659 - DNA, 103 bp, Homo sapiens
  chr6:19804696-19804799
  hyper
gccagaatgtctgccgagcctagcatgggatgctgcccagcaaaacagcacccagggagagggcgactgaggaagacagcctgcaagcgcgcttcagaaagga

SEQ ID NO: 42660 - DNA, 49 bp, Homo sapiens
  chr6:19805001-19805050
  hyper
tgtcagggcgaccgcccggccggcgccagcggagcgggggaggcgggct

SEQ ID NO: 42661 - DNA, 306 bp, Homo sapiens; identical to SEQ ID NO: 4646
  chr6:19836898-19837204
  hyper

SEQ ID NO: 42662 - DNA, 151 bp, Homo sapiens
  chr6:19837269-19837420
  hyper
cgactcccactcagctctcttttctcagaaccccgacccacagcgttgacggaatggagtgcccttcccattggcccgagcgtcattccccgaggtggcactgcccgcctgattggctggccactccagaccccccgcccactcctccact

SEQ ID NO: 42663 - DNA, 199 bp, Homo sapiens
  chr6:19837743-19837942
  hyper
ggtgcttttgctttttttttcctttgggctcgggctgagtgtcgcccactgagcaaagattccctcgtaaaacccagagcgaccctcccgtcaattgttgggctcgggagtgtcgcggtgccccgagcgcgccgggcgcggaggcaaagggagcggagccggccgcggacggggcccggagcttgcctgcctccctcgc

SEQ ID NO: 42664 - DNA, 1584 bp, Homo sapiens
  chr6:19837983-19839567
  hyper
cgatgaaggcggtgagcccggtgcgcccctcgggccgcaaggcgccgtcgggctgcggcggcggggagctggcgctgcgctgcctggccgagcacggccacagcctgggtggctccgcagccgcggcggcggcggcggcggcagcgcgctgtaaggcggccgaggcggcggccgacgagccggcgctgtgcctgcagtgcgatatgaacgactgctatagccgcctgcggaggctggtgcccaccatcccgcccaacaagaaagtcagcaaagtggagatcctgcagcacgttatcgactacatcctggacctgcagctggcgctggagacgcacccggccctgctgaggcagccaccaccgcccgcgccgccacaccacccggccgggacctgtccagccgcgccgccgcggaccccgctcactgcgctcaacaccgacccggtgagaggccgggcgccggccgtgggcggacgccgcgggggatgggaggttggtggcgtggtggcgggacgcgggcgctcaccgtcctccgggcaggggcgggccaggaatgacagccccctccccctgctcctccgggctcccccgggccgccagcagccggccgggctcggcgagcgcgggtccgggagaacgcgcagggcgggactcggggctgtgggcgccctgggctgtcaagtcccgcctgagcccggaggggcccccccggctacaggctggggtgggggcgtcggcgcgccagcctgatttccgaggacaatccaggaccgtgtcgagcgcgttgtttgcgcctgctaacctttcccttggtgttcggttgctgttccaggccggcgcggtgaacaagcagggcgacagcattctgtgccgctgagccgcgctgtccaggtgagcgcgcatttcccgtctcgggtggccggtcaccagagacgcccgtccccgagggcttccggggccaggcaccgcggtgttctttgcccccagcgtttctgagagcaaactcccaaggaagtaaatcccctctctccctgccacctaagtagcaagtaaacccgtacttagccttagaactcgaggttcagtctcggtggagacgggtcagcccttgtccccgccgtccccgtgttttttctggtggtcagcgggctcttctgccttccctagttcccgagggagggcaccctcgtgggcatgggagctgccccggtgtcctcccgtgcagtctgtcacccacaaagggggacgcgggcagggcgccggagtgggtcccctctccgggcttcccgagggccgcagctgcctgctcggcgcctggcccggccgcgggcgggtgttgtctgacctggtggtttgttttgggttgttgatcaagcatgtcttgagtttggtcggtggcgccagttagtctgcagcgagaaggttcacacaccccctctattcattcctcttccacaggtgtgcggccgcctgagcccgagccaggagcactagagagggagggggaagagcagaagttagagaaaaaaagccaccggaggaaaggaaaaaacatcggccaacctagaaacgttttcattcgtca

SEQ ID NO: 42665 - DNA, 803 bp, Homo sapiens
  chr6:20212303-20213106
  hyper
cgcccgccccgtgcacgcgatcgctggggagctggggtcgctgcgctcccggcctgcagttacctggtccagcgggatgcccaggagctcgctgagcgggtgcaggtaggtggagcccgtggtgcggtaggaaaggctggacggctgcggctctgctgccatcctgcatcttcgggaggtggctgcccctgtcccagcccgcaacaccccctgctcggcgtcctcccgcccgggtgctcttgggtggttgccccgagaggcgcacggccgcctggttcgcgggggagcgaacgggaggccggggaatgcgaaccggcgcaaactctcgaggcgcaaactctcgaggcgcaaacttggctttggcgctggcgctgcagccacgggcgccgtaggagggccgggcccaaggcgccccgcttcccgctcccttcctctccgcgcccattggcccggccgctcgggacggccccgagaggagggaaggagggaggaaaagtggggactccgagcccggcccccaagcgccgcccggcccgcccagcctggcctgcaccgaggccgaccgggagagggaaagcgacgccagcgggcgccgccgcctggccctgcagctggaggcgggacgcgcctttcctcctcccgggctgaccgtcctagccccccgccagacaaaacgacctcacccagcgggcgccttccactagagagcaccacccaccccgccccaccctgttttggtttcgccgccgcagtcgaagcggctgagtggctgcgtttccctttcaagccgtagagggttcctc

SEQ ID NO: 42666 - DNA, 325 bp, Homo sapiens
  chr6:20401054-20401379
  hyper
tgggataggtttgagtcgttgtgtttgcttccagtcagagaacttcctacaaaactgaagatataaagtgctgatgcctgggcgtgcctgcgttcgttgggggcacgacgtcatcgtgggaagcgtgtactttttcggattactgcttggcggattagaaacccgtagatcagttctaggttagccctgattaactgccctgggtgtttctgggccagagggaatgtctgctggattcaaaccaatatccgttgtaagacaaaagagttaatttgtactttacccctatccaggctaataatgaaggtaccgggaatgatctgga

SEQ ID NO: 42667 - DNA, 30 bp, Homo sapiens
  chr6:20402138-20402168
  hyper
catttttcagctgccggccgcagcacccgg

SEQ ID NO: 42668 - DNA, 30 bp, Homo sapiens
  chr6:20404075-20404105
  hyper
gacggctcgggggccgccgacgccgcgggg

SEQ ID NO: 42669 - DNA, 31 bp, Homo sapiens; identical to SEQ ID NO: 4651
  chr6:21332629-21332660
  hyper

SEQ ID NO: 42670 - DNA, 31 bp, Homo sapiens; identical to SEQ ID NO: 4652
  chr6:21588775-21588806
  hyper

SEQ ID NO: 42671 - DNA, 1132 bp, Homo sapiens; identical to SEQ ID NO: 4653
  chr6:21594474-21595606
  hyper

SEQ ID NO: 42672 - DNA, 265 bp, Homo sapiens
  chr6:21595890-21596155
  hyper
tcgcacgcgtcctcctcggcctcgtcccactcctcctcttcctcctcctcgggctcctcgtcctccgacgacgagttcgaagacgacctgctcgacctgaaccccagctcaaactttgagagcatgtccctgggcagcttcagttcgtcgtcggcgctcgaccgggacctggattttaacttcgagcccggctccggctcgcacttcgagttcccggactactgcacgcccgaggtgagcgagatgatctcgggagactggctcg

SEQ ID NO: 42673 - DNA, 30 bp, Homo sapiens
  chr6:21649069-21649099
  hyper
tcaaagcctttctctgataatcatctagca

SEQ ID NO: 42674 - DNA, 2314 bp, Homo sapiens
  chr6:21664625-21666939
  hyper
ggaacgggacgcgcaggaacccggcccgacgggcgcggctcacacccgtgctcttcctgcgctctcggcctcactttgcggccagagccgcggccctgcgcgtggccggcggccgcttctttatctccgaccccactgcccagtactgtacgcgtccagactaaagaaacatcattcgcttaaggggctgggaaaagcgcgtgctccgctcgccctggcaccgcgggtcgcccagctcgcagactgggacgggcggtgcaagaggtggtgctccctgtccaggaggggacgcggaagagggcatctctggtcccgggatgcgattgtcccggtttctccttctggcccactcgccgcgcgcacgaactctaggggaagttggttgtaaagtttccgagagcggcgtgggctggtgcgagtgaagcgcggggcgggggaggcgaggacagaagctctcctcgcggcgtctttgttctgctctggaggagagaccttggcaaggagtcgccgggcgggtgcagggacctaccgccaccacattccggacccagcgggagccctcctcttaatgcccctccccccgcaagccaacccaggacatagcccccaggtccccaaggttccgtctacctcatccttctacccccaaacttcaccaacccgaaaggattccaagtctgggatggggagaaaggaaagagggtggaggcaaaggtgcgcgacgggctggataccaactggagggtgggtgttcgcattgaaatgtttttttcttttgccctagaaattgcttccccatgcgggcccctactctctcccatttcccccacctccctgctttctttttcttcaattctagtggatctagaaggaaaacgagtgctgctctgagtcactcagcgagctaatgctatggcccgaagttgggatcagggtcgaggggtgggggaccatgtggatggggtcccaattctggaggttgagaatgactggaagggacctggggaagggtcgggagctgttcctggtccgagacacctgatttgtcccggacaaggcagtgggggaggggaaggaaagaggggatgctcggctgggacgtgtcgcggcagggggtggaggatgaggaggcggcctgggaccccgagtcagatctttggggtgagcacgaggacgtggtgtagggaagaggacgagtgagcagcgcctggctgtagggtcagagggcgcctggtcatcctgagagccttgccttcgcagtttgagattaggggaagttcggggcctgagaaggtgggcgcgatgctggagctgggaattcttcctcggagcccctggaccgagttgcgctgcgcctgcagcaacaggtagccccgagggatgggcggaggccccggccgaacccggagctggcctttgtcctgccaattagagggctctccagagggacagcgtgggtgggggtaggtggggaagggcgggagaggagtttcctaacacttggagcccctttgagttgttctgtgtattgggtggaggagggtgaatccgagaggagggaggagggtgaatccgagaggaggaaggaggatgaagagcctagcctgcgccccacctctgattgtgtaagcgcctttatctagggttgaccccctaccctttgcattttgtctcttgggatgacgaaaaatggacagaaactcgacgcccaagtgaatgtttcacattgattggcagggaaagtgcaaacaaagaggtgcatctccgggaaacaatgattttggagatcccctgcccaccaccccagacttgtgcgcggtgcggagggggccagggctggcatctcccggggaaagtttcgagcctggcagtgggaggagaccgtctgggcagagttgtgatgaactggggaccgagcagccccagctcgcctcggaggttcccgagccgggcgggagatgcggggagagggagggggcggggagggaggggagggagagaggaagaaggggtgagagggagaaacctgccgccgctcgccgcctctttgtctgctccgggacttggaacaaaagggggaactctgatgaactctctttcctcccctctcccccggacgccggggtatctccctctcgcaactttgccgccccgactttctctgctgtcaggccgggaaaaagtgtccgaacgcctcgtggactgcagcgggggaaatgtcccttaaaagtgcgacgaagtggggaagaaggtgagtggggactgttgtcttgtttacctctctcccctcaactcgccccgctccccgcccttc

SEQ ID NO: 42675 - DNA, 31 bp, Homo sapiens; identical to SEQ ID NO: 4656
  chr6:21783024-21783055
  hyper

SEQ ID NO: 42676 - DNA, 183 bp, Homo sapiens; identical to SEQ ID NO: 4657
  chr6:22146871-22147054
  hyper

SEQ ID NO: 42677 - DNA, 290 bp, Homo sapiens; identical to SEQ ID NO: 4658
  chr6:24360081-24360371
  hyper

SEQ ID NO: 42678 - DNA, 30 bp, Homo sapiens
  chr6:24403464-24403494
  hyper
gtactgcccttccccggcaacagccttggg

SEQ ID NO: 42679 - DNA, 171 bp, Homo sapiens
  chr6:24494701-24494872
  hyper
tcccaatcaatactacgtgctcaggagctacaactgaagaagcgtgatcacggccttggcatttagggcaggcaccagcgcatctatggaccgcgcacaaattccggggatgccgaatttgggggatgctaaggggagagagtgggtctctagcagcgattgggggctcag

SEQ ID NO: 42680 - DNA, 30 bp, Homo sapiens
  chr6:24645917-24645947
  hyper
tctttcctatttctcggccaggcgctctgg

SEQ ID NO: 42681 - DNA, 30 bp, Homo sapiens
  chr6:24646349-24646379
  hyper
ccccgggggatccccgcccaccgcccgcgg

SEQ ID NO: 42682 - DNA, 204 bp, Homo sapiens
  chr6:24667301-24667505
  hyper
gtcagtgagcaaatcgcggaccaccggggctgccagctcgcctgactcccggcctcttgcgctcctaggggcggagaagggtgcgggctcttcgccctttgtgtcctccttctttcactaacttctggactttccagctcttccgaagttcgttcttgcgcaaagcccaaaggctggaaaaccgtccacgatgaccagcatgac

SEQ ID NO: 42683 - DNA, 177 bp, Homo sapiens
  chr6:24721641-24721818
  hyper
ggcgagggtaggggcggagcaaagaaggaaaaggaaagtgtgtgttggagattggaagattcttatttcgattcttataattagttagtcctgggggtcggccccgcggtatcctgcggcaacaaacctagaactcaattcgacacctggaatttaaacggcgtgcgggagcagatg

SEQ ID NO: 42684 - DNA, 891 bp, Homo sapiens
  chr6:24910933-24911824
  hyper
ctgcttagcattcaacgctcattcaagtcgaggacacccctccccacacagacctcaccgcgttgtacgcaaaatcagaagcaaaaaaggagaaatgaaaaggtgaacctacctaacgacgacggctccttgtcatgtcaggggcacactcagggttctctggcatataaaagcctccgcaccaatgcaatgcccggagctgcccgcacctccggctttgcagacagcctgagctggctcacttgggtgaaggggaccccgggaggaagtcgggtggacgcgagctgtccccagcgccggctgccctgccgcgtccgctcgcagcagctgcggcgcgcggggtgaagttgcggggctggcgggcgcgagggtggcggagcgcggagctagagcggcggagcgggcggaggggcgggagccgtgaggagggggaggcgcggcgcgggggccggcggcgtcacttgtgctgggaggggagggcgggtggagacagctgcttgacagctacttcagcccaactccaggaggctgcgcttcggtgcctgcttccagctgatcgccggcacgccaggctcctttgcaagagctggcgcggcagctttggagtgacccgtggaatcgcgccggggagcgagcccggtggatccagcgcgctggagggagagggcagaggaaaggagccgaggcaaggaaaggccctttcagctaaccttttgggatctttcatacaagctgggctgtgcattgaaaaaaatgaggcggtggtgtatggggtgggggcggtgtgagggtgaggttggctgcccacggcaagggttgtgctggaaagccccgctgaagagggctgctttgtagggcactctctctaccggggctgctttggacacagct

SEQ ID NO: 42685 - DNA, 214 bp, Homo sapiens
  chr6:25278941-25279155
  hyper
gagatagcgaactgcggctgcagagcaccagctgaacgcacacacacaagtgtcttctcacggtatgattagtgttcacaggtttcgtctagctcatcagaaatgaagaatagcgatgatgaagtgacatgtcaccgggagggttgaaaaagaaaaagtgcgtaagagggtcccaaaaagaaccagcttccgtgtagacgggtctgcagaatct

SEQ ID NO: 42686 - DNA, 168 bp, Homo sapiens
  chr6:25280012-25280180
  hyper
acagggcaaccatgaccgaggagagctctgacgttcccagggagttgataggtaagattcacgcggttgttggttttccaccttcctctgcgtactcctcacctctctctcccttcccacctctgctttcccgcaggtctcgagaagtcttggcgccccttagggcag

SEQ ID NO: 42687 - DNA, 30 bp, Homo sapiens
  chr6:25280476-25280506
  hyper
ggaaggacaggtggcgagcgcacagtaggt

SEQ ID NO: 42688 - DNA, 30 bp, Homo sapiens
  chr6:25992386-25992416
  hyper
cctcagcggatccacgaaatggcctctttg

SEQ ID NO: 42689 - DNA, 30 bp, Homo sapiens
  chr6:25993000-25993030
  hyper
tggggtctgaatgccgcgccctctggagag

SEQ ID NO: 42690 - DNA, 62 bp, Homo sapiens
  chr6:26020650-26020712
  hyper
ataaatagagcagctcatgggcgtatttgcgctagtgttgggtgttccgctgtgctgttttt

SEQ ID NO: 42691 - DNA, 525 bp, Homo sapiens
  chr6:26020763-26021288
  hyper
cgccacgcaaacagttggccactaaggcagcccgcaaaagcgctccggccaccggcggcgtgaaaaagccccaccgctaccggccgggcaccgtggctctgcgcgagatccgccgttatcagaagtccactgaactgcttattcgtaaactacctttccagcgcctggtgcgcgagattgcgcaggactttaaaacagacctgcgtttccagagctccgctgtgatggctctgcaggaggcgtgcgaggcctacttggtagggctatttgaggacactaacctgtgcgccatccacgccaagcgcgtcactatcatgcccaaggacatccagctcgcccgccgcatccgcggagagagggcgtgattactgtggtctctctgacggtccaagcaaaggctcttttcagagccaccaccttttcaagtaaagtagctgtaagaaaccaatttaagacaaaagggaatgcattgggagcacttttcgttttaatgctactgaaggcttcaaaaccaatcgatttcgg

SEQ ID NO: 42692 - DNA, 73 bp, Homo sapiens
  chr6:26021527-26021600
  hyper
tctaatgtactccagtctgggcgacagagagattcggttaaaaaaaaagttcgacttaaaataattctggagt

SEQ ID NO: 42693 - DNA, 30 bp, Homo sapiens
  chr6:26022258-26022288
  hyper
gcccttttcagggccgcccaactaaacaaa

SEQ ID NO: 42694 - DNA, 506 bp, Homo sapiens; identical to SEQ ID NO: 4661
  chr6:26027157-26027663
  hyper

SEQ ID NO: 42695 - DNA, 937 bp, Homo sapiens
  chr6:26031786-26032723
  hyper
aaaaattatcacagctactttcgttggaataagtgggtggctctgaaaagagcctttgggttttaagactgatgaaaaagtgactttacatttacgctctttctccgcgaatgcggcgagcgagctggatgtctttgggcataatagtcactcgcttagcatggatggcgcaaaggtttgtgtcctcaaagagccctaccaagtaggcctcacaagcctcctgcagcgccatcaccgcagagctctggaagcgaagatcggtcttgaagtcttgggcgatttctcgcaccaggcgctggaacggcagcttccgaatcagcaactcggtcgacttttggtagcggcggatctcgcgcagagccacagtgcccgggcggtaacggtgaggctttttcacgccgccggtagccggcgcgctcttgcgagcagccttggtagccagctgcttgcgtggcgctttaccgccggtggatttccgagctgtctgtttagtacgagccatggcaaaaccacagaaaagcttgcctgcagagacgtctgtggaggaaaggaaagagctactcttcttttatagagtcagaccaccaactattggacccaagaaaattcaaaaatccccgcgcccttcttggattggtccatctctgtgcctggttgcagattaagagaggctcctgcccattaccgtagctactctgacgtcattttgttaaccccttagctgctatatccactgtggacaagtcttgtactggaaaagtttcctgaagtcttaaaatttacaaccacacaaagcaacgcggaaacctccaattgtttctagttaaaatataaaaaagaaatcagagaatattggagacgattagggaaatttgcatatgcgctttatttaaaattgtatttttctgggtgtcgcataagaagtgtgggcaattag

SEQ ID NO: 42696 - DNA, 36 bp, Homo sapiens; identical to SEQ ID NO: 4663
  chr6:26032842-26032878
  hyper

SEQ ID NO: 42697 - DNA, 442 bp, Homo sapiens; identical to SEQ ID NO: 4664
  chr6:26033433-26033875
  hyper

SEQ ID NO: 42698 - DNA, 30 bp, Homo sapiens
  chr6:26034130-26034160
  hyper
gctcgtgcttttcccggattgtgactcatg

SEQ ID NO: 42699 - DNA, 696 bp, Homo sapiens
  chr6:26087585-26088281
  hyper
ggtgacttctggagccatccccgtttccccgccccccaaaagaagcggagatttaacggggacgtgcggccagagctggggaaatgggcccgcgagccaggccggcgcttctcctcctgatgcttttgcagaccgcggtcctgcaggggcgcttgctgcgtgagtccgagggctgcgggcgaactaggggcgcggcgggggtggaaaaatcgaaactagctttttctttgcgcttgggagtttgctaactttggaggacctgctcaaccctatccgcaagcccctctccctactttctgcgtccagaccccgtgagggagtgcctaccactgaactgcagataggggtccctcgccccaggacctgccccctcccccggctgtcccggctctgcggagtgacttttggaaccgcccactcccttcccccaactagaatgcttttaaataaatctcgtagttcctcacttgagctgagctaagcctggggctccttgaacctggaactcgggtttatttccaatgtcagctgtgcagttttttccccagtcatctccaaacaggaagttcttccctgagtgcttgccgagaaggctgagcaaacccacagcaggatccgcacggggtttccacctcagaacgaatgcgttgggcggtgggggcgcgaaagagtggcgttggggatctgaattcttca

SEQ ID NO: 42700 - DNA, 30 bp, Homo sapiens
  chr6:26104170-26104200
  hyper
gaatcatgtctggtcgcggcaaaggcggaa

SEQ ID NO: 42701 - DNA, 181 bp, Homo sapiens
  chr6:26125816-26125997
  hyper
agacacggtcccccaaaaaaacctttgcttctagggatctggtaacagctgccccacccacaagaaatggagatctgggaccatggacaaatttctagagacctattttcctggattctgtgaatctcgccgaggttttcttccggatctcggtttctgcatttttttgtttgtttgcttg

SEQ ID NO: 42702 - DNA, 329 bp, Homo sapiens
  chr6:26126236-26126565
  hyper
gattacaggcgtgagccaccgcgcccggccggtttctgctttgatcggaattaagtgggcagaaaagtctaggcgggctaagtcttgcctatgcatctgcgcccagctgctcagactggccaaacagacccagtcgtttagtctaacgcttctggaactccactgaagcgttttgcattgtttcgtttggagccttcaaatccgagtgtgtggcaggagataataatcctagcagaagctgtttactgctgacgcgcctcccacttcccagatactgacaccggctcagggcggatccagccttttccgctcttccctccctccacccc

SEQ ID NO: 42703 - DNA, 30 bp, Homo sapiens; identical to SEQ ID NO: 4668
  chr6:26156472-26156502
  hyper

SEQ ID NO: 42704 - DNA, 211 bp, Homo sapiens; identical to SEQ ID NO: 4669
  chr6:26171958-26172169
  hyper

SEQ ID NO: 42705 - DNA, 139 bp, Homo sapiens; identical to SEQ ID NO: 4670
  chr6:26172268-26172407
  hyper

SEQ ID NO: 42706 - DNA, 7 bp, Homo sapiens
  chr6:26172706-26172713
  hyper
cgtctca

SEQ ID NO: 42707 - DNA, 30 bp, Homo sapiens; identical to SEQ ID NO: 4671
  chr6:26172916-26172946
  hyper

SEQ ID NO: 42708 - DNA, 30 bp, Homo sapiens
  chr6:26184022-26184052
  hyper
catgcctgagccagcgaaatccgctcccgc

SEQ ID NO: 42709 - DNA, 753 bp, Homo sapiens; identical to SEQ ID NO: 4672
  chr6:26188698-26189451
  hyper

SEQ ID NO: 42710 - DNA, 232 bp, Homo sapiens
  chr6:26197325-26197557
  hyper
ctcgcgcagagccaccgtgccgggccggtaacggtggggcttcttcacgccgccggtggctggagcgctctttcgagcagccttggtggccagctgcttgcgtggcgctttcccacccgtggacttgcgagcagtctgcttggtacgagccattgcgaacttctaaaccctgctaaatgacgaaaaaacgaaagtctagcctttcgtacccgtatatataaagacacccctg

SEQ ID NO: 42711 - DNA, 110 bp, Homo sapiens
  chr6:26197758-26197868
  hyper
tgtgtctagctactaggatgacgtgtcttaatttttttttaaatgttggcgctgaaactggctttgatcaacgttttaaaaagacgcgcgctagttgtgattggccaagt

SEQ ID NO: 42712 - DNA, 145 bp, Homo sapiens
  chr6:26198467-26198612
  hyper
ttaacagctttgcaatcctaacgagccgctgcattgatcgatttaaattacatgtgacataaagtctctttgcattttaattagtttgcttttttgggtttttgtttgttttgagacagtctcgctctgtcgccgaaactggagt

SEQ ID NO: 42713 - DNA, 1046 bp, Homo sapiens
  chr6:26198851-26199897
  hyper
gccccgccaatttgcttatgtatttttatggcatctttaaaatggacggttagtttcacgattcagtgttaagaacacccacttataaatggaaaaattattaaagaaaactgcaaaatagctatttacacagaaaatgtgagcccttttaaggaatacatgggtggctctgaaaagagcctttgttaagactgcttccttaaaaagccaatataagagttctcgttttacttgcccttggccttgtggtgactctcagtcttcttggggagcagtacagcctggatgttgggcagaacaccgccctgagcaattgtgactttacccagcaacttgtttagctcctcgtcgttgcggatggccagctgcaggtgtcgggggatgatgcgggtcttcttgttgtcgcgggcggcgttgcccgccagctccaggatctcggcggtcaggtactccaacaccgccgccagatacactggcgcgccggccccgactcgctcggagtagttgcccttgcggagcaagcggtgtacgcggcccacagggaactggagtccggcccgcgaagagcgggtcttagccttagctcgggcctttccgccttgcttgccgcgtccggacattttgaattcttaaaaacgatgttaagcaatgaagacaaaaatgtaaaagtgaattttgttagcaagtgagaaactattatacttggaggtcgaattgtaaataacgctatttgattggctagaacaaccaaccaattgcaaagaaacgctagaatcacctaatttgcataccacagggcacacagagacaattcatccaatcaatgtgtaagcttttaaatgccagtttacgataggagctctacaaatattaccagctgcagagtgaggacacttgcatttctctttaggttgtggacgaagtgtttatttatcatgcctgaacctgctaagtccgctcctgctccaaaaaagggctccaaaaaggcggtgaccaaggcgcagaagaaggatggtaagaagcgcaagcgtagccgcaaggagagc

SEQ ID NO: 42714 - DNA, 24 bp, Homo sapiens
  chr6:26200171-26200195
  hyper
aacgtcttcatacccaatcccaaa

SEQ ID NO: 42715 - DNA, 1471 bp, Homo sapiens
  chr6:26204317-26205788
  hyper
ccgtgtttttctcttcgggaggaaaatccttttggtcagatttcccttggcttggtggtggagagggtgagatcttgcagttttcaaacacttcctaagggggttccgtccccaagagagcaagcagcagaaatgccagaggaaccgtgcctatggggacaaagctgaactcctcatggaaggagattactgcagttccggtcttgtgagccaaagctcctgttcaatcgtcctagagcatcccaagcagcaaatgattttaaacatgttaatgtatttaatctcatttagttgttaaaatatgcctaaatttcctctttgggaacgcaagacttgcagagatgactccatggagagcggactctgccggcgggaactggagtcgttggtgacgtcatcccagtctgatctgtgaagggtagggccagcaggcagcaccaaagttcccgtatgcgcgttttcagtcttcatttaggtccgaattcccggcatataagaatactaccgtcgcttgtttttcagatttttgcggctattttcgttggtgtgttggtcatgtctggtcgcggcaaaggcggaaagggactgggtaaaggaggcgctaagcgtcaccgtaaggtcctgcgagataacatccagggcattaccaagcctgccatccggcgccttgctcgtcgcgggggtgtcaagcgcatttctggtctcatctacgaggagactcgcggggttctgaaggtgtttctggaaaacgtgattcgtgatgctgtgacttacacggagcacgccaaacgcaagacagtgacagcgatggatgtggtctacgcgctgaagagacagggacgcactctttacggcttcggcggctaatgctaccgcttaaacgactcagcatctcgacttcccaaatcaaaggcccttttcagggccgcccacagttttccgcaaaagagctcatgacttgttagacgattggttggtctctttataagttaattgttcctgtcaacaggtacgtatatttttcagccgttttttttttttcgttccaaattacatttggggtttcggcatacgattttttaggctacgatccttttatgtttattgtagtagggccttagattgcactgaaaaggctagggtaatagtgtctgtttaccttaccacttttattttgagtacctaaaaatgcatggttttcgacataagtgggaaaaccgcaagacactgcgtaaccgctcaaaatggcggagagcgaagaacaaagccggtgcctggcaatgggccggacccgcgaattagcgcaaccaatcatcttcctggaaaggagtgtgggccttaaattctagcggcctgttttctattacttaacctaacgaccgagtttaggtgtgtagaagttcctggggtagataagctcacgcaaggagaggttgcaagcattcatttcggaattctattaagccaaccc

SEQ ID NO: 42716 - DNA, 62 bp, Homo sapiens; identical to SEQ ID NO: 4680
  chr6:26205991-26206053
  hyper

SEQ ID NO: 42717 - DNA, 30 bp, Homo sapiens; identical to SEQ ID NO: 4681
  chr6:26206496-26206526
  hyper

SEQ ID NO: 42718 - DNA, 276 bp, Homo sapiens
  chr6:26215855-26216131
  hyper
cccaggctggaattgcactagcgtattcacatgttcctgcagtctctagcccgagagtttaagctatcctaccacctcagcctaccgagtaaatgatagtacagacgcaagccgtcacacctggttagcttcatttttttgcagagacgagttctatgttgcccaggcaaatctgttaactcctgagctgaagaaagcctcatgcatcgacctcccaaagtgctaggattacaggatcttgccaacacagaacaggagtatctcctgatcaatttt

SEQ ID NO: 42719 - DNA, 301 bp, Homo sapiens; identical to SEQ ID NO: 4682
  chr6:26216370-26216671
  hyper

SEQ ID NO: 42720 - DNA, 1115 bp, Homo sapiens
  chr6:26216790-26217905
  hyper
gccatccttcttctgcgccttggtcacagccttcttggaacccttcttcggagcaggagctgacttagctggttcaggcatgctgtcagaaaacaataacagcagtgagaatgaacgcacttaaataaaagctcgtgtctagagtctctccttttataggcctttcatgcaaataaagaattcaaaatatccagctctgattgggcaatgtgttagtgacgcatacatgtaaaatagccttcaccttatttcctttctaattggttggctcgtcaaagaacaattttaaccaatcaaattgcgcctttcacaattctaccgatgactataactagcttcttattcctccatcgagcccattctttttctttattcagtggattgttagttcttctgctgttaggaagccactatgtctggacgtggaaagcaaggcggcaaagctcgggcaaaagctaaaacgcgttcttccagggccggtcttcagtttccagttggccgtgtgcaccgcctcctccgcaaaggcaactactccgaacgagtcggggccggcgctccagtgtacctggcagcggtgctggaatatctgacggccgagatcttagagctagctggcaacgcggctcgcgacaataagaagacccgcatcatcccgcgccacctgcagctagccatccgcaacgacgaggagctaaataagcttctaggtcgcgtgaccatcgcgcagggcggtgtcctgcccaacatccaggccgtattgctgcctaagaagacggagagccaccataaggccaagggcaagtgaaatgattactagtcaaatccgtcagtgatcccgagtcccagaaaccaaaggctcttttcagagccacccaccttttctgtaaagtgctggaatacacatacgatgcctgaaatctcaatgttcactgtcctaatttttaacgaacgcttctgacgttactggtcagttctttattgaaatccttgctcacatttcatgcactaatttatcttactggtgtttctttgcagtaaaaatgcgtttataaaggtatacaagaatagaaaccgaggttgtgacaccaaggtttcactgcgttattttgtgtata

SEQ ID NO: 42721 - DNA, 1629 bp, Homo sapiens
  chr6:26233854-26235483
  hyper
agagccacctcgtcacgcagtgcagcccccacactatttacaaatacagtacctgagggccgatatcccaaagctaaggcttatcaaaggcctgcgaaaagacagacaccgggcaccaccagcagttggccattctcaacgaccagctgcacaagatcgtgggccggaagcaccttgggcatgccacgtactgctcacaaccaggacgggatgtgctcaggaagtcacctcaacgctaaagtaaactaaagcatttacaccacatccctgtgtcagaaataaaattttttcagggccacttttaagcgccgcgctttaacagaaatcggccggccaatcacacaccaccgcgggaatttgaagaaaaagtaggacctggtggctcaagtagccttagctatccggtgactgtggctgagactgagacggaaggatccttgcgcccaggctgctgggagctgttaataactgacccccaaccagcacgactaggatagaccgtggccgcacaacaccgcagcacccgcacccctctccaccccactcccccctccaaaaagcttcagctcttttgactgagacctgtgggtggctctgaaaagagccgtttaaaattttcaaaggggaacgtcccgccagtttcactttttcttcggagctgccttctttgcctttgtaaccttcggcttccccgacttaggcttggccgccttgggcttaggggctttggccttagctggactcttggcagctttttttggctgaggtgttttcacctttttcgcactcttggccactttcttggtcccagcagcggttgctggcttctttaccttcttaggagtctttttgatgcttttcttcggggtagcggcgccagccaccttcttgggcttcttggctgccccagcaggcttcctaggcttggctgcgccagcctttttggccttgggtttgccttccccggaagccgctttcttgttgagtttgaaggagccagaagcaccggtacctttggtctgcaccagagtacctttgctcaccaagctcttgaggccaagcttgatacggctgttgtttttttctacatcgtagccagcagccgcaagcgctttcttaagcgcggccagagaaacgccgctgcgctccttagaagctgccactgccttggtgataagctcagatactgggggtccggatgctttgcgtttcccagcagttgcgcctgccttcttcgcctttttcttcacaggtgttttttctgcgggtgcaggaatggtaggagcaagtggagcagtctccgacatgtttttgtcttcccagaaaagacaataagtaatctcaaactgtcagaacagcatgtcctctacgagggaggctgagggtttatatagagagacgctgagtgatgattggttccttgctccatgcgcggcgctgctggaaaaggactcctcgtatctaccgcgctgctgtgtttgttgccccttaaaaaagagtaaaaatataagaaatctgggcatgaaataattagagacttgggggaaactgatccgagagagttcgggcttcattcctgcctttgtttctatgcatagttttaaaaccggcatcttgaaacttttctta

SEQ ID NO: 42722 - DNA, 450 bp, Homo sapiens; identical to SEQ ID NO: 4687
  chr6:26240633-26241083
  hyper

SEQ ID NO: 42723 - DNA, 212 bp, Homo sapiens; identical to SEQ ID NO: 4688
  chr6:26249926-26250138
  hyper

SEQ ID NO: 42724 - DNA, 992 bp, Homo sapiens; identical to SEQ ID NO: 4689
  chr6:26250197-26251189
  hyper

SEQ ID NO: 42725 - DNA, 454 bp, Homo sapiens
  chr6:26251500-26251954
  hyper
agataattttaaatccggaagctgcaatttggtaggaaactagaaacataatatccgtctttgtttctgtttaaattctcacctaaggagacagaacttataggtagatgttactggcaaggcattagtttttctaatgttttgaatgaaaaactacgttttttcccccgggaggtgtagaaaaggatttagggtaggtttcgcataaatatccaatcaaaaagtagacttgaatttaacttttttattggctgatttggtccaatcagggattgagaatgattaagcacctatttgcataaaagacctacaaaaacggccagctgtgctgttgagccttcactttggggtgtattcttactcctttatcttgttgcaatgcctgatccagctaagtccgctcccgccccgaagaagggctccaagaaggcggtgaccaaggcgcagaagaagg

SEQ ID NO: 42726 - DNA, 25 bp, Homo sapiens
  chr6:26252073-26252098
  hyper
tttgtcaacgatatcttcgagcgca

SEQ ID NO: 42727 - DNA, 54 bp, Homo sapiens; identical to SEQ ID NO: 4692
  chr6:26252140-26252194
  hyper

SEQ ID NO: 42728 - DNA, 33 bp, Homo sapiens; identical to SEQ ID NO: 4693
  chr6:26252253-26252286
  hyper

SEQ ID NO: 42729 - DNA, 767 bp, Homo sapiens
  chr6:26271241-26272008
  hyper
tccttgggcatgatagtcactcgcttagcatggatggcacacaggttggtatcctcaaagagccccaccaagtaggcctcgcaggcctcctgcagggccatcaccgcggaactctgaaagcgcagatctgtcttgaagtcctgagcgatttctcgcaccaggcgttggaaaggcaacttgcggatcagcagctcagtcgacttctgatagcggcgaatctcgcgcagagccacggtgccgggacggtagcgatgaggtttcttcacgccgccggtggccggcgcgcttttccgagccgccttagtggccagctgcttgcgcggcgctttgccaccggtggacttgcgtgcagtctgcttggtgcgggccatctcagactacctgaaagaaaaactcagccacttggcagagtggaaactgcccttatatatactcagaaacattctaattggccttgttgattttcaaaagacccgcgcaacaaaaccattggctgaagagtccaacgatgtgattggtgaattactggaaaatctgattggatgaatcacttcatttttgaatcctctcttctcggttagtctgcgatccaagaacgttaacttcttaaagttctaattctgcgcttctcaagctgtagtccgtaaacgactactttaagacttggaagacgctaattctcattcagtagatgtgttgtggggccagattcggaggaccacgttttgagaagtttatcttgtgccgttttcttgagtcacctggac

SEQ ID NO: 42730 - DNA, 535 bp, Homo sapiens
  chr6:26272318-26272853
  hyper
caaggttttgtaaacgttactgaacttgcttcttcccgactacattaaagcacttacttgagatattaaacattttctcattagtcctgtttgcctagtcagtcacttgtatagacagggcaacagcacggcctgaatattgggcaggacaccgccctgcgcgatagtaactttgcccaacagcttgttgagcttctcgtcgtggatggcgagctgcaggcgtcggggggtgacgcgggtcttcttgtctcgggccgcgttgcccgccaactccaggatcttggcggtcaggtactccagcaccgcctccaggtacaccggcgcaccggcccggacccgcttggcgtagttgcccttgcggaggaggcggtgcactcggcccacagaaaactggagaccagccctggaagagtgcgttttagccttggcgcgagctttgctgccctgcattccacatccagacgcagtgaagtatttaaatacttgtttagaagaaggaaagtgattgattctagtaaaacgcaagagctaaact

SEQ ID NO: 42731 - DNA, 199 bp, Homo sapiens; identical to SEQ ID NO: 4696
  chr6:26273074-26273273
  hyper

SEQ ID NO: 42732 - DNA, 239 bp, Homo sapiens; identical to SEQ ID NO: 4697
  chr6:26273514-26273753
  hyper

SEQ ID NO: 42733 - DNA, 30 bp, Homo sapiens
  chr6:26284923-26284953
  hyper
cttggtttaaggcccgccgtctgggtgcga

SEQ ID NO: 42734 - DNA, 30 bp, Homo sapiens
  chr6:26286075-26286105
  hyper
tcggtccacaagaccggaagcctgaggagt

SEQ ID NO: 42735 - DNA, 226 bp, Homo sapiens
  chr6:26286644-26286870
  hyper
ccaaagaagtaggcaactgctcgtaggttttttcttaaattacgaggtagtctgaacgcatctcctgtaagtagttaagagtactgtgagaccgtgtgcctggcagaacagcagagtggcgcagcggaagcgtgctgggcccataacccagaggtcgatggatcgaaaccatcctctgctaggtcctttttttttctccccccccgtctattttcctgaggatccc

SEQ ID NO: 42736 - DNA, 68 bp, Homo sapiens
  chr6:26322235-26322303
  hyper
actatagctgctctctggaagcgcagatctgttttaaaagtcctgagcaatttctcgcaccagacgct

SEQ ID NO: 42737 - DNA, 301 bp, Homo sapiens
  chr6:26322362-26322663
  hyper
agtgccacagtaccaggcctgtaacgatgaggtttcttcacccctccagtagtgggagcactcttgcgagaggcttttgtagccagttgcttcccgggtgctttgccaccggtcgatttgccggtcgatttgcgggcagtcggctttctacgagccgtggtatagagacctccttacttaccccgcttctcctttggctggagctcggcgagcgagaggcggcgctgggctggcgttggagagcgacggcaggacggctgcggctacgaacacaattgcagtattttttttttttgacaga

SEQ ID NO: 42738 - DNA, 79 bp, Homo sapiens; identical to SEQ ID NO: 4699
  chr6:26322842-26322921
  hyper

SEQ ID NO: 42739 - DNA, 189 bp, Homo sapiens; identical to SEQ ID NO: 4700
  chr6:26327800-26327989
  hyper

SEQ ID NO: 42740 - DNA, 176 bp, Homo sapiens; identical to SEQ ID NO: 4701
  chr6:26328288-26328464
  hyper

SEQ ID NO: 42741 - DNA, 166 bp, Homo sapiens
  chr6:26330500-26330666
  hyper
gggaaaaacaaatccacaaaacgctccctagcagaggatggtttcgatccatcgacctctgggttatgggcccagcacgcttccgctgcgccactctgctacgcgagtcacaggtcccagagttaatagtcaccttttttctagcgtgtcaagtttccaaatctca

SEQ ID NO: 42742 - DNA, 935 bp, Homo sapiens
  chr6:26331612-26332547
  hyper
tgtaatatgtaatgtactccccgccatacagttatctgagccagcgagctaaaaactgttgaccccgacgtgatttgaacacgcaaccttctgatctggagtcagacgcgctaccgttgcgccacgaggtctccgggacacctacgttttatttacctgtcaatctgattcatgaaaataatttcggtactggtgaagaccaggcagctattaacagatacaaaatagtgcctagctgcttccctctcggtaaaattgctgtccgcccaatcactgattttctctgcctctgaattgcttcattttcacctgttcttgtttatatttcattccgtttcttacctagttttccctgtatattccaaatatagacgtcttgggagtttcgttgtttttatctttatagaaatacattctgttgaaggtcagtcgctttggaatggggttgtagagaggaggtagcgaagagggaataatgaggatccttcctctcccaactcctcattaaggaactctgatcaaggtgagttttaaattcgtttccaaagttcactgcaggtcacaaccagtgtttccgttaacgaattcacgcgggggctggcaggttgtttgtgctgcatcttttctgagagataacggcgcctccctgtagcctccgttctcagctgatgagagagttgatttcacaccccgataattcttcaaaatcagatcgctggacctgaaactgaccctaaaaagaacaagaaatcctgtcatcaggagtaagtgggttattctggcactgtgctttgtttggctggttaaagaacctgccttgggtaaccagagatcggagttttctaaagtcagcggggtttgtctggggaccccgaatttacatacagacgatctccgcaaatagtgcaggggccgctttgaactcttaggaaaag

SEQ ID NO: 42743 - DNA, 119 bp, Homo sapiens; identical to SEQ ID NO: 4704
  chr6:26383467-26383586
  hyper

SEQ ID NO: 42744 - DNA, 46 bp, Homo sapiens; identical to SEQ ID NO: 4705
  chr6:26458294-26458340
  hyper

SEQ ID NO: 42745 - DNA, 34 bp, Homo sapiens; identical to SEQ ID NO: 4706
  chr6:26501806-26501840
  hyper

SEQ ID NO: 42746 - DNA, 291 bp, Homo sapiens; identical to SEQ ID NO: 4707
  chr6:26501949-26502240
  hyper

SEQ ID NO: 42747 - DNA, 143 bp, Homo sapiens
  chr6:26521257-26521400
  hyper
agttcgcggagaggcggcttaccttttaacccaggaatgcccatatcttgagaaaaagaacaacaagggggtgggcgggggtggggacatggggtaggggggcggctggtggatggggaactaatagcgtttagacaagagac

SEQ ID NO: 42748 - DNA, 81 bp, Homo sapiens
  chr6:26521681-26521762
  hyper
agtactctgtactccgaaaataatttcagaacctaccggtgttttgaaatctcacctcctttttccgtttctcctctgtct

SEQ ID NO: 42749 - DNA, 71 bp, Homo sapiens
  chr6:26522004-26522075
  hyper
caggccctccggccccgggtcggcgggtgagctagggggcgccccgggacaggccgcgccctctgccctgc

SEQ ID NO: 42750 - DNA, 297 bp, Homo sapiens
  chr6:26550761-26551058
  hyper
atcaacatggcctggaagagccgtactctggatacccgagggcgcggccccagcgccgcgacgccccgcccctctggctgctccgctctgggatgcacttccgacgccctctaggcttgggagttccgcgcctctcggtgtcgcctggggggcgtgctccggttggcgcactgattcccagttgggtaggggaggcttgactgagctcccacccggaatttcaccttagacctttaaagaccttgctccggcctcccgcgccagcgctaacacctagtcctctttagtggagttccg

SEQ ID NO: 42751 - DNA, 53 bp, Homo sapiens; identical to SEQ ID NO: 4710
  chr6:26551083-26551136
  hyper

SEQ ID NO: 42752 - DNA, 31 bp, Homo sapiens
  chr6:26555187-26555218
  hyper
gaaacttactgggcctcgcctccagagactt

SEQ ID NO: 42753 - DNA, 653 bp, Homo sapiens
  chr6:26577244-26577897
  hyper
aaaacccagaaacttccaggacgcacattattttggggattctagagaacgcagaactacgtgtctaaaaaggacagcgttccgtgtccttcgatagctcagttggtagagcggaggactgtaggctcattaagcaaggtatccttaggtcgctggttcgaatccggctcggaggacggtagttttgacctaccaagctaataattccagacaatacggtctttacaaaaaataaggatccaggcaaaaaaaatgtattagatagctctttatgctcaaacatgcacaagtaaaccatttttggttacatgagtaaaaaattttaggaataaactagaaatgtggtagcttcaccgaagggcacctgcgtagatgaaaagcagcgtttccaggaagtctgaggcttcactttttccttgtgaaatttgtacctcgcaacactcttcacctccactccctccctgagtctcctgctggctggctcttggtttctcgatgccattcttatttccggctactgatcgtcaaatgcagtttttattcccacttcccctctccatccccgacccgagctgacgttcgaccagcaaaccacagccaacgcccgcaacacagttcagttaagaaggcgcgtgggaggtgtggggaatgac

SEQ ID NO: 42754 - DNA, 31 bp, Homo sapiens; identical to SEQ ID NO: 4713
  chr6:26987993-26988024
  hyper

SEQ ID NO: 42755 - DNA, 424 bp, Homo sapiens
  chr6:27059532-27059956
  hyper
taggggtatgattctcgcttcgggtgtgagaggtcccgggttcaaatcccggacgagcccacttcattttcgcccaataaggtttaaggatatttaaagtatttccccaaatagtcatacccaaaaatatgtactttcaccacatcaacagtagaattgtctaagcaggcgagtactgaatccggacttcttctaagggcagacaccggaatgttgatgcggctgcagctgcgctctcccacctctgtctgtctcttctcaaaccccgaaaggaagaccgtgggcagctcgtgcgcgcgtgcgtgtgcgtgtttaaccgagtgctggaggggaaacgtgagttgcagtcaaccggttatcttcctcttataggaaggaggattttaatttacacttttaactccagcttcggtgattactctct

SEQ ID NO: 42756 - DNA, 619 bp, Homo sapiens; identical to SEQ ID NO: 4715
  chr6:27064586-27065205
  hyper

SEQ ID NO: 42757 - DNA, 168 bp, Homo sapiens; identical to SEQ ID NO: 4716
  chr6:27094881-27095049
  hyper

SEQ ID NO: 42758 - DNA, 35 bp, Homo sapiens; identical to SEQ ID NO: 4717
  chr6:27095107-27095142
  hyper

SEQ ID NO: 42759 - DNA, 347 bp, Homo sapiens
  chr6:27099524-27099871
  hyper
tccttctcaaaaaaaaaaaaactgattatgttgccataaagggtccctttaaaaaaaaaaacgctctatccaacgaaaactaattagaaataaatctccttcccgaaagcgataaaatactaaagaatgagaaactgacagtttactgagtttgtaaggaaggccaaataaaggcggggtttggattcctttggcgcacccaagccgaccgtggacttcctggatacaacaaccaatcaggatgcagaggaagggcgggcgttgcccgggcaaattcaaactgacaaccgctgcaacttggcactgttccaaatcactaaccgacgggggaccgacgagtattttaa

SEQ ID NO: 42760 - DNA, 44 bp, Homo sapiens; identical to SEQ ID NO: 4719
  chr6:27100141-27100185
  hyper

SEQ ID NO: 42761 - DNA, 1003 bp, Homo sapiens
  chr6:27100304-27101307
  hyper
tgcgatgcgctcgaaaatgtcgttcacaaacgaattcatgatgcccatggccttggacgaaatgccggtgtcagggtggacctgcttcagaaccttgtacacatagatggaatagctctccttgcggctgcgcttgcgcttcttgccgtctttcttctgcgccttagtcaccgccttcttggagccctttttcggggcgggagcagacttcgctggctctggcatagcactgtgtagctataaagcgccaacgaaaaggaaaaacagcgtgagcagggtatgacaaggcgcttttatatagaatcgcttatgcaaataaggtgaagagttgaagtcttgtgtctgattggtagttattcagggtaacgtcagaggtcaggtctgcccaatcaggattcgcaaatccagaagacgcactactattggttgaaattaaactgcagccctaaccaacaacacgtcttctttttcgcgcccaatagtgtttataaaaagcgccgcctttcccgttcactttgtggttgctcgtagtgagttgcgctcgctatgtctggacgtggcaagcagggaggcaaagcccgcgctaaggccaagactcgctcttctagggccggtctccagttccccgtgggccgagtgcaccgcctgctccgcaaaggcaactatgccgagcgggtcggggccggcgcgccggtgtatctggcagcggtgctggagtacctgaccgccgagatcctggaactggcgggcaacgcggcccgcgacaacaagaagacccgcatcatcccgcgtcatctccaactggccatccgcaacgacgaggagctcaacaagctgctgggcaaagtcaccatcgcacagggcggtgtcctgcccaacattcaggccgtgctactgcccaaaaagactgagagccaccacaaggcgaagggcaagtaactatctgtactagtttgtggcagctcaagtaaaatcgagtccaaaccaacggctcttttcaggg

SEQ ID NO: 42762 - DNA, 116 bp, Homo sapiens
  chr6:27101538-27101654
  hyper
tccacagagcaccagtggcttcgtgagttcttgaagcactttggcccaaaagagttatcgcccgggctagaatttagcagacagctgttccacgcgggccagggcggcatgaagaa

SEQ ID NO: 42763 - DNA, 30 bp, Homo sapiens
  chr6:27107238-27107268
  hyper
tctatgaggagacccgcggagtgttgaagg

SEQ ID NO: 42764 - DNA, 246 bp, Homo sapiens
  chr6:27125325-27125571
  hyper
ctgaggtgcgagcgccgccggacatttcctgacggctcaggtgggcaggctgagtgcgcgagcgcctcactggcttctcataggtacctgggtcaggacgaagccacatagttcctcgtgatgagaaactcacttctggcacctgtcgagatgccagattccatgccaagcccccgaagattctgactagtttggcaaaaaatgggatctggcaggtccacttcaaagcagcgccctcttcctttt

SEQ ID NO: 42765 - DNA, 246 bp, Homo sapiens
  chr6:27125797-27126043
  hyper
gtgtgtaaataaggacgaaagactgcaccattctttagatgacaaaaacagacgtttctgggaaataagcaaaggaagagccccacaagcagcggcctctggtggcgtgccgtgatcgtatagtggttagtactctgcgttgtggccgcagcaacctcggttcgaatccgagtcacggcagtaccttgatgtcgcctcaatttctcaacgtactgagcagtaccttgacgtcgcctcaatttttca

SEQ ID NO: 42766 - DNA, 374 bp, Homo sapiens; identical to SEQ ID NO: 4723
  chr6:27173632-27174006
  hyper

SEQ ID NO: 42767 - DNA, 30 bp, Homo sapiens; identical to SEQ ID NO: 4724
  chr6:27205310-27205340
  hyper

SEQ ID NO: 42768 - DNA, 35 bp, Homo sapiens
  chr6:27205801-27205836
  hyper
agagacccgggggacgatctgggagcagaagctgg

SEQ ID NO: 42769 - DNA, 58 bp, Homo sapiens
  chr6:27205913-27205971
  hyper
cggcatgaggaatccgctccataatggaaggaagaaaatctccggcagctatgcctcg

SEQ ID NO: 42770 - DNA, 1177 bp, Homo sapiens; identical to SEQ ID NO: 4725
  chr6:27218650-27219827
  hyper

SEQ ID NO: 42771 - DNA, 6 bp, Homo sapiens
  chr6:27228180-27228186
  hyper
cacctg

SEQ ID NO: 42772 - DNA, 86 bp, Homo sapiens
  chr6:27228289-27228375
  hyper
cgctgcagtctcagagttggagcagcttggcgtttactcccgggcctttcccggatgggagaaggaacctgcgcgggaacttgaat

SEQ ID NO: 42773 - DNA, 30 bp, Homo sapiens
  chr6:27228697-27228727
  hyper
tctcgtcccgccggccggttagctcggttg

SEQ ID NO: 42774 - DNA, 189 bp, Homo sapiens
  chr6:27242891-27243080
  hyper
accgacgatttgcatcgttaattatccgtagcccttcgctggctgaaaaccgacgagtttctgcagaactgccataaaaaactactggggaaaatacgtggccagtacggggatcgaacccgcgaccttggcgttattagcaccacgctctaaccaactgagctaaccagccgacgctgggtgcagctc

SEQ ID NO: 42775 - DNA, 30 bp, Homo sapiens
  chr6:27248076-27248106
  hyper
ctttcgcgtgtgaggcgaacgtgataacca

SEQ ID NO: 42776 - DNA, 30 bp, Homo sapiens
  chr6:27248493-27248523
  hyper
gctctttgtgctgggcggtgctcgaaggga

SEQ ID NO: 42777 - DNA, 119 bp, Homo sapiens
  chr6:27264199-27264318
  hyper
gtgaacaggaaaaagctcttgcgctaaggaatgtcagagaagccagcgcccggtgcagccgagaagcttagcgacagggttgctgggccggagaccacgagatcctagaggctacaaag

SEQ ID NO: 42778 - DNA, 938 bp, Homo sapiens
  chr6:27279848-27280786
  hyper
ggctgaggtggccggcgtttcgtgggcctctcgggcaagtcggtgcgcacctgggctggggacgagggcgaaagttccagtttgctcaggaaactgcccatgaggagagatgaggcgcgggcagtgagttcaagcacggttttggcttccgaggtttcggacgtctgcagaatcggacagagtcgaagagcgcagtgttcggttgacggttgggattcacgcgctaggaaagcgcgagtctcagggtgcttagcactctccaggcccggcacccgcgggaacgggggacacgcgggacttcggcagtcccagtaacttgctttgctgttctgagacctcagcggggcggtcagacctctgctgtctccgcagcgagttgcagtacttggcgcggggagaggaactcgagaggaagctcactgcgcctcgcccctggcgtcggcagcggctgtctgggaccctgtggtccggattcaccaagtggcgcagagctggaatcgagtgggtgcacagtttccaggctccgactattactggcctcgaaggtacaggctcaggcggctcagggccccggcgcagatctgtcggcccgcgggatccccggagtctgagtggggagcactatccgcaccccgtagagtgagtgcgggcggctttcgcaggtgctcaggactggagatctggaccggtggctgtgccgcccggatggcatttgtggcactagcagtcgggaaagcagctgattgaggatttccgcgtttctctttttttgcagatcgtgacgccgccagtaggtgtcagtcatttgccgcacagccacctttgagatccacctgtgtctcccagcggccgaatccaggtttccttcctattcgcacttggagaactcatgcagattgccgtcaggagtggcctcagagatccggagtgggcgaatg

SEQ ID NO: 42779 - DNA, 30 bp, Homo sapiens
  chr6:27301144-27301174
  hyper
cagtcgtggagcgaacgcagctgccaccgg

SEQ ID NO: 42780 - DNA, 286 bp, Homo sapiens
  chr6:27342361-27342647
  hyper
gttccctgcactaccgctggttatgtttccttagtgaccctaggcctcttgcaggagagtccctggtcccagccagcgggagcggcttctccagtttgtggctctcggagagttcgcctcgtccctccctctcagataaccacctatttctgacctctggaggccgggctgagcccggaattttatgaccagcgcccgctggccgtcgtcaccctctaatttctcgcaaaactcccggggacccttcttaatgtcagtagccacagtcgccgccgctcctgcgcct

SEQ ID NO: 42781 - DNA, 270 bp, Homo sapiens
  chr6:27342926-27343196
  hyper
caactgacactcagcgcgcggaggagcccgctgagaaagggtttacctgtccgaagagaactgcgcttgcatggctctggctgtgggccggctggctcttgtccgcagactacatttcccagggttgtctgcggctggagagatttagggtttggggcgtggctagcacaggcctgaggtcctaattgggaggtgtaggcatggcggctggagagtctgatctatgtgacacctccactgtgactagggtataacgtgaataatttgtat

SEQ ID NO: 42782 - DNA, 224 bp, Homo sapiens
  chr6:27356304-27356528
  hyper
actctgtgaaccaccggtctaggctatactttgcagtgtattaaggtggtcttcggcacctctcgcagacccccttcctcttgcctctagcgccaacctctcagcctctcgcataccaggggaggggctttgcaaaaccttccacgaaagtgaatcccagcacagccctgctgtagctggctctcaggcgcaagcgcagagctgcgaccgctgctgatacgttg

SEQ ID NO: 42783 - DNA, 30 bp, Homo sapiens
  chr6:27357025-27357055
  hyper
gcctagtccctctgcggcagtgacagccag

SEQ ID NO: 42784 - DNA, 46 bp, Homo sapiens; identical to SEQ ID NO: 4729
  chr6:27440465-27440511
  hyper

SEQ ID NO: 42785 - DNA, 75 bp, Homo sapiens; identical to SEQ ID NO: 4730
  chr6:27447498-27447573
  hyper

SEQ ID NO: 42786 - DNA, 265 bp, Homo sapiens; identical to SEQ ID NO: 4731
  chr6:27463097-27463362
  hyper

SEQ ID NO: 42787 - DNA, 168 bp, Homo sapiens
  chr6:27471269-27471437
  hyper
ggttcaactgctttggtcacccggtctcgctggttgcaaatgactagaaacactgtcagagatctcgacaccaccacaatcgaaagaccaggctgtcctgacagaccccgtcgttttggcttaggcggcagattaaagtgtaaattcgccaagtataatcaatttagt

SEQ ID NO: 42788 - DNA, 30 bp, Homo sapiens
  chr6:27487053-27487083
  hyper
aggctggggagccccgcaggctgttgctaa

SEQ ID NO: 42789 - DNA, 30 bp, Homo sapiens
  chr6:27512544-27512574
  hyper
agacattgccggcctcggtcatggaggtca

SEQ ID NO: 42790 - DNA, 50 bp, Homo sapiens
  chr6:27512833-27512883
  hyper
ccttttccccgggctcgggtggctgaaggccttggctcttgggaatggtc

SEQ ID NO: 42791 - DNA, 552 bp, Homo sapiens
  chr6:27512994-27513546
  hyper
cgcccgctccagtccggttttagccgttccttcggaagagtaagtcagttgaatgtcatcgaagaagctcctgatttagattttaactgtacgtaaacgcagatgaccccccactctcgtgccttcatttaattcccgttgcttctcccatgggtattcagaggcttgaggttgcttggactctcaattcaatactccctttctgcgggttcgtgagaattaggtgtgaacgtggtgtccgcggatttcagcagctagcgggcaagctccagcgcccagaaactttgagtcgcttgtctaggagtcctgtgttgaattgcaacactatgcactatgttctggttattgatgtgctctgaatgagctctttcgttcgtgagcagaggccctgacgagactgaagaccaactatttccgagcgctccactcaaccattataagttcaccccagccgtcagcgatggcgtaggtaggtagtcgtggccgagtggttaaggcgatggacttgaaatccattggggtttccccgcgcaggttcgaatcctgccgact

SEQ ID NO: 42792 - DNA, 466 bp, Homo sapiens
  chr6:27533899-27534365
  hyper
aggtgtggagccagtcgcggggatgggcgaccgccatggggccaggggcggaagtggggatagagcacagggtataaaagactcctgctacagctccccctctgctgtcgggtgcagacacgaggtagcctccaggtgacaacacgggtggtgagagccgccgcatgaatccacactgcggctgaaggtcaagaattggcggtagcccatcggtagcccagagacccaaactgtgtccgatgtgagtgaaggtcaccccagatcagtgcgtcagttccgttttggcggccaaatttctgacgatcccatgtaagaaatgccacacctgtcaataggagcgactcacgcgctgggtctctttctcggatcgggtcgccaccccagtgccgggactatgctaaagactagagtctcagacttggaatttcgaggaaggtgttccaaaacgctgcgctccctccggcga

SEQ ID NO: 42793 - DNA, 45 bp, Homo sapiens
  chr6:27559909-27559954
  hyper
gtagtgaataatcccgcagctcattattgcgaacagcagccctta

SEQ ID NO: 42794 - DNA, 241 bp, Homo sapiens
  chr6:27560644-27560885
  hyper
agcacgcttccgctgcgccactctgctgtccccttcagctgttgtgccttatctccaagtaacttaaacatctcctaacaccgctgtccagctgcgtcaatatttttttcttccttatccatttatcttctctagtctctgtctttcatcctcgagttgtctcacgtttccttctcaacatagtcacctacaacttgttgtttgctcctttgcaacttaagaaaaccgattgaaatccttt

SEQ ID NO: 42795 - DNA, 32 bp, Homo sapiens
  chr6:27561176-27561208
  hyper
ctgaaaatcgttgctcgcggaattgaggcaga

SEQ ID NO: 42796 - DNA, 496 bp, Homo sapiens
  chr6:27573092-27573588
  hyper
tttgtttaatttttatgttagcggattcacagaccaatagatggaaatccgctgcttactttctcgcaggagaaaatgatctccaacagtgctgcgggactgcgtccaaatggcactgaaaatatcccaggattctgtaaatgtggggttttcctttgtcgattggtttgatgtaagagagatgcctctctctttgcgagaccctgtttggcgaacatcggttggggagggaaatcttggaggtagaaacggctgaactattgtggcattccttggcgaaactttcggtacaaatctggtagggaaaaacaaaagatcaggctgtgtcagaagtgggattcgaacccacgcctccatacggagaccagaagacccgaacacaggaagcagtaagcttgagtctggcgccttagaccactcggccatcctgacactgtgacaaaaatccttgaaactatacatgatgagtaatcacggcttacggctcgccttctgg

SEQ ID NO: 42797 - DNA, 710 bp, Homo sapiens
  chr6:27598638-27599348
  hyper
tgggagagttttggggaatcccgaaagacagcccagagatgctggactgcgaatgcaggcgcgctgcaggcgaggctgggagggccgccaggagcgctgcgggtatcgggagacacgcagagggaggggcaggcggcgggctccgcttcttcgcgtcctggctctgaaagcaaccacaggccagcggggcggtgctaggtgaagctacgaagaagccaaatagctcgcgtcttctacaaaaaccgtgttcttgctagaacgttggcaaggagaagccggagtctctcctttttctcctcggcttttctcgggctttctgaaaagagcacctgcatattcccaggaaattttggctcctgatggcatgggggaggatcacattcatcttccaggagagatggagatatcttgatcaaattgtgttttatgcaagaggcgaggggctgcgaagggaggatctcgggcagctcagcgcgctgccgctccggcgcgaggccggggtcgagcgcttcagtagctcatggctctgtagagtgcgcatggccaagcaaaggaaagcatgctccagtggcgcaatcggttagcgcgcggtacttatacaacagtatatgtgcgggtgatgccgaggttgtgagttcgagcctcacctggagcatgttttcttccaattgcgatttcagacatttcacgataatgcatttttcccttat

SEQ ID NO: 42798 - DNA, 30 bp, Homo sapiens
  chr6:27635386-27635416
  hyper
aactgctaatatattcgttaaaagtttatt

SEQ ID NO: 42799 - DNA, 267 bp, Homo sapiens
  chr6:27635787-27636054
  hyper
ctgaatatcttcgccgattacatcagtgcttatgtttgtgacttcagagacactgagaaggcgcggctctttccctcaaccccattcgccttcctttcggcggcgttgtcttgaaccaacctgaaaataataagtccttaagttacaagtcactaaagggaagtttgcaacttgcgatccagtacactgacatgactctaaaaagagaaggctgccgactctgggcgtactgcctttgaattagccatactccgcaaggagcagtgc

SEQ ID NO: 42800 - DNA, 325 bp, Homo sapiens
  chr6:27636296-27636621
  hyper
ttagaaaaacaaaaatatcaacgaatttatatatggtttcctttaaaacagcagcgcattcgtgtggccggttagctcagtcggctagagcgtggtgctaataacgccaaggtcgcgggttcgatccccgtacgggccactggatgccatagtggggcccttcacttacctgaagggaggccttttaatttaagcctgtcgaatcacaggtgctccgaatcgaatcccaggtgctctgaatccgaaattaagacgccctcttattcgtcaagcgagaaggctatttacgttcgtttccctttattgtgaaaaatgaaaagaacag

SEQ ID NO: 42801 - DNA, 377 bp, Homo sapiens; identical to SEQ ID NO: 4736
  chr6:27640043-27640420
  hyper

SEQ ID NO: 42802 - DNA, 128 bp, Homo sapiens
  chr6:27647890-27648018
  hyper
cgaaccgagctgaacgctcattgctgagtcctgggagaaggtcgcgtttgtacagaaggctcctggcagcgagcaaggccgggagtgggcccagtgcgcacgaagtcgcgccccgaattcccactggg

SEQ ID NO: 42803 - DNA, 71 bp, Homo sapiens
  chr6:27648345-27648416
  hyper
cggaatttcgaattgcgggaaacccgcagacttagtaaggtaaaagcgcagtaacacgaggtttccgtagt

SEQ ID NO: 42804 - DNA, 20 bp, Homo sapiens
  chr6:27648892-27648912
  hyper
cccggtttcgaaccgcggac

SEQ ID NO: 42805 - DNA, 1021 bp, Homo sapiens
  chr6:27655155-27656176
  hyper
ttcctctgagttgtcgaatccgggcctcgcctcctcctcccttttcagatcataggatttctctcccccgcaaataatggcccttacttcgtaaacacgctggctccgtaatccctattattgttttgggggtttggttctgtccagggaggaggtgagggcagatgctcaagagaggctgtccccaccgtccttttgtctcagcgaaccgcagtccgcgcccgagcgccactagctgtcctgggacgggaactgcagcggcaagtgtgtgactttcttgagcccggagccacaggcctgggaagcgccgctgagacttcagggtcgtagtgacagaggaaccacccgaggctaggcggggagagggtgcagtttccggatcccgaaggcttcgagaagagccgacctgtctggaagggtctccaagaacagagaggactctgcaaccatcactcgggagccgcgtcctttcatccttgagacagctccgtggtccaacggttccccgatccgctggccgagatctcaagcttggatgcaacttcggattcgccccaggcaggaggaaggaagccccgattggaaacgttgacttgaatcttctcggatcagaattagcaggttaagaaaaactgtttccccgtaagaagcagggttctttggtgttcaatgtggagctccgccactcccagcccgggtgaaggaaaactgggaaacagaatgaatgtgattatctattcgaagataaatttccacaaagcatgccgtttgatagtagcttataatgtggaagtaaggcatcctgtcatccggccggttagctcagttggttagagcgtggtgctaataacgccaaggtcgcgggttcgatccccgtactggccaagtattctctgtggcttttatcaccagaatggatagtaacccagacatcgatctaaacgtgtacctgtgtgtttctccaggcttaactttgccccgagaaaacggatctgtgaatttggtgcgccctcgcttactc

SEQ ID NO: 42806 - DNA, 493 bp, Homo sapiens
  chr6:27661789-27662282
  hyper
tttccagagcggacccggaaatgacgccaggggatgcaaacccttctgcccctttttgctacccctgaagcttactgttagtggtcgagtttttctggaagtgggcttccgcgatcgcggggaccaacgccctgagctcttgtgcccaaaggggatcgccaggttttttgatgcggatcgaaagggactggccccggagcctacaacctgacgcaggtgggacttggggaaatgtcgagaaacctaggtctgggacttgagttggcttccagggcacacattcttgttcagaagaaacacattgcaaaaatcgggaggtgacgggcagatgaagtgtcggcgcttcgcctcgggactccagtgcaacctatggggcttttggaaatgaggaagtcgatgactctgcagggactcctctgacccaggagcagatggcgctcgtctgggcactccccaggagaaaaggtgcatcgggaagcagcctggcttgtgg

SEQ ID NO: 42807 - DNA, 450 bp, Homo sapiens; identical to SEQ ID NO: 4740
  chr6:27774908-27775358
  hyper

SEQ ID NO: 42808 - DNA, 447 bp, Homo sapiens; identical to SEQ ID NO: 4741
  chr6:27775597-27776044
  hyper

SEQ ID NO: 42809 - DNA, 114 bp, Homo sapiens
  chr6:27776274-27776388
  hyper
gcttctgggcaaagtcaccatcgcacagggtggcgtcctgcccaacatccaggccgtgctactgcccaagaagaccgagagccaccacaaggcgaagggcaagtagaagcctgg

SEQ ID NO: 42810 - DNA, 626 bp, Homo sapiens
  chr6:27777716-27778342
  hyper
aaatttgagtccttcgccaatccggttactgttgggtaggccttcagcatacttttgtccaatcagcttcagactctcactataaataagcggctagctttctctttctcctgaagtgaatctagctctgaaggcatggcgcgtacgaagcagactgctcgcaagtccaccggcggcaaggctccgcgcaagcagctggccaccaaggcggctcggaagagcgctccggccaccggcggtgtcaagaagccccatcgctatcggcctggtacagtggctctccgcgagattcgccgctaccagaagtccaccgagctgctgatcagaaagctgccttttcagcgtctggtgcgtgagatcgcgcaggacttcaagaccgacttgcgcttccagagctccgcggtgatggcgctgcaagaggcatgcgaggcctacctggtggggctctttgaggacaccaacctgtgcgccatccacgccaagcgggtgactatcatgcccaaggacatccagctcgcacgtcgtatccgcggcgagagggcttgagtctcaaggactcactgattacatacccaaaggctcttttcagagccacccacatgcgcgctgaaaagatctgtttctct

SEQ ID NO: 42811 - DNA, 113 bp, Homo sapiens; identical to SEQ ID NO: 4743
  chr6:27782110-27782223
  hyper

SEQ ID NO: 42812 - DNA, 297 bp, Homo sapiens; identical to SEQ ID NO: 4744
  chr6:27782430-27782727
  hyper

SEQ ID NO: 42813 - DNA, 439 bp, Homo sapiens
  chr6:27792189-27792628
  hyper
caccctctacggtttcggtggttgagcgtccctttctatcaataaaaggcccttttcagggccaccctactttctcagctgaagagtggtaacactgaggagtggttttggtaggtacggaattttgcttggttctgagtcagttctggggggaacagttttttgaacacagcggcacacgtgtggccattcacccggggtcactgtaggcaggactaattacgagatgtaatgtctaaacttgctcaaaattcgtaagcttgtttacgtaatggagaaaatactcgtacacagaatgtgcagtaccagaaacgtttatgtaacccccgtagtgagcttgacagtggtaatcggaaatcgtttttgaaaagcctccaaatccacaagtatttgtgggttttttttgtttcgtctttgtctgcgagttggagtgcagcgg

SEQ ID NO: 42814 - DNA, 354 bp, Homo sapiens
  chr6:27798705-27799059
  hyper
cgggaggctacagtgagccatgatgacactgcactacagtctgcgcgacggcccatgtcagtaagctctggagcacctgaaacaagttgtgttgggtattttatttactggagagcgattagtgactgatgcctacttacagcgactagagacgcatgctccgatagcagcacaaactcagcaggcgcgaacaaatggtaaagagaaactgggcaaacaagcatcacggctcctcagctgagaaagtgggggccctaaaaagggccttttgttgatagaaagggacgctcaaccaccgaaaccgtagagggtgcggccctggcgcttgagcgcgtagaccacatccatggcggt

SEQ ID NO: 42815 - DNA, 52 bp, Homo sapiens
  chr6:27799498-27799550
  hyper
ttctgaattttgtaacgtgcatagtattttgttaccacgttatgaggcttta

SEQ ID NO: 42816 - DNA, 268 bp, Homo sapiens; identical to SEQ ID NO: 4749
  chr6:27804767-27805035
  hyper

SEQ ID NO: 42817 - DNA, 272 bp, Homo sapiens
  chr6:27805257-27805529
  hyper
ctggtttgttccagatcttgccggccacgaggtccttgctcacattatctcttttgtttcggctgcaaaaggttcactgcttgttatctcgcttcttgttcacccgcccatctaccttacttctgccctttgcttttacttattctgccctctaactttcagctccctttgttattctcttgcctcacttttcttattgtttcagctgtattgcaggcgcgagctgccgcgcctaaatttcttgatgtaccgtaaacatttcaatgtctact

SEQ ID NO: 42818 - DNA, 153 bp, Homo sapiens; identical to SEQ ID NO: 4750
  chr6:27805753-27805906
  hyper

SEQ ID NO: 42819 - DNA, 575 bp, Homo sapiens
  chr6:27805936-27806511
  hyper
cggttaggtactccaacaccgccgccaggtacaccggcgctccggcaccgacccgctcagcgtagttgcccttgcggagcagtcggtgcactcggcccactgggaactgaagacccgcccttgaagaacgggtcttagccttggcgcgagctttgccgccctgcttgccacgtcccgacatgacgtaaaaaattcaatcagtaacgttcctgagactgacgtaacgctaaagctccgctacttatagtcaacagaggcacgaaaactaagctgtgctattggctaacattacagtttcgctttaaccaatgggattgcggttttgaaaaacacttattttgattggacaaagttaatatacgtttccaggactcaccactggttaaacgcacaacttcattctctaccccacttgcgttaagaagcagtgaataagcggtaggttgacagagctaccgtcttcctgtttttttcctccaattttccggcagttactcccagtcatgcccgagccctcaaagtccgctcctgccccgaagaaaggctccaagaaggcagtgacaaaggcccagaag

SEQ ID NO: 42820 - DNA, 241 bp, Homo sapiens; identical to SEQ ID NO: 4753
  chr6:27806810-27807051
  hyper

SEQ ID NO: 42821 - DNA, 440 bp, Homo sapiens
  chr6:27832930-27833370
  hyper
gcgattctagatgacgtcatatacacgtttgtccaatccaaagaagcatgtttcataacagcgattccattggttgaaataaaactgtaatttgagccaatggcacagctttattttcgcgcccagtattgactataagtagtggagctctggtgaacttctctcggctgttctcagttcctccatttatcgtttcttcgtcatgtcgggacgcggcaagcagggaggcaaagctcgcgccaaagccaagacccgctcttctcgtgccggtctccagttccccgtgggccgagtgcaccgactgctccgcaagggcaactatgctgagcgggtcggggccggcgcgccggtgtacctggcggcggtgctggagtacctgactgccgagatcctggagctggcgggcaacgccgcccgcgacaacaagaagacccgcatta

SEQ ID NO: 42822 - DNA, 33 bp, Homo sapiens
  chr6:27833429-27833462
  hyper
aaagtaaccatcgctcagggtggtgtcctgccc

SEQ ID NO: 42823 - DNA, 26 bp, Homo sapiens
  chr6:27833809-27833835
  hyper
agagccaggctcagtggctcacgcct

SEQ ID NO: 42824 - DNA, 326 bp, Homo sapiens
  chr6:27834074-27834400
  hyper
aggaaaaaaaaataatccagtacagaatgacacggtcatatcaaattggcatgtaatagagaccccatcttgaaacttgctactatattgtcttgtgcgttgatagcatattatattaatgccgaacacattagtgacgccgaagtagctggtgcctaaatggcttaaacgcggaaaaaccacatacagatgatggaacaaaaactggccaatcagattatagagcgggctttttaaaatataagaagcttctttgtagctaggcgtctgacaaaaagcttgacaccaacttaacaaaaaccaacggctggaattcatactctaat

SEQ ID NO: 42825 - DNA, 192 bp, Homo sapiens
  chr6:27834670-27834862
  hyper
gttttgctgctttgggcttagcggctttgggctttgccgccttcggcttaactgccttgggcttggcaggactcttggttgcctttttcggtttggcagcggccttggccttcttagggctcttcgccacctttttgacgccagccgccgcgggcttcttcgccttcttcggagtcttcttcactgcctttt

SEQ ID NO: 42826 - DNA, 192 bp, Homo sapiens
  chr6:27834904-27835096
  hyper
cgggcttcttagctttagcggcgcctgccttcttggctttgggcttggcttccccggaggccgccttcttgttgagtttaaaggagccagaagcaccagtgcccttggtctgcaccagggtgcccttgctcaccaagctcttgaggcccagcttaatgcggctgttattcttctccacgtcgtagccaccgg

SEQ ID NO: 42827 - DNA, 104 bp, Homo sapiens; identical to SEQ ID NO: 4755
  chr6:27835377-27835481
  hyper

SEQ ID NO: 42828 - DNA, 1593 bp, Homo sapiens; identical to SEQ ID NO: 4756
  chr6:27839780-27841373
  hyper

SEQ ID NO: 42829 - DNA, 500 bp, Homo sapiens
  chr6:27858288-27858788
  hyper
ttgcagcgccatcaccgccgagctctggaaacgaaggtcggttttgaaatcctgcgcgatttctcgcaccaggcgctgaaatggcagtttgcggatgagcagctcagtcgacttctgataacggcggatctcacgcaaggccacggtgcctggcctgtagcggtggggcttcttcacaccgccagtcgctggagcgcttttgcgcgctgccttggtggccagctgcttccgcggtgccttgccgccggtagacttgcgagctgtctgcttcgtccgggccatagttgagaaagctatgctctgaaagcaagcagctgaatgagcagtggcttctaccagaatttataacgatgatctgatcctgattggtcagaactgttgtaggaaaaacctggttggttgttaatactatcttcatttggttcctgccacttttttttttttttttttttttttacctgacggcttctaattctgtcgcctaggctggagtgtggtgg

SEQ ID NO: 42830 - DNA, 30 bp, Homo sapiens
  chr6:27863231-27863261
  hyper
tgcctcgggcttggcgacagagcttatcga

SEQ ID NO: 42831 - DNA, 30 bp, Homo sapiens
  chr6:28109678-28109708
  hyper
tagaagttagtggccggaggggcctggtcc

SEQ ID NO: 42832 - DNA, 30 bp, Homo sapiens; identical to SEQ ID NO: 4758
  chr6:28109959-28109989
  hyper

SEQ ID NO: 42833 - DNA, 718 bp, Homo sapiens
  chr6:28175217-28175935
  hyper
acaaatgggaggactcgggcagctttcctgggatatcacaccatatagactgagaatttcagaaacgcaaagtgcgcgtcccagcagggcgagaatggcgttaactatgtcaccaccgcccaaattccctataatttaccacttatcgttcctggctttattctccgtgcgtgcagggacatgtaattctctaggagacggtggtccggacttggttcccgactccctcgtggctgcaaacaggggcagctgatttgggtggatgcagaggttgtggccaggggaagggccgcggggcagcgcgtagaactgattgtaaacccaacttcccgcctcggagcgagccgcggctcggagtagcgtcattcgaaagccaccggagatatcgagagagctccttaactgctcactgagcaaacttcgttttacagctttggggttgatatttgggaaactgggtcctaaaagtggcttctggtcttcagaaggctttgttctccgcttttgattttttgacaccacgggtttcacaccccaccccaccccccagtctcacacaaaccactcaaactcgattgcgtctccattgcgctttggggaaaaataatttaagattctcgcttctgaaatacagcgtgatggttaagagcatgggccgtggaaacagacccggggaaagcctcagctcggccactctttgccgcgtgaccctgggtgg

SEQ ID NO: 42834 - DNA, 49 bp, Homo sapiens
  chr6:28176155-28176204
  hyper
taggtttcgtggcgtcgccaagttgtacctcctgcgcttcgccgcagat

SEQ ID NO: 42835 - DNA, 30 bp, Homo sapiens
  chr6:28186868-28186898
  hyper
cccgcgccccggcccgaagtctatacattt

SEQ ID NO: 42836 - DNA, 42 bp, Homo sapiens
  chr6:28219717-28219759
  hyper
tgggcgtccagggctgcgttttttctcggttctctagccatt

SEQ ID NO: 42837 - DNA, 30 bp, Homo sapiens; identical to SEQ ID NO: 4763
  chr6:28220095-28220125
  hyper

SEQ ID NO: 42838 - DNA, 641 bp, Homo sapiens
  chr6:28249084-28249725
  hyper
cctaccagccagtgatgaccccgaagacagacatttaccactgtgttggttttcaatcgaaatgatgtacataaatttggggcgtgcttgcaccgtccgaatgggcctggggtccggcggcggagagtgacctgggcggggcaggaggtggcagcgggggtcctcccggctcaccagagagacgagcggccgtgctcctagagaggcagggaacccgccagactccgccactccgctgcgggcgcggcgcagggagaagcttttgtacccgcccagctgctggaggcgccggcagcgcccgccagacccgccagcccagcggcccgggctctggggaaaccggcgctcccgacaggggagcaccgggcctctgagctccctcgggagcctttcacgaggtcagctacgtctttgttgtgcgcgttcctgaacttttggtccattaaccaacaattagacacgccggtattcagtgcctggcgcggtgctagatgctgggtgtaatctcagaaaaatacattcaggggcgcgcctgagggtgctggctgctggcatctcaggtgctttacgtgcattcgtgaagaagcccatcagtatttcttgaataccaggtacgtgccgggcatgtagagtctatgcag

SEQ ID NO: 42839 - DNA, 1220 bp, Homo sapiens
  chr6:28303246-28304466
  hyper
ggttctggtaggttccggcaggcgctctactttcctttattaggactataagcccagcttctgtgaatcatcacctcagcccctgattggtccggggccaaactttcacttcggcttctgataggtcctgggccaagctaagcagcagctatgaatcatcatttcagctcctgattggtcccggaccaagctgagtcaagcgttcgccaggacagcccgcagactaagcgcattccctctcctttccagtccataaaaaccccagaacgggccccataatgggtactcccggtcgggaccccttctctgctggcagagagctttttcctttcgcttattaaactttcgctctaacctcacctttgtgtctgcgctcctttatcgtcttggaggcaggacaaagaactccgggcgttatctcagacaaagaaaggctgtttaatcttcaggataaggggcgggacctccacctactccacgggggcttcaggccagtgaatgtgtaggggcgggggtcacgcctgcgcagacgttccctccccgcctactccaaggcacagacctgaaatcttctgggaacctggcgggtcgcgacaaggggccaagactcaccttcggggcaccggcaagctacggaacaggtggcggggctgcagcaccccaatgaccgatcaaccgcaaaggccggaaatgcgtcagccgttctgagcccactggctgaagccaggcaactctttcctttctaggaattccagaggtggctgctgcttggtgactcccttattgcaaaccccggggccaaaaatcccagtcccactgggtgcgaggcggagaaatccggcgaggcatttctatggggagcggcccccagcatttaggagttagatggtcatcgagacccaaaacattagagccggaaggtgttaggaagatataaacgtagagagcgagtaacaggaggcaattccacggccaaacaggtttatttacaggaaaagcctgcgaagagttccagttaggaatctggctgagatcctgatcgcttacaagctgaggcttttataataaagtttctgttggggaggggttggggaagtgctggctagttggaactgtttggacactttccaactggggacagatgtggttagggccgttaggctctgttgcggttagagctgttatgctctgttgaagctatggacggggttgacatttgc

SEQ ID NO: 42840 - DNA, 234 bp, Homo sapiens; identical to SEQ ID NO: 4766
  chr6:28367112-28367346
  hyper

SEQ ID NO: 42841 - DNA, 325 bp, Homo sapiens; identical to SEQ ID NO: 4767
  chr6:28367490-28367815
  hyper

SEQ ID NO: 42842 - DNA, 117 bp, Homo sapiens; identical to SEQ ID NO: 4768
  chr6:28410970-28411087
  hyper

SEQ ID NO: 42843 - DNA, 288 bp, Homo sapiens; identical to SEQ ID NO: 4769
  chr6:28411151-28411439
  hyper

SEQ ID NO: 42844 - DNA, 227 bp, Homo sapiens
  chr6:28414764-28414991
  hyper
catccgggatggaggcgcgtcgctttctgtggctggcgctggatccaccctgggtctccagccacggctgcagagagggtagcgcggtttcttaggccagagtggagtgggacaggaggtgcccagagacgactgtggtggcttgagacatggaagcgctgcagcctttgagcccagtatccagcattgcagccgccgcggcggtctaagagctcaaaccctttcag

SEQ ID NO: 42845 - DNA, 15 bp, Homo sapiens
  chr6:28415091-28415106
  hyper
cgttcccctttatcg

SEQ ID NO: 42846 - DNA, 1112 bp, Homo sapiens
  chr6:28457230-28458342
  hyper
ctacaggtggcagcccgtttagctcttcttaaggtcttgtgatgtcattttcaagaggccagtaaagttctgtgtcacgtggggcctctcaggaggggtgcggaggtgggggaggggcggggagcaggactccactgctttggcctcaaggagtttggtcgacacttgaagactgaccaagaaaaagtaatttgtcccagttttctcccaccctttgttttcttctgctcctcttgggcttgttttttttttgggggggggggttctttcttttttcttttcttttttttttttttttcccgcagtaagttctgaaaatcgcctcccagaggagataacgcgttctcctctgtaacccgtccttccacgtcccggtggtgggggggggggtcccggttctcattctttcggggacctgcaaggagccccgcccgcaggctttgaaccgatttcggctccgcgtccaggagcaggccctacgtagggccgggggaattcaggtgcgtctgcggggcccagggcacccagggcaggcggggactgagacgactgagggttgagggacaaggaggttgggactggggaggggagacccgggacccgcccagaacgctttcgtggggttggagagggcaggacacagcctctctgggcccggtagtatgcgaagacacgcataacgcaaaaggattcccgtcctggactttgggaattaaggccctgaacacattgagcaaaaagtagatctgtctgtacagacgtttctttccacgtctttcatagtaaggactttattaaaaagcaggcactcgaatcctaggtgggtagatgggaggctggggctggggatggggacgtcctctgttttctggttgtgcacattaaaaataactctctgctgcctactcctaaacgcagccggcaaaaatgagacgtcaactaagcgccgtttcagtcccagagccaggtcgtccatgggggttttcaagcgttttctcgatgactgatttttctagaagcgaatggattttattctcccaggtgtaaaggctacctcctgcttcacacccgggtaacataaaagacagcgctgggaccgaaactcgggtctc

SEQ ID NO: 42847 - DNA, 30 bp, Homo sapiens
  chr6:28458582-28458612
  hyper
aaaataattgcttttcgtggaggcaaagtg

SEQ ID NO: 42848 - DNA, 30 bp, Homo sapiens
  chr6:31390394-31390424
  hyper
ctatacaaacacatatagctgaagcagcat

SEQ ID NO: 42849 - DNA, 30 bp, Homo sapiens
  chr6:31540125-31540155
  hyper
tttggactaccgcccagcagtgtcctgccc

SEQ ID NO: 42850 - DNA, 30 bp, Homo sapiens
  chr6:32600787-32600817
  hyper
tgacagatacaagagtcttcaaaaaaattt

SEQ ID NO: 42851 - DNA, 30 bp, Homo sapiens; identical to SEQ ID NO: 4772
  chr6:32612963-32612993
  hyper

SEQ ID NO: 42852 - DNA, 30 bp, Homo sapiens
  chr6:32636104-32636134
  hyper
tccttcctcagcccctacatcagtgcgcct

SEQ ID NO: 42853 - DNA, 30 bp, Homo sapiens
  chr6:33072156-33072186
  hyper
tatccatactccaagtaaatttggagagca

SEQ ID NO: 42854 - DNA, 30 bp, Homo sapiens
  chr6:33204258-33204288
  hyper
ttctaaagcagaactggctgcattccaatt

SEQ ID NO: 42855 - DNA, 30 bp, Homo sapiens
  chr6:33539186-33539216
  hyper
cgtgctcgcggcggcggccatcttggactc

SEQ ID NO: 42856 - DNA, 30 bp, Homo sapiens
  chr6:33589403-33589433
  hyper
cacatcggggacatcgtctccctgtacgcc

SEQ ID NO: 42857 - DNA, 30 bp, Homo sapiens; identical to SEQ ID NO: 4773
  chr6:33589676-33589706
  hyper

SEQ ID NO: 42858 - DNA, 30 bp, Homo sapiens
  chr6:33601848-33601878
  hyper
atgacttcacgcgacgctccctcccgtccc

SEQ ID NO: 42859 - DNA, 31 bp, Homo sapiens; identical to SEQ ID NO: 4774
  chr6:34100344-34100375
  hyper

SEQ ID NO: 42860 - DNA, 1865 bp, Homo sapiens
  chr6:34111735-34113600
  hyper
cgctctgagagacacgtggcttcgggcacccagctaggcaagcccagctcagtcggtgtccggaaaggccgcgttctcccgcgccaggggccggcaatggtgcggagaggggagaaagaagcaaggcgcctcctccgacagggactgaaagtctgagggcgggatgtcactcaaggcctaggggcagggggcgctcgtacgttcgggcctcaggactccctgccgccgccgatgctgctgccccatctcagcacaaacagcctcagaccgccctggtgcgggggcgcctctcgcagtcgaggcctccacctcccggccccgcccccgcgcggggaggagacgcctcccacctgcgagcgccggggaagaccgaccccggagcggggacccccagcacacacgcgcgtacacacatgcacacacagagaccactgccggtccgctcgcccggcggccgcgtagacgcgcaggttcatcacggtcccggggagggacggtcccgagtgtccggagagagcctgaccctgaagtcctggggctgcagggagaccccagaccctagagacccccacaacctgccgaggccacgggcaagcggttgccgggctccggccgctggcgaaggcggcgctggggcgggcacgggagctggacgcggtgcctgggaaaggagccgaggcgcgcgaggctgggtgccctcccgccgggagactgccgggaagaggtgcaaataatgccccgcgcccccgcctgtcccgcctctccgcagaccgggatgcgctaatgccgccgcccccacctgaaagctggcacgaccctccatccggtggaagcccctgtatacagagacagtactttccaccgggcccgcaaaaaagcctctgccccattccctccctcaggggcacccggaaagcctgccttagccccgaggggagaccctctagttcagatcccgcgccctccggcccctagggctccgggggcgccagctctcctcggagcactccaagcgcgggagctcgccggaggccacctccccgagccccgatgtccccgccgcagccctcgccccaggaggccggagggcacggtcccctctgtcggtccccctcgggccacaactcaccgcgcgccagcaaggtttaagccgcggcgaggggtcggctgcgtgccggcctgccccgggggcgcaggcagtcgacggccggaggcacggttctcgcggtgcccagagcccgggccgcggcgggcagcgctgacgctgcggacccagcgcgccgcggagccgcccggagtccgggacgcagcagggatgagctggcggccgcccggccggagccgccgccaagcgcgcggcgttcggctgctgctccggcaagcgagcaagcgagagggagatcggcggcaacccctgctcctgctgcggcggagcccggcgtccgagccggaaggagcgggagaggcggcaagaggagctgggtctggccgagagctccgggctgggaagggagcggagcgggagcgaccagcgagcgcagccggccgaggtacgggcgcctggcggcgccgcaacagcggcaacagcagcaggaaaaaaaatgagagcgagctagagagcgcgctggagagcgagcgagagagggagcgagagacgagagagcgaggaaggcgctgagaggggaggctgcgggagagggcgggagagccgggaagcgcaagggggcgagggggccgcagccgcttgccccggcgcccacagccgctgctgcacccgaggaggcacgagaccaatccggcaagtttgcgctgaaagtgcgggccaagctcacggcgcttctgccggccttttaaagagagagcac

SEQ ID NO: 42861 - DNA, 30 bp, Homo sapiens
  chr6:34119237-34119267
  hyper
tggatgtcacaagccgggatgtcaaaatac

SEQ ID NO: 42862 - DNA, 172 bp, Homo sapiens
  chr6:34192163-34192335
  hyper
ggcgagcggggtatcgagggtccagcagcctggacccggcccctccacagggcagtcccttttccagcttccaaaagctagcgttgctcacctactgccagaccccagacccacttctcccacgaggtgtaaagaaggacccctgagggtcttccacgtcaccttgtggagc

SEQ ID NO: 42863 - DNA, 30 bp, Homo sapiens
  chr6:34204896-34204926
  hyper
acacataaataccccgcgggggcctgggcg

SEQ ID NO: 42864 - DNA, 30 bp, Homo sapiens; identical to SEQ ID NO: 4777
  chr6:34217083-34217113
  hyper

SEQ ID NO: 42865 - DNA, 250 bp, Homo sapiens
  chr6:34359486-34359736
  hyper
tggcttatgcacaacgccctaaatcttccgaagacaccccacccccacccctcagctttgggctcacagacatataatccctcggcaaaccccaaacctgccaatgaagtgcactatttctctgccacaaaggccggcccgcgcctcgtgcacgccggcctccgcacacatgtgcctggctgacaactgcggagcggcccttccaggatcaaagccgttggcctggaccgaaagccgcactcttcccagc

SEQ ID NO: 42866 - DNA, 30 bp, Homo sapiens
  chr6:34360901-34360931
  hyper
cggcgcatgggaggcgtgtgcactttgcgt

SEQ ID NO: 42867 - DNA, 121 bp, Homo sapiens
  chr6:34405015-34405136
  hyper
gctaagcccctcactgcccagggccagtggcgccgctggccagccgctccgagtgcgaggcccgcagaacctgtgcccacccgcccacccagaattcgcgctggcccgcgagccccgagcg

SEQ ID NO: 42868 - DNA, 40 bp, Homo sapiens
  chr6:34405255-34405295
  hyper
cctcagttgcagccagagtggacgccgaggcctaggaggc

SEQ ID NO: 42869 - DNA, 118 bp, Homo sapiens
  chr6:34433686-34433804
  hyper
cgccacccgccacccgccacccccggcgcctgccaaactggttgctgcctccccggcagccgcggcgcgtccacctgcgcagccaccgcgccgccctgcccgcgctaccattggctcg

SEQ ID NO: 42870 - DNA, 30 bp, Homo sapiens
  chr6:34664473-34664503
  hyper
tagcttcgcgaccccgctcctttgaggtag

SEQ ID NO: 42871 - DNA, 30 bp, Homo sapiens
  chr6:34855393-34855423
  hyper
gagttttgtttggtcgtcccctctcttccc

SEQ ID NO: 42872 - DNA, 60 bp, Homo sapiens
  chr6:34856882-34856942
  hyper
gggggcccacaaggcgctgtccccatgccccgagaggcgtgtctcggcacagcaaagtcc

SEQ ID NO: 42873 - DNA, 30 bp, Homo sapiens
  chr6:35181533-35181563
  hyper
gcgcgcagggggagcggccaccgcgccgag

SEQ ID NO: 42874 - DNA, 30 bp, Homo sapiens
  chr6:35310242-35310272
  hyper
tggtgattggccgccgccgggcggaagggg

SEQ ID NO: 42875 - DNA, 30 bp, Homo sapiens
  chr6:35310670-35310700
  hyper
accctgcgcccccccgcccttggaccccca

SEQ ID NO: 42876 - DNA, 1085 bp, Homo sapiens
  chr6:35435671-35436756
  hyper
ccagctcttcccctctgcaggcgttgaaaggacaggaacagaactttccggacacttcccttaccacgagtccacgttagagcaaggtgctgagggagggaggtcgggccaggcttccttttgagaacataagctggtgcggagggcgcgaggggagaggggtttgagggacaagcgtgccggaatccacgctgtcagtgaacatcactgggctgtaccagtacgtgtgactaccgaagctcgagccccgaacccagccgcttccctaggggtccagcagcagcgggcgcgaatcggcacattaccgggggaccgcggggcgctcaggactgcgacaactctgtgggttaccgcgccggcctagcggcccagcgacgccccccagcggccagagaaggccgcgcttctcggggttggcccacccaaccgctctgcgggtaggaccgaggagcaaagcattatcgcgagatcagggccactatttgagcgcatgcgcaagacatgctagtctcttttccggttagcgcggcgtgagaagccatgaggtgagttggtcctgaaagccctatccgcgttcatccgcgccttcaggtgccccgccgagggttcggatcctgtaggccgcgccgcggacccttgcgccacctgcgccgcggggcatttctcaaggcgggtcggcctgcgggtcgcccttcctaccaggtccgatcactgagagcctccctcttccaccggggcttgggtctgggtctgagctcccgtcgctctacttggtgtccggaatctacgggggagtccgccgtgggccgcccgcccgtctcgaagcctagacctcggaggcttccaggcagtccgagcgtgtggactccgcggccctgagcgccctgtcgcttctctcccgcagcagcaaagtctctcgcgacaccctgtacgaggcggtgcgggaagtcctgcacgggaaccagcgcaagcgccgcaagtgagtgccgaccctggggcacggcgcgggtggcgagggccggcgggtgcttaacccccctcctctctcgaaggttcctggagacggtggagttgcagatcagctt

SEQ ID NO: 42877 - DNA, 161 bp, Homo sapiens; identical to SEQ ID NO: 4782
  chr6:35464207-35464368
  hyper

SEQ ID NO: 42878 - DNA, 31 bp, Homo sapiens; identical to SEQ ID NO: 4783
  chr6:35465519-35465550
  hyper

SEQ ID NO: 42879 - DNA, 30 bp, Homo sapiens; identical to SEQ ID NO: 4784
  chr6:35465830-35465860
  hyper

SEQ ID NO: 42880 - DNA, 30 bp, Homo sapiens
  chr6:35479895-35479925
  hyper
aagcccctcccttccgcagcccacaccctg

SEQ ID NO: 42881 - DNA, 31 bp, Homo sapiens
  chr6:35523457-35523488
  hyper
tgcttagaccctatgtcgactttcatacatg

SEQ ID NO: 42882 - DNA, 30 bp, Homo sapiens; identical to SEQ ID NO: 4785
  chr6:35696285-35696315
  hyper

SEQ ID NO: 42883 - DNA, 460 bp, Homo sapiens
  chr6:35744204-35744664
  hyper
ggcccctacagtctggaatcccgcccgtgcgagcctgagcgcctttcctccctccttcccttccgcaggcgtcctcgccctccacgtccctcctccgccggggtggcctggggcgccgggtcacgtggccggggaagaggttttatcccgcggcccctcggaaccccgccgctgctctgccgcccaggcccatggccgcagccctggcgctcgtggcgggggtcctgtcgggggcggtgctgcccctctggagcgcgcttccgcaatataaaaaggtgagccggggagcgcgcccagccggccgcgaccgcaggagagggtggccccgccgccggggcactggagcccgaaggcgccgggcagcctgaaagggagaggtgggtccggaaccacacccaggcgggtagcctggggcatcctcagacggacttcaaaagccgcttcactttcccctggtggc

SEQ ID NO: 42884 - DNA, 30 bp, Homo sapiens; identical to SEQ ID NO: 4786
  chr6:35887695-35887725
  hyper

SEQ ID NO: 42885 - DNA, 30 bp, Homo sapiens
  chr6:35889032-35889062
  hyper
gcagcggggaggaacgccggggtgaacgtt

SEQ ID NO: 42886 - DNA, 30 bp, Homo sapiens; identical to SEQ ID NO: 4787
  chr6:35995283-35995313
  hyper

SEQ ID NO: 42887 - DNA, 30 bp, Homo sapiens
  chr6:35996044-35996074
  hyper
tgtgtggtgagtgtcgctgggcctggggcc

SEQ ID NO: 42888 - DNA, 30 bp, Homo sapiens
  chr6:36098383-36098413
  hyper
ttctacaagcaggacgtcaacaagacagcc

SEQ ID NO: 42889 - DNA, 30 bp, Homo sapiens
  chr6:36165189-36165219
  hyper
gtctctggtgcgctcgcccctcccctctga

SEQ ID NO: 42890 - DNA, 67 bp, Homo sapiens
  chr6:36253024-36253091
  hyper
gcgccccctgcttcccgcgcgcccaccacgcacgctgctctgggagcagggccggcggcgccgccgc

SEQ ID NO: 42891 - DNA, 813 bp, Homo sapiens; identical to SEQ ID NO: 4788
  chr6:36354972-36355785
  hyper

SEQ ID NO: 42892 - DNA, 30 bp, Homo sapiens
  chr6:36391235-36391265
  hyper
tggccaatggggagcgcacatggcgacgcg

SEQ ID NO: 42893 - DNA, 53 bp, Homo sapiens
  chr6:36410470-36410523
  hyper
gggttccacattttcgggtaagcattagccgtcctggcgctgcacgagcgtat

SEQ ID NO: 42894 - DNA, 30 bp, Homo sapiens; identical to SEQ ID NO: 4790
  chr6:36515365-36515395
  hyper

SEQ ID NO: 42895 - DNA, 30 bp, Homo sapiens; identical to SEQ ID NO: 4791
  chr6:36561543-36561573
  hyper

SEQ ID NO: 42896 - DNA, 24 bp, Homo sapiens
  chr6:36563699-36563723
  hyper
ttatttgtggtttttttttggcga

SEQ ID NO: 42897 - DNA, 86 bp, Homo sapiens
  chr6:36563962-36564048
  hyper
gttctgggattgcaggtgtgagccgccgcgcccggtccatgggcatttttttaaaagtgaaaatcgttggccttatttttattaaa

SEQ ID NO: 42898 - DNA, 30 bp, Homo sapiens
  chr6:36622884-36622914
  hyper
atcacggaagcctcactcactcactccctt

SEQ ID NO: 42899 - DNA, 250 bp, Homo sapiens
  chr6:36646238-36646488
  hyper
gtccagcgcaccaacgcaggcgagggactgggggaggagggaagtgccctcctgcagcacgcgaggttccgggaccggctggcctgctggaactcggccaggctcagctggctcggcgctgggcagccaggagcctgggccccggggagggcggtcccgggcggcgcggtgggccgagcgcgggtcccgcctccttgaggcgggcccgggcggggcggttgtatatcagggccgcgctgagctgcgccag

SEQ ID NO: 42900 - DNA, 30 bp, Homo sapiens
  chr6:36647649-36647679
  hyper
tctggggggcacgacgctgctcagggcctc

SEQ ID NO: 42901 - DNA, 130 bp, Homo sapiens
  chr6:36703002-36703132
  hyper
gctgagtaacttccccgtagtcacgtagcaagtaagtgctggagccagtgttaaacgcaaacgccgatacccatagacttaactctgaagttatgcaactgcttacaggaagatgcggatgcttcgggga

SEQ ID NO: 42902 - DNA, 30 bp, Homo sapiens
  chr6:36807178-36807208
  hyper
ttagtcaatccctgcgcgattcacgcctcc

SEQ ID NO: 42903 - DNA, 255 bp, Homo sapiens
  chr6:36807967-36808222
  hyper
ggtggtcctggtcgcgcgcatcttcatttgcgcccgccccctctcaccacccctatctcccatcaggggtctccatcctgggggagggggagggttatgggaaccaacgggcgcctttttgagaaaggtctatgcagggttgagagggggcataagtgggagggaggtgtgcaaaaaagatcccctcccaggggcttgggtgtggagggtctctgctgagtgtgcgccctactcgggggcgggtctcagttcaga

SEQ ID NO: 42904 - DNA, 64 bp, Homo sapiens
  chr6:36954180-36954244
  hyper
gctgtggcggcagccgcaggccggggcgctcccccgggatgcccagagcacgcgggggcggggt

SEQ ID NO: 42905 - DNA, 988 bp, Homo sapiens
  chr6:37138569-37139557
  hyper
agtcgcagtaccaggtgggcccgctactgggcagcggcggcttcggctcggtctactcaggcatccgcgtctccgacaacttgccggtgagtgggcgccccgcggtggggagggcgcgccgggcggggggcgcacgggcgtgctttagcccggacgagggaacctgacggagaccctgggcttccaggtggccatcaaacacgtggagaaggaccggatttccgactggggagagctggtgagtgccctgcaggagcgacccccaggatgagtgggtggggtgaggggcgcccccgactcccgccctaacgcggccccctcgcccctgcagcctaatggcactcgagtgcccatggaagtggtcctgctgaagaaggtgagctcgggtttctccggcgtcattaggctcctggactggttcgagaggcccgacagtttcgtcctgatcctggagaggcccgagccggtgcaagatctcttcgacttcatcacggaaaggggagccctgcaagaggagctggcccgcagcttcttctggcaggtgctggaggccgtgcggcactgccacaactgcggggtgctccaccgcgacatcaaggacgaaaacatccttatcgacctcaatcgcggcgagctcaagctcatcgacttcgggtcgggggcgctgctcaaggacaccgtctacacggacttcgatggtgagccaggcccgggagggagctgcccaggtgactcggcccggcccggcccagtccggaggcctcggccagtctcccgcgccagccttttgtaaaggtcattgggccgcctggctcgatgctagccggggtgggacgcaggagagcctcccagcgtagtaaagccggggattttcagccagctgaacctgtaatgtttctggcatgattttattcttcaagtggaattcagttagttccaggctttcccgatgaataagaggttgtgggcaaccggcggtagcccagat

SEQ ID NO: 42906 - DNA, 30 bp, Homo sapiens
  chr6:37225491-37225521
  hyper
ccgtccacggcttgcgcagctcaccaatgg

SEQ ID NO: 42907 - DNA, 30 bp, Homo sapiens
  chr6:37226109-37226139
  hyper
aggggtctccaccacgcacaggtggttggt

SEQ ID NO: 42908 - DNA, 30 bp, Homo sapiens
  chr6:37321665-37321695
  hyper
gacctctcgaatcgcgcccgccccgcccag

SEQ ID NO: 42909 - DNA, 30 bp, Homo sapiens
  chr6:37321904-37321934
  hyper
cgctcggtgctgaccgcccccggggtcgag

SEQ ID NO: 42910 - DNA, 30 bp, Homo sapiens
  chr6:37322609-37322639
  hyper
cgcctgaactttctcgagtttgttttgaaa

SEQ ID NO: 42911 - DNA, 31 bp, Homo sapiens; identical to SEQ ID NO: 4795
  chr6:37446156-37446187
  hyper

SEQ ID NO: 42912 - DNA, 394 bp, Homo sapiens
  chr6:37664064-37664458
  hyper
ggcgagcccgccgcccggccttggtgctgacagccggctcgcccgcaagccgcgcggcaactccggctcatgcatcgcttggcttccactccggaggccgagccaggacgaggtttcggtgcaagtcgctgcaccagtcctagactgggtctgtccgggtctcccgagccgaccgggtgctctcaagggttcctaatcattcccacctctagcagggtgtgggaaagtgggtgcctcctcctgacatcccggcttcccaccagaccctacgaccggcccctgtgttccgaagcagctagctcggtctccacgcgccctggagagggcggggacgcgggcatccactccagagtccgagtcgaggtctccaccaaaccccggcagcgcgcacttt

SEQ ID NO: 42913 - DNA, 1226 bp, Homo sapiens
  chr6:37664481-37665707
  hyper
cgaggttaagccaaggtggagcgggacgcgggctcttaccgtagactccttgtccccggcagtggaaggggatcagcgccagaagtagaaggcaggtcacctccatcttcacggccggtgcttcatccccgcgaggcggcgcagcccgagaggcggcggggggcgcattcgccggggccccgcgacgcccctatgtccccccctttccctgagaggtgagagagagagcggcgacgaagaccaggagactgaagaggcggaggtggcggcgacccgtgtttctcctccggcggggccgctgcccgcgtggggacgcagggggcgctggcccagccccgggtgcctcggcgcgcccggcacagcagccagcgccccgacccgaggagcccggccgccgagccgccccgggtacccagggccgtccgcgcgggatgctaggcgccggggacctctcggcggcggaggcggcgcttcgatccaacaggccacggacgactgacaaacttgtcgtttccccgcactggggccgcccctcagcggagcggagtcggggaggccggggctccgctcgagttaatcaatctgctgtttccagtcctgcggccgctgccgtgggctcagcggcccgactccagggggccgggctgaaagcactcgcggcggcgaagcagccccgggcccggccctcctgatccggggagcagcgcgggctgggttcggccgagggacgagcgccgcgggtccccgggtccgtgaagttagccgagccgccgataaacccgggggaagaatagcagcccggcgccccgcgggaatctggagagcaattccaggcaagaagggccccagaaaacggggaaaggaggaaagtttgagtcttttgaaaaatattcgcgctctcgcccaggccggggctgcggcgcgggcgccgctcgccgcctccgctcgccgcgctcctctcccgccgtctggccgcggccgtagccctcccgggctccgagctctcgggagagcggggctacgccgcgccccaagttggtcgtccccgcccccgcccggcggccttggcctgcgggggcccagagcgggcggggccgggccgggctccggggcgcggcggccgctcggctccgggccgcgggagcgctccgctcgctcagcaacttgggctttgctgtgctgctttttcgcccctccgagcttttcattccgcgctcctcccgcct

SEQ ID NO: 42914 - DNA, 30 bp, Homo sapiens
  chr6:37666140-37666170
  hyper
ttcccccccaaccccgcccagcaggaaaat

SEQ ID NO: 42915 - DNA, 381 bp, Homo sapiens
  chr6:37666462-37666843
  hyper
ggggtcctgcagccgcgcgagacgggccgcggctgtgggtctgcaaggctgtctgcccggctcgagaggcccccgcccctttccaggcgtctggtgctggggccgggccggagcagctggcggagaggtcgcgctgagagctcctgcccttgccgcggcccacaggttgccaacaggtttgctcgcacgacccctccgccagagcttccctaagtcaccccacattttcctcggctagccactcttcccatcttgcctcccctcgggacctcaggcgcccccaagcgccccgggggcacacctccttccggctgccgaacccgagccccgctccagcggcgggagtccggcactcgggtctcagccgcctcgaaggggccc

SEQ ID NO: 42916 - DNA, 221 bp, Homo sapiens
  chr6:37666866-37667087
  hyper
cgctcctcccaaacgcccgcggggaggggcgtaggctggcaagcgaggctggtggcctcccccgcgcctccgatcccgccccgcgcccaacccgggtcctgctaatctcacctgctccacctgtcgccgttatttatctcagcgtgtgcgcaagaattgttttaggtcggcccgtgggagcgcagacaatcgcagcagctaacaagcggggagactacgaa

SEQ ID NO: 42917 - DNA, 30 bp, Homo sapiens
  chr6:37673049-37673079
  hyper
ttctaactttctccccggcagctccgcggg

SEQ ID NO: 42918 - DNA, 107 bp, Homo sapiens
  chr6:37673305-37673412
  hyper
gggcgggaaatctggcgtggacttggaggcgttcagcacacccgcgaccgctgcgtggcataaactacagggggcgccattcacataggatacgacagacatggcgc

SEQ ID NO: 42919 - DNA, 30 bp, Homo sapiens
  chr6:37787030-37787060
  hyper
acgaaggcctcagccgcccgtcgccgggcg

SEQ ID NO: 42920 - DNA, 215 bp, Homo sapiens
  chr6:39016390-39016605
  hyper
cggagagcagtgcccgctatctcctggcccgggaccggcagaggggtgcggcggggcgggcccaggggtctctggcggccggaagaaccgggaccctgccaggcccctcccgcgggcagggcggcccctcgccggctcctcccccaccgcccgccaccagcccgggatcagtctccgcacgcggttccgcaggtggcagcgatggcccagtcctg

SEQ ID NO: 42921 - DNA, 30 bp, Homo sapiens; identical to SEQ ID NO: 4798
  chr6:39082990-39083020
  hyper

SEQ ID NO: 42922 - DNA, 639 bp, Homo sapiens
  chr6:39196878-39197517
  hyper
gtccaccatggctcccgagcggccgcctcctagagaaagcctctcctagccccagctgctaccagtccgcccgccctccagcctctgaaaacagctgtttgaatttggagctccgcatgcgcagtgcccggtactcaccccccgcaagcaccgctccccggacagagttgcttggccaagttggcccacggagtgcggggagctgcgtggggccccactcacgcggcccggggtgggcgaacaccagcggggctgaaagggcgccctggaccgcggatgcgtaaggagcgggaagaacacaggacttgactctgggcagacacgtgggccgcttctccacgcgtcgctcctccgcgcgccactagcagtatgcgccgcgcccgcctccgcacgcctctttaaccagcgcccggcgcgctctgcccccttgctccgggctccgaccggggaggagcccaggcgggccccgccccttccccgcacaagcagcccggcgagcgcaggagtgagcgcgaggtgagcgctagaagaggcttggcgctccccgcgctcccagggtcagccgccaggggaggctgcgccgcccgcccagacctgcacgccctgcggtgcccgaggggttgcggtctcagggactcg

SEQ ID NO: 42923 - DNA, 47 bp, Homo sapiens; identical to SEQ ID NO: 4799
  chr6:39271081-39271128
  hyper

SEQ ID NO: 42924 - DNA, 494 bp, Homo sapiens
  chr6:39281406-39281900
  hyper
gcggccaggtgtggcgtttagctctttgccacgggtgcgggtgcgaccaacccccaagcaggctcaaacgcgccctttcccgggtcaggccgggcggggccggttacgcgcgcgccccctgccgtagtcgtcctcgcccccaaatttggatgtgtccccaggcatctgcctcctcaccgggccagcatgccctctcgcccccaagtaggactcagcccggcttctcgcagtcctctcgctagggcgagggtcttttcctccgaggtcccccaaccctctggtccccgcgcaggaacgcccacccccgttgtgcccgcgtctgcgttcccgacgtttccctgaacaggaaacacctgaccagggcctgaataggccccctcgccctcggcccgtacaccccgcggcccgctaccccatcccgccgcgcccaggccgacgccgctcgcccctgacccggatcagcgagtccagcgccgggcggtccagacacgtga

SEQ ID NO: 42925 - DNA, 658 bp, Homo sapiens
  chr6:39692722-39693380
  hyper
gaacatgcactagtctgcccccgcgtgaacacgtgtgcctgggtgcaaaaaaaatggctctctgccgggtctgcgctgtgccaggtaggagtggcctggctgtcggtcgcgtagctgacagcagtgcgcgggggtcttcgcggctgcagggctcctcggtcagtgtgtgcgggattccgggcggcctcggcgcccaccagcaagcccctcacctccgcccagccccttcgcgtgccgccgcccgaccccagcccaagaggccccgccgcgccggcgccccggaggctccagcccgtaccccttgttggtgcttccggacagggggcttcaccctcgcgaatatctggatagtctgcttcaccatctcctccctggctctgcaatgacccttgacctctctcaggcccgggctgccaaaactaactcccaccacctccggcgacccacagtcttagcaacagtagctagggacactacccagtgagcaccttggcagccaggatcccgcctcctccctctaattggtcgcgaccggaaggaggccactacggggcggggctagggaggggagggcgggggtggagaggagagcgctgcgcatgcgcatgagcgagtgtctgggctctgggtttagcgccggacccggcctggaccgtgt

SEQ ID NO: 42926 - DNA, 181 bp, Homo sapiens
  chr6:39759926-39760107
  hyper
ctcattgtacgcctcgccctgccggtggcgctctccccccgcctgcgttcggtctgaaagtgtgaaaattacaaatcccaagaaactgcaatcagaagtctacctagggaaaattcagagtaaccttgccataaatatcccgctccaagacgcctgacgtcagagcggggcgggcggacgg

SEQ ID NO: 42927 - DNA, 30 bp, Homo sapiens
  chr6:39760401-39760431
  hyper
gtgtttgcaggagccgccgaccccggagtg

SEQ ID NO: 42928 - DNA, 445 bp, Homo sapiens
  chr6:39901967-39902412
  hyper
aaaagggcagtgtgccggggccactcctgccccgggaagctgtggacgcaggcggggtgggctcacctccgaggcagctcgcgcggactccccggggcagggctgggtcaccggagcccctgagctgcagctccgggcgctggacctcagaagccgccgcagcatccgggacagtggccgcgccgccatgaagcctgatacgagcggaaccgcagcccgcttcgggagcacactggccgggcactcgcccccggggtcatcccagcaagggcggggaggggcagggggagggcgggacccgcgcagccaataggcgaggacgcagtcccgcgtggccttgtgggagctgtagtacgctccctgtgcccactttcctgggccggggtagcgctctagggcagaagggtaaactcaggtaaggaacggggttcttttccttccagtt

SEQ ID NO: 42929 - DNA, 843 bp, Homo sapiens
  chr6:40554427-40555270
  hyper
ctctccccgctccccgccagagtttcacccccactgtaggaaataaagactaaagaaaggaaaggaaatctctcgcgataaggatgggcgaaaagagaagggggtgtccgcatgagcacctaggatgcggggagtcttcaagagaaaaagaaagggatgcaaagttcccggttccctcgggtgcgttcagccccgcgccgagctcccgcggacacccgggatcgcaaagacgcagcgccggcgaccactcacctgggcgaggcagcatctacccccggctgggtggcaccgaggccggctccgcggggcgcccgggctccccggctcggccacgcatccttccccgcccgagacagactcgagctaaaccctccggcggctccggcgaatgcaggcagatggtggcctcggacgtccacgcggggaaagccctgagccgcttattcagttatatccatggcatttagcaagaagaaggggggaaaagcacaacttgttctcttctcttccagattaaagaaaaataataataataatccctccctaggaggatgccggtaggattttccggatcgaagaaccccaggcattcccaggaacctcgggcatcttggaatgtggggtgtcttcaagttcagacgagcctgccgggttgtgtatgtgtgagtgtatgtgtgtctcagcgagagggagccaggcactcacacccacacgcacacacaaacacactcccccgtactccccgcatgcacactgccccccacgcgcgcgcgcatacgcgcgtacccggtttctctctccgctccacacacacacacacacacacacgcacacacacacaca

SEQ ID NO: 42930 - DNA, 223 bp, Homo sapiens
  chr6:40555282-40555505
  hyper
gctccaatctgggagggagtcgggcgggctgcggagacagcgcagggccagcagtggagaaaacccagcggccagaggcgcccaggaacccggcggccgtgcgcaccgtccccgccgagctctccggcgcggcagcccccagtggcgaaccgcggagctgcaggagccgaaggcagcctctgcgcccgctgccctgcccgctgccgagcgcacccgcttccga

SEQ ID NO: 42931 - DNA, 207 bp, Homo sapiens
  chr6:40555709-40555916
  hyper
cacctctgcagctggcgacggcgctgccacctcacgtgcctagcgcgccctgcagccgtcagcccgccgcctgctggaggaaaacccgaccgcgccggccctaggctgggagtgggggctggggcgatcgcgcccacccagtcctggggcccagttcagattctcgaatcctggtaagggacctatgaataacgagcgccccgtgca

SEQ ID NO: 42932 - DNA, 31 bp, Homo sapiens; identical to SEQ ID NO: 4803
  chr6:40763876-40763907
  hyper

SEQ ID NO: 42933 - DNA, 30 bp, Homo sapiens
  chr6:40802245-40802275
  hyper
taagaggcctgatgttgccagccagtttat

SEQ ID NO: 42934 - DNA, 232 bp, Homo sapiens
  chr6:41039967-41040199
  hyper
ctcctaccctagggcgggtcagcgaggacgcagtctgtcctggggtcctatgggagggtgcggggaggctcgctcaaagccccaacgtacccaagtcacccttcacctggaaaggagtcggttgtttggaggtccccgccccgcggggaagggctccggatccgaccctggtaggtggggagcagcggaccagcccaaacgcggagccaatcccgccaaagcccttaattgc

SEQ ID NO: 42935 - DNA, 171 bp, Homo sapiens
  chr6:41040503-41040674
  hyper
gcgcgtctggaaagcgcctgcgtattcctttcactgggggtggtgtcaaagcgggaaggtgggcgtggcttcagggaacgcctgcgcgttgctcctccgaaggggtggggcgatccctgaactggagttagtgggcgtggcctcagaggcgcctgcgcggaggcggttgga

SEQ ID NO: 42936 - DNA, 145 bp, Homo sapiens
  chr6:41337023-41337168
  hyper
aaggcaacaggtgggacggggagccagggagtggaaacgccggaggtcctcaggctggggatcccggagtcctcgctcagattccgattccggagaaggccaattccgggaccctatccatgtcccattccgggcaccttcctca

SEQ ID NO: 42937 - DNA, 489 bp, Homo sapiens; identical to SEQ ID NO: 4806
  chr6:41339069-41339558
  hyper

SEQ ID NO: 42938 - DNA, 928 bp, Homo sapiens
  chr6:41339601-41340529
  hyper
cgtgggcacttacacgttcccggggaggctgggggcaggagcttcactgttcacacaaagagcgcttagaggaggaacatttaagtttgggggcaaagaaagaaaaaagagttaaaggtttaggagatgggggaggaggatggggcttaaggacgcggtgttgccgcggctcagccatcggggcgggaagctcggggagggagagcgcctgggcccgcttctcgcctattctacgcagaacttttctctcctccttcttccctcgctctgcctctctcggggcggtctccggggactgtctctcacatccattctcctctcctccttgatttatgctgcagagtggaacgaccttccctgacctcattttcatgtcggcgcgagcacacccggagccggctacgcacattccggaggaggcgcgcgctgacacgcacacacacacacacacacactcgagacactgcagggccctgcccatcctcgagttcacaccagccccgccactattatgggcactgccggggctgtggacgctcaaagaatagatcctcattagcatcttgctttgaatatcatttgcattttattcatttcatgtcaaaacgctcagaactctccccagcccgcaccttccccagagcttgggagtcatgggtttccagctcaagccccttctctgtgggccccacgcttgctggctacccccaccccacctaccctgcgccacagcccccacaaaatgaattgacgtctcctaagcacttggcaagttccatctcctgcgctagggtgcattgtctcatctaatcctgacagcaactcaaggagcaaagcactatactatacccatttgagagtcgaggaaactgagtcacaaaggtgacttgaccaaggtcgtggagctaaaaaccgaggaggagaaact

SEQ ID NO: 42939 - DNA, 30 bp, Homo sapiens
  chr6:41341059-41341089
  hyper
gctgggcctgcgcccgccatccccagcgcc

SEQ ID NO: 42940 - DNA, 30 bp, Homo sapiens
  chr6:41343180-41343210
  hyper
ccaggcgcagccgcgcgcagacctgtcagc

SEQ ID NO: 42941 - DNA, 30 bp, Homo sapiens
  chr6:41343420-41343450
  hyper
gagcgggagccggggcgggaaggcagctgg

SEQ ID NO: 42942 - DNA, 39 bp, Homo sapiens
  chr6:41343672-41343711
  hyper
ttcagacaaggcgaacgtggacgccgaggcggaggccag

SEQ ID NO: 42943 - DNA, 114 bp, Homo sapiens
  chr6:41472017-41472131
  hyper
aagaggccccagggcgcataggaaaggagggtgctgccgaggtggctgcctgggggcgggccctacaggggtcatttggggcatcccctgcctctaggcaaatccccacggagc

SEQ ID NO: 42944 - DNA, 30 bp, Homo sapiens
  chr6:41513987-41514017
  hyper
gtctcccctccctccgccgcttgctctctc

SEQ ID NO: 42945 - DNA, 182 bp, Homo sapiens
  chr6:41605769-41605951
  hyper
gagaaacttgatcgcgcccatctttggggcaaagagatttggaggccgcaattattcagacagttccacgaagtggttgaggtttctctctttctcctgattttccagaaacttttgcagagtttggacaggcaaaggaaaacgtgcagcccgcggatctccgggcctcagagagcagggag

SEQ ID NO: 42946 - DNA, 319 bp, Homo sapiens
  chr6:41606037-41606356
  hyper
cggacagacgtgtccggctcctggctgggccaagcccggcgcgggggaggggacccgcagaggggcgactgagaaggcgaggagggggcggggagagggtgggccagggaagaggggaggggagaggcgagtaggggaggagcgaggggggctggagggagagaaggaagaaggaaggggcgaacggcgtgagctggcgccgaaatgggagaaagcagcgagtgagaggggaaggggcgccaggcgagcacccgggagccagcgggacctgggcaggggcgcccggagcaggcgcgcatggcgggccccgcgcggggat

SEQ ID NO: 42947 - DNA, 49 bp, Homo sapiens; identical to SEQ ID NO: 4811
  chr6:41606527-41606576
  hyper

SEQ ID NO: 42948 - DNA, 30 bp, Homo sapiens
  chr6:41692796-41692826
  hyper
caacgcttgctatccgtttttcagattcca

SEQ ID NO: 42949 - DNA, 36 bp, Homo sapiens
  chr6:41747770-41747806
  hyper
gagcagtgagcatgcgcagacgccagagggcgctcc

SEQ ID NO: 42950 - DNA, 30 bp, Homo sapiens
  chr6:41755015-41755045
  hyper
ccccttcagtactgcgcgttctaagacttt

SEQ ID NO: 42951 - DNA, 30 bp, Homo sapiens; identical to SEQ ID NO: 4813
  chr6:41755384-41755414
  hyper

SEQ ID NO: 42952 - DNA, 171 bp, Homo sapiens
  chr6:41862276-41862447
  hyper
cagctcatctcgctccgcactagttcacaccctcgtcacgtctggctcttaatcactctctctttcctactcccaactattaccccagctctgcccctccttgtcttccacttccaacacttaccccggtacccctcaccccaacaccacccgctacgaagatttcccctt

SEQ ID NO: 42953 - DNA, 30 bp, Homo sapiens; identical to SEQ ID NO: 4814
  chr6:41863682-41863712
  hyper

SEQ ID NO: 42954 - DNA, 30 bp, Homo sapiens; identical to SEQ ID NO: 4815
  chr6:41888907-41888937
  hyper

SEQ ID NO: 42955 - DNA, 30 bp, Homo sapiens; identical to SEQ ID NO: 4816
  chr6:42016698-42016728
  hyper

SEQ ID NO: 42956 - DNA, 30 bp, Homo sapiens
  chr6:42018213-42018243
  hyper
cccgccccgccccgcgactacaagtcccat

SEQ ID NO: 42957 - DNA, 717 bp, Homo sapiens
  chr6:42109901-42110618
  hyper
gcccggcggctgctctcggccagtccgcaggttccaacgtgtccctcccctccgcgcctccaggagacagcaccgccggccctgccccagcgccctccgtccccgccccagcgccctccgtccccggagtactcaccgaagcccccggtcccctcctccggggcctcctgggtgaagatccagggcggattggtggcgtagagggaggtgctgggggtcgtggtgtgcttcttcccgaagagtttgctgaaggtgccctgcaccgtctgcttctttttcatgctgccgcagcccgcgcgggcgccagggaaggaccttccctccctcgccctgccctgccccggactgaactcagcacggtttccccaggggactctaccaggccatgtcccccgccgtcctccccgcccgcgcaccgggcaacaggtgctgcgggcgccgccgcttgccgggaaatgcgagctacctggccaggtaaaaggcagccgcttggccgggccccgccccgccgccgcccagctccccaggccgcattccttcccgcctccttctacaacaggccattgttggcacggcccggtgggctggggacctcgcccggcccacgcccagcctgggagacgggccaccccctcccccaggttcctccctgcacgcctccttcaccccacttccccctagtccgggaaaggaggcgggtgagtttccagcctctca

SEQ ID NO: 42958 - DNA, 30 bp, Homo sapiens; identical to SEQ ID NO: 4817
  chr6:42419076-42419106
  hyper

SEQ ID NO: 42959 - DNA, 30 bp, Homo sapiens; identical to SEQ ID NO: 4818
  chr6:42419451-42419481
  hyper

SEQ ID NO: 42960 - DNA, 30 bp, Homo sapiens
  chr6:42420756-42420786
  hyper
ggggtctcccttgccgcggcaggcgcagca

SEQ ID NO: 42961 - DNA, 30 bp, Homo sapiens
  chr6:42421228-42421258
  hyper
ctggtcagaggaaacgtgaaccaaaggtag

SEQ ID NO: 42962 - DNA, 30 bp, Homo sapiens; identical to SEQ ID NO: 4819
  chr6:42531622-42531652
  hyper

SEQ ID NO: 42963 - DNA, 3 bp, Homo sapiens
  chr6:42531864-42531867
  hyper
gga

SEQ ID NO: 42964 - DNA, 105 bp, Homo sapiens
  chr6:42531901-42532006
  hyper
cgtcacccttctctccctctgttgctccacctgcagccacttggacggctccgggactgattgcctggggcaggggtggcagtcgaggccgccggggccgaggtg

SEQ ID NO: 42965 - DNA, 30 bp, Homo sapiens
  chr6:42713390-42713420
  hyper
tcttgaaagcgaaacgcttcttgggctgca

SEQ ID NO: 42966 - DNA, 30 bp, Homo sapiens
  chr6:42714364-42714394
  hyper
cgcttgcatgcctccggttttttcttttcc

SEQ ID NO: 42967 - DNA, 30 bp, Homo sapiens
  chr6:42715329-42715359
  hyper
agcacagttcataccgtgtggcagattccc

SEQ ID NO: 42968 - DNA, 30 bp, Homo sapiens
  chr6:42896728-42896758
  hyper
gcttgcaccttaagcgcctacaagagtgcc

SEQ ID NO: 42969 - DNA, 30 bp, Homo sapiens; identical to SEQ ID NO: 4820
  chr6:42897235-42897265
  hyper

SEQ ID NO: 42970 - DNA, 273 bp, Homo sapiens
  chr6:42928259-42928532
  hyper
cgagggtcctctcccgccgtgggattgcacagagggctgggtccgcaggctggctaaaaggacctagcccaggattgcgaggcagcgccctccctgcagctggacagactcgggcgcccggcccaaagcccggcaggggcgtgtccgcgcgctcacctgctattggccaggtggggctgtcggctgccagcagtgcttatgctttaagtgcggagcgggtggctgcggagccaggcgcggcgcaggatggtggacagcgtgtaccggacccgc

SEQ ID NO: 42971 - DNA, 30 bp, Homo sapiens; identical to SEQ ID NO: 4822
  chr6:42947237-42947267
  hyper

SEQ ID NO: 42972 - DNA, 43 bp, Homo sapiens
  chr6:42952279-42952322
  hyper
ggaggcgcaggcaccgctcgacccgggcgcagcgcgcaggcgg

SEQ ID NO: 42973 - DNA, 30 bp, Homo sapiens
  chr6:42952571-42952601
  hyper
gccctccgcccccgcggctggcagcacccc

SEQ ID NO: 42974 - DNA, 248 bp, Homo sapiens
  chr6:42981661-42981909
  hyper
ccggcggggcaggacgtgcagaggtgcctagtcctccagccccgccccatatccatgattgacgctggcgaggacgaggagtccgccccttgccccgcctccgtcattcccagcccaaaaaacaaaggactgcattacccagtggcctcctcggtctcgacacatatttgcacatgcgcagaatctctcctacgcccctgcccactcctcagccctctcgtccctcaggaaacgtatggactacaagt

SEQ ID NO: 42975 - DNA, 30 bp, Homo sapiens
  chr6:42989081-42989111
  hyper
tgggggcagggtgccgaggacaagcaccct

SEQ ID NO: 42976 - DNA, 36 bp, Homo sapiens
  chr6:42989813-42989849
  hyper
agaattcagcagattccgtagactttgtttttttaa

SEQ ID NO: 42977 - DNA, 30 bp, Homo sapiens
  chr6:43021166-43021196
  hyper
aggggcttggggaccgaggttggagactgg

SEQ ID NO: 42978 - DNA, 30 bp, Homo sapiens
  chr6:43021399-43021429
  hyper
cacagagcaagggacgcggcacagacgctg

SEQ ID NO: 42979 - DNA, 30 bp, Homo sapiens
  chr6:43027110-43027140
  hyper
cagggccatcagcacgacacccttactttt

SEQ ID NO: 42980 - DNA, 30 bp, Homo sapiens
  chr6:43027915-43027945
  hyper
tgtttgtaggtgaccgtgacagagacaaaa

SEQ ID NO: 42981 - DNA, 126 bp, Homo sapiens
  chr6:43081635-43081761
  hyper
gtatatatagagcctccgcccctctctttaactccctctggccttccaccaacagacaagctgtaaccttcagaatctagtgttaccctgagcagccccggggcctgtggccggggactcagtctg

SEQ ID NO: 42982 - DNA, 169 bp, Homo sapiens
  chr6:43138367-43138536
  hyper
gatgaatgaagatcctcgagccagcccggtgggaaagtttcgtcgcctacaaaagcgagggaaagggaagggaagttgggggtaggggaaaagttagagctgagaggctggggcgcgacgagtctggacaccgggcggggacccaagctctctccgctcagccaataac

SEQ ID NO: 42983 - DNA, 30 bp, Homo sapiens
  chr6:43138950-43138980
  hyper
caatggggcgggggcgctggggctcaccat

SEQ ID NO: 42984 - DNA, 30 bp, Homo sapiens
  chr6:43139665-43139695
  hyper
tgggcgccgagcggcgcggcctgaagcgga

SEQ ID NO: 42985 - DNA, 174 bp, Homo sapiens
  chr6:43196992-43197166
  hyper
cctcaccgcgcgcgcccagctcggcggccgccacgtgctcggtgagcactgtcccgaatcgccgcagccgagacacgatccgctcgtacagcgtcctgtcctcgcgtccgccgcgaatgctcccgcagaagtacagggccgggcggccaggctccccgcgctcccagctctcgc

SEQ ID NO: 42986 - DNA, 57 bp, Homo sapiens
  chr6:43211193-43211250
  hyper
ggtgctgatgctggcggcgcggtgcattgtgggcagctccccgctctgccgctgccg

SEQ ID NO: 42987 - DNA, 30 bp, Homo sapiens
  chr6:43214835-43214865
  hyper
agctttttctctgacggaccttggagaagg

SEQ ID NO: 42988 - DNA, 211 bp, Homo sapiens; identical to SEQ ID NO: 4825
  chr6:43237315-43237526
  hyper

SEQ ID NO: 42989 - DNA, 30 bp, Homo sapiens; identical to SEQ ID NO: 4826
  chr6:43242896-43242926
  hyper

SEQ ID NO: 42990 - DNA, 482 bp, Homo sapiens
  chr6:43243446-43243928
  hyper
cacgccccaatccgcgtcccctgccccaccccaccactgagggccctgggggtcaccaaacatgcccccccatttccagctcttcccacacccccacccccgaaaataaaactcagggaccaacatctgcttcctttgcacttgctccgtcgaccccgctccccgctcggaggggcttccgtgggggagggggcggggctccgggccctcagagttctcagtgtcgagcgaggagaggggctggcccctgcccccggagaagcgggactggtaggagagagaaactcagcaccggggcccagctgagccccttcctgcgtaaggagacgccttctaattgcggggtgggggcggagtaggggagggataggaaggggattagcgagaggaccctcgcggaggtcctgagtcccagtcggtttattcctgagccttcccctcccatcgtaagtccttccctcgaccccccattttgtactgca

SEQ ID NO: 42991 - DNA, 30 bp, Homo sapiens
  chr6:43337739-43337769
  hyper
aacgggcctgtaaacgttagctgtgtggga

SEQ ID NO: 42992 - DNA, 30 bp, Homo sapiens
  chr6:43395754-43395784
  hyper
agcgtggccgctcccgctgtgggaggggga

SEQ ID NO: 42993 - DNA, 30 bp, Homo sapiens
  chr6:43422680-43422710
  hyper
caagtgacaggagccgacgagggagagggg

SEQ ID NO: 42994 - DNA, 48 bp, Homo sapiens; identical to SEQ ID NO: 4828
  chr6:43423047-43423095
  hyper

SEQ ID NO: 42995 - DNA, 30 bp, Homo sapiens; identical to SEQ ID NO: 4829
  chr6:43423742-43423772
  hyper

SEQ ID NO: 42996 - DNA, 39 bp, Homo sapiens; identical to SEQ ID NO: 4830
  chr6:43478198-43478237
  hyper

SEQ ID NO: 42997 - DNA, 30 bp, Homo sapiens
  chr6:43484797-43484827
  hyper
ctaggacgcacgcgcgagatagaacctcta

SEQ ID NO: 42998 - DNA, 30 bp, Homo sapiens
  chr6:43543533-43543563
  hyper
gggtccatcatgaccgtcaccgctttcacc

SEQ ID NO: 42999 - DNA, 99 bp, Homo sapiens; identical to SEQ ID NO: 4831
  chr6:43596712-43596811
  hyper

SEQ ID NO: 43000 - DNA, 30 bp, Homo sapiens
  chr6:43597039-43597069
  hyper
tggcctccgggtcgcgtcagaaacagccgc

SEQ ID NO: 43001 - DNA, 142 bp, Homo sapiens
  chr6:43597645-43597787
  hyper
ataaccggaggcaccgcggtggccccgacacgagacccgaacccgtaaaccagcttcctccccgaaggctgcaagcatacccaaagcgagtattcctcctcccctttgttttgaagcagaaccaatcgggaagaactgagtt

SEQ ID NO: 43002 - DNA, 134 bp, Homo sapiens
  chr6:43598078-43598212
  hyper
ggctcaattcacagccgcatggctgtctcatgactcagaccactcacagtgtgtccacttctcccctcttctcgaactgcgaggtgctcatacacggtcaagaaattaaacaactcagccgggtgcggtgcctc

SEQ ID NO: 43003 - DNA, 492 bp, Homo sapiens
  chr6:43969982-43970474
  hyper
tggccgccttctcccccgccgcccgcgcccacgccctcccccgcggggccgtggcagtgccaccaagggcctctttaagcccctttgaagccgcggagccccgcgccgcaggaggccccgccgctatgccagctatgccagctatgtccctgctgccgccggccgccaccgctcccccattaatgctggctaatctggctaataaataaactcccctcccagccccagccccgcgccgactcctccccgcccccgcagaatcgatgtcagggctcgactagagcaagcgcccgcactccaccccactccctcgagatgtagctgacgttttttcttatggctgccctaggtctgtagcccgtcggggattctcggggagacgtgggatttgggaggtctccgcctagccactgcgtttgccttcctcttttccagtccacctgcgcaccaggggcaggacacgtggctgggtgcagacgctggcccggatgt

SEQ ID NO: 43004 - DNA, 388 bp, Homo sapiens
  chr6:44044180-44044568
  hyper
ggcagcccattttaaatacaacggggcctgaaggctaacttctggccttcctgcttcgggaaatcattccaataaccgggaaaaaagggggcccgaggacagagcccctgccgggccccagggggagtgtcgtcggctcctttgcgtcgccggccggcggcgtggcggggactctggccggcagcctcccgcgccgtccggagcagctgacccgctggcggtgggccaggtcgcggcggggcctggaggcagcaacgtgcggcgcggcatgtcgcgggcgccgcggcagggaaatgtgggggcgggccggcgcgccccctcccccccgcctacgctggcccattcataaaacctgcaggcgctgcccggcctggcagccttggtctcc

SEQ ID NO: 43005 - DNA, 67 bp, Homo sapiens; identical to SEQ ID NO: 4832
  chr6:44094339-44094406
  hyper

SEQ ID NO: 43006 - DNA, 271 bp, Homo sapiens
  chr6:44095870-44096141
  hyper
ttttttctgctgctcccgggggcgagtacacccgaagccggtccggggtaagggctcgggctcgggcaagggcagggttcgcaggtgctggcacgaggccggccgctgcccccggctctggggactgactggtcggcgggctggagaggcggccggccccgggagcgtgtcctctccttgcgccccacacagtgcagttcattcatgagccgcccgggcctgcgttggagggtgcggtggggaaaagattcagacgcgaaaccgagagtgg

SEQ ID NO: 43007 - DNA, 58 bp, Homo sapiens; identical to SEQ ID NO: 4834
  chr6:44187016-44187074
  hyper

SEQ ID NO: 43008 - DNA, 110 bp, Homo sapiens
  chr6:44187131-44187241
  hyper
cgacccagggggaggggcagagagaagggggtccgagcccttgggcccctaaccccgtccctttccggagcctcgggtgcccaaaggcgccggccgccagtcccaggccc

SEQ ID NO: 43009 - DNA, 30 bp, Homo sapiens; identical to SEQ ID NO: 4836
  chr6:44214200-44214230
  hyper

SEQ ID NO: 43010 - DNA, 30 bp, Homo sapiens
  chr6:44214644-44214674
  hyper
agcaaatgtgtgggcggatccgttgcttgg

SEQ ID NO: 43011 - DNA, 30 bp, Homo sapiens
  chr6:44215347-44215377
  hyper
gtcacctctcttatcggacgcgttgttaaa

SEQ ID NO: 43012 - DNA, 30 bp, Homo sapiens
  chr6:44225470-44225500
  hyper
tcgcccttcataagcgtcccagaggtcatg

SEQ ID NO: 43013 - DNA, 30 bp, Homo sapiens
  chr6:44233431-44233461
  hyper
cttcccgggctctgcgtaggcttggagtct

SEQ ID NO: 43014 - DNA, 30 bp, Homo sapiens
  chr6:44238977-44239007
  hyper
gtacgggctacagaacgaggagggtaccat

SEQ ID NO: 43015 - DNA, 638 bp, Homo sapiens
  chr6:44265093-44265731
  hyper
cttcttcccagtccctcccctcgcctcactcggatccccagccccgggccagacggtttgcagacagtgactgtggtggggaggaggcgcggggcgtcctcgcgtggagggcgtggggtctcccgtgggtacggaccggcgcttccccgccacggaaaacgcaacccaggcaatggccgcccgtgggcttcgggccggtgtgggcagaggacgctagaggggctcccgggcccagccggccagagggggccccgataagggagaccggggctgggtgtccccactcccggaggtcgcctcacccgctccgggagccccggcgctcgcctcacgcagagtcccgcgcgccggcgcaggtctttgtcgttggggacgccccgcgttgctaggagcgggccgggccgggaggacgagcgcgccgctgcttcctccgctgccgctgccgctgcgcgccaggcacgcggcttactcgcgcgcagggtggccaggcccggcctcgggacggttccgtggaagcggccgctttgcgggtagtgggactgtggccttgcgctatgccctgtgcttccgtgggacgtgtctaggaacgggtgggctttctgcgggaggcgggggtcgggcagggctgctggtctgga

SEQ ID NO: 43016 - DNA, 30 bp, Homo sapiens
  chr6:44281017-44281047
  hyper
cccgccgcagcctccgggctgcagctgcca

SEQ ID NO: 43017 - DNA, 30 bp, Homo sapiens
  chr6:44355184-44355214
  hyper
actcggtgacgtcacgatcaatcccaccac

SEQ ID NO: 43018 - DNA, 30 bp, Homo sapiens
  chr6:45345529-45345559
  hyper
actgctgcgcttcccgcgaggagaatgtgg

SEQ ID NO: 43019 - DNA, 1471 bp, Homo sapiens
  chr6:45387304-45388775
  hyper
ctctctctctcttttttgaggcgaaagcctggcttcccttcccggatcggccgcctgtgggactcgagagacctgtgcacgcaggggacgcggcggtgcccggggttagagctctcccctgtgaccgaaaagataattaaaaatcgcacgcgcaggagccagctcagctcctggctgcgcttccagttggtccggtctggctaaatgggttctcgcaccctggcggcgcccgggctgggaggccagtaggccgggcgcgaagagtaggttggggaccaggtgtcatagccggtggcgcagaatcgcttctcggagtcaccgagggtggcagtggcaggcggcggctgtggggcgggaggggcgcggcttggggctagtgtctgtggagggatttggggaagaggcaggaacgtggagagaaacgtgggaaagggaaagaccgacgagggaggcgtggagcagtgcatggaggaagggcaggtaaaaataaagccccaattaggaaggacagagtagtatcccctgaactccatccttacccctcgagagcgcacacctggctaccccgcacccccacctctgctcccgcggtctggcagaccctcagtcccccgcgcatctcttcagcggggcgatcccgagtcacgcaaccacagccccccaagctcatcttgtactcgaaagggctccagagtccgcgactggcaccaggcccccatcttccgtgcccctcatgctctcagagcccttccaggccccttctagggcgcagacccgggcgtgggctcagcgagtgggagcaaagctctaaaaccagacagggagggtcgtggcaggtcgctacgagggtgagggaggcgtttgcactgagcaataaaaacacccagtaatgggtatgtgaattgctttaaataagatgggagggcgtgagagatgacccaaccatctttcttccttgatgcttcgagggggaggcattctaattcttcatttattttataaaatcacttgttactgtgtcagctactccactaggaatctttgaaactttggcaactgatgatttttttcgcaaacacgttttcaagctttggaaggctttaaagagtttggtaataagcaagaaacgtagtagtacacaacgccgagggtaaaacggccctgtgcccccttcttggggtgtaatagcctcaagcggatttcccggcttctgcgggcgcagcacattgttttatttgttttgaaggctcagagtttgaggctggtcgtagacacccacgtgctctgactctcatcagcgtaatgatcgacttagccagagtcgtgtctatataaaccacaaaaacctaatcattagaaatcccagcctccaaaaaccacattttaggtaaaaagtgccgctttttttccgcgctccttcatcctctcgaccacaactttttgggggatccaaagtcgctttttaaaccca

SEQ ID NO: 43020 - DNA, 646 bp, Homo sapiens
  chr6:45390895-45391541
  hyper
tctcccacctgtgcccgctgccaccccgacttcagccctagtccccctgacccgttcagcactcctcatgcctcctgcctggccttgattctcactcactccttcgcgccgtctccctttcccccaggatccccaaagtacccactcttgcactgcgagcggacttgctccaccccgcccctttcccgggggcgaggatccccggcattgtcccctggggctcccgcgtccttccgggacatcccggcctggccgcattgcgggctgcccgcgcagcctctctttggggctccgcgcgctctcacccgcttccctcacagccaaacgcctctcctcaggtctcggcgtccccttccccgacccgcagagttcagcggtcctggtccctcccgggctcccgtgccgggattcgtggggtgccggtgccgggcattagtgcccggggctgggcgtggggtgctgactgaggcgcgcgggctgcgctaccagtgcccgggagggtcctggacaaacctagggtctccagaggagggggtgtcagggcgggggcgtttgctctgttcgctgacccgcgccagatcccgttaccgggaggaaggcggggccgctggggcgtccgcaagccccgaagcgggggcgttcaggg

SEQ ID NO: 43021 - DNA, 37 bp, Homo sapiens
  chr6:45631098-45631135
  hyper
cgccccgcgtctggtcgactggctccccggttgccct

SEQ ID NO: 43022 - DNA, 23 bp, Homo sapiens
  chr6:45631602-45631625
  hyper
cgtttcagcgtgaaacagacccg

SEQ ID NO: 43023 - DNA, 963 bp, Homo sapiens; identical to SEQ ID NO: 4841
  chr6:45982720-45983683
  hyper

SEQ ID NO: 43024 - DNA, 357 bp, Homo sapiens; identical to SEQ ID NO: 4842
  chr6:46097264-46097621
  hyper

SEQ ID NO: 43025 - DNA, 443 bp, Homo sapiens
  chr6:46097694-46098137
  hyper
cgccttagacgctcgcctggcagctgcgcacactcggagcgccccgagcggcgcagatagggacgttggggctgtgccccgcggcgcggcgcctgccactgcgcaggcgcctcaggaagagctcggcatcgcccctcttcctccaggtcccccttccccgcaacttcccacgagtgccaggtgccgcgagcgccgagttccgcgcattggaaagaagcgaccgcggcggctggtgagtacgcgcctcgcgcgctcggcgttctggggggcaatgtcaccccctctccagtcccctaggggctttgaaaatagagatggtgagaccagaccctatgacccactctcccccactacacgcacatcccctggggcgcggcggggacgtccacgaagggactcaaagagccagggaggtggcgggccgaggcggaggccaggaaggg

SEQ ID NO: 43026 - DNA, 706 bp, Homo sapiens
  chr6:46138266-46138972
  hyper
ggggcaccgattaaacggaagagggaaagtgcagaaggagtaggtttgtgtagctcgggtagacgtcaagggcgggggtgtccatcttctccaccaggattccatcctagccacccagaatggtcgcggcgtaggttatgttcccaattcccagtcatcccgcccaccgaggcctgggcttcttagatgtgcagtggcaaggaggggacgttgctttagggacccagaggagcagtgtgggttcccgggagggaagccacccacgcccctggactcaccctcgcagcgatccgttcagtccgtattagtttggagcaacgggagggagggtctggaggagactccctcgggcgcgccgcgggtaacggcgggagggtgactggaggaacgcccccggaacgcgcaggagctcacctgcgctcaactctggagcggagcacctgaccgcgccgcttccccgccccgcctcctggcttctattggctgctgcagagatagtcacttctgcctgggttgcccccgaaagccaggctcccaggagtagctgcacggcctgtcaatcagcgggggcaggggcgggcgctgcctgggtttggagggtggagggggaggggactcccgggggcagggacccatctggtagggcgaaggcgtgggatggccaattgcttggtcacacacaaaaccttccggcaacgtgcctttt

SEQ ID NO: 43027 - DNA, 30 bp, Homo sapiens
  chr6:46620646-46620676
  hyper
cggccaatcagagacgtagcggagcccggc

SEQ ID NO: 43028 - DNA, 877 bp, Homo sapiens
  chr6:46702584-46703461
  hyper
aagagagagagagagaaaaaaaagaaaagaaaactccatgtgttccctgcctgtcctgattctccccccagctctgagctcttagggttgcttcctttcgggaaaaggtttggaagaactggtgtctaataccgtcatcctctccctctccccgcaaggatcctagcgctgtttccgagggctgcagggactgtgagcccaggaccggccagcagagcgggtgcgactcagcgagcccaccccggccggtcgccgctccggggtcccgacctccagcgcggcgaccgtgcccttcctcccactcccgcctcgcccccggggcccctcctcactcaggcgcggcgcggagctgctcgcgggaactggggtccctgggcgcgttccaccgcgcaccaacgcgacccaagcgctccaaacccgactgcttctcgccgacagcactgcgagcctccgaccagccgctgtccccctggctgcgggccgagcagctctggcaggcggcgggcgggtgggctgcgcgcgggctgtgtcctgggtccgcctagcgcggccttgtggccccgaccctctcctcccctggtgatgctggaggaggtaccggggaggagcgtgtgtggccccggcctctcactagcagcggcggctcccgacgctagcctgctcgagcgcacccagcaccctccccaagaccatggcccgcacctggacccgcggttaacttagcccgccgcggagagagccaggcaatgcctgggtggtgtcgtgctcaccagctcctttccgcagacctgatgccgatcagatttactccctgctgaattcaccccccagtcaggccggttttccttgtttcaccgtgttctctgaatacactgaa

SEQ ID NO: 43029 - DNA, 61 bp, Homo sapiens; identical to SEQ ID NO: 4846
  chr6:46816791-46816852
  hyper

SEQ ID NO: 43030 - DNA, 541 bp, Homo sapiens
  chr6:47276364-47276905
  hyper
cctagccacaggtaaacgagggatcggaaagactgtagaaaattcatcttccttcacacacatctccttccccctccccccattccagtgccggcgcgctggctggctggaagccggcgctttggaggcgccggagagtgggtctaagggtgatatttcggcatacagaacctgagaccccacccgagccaagagggaagagagagggtaaagggattgaggagggggcggcttgcgccctgctcgggaatgcaccgcgcgacagcacccggaggtctccggtgtccggcgcgcaccggtaccactgtcttccactgcggtagcatcccgacatgacattgcagctgcaacaaagcgccggcctcggccggccgtgggagccccacaccgcggcgaggccccacaccacgcagaggggcagtggccgatgggtggggggctgtggctgcgggcgtggggagcgcgaggtaggccgagtagggggaaaagccctcaaatgcgcagaagctgggcggctacctctagcgtctcctccagcaaa

SEQ ID NO: 43031 - DNA, 36 bp, Homo sapiens
  chr6:47277325-47277361
  hyper
atccaccgccgcctcccgggccgggagcccatctac

SEQ ID NO: 43032 - DNA, 30 bp, Homo sapiens; identical to SEQ ID NO: 4848
  chr6:47413210-47413240
  hyper

SEQ ID NO: 43033 - DNA, 30 bp, Homo sapiens; identical to SEQ ID NO: 4849
  chr6:47655314-47655344
  hyper

SEQ ID NO: 43034 - DNA, 30 bp, Homo sapiens
  chr6:49431022-49431052
  hyper
cgcattcctgatgacgtttaggggtagggt

SEQ ID NO: 43035 - DNA, 1071 bp, Homo sapiens
  chr6:49518205-49519276
  hyper
aggggactgaatcagcgaatgacaaagggagcagggctccggacaggggtaggaggaagaagaggagtgactggggcttgtgtcaagcttcttctgaatggctagacagccgccaggtgggagaggcggagggtgaagaggcgggttccgcacgcggttagcctggggctgatctagtcttcagctttcaccggctgggagtccggagctgcagcagaggccacacccagggcttggtggtcccgcgctttccggagctcagcaggcgcttgctgcttgaaccggtcaaagaaggaacgaatgaatgacccttttgccaggatggagacccgggggcctcagggagctgcgaatcccatggactcctcccgcagcctgggggacctcgggccttttccgcgggaggtagggcgcggggctccgctagctccgggcgcccggaatcccgcgacggcaggggcgagccgaagccagggcggcggccacgaggacagaacggcagatcgggccctcggacctcgggccggggaggaattggaccgtgagtcctgggtcagagagaaagtgctctttctcctgcacccagagaggtggttagggactcgaggggaccctgcacgggaagaggtggccggtgcagaggaccttcctcatgcgggtggagaggaccacggcgaggagcccaactacccttctgtctttcaacgacaaaagcgaatttctggcaggcgtgtagccccgccgcgggacgcagcagacccacccaaatacgtgcttgtgcgggtggaggattatcaggtaacacaagaagtgttgcagacctcctgggccaagggtcgcatgaccacgaggactgaggagcacttcgtgaccgcgctcacttttcgcagcagtagagagggacagcctggggaacgctggggccctgctgaatcccgggctctccaggcacgaacaggggcatcccgcgtccacgccgcggggaggagggtttcaccgtctccagggacttggctcgaggaaattaaactctaatgagtagctcgagaaatgttccgggatggtggatga

SEQ ID NO: 43036 - DNA, 492 bp, Homo sapiens
  chr6:50674320-50674812
  hyper
ggtgcctaggccctatggttgcggctcaattcgtgcaacctcagttaccagggggtcccggggccagcgcggaattcgcggaattcaccaagccgcagctgcctgccgctgaatgcgaagagggcgcaggagactggcaggtacagctggtggtcccttcggcctgatttccctgctgagtgccacagcgtccgagatccacgactggccaggtggagccaccgactctgaagagaaccagaggcggaccagccaggggagagggcaaccctgggagcactgcacccttgtcggtcccctggaaagctagcggtaagatccgggaggctgaatttgaggccgcggtagtccaggcgacttcccctggaaggtgtgacgatgacttgtactgcaaaagaagcctagaccaggcctccgtctgggtgttttcttttaggcgtttggagagggatggagatggtgggtgggggcgagggggaggggtaaaaagag

SEQ ID NO: 43037 - DNA, 30 bp, Homo sapiens
  chr6:50681843-50681873
  hyper
gcgtgtgtgtggcggcggcggcggtggcgg

SEQ ID NO: 43038 - DNA, 73 bp, Homo sapiens
  chr6:50682265-50682338
  hyper
agggagcaagttgaacgatttgcacagactggattttttaaaatatatggacaatgattttgagcagcccggg

SEQ ID NO: 43039 - DNA, 235 bp, Homo sapiens
  chr6:50682448-50682683
  hyper
cgcggccccggagtcagttgcaaacctggatcccaacgccaagctccctgcacaagttgggcaggggctgtgtgtgtgtctgtgtgtgtgtgtctgtgcgtgtgtgtgcgtgtgtggtgtcacccgcacctatatagggtgggggattttttttccgctctctcgactgtgaggacgaggccgcccacccccagttcgcctgtttgcaaaggctctctggtgaagacgctgagac

SEQ ID NO: 43040 - DNA, 229 bp, Homo sapiens
  chr6:50682711-50682940
  hyper
cgctcgctttccttggagtgccagagaaagctcctggctccgggagagcggcgccttggttgcaaaatgacaaacctcaagtttttctgctctcccttttccccctcttccttccagatacgtcacgacggatcaaacagctaccgtttgatgcagcttggctgtctggagtcagtagccaattccactgtcgcctattcctcctcctctcctttaacttactccacca

SEQ ID NO: 43041 - DNA, 105 bp, Homo sapiens
  chr6:50682991-50683096
  hyper
cgctccaccaccagtccttccattacgagtttcagcacagccacccggccgtcacccccgacgcctactctctgaactctctccaccactcgcaacagtactacc

SEQ ID NO: 43042 - DNA, 177 bp, Homo sapiens
  chr6:50684880-50685057
  hyper
tttctgtgctaggcacaaagccgagcatttttcaaaagagcggattagaacatttgcaagcactagacaaagagcgaatcccgtgcaaaaggacaccgtagtttatccaattttcgacttagtgccattcaactggtcatttatgcaatgtcatccgaccaaacaacatgttttact

SEQ ID NO: 43043 - DNA, 131 bp, Homo sapiens
  chr6:50689915-50690046
  hyper
ggttaatggtgtacgcgattttgcccgcagctccggctctccaaccatcagaaccaataatctttactttaccctgtgctcgcgtatcgatagcttctttcgcctcgggcgtaggctttgatatgttaata

SEQ ID NO: 43044 - DNA, 157 bp, Homo sapiens
  chr6:50690960-50691117
  hyper
tagaaggacctgatcgcttttccctttagccggcctcaaggccggcagcaggctgcttggcaggaggaagcgatttcctctgcttctctgggtttcaggaaggcccagagccttggaatccgggatggagaaagccgtggattctttcagcagctcc

SEQ ID NO: 43045 - DNA, 289 bp, Homo sapiens
  chr6:50691923-50692212
  hyper
tcgcagaaatgcaaccgcagaacaaacagggacaggaaactcttgtaatcgcttacacatttttaatgtgtcagaaaaaaaagagcgatcactggagatgaagaaggggagaagaaaaatccctgccgtttgtatttctttcatttgaattgtaaacatctgtttggctgtaaggcgaacagatcatttattttgctctcaagatttggtctaattatgtcaacaccgacgctacgacgagtggggcggcgctgtggctttggagaggatgcgcgcaccggcccagcgc

SEQ ID NO: 43046 - DNA, 331 bp, Homo sapiens
  chr6:50692299-50692630
  hyper
cgcggaggccgtgagtatggctcagaggcagatttagaggctccagggacccgcggctccttggagacagccgccgctgtttcctctgccccagtagcctgggatgagaagagaaaaagctcacccaggctccggcgcttgtctttcccatccagttgcagcacagacggtggcggggtgtgtgtgtgtgtgtgtcggcggggggacctgtcttgtcctaccccgcagttcacaccctgcaacggggtagttgtttttttaaaaaaaagtggcggggttgggtggcctataatcaggttgccgagcgtgcgtgcatccatttcccattgca

SEQ ID NO: 43047 - DNA, 611 bp, Homo sapiens
  chr6:50787265-50787876
  hyper
ttgcttccttgagggtcactgcgtccgaacagaaatcgcagccgcctcctgtgtgggcatctttcacggaaatttctgcccacgttcaatgcgtacgggtctctagcactgaggctagctcaactcttcggggcaggagaagttgcgcccagccaggaggacgccagccgcctccggggcccggaccgcgctcgccaaagcccttttccggctcgggcgagggctgacgcggccagacggctccgctactcgcgggcgaggcggactaggcggacgaggcggccgaggcgggcgaggtgggagaggcgggcgaggtgggagaggcggccgaggcgggcgaggcgcggggcgcgcggcgggccaggctggggaccgggaagcccgcggagcctcgcttttaagcggaatggtctgggacagccccaggtggttgccaggggaagggaggaagggaaggttctgctgagacgtcgaggttggaaataaaaacttcggaaaggcgaagcggatttagaaaaggagggaagtcgaggcgggcgaagcgggccatggagattgctaagaggaaaagttggagagaaaaggaaggaagagaagcagactcccgggtg

SEQ ID NO: 43048 - DNA, 480 bp, Homo sapiens
  chr6:50787949-50788429
  hyper
cgacccctccggatcgggacagctcctgaaagcccggcgcagagccgcctcgaagatcctaagagtgggcgactcacaggcgcggccggcaagctcctgggggactcgggctcggacgagcgcccacaggcagcgcctggcgcccacacctcctgcccccccccgaatcctaatgttggggtgtgtgtatgtgtggaggtatgtaggagagaggaggaggagataagagaggagagggagaaaagcaggagagagcgcgagagagcagagaggagagagattggtcttgttgctgaatgatgcttggggttttccttttctctttgtggttgtgtatcgactgtaacgaagagccgcgcctacgcgcctggtggggattgtttcggttcggcctccttttctttccttaacaggcgggataatggtaaagtccaaggcgctagaactgtcctaaagaatattagcgcccaaagtgggcat

SEQ ID NO: 43049 - DNA, 313 bp, Homo sapiens; identical to SEQ ID NO: 4855
  chr6:50791181-50791494
  hyper

SEQ ID NO: 43050 - DNA, 15 bp, Homo sapiens
  chr6:50791550-50791565
  hyper
cggccatcccggaat

SEQ ID NO: 43051 - DNA, 166 bp, Homo sapiens; identical to SEQ ID NO: 4857
  chr6:50794581-50794747
  hyper

SEQ ID NO: 43052 - DNA, 486 bp, Homo sapiens
  chr6:50803770-50804256
  hyper
tagttccagttcctcccaaatcggtgacttctctaatgatgaataaagacggcttcctgggaggcatgtctgtcaacaccggcgaggtgttttgctccgtcccaggccgtttgtctctgctcagttcaacttcgaagtacaaagtaactgtgggagaagttcagagacggctgtcgccccctgaatgcctcaatgcatctctcctcggcggagtcctcagaaggtaaccccaccacgaaaaacaaaaacaaaaacaaaaaaacaaacaaaaacccaccagtttttatttattggacagtgaggagaaggttccagcaaaacccaatctgcagtctgacgcagttgcctagcaaccgggtggccggagcattgctttcgcgcagcgcttgggaggatccgcggccgccacctgctcgcccacaaactctagtgtccttgcatccaggcctgcccgcgccgcgcaagtcctaccgcagattttgccgc

SEQ ID NO: 43053 - DNA, 201 bp, Homo sapiens; identical to SEQ ID NO: 4859
  chr6:50805674-50805875
  hyper

SEQ ID NO: 43054 - DNA, 251 bp, Homo sapiens
  chr6:50808577-50808828
  hyper
atttactcctgtctttggcttcggtgtcatattgttggtgttttatggccggctcaggcctgcagtgggcggcgctgcgtgcgcccgcacgtttctcttgcaggcgcggcccaaacagccgcgctcatttatttagtgttggaggacgcggtttgtcccgttgacagcgtaatttaaagaaatatatggaaggctgaaaaatcatttgctcaaatttgtccagatgtttttgagacgtgattggaatttga

SEQ ID NO: 43055 - DNA, 86 bp, Homo sapiens
  chr6:50810627-50810713
  hyper
tcagtcccagctgctcgagaagggagggcgctgggaaaggaaacagagcggaatcgcccacattagcctcgctcttcggtgacccg

SEQ ID NO: 43056 - DNA, 18 bp, Homo sapiens
  chr6:50810936-50810954
  hyper
cggcgccccggccatttg

SEQ ID NO: 43057 - DNA, 523 bp, Homo sapiens
  chr6:50811328-50811851
  hyper
ttggagacaaccgtccggattttccacttcggttctttcgagtttagtaatactgataataaaagaaaaccatgatttccccttccctttggaaaataaacataagactaaacatgagaaaaacgctaacttattggaagaaaatcggagaaacgttggtgtcaatgctttgagagctggttgactgagacgcacgaactttttaattttaaatatatttttaggaaactctcgcagtccccgccctccatctcacctcacccgtctcccaaccacccttttccatgttaccctcccttcctcacattgttacgggaatcttctgggatgaaaatgagtgtggttggcccttttgcgttgtttcagtcctctcggtacctccccgcccagccctgcgatcttaactcaccgggcccggctccccggccgcttgcataattagggagggcgagggcggggcgggaggcctgtggagaccaggcggaggctgcaatttttggtgccggccggcagagcaggttct

SEQ ID NO: 43058 - DNA, 556 bp, Homo sapiens
  chr6:50813317-50813873
  hyper
cttcgtccgagagctcggccgatcgcattagatgtgttctgattgcacaaggccaggagagaccacactgaaaacgatcgtctcctttccttgcagggcaacgcgccccacgcgtgtgacgtgcgagagacgcgatggacgcgccttgctcttactgtgcaggtcctgagagcgtgtgggccacaggcgcccagtcgtgttgaggacatagaatcagccgctggaggggctgccgactgcgcgggcccttcccgctctcggtctcaccctaagggctaaggcgaccgagaaagccccattctccagtaggtaatggggcggcgcccggtgggctgcaggtggggagggctcccagcgccgccagcggccacccggggcgccggctcctggagggagagtggcctagaaatatccaaggaatccgaagcttcccctcctccacctctgccagtacggaaacaccccaccgtcacaatcctaaagcggggagatgggatgggaattgtcttacttggcaaggcagggtaccttcattgccagacgccctcatttgtgt

SEQ ID NO: 43059 - DNA, 30 bp, Homo sapiens
  chr6:50814074-50814104
  hyper
aacagtaggattaacgcaatagtttgcctt

SEQ ID NO: 43060 - DNA, 160 bp, Homo sapiens
  chr6:50814563-50814723
  hyper
ctccatccccacttaaagaaccgaagaggcttttaaagacctggctgctttgttttccttggccaaggaagccactttctctcaagcaattatttcatatcctacgaaaactttggtcgaatggaaaactcgaaacctcgagcttatctacacactgttc

SEQ ID NO: 43061 - DNA, 356 bp, Homo sapiens
  chr6:50817109-50817465
  hyper
ctagaacctctaggtcgttgaccggcccagcgcagggaccctgagaccgccagatccggtgggcggcttacagtggcccagaacgcacccgccggctcgtgttagcgggttaagggcttgattaaaaatagtgctggaaggaagacccgattatttttttatgaagccacattccttttcttcatttgcaaataacagttccgtagggtcccttcccagggaccctgggcgccgaagttaggggccacctgagagttgttggcccggtgggaagtgtcccttcctgagggcgctctcggcttctcagggcaagctgccttccacgcttggactttgagggcggttgtctgtcatgt

SEQ ID NO: 43062 - DNA, 30 bp, Homo sapiens
  chr6:50817696-50817726
  hyper
ggggcgggggggcgcgctctcctcccgttc

SEQ ID NO: 43063 - DNA, 305 bp, Homo sapiens
  chr6:50818710-50819015
  hyper
ggtcacacctgctgtcgagagagtcctctgcataaaaatgctctttaaaatttttaaaatcagcataatggccaatggacttaacaaagcgtgacttgcccaggctgcacggagggcaactctggcagtcatctgtaactcgaccagttaacgtcccgaacgtgcctgttcgcggagatattagcaaacgtttcaaggatgtggctgtcagatgtcattagccaacgcttgctcacccaaccatttgcctaactgggaggagggcatggccacggcgtataggcgtagaatttggggggagggag

SEQ ID NO: 43064 - DNA, 30 bp, Homo sapiens
  chr6:50819335-50819365
  hyper
agaagcacctgattgcgcggaaggctggtg

SEQ ID NO: 43065 - DNA, 274 bp, Homo sapiens
  chr6:52149492-52149766
  hyper
ctccaccaaagtcgcgtggaggttcccaggatgactccaccccggcgcgaaaacttccgaactcttcccgccaccaaaggttacctcgaggaagaggcggggaccttgggagcatataagcattatgattggctgagttctctgaggtcggactagcgactgtccaatcaaaagcttcttcttcttcgggttttccgctgcgcgccccgcggtggcgggaaacgtaccatccgggattctctgttcctcccctccctccgcctcactcactgac

SEQ ID NO: 43066 - DNA, 40 bp, Homo sapiens; identical to SEQ ID NO: 4865
  chr6:52226739-52226779
  hyper

SEQ ID NO: 43067 - DNA, 1040 bp, Homo sapiens; identical to SEQ ID NO: 4866
  chr6:52227004-52228044
  hyper

SEQ ID NO: 43068 - DNA, 406 bp, Homo sapiens
  chr6:52284758-52285164
  hyper
ggcgcagtgaggtccgccaggactaggtggaaggagagaaggaacgtccctctctgcaactcatctaagggcctgctcggaccccggatctcacagcgagaactaccgcctcgctacacccgcctttccccgcgccacccaacagctcccacgtctcatcctccgggagcggggcggggcgaagcggaagaggaggggccgacacaaccacgcccactagccgcgctccaaggccgcggcccacttaccgcgagaacgcggagtcctgcggatggcgcacgcgcaaacctcctgtgatgcctgcgcctcctggccccgccttccgctcgtgggagttccggatgtttagcgttaccatggatcctggaggtgcccgcgaacactgcttgtcgcctgggcaaccgga

SEQ ID NO: 43069 - DNA, 30 bp, Homo sapiens
  chr6:52441447-52441477
  hyper
acagtgcacaaagccggggtgcagataacg

SEQ ID NO: 43070 - DNA, 30 bp, Homo sapiens; identical to SEQ ID NO: 4868
  chr6:52442134-52442164
  hyper

SEQ ID NO: 43071 - DNA, 108 bp, Homo sapiens; identical to SEQ ID NO: 4869
  chr6:52535660-52535768
  hyper

SEQ ID NO: 43072 - DNA, 30 bp, Homo sapiens; identical to SEQ ID NO: 4870
  chr6:52926578-52926608
  hyper

SEQ ID NO: 43073 - DNA, 413 bp, Homo sapiens
  chr6:52929653-52930066
  hyper
gggcgccgtctccacggcacttgggtttcagggccatggaatcgcaagcccttttcgcactgcattatgggatctgtagtgagacatgccttgcgttggctctttcctcctgctgggcgccaaagcgcgtcttttcctcaatctccagtctgtctgtgctctcaaaaactttagtcgttataacaactgtgactgttgagaaatttcactgttttcctgcattcctggcgcgggactctagccagaggctccgaggactttgtagcgactgtcccaagcgtccagttcgatgcttctcagggcggcttgctttaagggcccacccctaaatttgggttgtaaaaatttttgaggtaatgcttgttcaagttcgcttaagtgttcactcagcccaacacgcgggttgggcttga

SEQ ID NO: 43074 - DNA, 1865 bp, Homo sapiens; identical to SEQ ID NO: 4871
  chr6:53212357-53214222
  hyper

SEQ ID NO: 43075 - DNA, 30 bp, Homo sapiens
  chr6:53224533-53224563
  hyper
ggaagaatggaaggcggccttgacttctgg

SEQ ID NO: 43076 - DNA, 623 bp, Homo sapiens
  chr6:53408896-53409519
  hyper
ttaaatctctttcatattgaccgcaaaagcgaattttgagcctgtaaggtggatcatggtagttgccggtctgcagatacactaggttgaagactcgcagcacctaatgtcactttttcatgctcacgccctcccagcgcccaatccgtgtttatggaatgaaggggaaaacccaaaagaatgaatgaacaagaaaggagtctagtcaggaggatggccctggacgcggactaggcgaaagcagggacgatgctcccggggccgggaggcgctcgaggacccccgggcgcagtggagaacgcggaccgcgatagggccgggggcgtagggcaagacaaaggcagcgcgggcggccagacacgggtgcccggcggggacggggaccgcgggcgctcacctcatcgccccacttgagaacgtccttgtgccggtccttgacggcgtggtagatgtgcaggaactggaggatcccgtgccgccgcacgtggtcggcatggcgcttggtttcctcccagctcagcggcgagccctgggacagcagccccatggccgccccctcctcctcctcctcctcctccgggctgacggcggtcgcccgctccgggcgcgagacggacactcag

SEQ ID NO: 43077 - DNA, 539 bp, Homo sapiens
  chr6:53409552-53410091
  hyper
cgggggcgctctcgggccgcagtcggcggagggagggtcctgcccgctccggctccccggcggcggcccctggcgcccaggtgacagaccctgggtccgacgcaccgcgcggaggcgaaggcagaagaccgagagcaggcgggacggctctcggcccggcggcctcgccctccccgctgctcctcctcccgctccgatgcggcggcggcggaccccacggccgcgctgccgcggcggctcccgcttctctttgccggtctggtgcactggcttcttcctacttgtgaccaaaacctgcgccgccgcggagcatgcccagtctttgcgtccgctagctcgccgctcctgggcgcgatcctgcgctccaggttttatagactacgggcgaaggcggggagaggaggcggtgcagcggcggaggcgtggcctgaagcccggtgggaaccgcgggggctcaggaggcgtgtgcaagggtgattgggtcgcagttgaggggagcagctcgcgagaagggggcgtgcggtcggcctcgctttacg

SEQ ID NO: 43078 - DNA, 30 bp, Homo sapiens
  chr6:53517060-53517090
  hyper
ggctgaagtgcgtgcgcttctggttcatgc

SEQ ID NO: 43079 - DNA, 292 bp, Homo sapiens; identical to SEQ ID NO: 4874
  chr6:53659860-53660152
  hyper

SEQ ID NO: 43080 - DNA, 30 bp, Homo sapiens; identical to SEQ ID NO: 4875
  chr6:54835453-54835483
  hyper

SEQ ID NO: 43081 - DNA, 346 bp, Homo sapiens
  chr6:56112173-56112519
  hyper
tgtctccttacctggcgcagtgtccaggctcggggttgccgtcgcagccagctgagtgttgcgccagggggacaggtatgttccaggcagtggcaagcccaacccgagcaagacctgcgctgaaacggattggctgccctccgcccggagtccgttctccctgcagcggccagtgcagagctcagaggctcagaaactcgctctcagccccctggaggcggagcccgggagataaggttcgcgctccccacccgccccctttccttggccgaagaccagagggtggattttggatctggatcttgaagggcgaactgctagtgtcgccctggtggaaacactcagt

SEQ ID NO: 43082 - DNA, 30 bp, Homo sapiens
  chr6:56708235-56708265
  hyper
gcggcgacgagcagcgccacgccaagcgga

SEQ ID NO: 43083 - DNA, 30 bp, Homo sapiens
  chr6:56709126-56709156
  hyper
ccagagcccacaggcgcatctgctgctggg

SEQ ID NO: 43084 - DNA, 20 bp, Homo sapiens
  chr6:56716279-56716299
  hyper
attccagggtaaggtgtctc

SEQ ID NO: 43085 - DNA, 510 bp, Homo sapiens
  chr6:56716389-56716899
  hyper
cgttcccggaactctacagagaatgacacagaaaaagcattaacagcaaaatactcacatatgctcaatgatttaaacatctcccccaccaaccaccgccgccctccctgcccccaaactgggtctggcatatcctgcaccatcctcggagctgagggaatatgcagaaaccaaaaaaataaaacccggagctcaccatcttttcttggccaagtctccaatcgtaaaaacaatacacaggcagtttcaatacatgaagatttgcacggaagaagtgtgtggcctgtggtccggccaccagctcacaaatgactggcccaacaatgaagccagaatcaacagccttcctgttacaaacctatagtatttggctcccccaccaggacagtagaaatattttccattactagcctgctgcttaattcatcaatgcaactaactcgaagtttcgaaaacaaagcacaaatgcaggatgttgagtcccaactcctttccgcttcaagtcacctc

SEQ ID NO: 43086 - DNA, 1807 bp, Homo sapiens
  chr6:56818494-56820301
  hyper
actggtttcttaacacgcatataattaatattggtactcaggaaagagaacttcttctgaccttgagcgtgcgcgctaaataaattacctcagaacgaaagtggtgcgatctcaaaacagcatctggggagaaaagagataaatgagacttcatttaactccttgttcttcacctaccgagtgactcatgacttacctgggagaccagggttgggaaagcacatcgcagactcctggaattcggtgggacatcctgggggagggaggaggagtcctggggccatcggtctctacgtgatttctccgcgagaagtttgcatgaaagttctgggggagttggggagccccgaagtttccatgccttactttcttacccctacgctccagcgaaggatgcgtgaaggcgaggctggcgcagccccggactacgctcaaattacccttaaggctttagcaaactgactaaaaatttgagttctttcctcccctccctgccctcggcatcgccgtggttattcaaacctgggagactggagggcggaggtgacggcaaaaagggcaaggggcgttaaagaaacgcactcagcctggggagtgggcaatgatggggctaggggcagccgaggagaagggagcgagccgcgcttcactctccaaatcggcttaattgttcctggtagcccgcagaaacccgtcgcggcgtgtcttacctcggcttcttgaacgacccgagaagaccgatttcatcggatgcctccctttctggagcttgcggtgccagcagcagaagaagacgatggtggcgatggtgcccagcagaagcaacaagaggaagagggcacattggatgctgtagggtctcagcaagacgaggaaagccgcggcgatcatggtgcgggcgaggcgagggcgactcgacggcggggctggagggcggcggcacaggcacccgcgctgggcgcacgccgggacggcgggcacgggtgagcgcggctcagcgcgtcatgcctggcgctcgcggccccgcgcccagcccaatggctgcgcaccccgcgccagccgcgctacgcgagtgatccagggctgcggggagcgcttgccatgactcagcagacagcgacgaggctgcgactcggcggctgggatcctctcccctccctccccaggcgcccccgcccccgtccgtgcgcagcccccgggcgcagccccgccggggacgcggcgagtggggaggagcagcgccgccgccgcggccgcccgggccccgcgcatcgtcctgcggccgccgccgacctcagcatcccagaagccgggcgcacgtgggtcggggcggggacgcggcgctcaggctgcagccgcggcagcctgcggggggcgggaatggggcgccgcggcgggggctcggctgatgacatcacggccaggctgcggcagcgcgggcgcgcggacatggctgcggcggtttcggcggcgtccgcgggctgcacccgggcctgagagcccagcgccctcccgcggggccgcccgccagtccgcgccgtccgcgggtgcattggccgggtgcctctagcttcccggacacccggagcttccgcctatccagcctccctcggccaaattgctgcggagcccgtcgtcagggggcgccaaggagccagggggaaaaccgagaggcgctgacaggagcctcccggcggtgctaccctccacctcccacctccctgcgccccgccccgaggttggggctttgaagaatgcagccgggtgagctattgcttgtgggggtttcctcgcactctgaagcgcg

SEQ ID NO: 43087 - DNA, 237 bp, Homo sapiens
  chr6:56820670-56820907
  hyper
ctttgtcccctccccacgtttcttcataaccagcaaaaagtatatggcagttggtggccaggggatttaacactgatgcaatgccagcacggaaggtatagcgagagcgctgcagtgtgcctttctgcggacggccacggccacctggccaggaagcggctgctgcagcagtcattctgcggcatcttgcggccttggcgggcggtgctgtgccgcgttctgctgcccccaaggcaa

SEQ ID NO: 43088 - DNA, 30 bp, Homo sapiens; identical to SEQ ID NO: 4882
  chr6:56911387-56911417
  hyper

SEQ ID NO: 43089 - DNA, 19 bp, Homo sapiens
  chr6:56954758-56954777
  hyper
tctccggcgaggggcggtc

SEQ ID NO: 43090 - DNA, 617 bp, Homo sapiens
  chr6:57036933-57037550
  hyper
tgggtgctgggagaaactaaacgaagccgtcactgagcaatacacccacagcccgtcgaccgataggaaccttcgcgtggggggagttggttacttttaggttgcatgaagaggcggggcctcgcggggcggagctgggggtggtctgtgggtccgcgcgggcttcgggtagttcctgggtccggggagcagacgatccgctagccacattaggcgctcggtctctgcgtccgcccctcccgtgcctcagagacttgcgctccccaggcccgagcccctgtcggcccatcctcgagcccgtgtggctcgcgaacctctaactccagccgctgcagccccctcccaggcccggcgtccccgagccccgcgggcgccgcgcctgcccttctttggctacgctgcagccgcggtgtcggcgagtcctcccgggttgcccccgcgggcgtcagagggagggcgggcgcccgcgtggtgacggcgacgcctgcagcccaaggagcgctccactcgctgccgccggaggggccggtgacctcttggctaccccgcgtcggaggcttagatggctcaggcgaagatcaacgctaaagccaacgaggggcgcttctgccgctcct

SEQ ID NO: 43091 - DNA, 30 bp, Homo sapiens; identical to SEQ ID NO: 4884
  chr6:57086278-57086308
  hyper

SEQ ID NO: 43092 - DNA, 30 bp, Homo sapiens
  chr6:57086540-57086570
  hyper
gggcgccgggctggcgctgccgcccacctt

SEQ ID NO: 43093 - DNA, 234 bp, Homo sapiens
  chr6:57087023-57087257
  hyper
ctcagcagcagctccgccgggggtggtggggcgcgggagtctcgactcccctcatctgtggacccgccgcgctgcggagcatgcgccgtgcttcgtctgcgcatgctctgtgcggacccgcggccctgccccgcccctgttctggcgggtggctggcggcggctcagctttccaggcgcctccaagggagcccgggagggcagtggggagatcagagacgagcaggatctccta

SEQ ID NO: 43094 - DNA, 30 bp, Homo sapiens; identical to SEQ ID NO: 4886
  chr6:57943180-57943210
  hyper

SEQ ID NO: 43095 - DNA, 30 bp, Homo sapiens
  chr6:58147841-58147871
  hyper
cagacactttcggagcgtgttttttttttc

SEQ ID NO: 43096 - DNA, 30 bp, Homo sapiens
  chr6:58180191-58180221
  hyper
ttccccgagggcgagcgccgggcaggcagg

SEQ ID NO: 43097 - DNA, 30 bp, Homo sapiens; identical to SEQ ID NO: 4887
  chr6:58287415-58287445
  hyper

SEQ ID NO: 43098 - DNA, 366 bp, Homo sapiens; identical to SEQ ID NO: 4888
  chr6:62995508-62995874
  hyper

SEQ ID NO: 43099 - DNA, 453 bp, Homo sapiens; identical to SEQ ID NO: 4889
  chr6:62996077-62996530
  hyper

SEQ ID NO: 43100 - DNA, 30 bp, Homo sapiens
  chr6:64282619-64282649
  hyper
ttcctgtgagtagccgtcgcatcgtcgcct

SEQ ID NO: 43101 - DNA, 53 bp, Homo sapiens
  chr6:64283087-64283140
  hyper
ggctgcactgggagcgggagacgtggcccggggtggggcgagggctgcgcgtg

SEQ ID NO: 43102 - DNA, 30 bp, Homo sapiens
  chr6:64345476-64345506
  hyper
cttagtgcttactacggtcgagaaaaagcg

SEQ ID NO: 43103 - DNA, 30 bp, Homo sapiens
  chr6:64346049-64346079
  hyper
agctgggtgagttgcggctgtggccgcggc

SEQ ID NO: 43104 - DNA, 1369 bp, Homo sapiens
  chr6:69344102-69345471
  hyper
tttatcagacacttcgtcagccaactgtccaggaggcaaaatgactatctatgatgatagatagacagacagatagatagttagattaaaaggtggggaaacatcccttttccctttttcctttctatataatctggttttttctcttcaccccttttctcgcttcttcccaccccgtccccaaacctgttactagggaaacttgaaaaagaatcagatacattaagactacaaaacgaaacaaaagtttagaccccgaaaccatgattccattgccaagcacaaagcaatgcaagagcccaacgtcggtcgccgcaccgcgatcctgacaaagcctgtatggagccagaacaaataagatgttaattgcagcctcgcagagaaaaaaatactattgttccagccagagacactcagcagctcggtagctgggatgtgccccctccgctgcggactggatcaattctgaatcccggtactgaaatgacagctctctggctgcgacaggtctgcgctgaaagaaagagaaagacgatcaagtccagcattcacttcccacccttcagagtcgccttcccatcctccgcacccccctgcctcgcctcccagtgagtttctcttacagttggtcgccgccagccccagcggtgggaactgaggatgcaaaaacctcccagacgcagaaaataccgctttcgggacgtgcttgggtttgagtagccgtgacgtgcaggcgaaccgcggccctggctggagctccgtggagcccccctcccgccagcctctcccccgccctcccgccgggactccctcctctcccaccccgcggctcccttcgccttctctctcacacacccgcccgcgcccccggcaggcagaactccaggaagtcgcagcggccgcgccgcgcgagccgagcctctggcgggcggcggggcgcaccgcagctgtgcataagaagggcgcgcggcacccgggacgcgcgcgcacacgagcacgcgggaggccgccgcgcggacgcgctcccgggacacgcgcaccccccgcgcgcgcgcccaagggagagcgagcactgcgcgccggcgcgcacacccgagacagagctttactatctcgctccctctcgcgcctccctcctcgctgggcattcaaacagctttccgacatcaccagccaaggatttttttccccgctctccttagtcgccgtccgtccatcagtacctgcaggggggaggaggaggagggaggaaagcggaaagaggaaaaagcataagcttgagccttccgatccgaccacgaatactcctgtaataaacccaccgccccaacaaatctgccatagcagccgccgccgccgccggtcactt

SEQ ID NO: 43105 - DNA, 355 bp, Homo sapiens
  chr6:69345774-69346129
  hyper
ggggaaaatgggcaacggtgattgggaccgaaggggagtctctccgtcactgttgctgggacgcgtgcctgtgctggtgtcttagagcaagagcctccctgagctttcggagtggaaggtaaggaagggggtccaggggtcaccttttctctgccgggggtcgccaccgtggagctttgggcttaatgtttgagaagggaggaaaatgaaaggaaaggctgttgctggcggatggggaggctgtgagcagatccgactgtctgcatttacttaaacgccgcagttgaaaagttagagaagtctggttttcaagagatgtgctgggtcagaaggaataagcggagagacctagaaa

SEQ ID NO: 43106 - DNA, 30 bp, Homo sapiens; identical to SEQ ID NO: 4894
  chr6:69454973-69455003
  hyper

SEQ ID NO: 43107 - DNA, 344 bp, Homo sapiens
  chr6:69942811-69943155
  hyper
ccctgagtatttgaaacaatccgatgagcataggaagtggctgccaacgctctggcggctgctcgtgctgccgccgctgccgctgctgttcctcgcatagggctggacagagctagtcccggtttcagcacctccggcgctggacagctctctgcacgccgcaccgccgcctgcttgctttttcccactctcgctttgcattactggagatgcatctaaattacatcctgttcaacaacaagtagatttttttttcctgtacaggaattacagtagacgactctctcaattaaactgcattttcttctttacggatttggctatcaggcgtatttatcccgatt

SEQ ID NO: 43108 - DNA, 30 bp, Homo sapiens
  chr6:70506532-70506562
  hyper
ctgcccccgccgcccgcccaagcccccaac

SEQ ID NO: 43109 - DNA, 1144 bp, Homo sapiens
  chr6:70576372-70577516
  hyper
agtcctctgtcctcgcggagtgggagggtcacactgggagagactaataagggcagagatgcgtcccccttccccactcgcagggagctcactcctcggcggtgccgcagccctgtccggactccactgcgcctctgaggggctcaaatacgaattcaaggtaagctgcgcggctttgcgaccggctctgcacttgccctctcacacatgcccgggctatgtcatctgctcgtgttcctagttatctgtgtgcatctgcttttcaagaaaatgtaaaaactgtgctacacatggaaatatgtttaggtggataaataatgcacacctgcatacgtttccataggggccttaaggatgggaccaaaaacgtttggcaggagacggccactctcatgtggtacataccatgtagttcgtgttcctatgttcacatgatgcaggcttcatgcgttacacctaagttctaggtggtttttctggctatgtgtgtctgtgaagcggaactatggagcactgctgatgcgggtagggacagacatcaaatacattacaaaaaaaatggggggttaaaggagtaaaacaaactcactatcaattcatgccgttagagcgctttttttttttttttttgacggtgttagccctggaagcgaggcagccagttaagcggcgtaagctaagagacgcggggttccggtgcggtgccctccggcccggggttacctactccacatgtgggtgtttttcccaagtgcggcttctggggggcggcgcgggcgcgggcggggattcccggactccagccccaccacgttccggagcgtccggccctgttccttaattaccctgcagcatgcgcagcgcggtcggccacagcgccgccgccgtccccgcagtcctccctgcagccaccgccgccgccgccggaacgtcccagtcgcggcgcgaggaagacgcggccccagcctctgccgcctccgctgtcagagtcccgaggccaccgccgagagcgcgccggcgccgcagccacagcggccgagaaccaggaggcggcgccgggcggcccagctagggcgctgcagggtcgcgaggaagtttgttggcccggaaccaagcacgccgtcgggcacgctagctccccgag

SEQ ID NO: 43110 - DNA, 29 bp, Homo sapiens
  chr6:70992019-70992048
  hyper
caaacctcagctgggcttatgcgcccccg

SEQ ID NO: 43111 - DNA, 901 bp, Homo sapiens; identical to SEQ ID NO: 4899
  chr6:70992136-70993037
  hyper

SEQ ID NO: 43112 - DNA, 566 bp, Homo sapiens
  chr6:71123137-71123703
  hyper
ccggggacctgttgatcgcaggtatagccggctggcccgggctccctcgggactggggcgactgcgcatgctcgctggccgcgctgggccagtagccgagccgcggtgacgaaccggctccgcggttgcggtgtttgcggttgctgtgatggcgatgtgagggggcccggggcgggatggtgctgacccgggtcgggccgtcttcttgcagctggacaacgagctcctccgttcgacaggcgggggaagaggccgagccgggcgagaggtaacccccttactgtcccctctggctcccccggctcccgacacccacgacccctccctccgtccctcttgcccaggggccaggaaggaagcggcctcctcttcgtccgccgttcgcccgccgcggcccctcacccgactgctggcggtcggagcctggccccggccccgttgaaggtcggtggggacggcggtgcggagcgctctgagggaggcgaggggccgcggcgcgctgctctcccggtgcccgcggccgcccctgcccctgcgcgcgtccctcgacccgttcttcctgaacc

SEQ ID NO: 43113 - DNA, 304 bp, Homo sapiens
  chr6:71123746-71124050
  hyper
cgctctgtccctcctttacccgctttcgtggttctgctttttcatcccgcgcctcccacgtgtctttttgcccgggtggtccctccttgggaagcagcgtatctctgtgcttccatcccttgcctggctcttccctgtccggagctccttaccctggccgaccaggtttctcactcttgttacctccataatttcttccttggttttattttcctctcatccacctcctttcggtacttcctcctggttccctttttgttagttgccgattgtgttttgctttagcatcgctttgcattggagt

SEQ ID NO: 43114 - DNA, 30 bp, Homo sapiens
  chr6:71377840-71377870
  hyper
aaaggtagcttggacgtcgtcgctgcccac

SEQ ID NO: 43115 - DNA, 1098 bp, Homo sapiens
  chr6:71665582-71666680
  hyper
cgaagaagagcacgccgggctgcgcgcgctggtgctggtgcctctggcgcagccaggcgaggcccgcgttgcgctgctcagtggcgcgcggcagcccgggccgcttgtagcgccgcggcgtgggcacgtgcaggtgagtgctgggcagcccggcccgcgccaggaagcggctcaccagctcgctgcgcgccgccgcgtcctccaccaggatccagtgcagctgcgccacctggcggaacgtgttggccaggcgggtcagctccgctttctgcaccgggcggctgtaggtgggcgtgatggcatagatggtgggcagctgcggctccggctgtggctgcggccgagactggttgcgcttttgggtcccgtgagccgggccgcccctgcggagcgggagtcgggcgcccccgcggcccaccgcgtagggagagaagtaggggcgcggggtgagcgggggcactggcctgcgcgtgtccacgtcgagcatgatgatgacaattaggatccagggcaggaggataaagaagcgggtgaaaagcgcggacttcatggtgcacgctccctggcctctcggacaccccagagaggggcgagccgagggaccccagtgcgcagcttggacagcggcggcgccagcacttagggagtggtgatgggtgcgctgtccatggggccgagggcgctgcagagacctggagccgcggggctcactacctgggcgtggaggagcggcaggttcgcgcaagctagagcgacaaggggtgcaggcgggcgggcaggggctgcccccgactccaggtgagctggcgggaagcgggactcggtccagccgcgcgccgccggtcccggagttgtgccgagtgcgggaaaggcgctgatccccaccgcgctctttctgaagagtggaagccgagaagcggcacccggtgcgcctcgccgctccagtccggcggtgctgcgggcacaagggctccagccgcgggcccccaggacgctctctgggacgccttcgagggcgggcggcggcgctgggggctttccttcctcacattcccgccggggtggcgaggagcgggtggagacgctgggggttgtgtc

SEQ ID NO: 43116 - DNA, 311 bp, Homo sapiens
  chr6:71666698-71667009
  hyper
cgcagcggaagcctgctctcagtcccttgctcttgtcttctcagaacctctccggatccagcagcaagatcccaaagcaaggaaagaaagaaaaagcgagggggcgggggcgctgcagaatccagcgtcctcccaagtcctcctgtgggaagacagcagcgctgctactggtggagaggggctgcgagagggaggcgcggagggaccccttggctctccgccgggtctggcgctaacggccccgcgagcaagctcgggaggcggccgctgcaccgcgggtggaggagcgggaggagcgtccccgcggggct

SEQ ID NO: 43117 - DNA, 256 bp, Homo sapiens; identical to SEQ ID NO: 4904
  chr6:72129593-72129849
  hyper

SEQ ID NO: 43118 - DNA, 118 bp, Homo sapiens; identical to SEQ ID NO: 4905
  chr6:72129926-72130044
  hyper

SEQ ID NO: 43119 - DNA, 308 bp, Homo sapiens; identical to SEQ ID NO: 4906
  chr6:72130190-72130498
  hyper

SEQ ID NO: 43120 - DNA, 63 bp, Homo sapiens; identical to SEQ ID NO: 4907
  chr6:72130646-72130709
  hyper

SEQ ID NO: 43121 - DNA, 935 bp, Homo sapiens
  chr6:72596015-72596950
  hyper
gaggggtacctggggatagagcgaggtgctgtgcacgttggcgactgtaggggtagcggccggggcacgcgtggctcggacccggggagtgggcgggtgggtgcccgtgggcggagcggcgccgggactgagtggctggcagctatgtctgcgagagcagcggcatcaccctggatggaagcctctgagactccgcctaactgacacccaaactctccctctccctcccgcagccccaaattggaggcagcagagcctgggagcagcctccacggcggcagcggccgccccagtcccagccccagccccagccccagccccgcccccgccccgcgccccgccggagacgcccggatcggcggagcctggcgcgagccctcgccccctcgcctctcccgccgcgcctccgcctgcccgcccccgccggccgaggctgggctgcgggaggcggccgggcggccccgagcttcgctagggcgaccaaaacaaaggcagcatccggggctgggtggatgcaaacaaccatgaaagactgggttctcgctctccccggctctgctgctgctgctgctgccgccgccgccgctgctcctcctcctgccgccgccgctagggctccgctgtgagggggaagcaggggcgcagctgctgggcgtgcatccgaaaggtgagagccagagagcgagcagagggggcgggcaggccacgaaaatgtcctcggccgtggggccccgcggtcctcgcccacccacggtgcctccccccatgcaagagctgcccgacctgagccacctgaccgaagaggagaggaacattatcatggcagtgatggaccggcagaaggaagaggaggaaaaagaagaagccatgctcaagtaagccagccccagccgcgccatccatgcctccgtgcctccatccgtccattcaccact

SEQ ID NO: 43122 - DNA, 629 bp, Homo sapiens
  chr6:73329600-73330229
  hyper
gctggctgtcttccagggaaacgtgtccctgtgtcctgccttcctgagacttcttgcctgcacgcggggcccagccgcgccagagagatggaagtgactttacctacccagcgaaagtagcagtctgcaacaaggaaaacagctaagttaagaggaagtggttttcattttactgcttgcagaaaggccaagattttgacgtttaaagcgggcacacgagtcattttaagtctctagatctttcaccctgaaagtccctgcacagaaactccatagggagtctaaatatagcaacagcaccccctcccgccccctccgccttcagtcagggtcccgcgcagctctaggattggagagcttactccagggcgctctctgcatctgcctcgaatagcaccgcacggagcaacctctctcgcacctccacagtgcgtgggtgtgaagtgtattaggggaaagctagagagtgactctgggtgatggtgctcggctcacagtcacatggcgtcgccgccagctgcacagagctcccagctagcttctgctgcccagaggcttggggggaaggagggagggaagcaggctcctgctggtgaccaggagcaggcgagagggcttcacacaaataa

SEQ ID NO: 43123 - DNA, 1066 bp, Homo sapiens
  chr6:73330784-73331850
  hyper
accccgaaaagccggcgtcctggacaccccatcctccaggtgttctttcccagacactgggtcctcgccgccgctgctgaacttctcaatcatatgactttctcggacttaaatggaaatttcttgacggagggaactgggtttgttctcccaggcttcgcgctgcagtcaggcagagccccggggcagctcgctcaccgcggaggagccactttggagttttacgccctttccacaccccacccatggactggaaaggatgttcagttactcgcgagcttgtctgatactgggatggaaagtcacagtccgcaggctggagtgaggcgcgggaagatgcctggtccttgcctcgcggacttggcagccgcgtcctgcgggtctgtccactgaactgctgaggactcgcccgtgtgcggggacccgagtgccacttcccggagcgttaccttgcgctccagcctccaggctagataatacctggaaggcagggcagggctgttcccgctctcaccccttgcggaaggatggcaggatccggcgcagcgacgtagcagcgggagggcacagcgacctgcatctccagtttctcctcaggacacaaggctgacttcaccttccggacagctgcaaagcccctgccagaaccaaaccgaactcgcgcctcggagaggggcttctggggccgtttcgctgcagggcgtggggagtggagagagggaaggggaagcctggggctgggtgtgcgcgcgtgggagcgcgcctcggagcgccccgcactcccccactctatccccgggggcagtttgggaaggagggagtggtagtcgcgggaatgagggagcaagagaaaccctctcaaagtgacgccccaaacaggtccggatttagaattcgaagctaaaggctgttagaaattgggactcctcggcctcctctgcagcccctcctttcccgccccgaagcccgggcggtttgctggctgcctgcttccccgcccccggctcagaggtctctggctggcgggcgccccgtcggccgccggcttcctccttgaaacccgccg

SEQ ID NO: 43124 - DNA, 1246 bp, Homo sapiens
  chr6:73331875-73333121
  hyper
cgcaggcgctggcggccccctcgcggtgcccgtggtgatgccatgccccgccaccacgcgggaggagaggagggcggcgccgccgggctctgggtgaagagcggcgcagcggcggcggcggcgggcggggggcgcttgggcagcggcatgaaggatgtggagtccggccggggcagggtgctgctgaactcggcagccgccaggggcgacggcctgctactgctgggcacccgcgcggccacgctcggtggcggcggcggtggcctgagggagagccgccggggcaagcagggggcccggatgagcctgctggggaagccgctctcttacacgagtagccagagctgccggcgcaacgtcaagtaccggcgggtgcagaactacctgtacaacgtgctggagagaccccgcggctgggcgttcatctaccacgctttcgtgtgagtacccgcgccccctgctatgcccgctgcaggggaccactgtccctggccccctggggcgtgctccgcgctcgcgcccttgggcccccgcgcgcgtgcacacgtggtggcttttatttcttcgcacgtgttcgtggtcttccttctggagcctctcccctcccccagccccacttctctcatctctacagcttgaaccttttccccgaggacacccaatgaactgcccggtagcttcaggctcccggggcgagagccaggcagacgcgggacttaggctgcgcggataattgggagcaattaggtcccaagatacgtaaacttcaaccgaacggggcgcccgggagctagggaatgcaaagggaggacaggcgcccgtgtgaggcttgagagtatactggagaggttaggaggtgatggcggggtaggacggggagaagtgagggggcatcgagggctaggtcctcagtcctaggggcggagtaggggaagctgctacttggagagagctgctaggttttaagcgcgcccggaaacacgcctcgccaccacccagccaccaccaacggaaaatctgtcagtgcatgtagcccttcctgccacggagaaggtggccaaggtctagaggaggccagcaggccaggcgaagcaacgctcccgcgctgcagggggcggggaggcagcggggaacctggggcgcaggaacgcgggcggaggtgcgatagcagaagcgcaaatgggtcgcctctgacagagatcgggcagtgggttaagtccccgtttgtggcgcggagtcaaagagt

SEQ ID NO: 43125 - DNA, 390 bp, Homo sapiens
  chr6:73972753-73973143
  hyper
cctgagtagggcggcggcggcggcggcggcggcggcggcagcggcggcagcggctgcaggcctggccgattgtgaggagacagcggtacctcctgggccgcgcacccgacccttccaggggtcccggctcgcgccgcggccgcgcgaggcgcgctcgagcggaagtggcggcgaccccgccggaagcgcgcggctgcggcgcgggaagcaacccagagccctcctcccgcctgctctgtgtaggagacagcctgcggagcccactgccggcgcgcagagagcccagcagctcttgagtccaggaagcaagggtgggaggagggacgagccagtggcaatgacccagacccggacgacccccattgctgagccagcggagctgcttggtga

SEQ ID NO: 43126 - DNA, 853 bp, Homo sapiens
  chr6:74019357-74020210
  hyper
atgaagatcaggactccgtattctgagactgtttcaatcacaaataagactcggaacagcctctggaaggccgacagcatttcgcgtttctggcctgggaaagtaagggtgcgctaaggcacgagtagtacagctcctcccgccaccgcagagcccgccggcgggaagagaccagacaccgacggagaagcgaagttcaggacgcgaaggaaagggccacttcgggtcggggtcaacccagactggaccaatgcacagtctaggtggattaacgcgccaccgcgagaagtgggcacgggaccacatgcggctggcaagacgtcccagggctcaagctccaggctcggtcaccaaacaacggtgataacatccacaacgccacgtaaaccatctttgggccttgatcgttttccaataaccgactgaactgagggcgtgaccaaacgacaagaaccggaggagaggacccggagaacggagcagcatcccgccgcccgcctccaggaaagcccgaggcactgtagcaggagggtctgggctccgcgccttaattacaccgccctggacccgcctcttccgccgctcgctcctctgaccggcacccgaaggtgctgtcccgcccacggactcgctcacactccgtttcttcgatcctttagacgactttttaccgttcagggatgctctccgttaccgcctctgccatttggttgccctccctgcggtccaagggcctggaacactccccagggctgccaggccagcgctttccaggggctccagcctacagcgccgccacctggggctggagccagaaacgcaggggccgggggctcaccggctgccaagtaga

SEQ ID NO: 43127 - DNA, 30 bp, Homo sapiens
  chr6:74098797-74098827
  hyper
caggggagctacgtcgagacggcaggccac

SEQ ID NO: 43128 - DNA, 149 bp, Homo sapiens
  chr6:74161042-74161191
  hyper
agtaccggttggttgtctgatcgttggatgtgtagatgaataaacgaacggtttgtcgttttacttagactaggctaccgaaaaacatgcaaaagtctaagttacttccgaagggaagtgaggggcgcgacccggggaaggtagggact

SEQ ID NO: 43129 - DNA, 266 bp, Homo sapiens
  chr6:74161232-74161498
  hyper
cgccaagcagctcaccttcacgtgctcatagtagctcccggtgttcagcagcccgacgcctctgaacgcggagtcgcacttcagtctgagcagcaggtggtccacaacccctttcaccatccccgccgccgtggagatatcatcgcggctgagcttcaacttctccaaaaccgcccggagcttcgaggccccaggcgccgcatccctccgtacgagaatgggggccgagaccggcaggccggggctgggcacgtcccagggcccgg

SEQ ID NO: 43130 - DNA, 113 bp, Homo sapiens; identical to SEQ ID NO: 4916
  chr6:74161684-74161797
  hyper

SEQ ID NO: 43131 - DNA, 145 bp, Homo sapiens; identical to SEQ ID NO: 4917
  chr6:74161830-74161975
  hyper

SEQ ID NO: 43132 - DNA, 30 bp, Homo sapiens
  chr6:74230328-74230358
  hyper
acgggccccgtcgccgcccgcggccccaaa

SEQ ID NO: 43133 - DNA, 30 bp, Homo sapiens
  chr6:74233625-74233655
  hyper
ctcggggtgagggtcggtttttgtcaccgt

SEQ ID NO: 43134 - DNA, 30 bp, Homo sapiens
  chr6:74363003-74363033
  hyper
cggatacgcagtggcggaaacctagcggtg

SEQ ID NO: 43135 - DNA, 122 bp, Homo sapiens
  chr6:74406082-74406204
  hyper
cttcggggaggtggcggctgctgtgcagcagcgggtgggaaatgccctcgcggctgcagtccccagcctggtactggcctggaggtttgaccatatgtagcttcagcgtggctctccatggg

SEQ ID NO: 43136 - DNA, 30 bp, Homo sapiens
  chr6:75914107-75914137
  hyper
cttttgctgggtctcgatcgccacctgtcg

SEQ ID NO: 43137 - DNA, 196 bp, Homo sapiens
  chr6:75914508-75914704
  hyper
cacacacaccgcgtgcgcgtcgcctacctcctctcccacccaccacgaccttggcattagccaaaggagagcttagcgtttatttcctttcctgccctatccttccccagcattcactagaagactacagagtccggatcgagagtctccctggcccagagtcccagggagccctgaactggtcactgaagggctc

SEQ ID NO: 43138 - DNA, 382 bp, Homo sapiens
  chr6:75914738-75915120
  hyper
cgctgaacgagtccggcgacccacgctttctgatccccacaagtctaggatctgagtgggaaaccgccgcggagatctcacagaccccgaatagggcctccaccaatgcaccgggagggagtcggagaggggactttctcccggagctgggaaaagtccgccaagaatgagtaccctagtgctgcctaacccaccatctcggatgctctgaaaggtaggggaggaaggagccagaacactccactaggaatctgttacgagatgccacacacacccgtgcagcctcgacgagctgcagagcactcagcgggccctccaaagaattccgcaccgtgcgtcaccaaaataccttcccagcgcccccgccgcacgcctgccctcc

SEQ ID NO: 43139 - DNA, 213 bp, Homo sapiens
  chr6:75915170-75915383
  hyper
cggcgcgccctccattgaaatcgacagcatctacagatgaaactcctctagaaacggaaacactgaacgggatgctttgcgtgcacaaaaccttgctcagctcttaagaaaagcaacattcccctctccctcaaaaaccccaaagaatcaccaaatcccagtatacaaggcaacgctctagcccacctacactattacaagtccaaactgtcc

SEQ ID NO: 43140 - DNA, 591 bp, Homo sapiens; identical to SEQ ID NO: 4921
  chr6:75915426-75916017
  hyper

SEQ ID NO: 43141 - DNA, 207 bp, Homo sapiens; identical to SEQ ID NO: 4922
  chr6:75916809-75917016
  hyper

SEQ ID NO: 43142 - DNA, 30 bp, Homo sapiens
  chr6:75918564-75918594
  hyper
taaacggtaaagaacgggtaaccctcttcc

SEQ ID NO: 43143 - DNA, 30 bp, Homo sapiens
  chr6:75953675-75953705
  hyper
gttcctgaccttttcgatgttcagtaggct

SEQ ID NO: 43144 - DNA, 30 bp, Homo sapiens; identical to SEQ ID NO: 4923
  chr6:75994247-75994277
  hyper

SEQ ID NO: 43145 - DNA, 75 bp, Homo sapiens
  chr6:75994694-75994769
  hyper
ggatcgcgaatctgcgttcgcgcatgcgtggtcctagagctacggtgacacttcgcgtgcggtgtaggcgcatct

SEQ ID NO: 43146 - DNA, 30 bp, Homo sapiens
  chr6:76059481-76059511
  hyper
ccccagggatgcagcgacccagccaaggtc

SEQ ID NO: 43147 - DNA, 87 bp, Homo sapiens; identical to SEQ ID NO: 4925
  chr6:76458863-76458950
  hyper

SEQ ID NO: 43148 - DNA, 34 bp, Homo sapiens
  chr6:76459158-76459192
  hyper
cactgcggggcgtcggcgccggggtctcgcgttc

SEQ ID NO: 43149 - DNA, 643 bp, Homo sapiens
  chr6:78172322-78172965
  hyper
cgaggacgtggacccgggggagtcggttatcagctgggctcgggtcaagcgcttgccggtcctgttgggcgtctgtttcaaaatccgggagcgggcttctacgtagatgcggccatagagggcgatgaggagcagggtggggaagtagaaagcacccaccgtggagtagaccgtgtagaggatgtggtcggtgttcaccacgcattccgacacctcctcttcggccttagcctgacgccagaagaagggcggcagcgagatagagatggagaagacccacaccagcgcgatcatgaccgccgccctcttgggagtccttttagctgagtactccacggcgtccgtgatggcccagtagcggtccagggcgatgacacagaggtgcaggatggaggcagtgcaacaagtgatgtccgacgacagccagaagtcacagaccacctggcccagtgtccagcggccggtgacagtgtacatggtgctgatgggcatcaccaggatggacacaagcaggtcggtgaccgccagagaggcgatcaggtagttagccggggtgtgcagtttccgggtccggtacactgtggcaatcacaaaggcattggagagcgtggtggccaaggtgatgagcgccaatagcataacc

SEQ ID NO: 43150 - DNA, 540 bp, Homo sapiens
  chr6:78173185-78173725
  hyper
aggaccgtggcgatcgcaggtttgtccccagttgatagttccgtgagttcctcaattattcctccgcccaggttcacagctgaaactagaggtcatgggtgcggcagccaaggcaggcgggcgcctcccctgcacttccagagcgcctagctaagccgccgcgtctgtggttgttcctctccacaccgggtcttagacctgggttgctaagagctggcccaccgagccctgctccgctccagctccctggaggcgtctagtgcaggagggtgaagtactgcttgaggagaaggctttgaccaaatgggatctcttaccccagttgcttgaggctgagcgtctcctaacctggacgcttttggatctgcagactttgcccacaggagtttcctaggtgtagagaccaaagcttgcaggccagcgagaggtcccgagatcttgcattcccacccctcgccccaagctggggcacttttggggggctgcagcggccgccagagctgggtggggtgaagtctaggagcagcgctgcgccgcgcc

SEQ ID NO: 43151 - DNA, 417 bp, Homo sapiens
  chr6:78173771-78174188
  hyper
cggacgagctgccccgcggagacggagccataaaaggggggacacgggggctggagttgcggctgctcgggccgcgccgccgccaccgccaccctggtcccacgggagccactcggagccatgccactgggtgcgcgggtctggaggacctggcgcggcacactgggaaggggcaggtgtctgggggagctggagggacgcggcgtgcaccagcccgggagaagcgtgcgagctacggagcagatgggctctttatatagagtccaggtccggtccgccagagcagtgcaactcgtgcggcgcggcgggtgcggacgcccgctccccatcaccttccctttttctctctccctccctcttttccccccgccctgttcctttcctggccaaggaagctcccgccgggtcctaccgccc

SEQ ID NO: 43152 - DNA, 891 bp, Homo sapiens
  chr6:78175790-78176681
  hyper
aattatttttgtcaactgcagcgctcacttagaaaccatagaagagggaagcaaagccggcgagtttaaaccgctaggtgggggcattggccaggacggatcaaaagtgtgtgcgattgcgggtgtgtcctgtgggagtgcggggtgccaggaaacaattttcccgttatcctaggagaactggaaacgattagagacaagtgttaaagggatgggaagcgggggaaggccgacaggaatgtaaccagctccatgcgacctttcctcttttaatttctgctcgggagcatgggacggagaaaaaacaaagcaaaatttgttccccacacggtttttggctttagcggtttggggacctgtggctttctccagccatgcctccactgcttcgcagagtcccagactcccagaggaatccgccccttgtaggcagtttgattttaccctctttggtaaagagctgcttaaacacacaccgccatcatattgaccggatgttggcagagttcagtgaagaaccccatttccttaacctgacttccgcatttcaagtattcctttctcactttaaaacacataaaacataggtgtttgcacagaggcgcatgtgtgtgaaacacccaagagagaaagagaccctgtaaagtcgcctgtgcctgggtcaccccttcggagtaggggtcgctgggtaaggtccaagtgccagctctgcagtccccagcggcgctagaaggaacctccaggcaagttttgggggaaattcacctgacaggggaggagcagagagggaatcagtagcggaagggaaagggtggagatggattacctgagcgcagcaaaacttagttgagtagaaataagctcccgtatgaacaccgggcactaaaactg

SEQ ID NO: 43153 - DNA, 95 bp, Homo sapiens
  chr6:79577180-79577275
  hyper
ctccacacccatcccggcatactttgcgccgtgcacaggcaagccctggtgcgcattggccccttcggccgccgtcggccggtagttactatgga

SEQ ID NO: 43154 - DNA, 30 bp, Homo sapiens
  chr6:79577676-79577706
  hyper
acaggcccccctagcgggaagggagatgtg

SEQ ID NO: 43155 - DNA, 124 bp, Homo sapiens
  chr6:79620217-79620341
  hyper
gaaacaatagttactgtttgacgaattatacaacgtagacctaggtcgtgcgatagctacaaaatacctaaggaaatggactaggtcgtaacaagaaaaagtgatatcaagcccgggcagaagg

SEQ ID NO: 43156 - DNA, 263 bp, Homo sapiens
  chr6:79620474-79620737
  hyper
ggctgggactgccccagacacgcacaccctcccgacctccgccctgtcgcagttccagggcgctccgcgctgtcatgattgctgggtgcgcgctccgtgctgggacagccgcgcaccaacagcggagggcgttagcaccccaagacgctgctgcaggggtctgaaccgctccttggcctactggcaccgggtcctggacgaaatctaccgcggtccaactgagctttatcttgtgcggtgacgcccatgcctaggtcttgaca

SEQ ID NO: 43157 - DNA, 242 bp, Homo sapiens
  chr6:79788219-79788461
  hyper
ggttggctggaaggcgctttctctgtggaggccgatagtggcagggagggggccggggacggttccgcggagggatctgacgcacacggagccgcagcacaggctctattcagcggcgctggctggagctgagatggaagttagtttctatgtagcagaaatatgaaacaaatgaagcaaaactgcccagagaggggaaatgccccaaggatgggtctcactcacgcgcgtacacagacaca

SEQ ID NO: 43158 - DNA, 155 bp, Homo sapiens
  chr6:80246695-80246850
  hyper
ggtcttccttctcctcgcggtccctacatcctcccccatccctaatcccttcatcttccctgctttaagaaccacccgcaggcccccatccacgaacgccccttcactagctaccagacgcttcaacccagcctcacctcgcacctccacctccc

SEQ ID NO: 43159 - DNA, 288 bp, Homo sapiens
  chr6:80246889-80247177
  hyper
cgcaggctcttcagcagagccgatgcggcgtcccgcctccttgccttccctcttaggaccaaactcccagctggggcctcggcgtctgaccgccaaagagcgggtgcctggttcctgcggaggctgccgggcgggtgccgaggttgccgagatgcgggaggtttgaacacaaggatgggacagaggcgaggatcggggctcctgggtggcagcggcggtaacctgggctccagggtaacggaggcggaggcctagactgcactacgaagagaccgcagccaatcatga

SEQ ID NO: 43160 - DNA, 388 bp, Homo sapiens
  chr6:80340635-80341023
  hyper
gcccggtacgccagcggccctgagacgatgtgtgcccgcagcacgatcgtgtctgttggcatttctgggtgtggatgctccaaaccaataaaccacaatacagaacccaagcttggactttgaaccgagcccttttgcctagtttgctttttcctcatcaagccaggatccttgccaacccacctcacagcttctgcccgggctgtggctcccctccagccacctgcgcgtgttcgggatagaagcgcggtcaggaggggagctcagtccaccagccactccagggagagacggaaactacaaatcccatcaagccccgcagccggctccctcctcctccctctccttccccttcagcctgcggccgggcggcgctgggcttttatct

SEQ ID NO: 43161 - DNA, 503 bp, Homo sapiens; identical to SEQ ID NO: 4937
  chr6:80341054-80341557
  hyper

SEQ ID NO: 43162 - DNA, 1125 bp, Homo sapiens
  chr6:80656579-80657704
  hyper
gtggggcggctcctgcgaggagctcctggctgcacaggctccatctgatatgtcagctcccgcatccgagagctgatgagagatggagggagctcagaagaaaaccctgcgagtgtcgggggaggggaggccttaacattcggatcagattaaccagtgctcaaccgcagtgcccgcgccggcccctccgctgatccgcagcatccgaaagccgcagggcgcgggggcctgtggggccgggcccgggagctgcgagaccaggggccggtgaccccccgcgggggaccgagcgaggatggggaagtcagcggctttacctgcgatggaccaggtccagcggtagaactctaccgtgtcgttgagtgccgtggacactacgtttaggacactacccggctccgagtccaggagccccatcgcggcgatgagcgggcgctggcggcaggagaaagcggagacccagagagagggctgaccccggaggcggtggcggccgacggggcgagcggcggccgggaacccctctaacggcggcggcccggctgcgtcttctcctgctcctcaaggcgccgcggcggcggggatgcggcagaaggcagggccaagcggaaggcgtcgtcaaggttcccgggagaaagacgaggaggtggaggaggcccagccgccagcacagtgcgctgcaccagtctgcagcctcgcgcagccgcccctccaatctcctcagccggcgtcacgtggccgcgcgcgggggcggggggccggccgcccctcctccctccctccctccctagtattgggactcgctggcgtagggatgctgcgctcaagggtgcgacgccaactgggctcgcgcaggcgcgcgccgtcgagcgggagcgggacacctgggctcctccttggcccctccccgcacaagtcgcctcattagccttccccgcccctgtcccgggcatcggcccctgcggaggagttcaccgcctccccacgggtgatttcttatccgccccggatacgtcctgggaaacaggacacgggaagaatgggtgttctgtgggcaaagatgaggtaggcgtggtgctttggtccttacctgacactcacctcgatttcacttgtgttcctgtt

SEQ ID NO: 43163 - DNA, 45 bp, Homo sapiens
  chr6:80714141-80714186
  hyper
ggaaagcccgcccacgggcgtccggggaacgcctgcaaagtgcca

SEQ ID NO: 43164 - DNA, 30 bp, Homo sapiens
  chr6:80714459-80714489
  hyper
cactgaggaacagccgcagccggtgtaggg

SEQ ID NO: 43165 - DNA, 30 bp, Homo sapiens
  chr6:80816202-80816232
  hyper
cacttcccctcttccgcatgcgcacaagga

SEQ ID NO: 43166 - DNA, 30 bp, Homo sapiens
  chr6:80816792-80816822
  hyper
ttcagccctcgagacgcagtcccccctccc

SEQ ID NO: 43167 - DNA, 30 bp, Homo sapiens; identical to SEQ ID NO: 4939
  chr6:81814308-81814338
  hyper

SEQ ID NO: 43168 - DNA, 30 bp, Homo sapiens
  chr6:82128370-82128400
  hyper
tcttagaccaagctatgcaagctgttcata

SEQ ID NO: 43169 - DNA, 121 bp, Homo sapiens
  chr6:82461567-82461688
  hyper
cggctgcagctcgagcgtggggaagttgccgcgcccgtgaatcggaatggtctcgctcaggatgccgtccagccgctgcacttgctcccagttcagcacattgcagtgcgccgtagggctt

SEQ ID NO: 43170 - DNA, 943 bp, Homo sapiens
  chr6:82461728-82462671
  hyper
cgccgaagtcgccgccgccgaagtcgccgccgccgaagtcgccgccgccgaagtcgccgcctagggggatgtaggggctgcaggccagctcgtcctcagacatggcgaagtacccttcaccctccgccatgtagtgcccgccgagcgccacttggccctggtcagtcctaaaaagaaagggaaaggagcgcggtgaggacgcgcggcggcggagagcacgcgcggcggcggagagcagaggcccgccaggaaaagagcgccccctcccccgatagttccctgaccccgggcctcctcggagactccctcccccggcccttacagtccccagccgcgcaccgcgccccgcagagcagccccgcaccaaaagtatctctgatgcatctggaaagcgcaagcgagagtcccgtctgtgtcacctggaggcggccgccccttctaggagcgcagcgagcgagagcgaaaccgagaggcggcaacacttccaggagctgcgagcgcgctcagacagcaaatagcgacttcgtctttcccagacccctgccgcctgcgctcaccactccctccccgcgacccctcctgcgccgctgccaccccagctgcggtggtcccgaactggcggctcttgctgccacacacgctcgtgtctctggagctttagcagttgtgcggggaaaatgtcttcagtactttttttataccgggcttctctgcgcttccggggcccagagcggcacgttcgccacaccctcctcatctgcatagggcgccgccccctctgccctcccccgcccgcagggcacgcagctgactagcccagcagttagtgcgggacgactgccggtgagcgtgaggtcctgggctgtatgtgcggatactgtgtgcgcccgtagatgcgtgtatttatacatacatttaatttatgtacgccccctcccacaaa

SEQ ID NO: 43171 - DNA, 885 bp, Homo sapiens
  chr6:82462926-82463811
  hyper
gcacgcaaatcagtcacggcgcgtgagtgggaagggcttgttgataactgggtttcgattctcgaaacctcgggaagcgcgccggggagctctgggcgagcccgagaaggcgcgggggcggcaccacgggcctcgggcgtgcgcggctcctgcgcacgagtggctccaaggggccagtacttcgcgggggtcagggcgcgtcacggagcagacgcgggcgagcagccaatggccgaggactgggcgggccgagtgggcgcagagagcgcgcccggggagtgcgtgctgccccggagtccagggaaagggccgctaggtgtccggtgcctttgctgcgagttctctgacaaaattggaggcggcgaagcgcgttcctcgcggccccctaaagtttggccattttaagtgcatcatagtgtcagtggaatacgatttggttttccacgagacgtaaaagtaggagtttcaagaataaaatgaattctctcctccagcttcggtgacttcggcagagctaattctacgcacgctcactcgcgccaccaccactctttgctagaaagctgtggccgtctcttcggcagctcgctgcctccatcaactaacccggagcagctttcccagcgcctagacgctgccgggggctgaggtggggcagaggggagaatgccagggtcacagaatactccccaaaccctgctcagccctgcccgcccagactgggaggaaaaacagcccgcacctcctaactgggggagccccggcctagtcactcaagctgcgcggctcgggggtgaggggtagggtgcgggggtgtcacccgtggagcatccagctgcgtgacaacgccgccccctcccggtgccctgccgagctgcgtcccaa

SEQ ID NO: 43172 - DNA, 30 bp, Homo sapiens; identical to SEQ ID NO: 4944
  chr6:82968453-82968483
  hyper

SEQ ID NO: 43173 - DNA, 111 bp, Homo sapiens
  chr6:83073141-83073252
  hyper
ttctgctgctgcttcgcgctgctctgtcatgcctaaatctatctcgtcactgccaaaggtgcctgaatcagggtgaattccacgagattcaccagcggttttgctccagtc

SEQ ID NO: 43174 - DNA, 1111 bp, Homo sapiens
  chr6:83073788-83074899
  hyper
acccctttgagatccgaggggctggcggggcgcgggctggggggcgacagttgtagctccacttcctgctaatgcgagaaggtacaaaaagagatcaaaaagtcctgtaacctgaaacttccctcgcatcctaaccgggacctggtggagaggtctgggcgggggcggagacacccggaggccgaccttccgccgaggcggtgcaggaaggaacgggagagggagaagtttggtagggaaggaattggggattaagcggtaagttagacgcgggagacgagtctcctcgggaaaggcggagggcgggaggccggtcgggtttatttagtgtgggccagggaagaaggaagactttgcggtctgggtgtcggatgcgcgtccccctccggagtaaaagtgaccggaggggttggggaggcgaggccggggcgggcttttggaaggaggtctctgggacagactggagacgactagactcgaaaaggccggtttttgcactccggaagccgcggcagccaccgctgttcacgcctctctcctgcttgtcccaggtccctcagaggatccagcgaggggcgccaacaagaggcgaagaggtggcaccagggcggcggcaggaagaggagcgggagcaggagcgcggagcggagcgtcccgacccgccgtgcgtactttctggagggaaggggcgggggaatcggcccctgagggaagcgcccggtggcgagggggttagccaagttccggctgcggcgccactccctcggttccacgagaggaaagttttttttttccagacgcttccgccggctcgcgccctccgggcccagcctcccgagccttcggagcgggcgccgtcccagcccagctccggggaaacgcgagccgcgatgcctggggggtgctcccggggccccgccgccggggacgggcgtctgcggctggcgcgactagcgctggtactcctgggctgggtctcctcgtcttctcccacctcctcggcatcctccttctcctcctcggcgccgttcctggcttccgccgtgtccgcccagcccccgctgccggaccagtgccccgcgctgtgcgagtgctccgaggcagcgcgcac

SEQ ID NO: 43175 - DNA, 216 bp, Homo sapiens; identical to SEQ ID NO: 4947
  chr6:83775564-83775780
  hyper

SEQ ID NO: 43176 - DNA, 92 bp, Homo sapiens
  chr6:83902911-83903003
  hyper
ccccttcacctacacgcagcggagaagcgcccaagcaacaacgtctgcacccaaacccagtcctcagaaccgcagacgtggccctgcgtggc

SEQ ID NO: 43177 - DNA, 34 bp, Homo sapiens
  chr6:83903707-83903741
  hyper
gcactgcggcctctctcgccgcagcgtctggctc

SEQ ID NO: 43178 - DNA, 145 bp, Homo sapiens; identical to SEQ ID NO: 4948
  chr6:84417918-84418063
  hyper

SEQ ID NO: 43179 - DNA, 528 bp, Homo sapiens; identical to SEQ ID NO: 4949
  chr6:84418260-84418788
  hyper

SEQ ID NO: 43180 - DNA, 415 bp, Homo sapiens
  chr6:84419071-84419486
  hyper
gggccgcccctccgctgctggcgccgcacccggcacgcactgggctcgcgcaccacgcacacctgcccgccgactgcggggggagccctgggcgttgggggcgttggccaagacgggcgagtgggcttctcgggttctactctgtgaaggccaaggcaagggcgtcgtcgcgcgctgcctggcggagcccagccccttccccacactgtcgctgacacgcccgcctgtcaaaggctccgaggcccagatgagcagggcgattttaaatgtcagatcctgccggccatccgcgaccgtcacctgtgcgtcttcagctcctcaggctcctccgcttgtctcagttacaactgggagcccgggtgggcaggtaattctagccactttagtcttaaacggatactgaggtctgctgaag

SEQ ID NO: 43181 - DNA, 579 bp, Homo sapiens
  chr6:84562705-84563284
  hyper
ggccaagtcctgagtctccagcgaatcaagcaattaaccagtcacttggcctttttgcagaaatccacaaaacgtgtagactcgcttaattccatctcctcctggcctcttcacacggaaattggctgctcgggcgaatgttgtttttctccgcagccatgtgtcgaagggcgattaacattcgctcgacaaaaccctgtcccgggccatttgggagttgcacgcgttcacacccggggctcagcccggtgcgccttcacgcgcagcctttttgtttatgcggctagcagggagaggggcggagaggcagcgaacctctcaatgtgcagcaggccgcgagggctatataaagctcgggtctcggacctactggaactggtcaagattgcccgcgagctggcagcggccttccgcccagctctgcggcgtcatggagaacgcgggaggcgcagagggtacagagagtggagctgcggcgtgcgcggccaccgacggccctacgcggcgcgcgggcgcggactccgggtaggcttccccgcgctgctctgcgcctcccagcttcccccgtctctccctcct

SEQ ID NO: 43182 - DNA, 362 bp, Homo sapiens; identical to SEQ ID NO: 4952
  chr6:84563416-84563778
  hyper

SEQ ID NO: 43183 - DNA, 31 bp, Homo sapiens; identical to SEQ ID NO: 4953
  chr6:84564098-84564129
  hyper

SEQ ID NO: 43184 - DNA, 30 bp, Homo sapiens; identical to SEQ ID NO: 4954
  chr6:84569287-84569317
  hyper

SEQ ID NO: 43185 - DNA, 88 bp, Homo sapiens
  chr6:84743221-84743309
  hyper
acccaaagttgacccgagggacccactgcagagcccgggatggcaaagaattctctgactcaggctctgacccggactcggaggggca

SEQ ID NO: 43186 - DNA, 50 bp, Homo sapiens
  chr6:84744191-84744241
  hyper
gccccaccccgcaacccgcccccgctccccccgcccgccccgcgccccgt

SEQ ID NO: 43187 - DNA, 30 bp, Homo sapiens
  chr6:84937676-84937706
  hyper
tccgcactccgcatcgtcgcctcccgcctt

SEQ ID NO: 43188 - DNA, 30 bp, Homo sapiens; identical to SEQ ID NO: 4956
  chr6:85472292-85472322
  hyper

SEQ ID NO: 43189 - DNA, 425 bp, Homo sapiens; identical to SEQ ID NO: 4957
  chr6:85472934-85473359
  hyper

SEQ ID NO: 43190 - DNA, 30 bp, Homo sapiens; identical to SEQ ID NO: 4958
  chr6:85473758-85473788
  hyper

SEQ ID NO: 43191 - DNA, 597 bp, Homo sapiens
  chr6:85474013-85474610
  hyper
gcccccttccccaccgcgggcaaaaaacagatttggcgtttccgctttctcgcttgtgttgggatccaggaaccggcgacgcgccggccaagtctcctttcctgggtctctctcgcgcgctctctcactgatgcactcctttgctcccaccccttccacctcctcctgctgctccgaggtctgcctcaactgatgcgccagagaggactaacatgggtaaaaaacactctgtggacacaaattagggattgtaattgaaatttgttgccttgatctgtcagcacttccaggcaggagagcggtgggaagaacttgctcattagtgtcaataaagcggcgggggcggagcccgggtccctgtccatcacccagacggccggccaatcaggaggcgccgactccgcgcagcccgcgcccacttccttacaaggtagcgaaaaaccaggagtgaaaagcgccgctgtctggcttggatgtgccagccacacggacgctgaactctgtctctctgacgtccgtagctgagtccagccccgtagtctccagctttcctcaccaggacctggaaaggcggaagttcccggctttaaactagac

SEQ ID NO: 43192 - DNA, 199 bp, Homo sapiens; identical to SEQ ID NO: 4960
  chr6:85475697-85475896
  hyper

SEQ ID NO: 43193 - DNA, 256 bp, Homo sapiens; identical to SEQ ID NO: 4961
  chr6:85476131-85476387
  hyper

SEQ ID NO: 43194 - DNA, 554 bp, Homo sapiens; identical to SEQ ID NO: 4962
  chr6:85476713-85477267
  hyper

SEQ ID NO: 43195 - DNA, 30 bp, Homo sapiens
  chr6:85481458-85481488
  hyper
tctttagatttccatcgtggaggcataggg

SEQ ID NO: 43196 - DNA, 71 bp, Homo sapiens
  chr6:85481723-85481794
  hyper
gagacagtgaggaatcgagcgtttcatattatgggtttccagaaagacgtgggagacgaatgaggcgcaga

SEQ ID NO: 43197 - DNA, 204 bp, Homo sapiens
  chr6:85483319-85483523
  hyper
gggagcgcggaacgcgggtttctgttgataagtgcaaagtacggccctctcggtgctaagtgcacagtaagtgcgaagaataaatacatcatctcccggggcggctgtctcgaaaacgcctctcagctgcctgcgtttcagagcccgtcaagggttatagcttagtgtgggcgtccgcgccgcgcctgcgcctccgagcgccgg

SEQ ID NO: 43198 - DNA, 172 bp, Homo sapiens
  chr6:85483759-85483931
  hyper
cgcttcaggcggtaggtgtggagtacctgggcagctccggcgggaatggtgttggggagaaggagctgtcattcatagtcttctacatatctgaataaagaattgctttttaaaaataggttcagagcctagtgagtgaaaacttaaaagtccccgcgaggagctctagttc

SEQ ID NO: 43199 - DNA, 68 bp, Homo sapiens; identical to SEQ ID NO: 4964
  chr6:85484557-85484625
  hyper

SEQ ID NO: 43200 - DNA, 16 bp, Homo sapiens
  chr6:85484716-85484732
  hyper
cgctgacccctccacc

SEQ ID NO: 43201 - DNA, 1328 bp, Homo sapiens
  chr6:86159087-86160415
  hyper
gagctgtccgcgcgtcgcctctgttttatcactaaggttttaattgtgaataaacaaggaactggattcgaatgatttcttagtttctgagatttttttgtctaagcatcgtagacttcgtgcgttctcaacccaacaggaagcgtcacatctcagtgagcttcggctctcacagcccgaaactgcaaggagctcctctgcccggcctctctttactcctcctctctgcccctcagctcgctcatctttcttcccgccccctctcttttccttctttggttctttgaagtgatgagctagcgcaaccacaaaccatacattccttttgtagaaaaacccgtgcctcgaatgaggcgagactcagagaggacccaggcgcggggcggacccctccaattccttcctcgcgcccccgaaagagcggcgcaccagcagccgaactgccggcgcccaggctccctggtccggccgggatgcggccggtacccgctccccgccgggaacaacctctccactcttcctgcagggagctggtgccagccgacagccgcgccagggccgctccgggtaccagggtcggatcgggtgacgtcgcgaacttgcgcctggccgccaagccggcctccaggctgaagaaggacccgccccggccttgacccgggccccgcccctccagccggggcaccgagccccggccctagctgctcgcccctactcgccggcactcgcccggctcgcccgctttcgcacccagttcacgcgccacagctatgtgtccccgagccgcgcgggcgcccgcgacgctactcctcgccctgggcgcggtgctgtggcctgcggctggcgcctgggagcttacgattttgcacaccaacgacgtgcacagccggctggagcagaccagcgaggactccagcaagtgcgtcaacgccagccgctgcatgggtggcgtggctcggctcttcaccaaggttcagcagatccgccgcgccgaacccaacgtgctgctgctggacgccggcgaccagtaccagggcactatctggttcaccgtgtacaagggcgccgaggtggcgcacttcatgaacgccctgcgctacgatgccatggtaagacccgagcccgcgcccgggatagtagtcccggactgagagaggagccgggctggaaaagcagcggatggcagagtgtggcaagcctaggtccagggcgcggagagatgtggggataaagtgagactccggccagtgtgccagctggatgcatagaagtcccttggacgattcgtcttaaacggacgttattgcgcccccactatgagatgggag

SEQ ID NO: 43202 - DNA, 1319 bp, Homo sapiens
  chr6:86302970-86304289
  hyper
gtgtacagtctcaatttgagccgacacacggatttcacttttgaaaagcaacgaagatgaagaactcgttttgagaaatggatgagaaaaaggtagctcaggagacgaagcctcgggaaaggaggcaatcaaccccaccccaccggcctgtgcttccggcctcgacgctccgccgtgctccccgaggccgctcctctgcggagctcgctctccccactggtccccagtcccgcagctacgcggcctccgcacggttaagcagcacgggccgggcgtctgcaccttcggagaaaagccgccgcccaggctccgcgctgcggcgttacctgttaagaagcagggaggcggcgctgagacagagcagcaggaagcagaacagcgggtactggcggcagatctcgcgtcccacgtccagtcgcagccgctgcttcagcttctgccccatcgtccgcacccagggcaccatctccgtaacggcgaggccgagactgcgctactggctgaggcagaggtcaaggcgaccccccatccacacctcgcgtccccgccccaccgacttggcggcgcacacagacgcctaccggcagttagccgccgcaggctgaggtcgcgtccggctgggcccagccccacgccccccgccgcgcgtgcgcggccgcggtccccagccgaccagaggaacggccgtagaacgtgcccgaagtcgtcacccagcgcaaagcctctagcgtctcgccgctccgccctcctggccggagtagcgcgcagtcttccgtggaaactctgacaacactggcgaccggccatttccggaaatcaaaggacagccccagcacccagtaactgcctgtattgcggaggagagggaagaaggttgtagggagcccggaagaaactacagcacccccgtagccgccgggcgctgcctgaggggcaaccggagctcgtggagcccgctgggaactgtagtcttcgtgacacgaacccgcagagggatggagcgggtggtagcgcttccccgaccccgcaacgctccgcgcctcaccgtacactcggctccgggtgggagcaggtccgagctttgcgtgacgcctaagggagagggggataggaggacgcctttgagtcggtattttaaaaggggtgtgttgggggctgggggggtggcgagtaaaacagccctagaataaagactacaactcatcaggccgccaccccaccaacaaaatctcttttgcgcgctcacgggcaagggtagagctcaattcacgccggctccgggagcccaaccaaaatccgagtgcttggaagaggcaggt

SEQ ID NO: 43203 - DNA, 104 bp, Homo sapiens
  chr6:86388825-86388929
  hyper
tttgcagcgcagggcggcctcagcttaggaccgattcgagaagctgggctggctggctggctggcgctgggctgtagtgggcccccagcggaggccgccggagg

SEQ ID NO: 43204 - DNA, 592 bp, Homo sapiens
  chr6:87646716-87647308
  hyper
gggtctgtttgccattggaaccgcgtagagaaagcgtgcaaacccgtcaactgctcccgccgttcctctccctcctcaacccaggctcgctacagaagaagggagtagggtctgcccccttgttgtatctattttccccttctccgccagggctgtggccggcaaggggctcaggaggtgagtcccttgcccacacctccaaccccgctggcccggtttataacatggacagccctgccctctagtgtctgcaaccgggagccctaaggcgccatcagctccagaatttctcttttataacctaagcaagacctggagtacctcggagctgcgacctccagttcacaataccacctgcctcacacccgggctcatcttttcatcccacacccaccacccccctctccgttcacggtgtcccgggaggctgcgacctgcgtagatgatttagcagactgcccctgcccatgctcctgctcctgctcctcctcctcctcttccccgctctctccctctcgcctcctcttccagtccaggcgcccagactcggcgaagcgcagcgcctgccaccagcggtgcctcgggctgcccg

SEQ ID NO: 43205 - DNA, 230 bp, Homo sapiens
  chr6:87647316-87647546
  hyper
cgctcccaggttctgtctcgccgcaccccggcgggcactggcgcgggcaaggacgctggcggggagaacgccctgggctcaacgtactccagaatcgaatgttgagagaagcagtgctctgatccagctcaggagaaaaaggagcgggttccgagtgagacttctggagccagctggacgtgccggtttgcccagtgcggcgcggctgcacgcaccgtccacaaggtgag

SEQ ID NO: 43206 - DNA, 772 bp, Homo sapiens
  chr6:87861485-87862257
  hyper
agtaggttgatggagcctcttcgaaatcaggcagcagtgcccgcgccacggcctctgcaggacagactccagcatccccggggtgggtttccggaggccccgctccccgccgcgccctggaaaggctccagaatctctcggcctggaggcccctggcggcctctgctcccaagcggggagtcgcagccaggctacagcgggcttgatcctcagtgctgggtggaaaaaccgcggcggcaaacgccgggcctgcaactgctgggtgtcggcgttgctggttcgcgggcggcggcggcggcggctccgcgacaacagaggacgcgagcaaccggcgcagcgcccagcagggccttggcggggtggaggggcgcaggctgggttagcggagcagagcggaccgatctggtgccctccgtggcccgaggcctgcggaccttctccgttctccggcccagggcgagagcggggcaagagacagcgccccgatagtggcgcacgctctccgccatccccgggcctcgcgctttcacctcgcgtgctggggcgagggcggggctgcggggtgtactgggtcgggggtaggaaggacctgccaggccttagccctgagctatccgtcatccgctaacgccgcgctccctgcatccctggcttggcccccaggctctgcgccgcttgtctgtagcagacacaactcagctcccttactgtcctcaggcccggctatttcaagaattccagaaaaagagtgcaccggcgtgtgcgggccggt

SEQ ID NO: 43207 - DNA, 30 bp, Homo sapiens
  chr6:87864936-87864966
  hyper
actggggaaagccacgccgggatcgggacg

SEQ ID NO: 43208 - DNA, 30 bp, Homo sapiens
  chr6:87865470-87865500
  hyper
gtgccaggtgagggcgcccggtggtcccct

SEQ ID NO: 43209 - DNA, 30 bp, Homo sapiens
  chr6:87866036-87866066
  hyper
ggagcagtccccgccgaccccttctagttg

SEQ ID NO: 43210 - DNA, 41 bp, Homo sapiens; identical to SEQ ID NO: 4971
  chr6:88032034-88032075
  hyper

SEQ ID NO: 43211 - DNA, 30 bp, Homo sapiens
  chr6:88117711-88117741
  hyper
gcggtggctgcgagcgcccaactgctccga

SEQ ID NO: 43212 - DNA, 158 bp, Homo sapiens
  chr6:88182441-88182599
  hyper
cggggagacgcagtttacagaactacctccccaaccgaatttcacacacctgtcacctaggacgcggccgggaaggcctcccttcgatccgcgttctccccattttggggtgtagcttggattcctgagcccagttttagtgcgtggccgaccgggag

SEQ ID NO: 43213 - DNA, 30 bp, Homo sapiens
  chr6:88299908-88299938
  hyper
aggtatgtggtggccgatgcgcactgtggc

SEQ ID NO: 43214 - DNA, 44 bp, Homo sapiens; identical to SEQ ID NO: 4972
  chr6:88663570-88663614
  hyper

SEQ ID NO: 43215 - DNA, 221 bp, Homo sapiens
  chr6:88678312-88678533
  hyper
tctacttttagaaaacgtgtgcttaacttgtaaatgtagttttcagtgctggtaagaatatttttgttttgaataacaatcgcgttcttttccacagcgcgaggctctctgctgagtagcaaggagcccctcccagccggaaggcttttgcggtgctagcagcgcctgtctcagagcccttctttatcaacactgggctgcagggccggtttctgaagtac

SEQ ID NO: 43216 - DNA, 101 bp, Homo sapiens
  chr6:88875466-88875567
  hyper
cgagggggcgggaggcggaaaaagtatttccaaacgcaactctgccaggtcttacccttcgcatcccctggtcctcgggacagaagctcccttggcacctc

SEQ ID NO: 43217 - DNA, 616 bp, Homo sapiens; identical to SEQ ID NO: 4974
  chr6:88875621-88876237
  hyper

SEQ ID NO: 43218 - DNA, 192 bp, Homo sapiens; identical to SEQ ID NO: 4975
  chr6:88876284-88876476
  hyper

SEQ ID NO: 43219 - DNA, 791 bp, Homo sapiens; identical to SEQ ID NO: 4976
  chr6:88876630-88877421
  hyper

SEQ ID NO: 43220 - DNA, 30 bp, Homo sapiens
  chr6:89827120-89827150
  hyper
aggagggttggatgcgcgcgattttatcgg

SEQ ID NO: 43221 - DNA, 33 bp, Homo sapiens
  chr6:89827897-89827930
  hyper
ggggtcctggagtgcgacgggatttggggaggg

SEQ ID NO: 43222 - DNA, 811 bp, Homo sapiens
  chr6:89855490-89856301
  hyper
tattaactaataaccgttctcattctgctgctgtgggaaataagcaacaacggaaaagtaatcgataatcttagagcataactcaaaggccagagcagccaaggaggtggaagagtcccgagccctgccttctccacagcacccccaaaaccccacggcggggcagagcgcctggtagggtacgagcggccgccagcgtttcccgcgcggcgccgggggcggccccgggactgggggtggtgccctgggagctgtgtggccgcgtgcgcgctccgccggggtcctggaggcctctgggcgcgtgcgcgggcggtcgctacctgcggccgagccagggagcgagagggcgcagagggcagcgggcttgggcagcatgaggcccggaggggagcggcccgtggaagggggcgcgtgcaatggccgctccgagctggagctactgaagctgcgctcggcggagtgcatcgacgaggcggccgagcggctgggggccctgagccgcgcgatctggagccagcccgagctggcctacgaggagcaccatgcccaccgcgtgctgacgcacttcttcgagcgggagccgcccgcggcctcctgggcagtgcagccgcactaccagctgcccacggccttccgcgccgagtgggagccgccggaggcccgggcaccgagcgccacgccacgcccgctgcacctgggcttcctctgcgagtacgacgcgctgcccggcatcggccacgcctgcggccacaacctcatcgctgaggtcggggcggcggccgcgctgggcgtgaggggggccttagagggc

SEQ ID NO: 43223 - DNA, 30 bp, Homo sapiens
  chr6:90062676-90062706
  hyper
agcttcgtggcggtcggtcactacccagcc

SEQ ID NO: 43224 - DNA, 30 bp, Homo sapiens; identical to SEQ ID NO: 4979
  chr6:90120690-90120720
  hyper

SEQ ID NO: 43225 - DNA, 1576 bp, Homo sapiens
  chr6:90120935-90122511
  hyper
aaggtgtcctgacaacggtgtttgcgtggatcccgggaaatctgcggcctctcggagactcccacaacagcttggcgagcatccccccgccgccccgcgggtctccccagccactacctgggtgggcccctcccgcggcgacgcggggcgagactgacacccgcagctgccgacgaccctgccagtcacgccgccgccggctgcctttttttagccacgacatctgaccctggcttcaacagcaccgttctgggagagaggtcccagggcgcgcccgcggtcccctcccctccccaaccgccagacgctgcggagagcttggggtgaggggcgcgggaggcaccggctctgaaaggggcagaagcgcgcgctcctccagcccagacgcttactccctccttccccttttccaccgatcctggttgcccctccgccaccagcaccgcgctccctcatttggcagctcgaggtcgggcttttggcgtccctccccaccccaaaccctcaactggacccgctcccctggaccccctccaagtcggtggctcgcgcacggccgggctgggggcgggaaggcgccaaggggaggaaaggggcgcgagccgaggacgcgggggccgggcgctcacctccctcctctgtgccgctgtccggatcggcgtcggaggagtcgggcccgtctccgtagtccgctagccccaccagctcatcctcctcctcctcctcctccgcgtcgtcctcgtcctgcggctgcggcttccccagcacctggctcatcgtgcccaccggccggccggcccggggacggcgggggtcccggggtgggggccaagcctcctagccggccgcccgcagcctatttctgaagcggaggtttgtctagagctcagcggggcccggcggaagcgggggccgcgcgtcccccggcgggcggcgcccaggtccgggtcccgcggttcccagcgcgcccgaagccccctcccccgccccgcccgccggcggaggagtcagccggagcgcggcagttcctcccggaggagggagagagagagagactgcgtgacccgagtcacctgacacacactgtcacatactcacatacacaccccgcacgggcgcgcgcgcgctcgcccggccgcgggcaccactcggcggggcgctgggccgaggacacacatgcacacgcacacgcacacgcacgaggagaccggggaggcgcggggcccctgcaccctcccagactcacaccgacacacgccccgtacacggggcccccgggacgccggccgtcacccaccgcggctgcgcgccaggggcccccacgcgcctctccttcacgtggtccccgcacaggcaggggagggggcgccgcacaccctcaatgtcccccccgccgtcccactcccacacgcccgcagagcgtctaccgtgggcggatgcctcctgcttacagtcctgagctagggtcccaagcgggtggcctcccaacactgtggcgcccagatcccccaccccagagcagcgtgcccaggacaccctgtggacgctcaagagccccaggcggagaactcagata

SEQ ID NO: 43226 - DNA, 1085 bp, Homo sapiens; identical to SEQ ID NO: 4983
  chr6:90142634-90143719
  hyper

SEQ ID NO: 43227 - DNA, 150 bp, Homo sapiens
  chr6:90529580-90529730
  hyper
tgtcccgccttttccgggagggaaatggaaacaaaaatctagtcggtttggatgcaggagtgatggggactcgcgaacacagcacgtggtgggacagaaagaagagtgcgttaggccggggaggaaagagggggcgtgtgagtctcagcc

SEQ ID NO: 43228 - DNA, 30 bp, Homo sapiens
  chr6:90539228-90539258
  hyper
cactttgtctcgcacgcagctgacagcaga

SEQ ID NO: 43229 - DNA, 423 bp, Homo sapiens
  chr6:91004755-91005178
  hyper
agagactgcagcactagacagcgaaggtgaaaaccaggaacgccgcgtctcgccgcccgcgggcccgccgggagactgcgggtccgtctcgcgggtggggcgccccggtccctctcgtttcctggaggccacaggtcacggcgacggcggtgaccgggagagcaggctgcgaggcgcgcctcatcgggccacagacaaaccaccccggcagcggccgcgccggaacttccctcaagttaccaaactcgcctacgcgcgggagagtgctggggatgccccatgcgcccgcgaccccagaagccaggagtgtgccaccccttcacacactcactcccggccctgcacgcttcccctcacggtccgagttcctgcaaatgcttggccagaccgaggtcgccgagatgctcgctccagtctctcccc

SEQ ID NO: 43230 - DNA, 422 bp, Homo sapiens; identical to SEQ ID NO: 4985
  chr6:91005208-91005630
  hyper

SEQ ID NO: 43231 - DNA, 775 bp, Homo sapiens; identical to SEQ ID NO: 4986
  chr6:91005660-91006435
  hyper

SEQ ID NO: 43232 - DNA, 30 bp, Homo sapiens
  chr6:91297175-91297205
  hyper
tgcctgcagccgggcgaggtggtgttgaac

SEQ ID NO: 43233 - DNA, 617 bp, Homo sapiens
  chr6:91320685-91321302
  hyper
gactgctcaaggtcaccgagctaagtgccagagccaggattctcaccgctcctcaccccagatcggggctccggccagaccacgctggccgccgggggagaggacgcgcggggcgggcagagcgcggccgggggccgggaaggagccggcgccaggcgcgcgcggaggaggcggccgggcggggagccatttcctccccaagcaacggcgcttttcaggggcgcgaccgggaagcctctcttggcgtcccttccccagccgcagtttgggcaggggagcgagggccgggaggcgtctaggctgtggcgaggggagaagcatcccccatccctccgctccccgtctcgctcaagctcttcctgcgccacgggcaggtctcccagcctcgccatcgcggggcgtccccgtcccggcccacacctctttcctctccagccacaccggcgcgccccgagggttgcaggcgggggctgcaccgggttgaagcccagtcaaccacacgtcccagggcttaggcgccgggcggggacaacgtgtctgcctgggctcagacgctgctagggggcatccctgtcggtgagaccagactcagacacgagggggcctgggctattaca

SEQ ID NO: 43234 - DNA, 30 bp, Homo sapiens
  chr6:92818996-92819026
  hyper
ttgcaggcccatgaacgtgggcacctcacc

SEQ ID NO: 43235 - DNA, 39 bp, Homo sapiens
  chr6:94126251-94126290
  hyper
aaattaaaacaaaacagaacccggcccgagaacgtttaa

SEQ ID NO: 43236 - DNA, 246 bp, Homo sapiens; identical to SEQ ID NO: 4988
  chr6:94126366-94126612
  hyper

SEQ ID NO: 43237 - DNA, 423 bp, Homo sapiens; identical to SEQ ID NO: 4989
  chr6:94126642-94127065
  hyper

SEQ ID NO: 43238 - DNA, 594 bp, Homo sapiens
  chr6:94127085-94127679
  hyper
cgccgcctagaagccgggcgcactcgccgcccgccagccacagatcaccaccctccctcccatcacccccgcgccttttatacatcacacttctgcatctaaagaattcaggctcttagaatcagaatcctcttcacgtagcttgcacccagaagagcaaagagaactagacattctggctgcaggaacctctccccctagtgatgcagttatttatagcccaaactccagcccgagtctgcgtgtgttcgcgcgcggggtttcgccgcggcggtgcaaacttttcctctggtccgctattccagaggaatcacagtatgccagggctgaaggtttctgatcgctaacgtcaggggagtagaaatgtggttttggaggggatgagcgtgcgtttctagcagatgtccgtccttctgcaaacgcgtaaccgccagcttggaggcacggggttctctgaatgggttcagcatctatacaggttgcagatgtggaaagtggggtcagaaggtcaggctgaaagaaggactagaatttggcgccgggtttgaggggggcttgagcgaactaagaggagtgcacgatgagaataaagaa

SEQ ID NO: 43239 - DNA, 1780 bp, Homo sapiens; identical to SEQ ID NO: 4991
  chr6:94127968-94129748
  hyper

SEQ ID NO: 43240 - DNA, 32 bp, Homo sapiens
  chr6:94130100-94130132
  hyper
cgtatcgtttttttacgcgtttatcattttct

SEQ ID NO: 43241 - DNA, 30 bp, Homo sapiens
  chr6:94309719-94309749
  hyper
ttaaatcagcaattacgttttcttccttct

SEQ ID NO: 43242 - DNA, 30 bp, Homo sapiens; identical to SEQ ID NO: 4993
  chr6:94807929-94807959
  hyper

SEQ ID NO: 43243 - DNA, 1413 bp, Homo sapiens
  chr6:96463089-96464502
  hyper
cttcctagatcattgagaacacggtccgaggcaattgggttaaaacgatatatgtataaatttctttttttacctcgttagctggtcaaccccggcggtaaacaaccaaggccacccctgcccaggcaacagctccaaggggcaggcgatggttgccggcattgagctccctgctggcgccttctggcgggacagccagtgccaaagagcgcccagggaaacaaacaccaatgggggactatacagatgtcatggatgcacatgtaggatcataatctgcccagaaagaggagagaaggagggcgacaggctgcggatcctggtccaggagccgccgcaatggagcgggcggcagtgtgcgcgcacaggtgccacaggccggtggcggggagagctgtagaggctgcctcccggactcagcactcgcaccagcgcgctgaagccgcggctgctgccaagcttgggtaacccccagcctgagccacgagaggaagagcccaaggaaagggcgcgaagggggaaggagggtagggtagaaggagggcgggggagagacccatcgcctcatcttacatttcccctcccaagctcatttagtgggaacctctgctgggctcctgcgcgcctccctccccaccccctcaactctgggcgaccatctccccctcttcccttgctcaccccccacccttcctgctcttccgtccctccctaccgcgtgcctcctcccctccccctcgcctccctcccctccagcggcagtagctgtagcagcttcagcgaagccggagatgggcagagagcgcgcgcggcgcagcagctccagattcactgctctcccctgcagctccccgcgcccccgccgctgtcgctgcctcggtgtcccccagccccagtcgcgctcttaggacagcgccgccaccgccgcctggccctgcctgcctcctgcgccgcgcagccctcgcgagcgccccggatggcgctttacccctaggaccggtgagtaggcgggagagtgcagggggtcgggcgtcaaagcttggcgcggagagaacatcttttggtttgggaggcaccccaaaccagctgctgtgattccccgtcctccaggcagagggtccagggagggtgttgctctgtggtccccaaggggatgtttgatttcaactccacctgctggcaacctgaacccctctccgtcttggggacagctgcctgcagctcgcagtcccgcctcaccttccagcccccaggctcccacactagcagcagtagatggccccgaccctctggtcaccccaaacagggtcatctctactgttactgtccctgcgttcccaccttatgccagtgcacaaacgcccctatctgccacccttcacccgatctcgcgctgacaaagccttctccaca

SEQ ID NO: 43244 - DNA, 150 bp, Homo sapiens
  chr6:96839752-96839902
  hyper
aaaaccctccaaatttcctagcgtgagacaggcaccaagcgggagacttggttgcctggcaaccgcgctcttcacaggcagctggagtaaaaggaaccgtctggtgccaaacggcctttcacctgcttcgttaaagggaaatcagagaga

SEQ ID NO: 43245 - DNA, 119 bp, Homo sapiens
  chr6:96969408-96969527
  hyper
caactattactctacggaaatattaggggtagcgcaaacaaagttctgacactaaactttactgagccctgcatcctgcccacgacccccccagaaacacctacgcaccactctcctag

SEQ ID NO: 43246 - DNA, 114 bp, Homo sapiens; identical to SEQ ID NO: 4996
  chr6:97284790-97284904
  hyper

SEQ ID NO: 43247 - DNA, 30 bp, Homo sapiens
  chr6:97285728-97285758
  hyper
tcgtcgttggcctgcgccctgcaccccgcg

SEQ ID NO: 43248 - DNA, 30 bp, Homo sapiens; identical to SEQ ID NO: 4997
  chr6:97731281-97731311
  hyper

SEQ ID NO: 43249 - DNA, 30 bp, Homo sapiens; identical to SEQ ID NO: 4998
  chr6:98405135-98405165
  hyper

SEQ ID NO: 43250 - DNA, 30 bp, Homo sapiens
  chr6:99272074-99272104
  hyper
agggggcaggtctgcgaaaaagagaaacac

SEQ ID NO: 43251 - DNA, 30 bp, Homo sapiens
  chr6:99272544-99272574
  hyper
gcagggaaccgcggcgggaattttccagcc

SEQ ID NO: 43252 - DNA, 918 bp, Homo sapiens
  chr6:99273109-99274027
  hyper
ttttaatcttgatccgccggtcctgcccaaagttcagagcagctgtccgaaaggtccccgcatttgctgtccctaggaaaggtgaggctaggaggaagggggaggcaacgcagggaatgtgagaggactggggccacactgtgtatctaggaggaaactctgaatcctaatctcaagaatgtaagtctttgcgcagtttccaaatcgagtccatttagcagctttcttcggagcccgggtaccccaagtggcaacttaggaactgggagaaggaacgtgccaccaccgaccacctatcctggtgggaggaggtactgctcccccctactcctcccttttccctgctccctctccatcagcaacaggttgtcaagttgaggagacatcccctccaaactctctcactccccacttgtggccgaggcctgccctgtgttcatcccagacagtcaggcagacgctgagctgtccgcgtcggcgtgggcgcctgtggccagcgtattgtgagatttctaaatgtcagggcactgttaaggaaatgtctgacaaacctgtagtaaacctcttcacgaaggaaaggagggctgttgtcttggcttttggttgtgtgtccctcatggcccccaagaaaacaatttttctgttccaaacactctttggatcaagtttcgtccttgcatttctagtttaggcgtttctactagaaacgaatgtgtggtgcgttttggttgggcattacttgcaggtgtcttgccgcttaagtttcctggactgagacgttgactggtgacctaggcttgtttggggcagctgtaaaaggtccctgtaacgctccaggtctacctggggaccgcccaccaactccctggtctccaattatcattgttagtgcaaggtggagaacgagcttaattcttt

SEQ ID NO: 43253 - DNA, 30 bp, Homo sapiens
  chr6:99275319-99275349
  hyper
tgtccgcgccgcgtgcgggtccctctgcta

SEQ ID NO: 43254 - DNA, 403 bp, Homo sapiens
  chr6:99275600-99276003
  hyper
ccttctcctcgagcccgcagtcggctctcagggaaagggtgccaggccccaggcggcacttttattttggttaagaggagggagggctgctcccaggcccgagggaggcgaactgagcctttctgtttggatttccctcctcgctatagcaaccagcagcatccggacaaaaatgcgccctccctggacaatggcccggcctcctgcttctcgccctcgtcttcctcccccggatcccagccaggacctgcctaggcgctcttcgaccacggaacatccctccccgccacccccacctccatcctttccatagcagtctctccccgggtcagtccagggcgctgggaagccttagctctcgctttctacccccactgatccccccacgcgggccgaggctagg

SEQ ID NO: 43255 - DNA, 1079 bp, Homo sapiens
  chr6:99276258-99277337
  hyper
ggttaattaagttcccttccacgaactgagctccgtgcctattcattattctctccctctgacctagggcgttaatatgatcaggcctatgactcggccgtgttctgttttcctattttgcatttaatgctgggacccggctgccctagattaccatcgaaaactctcagaaaagacaagaggagccaggaggtctccctgctccaatctgcctaaggcttcctcttcctgcctcctcttccggccaacgtctgcccctatgttcccaggacccaaattctggaaacctgtctttaaaaatacaatcatctctaactttatgatgtccaaaagctgtctagaatgacagattcgaaactctgagacctagcagaagattttggcccacagttattacgactgtggttaactgctctccagaaaagcatctctcccgcccgtgcaccacctgctcccctccccgcccacccccccatccccccccaaccgccgtcctcccggacactaacgacacaattgttaagtgcacttgtacacttcagaaggatttgcattcgtgctgtgtgcaggcagaataagagaactgaagtccaacttcaaccaaatacgcctgtttatcccagggctggagcaacagccctagcccttgaaaatggcttcagtgaaatagctgagtacaccctcctcccacttccccagtccgcctctgtgcgcaggtgtatgttagtgcactcgtccctagcttgccttcctcttcgaaaattgctccagaggatgagagaagccaggagctctagcaagagcttcatcccagtacatttccaaatgctttagagctaaggaggtttctgttgaaatcactttaatttatcaaagagttgtcatcccctactggtggccagccatccacctgctttaaggctagggggagaaaatgcgagcgtgcctgtgtgtgcgtgtgcgcgcacacacacgcgcgcgcacacacacacacagacacctttaggctccattgttaagaggtcatttaactgttagtcctttgaaagtgaaattgcgggaagcaaactggaagccac

SEQ ID NO: 43256 - DNA, 1067 bp, Homo sapiens
  chr6:99278904-99279971
  hyper
ccactcagcgcaccccggcaagagggagtcggctccgtttcttcagacaagtccagctcagggtattgactgagtagaggttcctccggacctgggagaagctggggtggcgccagcatctccttacaggtgcctccatcctgtccttgcggaaggggcttaggacaccccgcagtccgcgccccgaggtggcgaggcccgcacgaatcgcctgctcagccattgtcctagcgagtgatctcgaggagctgtgctggatggagtgagggagatatcaagacaccttgtcagttcaaagcattttagcgttgtttgaaatcctctccacgtcaacgtaagcagcctgtgtatttgaacagctgctttgaacagtgaaagggaataaactgattcaaaacctggaggtgtctgcccgagacaccttcaacgtgcttttatgcgggcggagaatggcaggcagacgcgcggactctgccctgacagggtcagcccaaagaatgggccccagagcccggggcgggggaggaaccggtggagaggccccagtctggacctaaaaccagcgagagctcaggtttcgggagccccgaagaggtgccgcgctgggaggcagacaaggaagcccagggtgctcggaacccggcgttcgcgccaaccgggcccctggcgcctggaggggaggcggcggtagctcgtggggaggtgttgctcagagccgcggtgcgagcccagcctggcccgcccggtgattggccgcgcttgggggtgggggtggggtgcagagactgaggccccgggtaggctatttctttgtgtactcccggggatttattgggtatattaaaccctgttgggaacgtttcggctccttggccgccagcgaaatgagacggggatggaagttggagttgagacctgggaagtcaacgtgggaaggatctcagcattaatcgccggtgatgtcctatcgcagacaggaagttttgatgtacacgtgcagcctattcttgtcccctcacactagcgccctatgccgggaggagggcgggggtgtggggtggggtgtg

SEQ ID NO: 43257 - DNA, 304 bp, Homo sapiens
  chr6:99280171-99280475
  hyper
atgagctgcttagcacttggacgcggcccttccccagggctggattcttctgtccgtgggagctctgagctccaggtccgcgaaaagaaaggcacgacatgtcaggagaagatgcggctggcgggctgtctgtgcgctccccaaggcccagggaaagtcacgcgcctagcacaggggacgcagggccgaagccgggagaaggcggttctgcccgccacccagccccttggctcgcggttgcggagccgcgggcaccagtcgctgagtctgcgcgctgaggctcggacttgttcattttttccta

SEQ ID NO: 43258 - DNA, 184 bp, Homo sapiens
  chr6:99280852-99281036
  hyper
ccccaaaatgctccctctgagcgttgatttggctgccctctcaagcctacgaccgccggcaaaaccagcgatagagcgaggggtgagaggtggggacgcgatccaggttccctggggtctgtcattcccttcccggcagtaactgttgattcgctttacagcgcccatgtacacacccggccct

SEQ ID NO: 43259 - DNA, 766 bp, Homo sapiens
  chr6:99281067-99281833
  hyper
cgcgcccaagttctagctaccgggcttgcaggctcggaaactcgcaggcggcacctgctctgggcggctaaagaactgatggcgcgacgcgcccgcgctccgtagagcggcgctgcgggtgcatggtcccatagtcttgctctggagttcactgctgaaagctgagctgggagcttggccagggagcgccaaagacatagactaaccccacccgctagcgcccaccgaagttactgattaggaaggttcccctggcatcagcccatttgcttcacacactcttcctccttcccaaggggctaacggaaaagttgcacctaccagcggtaggagcacggggaatcgcgcacgcaggccctccgcgcggcttcccggagcggcctttggcgactgcgccgcccctacaaggccgcacacccctcgccagcactccggcagcctcgcacaagacggagcccacgcaggcttctagttttctaaaccaaaaactgcacgcgccggcgtgtgaatctgacggagagacttttagagttttgtttggttttcagttcagaccgctacgctgtcagagcaagcaactccgagccttgatgggaatgacttacaagccgcggtgcgggctgagcctgcctctctcggggttctttccccaagggagtgggagacaattgggcctggaacctaaaaggaagagagcctgtgctagccgcggggtagaggggaaggagaagagctttgggccgaagtgtccgcacaccctggagca

SEQ ID NO: 43260 - DNA, 570 bp, Homo sapiens
  chr6:99282548-99283118
  hyper
ggcgggaggcggcggcggcggcagcagcagcagtaatagcaggagcagcaacagaaggcgtcggagcgggcgtcggagctgcccgctgtgggagagagaggagacagaaagagcgagcgaggagagggagcccgaggcgaaaaagtaactgtcaaatgcgcggctcctttaaccggagcgctcagtccggctccgagagtcatggcgaccgcagcgtctaaccactacagcctgctcacctccagcgcctccatcgtgcacgccgagccgcccggcggcatgcagcagggcgcggggggctaccgcgaagcgcagagcctggtgcagggcgactacggcgctctgcagagcaacggacacccgctcagccacgctcaccagtggatcaccgcgctgtcccacggcggcggcggcgggggcggtggcggcggcggggggggcgggggcggcggcgggggcggcggcgacggctccccgtggtccaccagccccctgggccagccggacatcaagccctcggtggtggtgcagcagggcggccgcggagacgagctgcacgggccaggcgcc

SEQ ID NO: 43261 - DNA, 405 bp, Homo sapiens; identical to SEQ ID NO: 5007
  chr6:99283177-99283582
  hyper

SEQ ID NO: 43262 - DNA, 216 bp, Homo sapiens
  chr6:99283826-99284042
  hyper
tccatcgaggtgagcgtcaagggggctctggagagccatttcctcaaatgccccaagccctcggcccaggagatcacctccctcgcggacagcttacagctggagaaggaggtggtgagagtttggttttgtaacaggagacagaaagagaaaaggatgacccctcccggagggactctgccgggcgccgaggatgtgtacggggggagtagggac

SEQ ID NO: 43263 - DNA, 214 bp, Homo sapiens; identical to SEQ ID NO: 5008
  chr6:99290258-99290472
  hyper

SEQ ID NO: 43264 - DNA, 82 bp, Homo sapiens; identical to SEQ ID NO: 5009
  chr6:99290709-99290791
  hyper

SEQ ID NO: 43265 - DNA, 83 bp, Homo sapiens; identical to SEQ ID NO: 5010
  chr6:99291258-99291341
  hyper

SEQ ID NO: 43266 - DNA, 110 bp, Homo sapiens; identical to SEQ ID NO: 5011
  chr6:99291586-99291696
  hyper

SEQ ID NO: 43267 - DNA, 97 bp, Homo sapiens; identical to SEQ ID NO: 5012
  chr6:99291729-99291826
  hyper

SEQ ID NO: 43268 - DNA, 962 bp, Homo sapiens; identical to SEQ ID NO: 5013
  chr6:99292122-99293084
  hyper

SEQ ID NO: 43269 - DNA, 224 bp, Homo sapiens; identical to SEQ ID NO: 5014
  chr6:99293408-99293632
  hyper

SEQ ID NO: 43270 - DNA, 116 bp, Homo sapiens; identical to SEQ ID NO: 5015
  chr6:99295747-99295863
  hyper

SEQ ID NO: 43271 - DNA, 303 bp, Homo sapiens
  chr6:99296061-99296364
  hyper
cgcttccgccctcccggcctccctcttgccgcatgagcagcgcagggcctcctgggctgtgctggggtcaagagttatgaacacttcgtgtcctcaggagctcacgggggtgacgagaggcggtctgggtctgaagccgctacacagaggggagcagtggggcctcggggagcagcggggcctcggcttggcggctccccccgccaccccgccacctttcaggacccaggccaagccgcctcacgaagaccaggaagcggcctctgccgggaagccacctgcagcctatagtcccctccccaa

SEQ ID NO: 43272 - DNA, 15 bp, Homo sapiens
  chr6:99296407-99296422
  hyper
cgcctggagggccct

SEQ ID NO: 43273 - DNA, 30 bp, Homo sapiens; identical to SEQ ID NO: 5017
  chr6:99395953-99395983
  hyper

SEQ ID NO: 43274 - DNA, 184 bp, Homo sapiens
  chr6:99872771-99872955
  hyper
gggggttcccactgcgcacgcgcagtgtttaacggccggtcaggaacccaacaattagtcccttctcgtccgagaggaaactctgtgagaagatgggaccgtgagcactctctttaacaaggacatttccttttcagcgaaagcagcgctctgatttaccaagtctggcggaccgcagcgcttt

SEQ ID NO: 43275 - DNA, 204 bp, Homo sapiens
  chr6:99873213-99873417
  hyper
agaataataacatccgtttgtcatctgaagccataccatctctcatccaggtttgtgaacacgtgattgtgcggattgacatgtttcggcgccattttttttgtgggcaaaaccatctctactctggtcaacaccgggcaactgaaccattcctgcacgttactttttaacgtagctggcgccattcccgacccatctttatag

SEQ ID NO: 43276 - DNA, 67 bp, Homo sapiens; identical to SEQ ID NO: 5019
  chr6:99962858-99962925
  hyper

SEQ ID NO: 43277 - DNA, 30 bp, Homo sapiens
  chr6:99963155-99963185
  hyper
ctctcttccagcctcgcccacccacaaggg

SEQ ID NO: 43278 - DNA, 220 bp, Homo sapiens
  chr6:99963447-99963667
  hyper
gcgcctgcgttctgcgtgtccgcagagcccggagagtccctgataatctaagactcatagccaccgactagcaatttgttaggatcctgggccagcgtgcgcacctcggatgttgcaggagtccggcttaagtcccacttgttgctgggcaccttctgaaacagcctccgatttccctccgttaccctcctctgaactcttttttttttttttttttttt

SEQ ID NO: 43279 - DNA, 56 bp, Homo sapiens
  chr6:100016716-100016772
  hyper
ggttggaaggctctcgcgagagcgtcttgagaattctggccgggggcccaagccgc

SEQ ID NO: 43280 - DNA, 30 bp, Homo sapiens
  chr6:100036656-100036686
  hyper
ttgggctcctgctgcgtgagccgatctgca

SEQ ID NO: 43281 - DNA, 30 bp, Homo sapiens; identical to SEQ ID NO: 5021
  chr6:100038978-100039008
  hyper

SEQ ID NO: 43282 - DNA, 304 bp, Homo sapiens
  chr6:100039288-100039592
  hyper
agtcttctggctcccgggaaagcagcgtggcgccgccccagcccccagtccccagactagggattgggacgtcagtcattggctgcaggttactggtctgggctgggcccgcagagatcccaagcgctcctctgtcggtgcttcctcagcgtctgcgtttccgcagatgcccgaggtcagacagtttcgcaagggggctgaagagccaaatggggaaactgatggagcctcacaagtttattcctttcccacgtctgtgtttgtctaagggtgctttctgtgcggctttctgaacttgagcatc

SEQ ID NO: 43283 - DNA, 163 bp, Homo sapiens
  chr6:100050647-100050810
  hyper
atcccaattaggggcggctgacacacggtcctattcattcccatcagctcttgaatacatttgcctagaaatgaacttcacaaatagaggagctcctaaatgtgcccaacagcaaggaaaatcgaattgagtgcgggctcattcggcagcggccggcagagaa

SEQ ID NO: 43284 - DNA, 148 bp, Homo sapiens
  chr6:100051359-100051507
  hyper
cgcggctctctgcatccccgggttcaggactcctccggccccagttttgggattccgcgttgacctaggagggaggggtgtttggtgagtcaccagcaccagggtctccaaggctgagcccgcctccccaacccccgggacaactccc

SEQ ID NO: 43285 - DNA, 242 bp, Homo sapiens; identical to SEQ ID NO: 5022
  chr6:100051771-100052013
  hyper

SEQ ID NO: 43286 - DNA, 500 bp, Homo sapiens
  chr6:100061196-100061696
  hyper
gcgaggcctcttccgcgccctcggccacctcgccgaccccaggcaagtgggggcagcccaagaagggcaaggagcagctggaccgtgccctggacatgagcggagccgcccgaggacaagggcacttcctcggcatcgtgggcggctcctcggcgggggtcggcagcctggctttctaccccggcgtgcgctcagctttcaagcccgccggcctagcgagggcggcggcggccgctcacggcgacccctaccgggaggagagcagcagcaagcaaggagccggcctcgctttgggcaggctgctgggcgggggccgggcgtgcgggcgccccgggagcggggagaactcggcggcgggcggcgcgggtcaccaccatcaccaccacgcgcaccaccaccaccatcccaagtgcctgctcgctggggacccgccgccgccgccgccgcctggcctgccctgctctggggccctgcgcggcttccctctgctctccgtcccc

SEQ ID NO: 43287 - DNA, 725 bp, Homo sapiens; identical to SEQ ID NO: 5024
  chr6:100061988-100062713
  hyper

SEQ ID NO: 43288 - DNA, 34 bp, Homo sapiens
  chr6:100062944-100062978
  hyper
agaatcacatcaatgcgaacgtcacagcgccttc

SEQ ID NO: 43289 - DNA, 40 bp, Homo sapiens
  chr6:100067144-100067184
  hyper
cgccggcgccatcgcgaggtcaagcgtgacccttggccac

SEQ ID NO: 43290 - DNA, 30 bp, Homo sapiens; identical to SEQ ID NO: 5026
  chr6:100441566-100441596
  hyper

SEQ ID NO: 43291 - DNA, 127 bp, Homo sapiens
  chr6:100676802-100676929
  hyper
gaagtaccaggtgtccccaaccgcgggcaaacccaatcttggttcactttggcgtctcggaactgacagggctccgtcagatcttccgtttccctcctgcgcgtccgtgatattgattgacagcctc

SEQ ID NO: 43292 - DNA, 87 bp, Homo sapiens; identical to SEQ ID NO: 5028
  chr6:100729631-100729718
  hyper

SEQ ID NO: 43293 - DNA, 44 bp, Homo sapiens
  chr6:100902141-100902185
  hyper
actgccagcccgcagcgacctgagacgaccggccaggtccaacc

SEQ ID NO: 43294 - DNA, 30 bp, Homo sapiens
  chr6:100902455-100902485
  hyper
ttttgtaatattttcgttctcatctctaat

SEQ ID NO: 43295 - DNA, 30 bp, Homo sapiens
  chr6:100903212-100903242
  hyper
cgaggtttcctccccggagtgactccactg

SEQ ID NO: 43296 - DNA, 488 bp, Homo sapiens
  chr6:100903894-100904382
  hyper
acaggagcctctctcgccctctcctgccccacccccgccaccttttaaggaagcttttgccttcccggaggtttgccttctctttctgttccccgtagaaatcttacgattgtgtctgggttaatgttttataagggactggctactctcgtctacctgccgggctttcccgatctaatatcgaaggaacctccccaagtcctagtaaggggtcccccctccctaaagtctcgaagtggggtagagaccttctccctggagcccctcgcctcctgccttcggtgacgcgctctagcacacccaatttcagttggcgagggggtaagctgagatttcgtttctgcacttgacctaccgcagaaaattcgcaaatcctttgattgtctgtttaaaatgaggaggaaaccagctccctttgcggcgggattacagtgggaacaagatctaaagattctcttgcaattcggcgaggccgagggaacggggtt

SEQ ID NO: 43297 - DNA, 83 bp, Homo sapiens
  chr6:100912362-100912445
  hyper
caggtggcgcgctcgcgacagcccctcgcaggctcccccgggggtgggaggcgccgcggcctctcccacaccaccgcggagct

SEQ ID NO: 43298 - DNA, 585 bp, Homo sapiens
  chr6:100912465-100913050
  hyper
cggggcgtcttctgcttcacctaccttcagtccccacaagcggcagaggtttcgggggcgcccatctcttaactgttctcatgcctaccgtccaacccagcgacaccgccggcctctccgcttcccaccggcagagaggagcagagcattcccggctcccttttctggatcatgaattggaggaggggtgcgtggcagaaagaggaggatgcaagctttgggacgagtgaggtgattttagaatcctggtcctccgtagttgctacgaagccagttcactattattcctaattggaagccgaaaactgccccccgtaacttctttatagcttaagggtttagcttcaacttcactccggggccgcctctctcccgccctccctcaatgccactcacaagccccctcgcctcccattggcctggcgcggccaggggcgaggcgctcattggccaatagggctgagtgacacgagtcggccccgagccgccctccgcgcgcccaggctccgggctctgaatcttactacccgcgggaccgctggactcctaatgagctcagggtgccgggtcggcgctgtccggttg

SEQ ID NO: 43299 - DNA, 14 bp, Homo sapiens
  chr6:100913285-100913299
  hyper
ggtttggggagtta

SEQ ID NO: 43300 - DNA, 30 bp, Homo sapiens
  chr6:100913879-100913909
  hyper
ttggttttggtacgccggtgaccagattcg

SEQ ID NO: 43301 - DNA, 39 bp, Homo sapiens
  chr6:100914901-100914940
  hyper
gtcaatgagccaagtagatgtcgtttaataaacaaagtg

SEQ ID NO: 43302 - DNA, 30 bp, Homo sapiens; identical to SEQ ID NO: 5030
  chr6:100933169-100933199
  hyper

SEQ ID NO: 43303 - DNA, 30 bp, Homo sapiens
  chr6:101329104-101329134
  hyper
gcttgccggggtcgcgcccagtcacaggga

SEQ ID NO: 43304 - DNA, 126 bp, Homo sapiens
  chr6:101329393-101329519
  hyper
gggcgggagcgggacgctccactttaccctggctgcccgcaacgggccaggcctgccgtctctacctctctacctgtgagttttttccctgcatttacttcagtctgccgcgtcttctccccgccc

SEQ ID NO: 43305 - DNA, 71 bp, Homo sapiens; identical to SEQ ID NO: 5032
  chr6:101840314-101840385
  hyper

SEQ ID NO: 43306 - DNA, 969 bp, Homo sapiens
  chr6:101841143-101842112
  hyper
cgttgctatggtttcggagaggcataaaagccatcacccagaagcaaatgtgtttgggctccttatatgtgttgtcaccacccaaggctaggcaaattcctcggcgctttgcatgcatcactcactccctgacagagcatcttggccttagtctccccatcccaggaggcgggtgtgcgctaagggagcgaagtccagccggaggcttcgtaacatccaagtctagggacaccaggaattctctcgctctagctcctgtggtccaggggtgggagatgcccccgagtggccgcggcggccaggagcgtgcaggggccacggggaaaggagcgcggcgcctttaaagcaagaggcgaggaacccccgccaggaggcgtgtctgtctctgccgccgccgccgccgctgctgctcctcggtcaccgtcttcgccgctgccgtcactcgcgctcggcgccggcggctgcgctggtcggtctggtagctggggacttttccgcccgacctcctccggctgctcctccccgaggaccaccccaccccctccccgcccacctcacccctagctccaggtaaggactccccggctgtgggctgcactccgggctccttcacgaggtgtttgttttcaagaggacgggagggactgcgggtgggcgaggggcattttccacctggagagaaggaagaaggcgaacagtagcgctgcggacgtccgtgcgctcggggcgcccgctggacggattcactgcgagtctttgtcgggcttatctcagccaattcccgtcaagcatgcaagtggctctgttggctgcagtcgcctatgttctccacataaaatgatttaagaagtggacgtgtcaggaagtggcctcagctacggggactcacgcgaggcgaagagaatgagacagatggcaagaagctgtgtggctgccggcgggtctgacgaactccccatccctccttct

SEQ ID NO: 43307 - DNA, 361 bp, Homo sapiens
  chr6:101849736-101850097
  hyper
agtggtggagagacccgccgcctctgctggggaggcagcatccagtgtcccttccatcccccacccttggcgtggctaggcgccggcagccgccaggcgcctccgccgcggcgctatggcaacggcggagcccgcccaggcggccaccccagccccccttccccgctagttaaggctctgtgttatccttccccttgctcccgctaggactgtgattcgacccagcgtcctcctgtcacctcctgcgaggtgaggggcagcccccgcttagagtgctgaacccttgccacgtccctcgcctcccccgcccgtcttcagcgtgcgcaaccctcttccccgcgcttccctctccctctctgta

SEQ ID NO: 43308 - DNA, 56 bp, Homo sapiens
  chr6:101850938-101850994
  hyper
ggctgtgtgcccggctggcctagggttcaccgttcgggagccctcacatgtttaag

SEQ ID NO: 43309 - DNA, 30 bp, Homo sapiens
  chr6:105388546-105388576
  hyper
cgccgccgcgccccgcgctcccccacccgg

SEQ ID NO: 43310 - DNA, 105 bp, Homo sapiens; identical to SEQ ID NO: 5035
  chr6:105389509-105389614
  hyper

SEQ ID NO: 43311 - DNA, 102 bp, Homo sapiens; identical to SEQ ID NO: 5036
  chr6:105401586-105401688
  hyper

SEQ ID NO: 43312 - DNA, 569 bp, Homo sapiens
  chr6:105404583-105405152
  hyper
aaaaagcgttaacatcggttgttttatttaaacgaccccctcccatgattttagtcaggcttgtgtgtaaggcacgcgtgtgcacatatatgactgcctttttttctaaatctatgattcacaaggtccctccattgtgtttaagtagaagcacgaaatcagcattctgatttatcctaaagaagcgttccaaattgtctttaagataacatgtttgagtttttcgtgttcattcataaattattttgatgtcagcatagatgaaatggcgattggttatctcttcctcttgccagccccttaaggatacgaggtgaaattagtagcaagaaagcatgtaattgacaaagtcacgtgtgctcagggggccagaaactggagagaggagagaaaaaaatcaaaagaaggaaagcacattagaccatgcgagctaaatttgtgatcgcacaaaatcaagatgttagattgatgcagaagatcactccgttccaaagggaaagttttcatctcacgagtttggagctgagggcccgtggggcaacatggccgaaggttaattttcttttcta

SEQ ID NO: 43313 - DNA, 220 bp, Homo sapiens
  chr6:105405552-105405772
  hyper
tctaaaccatcttcacgatttctctttcctcctcgtgcccgccggagagaatagtttcgctgaaaatttctctttgtcaatgggatcagtattaaatcagcaatatacaagtaaagtatcgcatgctgtaatgtaaaatgtggctgaaaaatggagttaaatgaataagtacacgtatgtatagaaacgtggaagttggtgtgatcgatagaacagtgtg

SEQ ID NO: 43314 - DNA, 192 bp, Homo sapiens
  chr6:105584127-105584319
  hyper
ggacttgtctggccaacaacccgttcccaaaggctcggggaaggaggttgcgggtgggtggcgcggacctcgggtccccagccatcggcgctctcccggggccctctgacctcgctccttaaaggaggagggtccgtggcaacggtcctcctcggccaggcgctctcgggacgcgggggtgaggagtgagcg

SEQ ID NO: 43315 - DNA, 1175 bp, Homo sapiens
  chr6:105584366-105585541
  hyper
cgcgcccggctgcacgcaggctctgcgcggctcgaggcggccctacagggggcgaggaggaaccccggagactcggcggagagagcagagacggagctcaccaaggggcttgccgccgcagagcgcgggagccggcactcggtggggccgagggcccggggacgctggggctgcctgacctgagcggcggccgctgaccgttgagggtctctgtggccgcagcgcccagacccggggagaagggcggcctccaagggccgggagcccctcgagggcgcggccagcgaggagggacagagggcggcgcccccggctgcccgggcgcgtagaacaagcagctgccgccagggccgacaaagttgctccccgaggggctgagatccaactttcgcttcccgatttagccaggggagcgcgaggccgcacacaacccggcgcggggggaaagccggctgcagctgcgcctcccatccttacccggctggtccctggcggggagcctgggcagcgccgaccaaagttcggagcggcagcttcggggcgcgggacgcggggcacacgggctcagctgctcgacgggagcccgacgcgcgctcctcggcgggtcggcgggtccggaagctccgctgcccgggccgggtccccaagcccgcagccgctttgactaaaataggcatcgcgacggcggcggcaggcggcggcagccagggctggggccgcaccgcgcacgcgcatgcgcccgccgccccgcgccccccggcgggcggagcccggcgccgcggccaggatttcccacctcgctcccgcgactccgctgcgggtctgcacacccgaggactcggtttgaaacgcccgcttatttattttcttgtcgcctcgctacaagattctatccttgtttgggcatgagtggggggcggcagtctcgtgggaccggcggcattcgtcgttcctccttacggggataattcgagaagtgcggtccgggtagggagagaaatcaggagagaaaatgagaaagagaatcctcgtttcccctcaaagttggacgacccactcgtatatctcctttttgggagattcgcccataactcagcacaaacagggaatagcccggaaagcgcgcgagttcccgtccgattgtggcgggggaggctgaacgtttggtccacacg

SEQ ID NO: 43316 - DNA, 824 bp, Homo sapiens
  chr6:105627266-105628090
  hyper
actgacaagggcccctaggaacggcttttctcccttgcaaaactggcctgtttatttcggctccagggtgcctggggccagagtaggacctgcaggaaaagatctgggaggaatattcgcccagaagcctctagggcatacgactcgcgttcttcaggggtcggcgcggataggaaccgcagcaaaggatcccctagacctccgagctgtgagcggcgacacagccgggaccccagaccccggaccccagggcgcggagttgaccggagccgggaagggagcggcgcgggcagcgcggggcagcgagacgcaagcgctcgcaggggtcggcggcccagcagaagccgcgcccgctaagttgcccgaagcggccgcgaggtgcgagggtgcggacagcaccggaaggcggcggacgcagcgcccccgggctcaccttcttacctttccttcccagccctgcccggagcttcagcccggcgcccgcagaagtttcccggcggagcgcgcttgacccgggtggcccgcgcggaagccctcagcgtccccctcgtgagtgcctcgccgcccaccctgcggcgccgggcgcagcgtgaccgcagcgggctccggagcggcgcggcggcgcgggcgggtgccgggcacgggcgcgcgccccggggcgcagccgggtgggcgggcgcggcggctgcgtctgggccggggcaggcggttcggccaccggggtgcggggctgcggagaatcctagcggccgctacggaccgaagtttccaaagatgcggttccccgagtgtacaccgctcccggttgtaacatacacctagta

SEQ ID NO: 43317 - DNA, 30 bp, Homo sapiens
  chr6:105850393-105850423
  hyper
aaaagcagtgacaccgtctgtcttcccact

SEQ ID NO: 43318 - DNA, 373 bp, Homo sapiens; identical to SEQ ID NO: 5040
  chr6:106429102-106429475
  hyper

SEQ ID NO: 43319 - DNA, 30 bp, Homo sapiens
  chr6:106440648-106440678
  hyper
cctcgagagctggacgtcccttagcctggg

SEQ ID NO: 43320 - DNA, 1339 bp, Homo sapiens
  chr6:106441863-106443202
  hyper
gtcttttcctaatttatgaaacgtgaacgggggtaaggtatttatttgtacgctagttgaagtggggcaggagcactgattcctggacagtcactcaaaagctgcgcccaaagttttaaaaagcgcggggacggtggagagggaggcgaagagcccgcgctgctgggctgggctcgggtgccgcgctggggacgccgcatctactgagcggtcgccgaagacgccgggaggcgaggggcgaggtaagacgccgcctaaagaggcccgggctctcccccggggtcgttgttggaaaagcaaattccacggtgaactctaccaagctcagcgcgtacacagctagcggctctggattggactgcattcgcctaaattgcgtaattaaaaaaaaaaaatacaccactgccaccctacagcgacgcttccgctggaagacgagcggggacgcgtgacagcgcggggatagcttttctattacgtttcttgttctccgagctcgagcccccttttaaaaagtcgctcaccaaaaacggggtgggggatggaggtggggacgagaagtttccgaatgctgagttcatttggacgaggtgaggagaactagggtcctaacagcaggtccagaggactctcgagataggtttagagcccgtccttttgtctggagtgtcgcgggactccagaagtgggttgtgcaagacaaacttccagataaatctttgcccggatcctcctgcggtcaaagcatcagtcctgcccgtaacttcctaacgacatcttcttggagcagattccgcggcggggatggctgggtgtgcaaaccgaaaacagtttgtcagccctccagtcccgccgcgtcgggaatgcgagcccggccacgcggtccgaccgggtccggggacggcgcgcttgtcgcgggagcctcccggcttgcggagggcttgagttttttggcggagacagaggaaagcctctggtcgagaggattagagcgcgcgttttctccgccgagcacgctgcccgacgccgtcgcagccgcgcacttcccggttttgaaagccagagagatgagtcaagcgcaaaagctccggagtgacaatgcgagcttttggccagcctcatcctcctccccattcccttgccttcttttaggtcttcggttcgtgacaagtgcataggttaggcttgcacggaagagggtcggggcaggtgccagctcagggcacctacccggcgttgtcacgttccctttgggatcaatgatctttcataactaggctgggcatgttcgtgcagccctctgggcactctgggggacgttctcataaggctttttttc

SEQ ID NO: 43321 - DNA, 769 bp, Homo sapiens
  chr6:106533715-106534484
  hyper
ttacaacttttggggcggggggcggggaaacgtgcgttacatacacaacagcttgaggaccagacagctccactgtattacactagctgcaaaaacaatttaacttgctcttttgaagtaagatttgtgtcttttgtacctggggatttgagctgagaaatcagaaactgtgtaggtaaattttaagtttccttaatttaaggaacgtgcgccccctaattctgccgcgccaggaaggagggcgatctggagtgtttagaatacaatagagcccaagtaagcgttgaggttaagtgccttcaaagggaagtaagaagattccaagtcaatgttgaaatacacatgcgaagagaggaagctctcggcggctgtgctagcaatctgggggaaagccctgggctcggccaggtggtgttggccacgttggccacgcccccacttcgcgcagccgagtggctaaggaaatcttaagcagggaggggaagccagacggttaacacagacaaagtgctgccgtgacactcggccctccagtgttgcggagaggcaagagcagcgaccgcggcacctgtccgcccggagctgggacgcgggcgcccgggcggccggacgaagcgaggagggaccgccgaggtgcgcgtctgtgcggctcagcctggcgggggacgcggggagaatgtggactgggtagagatgaacgagacttttctcagatgttggatatttgcttggaaaaacgtgtgggtacgaccttggtaaggaacttgaa

SEQ ID NO: 43322 - DNA, 709 bp, Homo sapiens
  chr6:106808609-106809318
  hyper
ctgggtgctggttctgcaacccgcggccgtccccccgcatccgcgacgagggggcggggtcccacggcgcgctgagaaaggcgggcgagctggcgctcaggtgtgttcttccatagggcccgggcggcagagaggaccgcgtcccggcagtcggagcgggaggaggacaagacgatgccgctgtccccgccagcccagggcgaccccggggagcccagcccgtgcaggccccctaagaagcacaccaccttccacctctggcgctccaaaaagaagcagcagccggcgccgcctgactgtggggtgttcgttccgcacccgctcccggcgcctgccggagaggccaggtgagctcctcgcccgagccctccagtcccacctcctcctcctcctccttctcctgctgcgctagcccttggactcctgaccccacttggaggaggggaaagccccggggtctgtttcagtccgcaggagggtacccgggtccggaggggagcgatcgtagccgctggggttgacgaggttcctcgcggcttttggttcagaccaagcaccggcgagaggaacttgtgcccacgcatgtggcctttagtatgactgcaaagttttcatgcaggagcctcccgcatcagcctgctaaccagagcggcggggagtgagggttgttaccgtcctaaatgatggcgggaactctgctttggggtta

SEQ ID NO: 43323 - DNA, 638 bp, Homo sapiens; identical to SEQ ID NO: 5044
  chr6:106958124-106958762
  hyper

SEQ ID NO: 43324 - DNA, 1660 bp, Homo sapiens; identical to SEQ ID NO: 5045
  chr6:106959519-106961179
  hyper

SEQ ID NO: 43325 - DNA, 30 bp, Homo sapiens
  chr6:107077172-107077202
  hyper
aaaaaaagggggggcggggcattaaaaagc

SEQ ID NO: 43326 - DNA, 30 bp, Homo sapiens
  chr6:107077459-107077489
  hyper
attaaagatggctgcgcccatgtaacatca

SEQ ID NO: 43327 - DNA, 75 bp, Homo sapiens
  chr6:107780252-107780327
  hyper
gttgctgagctcgtcgctcagcaggcagcgaaggctcatgaaggacgtggggtaccccacgatcttctccgcctc

SEQ ID NO: 43328 - DNA, 1084 bp, Homo sapiens
  chr6:107810017-107811101
  hyper
gaacaatggacacccccatatcgcattgtgtcaggtaattatgaagtgtcgaggcgcgggaaggagaagccgggaacgtcaatgtgtcctctgcaacgtgtgggagcgctcagagccgcgcgtatcacagaaacatcatccagtcgtcacccccaatgcctcaacccagggacagggacagactcaatcagacctcggccccaggcgtggcaggagagggccaaagaggggacttgtgagcgcagagggagcgagcaccgctccatggagggcaggcgctagctgggaagtcgggaggagaaagtgcaaccaggcggggaggggaggatcccaccggggcgtggcgagggcgttcggggtccgggtgagcgggaccctacgcgggaccgtgcgctcccagaagctcccactcagcccaaccttttgggcgaaacccaggacacccagataagggtgcaggcggggtcacgcgtaaagctgttactttgaagcagggcataagtgagagagagataaagagagaaggaccaaggggaaaaagaaatgaaggggctgaaggccgagatgtcctacttctaagtagttctttgagaggcaaaagcttcattgccattgcagtccgaggcagcgccgcgtggaggaccggccgggcggggcgcggggacctctccaaggggtctccagcctccgcgcactctgcggtggcccccggagggggaaactattctggcagctcagtggggggaagctcgtccgggctgtggtttcctttccccgagaccccagcgttgcacccccgaggcggcaggctcagtcaaccctccccgggggacggcggccctctagccaggcgacctcaggtctcgcgacctcccgccgcccaaccttctcctttcacccccattcatttttcctcagcggctcctaggacgggctcaaaaaccaactccacacgcaacccagcccacctcgcggagctgagaagcagggctgggttccgagcgggcgccggcgcccctggcgtgtggcggggaggtggcggccgcggggggcgccgcgagccgcccgtgcccgccgcggatga

SEQ ID NO: 43329 - DNA, 113 bp, Homo sapiens
  chr6:108169774-108169887
  hyper
caccgaagacaccacgtgcagtgtcttcacaggcaaagcaatcccagctgtgaatcccacggagcacctacctgctcaccaaattctggtggcagaacgaagcctccggttga

SEQ ID NO: 43330 - DNA, 30 bp, Homo sapiens
  chr6:108434955-108434985
  hyper
ggcgagatgcgcctcggggtcggagtcgcc

SEQ ID NO: 43331 - DNA, 815 bp, Homo sapiens
  chr6:108436100-108436915
  hyper
ctctttccacggatcgaccgcggccttggcaaggacttgagtctgcgttccagccccttccgctcccagcgcgcacgcagcctctcgcctttgcgtcggcgggttgctggttgccggtacccgctcagcagctaggagccttggggaaccctagctcttagcttccccgtctggcgaggccagagggccaagttgctcactgggctgtgctgagggataaggggagaaaagaacggaaatcgcagctacgagggctagagggacggcgcggctgcttgaggacgggtcgcctagcggtgggcgagtagggctgtgcgtaaaaggatctagacagacagtcgtgcgcccgcagggttgcaggacaggggcaggccgagttgtggcgcgtgtgtgtttgtgtgtgctcgcctccgggttgcgcgctttcagggctttggatgccggggattttgaggacccattcaaagctccgagggggcggaggctcaagcaagccagggaaaaggtcccctaagcctcagagcctgggctgcgccccagacaaagtgcctaatgcagagtaggctcttaataggtttgcattggatctaaacgaaagctagtgaaattcgtacatgattctaatgagagatgacggccaggtgttctcagcagcccctggccctcacggggcgacctgaaagttcccactctacccgagacgaaactcagagccgaggtgggggcgaaggccgggtaatgcactgatcgagggtgaggagggatgtttcatagccttttccgacatacctcacgacaaaacacctttcactctc

SEQ ID NO: 43332 - DNA, 189 bp, Homo sapiens
  chr6:108438374-108438563
  hyper
gcggggtgaagggcgcgagtgcattcaggccccaagggaaactcggggacatctgcacagacaagaatccccaaggaggcccaggtcccacggccaaagtcctcgacccccaccaggctgtctccctctagtcctccccactcctgacctgccattcgggacggagccagtccgcgggcacccaagggc

SEQ ID NO: 43333 - DNA, 610 bp, Homo sapiens
  chr6:108440034-108440644
  hyper
aaatatcgtcccttacgtcgtgtgagtctaccaacccaccacgacctcatattcttgtgcgggtgtctgactcgaatgacaagcgagctgattttttcagtacatagctgggaaatgtagtgagtgataatagagatttctctttcattttttacgcttgacttggttattgttgcttttcttttcccgtgattccttctgaggattagctctgacttccccactattggcggtcaaagtggccccgactcgggatgacaattgacggggatcaagggattgcccattctgtgcctgtaagaaccgattcgtgccagagaaactcatcaagtggaggcggagaataaagaccgttcgggggtaaatgtattcattgagaagggttctcccaaattgcttctaagtttttttaatgaaaagtaacgattgcggcaatcagcggctttttggcggattacaaatctggagggagctgcggcgctgcattgaaaagtgcccccgccttcgcaccgggcagccggttcacaggagcagcgcgaggggcgggggtccgatagcgggacaaaggcggggagggggcgagcggaggagggcggctcggggcgcccgg

SEQ ID NO: 43334 - DNA, 131 bp, Homo sapiens
  chr6:108440744-108440875
  hyper
cgagggaggtctaccgcagcaccaccagcactggggagattccgggcatctggagcgaggaaggtgtgctataggggttgagtccatcaccgtggaagtccggggaatgggaggtgcgactcggtccccca

SEQ ID NO: 43335 - DNA, 1086 bp, Homo sapiens
  chr6:108478472-108479558
  hyper
ggatttagaatatcaaagggacgtgttctttcctcccaaatcacctgcctgcgcttcccccagccgggtgccccagccttcacctcggtccggccaccacctcatcccgcttcttcgcggcttccaggcctcgggctgggatctcagcccctgcctgtaggtgcggcccagagggtgcgacacgcgtcggagcggggcagcggaggaggggacagggacgcggcagccacacccgcatctctttcccctctcgggcatccccgagggcccttctgcctccagttccttgagcccccgaagccccccatgcggcaagagcgagtcgcaggaacaagtggggaatcttggccgcggccccctcccccgccttataaaaaagaaattgacttttgtttggagtttgtgaaaagtggggctcggggcccagtcaatggggcgccccgcggcgcgggctgagtggagctagcgcgaaccgctcagccgcggccccaattaatccgccctttgtgcggcccgcccggccgcccccgccgcagccgcaccagcggcccattgttcggcctcgccgggccgcgggatttacccttttcaaacagccggttttgtccagggcagttcgagcggaagtttctcactgacaatttgccccaaatagatagatttgtcagaagcgaccttcgggaaggaagcaaaaagccaccggcccgaaggttgggcccaaaacagggactctgcgtcccacccgcggccgcgccgcccccccgcgcccccggccctgcagtcccgaagccccgcgggggtccagaccactgcacctgctgagccagacactccgcggacctgacctccgttttacccatctgtaaaatggagcagctgggcgctggcaagccgtaagtccaagagctttggctccaccagcgtgtacgacgctcatttcctttctctctccccacaccctttccaaaaactgtaagccagaaaacctggccaggcctccgcgacggcgagaaacggtcttgaaggtcggtcggtcgccgtaatgcggtccggatcgtgcacgtgctgtttcgccactgccctccg

SEQ ID NO: 43336 - DNA, 396 bp, Homo sapiens; identical to SEQ ID NO: 5051
  chr6:108484807-108485203
  hyper

SEQ ID NO: 43337 - DNA, 619 bp, Homo sapiens
  chr6:108485519-108486138
  hyper
ccccataatcgcgtccgcgttatgggggtggtggtggtaggtggctgaagcaagtggatttctggcgtgaaccagaacctgaggattccaaacggagcctggcatcttattgtgtttctcaaatcctgcccgaaattcctcccctctctgggcgccgagttcgagaaagcgctacgccgccggtcgggctagctccacaagcggctgtacaagttggctgtcaaaaaacgctgatttctcctcctgtcacctaataaacccctacgcgcttatggcctcgtcccacaatcccccaatctcgtcccaattcgaaaaaccgaggaggagggaataaactgagagataaagatccccccatcttgctctttccccgggaccccagccttggtcgcggcgccccactaaggaggacacaggctctggtgtgtgtggtgtgcgagaccccgagctcgaggccgagccaaggctgggcagaaagttgcaatcacgtgctgtcggagcccactggagcgcacagcccgctccccctgggacgcccaggcggaggacctgctgcgccctcccagggctcgggggactccagcattcacttgcacgcacaggcgaactctgattgaaa

SEQ ID NO: 43338 - DNA, 529 bp, Homo sapiens
  chr6:108486476-108487005
  hyper
ggcctctcttcactattcctccgcccggagagcgggagcccgcaacgcccgccgaggacgagcggcgggagggaacgctctgccctccagccgccccggtgcagataatggaggcgacaagagattcgctcagcgtcggatgggccagctctgcttggggaagctggcggcatcctcccctcggctggtgcccaaacccactgcgcgaaggccgaaggaacgcggaacctccagaagaccccatcctcagccctgactttccgtagatatgtgcaaaatgagtaaattactcacctcgggccagatccaagttttacccaacagaaggggcaccggaccaagaatgaaccaactcacatggccatgtccggcgcgcacaatcacacgccagcacacagccacccaatttcttccgcgaatctatctggcactctggagagagggggaaaagcgttttgagaaagccccgtcacccctccccttccttcttgccgtgaaatatacgaattcatttttattacgagccgca

SEQ ID NO: 43339 - DNA, 444 bp, Homo sapiens
  chr6:108487077-108487521
  hyper
cgcctgcattttctttgggagccgcttggaggttcattaatatcattagcatttaaccccctccctcttcccatcccctccccgcacatggctgacgtcagaccccgccaggagttgggggaaaagctaagtgggccagggacgccctattcccctccccgcggctgcctgtcagagcgcttctggagatattacaggggacccagcccgcagcgacaggcacaaagtcacggggtaatgaacttcggggacccttcgccgctgcgtgcgcggctctccccggaaacccggacctggccgcctcttccctcggaagatttcccagcaatctagttttcccactctgcgcttgggttccggcagcgcggagcccgtctgcctctgagactgcggtagtgttttccttctttccttgggagaccagcggtcggcagagattgccca

SEQ ID NO: 43340 - DNA, 792 bp, Homo sapiens
  chr6:108487805-108488597
  hyper
cgcccagggagcagcgcagcgcgcgactgacacccacctgtcccgcccaggagccttgcaggctggagggcagctggagagcggcggcgcccggcggcgaggcgggcgctgccggccgggactcgggcagcgcccaccaaccgctccgccccgggacagccagcatgagcaagccagccggatcaacaagtgggtacctctcgggccgccgtggggcctaggcgcgcagcctggggcgagcgagcggggaggctgggggaggtcctgcctggagcgctgcgaatctgagcccctgagagggattccagcgggcgtgtgcgttcggcccagacctgtagaccgtgagttggagcatttcgtggagaggggagagccgtttcgttgcctctggattgcttgatcccccctgtctggtgcggtgagaaggttacgacccgcgcagcccaccagtcggatgagttgtctccatttagccgccaggtgctggatgggggggccatgggggcgggaactgggccgcagctccaggcggtagcacaataacacactcgctcaaaactccgagctccagcgcgcaaaagcaactctgtgcaaagcggattttgaatggaatgctttgcaccccgtttctagctatttcaaataatcctgcaaactgggaagcagaaacaatttaaaagtcacattttccttaatcctaaatccgcgtaggtcataactggggaatttaaagtatggcgaaccactctagcaaagagaggaccaaatccctaatcccaaggacttttcgag

SEQ ID NO: 43341 - DNA, 147 bp, Homo sapiens; identical to SEQ ID NO: 5055
  chr6:108489661-108489808
  hyper

SEQ ID NO: 43342 - DNA, 179 bp, Homo sapiens; identical to SEQ ID NO: 5056
  chr6:108490066-108490245
  hyper

SEQ ID NO: 43343 - DNA, 218 bp, Homo sapiens; identical to SEQ ID NO: 5057
  chr6:108490296-108490514
  hyper

SEQ ID NO: 43344 - DNA, 15 bp, Homo sapiens
  chr6:108490537-108490552
  hyper
cgaggaggggccccc

SEQ ID NO: 43345 - DNA, 166 bp, Homo sapiens
  chr6:108490834-108491000
  hyper
gcggagctccagacccggttcctgagcgaccaggaactcccttgggcgcagtgacaggcccgaaggagtggaggacaagacccgctgtgcccttgcctggccctctccagcccctccctcccacagcacaatctcccctcccgccctgtgggaggggggcgccgag

SEQ ID NO: 43346 - DNA, 149 bp, Homo sapiens
  chr6:108491107-108491256
  hyper
cgcggggttgtaattacccggccgagcctggtcgttaccgaacaccccctcacccccaagcacggtcccccgcgctctccttcccccaccccctccacctgagacgagtctgggacccacggtgcaagctcgcccggacgcctcgggtt

SEQ ID NO: 43347 - DNA, 391 bp, Homo sapiens
  chr6:108496966-108497357
  hyper
gagagagagccccttcctctgcggcgcaggaagccggagggagcgtccaacctgttgaacttgtgtattgacaagttgtcaagctcggcaggccgaagattgccctgaattaatttgtttgtttaaactgttggtggtaattgtcacatctcccctgcctttctccagcatactcggagacgggttctccctcgttccattccctagcaatcccggggctcgggtcctttcctcctgcggccctcggaggccaaaagctatttctgtgggggcggggcctgcgggtagggaggcttgttcttggacggagctggaaaagtctgcgcagaaacgaggtgtctggcgtgcgcgacgctccctctcttttggatgggggcgaggatacctggct

SEQ ID NO: 43348 - DNA, 92 bp, Homo sapiens; identical to SEQ ID NO: 5062
  chr6:108582546-108582638
  hyper

SEQ ID NO: 43349 - DNA, 13 bp, Homo sapiens
  chr6:108880344-108880357
  hyper
ttttggtgcctga

SEQ ID NO: 43350 - DNA, 30 bp, Homo sapiens; identical to SEQ ID NO: 5063
  chr6:108881003-108881033
  hyper

SEQ ID NO: 43351 - DNA, 30 bp, Homo sapiens
  chr6:108881440-108881470
  hyper
cccgggagacttggcgcttcccgacctgtt

SEQ ID NO: 43352 - DNA, 30 bp, Homo sapiens
  chr6:108881855-108881885
  hyper
gggaggcactagagcgggcccgagcgaaac

SEQ ID NO: 43353 - DNA, 184 bp, Homo sapiens
  chr6:108882163-108882347
  hyper
tcctgttcctgggaggcgggcgcggcaggactgggaggtggcggcagcgggcgaggactcgccgaggacggggctccggcccgggataaccaactctccttctctcttctttggtgcttccccaggcggcggcggcggcgcccgggagccggagccttcgcggcgtccacgtccctcccccgct

SEQ ID NO: 43354 - DNA, 30 bp, Homo sapiens
  chr6:108882665-108882695
  hyper
cggcacgctgggctccgggctgctccttga

SEQ ID NO: 43355 - DNA, 6 bp, Homo sapiens
  chr6:108882924-108882930
  hyper
agctcc

SEQ ID NO: 43356 - DNA, 75 bp, Homo sapiens
  chr6:108882975-108883050
  hyper
cgttgcgtgccctacttcaaggataagggcgacagcaacagctctgccggctggaaggtgcgtacccaccccggg

SEQ ID NO: 43357 - DNA, 30 bp, Homo sapiens
  chr6:109169469-109169499
  hyper
ggcaaattgctaaacgaaaagcggacaccc

SEQ ID NO: 43358 - DNA, 30 bp, Homo sapiens
  chr6:109331427-109331457
  hyper
tcaatctctgaaatcggatgaggaacttgg

SEQ ID NO: 43359 - DNA, 30 bp, Homo sapiens
  chr6:109415592-109415622
  hyper
agtggatatcctcacgttgtggagctgtca

SEQ ID NO: 43360 - DNA, 35 bp, Homo sapiens
  chr6:109416222-109416257
  hyper
cgcccaggcagacgcgacccgccgaggcaaagcct

SEQ ID NO: 43361 - DNA, 30 bp, Homo sapiens; identical to SEQ ID NO: 5065
  chr6:109704006-109704036
  hyper

SEQ ID NO: 43362 - DNA, 30 bp, Homo sapiens
  chr6:109776225-109776255
  hyper
cccccctccctgatcgacccctaccccgcc

SEQ ID NO: 43363 - DNA, 54 bp, Homo sapiens; identical to SEQ ID NO: 5066
  chr6:109776897-109776951
  hyper

SEQ ID NO: 43364 - DNA, 430 bp, Homo sapiens; identical to SEQ ID NO: 5067
  chr6:109777176-109777606
  hyper

SEQ ID NO: 43365 - DNA, 30 bp, Homo sapiens
  chr6:109804088-109804118
  hyper
aagctgcgtggggccgccagacacactagg

SEQ ID NO: 43366 - DNA, 30 bp, Homo sapiens; identical to SEQ ID NO: 5068
  chr6:109805059-109805089
  hyper

SEQ ID NO: 43367 - DNA, 30 bp, Homo sapiens; identical to SEQ ID NO: 5069
  chr6:110012080-110012110
  hyper

SEQ ID NO: 43368 - DNA, 30 bp, Homo sapiens
  chr6:110012708-110012738
  hyper
gtaccccctcgcggcggggcgcaggcggga

SEQ ID NO: 43369 - DNA, 30 bp, Homo sapiens
  chr6:110299603-110299633
  hyper
ggagctcagcccggcgccccgcctcggcgc

SEQ ID NO: 43370 - DNA, 46 bp, Homo sapiens; identical to SEQ ID NO: 5070
  chr6:110500691-110500737
  hyper

SEQ ID NO: 43371 - DNA, 96 bp, Homo sapiens
  chr6:110501272-110501368
  hyper
gggggacacgcccccgttccgccccctcgttgcaaactacacttcccattgtgccctctcgcgcttcctgccgcgctgcacgctgggagtgcagga

SEQ ID NO: 43372 - DNA, 30 bp, Homo sapiens
  chr6:110501595-110501625
  hyper
gcctcttcttcttccgccctggcagggtct

SEQ ID NO: 43373 - DNA, 719 bp, Homo sapiens; identical to SEQ ID NO: 5071
  chr6:110678980-110679699
  hyper

SEQ ID NO: 43374 - DNA, 30 bp, Homo sapiens
  chr6:111195961-111195991
  hyper
aagggcggtgctcacgcagcgctctcgctt

SEQ ID NO: 43375 - DNA, 30 bp, Homo sapiens
  chr6:111279597-111279627
  hyper
ggtttccttgttttcgcctttatcccttct

SEQ ID NO: 43376 - DNA, 30 bp, Homo sapiens
  chr6:111279875-111279905
  hyper
ccaataagctgcttcgcctcggagctgaag

SEQ ID NO: 43377 - DNA, 30 bp, Homo sapiens; identical to SEQ ID NO: 5072
  chr6:111303113-111303143
  hyper

SEQ ID NO: 43378 - DNA, 847 bp, Homo sapiens
  chr6:111409007-111409854
  hyper
agccgctcggccccgcgcccacgggggccgctccgccgcccggcccgggaccctcggacagccccgaggcggctgtcgagaaggtggaggtggagctggcggggccggcgaccgcggagccccatgagccccccgaaccccccgagggcggctggggctggctggtgatgctggcggccatgtggtgcaacgggtcggtgttcggcatccagaacgcttgcggggtgctcttcgtgtccatgctggaaaccttcggctccaaagacgatgacaagatggtctttaagacaggtgaggcgcggcgcccgccgaggccagcctgggcgacccgcgtggggcccccgagcgcatcccgcgtgtgggctgtgtctgcctccgagtgtgcatgtcggtgggtccctgtgccagagggtgcgagcaggggggtctttcgagttgcagacagagcctgccgcttctggggcctcggggtgcccgtctttatatggaatccagctgcagagctgtgtgtttgcaagcaggtcgcagaacttacttgccgagatcgtcctcctttcccctcagcagagcagacgctaacagtccacaggagcccttccttttattgtttgaaaacaaacagaaccccagaaccttcaaccccagtcatcgccctgtcatttttgtggtctctttcgtgactatgccagttatgtagttcttcacctgcctccctgggccgcagaggggtgtgcgtatgttggcggggcggggggtggagtttggaggaatgaaagagatttgtacgaaggtcactggagttccaaagggggccctgcaagagtcacggttccgtgcgttcccgtcc

SEQ ID NO: 43379 - DNA, 30 bp, Homo sapiens
  chr6:111803665-111803695
  hyper
tggagtgcggctcccgctcccggccgccac

SEQ ID NO: 43380 - DNA, 30 bp, Homo sapiens; identical to SEQ ID NO: 5074
  chr6:111804029-111804059
  hyper

SEQ ID NO: 43381 - DNA, 30 bp, Homo sapiens; identical to SEQ ID NO: 5075
  chr6:111804789-111804819
  hyper

SEQ ID NO: 43382 - DNA, 30 bp, Homo sapiens
  chr6:112194428-112194458
  hyper
gcggcgcgcccgggcgggagaggacgcgcc

SEQ ID NO: 43383 - DNA, 30 bp, Homo sapiens
  chr6:112194682-112194712
  hyper
gagggggcggggcgcgcctcgagagtgaca

SEQ ID NO: 43384 - DNA, 30 bp, Homo sapiens
  chr6:112195148-112195178
  hyper
aactgaaaagagtacggagcaaagtagaat

SEQ ID NO: 43385 - DNA, 481 bp, Homo sapiens
  chr6:114176582-114177063
  hyper
tggagggctaaggacgcgtctgggagaaaatctgaaagcgagctagcagtcaccccaatttaaaataggagggggatgcggaggaaggggcatgattcacgttgggggtggggggaaatcaagagccttaaatgggcttttgggaatcgcctggatggtggtgtcggatcagcccagttggcttttcaagttggaactgctaatacaagggatttgcgtccatcctggcggctggggtcgtgggccaggccagcgggctctcttaagggtaataacacgtttgctggcaagatgcatttctacggaaacgtctttacatcagctctggggaatatgaccatggtcgaataatgcatctgaaggaactggacagtgagaagacgaagcttcacgtaacaatgttcagcttggtgatttttaaagcaacgcttgaacaaagagttactggcttgaaccaaccgtctttttcactcagagtgtg

SEQ ID NO: 43386 - DNA, 214 bp, Homo sapiens
  chr6:114177461-114177675
  hyper
tttctccttagaactgcaatccggtttagaatgtcatcgttgctgctgcctcccttcctttcaggagcacattcgcctgcgtgcgcactcacacacacgttcaaaaagagtccattcgattctggcagtaggctgaaaacgatccatattgacgcgaataacatcccaactgtaaatatggattcgtctactcgaggctgtgtctcatttcacc

SEQ ID NO: 43387 - DNA, 30 bp, Homo sapiens
  chr6:114178490-114178520
  hyper
gccgcgtcagcgcccgcgagcccattcatc

SEQ ID NO: 43388 - DNA, 31 bp, Homo sapiens; identical to SEQ ID NO: 5077
  chr6:114180217-114180248
  hyper

SEQ ID NO: 43389 - DNA, 53 bp, Homo sapiens; identical to SEQ ID NO: 5078
  chr6:114194489-114194542
  hyper

SEQ ID NO: 43390 - DNA, 30 bp, Homo sapiens
  chr6:114292434-114292464
  hyper
gggtgaacaacctgcgcaaggcggcgccat

SEQ ID NO: 43391 - DNA, 200 bp, Homo sapiens; identical to SEQ ID NO: 5079
  chr6:114662112-114662312
  hyper

SEQ ID NO: 43392 - DNA, 547 bp, Homo sapiens
  chr6:114662742-114663289
  hyper
tgcatccatcccgcgcgcgcgcgcgcgtgtgtgttgggtgggaagagatgcataaagtggggctgtgaggggtgtggggggggccagctgggaagagaaaaccccacccacatgttaacttagcctttgcctgttctttgcctgccctctgcctgtcctctgctggggcctcgcaggcccccactgtcccaaagctgccctcgcgctccaaacagctccacagccaccccagaagtgaccgaacgcgaacccctaaactctggcgagcgcagtaaacgcgtgttccctttctccctcaaagagagcgctacccagcgctctgggagagactgagagagaaacagacaggcaggctgactgacaccttctgtctaattttaccccaggaattgcccccgccgtttctcatctcgcactagtttaacctctggtcctaagcaaacctctcaaaagtcttccccaggcagcgcccaggagaaccgaaccccacaaagtgcttttttgctggcatcacccggatgcttccctttggcgatttgccccttct

SEQ ID NO: 43393 - DNA, 51 bp, Homo sapiens
  chr6:114663528-114663579
  hyper
accaacagggctgtgcgtggcgcgtgtgagtaagacgcgagcgggccccac

SEQ ID NO: 43394 - DNA, 30 bp, Homo sapiens
  chr6:114664828-114664858
  hyper
cagggggcgatcaccgcctagctgggaagc

SEQ ID NO: 43395 - DNA, 30 bp, Homo sapiens
  chr6:116422366-116422396
  hyper
ggtgccgtggggaccggcacatttacctca

SEQ ID NO: 43396 - DNA, 58 bp, Homo sapiens
  chr6:116575296-116575354
  hyper
tgtcagggcggtagcgtcgtaacatcgcgcgagaactctctgcgcggttgactacgct

SEQ ID NO: 43397 - DNA, 30 bp, Homo sapiens
  chr6:116601338-116601368
  hyper
tgtaaaatcacagccgtaacagtgcctgct

SEQ ID NO: 43398 - DNA, 67 bp, Homo sapiens
  chr6:116691811-116691878
  hyper
agccaaagaggcctggcgggcgggggtgcgggtggagtccgggccgggtggcgtggaaggccgagca

SEQ ID NO: 43399 - DNA, 30 bp, Homo sapiens
  chr6:116692907-116692937
  hyper
gggaggggaggaggcgggggcttgactcac

SEQ ID NO: 43400 - DNA, 30 bp, Homo sapiens
  chr6:116937905-116937935
  hyper
tgagcccttggaggcgaagcaggggccaga

SEQ ID NO: 43401 - DNA, 30 bp, Homo sapiens
  chr6:116989642-116989672
  hyper
acaagccaggcacacgaaactagcaggcac

SEQ ID NO: 43402 - DNA, 89 bp, Homo sapiens
  chr6:117002110-117002199
  hyper
cacacggaggtctacgggccgcagagtacctacagcatggccaccgcaagcgcaactaaaatccagggcttgtcgcaggcacaggctcc

SEQ ID NO: 43403 - DNA, 30 bp, Homo sapiens
  chr6:117086464-117086494
  hyper
acagaggatcagcgcgccctcaagccgact

SEQ ID NO: 43404 - DNA, 30 bp, Homo sapiens; identical to SEQ ID NO: 5081
  chr6:117086916-117086946
  hyper

SEQ ID NO: 43405 - DNA, 283 bp, Homo sapiens
  chr6:117197937-117198220
  hyper
ttccctgtcccaggcgtgcagagtccacgccgcgcggccaggtgccccaatagtgtacctgaaagtagggatggggccagttacagctgcactttccctgcagaagacagtgagccttcccgggatctttctgggagctctgagtgtgaaaacggtcctccggccagcgcaggttgagagaacgggaaggagggggaagctgtgggcgcccagggcgtgacaggcgcaggtgagaaagtgagtttcgcgggagcatctgccgggaccgcagacaggtggagaa

SEQ ID NO: 43406 - DNA, 380 bp, Homo sapiens
  chr6:117198339-117198719
  hyper
cggccccgggtcccagccccgccccgccccgccccgggctggggctccgctggggaaccggccgagcggcgcgcgcggaggtgtccggcggccaggaggatggccaaggtcccggagctggaagacaccttcctgcaggcgcagcctgcgccccaactgtccccggggatccaggaagactgctgtgtgcagctcctgggcaagggcttgctagtctatccggaagaaacagtgtacctggcggccgaagggcagcccgggggcgagcagggcggcggggagaaaggcgaagacccggagctgccgggggcagtgaaatcaggtgagtgctctgccgcatccggagctgggaaggggacggggacgtattctaagaaggg

SEQ ID NO: 43407 - DNA, 924 bp, Homo sapiens
  chr6:117585719-117586643
  hyper
ctccaaaatgaaacataccatcgcagctggtattaccggctgaataggcagcaaaagacctctctgtgtacgggtcctagtatgcttcttcttagcgccaacgagtccttgtccccaaagttgccaaaactttaaaggaccccggccaaggagaccccagcatgaaaagccagacatccgaggccgggtaaagcctcctggactcctcgaaagcagctcacaccgggagcagccggaagcgggcgcgatctatgcgaagctaacgggttccggtggagaacatcaaagagaaaggagcaggatcgaactttagaggggcagaagggcacggcccaagagagcagaattggggtgtgggacaggcggcgggaggaccaggttagagggagcgaaaggaagtggattagaggacagcggttacaggtttcagccactgccatttccccgcagaggtagctcttctgcgccctggaggggtacccggactcccacatcctgtctgccacgacccggactccctaggggattccaagggacagcaccgtcctccccatacatcatcaggaaccgaaagcagagaatttgccccacctcggcacttctggaagcacccactcaactacagtatgagacaagggctttcctaagagacctttctccaactttctttctctgcgtgtatgagcccggatcccttcgtccccgcctccttctctctctctctttctctctctctcctattttgtcctgggagattcctactcgcggtgcgaagcctcggatccgctgggaaccgcatagtctccggcacccttggccgcatgcttgtcagaggtgggccccgggaaacacactcgctgcccctccaacaagcgtccctcgctccccattggccccccggtccccgccccccaccgccccctc

SEQ ID NO: 43408 - DNA, 384 bp, Homo sapiens
  chr6:117586846-117587230
  hyper
cgccgcccatgcagcacccctgagctccggggaaggagagttaatgaaaaaacacttaaccgtctccgctgcggagagtcatgagctgtctggatgttatgtaccaagtctatggtcctccgcagccctacttcgcagccgcctacaccccctaccaccaggtacgtgtctcctctggggactttgggaaggagtgcgcgccccccgtttgcggcggcatggcctgtacgccaaggtctgctgtgcctccgcgcgtctcgggcgtccgaccacgaccggcgcagccgggatgcggggattgccggagccgcccccagttggtagtgcaattagctaacccctttagctcgcctgtttgctctcgggaagcagctaagccctgct

SEQ ID NO: 43409 - DNA, 116 bp, Homo sapiens
  chr6:117587539-117587655
  hyper
agaattcatttcaaagagcaccgcgcagttttataattttttcctttgcgaagttctgggagcattatccggagtgcgaatgacccggcagaggcgagcctgatagacaatacttt

SEQ ID NO: 43410 - DNA, 396 bp, Homo sapiens; identical to SEQ ID NO: 5085
  chr6:117591200-117591596
  hyper

SEQ ID NO: 43411 - DNA, 690 bp, Homo sapiens
  chr6:117591683-117592373
  hyper
cgcctccccggccggcctacagactgctccttcccgatgagccagcgcagcttccccgcctccttctggaatagcgcgtaccaggcgccagtgcccccgccgctgggcagccctctggccaccgcgcactcggagctgcccttcgccgccgccgacccctactcgcccgccgcgctgcatggccacctgcaccagggcgccacggagccctggcaccacgcgcacccgcaccacgcgcacccgcatcacccctacgccctgggcggcgccctcggcgcccaggccgccccctacccgcgccccgccgccgtgcacgaagtctacgcgccgcacttcgacccgcgctatgggccgctgctgatgccagccgcctcggggcgcccggcccgcctcgcaaccgccccggcgcccgcgcccggcagtcctccctgcgagctctccggcaaaggcgagccggcgggcgccgcgtgggccgggcccgggggacccttcgcgagcccctcgggggacgtggcccagggtctgggcctcagcgtggactcaggtaagcagaggaagaagtttggtctccgcggagccgctcggccccgtacccgaccctgggctgtgcctagaccccttaatcctccttggagaccttgaattctgtggcccaaggatctgcatgccacggtcgtgtttccactgata

SEQ ID NO: 43412 - DNA, 821 bp, Homo sapiens
  chr6:117803612-117804433
  hyper
gaaggcaaggaaggagcgcagcagggcgcgccagatacgtggaggggagcgcgggcggcgcctcgctcgcctccggcttcgccgtcggtcactgcctgggaacgcgacttcctcctctaggggccgacgtgcggggcggggcggggccgggcgggagacgcccccgcagggctgggctgaaagccgccccaatgggattcggtgcggggcagcgactgcgccccgtcccggcgccgcgctcgtccgcagaggaggcggcccggcccgggcagctgcggctcgggatccgtcgaggggaggccgagcttgccaagctggcgcccagcggggtcatggtgcccggcgcccgcggcggcggcgcactggcgcgggctgccgggcggggcctcctggctttgctgctcgcggtctccgccccgctccggctgcaggcggaggagctgggtgagtggagcgcgtccggctggcggcgggacccgaggcgccaggggcgggctgagggctgcggggcgggccgggccgggccgagggctacggggcgggccgggcctggggggacggagcgcgggaggaagtcgggctcgccgcctgccatccgcggagtccggctctacccgcggggctgggggtgaagtaggttactgcattccttgtcgctcccccaccaaactccttccttcccccaaaaccagagaattaacctggcgtctctgcactttctctccgccgccccccagcccatttcacttagtttccagacttcctgactctgctggccccgtgagaagtgacctgaccccgagggtcgccttaggggacag

SEQ ID NO: 43413 - DNA, 298 bp, Homo sapiens
  chr6:117804487-117804785
  hyper
cggcgctgggccctgccctccctgccgtcgctcctcccgcgcggaattggaatcccggcgtgtgcgttcggggctcgtgcggaatggccggggcacgtttgccgaggttggccttggacgctggcgagcaggcggtgctgccacctcctctcgagtgtcctgctggcgccgcaagttggaatcgtgtggcttcctgtgtatttgagccggtagactctcaaccaggctgctttttctctggagctggtctttgacttggagttagacctaattaacccacaaccgagtttaccctctg

SEQ ID NO: 43414 - DNA, 30 bp, Homo sapiens
  chr6:117996630-117996660
  hyper
tgtactactgggggcggggctgccaaggga

SEQ ID NO: 43415 - DNA, 186 bp, Homo sapiens
  chr6:118228045-118228231
  hyper
ttgggtttctaatccggggccggcacctgtctcggcgtcctgccgctgtcccaggccggtggtgctggattccgcggcgcttgggcagaaacgaggaatccccgccaactccacagggaggatctattcccagcccccttatccccctaaaaaacacccaaaccaaaacaatcaccacaacctaga

SEQ ID NO: 43416 - DNA, 1066 bp, Homo sapiens
  chr6:118228323-118229389
  hyper
cgcccgcgccccgctctgccgccgccgccgccgccgccgccgccgccgccggcgcccccgcccggctctccgggttcaccctcggtctctcactccgtgagacacagacggtagctttccgaccgagcggggcacaggctgaggcggcgccagcacaactgccgccgcgcgccccgaggagacccgggcacgaggaaacaaggagaaatcaggactccttccccggaaccgaccggcagctccgcgcccccgcgcgacacccttcgcagccacttcgcggggcgggccaggacttggggacgcggctcgggaagagccggggcgggcggcggcggcggcggcacgggcgcgagggtgcgcgcactgggactggagaggagtgagtggcgggctgggcggcggcggccgtagccgcgggtgcctccccgcctcaccgcttcgcaggcagcaccgcctcccgggccgcggccgcccggccgggtcctctgcgcgttcccgggcccggaaccggcacacgatgcacccggctgcgttctgatcgccgccgcgcctcagcctctgccgcgatgatcccccctgagcagccgcagcagcagctgcagccgccgtcgccagccccgccgaaccatgtggtgaccaccatcgagaacctgccggccgagggcagcggcggcggcgggagcctgtccgcctcctcccgggctggcgtgcgccagaggatccgcaaagtgctgaacaggtgagcggcggcgccgggcgagggcgcggggggcgggggctgcgggcgcccggctccgggtcccctccgtccctggggcggcccacgggtcctttgggacggggttgcggccggaggagactgaggagatcgggcgacgacgcgctccgcgggcgcagagaggccgcggcagctttgtcccggcgcagggagccctggagtggtggagctgcagctggtccgaggcgggagttcggggagaggcggggtttttcgtacctagccaccctgtatgtgtgtccgcactcacaccctccatacgcgtgccgcctcacttccctttccctc

SEQ ID NO: 43417 - DNA, 156 bp, Homo sapiens
  chr6:118229416-118229572
  hyper
cggggggacgcggggacccggccagggctgaggagggaggcgcggggctgcagagatggcgtggaagtcctgggcctcgtgctgtcctccgccccgccccgcccgggggcttcgaccccttgccgggggaatggggtcgcagcgacagcctagcag

SEQ ID NO: 43418 - DNA, 131 bp, Homo sapiens
  chr6:118229616-118229747
  hyper
cggactcttcctggctgggagcagcgaagagagggctagaggcctggaacagacccagcaaagtgcaaaacattgcgggcagggtgtgagccggcggcgcccagttattccgaagcgcccatgccggaggg

SEQ ID NO: 43419 - DNA, 80 bp, Homo sapiens
  chr6:118241228-118241308
  hyper
gctctttgtgacgccgggttcccggggctggctggagtctctgtacctatctggatcctgctgcaggccggggaaacact

SEQ ID NO: 43420 - DNA, 280 bp, Homo sapiens
  chr6:118241394-118241674
  hyper
cggggcttgggtggtggctggaaaagggagaaccaggaggcgggggaggggcgctcggactacagaggaccggacgggggcgagtgttccgcggggtgtgtggagtaagagctgggacggacctttgtagctttgcgaaattaaccgtttttcctccacaactgccagctcggcgaatggccttcaagcccatccaacaggagataatctgtccttggaactagtgcaagtcagtttttaactacttgcggagaaagtctgaaacgtcacaaccaaccaa

SEQ ID NO: 43421 - DNA, 30 bp, Homo sapiens; identical to SEQ ID NO: 5093
  chr6:118971609-118971639
  hyper

SEQ ID NO: 43422 - DNA, 30 bp, Homo sapiens
  chr6:118973062-118973092
  hyper
cctctgtgaagacacgtggaagacctgccc

SEQ ID NO: 43423 - DNA, 30 bp, Homo sapiens
  chr6:119255786-119255816
  hyper
ggctgccccaggggcgcctggcaaacgtgg

SEQ ID NO: 43424 - DNA, 49 bp, Homo sapiens; identical to SEQ ID NO: 5094
  chr6:119671065-119671114
  hyper

SEQ ID NO: 43425 - DNA, 37 bp, Homo sapiens; identical to SEQ ID NO: 5095
  chr6:119671586-119671623
  hyper

SEQ ID NO: 43426 - DNA, 30 bp, Homo sapiens; identical to SEQ ID NO: 5096
  chr6:121506912-121506942
  hyper

SEQ ID NO: 43427 - DNA, 30 bp, Homo sapiens
  chr6:121757912-121757942
  hyper
accttccctctgctcgaacctgtaacagaa

SEQ ID NO: 43428 - DNA, 80 bp, Homo sapiens
  chr6:121758227-121758307
  hyper
gggccggacgggcgcggggcgcctcctgccatcttagcgtctgccgggatccttcccgcgccttcgctgcccgaaccagc

SEQ ID NO: 43429 - DNA, 507 bp, Homo sapiens
  chr6:121758638-121759145
  hyper
agaatgaggcggggcggctcaaggggaaagggcagggaggagagaccctcgggaagctgatgacgcgtccggggcaagtcagcctgtttccgagacgcgcgcctcacggtcgtagcagcgctgcgcccaccctgcccctttagtgacccagccagcctttgctgggggtttctgataacgctcatcgataagctctccttgctcccaaaaggcgtgcttctctttctctccaggtacaaagtaggggtgggaaggggagagctacacaatgttgtaaaaagaagcgtggctttatttggaagacggttgaatttcttttgcttcctcgacccagttagtaacgacaagaaagatactgaatatcgccctccgaaaatcgggcgcatttgaactcggtgaaaagtgtccctgtgaggaagcctaatgtttacttttgtgcaaggataactggaaattaaagcgtctagtaatgcagagatttcattaagcgagcgctcccctcccccc

SEQ ID NO: 43430 - DNA, 30 bp, Homo sapiens
  chr6:122792858-122792888
  hyper
gcacagccccaggacgctccccatctccac

SEQ ID NO: 43431 - DNA, 30 bp, Homo sapiens; identical to SEQ ID NO: 5098
  chr6:122931205-122931235
  hyper

SEQ ID NO: 43432 - DNA, 30 bp, Homo sapiens
  chr6:122931590-122931620
  hyper
gctagagcccgagtcgcagctccgggccgc

SEQ ID NO: 43433 - DNA, 30 bp, Homo sapiens
  chr6:122932070-122932100
  hyper
gccccgggtagtcacgagcggccgcggggt

SEQ ID NO: 43434 - DNA, 30 bp, Homo sapiens; identical to SEQ ID NO: 5099
  chr6:122932475-122932505
  hyper

SEQ ID NO: 43435 - DNA, 68 bp, Homo sapiens; identical to SEQ ID NO: 5100
  chr6:123110666-123110734
  hyper

SEQ ID NO: 43436 - DNA, 781 bp, Homo sapiens
  chr6:123317109-123317890
  hyper
ttgcacacaaagggcgaagagaggggcgtggggaggctggaaagcatggttgccccgcctggcccggcgacgcccgctcagcagcctgctgaggagtggggacgaagagcagcctaaacttagggctcgggatatttcgatgccacccaaattgccgtcctaccccaacgaggcagggaaaggagcggagcgcgcgcgcgagctgagtgagtgcttacgtcgcagcgagatctgtgctgggataattagagaggagttgggctgagccgagtcctctttcagcagcagcagccggagccgccgccgcagcccggtggggcaaccctgactcggaccgctcgggagagccccaggagaggccagcgccgcgcagcagccgccccgctgcgcccacctccccggctgctcccggagggctcacaaaggcggtggccgcccgagtggccttctccatccaggcgttcgcgtcctcctccccaccttctctcccgaaggcgaaaatggcagggccaggcgagaacctgggacagcggtggccctagccctgcgatcctcacccctcctgctaggagaggctgcgggctgcccgcggacgatgtggccgcggctgctcccgagcgcatcttcggcccgggtccccgccgccacccctcttctctgctccttccatcccgcccagaggagttgatgccgctgtcgccgccgccgccgctgctgaagccgcggctgatggatgccagggagtgccgcattgcttagcgaccccgcctctgggtttgct

SEQ ID NO: 43437 - DNA, 30 bp, Homo sapiens; identical to SEQ ID NO: 5103
  chr6:123366433-123366463
  hyper

SEQ ID NO: 43438 - DNA, 30 bp, Homo sapiens
  chr6:124123916-124123946
  hyper
ctgcaggtagcagccgcttcacagctttca

SEQ ID NO: 43439 - DNA, 1119 bp, Homo sapiens; identical to SEQ ID NO: 5104
  chr6:124124162-124125281
  hyper

SEQ ID NO: 43440 - DNA, 634 bp, Homo sapiens
  chr6:125282855-125283489
  hyper
tatttctctgaactcgacatcctaaatagccagcgtttactaattccagagctgagtgtagttttgtaggaagttctactgaatgcggagaccaaaggggagcctgcctgctctgagggttttgttgaggctgagtgtgaactccgggcgagaaagcgcatctcagctcttagatcacacccactcagggtgtgcgtgtgtgtgtgcgcgggtgcctgcgcgcgtgtgtacgtgtggggaggtgtgcgccaaaggggtggggtgaggggcggcgaggagggctgtaggtgaagcgcggggagagggaggtcgcccgctccggcctctcccccaggggccctgcggctggccagcgctccggctgcacctcctggtgcgcgccgcggcggcgccacaggcccctcgaccctttgaccaccgccctcgggccgcgcgtccggcagccgggaccggtgatggcgcgggactgacggccgtctcctcccagacccctctgtcccgcctggggctcgctggggctgcggcgccgccccgagctgcatgtggggcgggcgcgcccgagcccagagcgagcggccctcggcgcccccgaggcggtgccccgccgcgccagagtacgaggaggagcggcggg

SEQ ID NO: 43441 - DNA, 774 bp, Homo sapiens; identical to SEQ ID NO: 5105
  chr6:125283600-125284374
  hyper

SEQ ID NO: 43442 - DNA, 419 bp, Homo sapiens
  chr6:125420730-125421149
  hyper
ccactgatggctccgcgccgctcagttgatcccttcccactgcacggagcgggagactaaaggcccactgcccatggctgcgaaaaccttccttcgggaacgcggagctagtgcacgggggcatgttcttcccccgcagccctggcaagcagaggccggcggcctgtggcgcggggcagttgtgctggctgccgggcggggctgctctgggtctgggtgcacggagaggagcgcggagtgaagcgcacggtgcacactgcggggcgctgcttgtcacctccctgcccctccctctgccctcccccgctgtccggagcacagtcccgggagggcggatgtcccctgggaagatgcgcgaggagagcgactgggaggcagctagcagcacctgcgtgtgggcaacacgacccgaggctgtc

SEQ ID NO: 43443 - DNA, 592 bp, Homo sapiens
  chr6:125474808-125475400
  hyper
gggagtgggtgccttccgccggctgtacagagcgccggcaggtggcgcccagcggcgagcttgttccagcttggtttgggccaggtggactggaaggggcggaggtaaccagaagcggctagtggcggctgcctgcgtccccaaccccctccgcgcagcgctcgcgacacgcgtgccaggagtgggagcgagcggcggggccagctgcgttctgagcctgggcgcagctgccatctgctctgggaagcaccagggtgtccccgccgccctcagctcgaagtcagccaccatggaggcgcaggcacaaggtgagtggtcgccgatcgccccgagagtcaggtcctggggcgcgcataaaggctcttttcctgcaccacctaacttcgctctcggacagaacagattggtgccgtgttgcacatccagaactccactcccacccgcgcctttggtataatgcctgctgcccaaactcaggatttgctgtgggtctggggatcaataaagtgacaggggatccgtaagtggagaggcccctcctcaggaaatgcgcccgtggaatgctctaccctcttccgcagccagtcgcccc

SEQ ID NO: 43444 - DNA, 252 bp, Homo sapiens
  chr6:125684543-125684795
  hyper
ccggtcccacgggacggctcccaggctcccgcctcacggcaagaaaaataaaggcctccccgcacagccagccagcttcgttcattcacgtcaccgacaaacactcctagcaggcgttgttaaacgttcagggagcgcccgggacctagccgaggccccctcctggctgtgccgcggggggatgcgcagcccctcgcaccgactgcgggaaggagagtgtgggtggccggcgcgcccggtccagctgccggc

SEQ ID NO: 43445 - DNA, 30 bp, Homo sapiens
  chr6:126010100-126010130
  hyper
gttgtgtgacgtgtgattaggcactgtttt

SEQ ID NO: 43446 - DNA, 170 bp, Homo sapiens
  chr6:126067851-126068021
  hyper
tccctttagatcggccgtcctggcctttctttcctaacggcatctcctttctaataaagtccctcgtatcttttggtgtaattaactcatggtacaaatccttcaaaaagaaaggaaagaactgcggtttgctctacgcgcggacatcttttcttcctaagccttccctt

SEQ ID NO: 43447 - DNA, 308 bp, Homo sapiens; identical to SEQ ID NO: 5107
  chr6:126068068-126068376
  hyper

SEQ ID NO: 43448 - DNA, 856 bp, Homo sapiens
  chr6:126068810-126069666
  hyper
gaaagttgtgacggtcgagcttgagcctggcgggccgcggagcgttcacctgcggccgggaggtactggcccagggcgctcggggcgggaggtggcaggcgaccggcgcgcgtcaggctcgtcacccgctggattgcggggccggagcggggacggggtctgggtcctggcccgccctcgtgcagccgatcggaggccccgaaccccgcgccgacccagccatccgccctgaggccgacaggggagctggggttcaccgacccccgcggccccgccgtcgggcgcggaccccatccagccccacctggccccgccgagtgtgtgctttgcctggggttaagtttcagaagccaagatggaacgattcgggtttctattcacaaggttattgaaggcatggcggtggggaccgcgcaaaagagatgagagtgtggggggaaaggggtttctgttctaataagggcttagcacgctggccgcaggtcctccgcgccgaccgggctccttcccgctctcccccgggccaaaccccgccagggtcccgtctttcccagtcgcgtcctttcctcttctccccgccccgcgccgggcttgtgtggacagagaacggagtgtcaaagggacgccctgggccgatccccaggaagctatgaatccctccgtgacggaggggtctggggatcgatagacggccctttctcagaggctctctccactactgaccaagcggccctgccaacgtgtggtttccggctggaccccaacccagccgccgccagtctcccggcgcccctggctgggtctcgctcagtccctgccctcgcagacgcacagcggggtggccagttcaaaagtc

SEQ ID NO: 43449 - DNA, 30 bp, Homo sapiens
  chr6:126070076-126070106
  hyper
attggaaatcgtaacgtggccgacagacct

SEQ ID NO: 43450 - DNA, 351 bp, Homo sapiens
  chr6:126071131-126071482
  hyper
tgagaaagtttgagtggtgggcgctcgcagagcgtgagttgggatggggcaagggatgtggattttcaccgtaggggtggagtagccaggatgggagacgccactgaaaggcagagcgcaggagttggcgagggagggtcctggctgtcacagttggacgcgcgaacggcagcgtctgggcgacaggcgatgtcccagccactgaaaccgtatttgggggcactttcaaaatagatcaggagaaaataaaaacaatttgatttttgatttttagagataccaaaatcacaacttgatttttggaggaattaaagcaacctgcgatgtcaaggctacgtaggttgaactttg

SEQ ID NO: 43451 - DNA, 30 bp, Homo sapiens
  chr6:126240224-126240254
  hyper
tgttgggaaaccaccgtttcaaaggtgaaa

SEQ ID NO: 43452 - DNA, 30 bp, Homo sapiens
  chr6:126661121-126661151
  hyper
tgatgaaaggaggacgcaggctctcaatga

SEQ ID NO: 43453 - DNA, 17 bp, Homo sapiens
  chr6:127439255-127439272
  hyper
agggtagttgcgcgccg

SEQ ID NO: 43454 - DNA, 243 bp, Homo sapiens
  chr6:127439321-127439564
  hyper
cggccaccgacagccgggtgcgcctagcttgaggccgcggagaggagccgaactgggatgggtggggggtcttcggcctcaacactgcctgccagccccagtgcgcccaagtctccccgccagagctgcccttctggaggggctcttcgcacgcactgctttccccattcttctggctggaattctccggccgtcactgcagtgtccagagatgctgcgctgtagacccgggaccccttaggc

SEQ ID NO: 43455 - DNA, 1124 bp, Homo sapiens; identical to SEQ ID NO: 5108
  chr6:127439838-127440962
  hyper

SEQ ID NO: 43456 - DNA, 689 bp, Homo sapiens; identical to SEQ ID NO: 5109
  chr6:127441030-127441719
  hyper

SEQ ID NO: 43457 - DNA, 73 bp, Homo sapiens
  chr6:127441978-127442051
  hyper
ttattcttggcctccgaatggtgtgtactctggtaactccccacccactctttcattccggcccggacgcgga

SEQ ID NO: 43458 - DNA, 724 bp, Homo sapiens; identical to SEQ ID NO: 5110
  chr6:127664171-127664895
  hyper

SEQ ID NO: 43459 - DNA, 195 bp, Homo sapiens
  chr6:127836080-127836275
  hyper
ttttgttggctctctccaactcgtggcgcatttcctgcagttgacaggcatcctcctcgaagaaagtgtccctcatctcgtccatctcggttctcagctcatcgatctcgttctgaggcggtgacaggccgcgtgtcaaaatcaaactcgcttccagcccttccgacacacaccgtacacaccccattccaattc

SEQ ID NO: 43460 - DNA, 1219 bp, Homo sapiens
  chr6:127836582-127837801
  hyper
tccctgccggtacacgccctaatcctcccaggcccactcttcccatcccccagccgggtccccccaccctcctcaccttgagagtctcgttttcctctcgcagcttctccatctcctcttgcatttcttcctgctcttggagctgctgcgggtgcggctgcgacgaagggggcgctgccgcctgcatgcccccgccgctcgcgctgccctctgcgctctgctgggggccctccgccgccgccgccattggggaggcggaggcgacggccagggtctcgcaaacggcaggggggccagacaccggggagctgcggctactgctgccgccgccgttcttagcgtgcatctgagccgcggccgccgccgctgccgcccgctccttcttgagatggaactggatgagctcagactgcagacatccttctttccagtagctccctccaccaccgctgccgccccccgcaacgccgcttccggagtttctgctgccggttcctggggttttgcccgcagaagaggaggatggagaaggggaggccccctccccgccgctgccgcccctctgctgagcgcgtacgcctttccctcgccagcccctgggcggcggcggctgcggagcgcccccctccctttccccggagccgccgccggctcctcctccttccccgccccctcctcccccttctccgagcggagggggttccccgagtttcgagggcacggactctagctcccgaggcggctcctcgggcggtccgggcctcctgccgcccaaagcggccagggtcgcggcgggggccgcttcagcaccagccacaggctggacagctcccggagcggcccctttgggcgccaggggcgtcgccttctcggccccacctccgcctcctcggatgctggcgggcggccccgtgcggctcccggtcttgttaccctgctgttgctgctgctgcagctgctgctgccgaacagaattgagtttagtgccggcccccactggggaccgggtggccgcgattgtctgtcgcagcgaactgtccctcggtctagcgggtgactgagctcgctgctgctttctgctgctgccctccgggtgcagacgagcctcagtggctgcagcggcgggagaagctgctgctgtggcaggggcagcgcccccgattggtggctgactcatggctatgaacctaccagatgcgatttggaagagcccattact

SEQ ID NO: 43461 - DNA, 58 bp, Homo sapiens
  chr6:127839929-127839987
  hyper
cggtaacgtcaagattcagctgcccccagagcgggtgacttcccggcggtccgcggct

SEQ ID NO: 43462 - DNA, 411 bp, Homo sapiens
  chr6:127840308-127840719
  hyper
agaggatcccaaaaccgctcgaacacggatgcactggtttcctgcaaagctttgtcctgggttcggtcattctccatcaattatttacttgagcttcttttccaaggaggcggactagaacagccttccgggcgtgactaacatctcctgatgcagctggctggcggctgctgggagttctctttgttcactcactttaattctcagtcgagctctacacgcggtgctccctccccacccccagcccgggcggagtcatcagatgtcgtttccacgaatagataatggttgccatgatgggacccaccgtcccacagacaaagggttcttgcgaagccacgactaatttagtgcaaaccgaaataaatatcggcccacagagatcctttacagaacggtttgccttcagta

SEQ ID NO: 43463 - DNA, 2313 bp, Homo sapiens
  chr6:128840107-128842420
  hyper
agggcctccacaacaacgtgagaaactgtcaggtacaaagtaagttatttgcgtcctgcggcttcagccaggagcgtggctgtcgcttttcccgtcttctccatcaccctctggccaccactgcgtctccatctgcaccgcgaaccccagcagcagatgcgctcgccagccaagcgaagctgggtaggttggccagaaaagttgtcaggactggcgggaggtagacaagtgctcgggagcccgctccccagcgtccacctggtgaaacttcagagcccccagaggagagaacgaaagaagcaaccaacctacacgaaggataacaaaactggaggggaacagagggcgggaccgggagagccagggttcacggacttctctgagcggcttgaccgagaacccccagggctacagcgagacgctccacttgtctccttttgggttctccggcagaaggcagacatttacagtccgcttccagccccaggccggatccggggagcgcggggccagagccccaggccggatccggggagcgcggggccagcctggcggtggttttgcccgaggagcgggctcccacgcgcgagtcaggcttcctccaccaggcgcccagacctcgatgcccatgaacgctcagagtgggtccttagaaccgcatttcaacacatcttacagggctccgccaacacacacacagaacatgctccaagcagtgcccgagcgcacagggcaagcccgggagcaacccagagctgggggaggagaaaaggggactccgggagggacggggaagtagttagacaatagtcaggggaggttattcccgggacaaaaagcacctggcaaagcgcgccgaggtcagtcccttcgaatctccacatttctgacaatggcttcccagggaatttgtttaaacacccaagtggcagacagcaacaaacccgcaccacaagcaacagagtgccgtcacgggagtcgtaactactttttctttctctcttccccactagcccggcgcaggccacgcgagacgccgaagccagcaggtccccacactctccggctagaccgtgccagcctgagccccgagcaagcttcggagaggaacaatgggtgccccgcgtcccacctggcacgaactctggggacagccctccctctaccctgtgttccccacccccggacagagagagctccccacgatccttgtccccagccctagcggggacctggctcacccctcgtgagcccaggactccaggcgttcgtcggggacgccccccggccactcacctgcggagaactggccttgggccgatcccaggagaggccaaggagagaggagcaagagcgccacaaaagcaggcagcgccgccgccgcagtcgtatccatgccgagtttgggagaagtttcaagcagctttgcaaagagctgccggggggatcgccgcgaaatccacgacggaggagcgggccgggcctcgcggggtgaggacggtgagaggacagccgcccgcccgccctttttccttcttcgcggtcgccaaactacctcaggggcgaaagcgtcgccagcgtcgccggccggccgcggcggcagctctccatgctcggcggaggctgctcctgttagtcaagagttactttgctcggggagggacgggggcggagccgggggtgacgtcgccccgcgggctccgggcgcttctgaggaatgcgggctcgggcgcggcgccgccaccgcctcctgccggagagacgcgcgccagccccggccgcgcgccccgcgccgcctttgttcgcagcctgggccccgccgccagccgctgctcggagggagcgagcgagaaaggggagccggcgcagctcgctgccctgttccagaactcagaatttgagaggcgagagttcggtaagccgtgcgaccagacgaccgaggacgcgcgcagagaaacccccgccgtccgaggagaggcgtcctggggttccgtcccaaggtggaggtccccccgagcggttgctgattgaaaggggagtgtggaagcgccctgaggaaacacccgcctgccttgaaaactccccgttccttattcttgtaataaggaataagacaccccacccccatcgaaaacttgtcccttattcatagaataaataaaacttgaaccagaataaacgatcagtaactttccagcgtgaacagctggcgtgtctcctttctggtttatttgtcattggccaagtatttggatttactctgcttcactgactttgcttgttgctctgaaaccctccggcccctttccagtt

SEQ ID NO: 43464 - DNA, 30 bp, Homo sapiens; identical to SEQ ID NO: 5116
  chr6:129204525-129204555
  hyper

SEQ ID NO: 43465 - DNA, 30 bp, Homo sapiens
  chr6:130031489-130031519
  hyper
aattgcactctgggcggctttggttaaagg

SEQ ID NO: 43466 - DNA, 380 bp, Homo sapiens
  chr6:130088392-130088772
  hyper
tcttccctaagcactttcttccgtgacacacctactttgtggcatctacgcgctcttcacggctaaccacaatcctgtcatttcggcttattcatccagcagctgccggaaggaccgggctgaagcgtggccacgaggagggggatacccgtgcgagcgctgagccggcagagcggctgcagcccacgggctcctcggacccccgctgctgcgccgctgcagctgaccgtgcgaaagccgcatgttattgggtagagatcagctttccaggaacaggcatcagctgtgcacgagcccggcagcatctcgagacaagtgctagccggtgttggtgcaaaccaaagcttgctatgtgctcagaaagcggccccagctactga

SEQ ID NO: 43467 - DNA, 30 bp, Homo sapiens
  chr6:130342031-130342061
  hyper
cagaaaaatgcattcgagatcattcagagt

SEQ ID NO: 43468 - DNA, 31 bp, Homo sapiens; identical to SEQ ID NO: 5118
  chr6:130342613-130342644
  hyper

SEQ ID NO: 43469 - DNA, 30 bp, Homo sapiens
  chr6:130349103-130349133
  hyper
ttgaggtatagtctgcacgttgaacatgaa

SEQ ID NO: 43470 - DNA, 821 bp, Homo sapiens; identical to SEQ ID NO: 5119
  chr6:130686371-130687192
  hyper

SEQ ID NO: 43471 - DNA, 525 bp, Homo sapiens
  chr6:130687224-130687749
  hyper
cggtggcggcgccgcctgagcggcgactccctctcccctgcccggcttgctgcgcccggtgccctccgagggcaggcgcgcctggactctgcgcccggatggcggcggccctctgtgagcaccggcagcggcgcatcccctgccccgaggcctccggtgcccccccggcgcgggcataggggcgcccccaccctccgtccgcttgcaccccttgccacccgccccctcgcctgactcatccgcccgcggtggccgcccgagccctgggatggggagggagaccgcggctgcccgcggcggccgagattcccgctgacgcccccgaccctgccgccttcttcgtccgcctccagaggcgcccgacgtcccgacagctcctggagtgagaccaggactgagaacagggagaggcgacccgacccccagggcccggtgctcaggacaggtgaggggaaggaaagggtgctgacgggagtggggaggtgggtgggcggccaccgcagccgaaaccgggcacttcttcag

SEQ ID NO: 43472 - DNA, 380 bp, Homo sapiens
  chr6:131383361-131383741
  hyper
tcaggggaggtgagcgatctagagaagcataactgatgtcccaccacagacctcaggctgctgggggcagcgtctgcgcctggggatggcgtccccagacgccgacttcaaccctgtcgcgctcctttaggttctcctcgcccttccccgctgctcacctaaaaatgctcccaaccctcggcccccaggcgcaggaggagaaaaaacaagccatctgtggtgagatggcctgggtgtgggaattgtaaggatcggagcacgaaacacgcgtccctctccgcagctcccagacggcgcaggcggcagctgggggcgcggacgcgagcctacagcgggcccgacccgcaccgcgcgtggggctggcgcgccgccctcgcccg

SEQ ID NO: 43473 - DNA, 30 bp, Homo sapiens; identical to SEQ ID NO: 5122
  chr6:131456350-131456380
  hyper

SEQ ID NO: 43474 - DNA, 163 bp, Homo sapiens
  chr6:131602721-131602884
  hyper
gaggctggtggagaacgcggtgctcaaggctgtccagcagtatctggaggaaacacagaataaaaacaagccgggggaggggagctctgtgaaaaccgaagcagctgatcagaatggcaatgacaatgagaacaacaggaaatgagcccggaacgcaggcccc

SEQ ID NO: 43475 - DNA, 30 bp, Homo sapiens
  chr6:132129408-132129438
  hyper
ctcgctggtaggtccgcggccaggccccgg

SEQ ID NO: 43476 - DNA, 210 bp, Homo sapiens; identical to SEQ ID NO: 5123
  chr6:132271776-132271986
  hyper

SEQ ID NO: 43477 - DNA, 94 bp, Homo sapiens
  chr6:132272530-132272624
  hyper
ccgaggcttttatacgctccgggcggccgcggctcgccaatgagctgaatggagtcctacacaaacagggacattcctcgcattcctccccacc

SEQ ID NO: 43478 - DNA, 30 bp, Homo sapiens
  chr6:132722406-132722436
  hyper
ctggaggcggaaggcgatctggctgccccg

SEQ ID NO: 43479 - DNA, 30 bp, Homo sapiens
  chr6:132722755-132722785
  hyper
gtcccgtcccgttccgtcccgtcgggtccc

SEQ ID NO: 43480 - DNA, 31 bp, Homo sapiens; identical to SEQ ID NO: 5125
  chr6:133134687-133134718
  hyper

SEQ ID NO: 43481 - DNA, 30 bp, Homo sapiens; identical to SEQ ID NO: 5126
  chr6:133135672-133135702
  hyper

SEQ ID NO: 43482 - DNA, 30 bp, Homo sapiens
  chr6:133136324-133136354
  hyper
ttctgaatggcatccgtcctaccggaaacc

SEQ ID NO: 43483 - DNA, 194 bp, Homo sapiens
  chr6:133146627-133146821
  hyper
gcagtaaaaataaaaccgataagaagtgagctggtcttcaaataaacttctatattgcagtaaaactgcgaaggtgtttctcctgtcatagcaatgggcaacaacacgaccttttgtgagtcagaaacctgcctggccaatgaatccaatacatcccagtacgggacacttttaaagtccgtgttcaaagttta

SEQ ID NO: 43484 - DNA, 301 bp, Homo sapiens; identical to SEQ ID NO: 5127
  chr6:133561966-133562267
  hyper

SEQ ID NO: 43485 - DNA, 88 bp, Homo sapiens; identical to SEQ ID NO: 5128
  chr6:133562348-133562436
  hyper

SEQ ID NO: 43486 - DNA, 420 bp, Homo sapiens; identical to SEQ ID NO: 5129
  chr6:133562674-133563094
  hyper

SEQ ID NO: 43487 - DNA, 933 bp, Homo sapiens
  chr6:133563157-133564090
  hyper
cgagcctgcctgtcccttccggggtcggcgcggagcctgcgcgtaacggagttcatccagcagtccagcgcgcggcttctacctgcaccccgcctccacctggcagaggcgcgagcatcggggtctcccccacatctttcttatgacgtgtattactttctgatgaccccctagatggtccaggcgcgaggatgctgacccagagtccttcggagggtcacaggcgcctgggctttcccggtgccgggtgcgtgtgtactttaaaggctcgcgttctaatctccaggcactgatcgggcttttcaactgcggcgatcccactttaatagtttttatgtggcgtggactgaatgtctcctgcagtttgccagggtcggtgaaattagaggcgccttgtcagagcagtcgcgttcattggctcgagtagcgggtgccatggaaggcttataacttctccaaaggaagggacctggctgggtagagcaggtttttctctccttccaagcctgctgggtctggggaggcagtggaacttgaaatggctcggatttttagcgtggtgaagcgaggtttggaagtagacgtgtgtgtgcttgttttattctgcgccgcacagcaacccgaactttcgtttggtagcacttgaaagagttttctccctttgtttgcgagattctgaacagctcggagcgattagggaatttgcggaccgagtccggtggcagagctggggcgaaagcagagagcgcaatttaatttttgtcatctcttccctgcttgggaggatagtgtttcccttcaccaccacccctctttctccttcctatgaagacaacggatttgcgcctggggtgagagtgtgtgcgggagagtggtgtggagactgtcctctctcaccgcgtctcctgcgcctctccccgccatcccgagcgg

SEQ ID NO: 43488 - DNA, 139 bp, Homo sapiens
  chr6:134175382-134175521
  hyper
catatcttccagccccgcactcatgattcacagtaatgcctagtgttagcactcactaatcgacaatttgatggggaaggtgaggaggaaaacgaccctggaagcagagtgctggtttcacacccgctgggtatctgtt

SEQ ID NO: 43489 - DNA, 427 bp, Homo sapiens
  chr6:134175885-134176312
  hyper
caggggatgggctgcgaccgctcccagtgaccccacgaaacccagaggggaggctgaggctctgaggccagccaggggagctgacgatctcgcagaagccgcggcgagtctcccccggaggtctaggaggcagagccattaaagccaggctgcccgctgaaacgcacagtaaaagtgactgcgatttatttggattagtcagtataaaggtctggggagacagctatttattcgatacgggaccttgacaaattgggcagtgcaagaaaggacagtccctctgacctcaggcggtgctggggcggaaggtaggaacctcccacctgctcctggccccagggggcgcgcatgcccagcgggagcgcatcttcacctgcggacgtgaggctgcagcgctgccggccccagccagccagggtgccctctc

SEQ ID NO: 43490 - DNA, 139 bp, Homo sapiens
  chr6:134176376-134176515
  hyper
cggcaccttctccccagcttctgggacggtcaccaaatctgagatcctgcccggttaccctgcaggtgacccagtacccccgaagggtccacctggataaaagtcgtttggtctggcagcatccgggtcatatatctga

SEQ ID NO: 43491 - DNA, 394 bp, Homo sapiens
  chr6:134210624-134211018
  hyper
atttgtgacttccaacgagagcaccgaggagagctccaactgcgagaatgggtctccccagaagggccgcggcggcctgggcaagaggaggaaggcgcccaccaagaagagccccctgagcggggtcagccaggaggggaagcaggtccagcgcaacgccgccaacgcgcgagagcgggcccgcatgcgagtgctgagcaaggccttctccagactcaagaccaccctgccctgggtgccccccgacaccaagctctccaagctggacacgctcaggctggcgtccagctacatcgcccacttgaggcagatcctggctaacgacaaatacgagaacgggtacattcacccggtcaacctggtgagtgctcccggggctgcagctgcagtccag

SEQ ID NO: 43492 - DNA, 263 bp, Homo sapiens
  chr6:134211111-134211374
  hyper
cgcgggcctagagcctccagggaccggaggcgggcggtctagacacggccctcgctctctgccctaccagcccccggagcgggagtgatttatgcgagggtttgacgtggcagcccaattaaaagtttgcaagtgtgttgagctggcacagaggagggatcccccgctcccgctccatcgccatcctccctggggtgcagtggctgctgcggaactgagaacactgacaagacgctgcgagcggacaggcattttgttaatcc

SEQ ID NO: 43493 - DNA, 163 bp, Homo sapiens
  chr6:134212320-134212483
  hyper
ttgcgatggaagaaacgaaagtcggactagggaaatagatggtgatgaaaggcgatgaaagcgacagggccctgaaacccgaccaccgcctcagaaggaggccaggagggcgcttcgccccgaactcggtgcccagtaggcacaaggtcgttctgggcttccc

SEQ ID NO: 43494 - DNA, 11 bp, Homo sapiens
  chr6:134213976-134213987
  hyper
cgccacgactt

SEQ ID NO: 43495 - DNA, 347 bp, Homo sapiens
  chr6:134214076-134214423
  hyper
cgaggagcctgcgacccgggtccctcactgccccagcgcagcccgcggcggccgatgcgccagatgccaccggggctgtttaatgttcggggttatgaccgcagtgtttacaagacgtcttcggttatttatactgttattcctcgcagagagccttgaaacttccgcttcatttgctctttcttttcgattttttacccttttttctcggcttagtttggtacctggagcgagagcttctccgcccttccaccaaccccacaggccgcttcgcgggtggagccctctgcctggccatggaggaaggatcccgctaggctggtcccgactggagaagctgctctgcc

SEQ ID NO: 43496 - DNA, 732 bp, Homo sapiens; identical to SEQ ID NO: 5136
  chr6:134216761-134217493
  hyper

SEQ ID NO: 43497 - DNA, 411 bp, Homo sapiens
  chr6:134499448-134499859
  hyper
tcttccaaccggatacgtgatgggtggagcaggcgccccctgttctgtcccagcaacctactaagacttccgaacaggaaggtgacacacggcggaggggtgcttgaggggagggggagacgggggagctgtgtgtgacgcgcgcctgttaacactgcacaggcattaggttgccctgtagctgctattcaaactcttgatctgttcttccttcctgtcgccagcctctttctttggtccagatagtcctcctactgggaggaatccggcccctttcctcatactccctggtggcgaagtggtccgagtagcctcccgaactgtttgtaaatgcaacctagagggcgatcgagttctctgggagaacttgctccatatacgcgtatacgcggcttcccccacttgtctcct

SEQ ID NO: 43498 - DNA, 401 bp, Homo sapiens
  chr6:134638776-134639177
  hyper
ctccccactttcagttgccaccgacagcggcttttctccttccatcattgctccgaaacatatgcatcaccgctgcaggaccctgggggccggacggtgggatacggccaatctccggggagatgctgtggctcttaccgagcgggagaagggtacgcctccccgcccccagctacctggctgctcttccgcggccggcgcggggagcgagtcgctcttctccaggtgatgcgctcctggaggcggcttgagagaggagagttgtttttgattgtgcaagttccagtgggagctgtagttaagcagctgagagaaggagtaagaaagagcagaagccagagggagggagggagaacagcgccagaaaggcagagggagcgagaaggcgaggctggaagaag

SEQ ID NO: 43499 - DNA, 30 bp, Homo sapiens
  chr6:135375885-135375915
  hyper
agatactgataaggcgccaactgcagcctg

SEQ ID NO: 43500 - DNA, 30 bp, Homo sapiens
  chr6:135501796-135501826
  hyper
cacttgtattgaagcgtcctttgtcactaa

SEQ ID NO: 43501 - DNA, 30 bp, Homo sapiens
  chr6:135502363-135502393
  hyper
gcgcactgcaggggcgccagatttggcggg

SEQ ID NO: 43502 - DNA, 45 bp, Homo sapiens; identical to SEQ ID NO: 5139
  chr6:135503607-135503652
  hyper

SEQ ID NO: 43503 - DNA, 96 bp, Homo sapiens; identical to SEQ ID NO: 5140
  chr6:135503993-135504089
  hyper

SEQ ID NO: 43504 - DNA, 30 bp, Homo sapiens
  chr6:136610899-136610929
  hyper
cagcggccatttcccgactcaagaacgcga

SEQ ID NO: 43505 - DNA, 30 bp, Homo sapiens
  chr6:136611621-136611651
  hyper
cgcccttctggcggcgtgatgacagcttta

SEQ ID NO: 43506 - DNA, 564 bp, Homo sapiens
  chr6:136870741-136871305
  hyper
cctgaccaccaaatcccgggctgcagagccaacaatcctcctttgggctcctgcacagactaaaaacaaaaaactctgagaactccgacaagtcaacgaaagtctgatcccgtcaagcccgcactcgcaaacccccaccgtgctgcactgggccccggccctcccgagctcggtcccctcggacgacggtcgtcgccactgcgggcaccagattggggggcgggccgctcaccccgcggtcctgccccacaccgaccccgctgaggagcccccggcacccggggcgaccagggaaggcgggaggaggtgcccagaaactgctcgtcctgccagtcgcacctggccgacgactctctggccactggtttggtctgggggatacgatttcccattcaactgaattagacccgaggccgcggcggggagggcagcggccggggtctctccgtttcctcccccggctcgcctccacctgttgcgggaaagtcgcggtggagcgcccgagggcggccgcaaccccggccggggccgagccgggctggccgagccgcggcggcgaagggc

SEQ ID NO: 43507 - DNA, 435 bp, Homo sapiens; identical to SEQ ID NO: 5142
  chr6:136871730-136872165
  hyper

SEQ ID NO: 43508 - DNA, 409 bp, Homo sapiens; identical to SEQ ID NO: 5143
  chr6:137112601-137113010
  hyper

SEQ ID NO: 43509 - DNA, 2330 bp, Homo sapiens
  chr6:137241818-137244148
  hyper
ctttggctgaagtgtcgcgttcagcacagaggtggaagtaagaggcagaaaacagaagaaccacgagagaaatggatcctgtctattaaggcaacgtgatgcagcgctaaaaggttaggaggttacgattcccggggctaagagaaataaactgctggtggtgaacgaaaggggtgctggagcgcagcgatctcgaacctttcccttatagccaaaccctggccaaggccacaaatttcaaatcgcctgaaaaccaaactgtctggcgcttaacggttacctcggctgagcgaaacccttggctgctgctgatttaactacaggtccgcgcgagttactttccagggaactgaattcagaacaaagagttaccgaagccttactccctctccaaaattagaattccctttttctcttagtcatataggaaacacacagttcacaagtcctgtggtgcaaaggtgtgaaccctggcccagggaggtggtgactctccccgccctccgcctgccggttgtcctgcttccgaaagcaacccacgacggtcccgcagggtgagggttccctgggatcagttccctgggatccggagaacgccacgcggagtctccctgcagggtgaggggccccgggttcccgccccctccccctctactctcccattctgcgagcgcagccagcctcccctcccacgcttcgggaagcgtcgcccccgagctcctcggttcctggtggtggctactcgtgttagtgacttcgtttctgcgcgtttgcttattttcatctttgcctcagttcgaatgtgtccccgccaccaggccccgctgctgggcgagaccactgaaccccctgaaagcttccccggagccgcgcgcataatcccgggaccctctctggaaggcgtgcggagagcggtgcgcgtggcctggcaccggaaggagccagcttccgggctccgaggcaccccctggacagcgccccgggccgcgggttcctcctccgatgcccgggcgtcgtcgccgggatcgggagcttcgggggcccgccggcaccgacggttttcgcttccctggcgggcagctggacgaggtcccgccgctgcaccgggagggacagtgggtggaaaaagccgctgcagcgccggggcgagggggctgggggcgccgtcacttgttgcgaccaataaacggcgctcgatcctgatgcgctgtttctaaaatctttagctgtgtcccgatccctccaacccaagcccctcggccaggaggaaggggcaagcgagagccgctggctctgtggggggagaggggcgccgcgccccaagagcccccgtcccgccctgcggcagccgccccggggcgcccagccgcccgcttccctccgcagagcgtcttccctgacggtgaaaccgcgcgggacacaacccaccgcggctcatcacccacttacaaatagctgtcgctaggattcccgccactcctctcagaccggcccccccgccacctctgccacttttcggagtcccccgccctcgtcactgcctccccggagctgcggggcagtcggacgcagagctgcctaaccgcaagaacgcctggccggagctgccctctgcagccgagccggcgccccctgcccttcgccgccgcgctgggcgggcgcccccgccgccctcactccgctgctcccggctcctcgcgcgcaggtcgcggagctccgccaccgctgggtgcggcgaggccggcgcgatgcggcagctgtgccggggccgcgtgctgggcatctcggtggccatcgcgcacggggtcttctcgggctccctcaacatcttgctcaagttcctcatcagccgctaccagttctccttcctgaccctggtgcagtgcctgaccagctccaccgcggcgctgagcctggagctgctgcggcgcctcgggctcatcgccgtgccccccttcggtctgagcctggcgcgctccttcgcgggggtcgcggtgctctccacgctgcagtccagcctcacgctctggtccctgcgcggcctcagcctgcccatgtacgtggtcttcaagcgctgcctgcccctggtcaccatgctcatcggcgtcctggtgctcaagaacggcgcgccctcgccaggggtgctggcggcggtgctcatcaccacctgcggcgccgccctggcaggtgagcgggcccccgcgccgacccccagccgaccccacccaccccgctccgtcgggcagagaccgcggggatcactgagttcaacgacctcacttccagatggggagactgaggcagagagagccggagagctttgagagtgg

SEQ ID NO: 43510 - DNA, 230 bp, Homo sapiens
  chr6:137244235-137244465
  hyper
cgaccctcgcccatgcttcacccggcatcgcccttcctgtcgccccctctcctggtcttcccctgtcaccccattctccgggagaggtgggagggccgcctgagcctgggagctggagtcctccaagcctggaccaagccggaaggagggggccgtgaacttccttgggtcacgaggggctggaatggaggtgggggatgggggcgaagctgagggttcccggggctact

SEQ ID NO: 43511 - DNA, 505 bp, Homo sapiens
  chr6:137310875-137311380
  hyper
agtccaaagccaccccgggaaagatgtggcccgcagcctggcaggctgaggacgtgtagggggctgcaccaggcgcagcgagtaaccctactccgtttctgaacgcacgcgggggcgctgccaatgtaaggctccctgttaggaacgggtcctagccctcagcggagggtcacaaagaaatgagactttcctggcaagactgtggaatcagatcgagccatttttaactgtaaatgtctggctttgcctgcagcatttcaaggaagacttgactgctgtgcgttgccgccctccgccccgctcccctgcacttacccacccacctcgcctgcgctgatccgcagacgcgcgcggggaaaggcacgcgcgatgctttcccactcgctcagcgggcgccgctcactggaaactcgctccggattccgaacccgagagcagagcagagggaagcccctttgctgagcagctccttagtggagggcaatgaacgcgctgaaatcccaga

SEQ ID NO: 43512 - DNA, 30 bp, Homo sapiens; identical to SEQ ID NO: 5147
  chr6:137421484-137421514
  hyper

SEQ ID NO: 43513 - DNA, 30 bp, Homo sapiens
  chr6:137540386-137540416
  hyper
cggccccagatccgcggtgcccatctcagc

SEQ ID NO: 43514 - DNA, 365 bp, Homo sapiens; identical to SEQ ID NO: 5148
  chr6:137809000-137809365
  hyper

SEQ ID NO: 43515 - DNA, 471 bp, Homo sapiens; identical to SEQ ID NO: 5149
  chr6:137809445-137809916
  hyper

SEQ ID NO: 43516 - DNA, 1202 bp, Homo sapiens
  chr6:137810032-137811234
  hyper
cggggatcgctcacaggggctccggggccaccgcgagcgcggactgcggctgctggcgggctccttcgtcgtccaacgcaccccatcctctcccgccccgcagtgtcccagggaaggcttcactgaaaacagacgctcgacggaaaactgactctgcaggcccgagctttcggagtttgatttctgtgggccccttaaacgggcactgggtacaggagaggccccaactctctgcagggacggggagggaagggcactcactctcccgcaagttttcctagaggcgagctgaagatgcaggccacctccctcccgcacggcccctcccttggcctagttctgtccaaagacacttcccagccctcgagcggcggctcctccactcgattcctgcctacacgtgaagagcttggacccagcggggctgcactcgggaggacaggcccagatcctgcacggccgggaggacacctggccccgctgtcttctcttcacagctcccctttctcggcttcggcctggagcggtgcagggaggggtggacctggggtggccttaagatatctagcctgggtgcggagacttgggagcccacccttagcagtcactcctcctccccagtggagggtgagaaaaggggaacagagggccccggagtctctggaagggacgtggaacgcgaagttaaatgttggtgtctgagcgatgtgctggtggggcagagggggttccagcgtcctcccagagtgaggaggcttttgcaatttctgctgaatgcgtcagtggaggcacaaaaccttgcttgacctagcagctgggaaaaaaagaagttcgaggggacacaaggccccctgctgctggagcgaggaaaccctgggcttggccagctcgggccgcttctccctgcccgtttgcgggctgtcggcctcagcggtcccagaaacaaagatctagtgagcccagccgacgccggcctcattttccctttctaagggtcactttcttccgccctctaaattaggtcatcgcctgggaaagcgccgagaggtttctagtgtgggcttctcaaggtgtctccgcccaggaggatttcgccatccatttaaacgtaaggcggggtttaatctggaatgaaaggatcgtcgtggtgtttccagattgaatgaaaaactaaacttgcaaaatttcgagaaagtgacaag

SEQ ID NO: 43517 - DNA, 30 bp, Homo sapiens
  chr6:137814341-137814371
  hyper
gatctctcagacagcgtgggaggctgcggg

SEQ ID NO: 43518 - DNA, 216 bp, Homo sapiens
  chr6:137815524-137815740
  hyper
ttgaactaacctcacgctgaaaaagaggggcttttatagagctgcggcggagaaaagagacaaaaggagccctcctatctatcctgggctggttaggatgacgtgccatcattcagggcggtgcgctttgctgtcccatttagcaaggattcctattcatattcattgtggggccgccctgggacacctctgctccgaaccgctaggagcccccag

SEQ ID NO: 43519 - DNA, 230 bp, Homo sapiens
  chr6:137816535-137816765
  hyper
tgtgctgacgtgccccgagctccgggaactcagcggcaccccggcctgcgcgggtgggtccaccaggctggggccgccgtacggcgtcggacagggaaatcagaagctcataataaactatctgatgtcggggtggtggggcgggggggtggggtgcgtgggcaaagaagcacgggggaagggaaacaacgaaaggacctagaaagccccttgtgcgtgcccgggcactg

SEQ ID NO: 43520 - DNA, 234 bp, Homo sapiens
  chr6:137817041-137817275
  hyper
tgaaatcgaatcaatcgcggaacctcgggcacttggggcctcttgcgccgctgagtcacttcgaagaacaggatgcccccctttcccttgactcaaaccgagcggtcagtgggagagggatgcgcgcccaggtccggagtttgcacgctctgaggctgtgccccactgacagtcacgctgcgaaggcagctctggccaataccagaaggatgggcaaacgcaacattggcatgg

SEQ ID NO: 43521 - DNA, 125 bp, Homo sapiens
  chr6:137817736-137817861
  hyper
tccccgccctgcggacggtgcacaggtctggcccccgccgtcctcctgagccacctccctgaccctaggtcgtcggcggcgtctgtccttcccacacccagactgaaaacgctgcacctgagttt

SEQ ID NO: 43522 - DNA, 13 bp, Homo sapiens
  chr6:137818821-137818834
  hyper
ggctcagccggag

SEQ ID NO: 43523 - DNA, 450 bp, Homo sapiens
  chr6:137818915-137819365
  hyper
cggtggctcgggctgcgctctctcgggccacaccccgcgccctcgcggctggggcgggctgcgccgcggaggcggggatcgttctccggcaacaggtgcgtcccaaggcaggcaggctacttccctccaagcctgtcttggctctgagaagagcctggagtttctcagccttcctacaacatatgaaaacagcgggtcggcgcgtggaccggggcagaagagccgtcctgctgtacccgcgcgcccagggcgctccgcggggaccgcgcactcgggaagctgtgctgtgctcaacacccccctgtgcctcccagatcaccagggatcgtctcttacctgacacccagtgcgcgccgctcggtgcccgacgcccactgctccgcagccttagccaccgagttcctctccagcagctgccggctctgcctgaggccgcggcgattttggctc

SEQ ID NO: 43524 - DNA, 162 bp, Homo sapiens; identical to SEQ ID NO: 5153
  chr6:138132642-138132804
  hyper

SEQ ID NO: 43525 - DNA, 30 bp, Homo sapiens
  chr6:138188431-138188461
  hyper
ggagcccgcgggggcggagcggtgagagcg

SEQ ID NO: 43526 - DNA, 30 bp, Homo sapiens
  chr6:138428116-138428146
  hyper
catgagcccgagctcgtcctaaacaggcat

SEQ ID NO: 43527 - DNA, 228 bp, Homo sapiens
  chr6:138428362-138428590
  hyper
tagactgcaaccagccgcggccggccagcgcgatgatgtcgaaggcgatggcgctgagtaggagcaggggcaggatccagcggcagcgctcgcaggccaggccgcagcggatcatgttgacgggcggcgcggggccgagcggagcggagcggagcgggtcggaggagcgcgcgggacgggcgacagcagagagtggcctgcgagcgcgggcgccgccacaaaagcgaa

SEQ ID NO: 43528 - DNA, 213 bp, Homo sapiens
  chr6:138428797-138429010
  hyper
cctggcctctccaggcgcgtgttttgtcttcctggcgcaccaacatatacacttgtttatctgcacagcgccagcctaatatctgacccctgatgtcgcatcgtggggcggtggtcagcagtgccatatctgagttttcagcagtgtgagatgggtgttctaattgcacctgtggataaaggctgcactcctttggacgcgtgcacccaaacc

SEQ ID NO: 43529 - DNA, 444 bp, Homo sapiens; identical to SEQ ID NO: 5156
  chr6:138482424-138482868
  hyper

SEQ ID NO: 43530 - DNA, 187 bp, Homo sapiens; identical to SEQ ID NO: 5157
  chr6:138482902-138483089
  hyper

SEQ ID NO: 43531 - DNA, 314 bp, Homo sapiens; identical to SEQ ID NO: 5158
  chr6:138483409-138483723
  hyper

SEQ ID NO: 43532 - DNA, 267 bp, Homo sapiens; identical to SEQ ID NO: 5159
  chr6:138724515-138724782
  hyper

SEQ ID NO: 43533 - DNA, 30 bp, Homo sapiens; identical to SEQ ID NO: 5160
  chr6:138846140-138846170
  hyper

SEQ ID NO: 43534 - DNA, 484 bp, Homo sapiens
  chr6:139013360-139013844
  hyper
ccaattcccaccctccgcgcccactctctcgaggtagccaagaccctccaggagtccgaaagtcacagagcgctctgcgcccctgccacctgcccagcctcccgctggggtccggcagtccccactggagaccccgacatcgcggggctccgcggcccccgcgccgacccagggccgccagggggcgggcgggagcagctctccgggtgcctcccccgccggttcccctcccccggcccgccggccactcacggattttcactcggcggtggtccaggcgcgcagcggcggcttgcagggcgtcgaggcggcggtgcagcgcggcggtgcggtggcccagcgcggccgcctggccctcgagctcgccgaagatgtccccggcgcagcgcgacaggtcggccagctgcgccagcaggcagcccagggcatgcgagctgacctgctccagcgagcggaagagtggcgcgcccgcagccccggcccc

SEQ ID NO: 43535 - DNA, 16 bp, Homo sapiens
  chr6:139094532-139094548
  hyper
cgggcaaccaatcgga

SEQ ID NO: 43536 - DNA, 30 bp, Homo sapiens
  chr6:139308708-139308738
  hyper
ctccagcacccgcccgttgaccaccacctt

SEQ ID NO: 43537 - DNA, 97 bp, Homo sapiens
  chr6:139349756-139349853
  hyper
gcccctttcttggacgtctcctcccctgagtttcctcctcataggcttgtccctgggagtgtgggcggcccctttcttgagcgcagaaacacttact

SEQ ID NO: 43538 - DNA, 31 bp, Homo sapiens; identical to SEQ ID NO: 5162
  chr6:139350568-139350599
  hyper

SEQ ID NO: 43539 - DNA, 30 bp, Homo sapiens
  chr6:139694472-139694502
  hyper
ggcgggcatgttgccgctgccgctgccgcc

SEQ ID NO: 43540 - DNA, 244 bp, Homo sapiens; identical to SEQ ID NO: 5163
  chr6:139694963-139695207
  hyper

SEQ ID NO: 43541 - DNA, 30 bp, Homo sapiens
  chr6:139695646-139695676
  hyper
aagcgcttcgctgtcgcgatgtcggcgccg

SEQ ID NO: 43542 - DNA, 30 bp, Homo sapiens; identical to SEQ ID NO: 5164
  chr6:141490782-141490812
  hyper

SEQ ID NO: 43543 - DNA, 32 bp, Homo sapiens
  chr6:142410083-142410115
  hyper
cagtggtttgttctcgcggttatctagcggaa

SEQ ID NO: 43544 - DNA, 30 bp, Homo sapiens
  chr6:142468303-142468333
  hyper
acgtcgctgagcaacggaagagtgggcagc

SEQ ID NO: 43545 - DNA, 30 bp, Homo sapiens; identical to SEQ ID NO: 5165
  chr6:142623418-142623448
  hyper

SEQ ID NO: 43546 - DNA, 885 bp, Homo sapiens
  chr6:143247635-143248520
  hyper
gggctttgtgaaaagaaagagcgtatattctatccgggcaatgacaaacggactcaggcctcctgaggtcagcgctcctgggcaccatcaggccccacttcgggagcccccggtgctccgggcccacctgactgggcgtcctctgagtcagggaggtgccagtgctgtggtccccgcgagcccaactgtcccctgacccccgggcttttccgcaccgtggagtcccccgacacgctggggccagtgaacccgggccggggcgcgcgttctccctcccggaccagctcccggcgctgggcccgcggccgagaaactaggtctgggccggccctgcggcggccgccgggcgcggcgagccccactttctcccggcaggaaggggggaggccgagagcatttcctgttgtgcagctgagccctgcggagacgtcattgcattcatgctccctcgggtgtcagcggacggggggccaaagttcaagccgcgtccagggcaggcagcgcgcggcggcgcggcggcgcggggcgggcggccagggctcccctctcccgctggcgctcccggcgcctccgtccccggccggcccagcgctgctaccggaggccagccctggggctccgcggggaagagctgctcttcctcccggaggaaaccgagctcgcaagcccagcgctcccagccgcagactgcaggctgccctcctccaccgcctggatttcccacggggaggaaaaggcgtgcgtttccaggtgtttggaggacgcactggccgggcgcactttcctcagcgtaattttgaacgcagtttccctaaagatgactcttttttccactaggattatttccaagtcatcaaaagtgaaaaatcacgtaagtgttgttgc

SEQ ID NO: 43547 - DNA, 31 bp, Homo sapiens; identical to SEQ ID NO: 5167
  chr6:143266116-143266147
  hyper

SEQ ID NO: 43548 - DNA, 30 bp, Homo sapiens; identical to SEQ ID NO: 5168
  chr6:143266539-143266569
  hyper

SEQ ID NO: 43549 - DNA, 30 bp, Homo sapiens
  chr6:143267434-143267464
  hyper
tcccgggctgtggacgcaccgggttattcc

SEQ ID NO: 43550 - DNA, 30 bp, Homo sapiens
  chr6:143268448-143268478
  hyper
acaccggggctctctcgggccgttaccctg

SEQ ID NO: 43551 - DNA, 397 bp, Homo sapiens
  chr6:143268757-143269154
  hyper
agatttgacctggcgcgacccggctttctggccggggttccccctgagcaggtgactccgtgggaggggtggaaatgagtctctggaattccgggccaaagacaataactgtggttctgcttttaaagcaggtatttcaccagcaactgcggaatgttttgtgtctccagtttcaaatttcgcggaaagggaccaaatgtgaggacatataaaatatccccttctcttttcattaaaaatgagtgcattacaaaggaagggcagccccttaatgcctgcgagaatagcgctgctggtttcgtttttgttttgttttgttttgtttttcattctgacccacaatcagtgtatttttgaggtccctatgcaatggcgacggtgccgtgaagggcaactc

SEQ ID NO: 43552 - DNA, 206 bp, Homo sapiens
  chr6:143771596-143771802
  hyper
aaaaattatggtgacgagaaagaacgtttgctcaaatgccggggtcgggttgagggctggagaaaggtcccaccccgcagcatctacctcccgggctcctcaccatgtgcatcgcctcctccatccacttttcggtctcctctgccgacaccgagcacgcgccgcttgcagctggcttgggtgccgccttcgcctccatacccagc

SEQ ID NO: 43553 - DNA, 30 bp, Homo sapiens
  chr6:143832927-143832957
  hyper
tctcccgggcgttccgaatgacctcaggag

SEQ ID NO: 43554 - DNA, 30 bp, Homo sapiens
  chr6:143857957-143857987
  hyper
cctcttcctcctcccgccctccgcaccggc

SEQ ID NO: 43555 - DNA, 470 bp, Homo sapiens
  chr6:143998942-143999412
  hyper
gagggggtgcgggtgcggcggggccggctgggggcttcccccaccccctgctcctgcgccctccccccgcttccccctcctcccctccctatcgccctcaccccccttcttcccccgtgacccctgaccccagctaatctgcatagaggaatgacaggcatccgctgggcaggatccgccgcgccggctgcggccggccgggctgggagacccgcgcggggtagaaggtgaggggacccggcgggccgctcggcacaggccgggacatgaacgcctggaagtctggctgggagcggacccatgatcgaaggaccaaaggagccgcttgatcgctggacctggccctgcgaccccagtcatgggccagacctcggtgtccacgctgtccccgcagcccggcagcggtgagtccggggcgcacgcgatgcgctcccgccgcgcgggcgcagggctggcggcggggccccggg

SEQ ID NO: 43556 - DNA, 143 bp, Homo sapiens
  chr6:144164377-144164520
  hyper
tggcttctcgcgatcgtggagacgcagcgagcctatgtaacttccggtcgcgacccatcagctcctcggcgattggtccgtttccacggccggctgggtgacgttatcgccgggtcctggggctgcacgtgtggtgaggccta

SEQ ID NO: 43557 - DNA, 188 bp, Homo sapiens; identical to SEQ ID NO: 5172
  chr6:144384641-144384829
  hyper

SEQ ID NO: 43558 - DNA, 30 bp, Homo sapiens
  chr6:144471628-144471658
  hyper
ggcgggggctgagccggcggcgcccagatg

SEQ ID NO: 43559 - DNA, 30 bp, Homo sapiens
  chr6:144537591-144537621
  hyper
gcgaaaactctctgcgttctggagggaggg

SEQ ID NO: 43560 - DNA, 47 bp, Homo sapiens; identical to SEQ ID NO: 5173
  chr6:144537938-144537985
  hyper

SEQ ID NO: 43561 - DNA, 488 bp, Homo sapiens
  chr6:144606892-144607380
  hyper
gagcccttggccagctcggggtgcggcggtggcgaccggcaggcgaggaggcccgcgggcagcaggtaagcccatgcattattgaagcctcgggctggtaatgtgactacagcccccgagggaatggggcgggggccgggaggaggatggctctttctgtggttcttccgcctgggatcggcgtcccgagctgcttcccaagtcccagagtcgaagatgggagtaacttttgcgtgccctttcctcggggcctcagtttagctccccgcggtgcgagagagaatgccggaggcgtggagagctcgggcgtggaggtccttgggatccgtactagttgtgaacgatccaaacttatctgaccagctctgtgctgcctccctgctcccctaatcttcctccccgccggggtgacagagtcgccctccgtgcatcgcgcggtgcagggcgctgggccagtgatttgcaagaggggacgtggcctcttagga

SEQ ID NO: 43562 - DNA, 30 bp, Homo sapiens
  chr6:145166138-145166168
  hyper
ctattttaacatgaccgttttttaactgtg

SEQ ID NO: 43563 - DNA, 780 bp, Homo sapiens; identical to SEQ ID NO: 5176
  chr6:146136027-146136807
  hyper

SEQ ID NO: 43564 - DNA, 305 bp, Homo sapiens
  chr6:146285324-146285629
  hyper
ttgcaccaggcctgcgctcctctacagacccagcagatcacgggcacgcattcgccacccaccgaacatgggcttgaggtgggcacgagcgctttttgccggaacgtgtaggggtcccccgggagacccagaaaccacagcgcctagctgccgggcgcgcgctgtagcgtggggtcaaggcgaacgcgctcgtcagagcaccccgccccctttctcctgcgctggcttcatgagtctcttctgcgcaagttcacactgttaaaaacttgctgaggatacagtggagtctcgcgatagctctgccc

SEQ ID NO: 43565 - DNA, 30 bp, Homo sapiens
  chr6:146349473-146349503
  hyper
ctcactggtcaaagcgtcccttgcaggccc

SEQ ID NO: 43566 - DNA, 467 bp, Homo sapiens
  chr6:146755454-146755921
  hyper
agtggtcagcaacttcagtaccgcgatcccggattttcacgcggtgctggcaggccccggtggtcccgggaacgggctgcggtccctgtacccgcccccgccacctccgcagcacctgcagatgctgccgctgcagctgagcacctttggggaggagctggtctccccgcccgcggacgacgacgacgacagcgagaggtttaagctcctccaggagtacgtgtatgagcacgagcgggaagggaacacggaagaagacgaactggaagaggaggaggaggacctgcaggcggccagcaaactgaccccggatgattcgcctgcgctgacgcctccgtcgcctttccgcgactcggtggcctcgggcagctcggtgcccagctcccccgtgtccgagtcggtgctctgcacccctcccaacgtatcctacgcctctgtcattctgcgggactacaagcaaagctctt

SEQ ID NO: 43567 - DNA, 458 bp, Homo sapiens
  chr6:146864476-146864934
  hyper
gggcccggaccccacgccgaccccggccccggggggggctcagcgacctcggcgcctcctcaggcccccagtgaacctccggggcccataaaggctccaggccggctccccggaggcccaccagcgggcgtctgggcctccctccgcgccgcgaccgccaggaggcgccgcccgggagaggaagtccagctgggcccggccgggcttcggaggcgccgcccgggagaggaagtccagttgggcccggccgggcttcagaggcgcagggcgggagccgcctcgcgcagggtcctccccaagccggcgccaggccctgccctcgtccggccctgccctcgtctggccccgcccgggccgcgagcactggcgggttctgggtcctgtgaccggtcaggcggcgtcagcgggcgcggcggagggctggccggcctcgggggagtttccgcggccgccggggg

SEQ ID NO: 43568 - DNA, 201 bp, Homo sapiens
  chr6:147828795-147828996
  hyper
acgcgatccccgggcgggagcgagaggataggctcggattcccgggctccaggaccgaacgcctggcagtgtccccgggggcaaagccaccccgggagcccgtgcagtatactaggtggggggcccggagagaaagcatagcgccgacgagggggaggggccgggcagaaaggagggtggggtaccgggtgggacacactg

SEQ ID NO: 43569 - DNA, 403 bp, Homo sapiens
  chr6:147829784-147830187
  hyper
gcatccaggggcggcgcggagccttgctcagcccagcagccagtgcctgcgagctccgctgctgcttggggaattcactttgctgcttgttcgcttctcccttcctcaggcttcttctgatggttttccgtctcctgcccgagcctttcctttaaaaggaaaactttactgcgatacccttttccccttggaggagaggattaaaagttccaagaactggtgccgcccgtgccatttgggcgctgggaaggtgctcggcggcggggttcccggtcccaccatgtgcaccaacatagtttacgagtggctcaaagcgctgcagcttccgcagtacgcggagtccttcgtggataacggctacgatgacctggaggtgtgcaagcagatcggggacccggacctg

SEQ ID NO: 43570 - DNA, 30 bp, Homo sapiens
  chr6:147830546-147830576
  hyper
cccggggcgcgcggcgggaggggacacagc

SEQ ID NO: 43571 - DNA, 30 bp, Homo sapiens
  chr6:148540220-148540250
  hyper
ttcaaaacatgcccacgcagcatcctcact

SEQ ID NO: 43572 - DNA, 999 bp, Homo sapiens
  chr6:148663338-148664337
  hyper
tccaaacaatggctcgtgcccaagctttcacacttgttttgcagagaagtcttggctggcagaggcaggatttgtaattccttgggtcgcttgacttcacgaggggcgaggtatgcattgtagcgacacggactacttgtgaagcctttgggcgggagtcgcttaaagattaactttctcgggtttccgttaccaaaagcgtttccgtgaatagcgtgattggaaacttgtgcgggccggagaccgcggcgcggctgctctttcaacaggcgatttgttctcctgtccgaggctcatttccatgcaaagagcctgacatcagagcaccttttgttgctaaacgctttctttagcctcgagggagagagtcatgtggagctggaagagctcattttgaagagaggggtcccggggagctccctccaagatctagaggctccgcggccacccctgccgggtcctgccaagacttgctagaaggaacgagtcgcgtgccttagttagttggttcccgtcacaggaagaaacgcctttgcagtgggtttaattgcttctgggccgagcgaattccccgccgtacaactcagtggtgcggactttgcctcctgctaccctgttgctgcgccgagcggggtgggaaagtttctggagttgtcagtcgcgcagcccgtggccacctagacccgaggtgcgggcgcctgcgaagggcccccgcggggtggccggggccgccggggcatgcagcgcgggggcgcggctcggtgacgccgcgggcggggacccggcatccgggcaggctgcgcgcgggtgcggggcgagggcgccgcggggactgggacgcacggcccgcgcgcgggacacggccatggaggacgcgggagcagctggcccggggccggagcctgagcccgagcccgagccggagcccgagcccgcgccggagccggaaccggagcccaagccgggtgctggcacatccgaggcgttctcccgactctg

SEQ ID NO: 43573 - DNA, 30 bp, Homo sapiens
  chr6:148899474-148899504
  hyper
cacagtggtgctgacgcccttcaagtgaca

SEQ ID NO: 43574 - DNA, 145 bp, Homo sapiens
  chr6:149067612-149067757
  hyper
gagttcaggcgctgcgcctggccctctggggcgtgtttgaccataactcgcaccgcttgctcttttcccatttcagcaaagtcttgagcctgtattctagtaccttttatcagccttgggtaagcagctcgcacggggtatataa

SEQ ID NO: 43575 - DNA, 88 bp, Homo sapiens
  chr6:149068143-149068231
  hyper
ctgttcctccctgccgttttttagagaagcctgaaccgggacaaaacacgccgagacctacagacacaaagccggggggtccacgctg

SEQ ID NO: 43576 - DNA, 786 bp, Homo sapiens; identical to SEQ ID NO: 5182
  chr6:149068748-149069534
  hyper

SEQ ID NO: 43577 - DNA, 30 bp, Homo sapiens
  chr6:149639678-149639708
  hyper
tggttttctgcagccgtctttgaagtgggg

SEQ ID NO: 43578 - DNA, 52 bp, Homo sapiens
  chr6:149887281-149887333
  hyper
gtctaatgaggggccgtaccttccaagatttcactccgcccctcgacgccgc

SEQ ID NO: 43579 - DNA, 30 bp, Homo sapiens; identical to SEQ ID NO: 5183
  chr6:149888030-149888060
  hyper

SEQ ID NO: 43580 - DNA, 30 bp, Homo sapiens
  chr6:149969553-149969583
  hyper
cggccctggaaaatcgggggtccccagagc

SEQ ID NO: 43581 - DNA, 30 bp, Homo sapiens
  chr6:150038521-150038551
  hyper
cacactgaactagacgtaagagactcccag

SEQ ID NO: 43582 - DNA, 127 bp, Homo sapiens; identical to SEQ ID NO: 5184
  chr6:150039629-150039756
  hyper

SEQ ID NO: 43583 - DNA, 30 bp, Homo sapiens
  chr6:150071488-150071518
  hyper
ggagaccccaccctcgtcccctgcattttt

SEQ ID NO: 43584 - DNA, 197 bp, Homo sapiens; identical to SEQ ID NO: 5185
  chr6:150071939-150072136
  hyper

SEQ ID NO: 43585 - DNA, 287 bp, Homo sapiens
  chr6:150185354-150185641
  hyper
atagccggcccagccgggcaccgctccttgccctcgccggagactgcccagcgccctgcgcctctccgccccggcctgcggcgcgctgggtggcgacgagtcggcctcggcgttgatcagcaccaggtgtgtgcgaacagtggccgcggcggggtggagccttggtgagccccgcccccccgcgcggccccgcccccgcgcgtctcgcgccggctcctccagggctgggagagcaggccccggggagggcagcctcagaacaactttgctcccgcgccgctgcccag

SEQ ID NO: 43586 - DNA, 147 bp, Homo sapiens
  chr6:150243888-150244035
  hyper
gtagcctctgggaacggacccggcgggaaggagacgcggagggaaactgagcgggggcgcagtccggggtgatcgcacgggtccttccagaagcctcccctcctctgaagcccacagtccacagccccccacggttggcctccgccc

SEQ ID NO: 43587 - DNA, 30 bp, Homo sapiens
  chr6:150244618-150244648
  hyper
cttccctctccctgcgttgcagagtgctcc

SEQ ID NO: 43588 - DNA, 23 bp, Homo sapiens
  chr6:150247248-150247271
  hyper
cgtgaggcggagaaaaccttggg

SEQ ID NO: 43589 - DNA, 801 bp, Homo sapiens
  chr6:150262702-150263503
  hyper
ccggactgtaatcacgtccactgggaactggcgcagtagtggaggggacgcgatcaggcccgtggctgcgcccagagcatgataagccagggacctcgcggcgcaggcggagggagggagagcgtcgcggacccaggcggggacagggagacgccgccgccgctgaatattcctctgcaagtttcttcaccttcaataaaaaaatgttgtgatgattaaatgagtctgtcgtggaaggaaccgtgtcttggcaggagccgggcggacacccagacaccaacccgaagggggttgggacaaaggggagggacgcccgggaaggggagggacaccgtcagggcagccaatcatatttctagccgcgtgacgctatgacccgcttgacgctatgacagcgggaaacggggggcgcgcccgtacatagggaggctttaaaaccttgaggtgattcatcttccaggctctccttccatcaagtctctcatccctagcgctctgggtccttaatggcagcagccgccgctaccaagatccttctgtgcctcccgcttctgctcctgctgtccggctggtcccgggctgggcgagccggtgagttcgtggatggagcctaagccgggcggggaccaagcctggagggctgtgaactgccgcgggtttcagaggaggggaggcttctagaaggacgggggagatctcccctaactgcgcccccgttcagttccggtcggcggctccttcctgctgggtgcagtccccgaggctgcttcttgcccgggaagaggcgaaaaggagcggggt

SEQ ID NO: 43590 - DNA, 618 bp, Homo sapiens
  chr6:150284551-150285169
  hyper
catcatgattgatcacggtagccctctagggctttctttcttttctttttttttttttccagaagtcataaagggatatagaatatactcaaagaccacctcatgcttttagtggagaggcaaaaaaggttcgctccggaatggggaagcggctgcgccctggacggagaggggcggggacttcgcgactgcaggcggagggagggcgggtgtcgctggcgcaggcggtgacagggagacaccgccgccactgagtattcctatgcaagtttcttcatcttcctgtgcatcagtgtttacactggggtaatgataaatgctgtgttgaaaaattatttgatggggccatggaaggaacggaaggaacggcgtcctggcccgctcggggcccgcgcacgccgccaccaagccgcgggggcgggtcggaggggagagttgcgtcagccaggccgctgtcagatgacgagcccggggcgtgacggggtggagcatccccaaaaaagtgcatgcctaggatcccgcccagtgtatccctgcgcgcggcgggccgggctgggcagctttataaacagccgtggtgtgagcctcgaagggaaccatcagcgcctcctgtccacg

SEQ ID NO: 43591 - DNA, 341 bp, Homo sapiens; identical to SEQ ID NO: 5189
  chr6:150285544-150285885
  hyper

SEQ ID NO: 43592 - DNA, 376 bp, Homo sapiens; identical to SEQ ID NO: 5190
  chr6:150286099-150286475
  hyper

SEQ ID NO: 43593 - DNA, 30 bp, Homo sapiens
  chr6:150311537-150311567
  hyper
acaccggtgttcgccgcgcaggggaaactg

SEQ ID NO: 43594 - DNA, 484 bp, Homo sapiens
  chr6:150311892-150312376
  hyper
ttttgtggatttcaaccgctaaagcctttcctcaaagttcattgcgaggggtttcagttccgcccggcagcatccctcagggttctgcgcgctcccgtggcaccgtctgcgcccgagctccggtcccgtcccgattgcctgatgccccgcagggagcgcccagcggccgccgatgtcccaccagcaggcaccgggcgcctagcgggacccgcgggcggaactgcctttggaagacgcgtgagaactccaccccatcgcggcaggggacagttattatctccgagcttgaggtgaggggaaatcagaggcggctgatggtttcctcctacagcctggtgctgggcgcggggaggactttacacccagctcctgccgagacgtgaccttacagctggggtccttggggctccaaaagtgcggcttccgcgcggatcccattcctgcttgctttgaggctgctggtgagcggcgcctgcgcagggga

SEQ ID NO: 43595 - DNA, 30 bp, Homo sapiens
  chr6:150326006-150326036
  hyper
gcagccgcaggaagcggacccagcgtaaag

SEQ ID NO: 43596 - DNA, 237 bp, Homo sapiens
  chr6:150326374-150326611
  hyper
ctagtgaattggaccgctccgccccgtccagccccgttccgccccgccgcaggctgggatccaaggggcgtgatccgacggctgccttgtttgggcatgctccaccccgccctgctccggggctcgtcacgtgacagcggccccggcgggcgaaccctccccctccacctcggccccgcggcttggtggcggcgtcaccgggctccgcgcggggcaggacacggtgccttccatgac

SEQ ID NO: 43597 - DNA, 507 bp, Homo sapiens
  chr6:150358685-150359192
  hyper
tgggctacgagagtccggggacgggcaatctgggcagagtcgcacgaggctgctgcagtgatgaggcactggttctagaaatttacccaacggtgttgtcataggggggacattacaggtgattgctgatttcaaccacagatgactttcggggaaagttctctcctgggggtttctgtttctaccccgccgcgtcctctccgagttctgcgcgctcctcccagggcgcccgctgtccccgagctctggacccgggtcctgcccagtggagaccgcggagttggtgccccgcttgcggccgatgctcccgggcctccgagtccacagcgtccggacaaaacggcctttggaagacctgggaggactcgccggtagcggcaagggaaggagccaggaaatgcgggggtcggtggggtgaggagcacggggttcctacttcatcctcgcggaaactttgccaccggctcagtgtggagacctcaccgtcccgcttggatccgtggggct

SEQ ID NO: 43598 - DNA, 497 bp, Homo sapiens
  chr6:150463561-150464058
  hyper
gtctggaaataatttctcaagcgccgtgactgccttattgcacaaacatcgcctcttcgatgtttctcacaatccagagaggaagtggcatccatcgtggcatgaataggaatgtgtgtttggagccgtggggcggggctggaggggaggggacgctacccagccaacagaggagacggtggggctaggaaaacctcctgggggagcctgcggcgcggtcctttcctgtgtccccttcgctgcgggtcctgcccggggccgcgccaggtggaggccccgagaggcggcgcgtttcctgcgctccgggattgcgggagaagcgtgagtccctgtctccgagactagaggccacggacacccgcgcaggagcatcccctggcaccccgccccacgcccgtccttccggagtctacacatcggcgacctcccgtgtctaggcgcacacatttcccgccccgcggagactcccacgccccgggccctctctgccgcaggcg

SEQ ID NO: 43599 - DNA, 30 bp, Homo sapiens
  chr6:150465034-150465064
  hyper
tcactgctgggatccgggcagccctgattt

SEQ ID NO: 43600 - DNA, 333 bp, Homo sapiens
  chr6:150920421-150920754
  hyper
actttactgcagagccggtgcctttaaacatctctctggctgtcaccggttattctttacctccgtttccacttttactttctctaggcaaaggtcgtttggtgctttaaccgaggtgattagggtaatgacgcctgaagaacaccgggcttccccctcttttcacttgattaccggcaaagcttctatgtaaaactagaatgttcactaaaaccatgattttgggtattattttaaaggactcacataggaaattattacgtccaaaggaaagctaaacctgaagagctaggaaaatgaaaaaaagtgatgtgtctgcgaaaacagtagcag

SEQ ID NO: 43601 - DNA, 83 bp, Homo sapiens; identical to SEQ ID NO: 5193
  chr6:150920981-150921064
  hyper

SEQ ID NO: 43602 - DNA, 767 bp, Homo sapiens; identical to SEQ ID NO: 5194
  chr6:150921276-150922043
  hyper

SEQ ID NO: 43603 - DNA, 119 bp, Homo sapiens
  chr6:151561221-151561340
  hyper
gaatccagtgtccccggcaggctttttgctcccctgctctcttgccttctgaggccctgggtcgtccccgcagctctagtcgccctgttagaaacgggaggcgcccgagggccgggtgg

SEQ ID NO: 43604 - DNA, 623 bp, Homo sapiens; identical to SEQ ID NO: 5196
  chr6:151561368-151561991
  hyper

SEQ ID NO: 43605 - DNA, 610 bp, Homo sapiens
  chr6:151562056-151562666
  hyper
cgcggcggggggcttgcatctttgtcgcgggtctccaggggaggcgactgcgccatgcgcaataataaaacccgcgccctgcccacggcggctgagcctttctgcgcactcttccggtgggagccatgcagcccgaggcggaggagctgcgcggagggggatccgtggagaatggaccccgggccgggcctccggagctccgagatgcggaaagtcagctgtgaggccaggactcgtggtggagcccgccggggagcccagccaccctcgggttccccgtcgcgtaccgccctggatgccagcggtgcctggagcgagcgggtttggtacccagtcctcctgcggcagcggcccgagcaggcaccgccttcccgaggcagagaaagcctggggtgtagctcgctcagagccaggaaaaacctgggcaggcgctgcgtttccagaaggaatgacaggtttcgcaaaccagccagcgccctcgcgttcgctcagcgctttgcctgcagactcagttggccaaacacacgctagagtggctagaagttctcaaaggatggggtcagtgtaacgagcattccgggtactcttccctggacgcagtgctgaaacg

SEQ ID NO: 43606 - DNA, 30 bp, Homo sapiens; identical to SEQ ID NO: 5198
  chr6:151772931-151772961
  hyper

SEQ ID NO: 43607 - DNA, 30 bp, Homo sapiens
  chr6:151773674-151773704
  hyper
aaagtgatggctgtcgtcccggcgtctctc

SEQ ID NO: 43608 - DNA, 998 bp, Homo sapiens
  chr6:151814959-151815957
  hyper
gcattcactgcagagtcccaccgggaggaccgaccgttatccccgccgactccccccaggtcgccctggcagtttcggccgctcagttgcaggccctcgccacggaggccacgctcgggggttcggggtccaccccggcctcctgcggccgggccaccctactcgcgcgcagccgcgcgccgccgcgtccccgcggtgtttacccgttgcccgaggagacacccgcgccacccgccggctcccggcgccgccgcttcctcagggccggttccgggtccgagcgcgcccccgggctcgggtcgtcatgagcctggactgcaccagccatatcgcgctgggtgccgcttcgccagcgcccgaggtacggtcccagccgccggccgcgcgcgggggtggccctggggatagacgacccaggaggggccgaggcgcccctgatttgcacccttttcctcccggaggcgtgggcagaatcagagcagctctgtgcccgcgagggctgtggcctgggactgccagggcgctgatttcaggaggggatgggcaggaccggagtttgcggagcgcgtctgaattttaggttgtgccactctgcttctctgaccatttaaaccggtgacattcgaaagactgtggccgggcagttcctccccgccacccctgggagcaaagaattccttcatttaactttccctgcttagctactgaagtgtgcttcggagcaatttctggaaaatctgatgtggcaggaggagggccagcccggagtagagtcaccggccctttcgttgcgaagtaatccagaaacgttggtaattcagttgttcctgaatgcatctactcatttactcccaggagttacttaggtactggggactttcaggtattagatgtaccaatgcgcgcgcgcacacacacacgaacatgcgcgcatacacagacgctcgtgcacacacgcgaacaggcacatacgcgaacaaacacgggcgcgcacacac

SEQ ID NO: 43609 - DNA, 30 bp, Homo sapiens
  chr6:151918840-151918870
  hyper
aaagaaatggaaacttacaagaatttaatc

SEQ ID NO: 43610 - DNA, 30 bp, Homo sapiens
  chr6:151942178-151942208
  hyper
tgatctttagggacttctaatgaaaagggt

SEQ ID NO: 43611 - DNA, 30 bp, Homo sapiens
  chr6:151948350-151948380
  hyper
catacagtcacatacgcatctacctgaaat

SEQ ID NO: 43612 - DNA, 30 bp, Homo sapiens
  chr6:151952316-151952346
  hyper
agcactgcagctgttggcctgtggaaatgt

SEQ ID NO: 43613 - DNA, 30 bp, Homo sapiens
  chr6:152417445-152417475
  hyper
taaggaggttggattcgatcatttttaagg

SEQ ID NO: 43614 - DNA, 30 bp, Homo sapiens
  chr6:152437000-152437030
  hyper
gccagcccttcccaatcgtctgcacctggg

SEQ ID NO: 43615 - DNA, 755 bp, Homo sapiens; identical to SEQ ID NO: 5200
  chr6:152622775-152623530
  hyper

SEQ ID NO: 43616 - DNA, 30 bp, Homo sapiens; identical to SEQ ID NO: 5201
  chr6:152720395-152720425
  hyper

SEQ ID NO: 43617 - DNA, 254 bp, Homo sapiens
  chr6:152957526-152957780
  hyper
ggatattaatagggacatctacgtacgagatgcaaagaggctccccaacctcctagtctccttatctatgagtatcgcacacgtacacacatcactgccaccaccccctcccatcaagcacgcagagccccagcgtgcaggcacaaacttgctgacaatttgtctgcaatgtgttcgtcttgcacctctctctcctctccctgtctctgtctctccctgtctcccagtctctgtctttccttttaccttctctc

SEQ ID NO: 43618 - DNA, 689 bp, Homo sapiens
  chr6:152957815-152958504
  hyper
cgagcgaacgcttcctcccggctctctgcgcccaggctcggcgggaccccggggatgcgcggctgtccgcccgccctgtcgccgggatcgggcgcggtctgcaggactgcgggagcccagccgccctggtgacagaggacaacaatctcagcccgctgcggccggcggccgcggcccggcgcccgcgctcaccctggctggctcgcccacactcactcccgcgccgggctgctcagccgcgctccccgccctccgcgaccggttcctcctcccggctgctcgctggggggtgaggcctcccccttcgccctcccccacgcatctactgctcctgtcgggaaggaaggtcgcccaggccggttcagcctctgggcagggtccctgcaccgccctggcccgccacaccccctccccggctccgtgccccgcgccccgcgcccggctccgggatgcgccggtgcctggaagagctgggggcggggacccggaggctcgcaggcttccctacctcctggagatgcacggccttgggcgtttctccgcagctgcaaagctgtgctgtgacccacccgctcagcgagcctttataccgggaccacctcccgggggtcgaggtgggaaggaaatgtccctgagagccgggacgcgctgcctccgctgcctggaggagctgcgctgtcctgccagct

SEQ ID NO: 43619 - DNA, 80 bp, Homo sapiens
  chr6:153304957-153305037
  hyper
cttccttgcaagcgcgtttatttgtattttcaaccacacttcagacgctactggtttataggaacgttaagtttactgag

SEQ ID NO: 43620 - DNA, 138 bp, Homo sapiens; identical to SEQ ID NO: 5205
  chr6:153323991-153324129
  hyper

SEQ ID NO: 43621 - DNA, 576 bp, Homo sapiens
  chr6:153450984-153451560
  hyper
gggtcaatcgtccccgggcgacaggggttctcccacgtgaaccgacgtcccgggctccgggcgaggcgcagggctcagggcgcagggcgggtcccgtacgcagggcgggcgcgcgggcatctttgtggccaggcgaccccggctcgctctcccggagcccagggactcccgaggctggcgcgggctgcccgcgacaaggtgccagcagcctcgggctcgcgaggagcagctcccacccgcggcttccgagtccagctctgtccctccgccatcccctagtcctccggcatttattcagggagacagggaggcagagagaagaggagaaagcggccgtgtctgcacccagcctctgccgcagcactcgatgagggacagcagggaggctggcggggaggcagagattaaactatgattccatcgatcacggaaagaccaccatcacctacagcaaaggaggctccgatgcgcccacccgggcagcgactcgcggttggtgggcgttcctcgtcctcgccccctcggtggctgtggaatccaccccgcgccgcacacgccaggactccctttcctttg

SEQ ID NO: 43622 - DNA, 370 bp, Homo sapiens; identical to SEQ ID NO: 5207
  chr6:153451759-153452129
  hyper

SEQ ID NO: 43623 - DNA, 611 bp, Homo sapiens; identical to SEQ ID NO: 5208
  chr6:153452143-153452754
  hyper

SEQ ID NO: 43624 - DNA, 102 bp, Homo sapiens
  chr6:153452788-153452890
  hyper
cgcgggagccttgcacccaggagccggcctgccaggcacagcagcctgcctgctccgggtcccggaggaagcattccctgcgtgggggttcaaggaagtgtg

SEQ ID NO: 43625 - DNA, 455 bp, Homo sapiens
  chr6:154360329-154360784
  hyper
cctactccttggatcgctttgcgcaaaatccaccccttttccctcctccctcccttccagcctccgaatcccgcatggcccacgctcccctcctgcagcggtgcggggcaggtgatgagcctctgtgaactactaaggtgggagggggctatacgcagaggagaatgtcagatgctcagctcggtcccctccgcctgacgctcctctctgtctcagccaggactggtttctgtaagaaacagcaggagctgtggcagcggcgaaaggaagcggctgaggcgcttggaacccgaaaagtctcggtgctcctggctacctcgcacagcggtgcccgcccggccgtcagtaccatggacagcagcgctgcccccacgaacgccagcaattgcactgatgccttggcgtactcaagttgctccccagcacccagccccggttcctgggtcaacttgtcc

SEQ ID NO: 43626 - DNA, 1469 bp, Homo sapiens
  chr6:154830546-154832015
  hyper
gcctgaaaatgcagcgccaccggggatactggcgcctcccggagcaaaagtcactgcctcccggggagtcctggctcgaggtttctccctggcgcaaatgctatggtgttggcttttgcgcggccctctcgccttctccaacaaaaacagacaggctcggcggacccgccggagtctccctctacctgtccgacagccctgtcacgcctgcggacggctctgggcaggcggcatggacgaggtcccgcgggagtcacccacacaaaggcaccttgtgcctctgcactcgggcccccgggtcgccgggcaccgcaccggggccaggcagggagagcgccccccggcccgagtgccgagtcccgagatcggcatccccagccctcaaccgccacagaaaggccacccctactccctggtttaaagatagggctcccctcggcttgccacaatccgcaccctggaaaggaagagctcggagcaggtacgagagataggagcgcacaggccactcggcagaagtttgcattgtcaccgggctgtgccctcaccgcttctcgccgggaggaagggccaagtaccctcttccccagctcctcgtccgccccatccccgaggctggaggactccggacccccccaaggcccgcgcacctctagtccagtccaccacttgtttggggctccacttggtcacgggttccatggtaaaccgcttcgcctctcgctgggctggagagtcgcagataaagtgctgctgcctgcgctccggtgccccttcccgggagggcgcgcccgcggctgctcccctgcgcccgagcgactccgtcaagactgcatggccgcggtcagccagtcgtcccagcgcggctccgccaggggagcccggccctctccctccagctgccacagtccagctgcagctcctccttcccccgccgccgccgggatcccgggcacagctgctgctcccgagcgacggcagctgcaggcacgccgggctgcgaccccagacccctggcctcggctcggcacgggagcctcccggcccgcgaccacttcctcggatctctcgaggcgcgatcggctctccctcggccggtcttctcgcctgctggctctccggggtccccgctccgcgtgcgctggcgtcccggagccttcccggcgcaggtcccacctcctgcgccgccctcccgtgccgccctggcagggccgagcgcagagcgtgcgcgctcgggttgcaaagtttcagctccggttgctgcaaaccgaataaaagagagggcggggccgagggtctagggaaactcgtgggagggggcgggtccgcccgaagcggcggactcgggttactttccctctctaagccggtccggctcacacccgcagcgtcccgggccccgctttccttttcaaggggcgggttgtagatcgcgcgcgcaccctggagagcccgctggtttgtgtgag

SEQ ID NO: 43627 - DNA, 823 bp, Homo sapiens
  chr6:155316286-155317109
  hyper
gttccaaagaaagcgcgagggacatggtccgggaccagccgggagctggcgcgggggtcctgggcctgacgctgggcggggctggggcgtgtccggggcggggcggggcgggaggtgcggtcgcggctcgggcctggcaggcgctgcgcgcggggctggggcagcggtaaccgtaactgtggccgcggccgccgcaggcgcacagcgcgcgtccaagtggagaacaaagtgacccccagaacttctccaactcctcccggcgttcccgcgagggccacgcgccgagggtagcggagggcggcgcgcgaccggccccaccgagcccggcgcgcgacccgaggtaaggggcgcccgggtgagggcgcaggagggcgacgacccgcgctggttggcggcggctccaggtcccctgcgggcggggcggcgcgcggccggcggtcccctcccttcccctttgttggccgcccctctctgcccccgctttcctgggagtcccgcggaaggtcgcggctgcggggcgcggcctggcaccctctccccggagggcggcagcgtccgggcacagcctggcacgggggacgaagcactttccagaaggctctgaaactaggtcccctggtcccctcgcgctgcgcgacacgccaggacccactttcagccccggtcccatcccggatgggaggaggcggcgccccggcctcctgataccgaggttctcgcccaaagccgagccgtgggtgcccggaggggagcgcccgctgcgcccacgcccgcccggcgacctcggagcctcagaaaggcgctgcggcgaagcaggatccca

SEQ ID NO: 43628 - DNA, 192 bp, Homo sapiens
  chr6:155635390-155635582
  hyper
actggggagacatccggggagcactgctaagccatccacctgtcagcctcaagtccaggaggaaattctgtgatagctgcttcgctgcttgcagtcttaacaacttaatgatttctcgaatcgtgggcaacggagggagacggcaagtgctgagttttccggaggcagccatgatacgcggcaagcaccatc

SEQ ID NO: 43629 - DNA, 30 bp, Homo sapiens
  chr6:157008124-157008154
  hyper
tactgacaactattcgagcgtgtgtagcag

SEQ ID NO: 43630 - DNA, 30 bp, Homo sapiens
  chr6:157008874-157008904
  hyper
gcacacccccgtcccgcagttgccaggagc

SEQ ID NO: 43631 - DNA, 30 bp, Homo sapiens
  chr6:157097785-157097815
  hyper
ctcctttgggaatacgtggacatattcctt

SEQ ID NO: 43632 - DNA, 30 bp, Homo sapiens
  chr6:157098323-157098353
  hyper
agcggccgccgagccgccccggccccggcc

SEQ ID NO: 43633 - DNA, 30 bp, Homo sapiens
  chr6:157100263-157100293
  hyper
ggcttccagcgcttcgccggccagaaccag

SEQ ID NO: 43634 - DNA, 30 bp, Homo sapiens
  chr6:157103459-157103489
  hyper
gtaattgggacaaaacgtgtatatattata

SEQ ID NO: 43635 - DNA, 30 bp, Homo sapiens; identical to SEQ ID NO: 5213
  chr6:157343361-157343391
  hyper

SEQ ID NO: 43636 - DNA, 31 bp, Homo sapiens; identical to SEQ ID NO: 5214
  chr6:157446395-157446426
  hyper

SEQ ID NO: 43637 - DNA, 532 bp, Homo sapiens; identical to SEQ ID NO: 5215
  chr6:157556764-157557296
  hyper

SEQ ID NO: 43638 - DNA, 30 bp, Homo sapiens
  chr6:157744525-157744555
  hyper
ctccatgtttaggtcgcctctagtgcgtcc

SEQ ID NO: 43639 - DNA, 30 bp, Homo sapiens
  chr6:157802481-157802511
  hyper
ctgggaggggttgccggtgccgcgcgcggc

SEQ ID NO: 43640 - DNA, 60 bp, Homo sapiens
  chr6:157802883-157802943
  hyper
ttaacctgggtgtcctcggcaaagttgtcgccgagccgggagcccgtgtaggggccgcgg

SEQ ID NO: 43641 - DNA, 425 bp, Homo sapiens
  chr6:158244129-158244554
  hyper
caggaggcgaggaggccgggccgcggccgagggcccagggcgcgcttccggcgggcgtcgcgcgcgccgcggtaaatgggaggctcggccgacaggggcgggggccgcgcagccggggactttcaggaactgcaggagcgtgcggcgcgggagtagccgagcgcccagcggctgggcctgagcgtcgagactcggggccgaggcggaggagcggccgccgcgccggggcccagccggagccgccgccctcgcccttgcctttgcctgcgcggctcagaatcaccatccgcggcgcgggagacgagccggccgtcccgggccgggggacccgcccgccatggccaccaaggtgaggggcgcgcggcgcaggccgggccggtcgctcaggcccggggcggcgcggagagggtcggggccggggccgc

SEQ ID NO: 43642 - DNA, 427 bp, Homo sapiens; identical to SEQ ID NO: 5218
  chr6:158402207-158402634
  hyper

SEQ ID NO: 43643 - DNA, 34 bp, Homo sapiens
  chr6:158402897-158402931
  hyper
actctggcaagttgcgggcgcgcggggagctgtc

SEQ ID NO: 43644 - DNA, 154 bp, Homo sapiens
  chr6:158430536-158430690
  hyper
tctggcaagaggagtcgaggaagggggctgaggaggtagaagggagggctttcctcaaaaggccagaaattcgtggccagccaaaggggaagcaaagacattctcgtgtaggaaaacttacaggaaatgcaactaaaagcgtgggagacaggaa

SEQ ID NO: 43645 - DNA, 176 bp, Homo sapiens
  chr6:158589287-158589463
  hyper
tgaccccgccccctcggcccgctctgggcccgcctcccgccggctggctccacccacaatagcgtccctagcgcgatggcgtatcggcgcaggcgcactctgccggcaacgccgaggcgcttctgcatctgtgggccgaggtgtgtggcgagcgtccgagcggctggggaaagtgg

SEQ ID NO: 43646 - DNA, 30 bp, Homo sapiens
  chr6:158652815-158652845
  hyper
acttccggctcaaacgaagttcagacggcg

SEQ ID NO: 43647 - DNA, 1228 bp, Homo sapiens
  chr6:158957206-158958434
  hyper
aagaagccagaagtcgcccgcgggagctgtccgcggtgctgaacgcggtagccggcttcagcctttgacctccccagcaggaaagggccttcggtccgcccccaagcaccattttccttcgtgctcccacctccagtgtcttcccttcccagcgctgccaatggcgagggcggcactgagatttttgtcctgggcggcagacgaccttgtgttgcacttcctcccccgccttctgcctctcccggggcggcggcggatgggcgcggaggcggatgggcgcggctccctcccccactcaggcctcttcacggggcggggggccgggtcccccagcccccacccgcgccgtgtccagctcctcgcgtgctcgcggcggagccctgagcgcactgggtccgagtcctgcgcgccccctcaccacctcccccgcacctgctcctcctcctcggtcccgcccagcgcgccagcagcccgatccccagtgctgggagaagagagggggcgcaggcggcgacacaaagggtggagcggcgggaccgggacccgggaggctgcgcggcatggacgccgagtaccctgcctttgagcccccgctctgcagcgagctcaagcacctgtgccggcggctgcgggaagcgtaccgcgagctcaaggaggacctcacgcccttcaaggatgaccgctactacaggtgggcgcggcgcgggcagcggcggggcggccggaggcttccgggccgcagtcccctccgggaccccggcgcgccccggccttggcctggtcccgccgacggccgcctccgccggccgggcgcggagcctacggatggggacggggtcggggcggggatctgggagggaccaggaaggggacggggagcagggatactggcagcggcgggcaggttcctggattcagggcagcccggcgcccccgggcgaagggccgatttccgttcagctgaaacccaagccgaggctcccgcctccccggaaaggagctgcgggttgtggctcctccctgcgccccgcgtcgttctccccccgcgcccgcctcgccgcccccgctcgggcctcacgcggcgcagtctggggaggcgaccgcgcgcgctgcggcgtcgggaggagggtcttggccgcagctctgagcgccctaggctttgcaggacgcctcggaggcgggggcgccgccaagggctgggggcggatgggcgcggcggggaagacgc

SEQ ID NO: 43648 - DNA, 30 bp, Homo sapiens
  chr6:158981426-158981456
  hyper
cggaggtgtttgcgcggggcgagagtagac

SEQ ID NO: 43649 - DNA, 30 bp, Homo sapiens
  chr6:159065923-159065953
  hyper
gtggaccctgaattcgcctctcctcctgtc

SEQ ID NO: 43650 - DNA, 340 bp, Homo sapiens
  chr6:159290823-159291163
  hyper
ctggatggcgggcgcggccggtgcagagcctcgcgctggggtggggttgcgcgcgcaggtgaggggggcggggccggcgcgaccggcggggcggggcggacactcccaccgcgcacctgcttctgcctgacgtgtacccggaaggtcgtcagctcaggctccaaatatgtaacagtgagtttctaagtgagtcacacggacgcggttggtttccagtgaggcataactcatcgcttcactcttctcaacggttccctcttcggaaggaagcgcagtccgcagcgtcgtccgagggcgtgatcgcctgcgtcgcacccgcgtctccagtggccaccccttg

SEQ ID NO: 43651 - DNA, 30 bp, Homo sapiens
  chr6:159420451-159420481
  hyper
ggcttggtcactcacggctgcgtcaggctg

SEQ ID NO: 43652 - DNA, 30 bp, Homo sapiens
  chr6:159421014-159421044
  hyper
ggcctgcggggcaacggtggctgtccttgg

SEQ ID NO: 43653 - DNA, 30 bp, Homo sapiens
  chr6:159421513-159421543
  hyper
gcggggtggggctgcgcttaaaaacgcaga

SEQ ID NO: 43654 - DNA, 30 bp, Homo sapiens
  chr6:159463878-159463908
  hyper
aatacgaatcgctgcgggaagccttgaacc

SEQ ID NO: 43655 - DNA, 346 bp, Homo sapiens
  chr6:159589740-159590086
  hyper
tgtagcctccaggggcgctccgagtccatctggagggccgcgaggcttccaggctggaaggaggaatagggagaaggaggaatagggagacctggggcagtgttacaattacagaaaagggagaggcgaggtccgctgagtccttggcctgggcaacaaggcacactgaaaactgggttccttttcgacccgcatcgtgcgcgccctagaaatgacagccagacggagcagggtctaaggacgctgaaaacccctgacgtgggcgcgccgggtgcgggtagggacgtggaaggactgggctagccacaggaactacagcgctgcggaccgggtgaggggtcccggc

SEQ ID NO: 43656 - DNA, 607 bp, Homo sapiens
  chr6:159590154-159590761
  hyper
cgacttccccagccagaaaatgagagggttagacgaggggaggaacttcctcagccacttggcccggcacagcgaccgccccaagttcagaaccgctaagtcagtccggggcgctccggccccttcgtcccgcgccccgcccgcctccagcccgggccccgccgcccccgtcgcccctgtcgcccgggtcgcccccgccggccctggccccggccccgcacaccggcagggggcgcccgagcgcagctaaaaggctcggcgggaggtcggcggcctcagtggcggagcgcggctgccggtgtgcggccgggagcgatcgccgcggggcaggggcgcggcgggcaccgcgcagagcgcgcagaacagacggacggcggcggggacccgacggcggcgcctcggcactccccagactccggccagcgcccccctgccagccgcaagcacccagccccggcccaccccgggctctcgatggcccccgaggccggggcgaccctgcgcgcgccgcgccggctgtcctgggcggcgctgctgctcttggccgcgctgctccccgtcgcctcctcggcggcggcctcaggtacgcgccgcgcccgggcccccg

SEQ ID NO: 43657 - DNA, 368 bp, Homo sapiens; identical to SEQ ID NO: 5225
  chr6:159590971-159591339
  hyper

SEQ ID NO: 43658 - DNA, 252 bp, Homo sapiens; identical to SEQ ID NO: 5226
  chr6:159654812-159655064
  hyper

SEQ ID NO: 43659 - DNA, 162 bp, Homo sapiens; identical to SEQ ID NO: 5227
  chr6:159655082-159655244
  hyper

SEQ ID NO: 43660 - DNA, 30 bp, Homo sapiens
  chr6:160112617-160112647
  hyper
gtgcaaaccactaacgaataaattaaaaag

SEQ ID NO: 43661 - DNA, 30 bp, Homo sapiens
  chr6:160114163-160114193
  hyper
cctttcttctcacccgcacactgcccggct

SEQ ID NO: 43662 - DNA, 30 bp, Homo sapiens
  chr6:160182814-160182844
  hyper
atgcgtccgaggtccgcggttctgcccgca

SEQ ID NO: 43663 - DNA, 30 bp, Homo sapiens
  chr6:160209888-160209918
  hyper
atgcactcgagtggcgtttcctgggctaac

SEQ ID NO: 43664 - DNA, 471 bp, Homo sapiens
  chr6:160389586-160390057
  hyper
ctgtaggaagcccacgcttgggaaataacattcccacagaaggtctgagaggctctgacgggccaaggttgtaaacccccatgatttgactccacgggcagttaaagtgtgttcccaccccccacggatccgctgccactaggctgtgcgaaggcatttacctccctggcactttgatccaagttccctattttcccctactggtcgatcgaggttgggaacagttgctctaacctgggaagcacccgccacgatccagcagggcgcggtgggaggggaaactgaggcccggctaggcacccccgccgcgcccagcccgccgagaggctcaggccccgggaggcacctggagcctgcgccccgcccgcgccgcttcctgtcccgcgcgctgcgctcacgtgacccgggcctgggaggagccggggcgggcgggggtcacctgaacaagggagtcacgtgagcggggggcgg

SEQ ID NO: 43665 - DNA, 406 bp, Homo sapiens
  chr6:160769388-160769794
  hyper
cgccggctgggtccgcgggtcactccgaggcgcgggctgcgggcggcgggcggcgggcgcaccatgccctccttcgacgaggcgctgcagcgggtgggcgagttcgggcgcttccagaggcgcgtgtttttgctgctgtgcctgacgggcgtcaccttcgccttcctcttcgtcggcgtggtcttcctgggcacgcagcccgaccactactggtgccgcgggccaagtgccgcggcgctggccgagcgctgcggctggagcccggaggaggagtggaaccgcacggcgcccgcctcccgcggcccagagccccccgagcgccgcggccgctgccagcgctacctcctggaggcggccaacgacagcgcctccgccactagcgctctcagctgcgcggacccactcg

SEQ ID NO: 43666 - DNA, 540 bp, Homo sapiens; identical to SEQ ID NO: 5230
  chr6:160769827-160770367
  hyper

SEQ ID NO: 43667 - DNA, 30 bp, Homo sapiens
  chr6:160840236-160840266
  hyper
accttaatagctaccgtcttttctataatt

SEQ ID NO: 43668 - DNA, 179 bp, Homo sapiens
  chr6:161188410-161188589
  hyper
cgaccctggattgctctccccattctcagcctcaccccccactccttccaccccatattttgccgcctcgaaggacatgaaccatctgctggctgaaggcgcttggacctgaaaccagcgacaggttttggcagctgcacgctcactcccagggaggcgagggcgcccggcgaagtgtg

SEQ ID NO: 43669 - DNA, 30 bp, Homo sapiens
  chr6:161413111-161413141
  hyper
cgaggtgagtgtggcggccgcagtcggtcg

SEQ ID NO: 43670 - DNA, 81 bp, Homo sapiens
  chr6:161413418-161413499
  hyper
gctgcctcccctgccgctagcttcggaagagtggcctcactgaagtgcctctcatcattactgaacgaaagtggtccctcc

SEQ ID NO: 43671 - DNA, 30 bp, Homo sapiens
  chr6:161694825-161694855
  hyper
tccccccccgcccccggagcctaccccttc

SEQ ID NO: 43672 - DNA, 30 bp, Homo sapiens
  chr6:163591386-163591416
  hyper
ggttgcctggcccaccgtcagctcggagca

SEQ ID NO: 43673 - DNA, 68 bp, Homo sapiens; identical to SEQ ID NO: 5233
  chr6:163834314-163834382
  hyper

SEQ ID NO: 43674 - DNA, 127 bp, Homo sapiens; identical to SEQ ID NO: 5234
  chr6:163834405-163834532
  hyper

SEQ ID NO: 43675 - DNA, 191 bp, Homo sapiens; identical to SEQ ID NO: 5235
  chr6:163834710-163834901
  hyper

SEQ ID NO: 43676 - DNA, 2793 bp, Homo sapiens
  chr6:163834987-163837780
  hyper
cggggccctcccctcccccaccgcgcgctcgcggggcccgacgggggcggagcgaccctcggaaggggcgtggcgaccgggctcgacgcgcgcacgcgctctggagccccacggctacgtgtcgggccacgtgatgcccaccccgaaagtcccccgtgaagcaacaggacgttaaaaaaaaatttctcttctgcggggtggataagaggttctgaaaaaactatagtaacgggaggcgaggcggaggcagcgctggcgcgtcccgctggaattcctctcgcctgccgcgccagccccgaccgcgcccgcagccccacccgccccgtgccgtggaaagccccgcgccccccccgcggccgtcggccccgcagcccacacccacccgccccgggcgccccgcacggcggcgacccagtccttgcgcccaggcccgccgagcgccgcagtccgtcacactcccgttgcccccgtcgcccgccccgccggggaggcagggaggagggggcgcggcgccggcggctgccccggtcgcggggcggcgggcagcaggcagcgggagcgcgccggccgggacccgctaacggccgccctgcgcggccccgcccgccgcccgcccccggccctccccgcgccgctgcccctccccccgccgccgccgctgctgccgccgccgctggcagcgccgcctgaactgaggcgaactccgccgccaagtgagtgaggaggaggaggaggagaaggaggaggaggaagaggaggagcgcagtcggagcgcggcggcagcggcagaggcgccgcggcggggaccagcccagagagaccccccgagcccgcggcacaggcggcggcggcgctgagcgggctcgaccagccgagcgagcggcggccccggctcctcctcgtccggcgccagcagcccgcgccccgcgcccgcactcggccagccgagacccgcctcccgcccgcccgccggcctcgtgagggacgcgccgagccgggcggccgagagcggcggcggctgggagcgcgtcgggcccgggcggaaagtgcctgcggggggcgggcgagcgcgcggtgccggccgccccggggctcggcgcgggagccagagcgggagccggcgcggagcgggacgccgggtcccgagcggcccgcggccggggctcgcccccgcccctccctcctctccggcggcggcggcggcggcggcgggcggagtgagctgcggagcctggaatatggtcggggaaatggaaacgaaggagaagccgaagcccaccccagattacctgatgcagctgatgaacgacaagaagctcatgagcagcctgcccaacttctgcgggatcttcaaccacctcgagcggctgctggacgaaggtgagcgtctccagggccccggccccggcccgacccccgccggggcggcccctttccccgcttgggatggtggggagggcgggaaggtcacggccgggcgggaccgagcgccggggggactgggaggccaggagggcgcacaaaggaggtgccgggccgggcttgcggcgggcgggcgggccggggtggacccgccggtgccggacgccccctgcccggccgggaccccgcgccgctggcgtccaagttggcgcgttgcggagggctgcggggtgagccctgcggcccctctagcttcggcggtcacatttccgagaggtcggcgggggctgcgcggactcggtggtcctcgccgagccctcccgagagcaggcccacgccgcgccgccggcctggaggacgcgtgtgcccggcgcgggccccgctcctccgctcggcctcccgagcctgctctgcgcggacccccaccgccccgcgttcgggagctctcccctcccgtgaggactaaagcggggtttcgtggttggggagttggtgcagctgttcaatactaagtggaagtcagtgtggggctcgttagtttaaagaaattccgtaggagaccgaaattatgctggcgtagccgacaaggaggactaagtgacggcgaaaagcacttttttcccttttgtttggggaagcgagaactgttagggagttgaacttcacttttcgggggtggggggggggggggtggagtgcgaaataacgcgatgacagatcggagcgcagcctgagttagaagaacttgggcggagggtttgctcccggggacgcagccgcctgagtttgtaggacagggtttcgagacgtttggaaagggcgaaataaaattgagccaaagtttccaaaaagctgtatggagcgctgtggggagtgaagaatgacaagaagattaatgttgaccaactttggaatttccttaagaagttctcatagcagtacctgaagtattaatttctagtagctgtgggtttctgtggacgcctagagaaaaaaaagaccacaaaaaaagtctgtttcgaaaatcgactggccaggagtttgtttgtttttttttcctgcttagaggcaccaccggaggactgtgtaaaggaaactgaaaactacaggttgaagagatgaacaatggagtttagatttttcgcaagaatttcgagattttaaaaatagagtcggggaacaggagtttgaagcttggggagttggaatgtcactagagaacaaaaggccggaaatgtttccatgataaaaaatggttaaagaaaaatcccaggagttctgttgtcttgaaagtcatagaaacaacttaaaagtagaaaatggttaggtgttacggctttctcgtcgttttgcttccgtatgttaaacata

SEQ ID NO: 43677 - DNA, 121 bp, Homo sapiens
  chr6:164377730-164377851
  hyper
actttcataatgcggcgtcctagtggccagatgacatttctggctcgtcacttgttgagccatcttaaccttgaaccagctttgagtccttcacagtcagtgctagcggacagagccccct

SEQ ID NO: 43678 - DNA, 206 bp, Homo sapiens
  chr6:165722843-165723049
  hyper
acctctgtgctttgcgcgctggtttcagattctctgaggaggcagcacaaccccaatccagtcctcagccctagtgaccctggagccggcgtgcagccaccagaaaaagattttcacatttcaaatcagtcttcagaagcccatccctccacaattgaacatcaagcaaatctcacaagccagcaagagccgctccaggccactta

SEQ ID NO: 43679 - DNA, 1050 bp, Homo sapiens
  chr6:166073993-166075043
  hyper
cgcccgtgcccgggaagcggggttgcaaggagcggccgatcccggcgcgaatacgctcgccagcccgggggctgcaccccaaaggtgcctgagcgggcggtgagcccggagcagcttcggccgcagggaggggctcaacctcgggtgccctggagacccgggtcggccaaagcctgggaatgagccgcagttgggagcgggaaaccgaaacagcaatcctggaagagcgtcggcccagagaaggcgccgcggaaacgcggctcctgagcgaggcgcagacaaaggctcgggtgcacacgcggtggacggtggctccggagccgcgctctgggccgcgggaagccgcacccgccccgactggcgccggagtcgggcgggggcccatgggcgcgacctcctgcacccggaggtgctcctacccggccccgccgcggtcttcccgtcctcaccctgctccccctccatccgcgaccgcgacgcccccctcctctgcgcaccgggcgcctcctctttcctcactgtctcccgcctgcctgcttccttctagcgaacccctgccttgacttttctgctcaatcttgtcccccacccccgtgacatgcctttctgccacctctgcctcagcgcgctctcggccccgcgcccgcgggtggcgaggaggagtggccacgccacagtgggcccgggggcgcatcctgcgagtcggaggcggcggcgcctttctcttccaccctagcgacctattgtccttcccttttctctaccaccccggaccccagagaagcccgggaccaacaggacgcggcccggggtgggggtgcgtcccctgggtggaggtgcaaccgtttccaccccgccagtccatgctctggatgccggtcactgcgcggggtgggaggccgggcgcccactccgagtcctggagaacggcggtgccatcacagttggaagcgcggggttctgaggccctggcctccctcaccccggctacagggacccggtgggctggacccccaagtggaaggaagcgcatctgctccagccaagtgg

SEQ ID NO: 43680 - DNA, 1332 bp, Homo sapiens
  chr6:166076300-166077632
  hyper
gttcctccccgggccgcggaggggcaggccgcgggcgggaggggcgcggcgggccggggctcggtgggctccgcccccgcaggacctgcccacccctgccggccgcccgaaccgctgcctggtcctcctctccggtcttcggcttccctcccagtctagtcttcacattgtgctcggcttgggttgcgggaggacccgggcctgggggccaggccccggcgacggcgcctggctaccctcaggcgcgcacaatcggcgtcctcccgggccggggctagggacggcggagaccctccctgcaggcgtggcgtggtgtgtgcgcgctccggcggctgagcctcggcggcttctcgaaagcagcggagaaaagcgccgcagtgccgctgcccgtggaggcggtggtggcggcggcggcagaagacgcccactggcggagcaggcgctccccacgccgccgccgccgccgccgccttccgcgcccacgtagcgcgccccgcgggactcggcccctgcgccaggctcccgcacccgagtgatcctctgtgcgccgcctgcacccggggccggggcgggcggacagagcaaccgctgcgtctctgccctgccttgtcacatctgggtccggtgtttcggattctaaatcctgagtcctgcagctgctccagctgtgcgctgctgggcgagccacgtcggcctgcccgttgcccgagccagggaatcctcctggtagcgggccagcagctccgacccagctgtgctcagtcagagttcccgggagagagttccaactcggacctttggttggagtttaaatcaactcgcagtgtttcccataaactagggtttgaaatacggttcctccccaggactccctttcgcatactcactttaaaacgaacttcgtgtgcacaagcccagtttgccttggttggggttagagaacggaaagggcaaactgtggccaaaaatgagcaagactgtgcgatcattgccccaaaccctgagaccgccttgccatatgcggctctcttggacacccccacccccttccgtagccatgaatccaggcagttgccactgaagggaaatgagccgcccaatgggcgctcagaactaggagccgccagaagtttggggaagttggagcgcaagagcgcacacagatgcacaggtgtccgcgttcgggcaggcacgcgcggcggggccaccatggcgcgctgggtccgaggaggggcggtggctgtgctgttccacggtggcacgggctgtccggactgcctggacgaggtcaccttccccggagtggagcacacgcgccaaagctcagctttc

SEQ ID NO: 43681 - DNA, 616 bp, Homo sapiens
  chr6:166077668-166078284
  hyper
cgctacagtgcagcaactgggttgacccagggccctgggctcccggtgtgccccgggtcccggggccatttctcgccctccacgttttcttctttctatccagtttcacatgtttattttgaagcgtgctccagattcctcactagtcgatgctttccccgactcccatccaaactccccccaatggaaaataacacttttgtatttgcaccaagctgagcagttgggatgcaaaggacatgctggggctcccctcccccagtaaagtccacagacgtctccgcgattgccgggcagattctgagtgtcgcgtgtaacgggcatcagacttggcactcactaggtcagaatccctacatttgtggaagaagaaaatgattcctgtgactcttaccttaggggcgctgcccttgtttctgaattttttcggcaaagaaaaaaactgcaatggttgagccaggctgccggcagcctcccggcttgacgcttctccagccgtgcagagtccactccggttactttgctgcgagtccggagtttgtgctttcgcgactggaccaggcagcaagggtctgagggctgcccacacatttagggaagtcgagtttctcctcaa

SEQ ID NO: 43682 - DNA, 164 bp, Homo sapiens
  chr6:166188883-166189047
  hyper
acttccttagcaacccgcttaacaccgtgactttgaaatcatccgctattttggcagcaggatgaatgtttgctggtcgtgaacttttcaaaggtcatcagctggaaacaagcctgcccacttcctttgcctaccccgccactgcctgtcgtacccatccatca

SEQ ID NO: 43683 - DNA, 355 bp, Homo sapiens; identical to SEQ ID NO: 5246
  chr6:166267536-166267891
  hyper

SEQ ID NO: 43684 - DNA, 28 bp, Homo sapiens
  chr6:166268182-166268210
  hyper
cgagcccgcagaagccccagaggcctgg

SEQ ID NO: 43685 - DNA, 180 bp, Homo sapiens
  chr6:166298486-166298666
  hyper
gcggtgcggccttcatgtgcacgcccctgccgccgtttaccgccaggtggcagcgtagaccaagtaaggaagccggcccacccagagctgggaactacaggggtgtgctttgtggctttcagactcacaaagattccagatgaacatgatgtctctttttaaaatcgatttgaaacgcag

SEQ ID NO: 43686 - DNA, 308 bp, Homo sapiens
  chr6:166400523-166400831
  hyper
ccactgagaactggagaagggcggctggctcgggaggaaggaagttgcggtgcacacaccatcccttctccaggccgcctcgggaggcacctgcgggtctggcgcggcagccgctgcggtttgcagctggcgcgcagccctcgctgggaacttggagctctcaaactcctcggatcaagcgttagccccgaggctgtcagttggcgctggggcgggctgcagtctctctcccctcctctgcaaacccttgagtcttcggctttatatactcccttttcttctttctcgagtccactcatcaccctttc

SEQ ID NO: 43687 - DNA, 266 bp, Homo sapiens
  chr6:166401449-166401715
  hyper
cttgtgtgtgcgtgcgtgtgtgtgtgtgtgtgtgtccgagtgcacttcacatttgggggtgcttgtgctctcaggaacgactctcccggctgcccggaacttagagagtttccctttaagccggagatgctgctcggacacccccccgcgtccaacaggaggcgatgacgtctgtagcctcgttgccagaacagtccccaggctaccgctgccgttcattgacaggagcgggcgctcggacgtcagcagccggacctttggcaagg

SEQ ID NO: 43688 - DNA, 584 bp, Homo sapiens; identical to SEQ ID NO: 5248
  chr6:166402066-166402650
  hyper

SEQ ID NO: 43689 - DNA, 151 bp, Homo sapiens; identical to SEQ ID NO: 5249
  chr6:166402752-166402903
  hyper

SEQ ID NO: 43690 - DNA, 206 bp, Homo sapiens
  chr6:166419578-166419784
  hyper
tgcgcaggagctgccggccctcgcgcgcccctcgcgggccccccgggccccccgcccgcccgcggctgctgccgtcagagctgcctgcgtcaatgctgcttggtgacacacacagctttttttcttctgctcctttttctcaatgagaggagcctaatgggattcttattatcagactcataaatcaaaccgttaggccgtcacgt

SEQ ID NO: 43691 - DNA, 30 bp, Homo sapiens; identical to SEQ ID NO: 5251
  chr6:166422167-166422197
  hyper

SEQ ID NO: 43692 - DNA, 2956 bp, Homo sapiens
  chr6:166579863-166582819
  hyper
aaaggggagtgctcccgctccccgttcgccaggcgtggatgttatcagcttagtataaacagcgctaaaggccttattagagaaggctgtggcagtttctccagggcagacgtcgcctcccgttcaagcagcgtcccttcccacaacccccgtgcagaaggcgcagcgcggccccctcctcgctggtcccagacctggcgggctcctcacacctacctggccccctccgttgagcttgttggtgagcttgactttgctgaaggagacgggagccttcatccagtgggccccgaagttgggcgagtcggggtggatgtagacgcagctgggcgcctgcggctccggcttgccccccggcacccattccccgttcacgtacttccagcggtggttgtccgccgccacgaagtccagcaggaaggagtacatggcgttggggtccaggccagacacgttcaccttcagcaccggaaacatcctcctggaaaacacggggcgggcgcaggaggaccccgacactgaccaggtaggccggaggcagaagctgggcacagaggcctcagttatttcggggcacagaggagccccctggggaacgtccgagggtgactcccaagctcccccttccccgagccctgccaggtccaggtggcctcctcaccatctccacggcctcgggagggaggggaggagaggacctggcgaagggtttcagtgcaggaggccacatcccgcggggacaggcggggaccagggcgcgcctcgcgggtcccgggatgcctccgaggtcgggacaccgaagtgcgcgttcctcctccccaagcttccgcggagaaagccccagaagaggggcttgtagaaatgcactcgagggagttaaccagagcgggaacaaacacaaagccctcctccaggagaaaaagggttcgacctccgggaacttgccaggtcccccaggctgcccaggcgctggagagcgcggcgcgcgcgggctccggacgcgcacccacctgccgttcttggtcacgatcatctcattggtgagctccttgaagcgcagccacagctcgctctcctccaggcccacgcgcagttcgcgctctgtggggtcgcccttctcgctgcccgcctgcagctcattctccacggcgctcagcaggtggtccactcggtactgcaggctctttcccgcgctctcggtgccaggggagctcatcctcccgtccggctcccctccccgccgtccccgaagcccagactcgctacctgagatccaccttccctgctcttggccgccgcccttccgagaaaaggggccccttggaccgagacctgcgacggctcccgggtcccgggtcccggcacagacccgggaggagggcgcggaccaagacttggggggaggggacgggggcagaggggtggggagaagttattccacttgaactccccaaggctctactagtgtaggtctctggggaccgaaattcagtgccctccccataaatagagccgcggcggcagcgctggggtgctcggcggattgggccgcgcacgctttgaagtgccgggcagcctcccattggccgagagcggccatatcagacccagccgggcgggtctgggaggccgggggccaacaatgggctcccgcacgcctgtttcatgtaaatccggggccccagccctgcgagccccggcccagcccctacacccccgcccttctccaaatgtttgcacctccatcaaagcggcggggcaagccccggaggaaggtaagctggacgccccggcctgccccagcccgccccagcccgccccagcccgcacttccgcgaggggctgcccggcagcctgcgatgctccctgattcccgcgcggggtcctcctcgctttcccagcgcgcccggatcccgcagccgcgccaggctggaacgttcgcgcggcctcacctgtccccgctccaggcgcgcctccctcccctcccagggacgagcgcatttggccgggctttgggatgcgccgcgctcgtctcgccgcagtagtagtgctgttctcgcgcctccgatgcctcaactctccagtctggcagtttccggtgcacctgtccccacacgtccctcgcccacggagccccaggcggcgttacgcacacccaggatcgtggatcagcctgccccggcgtcgggtgtccccgcggctctcaccatctggaaaaggaaggtccgcgcgcagagagggaaatggacggaaataagcaaaagcaaaacaaccccttctgagaagtgtcctcctcgctctcttataaaaacaggacttgttgccgaggtcagcgcgcgcatcgagtgtgccaggcgtgtgcgtggtttctgctgtgtcattgctttcacggaaggtgggagaaggtcggggctggcggggtggtccggactagtgggactcggggcgctttccccgcccggcccagcgccaagcggtgtcggcagcggttgttttattacctttcggtgagaacttacgcgaggagagcgaaggagaggtgacaatgagcaggaaatagttcagtggggtctctttaaacagtaacattcctcctaaaacgggagcccaggaagggggaaggaggcagaagctcccccttccaaggcctggctttgcgcttctgcacacctcgcccattcgctggacgagggcctgcctcgggtagcagcctctgtttcccggtctcctgagcgggcaccccagccccaacccctctagagaaagcctgcgcatcgggtggggcagcgagttcagaggagtcttgcgccctagcaagggggctttcccgcggacatggtatctgcgccccgcgctaagtctcccctgccccctgccccctgcccctcgcccctcgcccagccgggctcgctccggggtcgggaattgctggggaagccgaaggagggatccccgc

SEQ ID NO: 43693 - DNA, 154 bp, Homo sapiens
  chr6:166582941-166583095
  hyper
cgacgagtcaggaagccggagcgtctagtccctgtccgcatttctcagtgtcttttgatgtctgggatgcatggatattcccagggggctgacccgaggtggggaagtttccttctagaaagaggcaccaaaaggacctcatttgctcctgacg

SEQ ID NO: 43694 - DNA, 277 bp, Homo sapiens
  chr6:166583152-166583429
  hyper
cgtggtgcgtgttactctccttactccgggtattaaaatgtctaagaggtcatcgctttggcccaaggcctcccgaggataagataaaagggaaaagtggaggggaggtgaaggaggaacgagggtgggtcccaggcaattgagggcctcggaaccctaggcacgggagcgaaacctctcctgcggcttcagggcaaaggagtcccgaaggctggatccctcccctgcgctcggacggcgtcgcggccgcttttcccacagtcgggaagcgccaaag

SEQ ID NO: 43695 - DNA, 109 bp, Homo sapiens
  chr6:166666750-166666859
  hyper
aaaagaaaaccagaacgagaaagtgcggccagcccgggctcaggagctgggtgggaaacaaagccgccagaaaatgacaagtaaacacgcagccgcgggaagccactgg

SEQ ID NO: 43696 - DNA, 139 bp, Homo sapiens
  chr6:166666879-166667018
  hyper
cgcgcagcggggccgccacgcccgcgcggacacggagcagcggcgcctttccctgcgactggctgtgtcgcctggagcccggcggccgccaccccagggagaaagctccggtgaggggagcagacgctgggacccgtgg

SEQ ID NO: 43697 - DNA, 283 bp, Homo sapiens
  chr6:166667349-166667632
  hyper
gattaactctttgccttttcccgtctaaacttctgaagacacctgacagctcgttttaactctgcaaacgacagttcatcctccggggtgtggattcgggctcccacggctgccgcctggggcaagtgcgtctccccgggcgcctacgcggccccgcgcgctcctggcagcgtcgcccccaagccagccccgcctacccagagagggccagtcctgttccgggtcccgagggccttgggaaccccacaggttccttcctcccggggtttcccagcagaccaca

SEQ ID NO: 43698 - DNA, 224 bp, Homo sapiens
  chr6:166721133-166721357
  hyper
gaggggaagggcctgcggggccgcgccagcagctgcttctccagatgacgcttctggatgaccaggacggcctcgggggtgagattcaggcagaagcgcgcagcggagtctggacaaggccccgcccccgaggaggtgcccgcggcggtggtccccgtccccgccgaggtcgccgcataggtggtcctcgctgggctgtggccggagcctgccggccggggcgg

SEQ ID NO: 43699 - DNA, 30 bp, Homo sapiens
  chr6:166722038-166722068
  hyper
aggacagcggagggcggagcgcgcgccagg

SEQ ID NO: 43700 - DNA, 327 bp, Homo sapiens
  chr6:166797105-166797432
  hyper
gctcaggagggagccgcagcgtcggaggaggaaagcatttaagaatagcacaaagccttaggctcgaggaagcgtgactgcttacgtgttgaaaataaaggttctgtaagtcccaccgcgggtgcatattgaaaagaaagggatcattagcacgcgaccctcgcctaggagtatataaaccgcagcacgactttcggatcacaaaggcagagaaaagaacacattgaaggcttttgctcacttttccaagttgtttcgtttcgttttgtttctaatgtggacgatcatttaaaatgcctctggtggccgggcgcggtgactgacgcc

SEQ ID NO: 43701 - DNA, 31 bp, Homo sapiens; identical to SEQ ID NO: 5254
  chr6:166822698-166822729
  hyper

SEQ ID NO: 43702 - DNA, 118 bp, Homo sapiens
  chr6:167039795-167039913
  hyper
aatctgtatcagcctcggcgctgcgaggatattgcatcaggctctttactcctgaacgccgttttagacgcctaagcagattgtgctgctgcctgttcttccccgttctgtgaattct

SEQ ID NO: 43703 - DNA, 30 bp, Homo sapiens; identical to SEQ ID NO: 5255
  chr6:167040720-167040750
  hyper

SEQ ID NO: 43704 - DNA, 356 bp, Homo sapiens
  chr6:167275699-167276055
  hyper
gaaaggaaataaacagaggctcggaccggcacagggggacggccagacgggatgtcggaagccaagggacgcagaggccggcgggtggcggcgatggagaggacagatccggctcccagaggaggtcgtgagcgcggggcctgcgccggccggaggagggacccggggggctgcaatatggctgctcgggcgccgtcccctccctgccaagccagggctctggggagctgctgccgcttcccgctcgggctggggcgaggaaaggaggggacggcgctgcggcttcggaatctgtactgcgactttggcagagtaaacgctgcacttgcagcttcgaattgaatttcctgcctctc

SEQ ID NO: 43705 - DNA, 114 bp, Homo sapiens
  chr6:167276260-167276374
  hyper
ccgccgcgcctccccggagacccacaccgccacctcccgccgcagaacgggagggacaggaacacggacggagggaccgggacgaggggagggctccacgcagcacagctgctt

SEQ ID NO: 43706 - DNA, 30 bp, Homo sapiens
  chr6:167370633-167370663
  hyper
cctctccagtctcccggtgctaggtgctgg

SEQ ID NO: 43707 - DNA, 30 bp, Homo sapiens; identical to SEQ ID NO: 5257
  chr6:167412514-167412544
  hyper

SEQ ID NO: 43708 - DNA, 30 bp, Homo sapiens; identical to SEQ ID NO: 5258
  chr6:167412966-167412996
  hyper

SEQ ID NO: 43709 - DNA, 501 bp, Homo sapiens
  chr6:167764688-167765189
  hyper
cccctcttttctgttcggagactcacggggccgtctgtctggaccacgtgtgcacatttctgaccacgattcctccgcacaccagctacaggcaccgcagcgctggggacggcacagctgaactgtgctggcagcgaaggggcctcacggggacggctcagctccctgagggcgcaacccacctggtccgggggcgggggggggggtgaggaataaacttccgcggttttcagtgacccagtttgttgcatggcacatgttggaaaggtgaatctgaccgcgttgaccgcgttacttcagagatgcgctgtgagctgctttgtgccgcgaaatgacctgtttacccgacagcgccctctgcagcccagcgccggaacgggctttttcatgatgttcctgcgttgtgtttacagcctccctgcgaggggttcgcacgcacaggcggacctcgttttgttgcgccttgctctattgtgcctcgcagatactgcacttgttttt

SEQ ID NO: 43710 - DNA, 472 bp, Homo sapiens
  chr6:168226996-168227468
  hyper
cgtctggacccagcaccgcccgtctggaaccagcaccgcccgtccacagatccatcaccacccatttggacccagcaccgcccgtccccgcccgtccggaccgaacgcagcaccgcccatcggacccagcagcgcccatttagacctagcaccgcccgtccgaaccgaacatagcaccgcccatcggacccatcaccgcccgtccagatccagcaccgcccatttggatccagcaccgcccgtccggactctgcaccgcgcgtccggacccaacacagcaccacccatcggacccagcactgcccatttagatccagcagcgcgcgtccgaaccgaacctagcaccgctggtcgggaaggaacccggtaccgccggttgggacccaccaccgccagtccagacggaaccctagcaccgcgcggggcccgccctccgacacctccctccctggcggccgcggcagcagcacct

SEQ ID NO: 43711 - DNA, 34 bp, Homo sapiens; identical to SEQ ID NO: 5261
  chr6:168227909-168227943
  hyper

SEQ ID NO: 43712 - DNA, 85 bp, Homo sapiens; identical to SEQ ID NO: 5262
  chr6:168228221-168228306
  hyper

SEQ ID NO: 43713 - DNA, 34 bp, Homo sapiens; identical to SEQ ID NO: 5263
  chr6:168228538-168228572
  hyper

SEQ ID NO: 43714 - DNA, 30 bp, Homo sapiens; identical to SEQ ID NO: 5264
  chr6:168720664-168720694
  hyper

SEQ ID NO: 43715 - DNA, 71 bp, Homo sapiens; identical to SEQ ID NO: 5265
  chr6:168841851-168841922
  hyper

SEQ ID NO: 43716 - DNA, 30 bp, Homo sapiens
  chr6:168842476-168842506
  hyper
gggagctgcgggtgcgctcgggtgtcccgc

SEQ ID NO: 43717 - DNA, 30 bp, Homo sapiens
  chr6:169386136-169386166
  hyper
cacacagacaaaatccgaaagccctgtcca

SEQ ID NO: 43718 - DNA, 225 bp, Homo sapiens; identical to SEQ ID NO: 5266
  chr6:169613105-169613330
  hyper

SEQ ID NO: 43719 - DNA, 36 bp, Homo sapiens
  chr6:169653597-169653633
  hyper
gaaaagctgaggagcggccacgtgccttgctcttca

SEQ ID NO: 43720 - DNA, 169 bp, Homo sapiens
  chr6:169653881-169654050
  hyper
caggctctgctggagcgagagaccggccctgcagtgcaggatgctccggtggacgtggccgagcggctcccgggcagcgcggctttatatgccgcttctcctgtgcagggctgtcaatcagacacacgaggaagcacgtttaattcattccttcgaaggaatgacatca

SEQ ID NO: 43721 - DNA, 30 bp, Homo sapiens
  chr6:169776469-169776499
  hyper
tggtgcagcacatcccgaatatttgctctc

SEQ ID NO: 43722 - DNA, 479 bp, Homo sapiens; identical to SEQ ID NO: 5269
  chr6:170124927-170125406
  hyper

SEQ ID NO: 43723 - DNA, 30 bp, Homo sapiens; identical to SEQ ID NO: 5270
  chr6:170190097-170190127
  hyper

SEQ ID NO: 43724 - DNA, 193 bp, Homo sapiens
  chr6:170598158-170598351
  hyper
caggatggggtggaagaggcccgagggcccttgtcatttttcttgggggatgggcacgctccgggtggtagcggtcgcgctgcgcgggtaatcgcgccaccaacgcgtctaggagtcgggaaaccagaaccttcccacgtgaaggggcgcctctgactggagacctggcacagaggccggatacggaaatctc

SEQ ID NO: 43725 - DNA, 438 bp, Homo sapiens
  chr6:170598458-170598896
  hyper
cgctaggcagatcgcagcgcccacctgcgcctcgcggggtccccgaggtcccgccaccgagcgcccaaggcgggatcccagcgcgtcctgcagcccgcccagcttcagggccggcccggcgcgcgcaggtgcggcactcaccggccaggtgaagccgaaggggaagcggatggggttgctgaacgcggagtcggcgcccccgccgtcgggcagactgaaggagtcgacgcccagcacgggggtgacggcgctgccgtaggtgcagggcggctcgggggacacgctggcctggtagtgcttgaggcacacgcggaagaaggtccggcaggcgcacggcggtggccccgcgcccccgcggcagcagttgcggttccccagcagccccttcttgttgacgaactcctgcagcttcagttcgaacaccccagagctccagac

SEQ ID NO: 43726 - DNA, 442 bp, Homo sapiens
  chr6:170599639-170600081
  hyper
gagagctgcagagcttcctcccgagccgattagaaagccgcggtctggaaatcccacgggcaaggcgataatccggggccagcggcgcgcgctgaggggacggtcggcggcggcgggtgtgcgcggcggcccctgcggatcgcggcccggtgtcactcggcggcggcggtcgttccgggagcactccgggctccgatctccggtgtcacagcaaagatccgcgtctttccgatgaatccagccaatgccatccagtacacacgcgcaggaccggaggggccgggccgtgggaggaggctctgcgccgcggctgcccgggttcccctgcgctctgccctcggccgggtcgggtctccgcgggtgcgcgcagaggatctggctctcgccggcgcctgccgcccttatattcagccggccgcccgcatggctaatgagatgcaaa

SEQ ID NO: 43727 - DNA, 30 bp, Homo sapiens
  chr6:170601105-170601135
  hyper
agtggctctttgtgcgctcagctgtatggt

SEQ ID NO: 43728 - DNA, 30 bp, Homo sapiens
  chr6:170604439-170604469
  hyper
acgaagccatcgttcgtcacagcctggaaa

SEQ ID NO: 43729 - DNA, 156 bp, Homo sapiens
  chr6:170604988-170605144
  hyper
gatttgcatgagaacgggcgggtcgcgtggctcagctggcggccccggcgcagatgacggctcggcagcgggcccccgccccctcctctgcgccgcggctccttcccctggaacccgcggatcatctgctggggctgtcccgcgccccatctccat

SEQ ID NO: 43730 - DNA, 30 bp, Homo sapiens
  chr6:170605478-170605508
  hyper
cgcgagggcacaggcggcgcggccgtgcgg

SEQ ID NO: 43731 - DNA, 30 bp, Homo sapiens
  chr6:170615732-170615762
  hyper
ccccgcccaacccacgacgcgggcgctcct

SEQ ID NO: 43732 - DNA, 44 bp, Homo sapiens
  chr6:170862216-170862260
  hyper
ccctccgttgaaaacgtagggcgaaaatcgcagctgcaaagggc

SEQ ID NO: 43733 - DNA, 30 bp, Homo sapiens; identical to SEQ ID NO: 5273
  chr6:170863272-170863302
  hyper

SEQ ID NO: 43734 - DNA, 30 bp, Homo sapiens
  chr6:170863566-170863596
  hyper
cttttctgacggttcgggcgaaggccacca

SEQ ID NO: 43735 - DNA, 100 bp, Homo sapiens
  chr6:170893980-170894080
  hyper
ggcctgcgggtggccgccagggaggcagagccctcccgcaaaccttccctgctggtgtccacctcagggtgtgggaaacctgtgcgctggccgagtgcta

SEQ ID NO: 43736 - DNA, 790 bp, Homo sapiens
  chr7:149019-149809
  hyper
ctaggcgggagaacacggtcaggcccgcaggagacgccgcggcacctgccagaaagagagccgcaggccaagaccaggagacgcgagagaggtgggcagggctgcccgagagacccaggcggccattgcccgccctgcgtctgcgcctgcgccggagcctcctccacactgcgccagcgccgagtccggccgcctcctcattgcgccggcgccggggcttcctccacaccgcgcctgcgccgatgacaacccgcctctacaggacgcctgcgcaacgccatagtcacctcatcagctccgtgcacttacgagtctctctctgatcgaccacgtgttcctgtcggctcacagaggccgcctcagggtcctcccccattgtcttcctcgcaccctccactgttcccggcccttcactctgcgcttgcgcaggagtcgctcgctcctctctgcgcctgcgcagaggccacctcctccccgcccgtccgctcccttggcgtcgtcttgggccgcgccccgaccccttctgtttacgcatgcgcaggagccgccctgcgcgggtggggggctgagcccctgtggcttcaggtttaaaggcgcgagcgccacccacgcaggcacaagggctcctagtcgttttatttttagcgtaaggttttcctctttaacaaggaagtaaaaaaaaaagttgtgcaataaatattaatcgtccttatatgtactcgggaacgttcgtcctttaggttttctcctggcgcatgggcgccgccaatcatttcggggcttattttgg

SEQ ID NO: 43737 - DNA, 1821 bp, Homo sapiens
  chr7:191991-193812
  hyper
gacgggaccggtgccgggagctccgctgccctggcgtcccctgggtccaggcccagtcgctccttgggcctctctcgcggggccgcctccgcctcctccttgccgagacgggcgtggggcacggggtcgccgcccggcggggagctcatccggcggcgcagacgccccgcggctccggggagggacttggcctgggccccggccccgcgctcctctggggaggagccgagaggctgcagctggcggcggcggccccgggcgggagggggtcccaggaagcggccaggccggagccccccactcggccgcagctgctggcctggccagaaccgagcgcgccctcccggtctccgccgcttccctctgcaaaccgcgggcaggaggagccctctccttagcgggcccggagctcagaggcgtcgcggggcgcggccgaggggaggaggaaggagagcgggagcgcagccggcccgggcccagccgtgactcgtggggcggcggctccgccaatctgtgggcgctgacgcggggggcggctccgcggcgctcgatatctgcccgcccgggacgcggggcgccgagaggctcggccaggcgggagctgcgctcggggcggccgctgcacctgcccgggaccccgccggccgctccccgcgcccaccccttccgcccttcgccccccccttccccccagccccggtctcccgggcgcggcgtgagagcagagcccggcccggaggagccgccccttccccgcccgcccgcccggcgcctggagaggagcgcgctgaggatcgggacgcctgcggccgccgccaccgcccaggcccgtcgcgccccggccgggatggacccacacgcccgatgagccccgcgccggcggctgcgagcgccgagcctccccctgctgcggccccagccgccccccgcgcgcccggctccgcggaccaggacccctgggctccccggctgagggcgcggccgctccggagaggccgagcggggacgggcccgagatggcgcggggacccagcgctccggcggcgggcgccctgcacgcggcccgggcccggggacagccccggagctggtagccgcccggcaccgatggaccttgacccgcgaggcggcgccgcgctcgtgcccagctgcagctagaggggcgcgcgggcagaacgcgctccaggcccgggccggcccgcgcggccatgaagatgatgctggtgcgccggttccgcgtgctcatcctgatggtgttcctggtggcctgcgcgctgcacatcgccctggacctgctgcccaggctggagcgacgcggcgcgcggccctcgggggagcccggctgttcgtgcgcgcagcccgccgccgaggtggccgcgcccggctgggcccaggttcggggccgccccggggagcccccggccgcctcctccgccgccggcgacgcgggctggcccaacaagcacacgctccgcatcctgcaggacttcagctccgacccctcctccaacctctcgtcccactcgctggagaaactgccgcccgcggccgagccggccgagcgcgccttgcgggggcgggatcccggcgccctaagaccccacgaccccgcgcaccggccgctgctgcgagaccccggcccgcgtcggtccgagtcgccccccggccccggcggagacgcctccctcctggccaggctgttcgagcacccgctttaccgggtggcggttccgccgctcacggaggaggacgtcctgttcaatgtgaacagcgacaccaggctcagccccaaagcggcggagaacccggactggtgagtgg

SEQ ID NO: 43738 - DNA, 102 bp, Homo sapiens
  chr7:362169-362271
  hyper
ccgccttccaggagctcggtgcacctgctgtcccgcaggtgaggccgaggctgcacggccgcgccacgccaccaggtggcagcagagcgccagggatgggcc

SEQ ID NO: 43739 - DNA, 214 bp, Homo sapiens
  chr7:402447-402661
  hyper
ccctggtgctgttcagctcttcgaacacacataaccgtatcctccgtgactgtcagaagttgtatttcttcctttccgatctcgttagctttcatttccttttcctgccttggcccggacctgcggaaggacgctggtgaaatggtgctggaacgcaccgccccttggtcccgatatcaaagcaaaagcttccgggggtgcttctgctgtgggt

SEQ ID NO: 43740 - DNA, 30 bp, Homo sapiens
  chr7:500667-500697
  hyper
aacaccagggccaaccgtgtgtcccacggg

SEQ ID NO: 43741 - DNA, 755 bp, Homo sapiens; identical to SEQ ID NO: 5275
  chr7:556556-557311
  hyper

SEQ ID NO: 43742 - DNA, 34 bp, Homo sapiens; identical to SEQ ID NO: 5276
  chr7:557625-557659
  hyper

SEQ ID NO: 43743 - DNA, 293 bp, Homo sapiens; identical to SEQ ID NO: 5277
  chr7:557697-557990
  hyper

SEQ ID NO: 43744 - DNA, 37 bp, Homo sapiens
  chr7:558726-558763
  hyper
ccatcccttagggagcgcggcccggaggagggtggcg

SEQ ID NO: 43745 - DNA, 506 bp, Homo sapiens
  chr7:558985-559491
  hyper
gctggcttcaggagcgacccggccggtaattctgcatatttgcggacatcagccccaagaagaactccggagggagtctggggccgccgccgccgccgccgccacaccgatcacctgcctggacgcctggcccggccccggctgcgagctgcgagccgccctgcgcgcccaccgccggccccgcgctcgcctccggcctcctcttgcagccgccgcccggccgggcacagcgcggcccagcaccccctccgcggcgcgccctcggctccggcgccgcgctccgccctccgctcgccggggccgggcagcgcccgcggccgagccgcctggcagccaccacccgccgcccggggcctcgctgcgccgcccgcgcgggcctgagggcgggcgcaaggccgagtcggcgcctccgccgcagccgccgccgggagaggaggaggaggagtaggcgcaggcccggctcgccggagttgggcgggctccgcagggcgcgcgtgtggagccgg

SEQ ID NO: 43746 - DNA, 8 bp, Homo sapiens
  chr7:560773-560781
  hyper
tcaaaggc

SEQ ID NO: 43747 - DNA, 7 bp, Homo sapiens
  chr7:560796-560803
  hyper
cttcggg

SEQ ID NO: 43748 - DNA, 30 bp, Homo sapiens
  chr7:562423-562453
  hyper
cggcctgggatgtccggtcgcccccggagc

SEQ ID NO: 43749 - DNA, 30 bp, Homo sapiens
  chr7:797705-797735
  hyper
gaggggcccgggccgcgtgctcatggcatt

SEQ ID NO: 43750 - DNA, 30 bp, Homo sapiens
  chr7:814375-814405
  hyper
tccttggggcccaggcgagccattaccctg

SEQ ID NO: 43751 - DNA, 257 bp, Homo sapiens
  chr7:822391-822648
  hyper
aactcgatcttcctggcgtggccgcctcccgtcacgcagcgtcagaaactcggtcttcctgccatggccacctcccatccggcggcatcagaaactcggaccttcctggcgtggccgcgtcccctcacacaacgtcagaaactcgatcttcctggcgtggccacctcccctccggcggcatcagaaactcggatcgtcctggggtggctgctcttgttacgcaacgtcagaaactctcctgcgtgggcaccaggctc

SEQ ID NO: 43752 - DNA, 198 bp, Homo sapiens
  chr7:852641-852839
  hyper
cactgaaaccacagcaggggccgccctcactcaccgcaggggacaaccacccaccaaaaaccatttcctctgcggatgcttcccgcccaaagaaggaaccagaagcaggcaggatggggaagcagctggtggagaagccaaattgtttccttaagagaaagggatttacgggaggtggaggttgcagtgagccaagat

SEQ ID NO: 43753 - DNA, 42 bp, Homo sapiens
  chr7:852898-852940
  hyper
aaaaaagagagagagatacggatttcctgagcctccaggagg

SEQ ID NO: 43754 - DNA, 81 bp, Homo sapiens
  chr7:853018-853099
  hyper
cgggctcgggtttctgactcgtctcccaggagccggtttctgtttaccgctgaaaggcacgcctgctgccaaatttgaggt

SEQ ID NO: 43755 - DNA, 230 bp, Homo sapiens
  chr7:889349-889579
  hyper
ctcactgatgacgacgggctgttggagctgctgcttaagccctcatcacagaagctcatagccaccagatcgcatttgctttgattgttgactgtctcgtgtgtaattgagtttcccagtttctacagactgccattgctatgcacggctgagatggacagagtttgcttgtgaatccgccacactcactgcctgtcaccacacctgcaggcgacgactgtaagggcaag

SEQ ID NO: 43756 - DNA, 100 bp, Homo sapiens
  chr7:915757-915857
  hyper
cgcgtggggagggtcccaccccgggacgcttcctgctcggggtcagccgccgccgcagcctgtttacgcgcagcgccccgccaggcagtttcgtgccacc

SEQ ID NO: 43757 - DNA, 31 bp, Homo sapiens
  chr7:932818-932849
  hyper
gtgttgggcgcgggcgcggtggtgtgtgcag

SEQ ID NO: 43758 - DNA, 352 bp, Homo sapiens
  chr7:1001817-1002169
  hyper
acctgcgatgtgggccgcgaccgtcccggcccgtgcaggaccactgtgggcgaggggctgtgaccgtcccggcccgtgaaggatcaatgtgggcgaggggccgtgaccgtcacggcccgtgcaggatcaatgtgggcgaggggccgtgaccgtcccggcccatgcaggatcaatgtgggcaaggggccgtgaccgtcccggcccgttcaggacagtggcctataacctctgacatggggtcacaggagaatgcggcttctgccttgcccctcgcccctgccccgcctccacatacacagctgggctcccctgcagcctccacgctgcagaggccacgcggacagagcccagg

SEQ ID NO: 43759 - DNA, 705 bp, Homo sapiens
  chr7:1007357-1008062
  hyper
tgctcggaggggctcgcggccggctatgcccatcagttccagctcctccttctggatttctcgtttgtagtttcctgtgtccctgcctgtctccacttcacagtaagctcacgccatatagccgcactgcgttggcgagctcatggcacgtggccacaccgcgtcagcgccgactccacggtggctgcgtcacggctcacgtgcactgtgaggacactggggttgctatagacagtgctggggcaaccctgtgcctacacaaaatattctaataagaaacaagactttccatcaactagcggtgatatgttaatacgtctgcagcactcagaggcctgacagagagcagacacgggacagtgacagctgcagccgaatcaggtggtagaacccatgggtgcagggacacagggttgggcgggcccagccgcaataggtactcagttctgtgaggaggggagggacatgtttaaccacgaaagggccaccactgcaggacagaaacagagggcctttgctgcagagaactggagatgggctgagaagcctcagccacccacaggcagagggacgagggcagcctgtttcccagagcctgaggtcggccagattggtggccccacctgccagggcttggagacagccactgccagggtcgccagagaggacgtgacctggacctccccaccccgtctcctgccacca

SEQ ID NO: 43760 - DNA, 71 bp, Homo sapiens; identical to SEQ ID NO: 5285
  chr7:1069636-1069707
  hyper

SEQ ID NO: 43761 - DNA, 339 bp, Homo sapiens
  chr7:1083895-1084234
  hyper
ctgtaaaaagaaaccgcgctgggcactaagagaattctcaaaaactcccagagccctgggtgtgtgtcctcccacagggaatctcgcacgagttcgtcaaatggctggtctcaggttacacaaccagcactgcctccaccgccaccgccccccaacctcactggtccgagcggttccccgcggtctagccgcgagggcggggccggggggcggaggccagggcgggaccaaggctgggggcggggccaggcatggctgccgctcgccggccgggggcggggccgacggtcacgtgtgtacacagggcccgggcggcgtgcgcgccgtgagccccgccgc

SEQ ID NO: 43762 - DNA, 30 bp, Homo sapiens
  chr7:1084579-1084609
  hyper
ggctctcccatgtccgacagggcaccactg

SEQ ID NO: 43763 - DNA, 291 bp, Homo sapiens
  chr7:1126563-1126854
  hyper
gaagacccacccctccgcctggagagccggggctggcggtgcctgaggaccccttcggcctggacagcccacgcgggcttggggggcctcgctctgccctcatggggcggccatcggttcccgaagcggcgagtgaaaattcaaatggccagtagggggcgcactcggaagtggccgccccgcatgaggcagttcagcggccccgagagtccggggagggaggtttattctccgcctgcacgagactgtgaaatccgcaaccatgagcaggagaggcggccctggtgggga

SEQ ID NO: 43764 - DNA, 31 bp, Homo sapiens; identical to SEQ ID NO: 5287
  chr7:1147466-1147497
  hyper

SEQ ID NO: 43765 - DNA, 30 bp, Homo sapiens
  chr7:1216020-1216050
  hyper
gcagcgtagacccccgtccagccgtccctg

SEQ ID NO: 43766 - DNA, 104 bp, Homo sapiens
  chr7:1263475-1263579
  hyper
tcctctcccatgagcagtagtcgaagaggctgcacggaggtcccggcctccgtgagggcggtgggttggagagggcgcctggggcctcaggaccctgctccctc

SEQ ID NO: 43767 - DNA, 720 bp, Homo sapiens
  chr7:1263658-1264378
  hyper
cgctgcgtggccttctccgggaggtggggggaatccgaagaggtcccaccccaggttcggttcccggcttcctggtctttgtttaccaggctccgaggaggacctgcctctctcctcccgcagccctgggccccccactcgacagtttcacatccagggagggacaaagggggacgcggccggattagctttcgcagcgcgcggtgcgttcccggggtgcagctgcttcggggcccctgccaaggctccggcttctgcaggcgggactcgggctcgggccaccaccgcgagcactttcctggccagctccgttcccgccccatcgggccgggccgggccgagctgagcggggcgcggagaccgcggcggacggtggggagagcgcgcgcgcgtccatccgatttcaggcctttgttgccggagcctcgtgccgatgggttaatggggcagaagagatcggtgaagggcgacagaagcggcctttgaaagagggtgtcagcgcggggcagcgagacaaaggccaaaacacacacgggcggagagggacagatggggacgggcgagggaaaacaattaggccgcaagtgcgggggcggggcgcggctccatcgttttccagttaaccaggcctggccggcgcgggccccacgccccaggctggagcggtgccgaagcgcagagcagaccggcttctgctgcgtgcgcgagtcctgcaccccg

SEQ ID NO: 43768 - DNA, 301 bp, Homo sapiens
  chr7:1265098-1265399
  hyper
ataacaagagctgcgtcctggcggctgaccgtagccaccccgtgtctccctgcgggatgacctgagagcgtttcctggaagccgcgcagcccctctcccggcctccaccatcggggccgctcaccctctggggactctggccccgggaccccgggatccaggcccggtgcgcgcggctccggccccgagcgcgctgtccaggctggatccccaccaggcggcgctgcgcccctccgagcccgcccggccgcgctctgcaaaccgatgctgtttaattaacgtgcaaattgagtagattaaa

SEQ ID NO: 43769 - DNA, 30 bp, Homo sapiens
  chr7:1265620-1265650
  hyper
aacaggaacttgcacggctccggcgccggc

SEQ ID NO: 43770 - DNA, 57 bp, Homo sapiens
  chr7:1268388-1268445
  hyper
ccttcaagcattgataattttcggcatattaagcacgttttagcaaaggtgataagt

SEQ ID NO: 43771 - DNA, 30 bp, Homo sapiens
  chr7:1269166-1269196
  hyper
ggccccggggctggcgggccagagggggag

SEQ ID NO: 43772 - DNA, 327 bp, Homo sapiens
  chr7:1269822-1270149
  hyper
aggaacagggcccgcgagggagggggcgggggcgggggaggggcgggggagggcgcgggggagggcgtgggggaggggcgcggggaagggcgcgggggagggggagggggcggggggaccctttaaagcgaccgctccagcggcagcaactgacaaggaggcgattatgaaattttgatgttgaaaatggggggcggggtgggggggtgggggccgagagcagaagccgagcgactccccgcggcgccgccgcagccgagggcctctgaagagctctcgagccgggcgggggtcgtcccggccgcccccaccgtcattaaaggcccc

SEQ ID NO: 43773 - DNA, 374 bp, Homo sapiens
  chr7:1270794-1271168
  hyper
ggggctccccaaattccaggccgcctctcggtctcctggattggctgggcctggtcctcaaccctgcgccgtcccctcctctcccgcaaggagagacaagagggtcattgaagtcggagtcagcgtggatcggcccgtccacgaccttcagttaggaacagggccagactgtgggtccagtcgcagggacaggcagtcgtgtggcaggacggggtggccttgcgcccgccaacccaagcattcccctcctgagcgtttccggcaccccccaccctccccggcccaggcacgggcacctgacccggagggacgcagagatgcgcacggtcccggcctgcccttccctctcacgcgggctagggcttggaggcctg

SEQ ID NO: 43774 - DNA, 320 bp, Homo sapiens
  chr7:1272240-1272560
  hyper
cccaggcaccagcccgcgcctgcccggccctgggcggcccctccctccctccctccctccctccggctccccccgcccccagcccgtcttgttgtgacagttcctgatactgtttattgaggtgcatgtcaggtataattagcaatcgatatggaaaacgtttccctgcacccagcacgcctctgacgtcagagccgattagcgcttcttattggtcccaaattccccgggccgcggctaattatcgggagcttgatgttgataagtaaagcgccggagtgcgggcgaagcatgtgtggggctccgggtccctgtctccg

SEQ ID NO: 43775 - DNA, 280 bp, Homo sapiens
  chr7:1273107-1273387
  hyper
ggcctgggccggtggctgagccgcgctgcgtcctgtgactgcccgcagactcgggggacccggacaaggagagcccgggctgcaagcggcggcgcacccgcaccaacttcaccggctggcagctggaggagctggagaaggcgttcaacgagagccactatcccgacgtgttcatgcgcgaggcgctggcgctgcgcctagacctggtcgagtcccgagttcaggtaaagacccggcgtcgctcccggatctgccatccggaccccaggctctgggcgcg

SEQ ID NO: 43776 - DNA, 267 bp, Homo sapiens
  chr7:1273589-1273856
  hyper
cgtccgaaccgggaagcggcgtggtgggttggcggaggccgggccaagtgaggtctccaggcaggggcgaggaggggaggaggggccggcttggctccgacccggaggagagagggaaggggacccccccccgcccccgcaccgcctcaaccttccgcgcgaggctctgtcacccagcctggagcgaacgagtctgtttaccttgcgcctgcaaaatattcagatggaaacatgtatttattcatcgctttgcagaagggaacagct

SEQ ID NO: 43777 - DNA, 42 bp, Homo sapiens
  chr7:1274882-1274924
  hyper
ctgcagaggcccacccaagtacggctccccaggcccttccgg

SEQ ID NO: 43778 - DNA, 150 bp, Homo sapiens
  chr7:1275045-1275195
  hyper
cggcaggatggtcagcgccaggccgggcgggctgcttagaacacgagccgtgagcggccaggaagggtgaacaggggccttgctctctagcctccggaccaggaacccgacgctctccgtccggggccagaccggccccccaagtaaggg

SEQ ID NO: 43779 - DNA, 424 bp, Homo sapiens
  chr7:1275257-1275681
  hyper
cgcgccttccgggtggaaaaggcgctcgctggaacctgcagctccagtggcaaagcccagctcagggcccgctcggccgcgcggcttcactcctgccccggccgagcggaggttgtgcaggcccctctggggggagcggggaggtcctcggccccggcggccagcccgccgcctgattgtggcttcctctcccctatccggctgctctaggtctggttccaaaaccgccgggccaagtggaggaagaaggagaacacgaaaaagggcccggggcggccggcgcacaactcgcacccgaccacgtgcagcggcgagcccatggacccggaggagatcgcgcgcaaggagctggagaagatggagaagaagaagcgcaagcacgagaagaagctgctgaagagccagggccgccacttgcactcgc

SEQ ID NO: 43780 - DNA, 232 bp, Homo sapiens
  chr7:1277074-1277306
  hyper
ggtctgcgcttaatgcgtccttttgtgtgcgtgtgtgtctgtgttttctgattcaacacatttatgcatctgcggctcccggtccccgcccgccccggcgctccccctcctaccccgcgccgcacacgcacgctcacatccgccgcgcgcccccgcgcgcactggcacacgccggggcgcgcggcgcggggtgacggagccgggggctgcgagggccgggccgctgggctcc

SEQ ID NO: 43781 - DNA, 330 bp, Homo sapiens
  chr7:1277519-1277849
  hyper
gcggagatggggaatcgtggggcggaattttcatgagctgcactctttgtcagcgctcttgtagccggctatattaagatagatgcccaatgatatccctcattgttctgtcgcttatattgatgttgctgcgttatcagcctattgatcatgtgtcgcctgtaataggacaggcgccgccaacgcgactctttacaaaagccgtgcacatttgttctaatagggtccgggtccccaggggacccttcggggacttcaggacatctgcagcgaagaaatattagcaaacttggctggagcctgcagccagccccgcgcccccgcccctgc

SEQ ID NO: 43782 - DNA, 1312 bp, Homo sapiens
  chr7:1280221-1281533
  hyper
gtttgctagtcaatcggttagatgcagactggtttaattttgttgataaatcggttcgttgggggtggggacggggcgggggctgtggggagtggggagtgaggagagaagggtgttgtttctttgctgatttatttttaacccgaggttgtacaagcccctgacagtttggataaattagccaggcctcgcagtctcctaatgagagggtattatttcggcacctcggaaggagcgtgaaaaatgagagagactccatccggaggtgtcggatcgattcaggatcagggtgtaaattatatacaactaaatatccagccgcccataccgctgcttaatacggagcttagaaatgcaacattaaacaaagattatgagagatcgacgcctctggaccgagcccaattcactgctcagccgggtcagcccctgccccgcgggccgaggatggggagggggcgcgcaaggagtgaaaacggcgagtttgggatgagagccagggccaggaggggagcctcgccctcgctactccttccctttcttctaaagccagggagctccccgcccagcattgcccgttccttcctccccgccagggcccagagaaatccgggctccagcaccgggcctcagtttcccggaagcggacttgggccccgatcccgggccctctccgcccttcccaggtctcaggcgtcgctgcgtggaggaggcgcgcgtggctcccggcgccgatgtcccggcccggaaccctgcccgccgctgcgactccggggcgggggtgggtcagcctcgggggcggccggggtgggcgtggaggtggacgcggggccgcatattgggcgcttggttctgtttatctcacttagcggtggagggactggagggaaggggcggcccgaagggaggccttggtggggcccagcggctccctggcgcaccccggacacggtggccacgaggagccggggctgtggccgagggctgcccgcaccccgagacccttcctcgtgggcccctctgcccggggcgccgcccagagggggcccggacggaaccccccgcgcggggaaccaccgggccgggcagagctggcgtgagtatggagggggcgcgtggggacagaaaccccgagctgggaggagcggggcgcggggctggccagtctgcggctctctgggccccgctgggcgtcctcccttcctcccggccgctctctccttgcctttccggggtctccccgcgcccggcgcccctcgcccagccgtgactccctttcctctcggccgcccgactccgcgcgcccctctcg

SEQ ID NO: 43783 - DNA, 695 bp, Homo sapiens
  chr7:1281813-1282508
  hyper
ttggggactttcaataactatcgataatctcatctgcacagaaccccccgcctctccgcgttatcggaaagtttgcagcgtttcccgagcagcgcgggcaaggccggacctgcggtggagccggcacctgccgctccgcccgggattagggagctcccggcttgtggggggtgcgggcggccggtggtccagctcgcccgccccggccgagacgctgggcccggcccccacaggctgcgcctgacgggaccggcgggaggcctttgttcgcagcccggaggccccaggctccaaaccacactcgggctgcggggagcgagcgcgggcgttgccgctaattgctgctaattttgttccattaactttatttactcttgaaccccttaattgttttccacttatttttagtaattttataatgcactaataaccaccccccccccagcctgcggacgcctcccgcctcctcctccccgctccctcctcgcttcccctccctgagcgcgacctcccaggcttcccagccactggccgcgggctccgcgtggcgctggcctccgggcacacagagaagccgcggggtgagcgagagctcggcctggggccacgggtgccggtgggtccccccgggattccgcggggagggcagctggctaggaccaggaccagtgtctccgcgccggaggccagagggt

SEQ ID NO: 43784 - DNA, 370 bp, Homo sapiens
  chr7:1283690-1284060
  hyper
cgaccccagccgacacgctaccaggcctgcaccatagaagtgggctctgagagtgttcccaagccctgggggagggggactccccagagatcgtgtccccgacccctccttccgggcccactgctgccatcccaaacccagccccccagcgtaactcgcaccctcatcccctttcccgaggaatccaaactccggtttaatgagtcgtgaagtgtgagaacttccggagcccgcagcgcccctgatgccaattccagatgtgtgagttgggaggggcgggcctcccggcccgtgagcacccagccgctgccttcagagcgaagcatccagcacccaggttccagcgatcgggggcctgaattggaaacag

SEQ ID NO: 43785 - DNA, 101 bp, Homo sapiens
  chr7:1286444-1286545
  hyper
cggctgggaaacggcccctcccggcgcctccccgaccccagggcagggcccgggaccacacagacccccgcaggccggcggccggagccctggcagccggg

SEQ ID NO: 43786 - DNA, 141 bp, Homo sapiens
  chr7:1286612-1286753
  hyper
cggtgcagatgtaacatctcatttacagcgtggcctccgggcatagaaacaattggcaacaaaagagtaactccggagaattagagaaaaaacccacgcaacaacaacacgagtcgggggcggggtgagcgctccggagag

SEQ ID NO: 43787 - DNA, 30 bp, Homo sapiens
  chr7:1287546-1287576
  hyper
ggcttccgaggacccgcccctcccccgcag

SEQ ID NO: 43788 - DNA, 30 bp, Homo sapiens
  chr7:1288706-1288736
  hyper
ggcagggcaggcagcgccccgccagagacc

SEQ ID NO: 43789 - DNA, 158 bp, Homo sapiens
  chr7:1289293-1289451
  hyper
ctggcactggaaagcacccaccgggacccctgcacccaggcacggagacactgcagaccctggcagggtccgggacaggcccagggctggagggaggggttcgagacaggccacccttcctggggcagcccccctccgcttcctcccacagctctatt

SEQ ID NO: 43790 - DNA, 331 bp, Homo sapiens
  chr7:1408439-1408770
  hyper
gctctccccaggacacccagccgggctctcagccaaccagctgaaccccgggctgcgctctccccgcccctgcctggcgagtgcagattcccgcctattttccgacacccgcctgcagaggagtcgggcgccagatgggatcgaacccagcaaggtgagaaatccgggcggggtggcagatggggaggccttccccggggaactccaggagaggggaggacagcgagggccccgggcgcggcctctcgtgtgcccccagccgcggggcgcaggcccgcagccccccaggggcgccgcagctgtcactccgcggtgagtggcgccatccgga

SEQ ID NO: 43791 - DNA, 12 bp, Homo sapiens
  chr7:1408874-1408886
  hyper
cgcggaccccgg

SEQ ID NO: 43792 - DNA, 30 bp, Homo sapiens
  chr7:1443481-1443511
  hyper
cccctccggccccgcgtccgtgctgacgtg

SEQ ID NO: 43793 - DNA, 685 bp, Homo sapiens
  chr7:1498584-1499269
  hyper
tcacgtctgactcagccggcgggcgggggatgccatggctctggcccagctgcattcggtgtccgggcacactgaggccactgaggacagcctcggggggctgcacggtgggctgtgcctgcccagtcccacgcctcggctccccatcccccagccgcccgggcctcagtttccccgcccgtgtcagcgcgcagccgaacagcagaagaatcaaagggcgccaggcaggacttacatgaggtcgggccggtggcggtgcaggatggcgcagaaagccaggccgtcgcggaacgacgtggtcatgttgcagatattcacgtcgcggtagccctcgcactgctgccggcaccactgttgcagcgccctgatggccgccatgtgggcggcgcgcccgccgcgcggcggaaccgccctccgacaccttcccgcggctgtgccgcgaccgcccggccggcgggacagacgctgggaccgctacggaaccgccagacccacggcgcccagccccagctgagccggactgagggcgacgagtgccgggtccctaagagaagccgagcccggccccgcccccgccggccccgcctccttgtaggccccgcccccagccgccaagtcctgcctccggataggccccgtcctcacacctcccagccccggcataggctcccgcccaggcaggccc

SEQ ID NO: 43794 - DNA, 31 bp, Homo sapiens
  chr7:1499562-1499593
  hyper
ccccgccgctgagggccgagacccccaaccg

SEQ ID NO: 43795 - DNA, 30 bp, Homo sapiens
  chr7:1544318-1544348
  hyper
tggcaggttctgcacgtcccggagagcggg

SEQ ID NO: 43796 - DNA, 459 bp, Homo sapiens
  chr7:1571090-1571549
  hyper
ggtctccccacaggcgggatcctgggactggtgtcgctctcagccgcccacctgccagggttgctggaaggaaggccgtggggaggcgggaggggggcaggtgacagtggccccaaggctcgtccctttgctcacgtgtggggcaggggctccggcctcttcccgctcccactgcgtgagttcttctgtgcctctgtcaagttcaggaaactgtgtatgtgcccgtgactgtgtgtgtctgcgtctgcacagcctctagatcctggggggtgggaccaggcgccaccgagaaacccagaaagccaggaccccgcctggccttggcccttgacctgggtccgcctgggacacagcagtggccctgcactgcattctcgcgctcacaccgtgtgtgtccgtgttcgcggggcctcccgtgtccctctcctggtgtcctgcgtccctgagcatgctgttttc

SEQ ID NO: 43797 - DNA, 30 bp, Homo sapiens; identical to SEQ ID NO: 5299
  chr7:1572312-1572342
  hyper

SEQ ID NO: 43798 - DNA, 30 bp, Homo sapiens
  chr7:1609778-1609808
  hyper
agcggctcgggttccgcgctgccggcaggg

SEQ ID NO: 43799 - DNA, 19 bp, Homo sapiens
  chr7:1703852-1703871
  hyper
cccccaggccgggctcggc

SEQ ID NO: 43800 - DNA, 3500 bp, Homo sapiens
  chr7:1704118-1707618
  hyper
cggagtttctgggctgcggagaggccgttggacccacgtccggacaggagccccgcgcgcccatccccggcccggccatcctcggggcgcgctgtctgcggcctcccgcgccacccccacccctgtcccgggacctcctccgggaaagacacccggggagcagccccctcccctccagtagtcccctcccctcccctctccctgccctcttgacggtgtggggctccccggccggaggggcgcggcgctggcagcggggtccagagtgtcgcgcccagcgcgcgctgggggtcccgggctccgcagctccgcacgcggccggtttgtgaagcggcgcgcgggggcttagccgggcgagggcgctcttgagcctggtttggaatttttagcccacacgaaagccgcaggctggggaaggggcgggtgggagcgggagacgccctgggaagccgtgagaccgctcggcgagggctcgggaccaccagggagcgacgggggacccctcggctcagagcccgagggcgcgatttcggatccgctgggattccggaggcacatgaagggagagggaaatccgctaaaccgaaccttccgggaatcggaaggcgccgggccgctcccacgcctccccctcctcccggccgaaaggcggggggcgacgcgcaacggggagggaagggagggaggggtcggcgaccttaggggagggcgagtctctggggacgcggggccgccaggggcccgacgaccctctcgctccacctccccgcccccaagtgccccgctctccccccgccccgcaaacgcgcgtcctgcgggctgtgctttggccctcgcggacgcgcgcgctcacagagggtctgacttggggtcaacttccacgaggttgccgggcgcctgtgagcacagccgtgtccccacccaggggcccacctcccagcgccaccagggtcccgacccccagaccttcggacgcttctcttccaaaccgaagcctgggagcctctgggtggcctggggcgggggcagggggcgagcggggcgggccaggaggagggggcgaggccgccactcggcttcccacgccgcccccgcggctggctccaacttcccctccggagcccccctccggccaccccccagcccaccgacgtgcgggcagcgaccccgccccccgcccctccggtcgcccccgccgcggcccccgccccctccccatccctccccgcgcgctctcccacatgaaaccttccatcacgctcagaaagaatgtgctacaacctcggcgctgccgcggccgccaccactgcgcccgcgcccgagcccgagtcggagccggagccgccgctcccccgcctgcccggccagccccgggctccgagcgcgcggtccccgccgccgccgccccgcgctcgccccgcgcttgacgcagtgagcgccgcagcctggctcccgccggctccgctgggctccgggtcgcaggccgagtccagccgggcgggctccgggaggggccggcagggcgggagggggaggagggctgtctggagccagcgagcccggaggaggaagaggaggaggaaggaggggaagccgccgccgccgccgccgcgctcggggaaccggggtgcgcgcgctctgctcgcccgcgacagtgcctccagcccggggcccgcaccccggcccaggtaagaaggggcctgaggggcagggggctgtccggggccgggggacccctctgtcgccgctgcgggatcggagggtccccgcccctaggggaggcagggaagaggatgctctctggggggggcggcggggggcagcgcagggtccccagcggctctcgcagcccgggccaccccatccctggtgccctgacctcggcgtccgcgccagggccgagtctccccgcccgcggggctctggatgcggcgctcggggcccgcggctcccgggcgtccccatccacccacccaggttcggaggcgggcgcacccgaagttagcggccgccgagcctgggccggacaaacttccctccccgacgccgcggctggaagggccaggactccggacccctagggctagggaggcgccgcggggaccccgaaactttccggagcgcgctgagagcaaaaagccggctgggcagaaagagggggagggggctgggcgcgccttcgagtgcgctggggtagccgcggcgccccaagttgaaccacagacgaacccctcttcatctgaaacctggtctcggagtcggaggtggggagggagtgggctgtgggtgcctcgacttcgcaaagccggcgtgggggggcgcagcgccccgccccgcgccgcttgaacctccggagggggtgttacgggacccccgcccccaccccagccggtggctgggctctgccgaccgctgcggagctcccgggaaggacccgctcgcggctattaataggcgtcggtgaccctagcctctcccggtccgggaagctggcgcggcggggctgggctgggctgggctgccgagtggggcgggaccccggggcccagagcggacccccagctctcctggtccctcttccgccgctcttccctccctgccgcctgctttcctcccattttccctcttcgatctcggggtgtcggcccccccccgaactttttctcttcccaaactgcacggtggccacccggtcacggccctgggccgtacccgcgcaatctcagcaccattcccgaccgagtcctccgccgcgggctgagcgcgagtccccggggccaggctgcccagggaggagcagggacttcctacaatccgcgcccttcctcccaacccacggcgagcgcaacacattcgcccgcccctgcggccccatctgagggcggggagaggtcgctgggggcagcttcgggggttgtggagggcaggggggacccgcgaagctcctggagcgtttagggatgcagctcgggcggcgtgtgcagggaggaagcagcgtcccggcgtccccccttcagcgtcgccttcgcgcgcctcgagggcccaggagggttcggtctcccccaccccacctggacactcaggtctgagcctgagtggatttgaggatctgggggacggggaatacggagtccttcttcctgcctcggtgtctgcagagcccagccctcaggcagcgtggggatctttgtccccagggccagcgccggccccgccccccgccccgttaactccgggactccgccgccctccaggttccaacctcccagcttcaccgccgcgtcctctccccggttctgggtctgggggaggggcagggggcgtggagcgcggcgttgggccccggacagatgtcctcgcggcggcggcgccggcgtccgggtaacagcaggccgccaatcggcgcggccacgggggaggggcgacccggccgggactccggggactcggtcgcagccggacggcgcagcctccgctcggggtggggggggggggcggcc

SEQ ID NO: 43801 - DNA, 15 bp, Homo sapiens
  chr7:1707646-1707661
  hyper
cggcctccagtcctc

SEQ ID NO: 43802 - DNA, 656 bp, Homo sapiens
  chr7:1708905-1709561
  hyper
gctgctggcggcgagcggagagcgtgccgggggtactgaggccgggaaccagaggcgggcgggggacaggaagcggggagggggcgccggcggggacgcgcgggctgcgcggggactggagagggtccccaggcgccggccgttctgcgaacgcgggcttgtccaggcaccgccggggcctgcccggcccgagcgtggagtcccgaggctcctgccgggggtccaggctgcccctggggctctgccttcgacgcgctgtgtagggccagattctgggcctctcttgactcagtttcccttcctgtaacatgcggacgggggcttccgcacaggcaggttgtcagggtgaaactgagccgaagagtgctccagaaccccctgaagtcctcacagaggttggggtgaatgaaggaaggaagcggggccagggctgggcagaggaggcccggcctgcgccctgcgttctccgcccctaggtccctgccctcccggataaggggcggaccgacgggaggacctgagaacgccttggctttgcttgaggtggtgggagtcgcgggtagcttgttcagccaacagctgtcgcccccactccccccacccacccacccaccccctccaccttttagatgtgggcggggagggccggggacgga

SEQ ID NO: 43803 - DNA, 47 bp, Homo sapiens; identical to SEQ ID NO: 5305
  chr7:1709617-1709664
  hyper

SEQ ID NO: 43804 - DNA, 10 bp, Homo sapiens
  chr7:1709955-1709965
  hyper
cgggcgcagc

SEQ ID NO: 43805 - DNA, 77 bp, Homo sapiens
  chr7:1710166-1710243
  hyper
ggcaaagttggaggaacttggcggcggcggagcgggcgcaggctcagcccgacaaagcccgggggcccgggtcgggg

SEQ ID NO: 43806 - DNA, 22 bp, Homo sapiens
  chr7:1710324-1710346
  hyper
cgtccgcaccctgcccggcgcc

SEQ ID NO: 43807 - DNA, 30 bp, Homo sapiens; identical to SEQ ID NO: 5306
  chr7:1782562-1782592
  hyper

SEQ ID NO: 43808 - DNA, 1073 bp, Homo sapiens
  chr7:1785929-1787002
  hyper
ccagatcatcaacaactgcatcgacgcgctcaagtccgagtccacctccttccagggcgtcaagtcggggcccgtgtccgtcgcggagccgccgctggtgctgctgtccgagccgctggccgccaagcacggcttcctggcgcccgggtacaaggacgccttcggccacagcctgcagcggcaccacagcgtggaggccgccgggccccctcgtgccagcacctcgtccagcggctccgtgcgcagcccccgcgccttccgagccgaggccgtcggggtgcacaaggccgcggccgccgaggccaagtacatcgagaagggctcccccgcggccgacgccatcctcactgtgacacccgcggccgccgtgctgcgggccgaggccgagaagggtcgccagtacggcgagcaccggcactcgtaccccggctcccacccggccgagccacctgcgccccccgggccaccgccgccgcctccgcacgagggcctggggcgcaaggcgtccatcctggagccactcacccggccgcggccccgcgacctcgcctactcgcagctgtccccgcagtaccacagcctgagctactcctccagccccgagtacacctgccgggcctcccagagcatctgggagcgcttcagactgagccgccggcggcacaaggaggaagaggagttcatggccgcgggccatgccctgcgcaagaaggttcagttcgccaaagacgaggatctgcacgacatcctggactactggaagggcgtgtcggcccagcacaagtcctgagccccccaagaccggcgatgcccactggaccaaaaaggatgcaggatccacccagagactcagcaccaaacccaacacacgcacgccaccacagcaactgtgacagcggggggccctgcagaggcgaggggggagcgagtggggacagacaagggggacacgtcccgagctcctgtggccggtcctgggatgcgcttgtcgccccgggtggcacgtgtccacacacacacacacacacacacacacacacacgagggacttcggaaaactgtgtcttagggat

SEQ ID NO: 43809 - DNA, 203 bp, Homo sapiens
  chr7:2195724-2195927
  hyper
ggcgcatggtttcacggcgcgtgtggcgagggcagcgggcgcacggtttcacggcgggtgtggcgaggggagcgggcgcacggtttcacggcgcgtgtggcgaggggagcgggcgcacggtttcacggcgcgtgtggcgaggggagcgggcgcatggtttcacggcgcgtgtggcgaggggagcgggcgcatggtttcacggc

SEQ ID NO: 43810 - DNA, 31 bp, Homo sapiens; identical to SEQ ID NO: 5308
  chr7:2250419-2250450
  hyper

SEQ ID NO: 43811 - DNA, 30 bp, Homo sapiens; identical to SEQ ID NO: 5309
  chr7:2281348-2281378
  hyper

SEQ ID NO: 43812 - DNA, 30 bp, Homo sapiens
  chr7:2281728-2281758
  hyper
ggaaggcgaccgggcggacccccaaccact

SEQ ID NO: 43813 - DNA, 360 bp, Homo sapiens
  chr7:2443783-2444143
  hyper
gctccccggccccgccgaccgcagccctggagcctgcagacgccagcagcaccggcaggtcgctcagggtatcccttaaatgacctctcactccagaagccgcagccctgcccctctgggagaggaaaccgtgcatttagtccgggaacagtgggacttagacctcctctgcgggctcccggccaccgagacaccgccggcaaagccttggctcgggcagaggctccgtctggcaggcagcacaacaagccatagtgtttccagcattattaaattatttagttcataagcggggctgtggggactcggaagccccggggtgaataggaatgtgagttgcaggcgcggtgctggacgcag

SEQ ID NO: 43814 - DNA, 78 bp, Homo sapiens; identical to SEQ ID NO: 5310
  chr7:2524319-2524397
  hyper

SEQ ID NO: 43815 - DNA, 78 bp, Homo sapiens
  chr7:2555343-2555421
  hyper
ttacagagtcaagtaacgtcccaagacccacagaagggcactggcccaagaccacacagtgggcgaggggtctgggca

SEQ ID NO: 43816 - DNA, 30 bp, Homo sapiens
  chr7:2558876-2558906
  hyper
cggctcccctgaaccgagcgctcgggaaga

SEQ ID NO: 43817 - DNA, 30 bp, Homo sapiens
  chr7:2559402-2559432
  hyper
gcgctgctggactgcgccgccggagcgacg

SEQ ID NO: 43818 - DNA, 168 bp, Homo sapiens
  chr7:2559951-2560119
  hyper
gcgggcgagcggggcggggacccaccatctggtccagctggtggcagtgtcccatgggagtcaggctgcatccccatccagccactagggccatctgtgggcgacgccagtgcaccccggtgcacccagtttgcctgctggggccactctcccgttacagttgtgtta

SEQ ID NO: 43819 - DNA, 82 bp, Homo sapiens
  chr7:2595522-2595604
  hyper
gaagcgtcctgatccgtgcaccaaagcccttggtcatttagcttcaggttctcaaattaagtcctccgcggccgcgctgtgg

SEQ ID NO: 43820 - DNA, 31 bp, Homo sapiens
  chr7:2671600-2671631
  hyper
ggcgggcgcgggcggccgagcggagccgagc

SEQ ID NO: 43821 - DNA, 421 bp, Homo sapiens
  chr7:3018093-3018514
  hyper
ggtgagtgggagaagaggggacggcgggacagaggccttgtgacagaaaagggaacaagaactcagggttttacgttgtacccacaggtgcagagctgagaaaaggaaagagaaatgaagaacggcaactcggagggaggagacggtgggggtggcgcgggcaccgggtgcaggctgagaaagcgagagggcggtccggccagggggtgggggtgctgcaaccagctctggtcacgccccttctcctgagagctcccaggactgcaggcaacttgctgaagaacttgggtaatttcccggaggccggctcacctgtttccagcccatcagtgatcttgaaacttacaaatactcagactcacactttccgcctatccgtgcaaggtaagaggagccaaacacatctcgaaatgcaccgatt

SEQ ID NO: 43822 - DNA, 363 bp, Homo sapiens
  chr7:3082924-3083287
  hyper
cagcctcctgacccccgattttttcctgtccagtaggaggaggtgggggctttgctgggcggtgatactcagagacgctcaaagagacacggaggagaggcacacgaggtggaaagtgagggagaaaaagggttggaagggaaaaaggggagaggagagtgagagagagaaggggggcagggggacagagatggagagggaaggatacccccagcatcgcgggaccagcgggagccactcccatcccccgacgccccccccgccaccgtgtcatctcactgatgccccccatctcctccccgtgccctcttctcttcccccaactccccgcctcgtgctccccctccgccagctcccccatcc

SEQ ID NO: 43823 - DNA, 370 bp, Homo sapiens
  chr7:3083330-3083700
  hyper
cgcggggcgcctcctccacgcaggcctccggcttcctccaggcgaccaggccctccgtccccccgggcccggagccgtcctccgaggggcgccgcccgcccaggggctgcagggccgggagggggctgcgggcggcgcgggcaggagtccgaaggccagaggaggcaggagagaaaaaaggagagaaagtatgtcataggctgggaggggcgggggagggaaatgcaaaacccgacaggaaatgagactaaaaaatgcgaaaggttagaaaaagataaggaagagagggagggggcggagtcggtgcttcgggaggagggcggcaaggaggtgggggtgggagtggggacagggccgggggtgggggtgc

SEQ ID NO: 43824 - DNA, 469 bp, Homo sapiens
  chr7:3340345-3340814
  hyper
ttaaaaacccgattgcgcgtgtttgcaattacggtaacttggcgcgtcacccccaagcactgagctagctggtggtagccgggcgcctctcggggcgcgccctattccgccctcggccctgggctgccgcacgatctgcgcgtcctgctgcacctgagcccttcccactcgggcgcccgcaccgctgcggggccgggcgaggatgcaccacccccgcccgcgagcccgccacgggagcgcgtgccgaatcgacgccgcctgcagtccccactacgggtccctagggggcgcagccggcgcgggaagccgcccgagccaggcgccgcggccggcacaaaattgcaggcgggcgggcgccgcgactttgaaaacaagcgagggcctggggggcgggccctgggagcgggcgccgcctccctcggccaatcaacggcgggcggcgggcggcgggcgcgggcggcgcgtgcgg

SEQ ID NO: 43825 - DNA, 122 bp, Homo sapiens; identical to SEQ ID NO: 5314
  chr7:3341286-3341408
  hyper

SEQ ID NO: 43826 - DNA, 468 bp, Homo sapiens; identical to SEQ ID NO: 5315
  chr7:3341569-3342037
  hyper

SEQ ID NO: 43827 - DNA, 30 bp, Homo sapiens
  chr7:4238935-4238965
  hyper
gaagcacacacagtccgcaagccgcagagc

SEQ ID NO: 43828 - DNA, 51 bp, Homo sapiens; identical to SEQ ID NO: 5316
  chr7:4770078-4770129
  hyper

SEQ ID NO: 43829 - DNA, 120 bp, Homo sapiens
  chr7:4770152-4770272
  hyper
ggggaggggatggacgtttgtgttgctgtcagggaccttgccgacccagcccccgccccgccttcaagtttgtgccttattttccaaagccgccacacttgagacgtccttgctgcgggt

SEQ ID NO: 43830 - DNA, 31 bp, Homo sapiens; identical to SEQ ID NO: 5317
  chr7:4814425-4814456
  hyper

SEQ ID NO: 43831 - DNA, 30 bp, Homo sapiens; identical to SEQ ID NO: 5318
  chr7:4815145-4815175
  hyper

SEQ ID NO: 43832 - DNA, 194 bp, Homo sapiens
  chr7:4922512-4922706
  hyper
attagccaaacacttgacaggcgacagggcagggcaggatggtccgcagccccgccagggccctgccaaccccaccaacaggctcctcctgcgaggccccaggagctcggctcagcatctgttatcttggatgcagtatttgtcgaggggctggaaatggtacataaatagccgggaaacaatgctttgagctg

SEQ ID NO: 43833 - DNA, 134 bp, Homo sapiens; identical to SEQ ID NO: 5320
  chr7:4922839-4922973
  hyper

SEQ ID NO: 43834 - DNA, 196 bp, Homo sapiens
  chr7:4923327-4923523
  hyper
ggcggcgcaacgggcggggcggggcctcaaggggacggggccacaaagggtggggcgggggagaacaggtgggctggagctgggcctcggcgcccaataggcagaaagaaagcctcgaggaggcggggtctccaggagaggggcggggccaacctgctagaaaaggcgggctgtgctctggcgcctcctgccggcc

SEQ ID NO: 43835 - DNA, 30 bp, Homo sapiens
  chr7:4998400-4998430
  hyper
aggcgcgggcgccccggttactccatccca

SEQ ID NO: 43836 - DNA, 204 bp, Homo sapiens
  chr7:5085237-5085441
  hyper
agtaaagacaaatgcgaagttcaatcaggggttcagagctcccaaagctcatagcctggagcttcttaacctttaggcagggtagagacatttaaaacggcccctaaacttggggggcgcgtaggctcatgggaaatagagtagggtgcttgtcctgggaccagctgtgggccccggaggctgacttccggtgcactcctgcgc

SEQ ID NO: 43837 - DNA, 30 bp, Homo sapiens
  chr7:5229806-5229836
  hyper
ccgcagtgcgactgcgccgctcgaggccgt

SEQ ID NO: 43838 - DNA, 31 bp, Homo sapiens; identical to SEQ ID NO: 5323
  chr7:5329219-5329250
  hyper

SEQ ID NO: 43839 - DNA, 2060 bp, Homo sapiens
  chr7:5459069-5461129
  hyper
ccaaatgacccaaaagacacacgcatgcacacacacacacatcacggtggacttgtggggagcgcaaaaggggacagctcagatggtctctgtaccccagggccgccccccaagttcttcctcgggggtcccccgcgcccctccctcgccacaacacgccactagagaacaaacccttgccccggtcacagaccccgggcggaatacgcccccagctccggagggacacaagcaggtccgggggccaagacctggttcttgcgccccggctggcggggatctccgagctcccggcccccgggcgcgcgcccctcccccgcccggcgcctcacaaaggccctttgtcccgccgagcccccgggactccagttcctgaaaagttccaggagaaaaatcaaagagagagcaaaatcggcgagctccgccgagcgggcggggcaaggccgaggtggcagctcctgagagaccccaaggaagaggggagcatcgagggctactctggaaattgcaaaaatccgaaactgcaattcgaacaggaggtggatttttttttttttttaagtcgagacttgggacgccaagcacaaaagccagggacagcccgggaaggagggaccaggtgtcctggggcggccgccgggcaggtctggaggtccccgagtctccttcccacccctctggctgcagcggccgcggactgactggagggagagtctcccgccccggcgcagcgcccgcccgggtaccgtccccaccgcgcctgggcagcccgtctcgggaaatggtggaggccgcgggaccttctcggccacctcctccagcagctcgatgtgagacccagggttttcccctccgccgcctgggccctgcccgacccgctctcttctttccccctaggttcgggaccgcgatggtccggtttcggtgtccctgccgcacctccgcaccctctttcgcgctggaaaacaaggggtccccgagggccggggtcgccgccctcctaccggggtgcaggttcccagggccgccgttctcccggggaagaaaggggcatcccgcccgccccgaggccagggtcccaaggctggggtcaccgtactcccgcatcccccggcgtactcccgcatcccccggcgctcggtaactgccagggacccggctcggcgcgagtggtggagctgggaacagaacccaggagggcccacgagcgccaaaagtagcgtttgccaagaaaaagattcgagctcggggagcgggtgtctcgcggggtgcgggggccggtttgttcttttctcgcccagattttgaaaactccagcccaggctcgtgccgccggggccccggggattggaatcgcccccggtggctcgggctaccacaccggctttcggctcacgagggccaagcacgctacggaaaaggtagccgagccgcgcgacactctccaccgccttggctccgggaccaggagtttcccagccctgggagccgagtctgcccgcacccccgtggccgaccgaaggagagtcgccgagccccggccgcgagtgcacaggaggacccggccgagtggatctccctgggaagacaggaggggacgggcacggcgcggggcacttacccgggtgcggatggagattcaggccggccatgtacttcccgggcggcagcgggccgggcaagcccgaggcgggcaagcgtccggcagtggccgcgcccacgcggtggctgtccatggccaggccggacagcagcggcggcgggggaccgtgcacggaccgctggggcccgaagtctcggccatccatcctccgcgggagtgccgcgatcagccccccacccggcccgcaggcctagctcagtgggacctaaaagttcggcctcggcgtagtcccagagtcctcgggcggcgggggctccgcggcgtgcatggcggcggccagcggggcttgcgctcggcggcgggcccgcggcccggggcgcacaggcggccggcggtggggcccctccgggcggccaggcggagctgcgcgaggcggcgcacacggcgtcttggcggg

SEQ ID NO: 43840 - DNA, 31 bp, Homo sapiens
  chr7:5461384-5461415
  hyper
ctgcctcggcggctgccgggtcctcccgaaa

SEQ ID NO: 43841 - DNA, 222 bp, Homo sapiens; identical to SEQ ID NO: 5325
  chr7:5462089-5462311
  hyper

SEQ ID NO: 43842 - DNA, 30 bp, Homo sapiens; identical to SEQ ID NO: 5326
  chr7:5462587-5462617
  hyper

SEQ ID NO: 43843 - DNA, 94 bp, Homo sapiens
  chr7:5463269-5463363
  hyper
cgcgccaactcctccgccctcccgcggcccggctcccgcagcccccggaaaagccagctttcctcccgccgagctccccgctttttaataaaat

SEQ ID NO: 43844 - DNA, 30 bp, Homo sapiens; identical to SEQ ID NO: 5327
  chr7:5463612-5463642
  hyper

SEQ ID NO: 43845 - DNA, 3278 bp, Homo sapiens
  chr7:5464743-5468021
  hyper
ttgtacttttattttgcgctttcagcaaaatcctttctgggttgagtagccgtgagctgcccgcggccgacctacctgaccgggggcgcagggagtgcggaccacgccagcaggactgtcctgggggcccccgcaccctctctctgcagccccccgagcccggctaggcattacgtaccctggaaaggaagcttggaggggcagaaatccttccaatgctgcctcgaagagcaactgcagtgataagattttaattaaaacaagagaagcccgctctttcgccccgcgctgcggactcagcgttttcgcattgcccgttctgttttttttaaatcaatttttaaggcaactttttgggaggggggaaaaatgagcgagttagtgcccattcgttctattttcttttctccacttttagaaaaaagtggggggaggcttcgagaacgaacgggggggtgtctaatttaattccaggataaatttgaggaaaaaagttcagcctcttgagggcagtttcaagttgcccttcctggagcttcctgcgttagtttctaggctgccctcttttggaagctgtagctccgctggggaggagggaggagtgagaaggaaagaaaggaacaaaaatagccggagccgaggggaacaagccacggtgtccgcgtttggagctgggcgtgcgggtctcagtggcggcctcggcattcggggcggcgggaggcgcccggtgcatccccgggacggccaggagcaaagacggagaggagaggggggttagagaaaggaggtattgtgtctgtgtgccttaggggaggaggggactgcaggaatcgaataaacgcagtcgagctgcgcggggctgctggaagcccaggcgggggaagggggccgtgtgtgggggcgcagagcgcccttgagccttacgcagaggtcttgtgtgttcctagttaagccctcccacgcccgaggccccatcgcttcctctccaccctctttacccaccaatattccaagcccagatcctaattccccaccgcattaccccgccctggatttggggaatgtttttctttattttaatatagctcaaggaaaaaatacgtatatcttgagagatttggggtggggaaaacaaaagccttgcggagtagaaaaaacaaaggcttatttttataaatgtttaatgttttcaccccctggatgctccgagacgccgtaattgtgacggcggggtacgtgtgccataaatcatttagttgctaataaaaattctgcctgtttgccctggatttgccaatggcgtttgcatttttcaagtgtgcgcctcggcggtgtgacgaacccagccggtatttcattagggccgcggttcggggcagaggaggtcccctccccgcctgggctttgtgcgcccagcccccttgcaccggcccttccatacctgcccccggcacccactccatatttgcgcggccctgcagccaccggagtccggccggggagcagggcctggggacgcggtggtggtggtggctcccagttcctggccaccaggcggggcggccaggacgcatcctgcccacgcggttttccagggctgccgcgtgcttgggggcgcgggcgggccacgcggagaggccacctgcccgggccaatctgtacgctccgtgatcttcgcccgctccccggccccgcgccctggtgtccctgcagtcgctgagtaaacagcgactgggagccatcttggggcggaggaccgatcccaagcgaagtagtagtggctgcagcccgggtgcccccattcgtaaaggggagcctctaggacatccctaactaggcttcagggtccagggaaacgccctccccagtatggcgggccacattgaaatgtaaaaaccaggcctgggcgctgtggccatagggcacaggccataggccaccaggtccagccgccatcttccgcgccccacccccattccatcccctccccctccccaccccctcatacttttgtttacccagcgggataggtggccaaaaactgtggacgcaattgagtgaaagtgcgtgtgtgtgtgtgtgtgtgtgtgtgtgcgcgcgcgcgcgcgcgtgtctgtgtgtgtgtgtgtttgactgggtagaaaatcggctgggggctgggggggtcttccttgtagccctaagccgcagctgcgggagaagctgccctggctagccgaggcccggcccagcgtgcttctccgcggccagcctgggccaccggagccgaggccttccctgtgttcctaggccgctggctccggcctccgctccctggacgcctcccgactgacaaaattctccgtctttgttttaaaaccaaaggacaggccaaccttgagcccggccgtcacccctgtcgcgcttttgttggcgcaggctcggccccctacaccgggctggtgcagctcccgcgatcagacggtctctctcaattcggcgttgaacccggttcttcccaaattctggtattgctggccgcttggacacgttctccccttatccctcccccagcggggaaagaaaaagccaggatcctttccttggcgcggccacccgagccactccacccgtcgcgccaaccgcctttccaggtggggaccaaagcccccactctccgctggcatctcattgaagggcacccccccgagggattgccagcttctgctgccagctgagaggccgtgtggctgggcgtcttaagcgccggtttccgcaggtcccgtgtctggcgggcgcggctaaaacccggagaggctgtgcccgggaaagccacgttcgccgtcccctcgctgcgacaggcccagccgcgatacagcgccaagtctaggtcgggccaacccagccaggagctgcccggacctgcctgaaagaccagggacgcggcgccagcgccccacaccccaccgagaccagggcgcaaggcgggcagaattcggactgatgcgccaggcccagccccgatggattccagctcctctcggccccgcctccggccctggcctcttcctccagccggggtcgggtcctccactccactgtttggctgggaaaggaccgagacgcgctcagtgcacagggggccggctgcggccataaatctccgggcgggccctccttcccgctgctcacgccggggtgctccgggccggtctcgtgtcccgggccacgccgcgcaccctgctcaccccatcacggcctggggacccggagactgcgcagggaaccacgccaggagc

SEQ ID NO: 43846 - DNA, 30 bp, Homo sapiens
  chr7:5526318-5526348
  hyper
ggccgatacccagtcgtgtgtgaaggtgag

SEQ ID NO: 43847 - DNA, 493 bp, Homo sapiens
  chr7:5594637-5595130
  hyper
gtctcagcttggggtgcgggggccgactctgcccgggctgggtggatagttgttatcgggagctcccaggcccgcgcggctcacgtgggccgcagctcgcggcgcctcccgcgtcccagggccgcgaggcgctccgggagataagccaggccccgtgcgagtccagcgcggacccggccggcccccagcccgcccctcaccggcccccaccccgcccctcggccggcccggcccacttggcccgagttcctctccataaaaggcgaggtttgggagcgcccggggagggggcgttgggtccacgggccgcccccgcccaccgtgttcccctccctcactgcgagccctcgccggcccgggggtgcagcccagcccccctgccgcgacccccacgccgggcccgtagaccacgaccctgaccccagtccccactccggatcgggcccacagcaccccccgccggtccccgcgagtcccgcgctctgtccccatt

SEQ ID NO: 43848 - DNA, 30 bp, Homo sapiens
  chr7:5595698-5595728
  hyper
cataaatgcagctgcgccctcccgccccac

SEQ ID NO: 43849 - DNA, 30 bp, Homo sapiens
  chr7:5603110-5603140
  hyper
ttcagggcaagaaccgctctctggcccctg

SEQ ID NO: 43850 - DNA, 920 bp, Homo sapiens; identical to SEQ ID NO: 5333
  chr7:5632265-5633185
  hyper

SEQ ID NO: 43851 - DNA, 215 bp, Homo sapiens
  chr7:5633395-5633610
  hyper
cagggtgagtggggacgctgcccccgcctctcctggtccgtgcacaaagcgcaccccacccgcgcccctccagcctcccgccctttctcgctcgcggcgccgctgcggtccggagcactgcccattgcgcccccgctaggcacgcgggctaccccgcctggagggggcgaggagtggggctttgcccatcctcgggtgccgctgcccacctccca

SEQ ID NO: 43852 - DNA, 30 bp, Homo sapiens; identical to SEQ ID NO: 5335
  chr7:5634149-5634179
  hyper

SEQ ID NO: 43853 - DNA, 30 bp, Homo sapiens
  chr7:5635668-5635698
  hyper
ggggtacttgggggccgaggttggggctcc

SEQ ID NO: 43854 - DNA, 30 bp, Homo sapiens
  chr7:6098483-6098513
  hyper
gaggcagccaaagtcgcccaggtcctcagg

SEQ ID NO: 43855 - DNA, 76 bp, Homo sapiens
  chr7:6098847-6098923
  hyper
accttcactgggggcggggctgtagcagactccgccctttatcagacaagaagagttgggcgtgtccggccccggc

SEQ ID NO: 43856 - DNA, 30 bp, Homo sapiens
  chr7:6312202-6312232
  hyper
gccgccggagggagcgcgcaggcgaccggg

SEQ ID NO: 43857 - DNA, 30 bp, Homo sapiens
  chr7:6413862-6413892
  hyper
gacgtgagccaccgcgccgagctgacaggt

SEQ ID NO: 43858 - DNA, 30 bp, Homo sapiens
  chr7:6414187-6414217
  hyper
gtggtggccgctgccgggcatcggcttcca

SEQ ID NO: 43859 - DNA, 30 bp, Homo sapiens
  chr7:6522787-6522817
  hyper
cagctcactggtgacgtggagcaacgaatt

SEQ ID NO: 43860 - DNA, 30 bp, Homo sapiens
  chr7:6523596-6523626
  hyper
ccggcgcaggagcgcgtcttccagatcttc

SEQ ID NO: 43861 - DNA, 32 bp, Homo sapiens
  chr7:6523871-6523903
  hyper
ccccttaaagggggcgcgccccagcgcaggct

SEQ ID NO: 43862 - DNA, 470 bp, Homo sapiens
  chr7:6543021-6543491
  hyper
ggcggcccccgaaggcgcgcgggaccccagcagccctggccacagcgacagcccctgtggagccggccgaggcctcggggcggggttgtggtcgcggcacctgcaggacgaactggtccggctcgctgaggcggccgggcgcctcgcggaaggcctggtagcgctgctcctcgtcggcgtcgggcgcgaagagcagcagctgcgcgagatgtgcgggctccaggcgccggggctccatgctcatcagcacctggcgcagctccgcggggctcagcttcaggtgtgccaagaggatggctgcgggcggggcggggcggtgagctgggcggggccggagcggggccggatgggacccaagacggagagggcagggcagaggcggggagagggcggacacggggcggggcctaggggagaggacggggccttgaggctggaaggacaagaaacgcggacggggacaagaggct

SEQ ID NO: 43863 - DNA, 430 bp, Homo sapiens
  chr7:6570432-6570862
  hyper
cccagccttttatcccaacaccgactctttagggccacgcacgggttctgagcgcccaacgcttagacctcgccgccccggtacccaccgagtttatttccaacctccctgggcctcgggctccgcccaggctcggagggtgcccacccagggcagggaagcccctccacgctccagccccacccgctttcagaccagcccgaggcggatccgtggcgcagagggcgcacggttcccggaggcgcgggacgcgatggggaagctaccgaaagtgccgagagaagccctggtccttccccatctggagccggggaccgcggcgcggcaggtgccgaagggcagggggtagccgagcccaggaatggagcgagcgcgccgcgactccacgcacctctgccctgcgagcgcgcgcggcccctcccgagccgtc

SEQ ID NO: 43864 - DNA, 305 bp, Homo sapiens
  chr7:6570900-6571205
  hyper
cgccccctccaggtagccccgcctctgccctgctgggacccttttggtcgctctggggtgcagcggaaactggcggcggtttgaagccgccgcgctcactccccttggctctctccgttattcccttcccaggatcctcgcctgcgtcctctccagctactgcgccccggacccccacacagtggcgagtccccgcagttcagaggaagccccgacggcctttggtagaacatgcaatattttccggaggggatgccctttacgctgggcctccagggctcagcaggagtcggccggctagaaga

SEQ ID NO: 43865 - DNA, 30 bp, Homo sapiens
  chr7:6629791-6629821
  hyper
aagcgggcgggtgccgcagcccaggcccgg

SEQ ID NO: 43866 - DNA, 301 bp, Homo sapiens
  chr7:6654834-6655135
  hyper
ctaattagccacaatttgcaccgcggcaggggcgccccgaggccacgcctgccctctagggggtggcagggatcgggttgggtaccccccacccagacacccaggcagtgacagtcgccaaccccgtggcgcgaggacacgcgcagcagggatgcggcacagcgcgcgctgcgctcggcaccggccagcccgggacgccccaggggccgccgcatcgtgtcccccgggccgggtgagtggccgggccgggaatggttaagcccaccgagctgcggctgcctagagcggcggcggcgacggc

SEQ ID NO: 43867 - DNA, 30 bp, Homo sapiens
  chr7:6655443-6655473
  hyper
ccgtggtgccgaccccgggcgccggcctgg

SEQ ID NO: 43868 - DNA, 30 bp, Homo sapiens
  chr7:6655696-6655726
  hyper
tttctggatggaggcgcctccggaaggagc

SEQ ID NO: 43869 - DNA, 163 bp, Homo sapiens
  chr7:6703706-6703869
  hyper
gcgcgtccgaacagtcgcagccccgagcccctgggaccgccttccccgcggaggcttgggctcagcgcctggggcggaggtggggcgggggcggtccgcccgcagcagggggtgccggggccgcctccgggtttcctccgctggatgcggcggtggtgcgctg

SEQ ID NO: 43870 - DNA, 79 bp, Homo sapiens
  chr7:6703915-6703994
  hyper
cgccctgggccctcctccgaggtgcctcgcgtggggcccgtgccagggcccgctgagtcggggccgctcgtgggccgcc

SEQ ID NO: 43871 - DNA, 31 bp, Homo sapiens
  chr7:6967024-6967055
  hyper
tttccaaatggggagtcgtggcttggtcctg

SEQ ID NO: 43872 - DNA, 30 bp, Homo sapiens; identical to SEQ ID NO: 5339
  chr7:7044631-7044661
  hyper

SEQ ID NO: 43873 - DNA, 30 bp, Homo sapiens
  chr7:7222045-7222075
  hyper
ccttcgcattagggcggagcgtgcacccgg

SEQ ID NO: 43874 - DNA, 78 bp, Homo sapiens; identical to SEQ ID NO: 5340
  chr7:7464015-7464093
  hyper

SEQ ID NO: 43875 - DNA, 405 bp, Homo sapiens; identical to SEQ ID NO: 5341
  chr7:7605663-7606068
  hyper

SEQ ID NO: 43876 - DNA, 30 bp, Homo sapiens
  chr7:7680663-7680693
  hyper
ggggttgtgatacccgcccccttggagatg

SEQ ID NO: 43877 - DNA, 30 bp, Homo sapiens
  chr7:8008368-8008398
  hyper
tgccgggtcctgggcgctgggaggcggtgc

SEQ ID NO: 43878 - DNA, 619 bp, Homo sapiens
  chr7:8009321-8009940
  hyper
ccgcagccccggccgagcaggcgccgcgggccaagggccgcccgagacggtccccagagagccaccggaggagcagctcacctgagagacggagccccggctcgcccgtgtgcagaggtagcgagcccaaccctcccgtcctcccgggctgcgtctccccgacggtgccctccgtggaaacttcagcctcttcgggcttctctttgctagtgcattatcgaaggtgtgaaagtggctttgggaatctcacccccctgcggtcgctgtggggcttggaggagcgaactgaaaagcgacttttatttgaccctcatgccgcccctcagagtctctcttccatcactcgcctgcttcgagaggtttttcagtttaagagctggctagctcattcgtgtgtttgccgtttgtagccggggaaggagaagctgggcgaaacacttaacacgcacacaaactcttcagcagcggataaggtggcggttgtaatctctaccgtctctttgtgcttttctgcaaagttcctaacgtgcctgtaactaccgggatagtattttattttttagagggttggtggcattagtttcgatgtaaggatatcggctggatgtaatgatatctg

SEQ ID NO: 43879 - DNA, 77 bp, Homo sapiens
  chr7:8301293-8301370
  hyper
acaagtcaaccctggacgcaagtccctgcccaccagggagctcggggtcctggggccggagccgccgggaaggcgag

SEQ ID NO: 43880 - DNA, 6 bp, Homo sapiens
  chr7:8301429-8301435
  hyper
cggagc

SEQ ID NO: 43881 - DNA, 217 bp, Homo sapiens
  chr7:8301667-8301884
  hyper
gctgcttcctgcagcccgcccggcgcgcccccgccccgaccccggagggcaggtacctcggagccccggcccccaggagcctcccggccgcggtcggagcgtccctccggatcactcatccgacgtcagcgtcagccgaaggcgagggaaaggggcggggggagcgcaggaaccggcccttcctgcggcggccgccaccagccggaatagcaaccgg

SEQ ID NO: 43882 - DNA, 30 bp, Homo sapiens
  chr7:8302176-8302206
  hyper
gcccagagtgaccccgcccctgctctccgg

SEQ ID NO: 43883 - DNA, 391 bp, Homo sapiens; identical to SEQ ID NO: 5343
  chr7:8473064-8473455
  hyper

SEQ ID NO: 43884 - DNA, 762 bp, Homo sapiens
  chr7:8473479-8474241
  hyper
cgggagccacttgtccctgtgggcccagcccgcgagagcctgagagccggatctgtttacacagggtactaattagtctttgaggaatcattcacccacgtgccaaagtaattgtccgtgtcaggaaggtaggcgtgccaagccgcggctctgcggagaaaccacgaccaccgcggccgccggaaacccaaagcgctccagagcgtccccgggtggccgggcagcaccagggacagcgcccgggactccactggggaccggctcctgggcttcccagcgtcgcgggtagaggtacagctgctccgtgtgccgcaggctccagattctcgccaccccacccctccctcagaaactcggactgctctcgtctgccgtgtggttctcttttcttccgaaaggccagtgtcttatctctccacttcaagtccagaggacttgctcagtctcctccccttaagtcatttccaccatcctcaggcagctgtgggaagccgagagtcctggactgttcgtccgggtgccagcgctggcagtcccagtccgtccggtgcagcagcccggcgcattcccctctctccctccctcttgctctccctccctttctgtcttcctctctttcctcctctactgctccctccctctcttgcctcttaagtttcctgcaccgtgaatccaactgtgccaagccttggctcccgcgaaccaatcctgagcgcgacccgggcactgggacggcgactccgccaaagctggacgaggcag

SEQ ID NO: 43885 - DNA, 44 bp, Homo sapiens
  chr7:8474515-8474559
  hyper
cggaggaggcttcttctctagaagttagcgaccggctgtaccct

SEQ ID NO: 43886 - DNA, 470 bp, Homo sapiens
  chr7:8474969-8475439
  hyper
cgccgcctgggaactcgcacccgaggagcgcagggggcaaggagcccctcaccctccctctcgtccgcccgcccgcctccccagctgcggaccgcgcgcttgctggtctcaggcgctggatttactcgcttttcaatttttcgtaccctccctcccttttttttttggtcccccactccccgctacgaccccctttccccgcttgattgtcaagcctaaccttgcccgcgtagtcatgggatgtctaattttatttgcatctaggctgctgagagcgctccttgctctgtaaagtggatgtcaggtggatctatgtttctgaaggaacaaagactcaaagaaggcaccgccaaggaagtttgagacgcgggagaatgcaggctgcgtgctggtacgtgcttttcctcctgcagcccaccgtctacttggtaagtcttggaaggttcggggctttcgcatttttaccccgg

SEQ ID NO: 43887 - DNA, 472 bp, Homo sapiens; identical to SEQ ID NO: 5346
  chr7:8476377-8476849
  hyper

SEQ ID NO: 43888 - DNA, 30 bp, Homo sapiens; identical to SEQ ID NO: 5347
  chr7:8477049-8477079
  hyper

SEQ ID NO: 43889 - DNA, 30 bp, Homo sapiens; identical to SEQ ID NO: 5348
  chr7:8477582-8477612
  hyper

SEQ ID NO: 43890 - DNA, 349 bp, Homo sapiens
  chr7:8479985-8480334
  hyper
agagaagctgactttagtattcggagagaaccaggattgctccaactttctcagcggtattttttcggaaagccattaaattcgtggctcctctgtgcgaagttgatttctatttggctttgaattgttgacggctatttcttccttaatgaaagtgttgtctgggtgaaaaatatatcaggtggctgggaaattggttgatttttttttgagataggtgcccagtgtcctatttttctatctgaggaaagattttctgcagactacagaaattgacagcattgtccgggtaataaccgtcgtcgacaatattttcgaaagggcatttgagtgccgaaagcatttggat

SEQ ID NO: 43891 - DNA, 480 bp, Homo sapiens; identical to SEQ ID NO: 5350
  chr7:8480571-8481051
  hyper

SEQ ID NO: 43892 - DNA, 923 bp, Homo sapiens
  chr7:8481374-8482297
  hyper
gcgcgcccaagagcgcgtttgcgcattttccaagtttgccctgccctcgcgggttggtggctgttgtttaaacttctgatgagcgcgctgcgtttctgctacgggatgaaaacctaattacctcctctgcaaagagctttccctagtatattttattgattgcggaggtgggagccggcagggggtctgtgggggtgggcggggaggggattctcttgctccggtgccctctgttgccgaaagttccttaggcgtctagtcaggggttcggggtggtggaaagcgagatggcgttgggagccagggcgttgggacggcacaagcagtggggtcccaggagcagcaagacagtagctcctctcgggccacggcttacgaaaagctttcctagctccttcttcctataaattaatgagggtattttactcgttcaagccggaaatacgatggggagggggagacacaggccgcatccagagcgcatcgcctcatctgcatgagaatggagaaccgggaggcttttcttgtactgtttctttctcccacaataagacaaattgctgcttagaaaaactgagtgtttccttagaaactggcttgcgggagctctgcgcgtccccgctgaacctgcctctggccgcgcctcgccatcacccccgccgccctaatggattctgaagcgaaggatcctagctgccgcggctaagggcgcagggggaggccgcgcgtcctcgccacaccggaaggagagggcatccggctcacacatcccaccctatgtcttagaccccgtcctcacacattgactttaaaaggccattttccttcgtcttctacaagaagcaagaaacttttttcgacgtaggcttcataccctcccttcggaaactcagtccgctgaccaaagccgcagtgttcaggcc

SEQ ID NO: 43893 - DNA, 155 bp, Homo sapiens
  chr7:8482669-8482824
  hyper
cgctgccgctccggctgggtccttaaagtcgagttagcactctcggtttccgcagatacctcctcaaggcccgctcgcgactgtgacgacccgcctaccccttccagctattcggggggcagctagctcccgtctctaggtccccagcatgacct

SEQ ID NO: 43894 - DNA, 7 bp, Homo sapiens
  chr7:8482884-8482891
  hyper
cgtgatc

SEQ ID NO: 43895 - DNA, 627 bp, Homo sapiens; identical to SEQ ID NO: 5353
  chr7:8483359-8483986
  hyper

SEQ ID NO: 43896 - DNA, 30 bp, Homo sapiens; identical to SEQ ID NO: 5354
  chr7:9580107-9580137
  hyper

SEQ ID NO: 43897 - DNA, 30 bp, Homo sapiens
  chr7:10979326-10979356
  hyper
tatccctcctggaccgcacaacctgcaaaa

SEQ ID NO: 43898 - DNA, 30 bp, Homo sapiens
  chr7:10979884-10979914
  hyper
acccctcatatgttcgtcctgacctggtcg

SEQ ID NO: 43899 - DNA, 108 bp, Homo sapiens
  chr7:11870584-11870692
  hyper
ttttttaatgcagagagaaagcgaacccgcagaaaaggggttggtaattcctcactccgtattgttttcctgcctgtcacggcccccgccagaaactccaagcatttt

SEQ ID NO: 43900 - DNA, 580 bp, Homo sapiens
  chr7:11871349-11871929
  hyper
aagatggggaaagggtaactccgtcccacttaccagtcttccacagatagagggtgggcgcctccgcctcgccctgcgccgcagccctgccggcgcccgggcgtagcagcagcagcaggagcagcggcagcggcagcggcagcggcagcagctgcaggacgccccggcgcggccccgcagcgccccggctcccggacgcccagcgcctggcttgcagccccatgccgcctgcagccactccagggtccagagccgtagcacgctcggcagggaatttttctccgctcttggaacgtcttttcaaagagtacagaaagcaaagctctttcctgctattgttcgcttcagatgagaaggagggagagcgcgtctaacaccagggaacaatagcgtccgcggtggtggccgtggccgctgccgccgccgccgccgcctctggcggggatgctgctgccgctgccattcctcgcagaatggcaggtcccggcggctccggaggcaactgtcctcagggggccccagctgactgagcaggtctgctaggtctgggaggcagcgcagcccccgccagctggagggg

SEQ ID NO: 43901 - DNA, 308 bp, Homo sapiens
  chr7:12151164-12151472
  hyper
tgcccagggatctgggcagagcgtgggagggcctgtggggcctggggttctctctgcgcacgaaatccggggcgggcactatgtgattcgagcccgctgcgccctgggctcctcgtgtcgcccgcggggaaaggaggagggagactgctcacatggcccacttcgcggcctgagatggagtgcgcgcagggcgtcagggcagagggaggcggggattcaggataaagagcggcctgatgcccagagccgggtgcccggacctcctgcctcctgcttctgatccctgcaagccgcccaccctgcgatcg

SEQ ID NO: 43902 - DNA, 155 bp, Homo sapiens
  chr7:12151523-12151678
  hyper
cgtcgccggtcctgtgcgcctctggtggcgcgtgcgccctgtccttccctgcccaagagggagaaccctcagtgccccagcctcagctctgcgcacagcggtcccctgcatgtccgcactcctgttctgtactgcacgctcgccagagcacagag

SEQ ID NO: 43903 - DNA, 30 bp, Homo sapiens; identical to SEQ ID NO: 5356
  chr7:12250706-12250736
  hyper

SEQ ID NO: 43904 - DNA, 601 bp, Homo sapiens
  chr7:12443124-12443725
  hyper
agcagagggacagagaggaggcgggtgaggaacaaacatcgcttgctgccttaaaacgcacagggacgctccccaagtcgtccaaaaagtctagcctagtccctctaccgcccacgcggcgccactgcgcgcccacccccgcgcgccctacctcgcttaccttccccccaggccaggaacatcagcgcgatcaccagcacgcaggctccgccaggcatcgctgcttccgcaggtggggcgaaaggcgtcgcagagcccgggccgcgggtgccaggaggatggggccacagcagcccctcgggcctcctttcttggattttctcagtctgttgctgcttggaacagggaagctccgcgtcctcgttctggggtgcacccagtcctttcgtgggatagagccttcgcgtaatccgtctgcgactcctcccttcccattttggctgctggctgacctgaaagccacgcccaacctgtccccatagcccagcgtgtaccggcagtggctccgccgccttggatgtcaccgtgcagtcgcacagccaggagtcaagctacagggatgtagctctccgcccgctgcgtcttgctgttctaacagagg

SEQ ID NO: 43905 - DNA, 601 bp, Homo sapiens
  chr7:12610063-12610664
  hyper
ccgttaatgttcttcgtctattgctagagaaaatgtctttccttggaggaggcattggcacgagttactataaactccctctgaatctcaagacttctgggacgccgattccgctcctggcctggggcaaggcgtgggagcttggaagccagcgctgcgctccccgtgggaagcgatcgtctcctctgtcaactcgcgcctgggcacttagcccctcccgtttcagggcgccgcctccccggatggcaaacactataaagtggcggcgaataaggttcctcctgctgctctcggtttagtccaagatcagcgatatcacgcgtcccccggagcatcgcgtgcaggagccatggcgcgggagctataccacgaagagttcgcccgggcgggcaagcaggcggggctgcaggtctggaggattgagaagctggagctggtgcccgtgccccagagcgctcacggcgacttctacgtcggggatgcctacctggtgctgcacacggccaagacgagccgaggcttcacctaccacctgcacttctggctcggtaagggacggcgggcggcgggaccccgacgcaccaaggccggcgaggggagg

SEQ ID NO: 43906 - DNA, 25 bp, Homo sapiens
  chr7:12610726-12610751
  hyper
cgcgcccccacggggctgcctttgg

SEQ ID NO: 43907 - DNA, 1100 bp, Homo sapiens; identical to SEQ ID NO: 5359
  chr7:12726347-12727447
  hyper

SEQ ID NO: 43908 - DNA, 1041 bp, Homo sapiens
  chr7:14028675-14029716
  hyper
atgctgctgctcttcgcaaatctcagctcagtattttatattttgagcatttagctggagatttcctcaggatctggacttctatcaacctagaggggaacaagatggcttttaggcttaaaaaaaaatcatgaatgaagctcttgaatttgcatagctaattaccctccgacagtcccattcacaaaaataaccctccctacaccgcctccttcacctggatccaaagagagccaacagagttcacaatttacatattttcggtagtagcaaaaatccgaacaagaggcgatgtatttatttacactctcgatgtttccctgcgcggtcggtgtaccccgggcagctctgattcgcaaacgtgtgcaaaactagcaatggcgatcaacgagacttgctttgcacctaacgggactaaagagacggagacacctctttcatcaggatagtttttgcgacccacaaccatgcaattatctggagagacataaaaagttgttggaaagacccacctgaaggccacgctaggcgaaaggctgcaaaaacttccctccaaatttaataaaaacattaattatagcccagcacttcccccttggaagccgaaagcgcctctgacagagctcaattcggtggtttttcctctacttctcctccaggggcctccaatccaaactgatggatcgctgcctcccattggctccgcgtctctttcacaagatcagatttcgggctgtcaatcaggcggcttgctgccccttcccgcgggtctccctcgcccctctgccctagggggtgctcggccggtaggcgctgggtcctcagcctggaagcgccacggagagactcgatttcctctgtaacccgctgcttattgttaaggcgcctggggatactgaaaccgtgtgtttcgagtcgccagttcccattattggggtgttaggtccactattgggctggtttccttaaagtactgttgtgcggttctggtatacccttagagccgcgatccacaaagcccgtaccgccttattcagctgc

SEQ ID NO: 43909 - DNA, 822 bp, Homo sapiens
  chr7:14030376-14031198
  hyper
cagcggacgggaggccgcggggataggaccagggactcaatgctgttgaaattcatttgtgaccagaactagtgaccaaaagacgtttccggcagctgttccgcccgttaggaaacgtgctgcagttctcaatttctatttgaaagtttccttccttaaatagaacgttatggagacacattaaaatggagtgtaagagcgcacagcactcaaccccggacctgggcaggagaaagatctacttaaaaaagaagcaaacaaacaaacaatcaacacttattactgggaaaacaaccaataactatggacagcaaagacagaccccgcgcattcccggaaactactaaatcggagttcacaacgcgcgcacctataagcattttgagcgggaactgcattttaaccccggccaaggagagattccaggaagcgcctgggccccgaggctgaacagtgaagctcatgggtactatctgagggtgcaaccaagcagggggtcaataacaagggtcctccaccaccctgcactcctggaataacccagcgcctgtaatctgagcaacagtttccaaagaccttctctgcagcccgagcctgacgggtatccagggtaaccgcgagggggcggagcttcgggttaggtcccggcgaggttcttcccgcagccaataacgagccgtaaatccccagcccattgttgtttattgctgacccctcagcgctccgctaggagattggccgctttagggaagggggcggagtcccgcccgccccaacagccacctttcgtctccattcacaaaattccggcccttcttggtc

SEQ ID NO: 43910 - DNA, 697 bp, Homo sapiens; identical to SEQ ID NO: 5363
  chr7:15725484-15726181
  hyper

SEQ ID NO: 43911 - DNA, 767 bp, Homo sapiens
  chr7:15726411-15727178
  hyper
gctcagcctgcgccacgcgctcccagttccacttcctatctcctgctggacggacgtagagcgtccacgcccgcccagcactgccggctgccaggactacaagcggcacgccaacgtctaagtcccgcccgggagggcagcagctctgccctccagactctggaggcctgggcgcggcgcacaccacccccaacctagcaccctgattcctacctactcactttcctctcggggaaacgtgacttgtcagtgtcatttgggaactgtcacctgcagaaaagctagggatacgcctatcctttcaggaacacgaaagaagtaatagggttaaaggaaaagaccagagctagtttggcgcaccctcgaagtttttcaaactttgcatcttcccgtgccccgggcgccgcagcgcgcctaggttttcgcagctggtttctgtcggtgggttgttaataggctgggacgccagatctgaggttgcggggatgagcaccatggcctggaaaaggcggttctcagtgcagaaagaagacggacctggttgggtgggtgggaggaaggcgtgagtctgaaagggttgcagatgcctgctccctggcatcctcacgtgcgatgccaggtggaggctcccttccccctctttcccggtcccgctcaatttcctagccacttgtccaccaagaagaacttttcctgggtcaagaatatttccaagcgattgtgtcccggtcatatgagatgtgtagattgcacgcgcatttctagcc

SEQ ID NO: 43912 - DNA, 30 bp, Homo sapiens
  chr7:15727450-15727480
  hyper
cgctgggggcagagtcgtttacacacaagt

SEQ ID NO: 43913 - DNA, 285 bp, Homo sapiens
  chr7:16460524-16460809
  hyper
gaacttcccatctctgaaatgcgggagggaacagagctcaagcttgaataactgagcgcggcccggcagtcccccaagtgaaggtgctagcgctagagcagcggcagggcggggagcgggaggccgggccccagggaaccgcggggcgcgcccggcgccgcattacctctccagggcctgtagggtgtagctgatgagcggcctctccaggatggggcagaattgcttcggggtggggacccccatcctctccccgcaccccccggcaggcaacacagctgccac

SEQ ID NO: 43914 - DNA, 211 bp, Homo sapiens
  chr7:16685580-16685791
  hyper
cggttcaaatatttcgccacatgtaatattgaaaattctacagctggcagttatgtgctcagcgacggctttctggggcatgcagaggccccaggttgtcgccgtacccccaccattcccccgggagtggcgcagtctgggcgggggcggtctaggagacgggggcggtacgggaggcggggctgcgccgggttccgtgtgtctatgtcaa

SEQ ID NO: 43915 - DNA, 43 bp, Homo sapiens
  chr7:16793111-16793154
  hyper
tttctccttgccagcgtggatctcctccgagccccgccctccc

SEQ ID NO: 43916 - DNA, 123 bp, Homo sapiens; identical to SEQ ID NO: 5368
  chr7:17338150-17338273
  hyper

SEQ ID NO: 43917 - DNA, 196 bp, Homo sapiens
  chr7:17338542-17338738
  hyper
ccaggctcctcctccgcccgggccgcctcacctgcgggcattgccgcgccgcctccgccggtgtagacggcacctgcgccgccttgctcgcgggtctccgcccctcgcccaccctcactgcgccaggcccaggcagctcacctgtactggcgcgggctgcggaagcctgcgtgagccgaggcgttgaggcgcggcg

SEQ ID NO: 43918 - DNA, 31 bp, Homo sapiens; identical to SEQ ID NO: 5370
  chr7:17339051-17339082
  hyper

SEQ ID NO: 43919 - DNA, 497 bp, Homo sapiens
  chr7:17339368-17339865
  hyper
tagagtttggtaaggcgagatgttttaaagagctaaacacatgctgacttttacgaaggggctgagtgcctctaaaggtactttttggtccccaccaactggctttgtgttgcgctcatatttacttatttggcagcaattttgtagcgctcatcgtgaccatatcggtaaagtggatagaagtggtagcaggtgggagtggatgcaacggacaggatacggtggaggatttgtattcttcagacatctttttcggaagcttgcttatcacttttggggtggctttagggtctgtaaaataaaagatttagaactgcatttgagagaggttttcattcttaacatctacctctaattcttttccccttcaaagttttcttctagttgagtgagtacaaacttgcttttgtcgttgtcggttgattttggtggaatatttgtgtgagatggccaattttttgtgtgtgtcagaaaaaactatccgtgctcaaaacatt

SEQ ID NO: 43920 - DNA, 195 bp, Homo sapiens; identical to SEQ ID NO: 5372
  chr7:18125866-18126061
  hyper

SEQ ID NO: 43921 - DNA, 375 bp, Homo sapiens; identical to SEQ ID NO: 5373
  chr7:18126082-18126457
  hyper

SEQ ID NO: 43922 - DNA, 229 bp, Homo sapiens; identical to SEQ ID NO: 5374
  chr7:18126465-18126694
  hyper

SEQ ID NO: 43923 - DNA, 14 bp, Homo sapiens
  chr7:19145879-19145893
  hyper
tttgagaaacgcgt

SEQ ID NO: 43924 - DNA, 153 bp, Homo sapiens; identical to SEQ ID NO: 5375
  chr7:19146031-19146184
  hyper

SEQ ID NO: 43925 - DNA, 295 bp, Homo sapiens
  chr7:19146237-19146532
  hyper
cggctagaggttgaggccggaggctgacaccaccagggacccaacggagggtttattctgcccagcttcacatctgggggtcaaatcgcattaaagccaaaccaccaacggggcagggagcaggtggttaactgcacaaaataaagttacagaaaaaacctcgttttgcaggcgagtgacttagtttccctctgtagctttgccgtcataaaaagcaagtccctcccctctcctgagctggaaggcggggaaaggttatcagcggctccagatggacgcccgtaggcagggtcag

SEQ ID NO: 43926 - DNA, 818 bp, Homo sapiens
  chr7:19146902-19147720
  hyper
cttcttggagacaggctacagcgcttctaaacccaatacgcttttctggagtcctcggaacagctggccggggcttttagcacacgggacgggaccttcgcctttgcctgtttttttttcgaccaggagaagcaggtgcgagagtctggggcttaggaggtggaaggcggggaaagagaatccactaggtcctcgtgtagagaacaacagtcgctccttagatattactccaggacggaaacctgattgcaaaccgctgttccttcgaaacttgcaaaacccggaacagaaaactcccgcccagccaattttagctctcgctgaactctcccgcctgcgttacgtttgcacagcaactctttgtaaatgtccgagtcctctcggaggaaagatcgttagggcgacgagaacattaagaggggacctggagggcagatatcctcgatcccaagagagcaactttgtcgcctcagaaaacacgccaacttccctcctgctctttccttggtcaactcagaatcaaccgattgtattgaaatctcctgaaatcccgaacagggattggcccagtcggcttctgaaaccgaggccggggaatggcaggaatggggggcagagaggatcggaaagaagagtccttcccccacagacattcccagctgggacacgagctcgctcgcagcgcgtttatggaaagagggggcgctgggaaccgcgctggcggcgagcagactccagggtcgagattattcgacacgtgtcttttattcctcacaatccatttcttacgggtgatttatgaacgaatctctttgatc

SEQ ID NO: 43927 - DNA, 104 bp, Homo sapiens; identical to SEQ ID NO: 5379
  chr7:19155957-19156061
  hyper

SEQ ID NO: 43928 - DNA, 7 bp, Homo sapiens
  chr7:19156125-19156132
  hyper
cggcctt

SEQ ID NO: 43929 - DNA, 442 bp, Homo sapiens; identical to SEQ ID NO: 5381
  chr7:19156303-19156745
  hyper

SEQ ID NO: 43930 - DNA, 511 bp, Homo sapiens; identical to SEQ ID NO: 5382
  chr7:19157055-19157566
  hyper

SEQ ID NO: 43931 - DNA, 453 bp, Homo sapiens
  chr7:19157633-19158086
  hyper
cggtggcagccccatccggagtggctgtgacagcagcaatggcaacagcttctacacagtgggtgatgtctcatctcgcccaagagccctctaggtccgtggggccgatttgggattgctggggctgggggggtggtgtggcgcggggtgggggggcatgccaagaaaagtgtcaaccgcggagcccacccaatggtcaggtagacgaaccccttggagttccaaaggccaaaccgcggcggcccagcccggaggtcctgggcgtttctgaagacgtggccgcgccgcgggggctgaggatttgcgtcccggcctgctctctcgcccttctgggccctcctttcccctctacaacgacccagtctgacgctccccaacatccaaaggactacgcctcggaaggtgctcgaaagaggcagaagttcactcttcggtggaaggaaacccagtcca

SEQ ID NO: 43932 - DNA, 453 bp, Homo sapiens
  chr7:19183547-19184000
  hyper
gcccaaggccccctgcggcccaggagtgacccgagtgcactcgccccttactctggcctggggcctgaagaaggcactggaacacggaagctgatgctgcactttagatgcaaagcgtagatttgcactctggctaaggcactgaatgaacaccactgtggccctgggacaaggagctgtggtccgtctgggatcaactaggtggcgaaggggagggagaaaggaagagagagggcttgcgcgcgggagagaggaagggacgggagggagagggaatggaagacaggaagggtgtcccttctcagaggtcgcactttgtcagcagttcctctcgactgctctgccttccatttttcctttcctcagttcctggacaagcctcggaggaccaggcagaaccctctggctagcagaaaagctcgcacccccgcacccttgcggcgtctgcttcag

SEQ ID NO: 43933 - DNA, 13 bp, Homo sapiens
  chr7:19184412-19184425
  hyper
cctcacccagtgc

SEQ ID NO: 43934 - DNA, 6 bp, Homo sapiens
  chr7:19184564-19184570
  hyper
cgatcc

SEQ ID NO: 43935 - DNA, 30 bp, Homo sapiens
  chr7:19748648-19748678
  hyper
caaggttcccacggcgcgcgccgttgacgc

SEQ ID NO: 43936 - DNA, 305 bp, Homo sapiens
  chr7:20369104-20369409
  hyper
taatcctgtgcaccccgttgtgcggtccacacctgaaagggggagtttcgatgttgtggtttattaaccaggtactttccattcactcagtcaacagaaagaaagagagagaccgcgcctcctactttttttttttttttttttttaactacaaataaggagacggaaactattaaataagaaggggggaaactcccgcatatttcaccttgacctggctggactggtctgctgcctctaagaggcgggtgttgtattaaaatgagaggtcaaactcctcgaatgggaatcgctcctgcccctag

SEQ ID NO: 43937 - DNA, 273 bp, Homo sapiens; identical to SEQ ID NO: 5385
  chr7:20370483-20370756
  hyper

SEQ ID NO: 43938 - DNA, 30 bp, Homo sapiens
  chr7:20371488-20371518
  hyper
gcgaggtcccgcctcgttcctctgggcagc

SEQ ID NO: 43939 - DNA, 297 bp, Homo sapiens
  chr7:20816218-20816515
  hyper
aggcacaatagggtgagagaacgcggcattccagcgcttcccagctttccggaccccggagagagggggtgggggtgtgggctcacatcgccggctggcttgagggaggagagtggtggcggctccggaggtggacgtgtcaattatatcctggagctccgggaagccagattgcttctaccggcggctgcaggggcttgcaagcgaagataggcggccctccttccttccccactgtgggggattggggtcagtggagcccgtggatttagccacgaggggacatgactggagccc

SEQ ID NO: 43940 - DNA, 676 bp, Homo sapiens
  chr7:20817280-20817956
  hyper
gccacctatggaggacgctgcactttgacgtcgctggggagaggaggcgggtgcgagtgaacacaaagcagtttggccaagaaaagagcacaggaggtgaagaaaggcaggcagtcgtgggccaggacagagagaaagctgaacaagttcaggaagaagaatctgagtctgtccacgccgcagcagcctccggtggcacgggcagaaagatcaagcgcggcaccccgtgacaggatgggacagattccccgggctccgaggccctaggatggcgcagggcagcgggctggtgcgggaaaactacagagcaagcgagggagggaagcgaaggcaggggaatccctcaccccgtccggcccgagtgtcttttgagagcccacaggcgagcggggcggggggaggctccccgcgcattcccaccgtgggtttgcccaaggtcagaggcccgggactggcggggcgggtctggccggcattgcccgcgctgagcgcgctgcagaacgggagcagggcacagggtggcgctcgctgtccgtgcagcgggcggaggcggccgcggtgcctttgtgtgcggtgggcgcggcgatgggctgctccggcccgcagcccgaggggagcggcgggcccgggccggggccagggctcgcggggagaccccagaccaccacctcactct

SEQ ID NO: 43941 - DNA, 259 bp, Homo sapiens; identical to SEQ ID NO: 5389
  chr7:20817982-20818241
  hyper

SEQ ID NO: 43942 - DNA, 75 bp, Homo sapiens
  chr7:20823255-20823330
  hyper
aactctacaaactctgggtctcgggctgccaaaagtcacccccaccaagccccgacagcctgagtaggacgtccg

SEQ ID NO: 43943 - DNA, 275 bp, Homo sapiens
  chr7:20823382-20823657
  hyper
cggctctggaaccaagcagccgtctgcccgggcggcgctgttctgcccaggcctccagcctctccctctccaccgctccgctcaggcttgtcagccgagccgctcctgcccgcgcgaggcccgctgtctaccaggcactggattagtccagctctacctccagtggccgttccctctaaaagttacgcccttcacaacctggggggtggaggaggggaggacaaggaagagagaacgagaaataaaggcccgacgaggcgcgggttccggctgca

SEQ ID NO: 43944 - DNA, 134 bp, Homo sapiens
  chr7:20824009-20824143
  hyper
tgcccttcttgccgccgctgcccgagcccgccgagccgccgccgccgccgccgccactgtgcgtcttcacgtgcttgctgaggtggtcgctgcgcatgaagcgcttgttgcaaactggacaggcgaagcgcttc

SEQ ID NO: 43945 - DNA, 344 bp, Homo sapiens; identical to SEQ ID NO: 5391
  chr7:20824475-20824819
  hyper

SEQ ID NO: 43946 - DNA, 2035 bp, Homo sapiens
  chr7:20824835-20826870
  hyper
cgccatgcccacccgcgggtagatgccctgcagcccgtccacagaggtgtgcaccttggagatgaacaccggctggtgggagccgtcctgcgagtgcgcggaggagccgccgccgccgcccccgccgccgccgccgctgcccccggaaactccgggggcctggaaaacagagtagtcgttggcgaagggcgagctggaggcggcggctgcggcggcggcggcggcggctgcggcgctgctggaggtgagggagaaggcgctggagccaggcgagccgccgcagctgaacgagtcggacaccagggccgcggcagccgcggctgctgccgcggccgccgcagccgccgaggacgagccgccgttcctggaggccccggacacgccgaagcttgagagactggaacccactacgttgcagctggcggaagaagaggacgaggagcgtttccaggggtggaagcctttgccgaaggaagaagagctgtccgagagggaggagggagacgggctggggctgcctatcttattacaggtagcggcaagcatggccagaggagtcgatcccaacctcggttcttcctgcgaggaggagaggagaaggagtgggggaggggaggtgggcaaagggccggtgggggaggaaaggaagaaatgtgcatcagtccttcggtagcctccaaagcgccccactgcaccccatctctcgctgcggcgcgccgccaccaactcacctggcacccccaacagccccggcgcccggccgcttcctactctacaggaggggacaagtttggctgccggcgtctgattcgggagcaagcaccacgctaaagaagagtttgacaagtattctcacctaaaacaacactctcttgcacacaaagccccagacacttcgtaacaaacaagcaaaaagtccagattggagaggaaggaagttttctttgccgagaagcctgggggaaaaccattggattgcttttaagagcgcttccctgtaatccggagagctttgaaaaacctgttcgggtccccagaaacccatcctgggttgtttctcccaggccaaaagaaatcaaactgtagggctcactctttcttcctgcttttctttctttctttttttaaaagcatatctacagtagtaaaaacgagacgagttcaacgtacctgcgagacaaggcgggctgcagaatttttttttaagggttaggggaagaatctgcactttgcccagaaggaaaaacttgctctctttacccccgaaatcggtgcctgtaaaatgggctggacgcaggtctcccgggcagggagcagcgaggcgctgcgcggtggcttgtctaaatgcccttcgaaccttttcctgcgctgaaaaaaagtgactctgcccccttctccccctttttcttttctccaaactcacttgtatttaaagaaaaaaaaaaaaagctctcaatagagagactgatagcccgtggcctggccggggcgactttaaccccctccaatcggcaataaaaggaaactaattaaaccagcaagagaaaatcctgagactcacccctagaagtgaagttgccatcacacaaaagtgccctcctcctctcagaggatcttttttatattgataaatcagaggcagtgttttttttagaggtgtgcaatacaatgatcagttccgcccattccaccacaattgtagctccctctccggctttgaagtgccgcggaggcgcggccagccaatctgcggcctcgccgggccgcgcggcgcgcgcgccgtgaggtcatcggcgccgccgcctgccgccgtggtggaagggggagtgggagcggagggggcgggggcggctgcgtgtgttacaaagcgcaaagcgcgcgctcgcgtgtatgagtgtgtgtgtaacaatgtaactgtgtgcgagtgtgaccaggcgtaggagaggacagtgcggagactggagggaggggggatgggggtgtgacaccgtaacagtgacagtgtggtaaaggcggggagtggagagagtgcaga

SEQ ID NO: 43947 - DNA, 94 bp, Homo sapiens
  chr7:20827406-20827500
  hyper
taagggttatttttagggatgcgttgggacgtggatgcgcgcctgcgcgcccatgagttgtttctttgatgccgtggctttttttttttttttt

SEQ ID NO: 43948 - DNA, 30 bp, Homo sapiens
  chr7:20828502-20828532
  hyper
tctgaatgattttagcgtgttgagaaggcg

SEQ ID NO: 43949 - DNA, 396 bp, Homo sapiens
  chr7:20830546-20830942
  hyper
aaaaatgcacacaaactgtagcgcgtacctctgcagggtacgtttaaacccggctcttagcatctcggtttctagagcgttggcagggacatgcagctctggaagctgaccggcgggtgcccgcgggagacagagcgaacgcagtgctggcactgcgtccctggcctgcgcctctcccagaatgggaagacgacccccaaccccttgactagtgtgcggggtcctcgcacgcggacgtgttggctactaaataaagcgtgaagagggatcgctgggtagctgagcgccgccggcggccgccgggagcagcgagctgagccaggttgggtgggggtgtttcctcgtcgagagctctctggtcaaagtttccttcccgctggaaaacaaaaacaaaaa

SEQ ID NO: 43950 - DNA, 575 bp, Homo sapiens
  chr7:20833070-20833645
  hyper
gaacacgaacaaaatcgcgtgctttagaatcattcgactctgagtccaggaaaagcagggggtgtggtggcagtgggggtggctagggaggggtgtatatgagtgggggagccgatttcatctcggatcgcaggaagagaacttgctcaaaagaatttttccccagcaaaagtggtataatttacagcgcaacttaataatccgaggggcaatgcaaaagccctttgcgttgtaaaccgcttctaattacctgccagagcaattagctgactatcacgaagaaattagatcgctcaatgtagcataaataatgcgaataattttgtaagaagaatggaaagcgagacctggtgtttctttataaggaaataacacctcgtactgtaagagccctccatgaacacatattaatgtctaggcatgcatggcaatgagtccgagcaggagccctctggctgcggttcagcactttttccgtttacgtatgcggggtgaaagtcggcttccaggcgttcgatctccagccttccagctcacagtaattaacacatagcgacttcaatgggaaaacctgt

SEQ ID NO: 43951 - DNA, 30 bp, Homo sapiens; identical to SEQ ID NO: 5398
  chr7:20834347-20834377
  hyper

SEQ ID NO: 43952 - DNA, 392 bp, Homo sapiens
  chr7:20836773-20837165
  hyper
ctgaggaaggaaattacaagccgatgctgattgacttttgaaaggcctggcacgtcccagtctatataataactcagttggaggaagaacctcgaggaccgagtgtctccagatcacttaatgcatcggcatccaccacgctcggctcatgggcagggcccccgaggctgccaccaacccacggagccttgaggagctgcgcttccccgcgatggtccaacgaacttcggaagtgctcctgcttccggtttcacgtatacctgggatgcgttgccatacaggtttgtcccgttttaatgctttgacccatctaagatacgaggacaggagactggagaagtaaacgaaaggcaatggccgaggggtaaggcggggaacacagcaggaaaagg

SEQ ID NO: 43953 - DNA, 70 bp, Homo sapiens
  chr7:20837556-20837626
  hyper
ccgagagacagcctgccgtcccaggtccagcccgcgcctctgcgcacctcccggcacccggcgcaggtcg

SEQ ID NO: 43954 - DNA, 182 bp, Homo sapiens
  chr7:20837650-20837832
  hyper
cgcctgctcgccggcccgcaaggcccgggctgcggcggccgcgggcgcgggaggcggaggcgcaggcgccgggctccgtggcagcccggcccagccccgccccgccccaccctccggccctcccctccgcttagccgtgctctcccgccgagctccgccgccagctccgtgctctgcccggc

SEQ ID NO: 43955 - DNA, 116 bp, Homo sapiens
  chr7:20838168-20838284
  hyper
cggccgcgggagggcccgcctcgccccgggccgccgacctgacacctgctgggcagcctgcgcggcctggggcgaaggccagcgggcggcggggtgggaagcgccagcgcaggggc

SEQ ID NO: 43956 - DNA, 159 bp, Homo sapiens
  chr7:21293814-21293973
  hyper
tcccagccctcagccccctaacgtagcagagttccttggcaaacgacagagtgccctctgttgatggaaaaagtaatgcgcagcggaggatacagagagaagctttcctactagaagtcgcagagctgcccgttagccgatacacatttgtgatgtaaa

SEQ ID NO: 43957 - DNA, 166 bp, Homo sapiens
  chr7:21582474-21582640
  hyper
actgggggctcagacccaccccggacacgcggcttctcggccgtgttcgggacctagagcccgagggcctctcccctcggccttggccttggcgtatactgggcggtggcgcggtgcgctcactccgcccccagcgggctggggcggggacaccgtcccccgggaa

SEQ ID NO: 43958 - DNA, 486 bp, Homo sapiens; identical to SEQ ID NO: 5403
  chr7:21582791-21583277
  hyper

SEQ ID NO: 43959 - DNA, 160 bp, Homo sapiens; identical to SEQ ID NO: 5404
  chr7:21583303-21583463
  hyper

SEQ ID NO: 43960 - DNA, 1128 bp, Homo sapiens
  chr7:21984771-21985899
  hyper
gagttaggcccttaacgcgtaattggggtcgtgctgtgcatatgatttgggatcttgcagcttgtttaactcggcccaatgacgttaccatttcccccaaatggttactaattccttgaaaacgtttacaaaagttctagaataaacactaaagttattatttttaaactccattatccaagttggactggtctggcgatcgactgttaaaaaaaaaaaattacaactttcttaagcttcctgatctctgtgccaattcccggagaaagtgtggggagtgcacaaaaaaagcccctcccccgtctcacgagggctgcaaacgcaggcgctgcgccccgctagctccccgcctgcacccccggcggccacccgagactgagcagagcgccaggctgagcgcggttgtgtgctggggcgaccggcctctgtggtccgcgtagcacaaacgtgacccactgcgcacacctgcagggcgcgcccactccggcactcaaccggctgggcgcgccagatccccagtgccgcagccaagggccacgtttccagcccaaggccagcaggaccgggtggcaaagggaagtcaaactgtgggtgcgtccggacggcggcgggcggccggaccctcacctggtagcgagtcgccaactccattcttcctaaccgggctccagtctcctcccagcacgcggccacgggagcccggactcaccacggcccggcgcaccaagaacgccccgcgcccgagcagctagcgcgctccgcccggagcacaggcgggccccgggaggggcgcacttgacgccctggacagggggagcgcgttgcgctgccccctcggtgccgcctcactgggcctcgtggctccgatcacgttccaacttcgcggccactgaccttgtcttcgcaggcggcgcgagagggggctgcagttgggcgcggcaagagcaattaccagtgttagggcgccgggctcccccctgcagcagagggagggagtggagccgtccggcggggtttagcgcgggagaaatgagggggctgtcccggcgcagcctccagctggcacgcgcgctggatacttggcagggtttattccaggtcatgccctggggcgcgagcttctgctgc

SEQ ID NO: 43961 - DNA, 185 bp, Homo sapiens
  chr7:22143357-22143542
  hyper
gacagcctcaaagcccagtgtcgggcagtttggatctgagtcaagcagtaatcagagcggttaggcttagtcagtattctctgaatgaaaattttgccgatgaacctttttctgcagagcggaagtggctgggcacccttgcgagatgagaaccaccagatggcgctgaatcctcaataagaaaa

SEQ ID NO: 43962 - DNA, 30 bp, Homo sapiens; identical to SEQ ID NO: 5406
  chr7:22396131-22396161
  hyper

SEQ ID NO: 43963 - DNA, 31 bp, Homo sapiens; identical to SEQ ID NO: 5407
  chr7:22396516-22396547
  hyper

SEQ ID NO: 43964 - DNA, 733 bp, Homo sapiens
  chr7:22589356-22590089
  hyper
tgaggaaaatatgtacggctgtagcccgtccatttctcatcctgggatagcgaggggtttccggaggaggcgtcagcggtgggaagtgggagaaagcgagcaaaaggggcgggggcgaaggagcggactcgcctgctgccgcgggggcgggaatccgcaagccagcctgggagaagggacagaacagcggctgatccttccctgggctagggaaggaaaataaactgtgctggcctcggagtgggggatggagaggggcgatggcgctgcatctgcaggacgttgcaagggctaggagcgggcaagactagtgtcggcaggaaggtagtggtggtgatggcgggggtgtgtggcaaacagagcccgagcgaaagcctgagaaggttctggttgccccccagcctactttagtccctaaccctccagcggggcgaggagggagcgcatcggagaggtacctgtgcgatgggcagcggtgcttggcacctgagcgtaggtacgatactcagcaaggcacctgggtgggacataggagaaggaaatctccaccccaaccccccaaaacaccgcccagaagtgggcggtgaggcccagtgccgcagccccagggaaatggcagtgacacaggtggcagccaccttcagagcgccaggcccccgccagcacatctgcaggtagcagctttggccacaggaaggcgcatctgcactgccgggttcgcaaaagcggggcg

SEQ ID NO: 43965 - DNA, 1258 bp, Homo sapiens; identical to SEQ ID NO: 5409
  chr7:22893442-22894700
  hyper

SEQ ID NO: 43966 - DNA, 793 bp, Homo sapiens
  chr7:23052999-23053792
  hyper
ggcgagggcggggggtcgacagtgaccattgtggccaccagaccggacggacagtggcggcctcgccgaagtagagggcgcgagtgggagaggaggcagaggccagagcatccgccgcggcagggaggggacggggggctcccgccccaggcccacccggcagaggggcggccggtggggccgaggcggcggcacccgggtcacagcaggaggctggactgctcctcgccgggaaggaaagacccgagtcgcgcgcacaaagctgccgccctccaggcagcgggcaggctgcgcccaacttcggggcgagcagcgccggccgcagcccacccgcccgccagccgcccccagcgccccgcgccgcctcgcacccacccatggcgcctcgcgcgggagccgttacccccagtggagccgcggccccagggacaaagtcccggtcctgtcctcgccgccgcctcgccccggctcctccctgacaaaaaaaagttatccgttgccggacgccctgggggcccggcgtgggtctctcggctggactcaccagggcggctgccggagctccacctgcaggacctcgactcgtgaggctctcagcgacagcgacggaggctgctctgcttcctcccgagtagcagcaccacctgctccccttcttcctagcagaacgggtcccggtgagccatcttccccctcctctcactgactgacaacccagccgggagagccaccactgccgccagcctctctgacaggcacgaccagggacccgtcctcaagcagccaaccacca

SEQ ID NO: 43967 - DNA, 219 bp, Homo sapiens
  chr7:23053819-23054038
  hyper
cgtcctccggggcgggatcagaacaacttctccaccaatgagaatcttcttctgctgggcctggggcggagccatgaggcgccttgagtgggcgtggtctgagcaatgggcgtgatccgggcgtccgagggaagttgattgactgtaaggtttgcggtggccgctaggcgatgacaatcagcgaaggtctcttagattctgagccgttagggcttatgg

SEQ ID NO: 43968 - DNA, 30 bp, Homo sapiens
  chr7:23221664-23221694
  hyper
gtgcagactgaagacgccctccgtcagcga

SEQ ID NO: 43969 - DNA, 34 bp, Homo sapiens; identical to SEQ ID NO: 5411
  chr7:23287316-23287350
  hyper

SEQ ID NO: 43970 - DNA, 180 bp, Homo sapiens; identical to SEQ ID NO: 5412
  chr7:23287532-23287712
  hyper

SEQ ID NO: 43971 - DNA, 2172 bp, Homo sapiens
  chr7:23507682-23509854
  hyper
gaaaggagggacccccgcgtgtccgcagctgctttcgcctctcctgctcctggaggggtgggggaatcatccgctgcttcccaagccctgcaaaccccccaaactgcttgttgggacccatttcccgtaggagcaatttgacccgctcggaccgaggacattcagctgtgagctttcgagagattttgtaaccaataaccataatcccgcggcagaggccacagaaaagctttcaattcctgcccagcatcatcaacacacacacccccgccataaacttaaaagcaaggattaaagaccggaacaccacgccacacggcagggggtaagcaccagaggacaagaagttctcagctgagtctctccacccaataacggagtgagaacagaatcggggcaaacagaagcagcagctcacctttgcctttttgggaccgagtgctcaacttctatgggtttcccgtgcagttctattttacctgcggacacacaagaagtgagacggtcggccgagttcagcggctctccctgcccgaagacccgcacagcccaagcggcgacacaaatggcctcctgaggccctcgaagggcccccgaggcccggacgcggctccaggcggagggagaagccgaccccctcgagcggcgtgggcatttaactcgcagatggttggggagcagggtccgctggcgggcccactacttgggtatcagtccagtctccaagcctcccccacccacccctgggggccaccaacaccacgaggcccgcaagagggacgcggcccaccctctcaccgccctggacacgctccacagggcagactcggggcagggggctcccctggctttcttcaggagggggcgccctggccctgccctctgcttcagcccagacccgccgggaacactcagcggtgggcttgaggaagacagggagtggcgagaaagggtcggggacggcaggggagaccacgaacgggagaactggcagaggcgcagctcggcacaggctgaaccaggcgcgaaggacggcgaggcgcccgcaccacgtctgaattgattaaaagggaagccgaaaggcacggggctcccatggggaccccaacgcagccttccccctgggcgtcctgctccgcccggcaccgtccctcgccctggcggagccatacccggaggccgcagccccgcgccagggcccggagagcggcgggcggccggtgcgtggcggcgactcccttccaggcgaccagccgcccccgcccacctgcccctatcgctcgtcggaccaggggaggtggaacggggaaaccgggcacacactctctcctcccacagggtggggaggaagcgcggggccgcctgtgcgaggcaccagcctcgcggtctcactcggcagcacggtcgaggccactttccgttctccacggccgggggtttcggggcgcagcacagacagcgccgtaaataacgaccgaggaaagcaggaaggaacgaggcacaggcgggcattctagctcggcccccgaggcccagcgtgccggggcctggagcacgcgcctgggcccgggcggggcgccgggggagcgcgcctcccccagccccgcgccccccttagccagcgccggggctttcttgacagcgcgttcgccctcacccagcaaaccccggccggggaagcagagccgcgggccggagtgggagccggagctgaggagagccccggcccccacgcgcgtgggtgtgggcgctcaggcctcacccccgctcccccagcgcgccgggcctggggcccgcggagccacccggtgggcctgggcgggcggtgcagggctggggcgagagcccgggtggggccaggcccgggcccacctgaaagcgcctcgatggccttgagggcccagctctcgtccgggcagtccacgaacgcgtagccagtcttcaccaggaagggtcccgacaccgggatcttggcgtccttgaagatactttctaggtccgagggggcggcgttctcgctgaggtttccgatatacagtttgttcattgtgaagagtggttgtttaaaaaaaaataacgagaaaaaacgaaaaattaaaaccacccacggtgatggatggatccagctggttttgttcccctcgtcttctcgcctttaaaatacacaaacac

SEQ ID NO: 43972 - DNA, 957 bp, Homo sapiens
  chr7:23510067-23511024
  hyper
aacccctttggcttcggccagcggactgtgaaaatatcacactacgtgaggcaggcgccgcctccccataaaaaacccagaagggtgactggcaggagggaggggagaggaggaggaggaggagggaggaaggcgcaggaggcggaaaaaatccgctccgagtgtccggctttttgaatgagccacgtgttcaaactacaaatcaacgtctcacgtgaggaatcccagagcctcaattagagtgggtttcggagaaaaaagcgagcgagaggaagagggggaggggaaacgagattgggagagggactctgagaagggggaggaggaagaaggaaaatgctaaaggaaccgcagccggcaccaagcggggcgctgacggtcacaactcgagtttgtaaagggttatctggtctgggcggatcctgggagggagggctggaatattgatttttttttttttaatgaggaaatgggcagaggtactaacaggcagttcctcagcgctagttaccgtagttttaatcattcgatttttcaaaataggttattaacaacaaaaccagagtcacaatcccgaactcgcctggtggctttaatggcattagaagtgtaaccccagcaaagccgcaggcacgtttctaaggctggcatggacggaaatgctgcgaggaggggtgggggagtgggtgaggggggcagggggtgggggcaagacaggcgggcgacgcgccccaccccgtgcgcccttctcgggccctgggcaccgcgcgagtgggggcggcccggccccggagtggtgggggatgggatcccgcagcgtcctgggcgggtgtctgggcgacacctcctccgcctccgcctgcgctcgcggtggctctcggcttcgcgtttgccattggttgcgcgattcagaaaaggctccaggataaatgaggccgggggcgggcttggccactg

SEQ ID NO: 43973 - DNA, 1274 bp, Homo sapiens
  chr7:23513225-23514499
  hyper
gggggctgccacccctcctcacgcccggcttgggaccagcctggagtctcaagccgaaacccctcacgcgggtgggcacacaatgcccggcgtgtcgcctgggcctcctcggaggtgctttaacaggctcttgcgcttttgaacggccctcctggactctgatctgtttaaactagaggcgttaataagtgataacctggatctgccctccttggaagctgcctgcctatattttattgtttaaaataaataaaaatggtgccccgggagagaagatggggttgtttcctttttcctctggctctgccccgagaaagagggcgggatcctcacggctcacagtggggagggtctttcgtcggccgccggctcgcctcggagggcctggaccactggaccgcccttccccggggccctgccgcgggaccgcgggcttctggctcctcctggggctgcgtccgtatgcgcggagcgtgtggccgggccgtcgccgcgccaccccacctgagtccgccggccagcgcggggacgcaccgggcagcgtgtgtttggcgaccctcccgcacctctggtctcagttgcgtgtgtgcacgaggggttccatagggcccagggatgcttggtacccacgggggagaatccctcgccgaaccctgcgggtctgcggggcgggccgcgagactggcgcgcaaaagcggctccaaggcggggctcccgcgctccccggggccggcttgccgagtccaagttgagcaaccggcgtcgagagagacaccgcccctgctgcgggcgggggcctctcctcgcttccgattggctgacggggggaacctatcgccgtcggccgcctccgccagagcggtttgctggttttcattcattggccccggagccgcccctggatttccatcttttgtggcgcgaaaataaccctttgctccctcgttggttttgttgaggttgaggggtgggactgtgttcccctctgctcgctctcgtttttcctgccctttaacagctcgcccccagccccaacccccaaggaagaaagagggaggtaacgctgaggaagggtggaaagcagttctgcgtccgtgggtggagcccgccccttggctgaccgcatggtgcccgcacggtcccttcccttcccccagcgtccagcgcccggaggttctggatttgcgccatgctcagcagctggagtcacatcttcgtttccctgcccatttccaacatcttagagttgatgcgtccttttttacttaaaacaa

SEQ ID NO: 43974 - DNA, 206 bp, Homo sapiens; identical to SEQ ID NO: 5418
  chr7:23570741-23570947
  hyper

SEQ ID NO: 43975 - DNA, 37 bp, Homo sapiens
  chr7:23637008-23637045
  hyper
gcggaagccgagtgcgagggacgagcggagtaaaatc

SEQ ID NO: 43976 - DNA, 160 bp, Homo sapiens
  chr7:23719537-23719697
  hyper
acaagaagactcgccggtccagggaagggagaggggaataggtgcaaggtttgtggagggcggcaaactgcactccatgtggcgcgaggctgcgcttgcggagatccgggttctggtgcctggcgccggcagccagtaggggcgcgcgtcctgcgcagtt

SEQ ID NO: 43977 - DNA, 26 bp, Homo sapiens
  chr7:24323302-24323328
  hyper
ctcactccaacagcgcgcagttgtgc

SEQ ID NO: 43978 - DNA, 30 bp, Homo sapiens; identical to SEQ ID NO: 5421
  chr7:24323556-24323586
  hyper

SEQ ID NO: 43979 - DNA, 217 bp, Homo sapiens; identical to SEQ ID NO: 5422
  chr7:24323801-24324018
  hyper

SEQ ID NO: 43980 - DNA, 30 bp, Homo sapiens
  chr7:24612553-24612583
  hyper
cagaaaggtcagggcggagcctgttttatg

SEQ ID NO: 43981 - DNA, 620 bp, Homo sapiens
  chr7:24796416-24797036
  hyper
tgagagccattccagcgcatgccaggcacaccgagtggggcttggcctcctccccaagctaggagctctctagataccggagcaaagtggagggggacttttttccgtccagagagactgaactccgtatctgttccgcggtccgcctccctgcacacacgcccccgagccgggagagcctccgcagcacccagagaagagaccggaacacaaaggatgaacgaatggggagggggggtttggggggttgggagaacgaaaataccagctgcgcttccaacatccaaggaaggaagtggcagcggggacggggagaggatgggaaggggatgctgactgcgagttggggcgggacgcggtgatgggaggggaccgggccgggaatgcgggaggcgaggggagcgacgggacctgccgttccggcggccgggcagccaatcgattcgtctcccctaggaaggagcgaggggagggtggcccagagagaaagcgccgcgcggcctcggctgcccccggcccgggacacccaaacagaccaaagaggatccggagtggagcccggagcggatcccgcagcccgcgcccgccgcgcacttacccgcgcgcccgctgctgggtcc

SEQ ID NO: 43982 - DNA, 434 bp, Homo sapiens
  chr7:24797067-24797501
  hyper
cggaggagcctgcgctgggccggcggggggcgggcgcttggggagggcggagagagggcccgcccgccgggacctttgctcggtccgggcgccccagagccgcgggactggccgccggaggctgcgggaggggcccgggccagacctcccagaagccccagagagagccgcttcccctccttcgtgtgactctctgggagccgggttgctgacggcccagcgctcagccggagtccccgcgcgcttttcgggactcacccgggagatgtcggggcctctcgggaagagtgggctgcgcctgccttccgcggccgcctcgcctcttcgctgcgcgggaccgtggggtttgagagcggcgcctcctcgcggggccgaacccgccacccacagtggagtgtggactgacaccgcggcctcacggttcaaccaggaaa

SEQ ID NO: 43983 - DNA, 1201 bp, Homo sapiens; identical to SEQ ID NO: 5425
  chr7:25019059-25020260
  hyper

SEQ ID NO: 43984 - DNA, 30 bp, Homo sapiens; identical to SEQ ID NO: 5426
  chr7:25021052-25021082
  hyper

SEQ ID NO: 43985 - DNA, 30 bp, Homo sapiens; identical to SEQ ID NO: 5427
  chr7:25043520-25043550
  hyper

SEQ ID NO: 43986 - DNA, 572 bp, Homo sapiens
  chr7:25219528-25220100
  hyper
gaggccgagcctcacgggctgtcactgccctgcaagcggtgcctcgggggtctggacatacctgggacatgagcctgggggcgctgcgggaccgcgcctcccctcccctccccgcagctggcggccttcgcgggccgaggaattttgaggtcgtccgcacctacggcccggtggagctggcaggcaggggcgggggcgggagaaggacggcgggcaggccggggtggggtggggctgggggcgcttgtgacggtggccgtgaccgcggcattaggtgatgcgtccttgaggggctgggggcttccgggcggcgagcggggcgcagtaggaggctcttagagacctcggaggaaaccagcccagcgctacgggactggcaagaatgcgaagaggaaccgagagtgaacggagtgcgaggcgccgggtcggaggcgagaggggctcttccgccttgcgacccctggccccgcctcccggtcccttgccccgcccctctcggctcaccgccctgcctccagtcggaccccgccttgccccacccgcgccccgcccccaggcgccctctagcggcg

SEQ ID NO: 43987 - DNA, 532 bp, Homo sapiens; identical to SEQ ID NO: 5429
  chr7:25891898-25892430
  hyper

SEQ ID NO: 43988 - DNA, 11 bp, Homo sapiens
  chr7:25892608-25892619
  hyper
gggatcgccaa

SEQ ID NO: 43989 - DNA, 380 bp, Homo sapiens; identical to SEQ ID NO: 5431
  chr7:25894657-25895037
  hyper

SEQ ID NO: 43990 - DNA, 262 bp, Homo sapiens; identical to SEQ ID NO: 5432
  chr7:25896367-25896629
  hyper

SEQ ID NO: 43991 - DNA, 565 bp, Homo sapiens
  chr7:25896688-25897253
  hyper
ctctccctgctgtcaatcatacatgcgcgccatagcgcgcatgcgcactggtggactccagcccccaccgatcctacgccctgtctctgcgtctgggaccagacgcaccaataagagagcggattcgggggcgggccacaaggaagtagccaatgagagcgcggttggaagccagggctagagaggagtaaatccttctgtcgtccccgttctgccgcccccgcgatgatttatgcgtcctttttattatttgtaacactttgggaagttattaaaaggaagatctactgcttcctccttttgggttaaactggatggcaatgtttgtcactggcccttattagagaagagtgtggcgaggtggagggccgttggacgctgggtttgtttgtgtgggtcttgttttttattacaagacacattatccttttaattacaagctgtagacagggccaacttcgaaggtcttcgtggcggagtgatcttggatcattcagggggctgaaacccgatgccttctgactttcgcgtccgtactcttggcgttgggaggagcctctcagga

SEQ ID NO: 43992 - DNA, 113 bp, Homo sapiens
  chr7:25900263-25900376
  hyper
tcaattccagccccgcgcaaccaagtgaaagcaaatgcactggaccgcttcggaattaaaatgaattgctaaaaccacggaccgctctgtccggggcccagacctgtctcaac

SEQ ID NO: 43993 - DNA, 31 bp, Homo sapiens
  chr7:25900433-25900464
  hyper
cgcagcacccggcctccaggcctagagtgaa

SEQ ID NO: 43994 - DNA, 702 bp, Homo sapiens
  chr7:25901790-25902492
  hyper
aaaacaccagccaatcagaagcgtttccggaagacactctacacctctccgcctcttcataaatatttaaaccgcttctttctagatttgtcatttaaatctactagggaatgtgcctcaagggctcatctttcactgggtcgctcacacagaggtggggcgagagggaggaggcgcattagccctgcgctctcatttgcttaaacggccttcttacgtcatcgtaagcctaagccaatccgtgaagtgcactttgacaagctacccgcccctaatttgtcctttcaccgccagcctaagccaatagtgtggctgcatgtaaatgagaaaccgcgagcatctccccccgcccccggctccgcccaatttcccacctcttcccggagcgcacagacgccagctgagtgggaggggcctagctgcgggcggagcacggaggaggaagggcacgaggaagaggcggagcgggccgaggcgcgcggagctgggtttgctgagtgcttccttcctcggccccacctcccgccgggcaggatgccgtttgatcattggctggtttaataaagagggcgtgtttattttgcataaatagtgggcgggcacccagggctgctttgtaactcgagaacccggtgtcccgcctgtctcccggggggtatgggcgggtctcccgccagcctcgccagactgagccaagggcct

SEQ ID NO: 43995 - DNA, 106 bp, Homo sapiens
  chr7:25935132-25935238
  hyper
gcggaaatgaaactcgccccctgctggcccgccccggcgctttcagagggaaggggagccaggacgcccgcggggatggctgcccagctgcgagtcacacacgagc

SEQ ID NO: 43996 - DNA, 255 bp, Homo sapiens
  chr7:25989998-25990253
  hyper
tggaaagctgggggcgggggcgctgcacgaggacgaatattcggagctgaaagagttaaacggtggggaacaaatacaggcccgggaaaagcccctaagatgggacgacccaagaaagacccgctttgcggggcctcccctgagacccccttccccagccattcccagtactctattcccggtcttccagccgcccgcgcccagccccgggaactcgggtcgaagtcgtcccatcccctccgttccacccaccca

SEQ ID NO: 43997 - DNA, 30 bp, Homo sapiens
  chr7:25990791-25990821
  hyper
tttgggtttggagacgacctgcgctcttat

SEQ ID NO: 43998 - DNA, 223 bp, Homo sapiens
  chr7:26192423-26192646
  hyper
cgtccctcgcaccagcgtggatgcatggctggtgcacagcgtggctgccgggagcgcggacgaggcccacgggctgctcggcgccgccgccgcctcgtccaccggaggagccggcgccagcgtggacggcggcagccaggctgtgcaggggggcggcggggacccccgagcggctcggagtggccccttggacgccggggaagaggagaaggcacccgcggaa

SEQ ID NO: 43999 - DNA, 192 bp, Homo sapiens; identical to SEQ ID NO: 5437
  chr7:26192666-26192858
  hyper

SEQ ID NO: 44000 - DNA, 30 bp, Homo sapiens
  chr7:26240545-26240575
  hyper
tacttccgtaaatgcgctcaatgaattgcg

SEQ ID NO: 44001 - DNA, 92 bp, Homo sapiens
  chr7:26241049-26241141
  hyper
gagtccggttttggcgccagccgctgaggctgccaagcagaaaagccaccgctgaggagactccggtcactgtcctcgccccgcctccccct

SEQ ID NO: 44002 - DNA, 163 bp, Homo sapiens
  chr7:26331324-26331487
  hyper
caggtggcgaattccgaagggtgccgctggagcacctccagcctcaacgtccggactaatgggggcatttcctccctaactcaatttcaggaagcaggaggctagctctgcagggtgggggcgcacctgggctgggctgcgcggaggcggcggaagcactagg

SEQ ID NO: 44003 - DNA, 793 bp, Homo sapiens
  chr7:26415725-26416518
  hyper
ctttgccccccaccccactggcggtggcgctcccgcggctgcaccctcggccgcctgttggttgcggcgcctccgcggcccgcgcgcatcccccgcgctgcgtcccgcacacgcgcgctcccgccgcgtcccgcccgggccgctccgctggcggcggcgactgggctgcaggtagcgagccagccggcctcggtccggtaacccatggcaaccgccctggtaacccatggcaactgcgcggcggaaagaaaaaaaagaaccgtggtggggcggggggcggcgggcggtgaatgggaacaacgaccgcaaagagacagcgatttaccgcgcgggcctgcggctcccggccgcacctgctgcagacggcccgcgaggccccttcccgcgctacggtgacgattctggctgctggggaaaagagcaataagcagaaagccctcgtgcagaggggatccgggcggtgcacttggtgtgggaggctgccttaaacgccgatgaccctcccggcctccgcgtgtcccggcttccagggccccgccaggctggagagcgcgcgtggagagggccttgccgcctgggggttggttgaggggcggccgcgccggggccggggctggactccaggctttgttctgcagacgctcgcgcccggccggaggaggggctacaccgtgctgccccggccccatggggcccggcccccgagggtccccgcgagcggacgcggtggggccgggcaaactctacgtgccctaaattttgtcatctgcacacgcatcgcacacattagtta

SEQ ID NO: 44004 - DNA, 30 bp, Homo sapiens
  chr7:26416815-26416845
  hyper
gctgccgggccagtgcggaggctgcagccg

SEQ ID NO: 44005 - DNA, 30 bp, Homo sapiens; identical to SEQ ID NO: 5440
  chr7:26437666-26437696
  hyper

SEQ ID NO: 44006 - DNA, 30 bp, Homo sapiens
  chr7:26438289-26438319
  hyper
ggaacgagggcaggcggctgagacaggcga

SEQ ID NO: 44007 - DNA, 30 bp, Homo sapiens
  chr7:26903418-26903448
  hyper
ttcaaaagtcttaaacgtgagtgagctgaa

SEQ ID NO: 44008 - DNA, 30 bp, Homo sapiens
  chr7:26903648-26903678
  hyper
ccactcttcctcccccgcccttctgtcaca

SEQ ID NO: 44009 - DNA, 30 bp, Homo sapiens
  chr7:26903957-26903987
  hyper
tatcgccgccttcccgctctttacctgcca

SEQ ID NO: 44010 - DNA, 609 bp, Homo sapiens; identical to SEQ ID NO: 5441
  chr7:27135161-27135770
  hyper

SEQ ID NO: 44011 - DNA, 956 bp, Homo sapiens
  chr7:27135979-27136935
  hyper
cgttcaatgaaagatgaactggcgagaggtgagaagggaagagggctcccggctctctcggggcgggaatcagtgggccagagctcgccgggtggccgcaagtacgccggcccagcccgcagcgcgcccagccggaaggcggggaatccggctgacaccgcgccccgggttcccaggccacctcctctgttctgaggctgggctgggagaccgtggggctgtgaggagcgcatagaaccgtggtggagggcgaggctgggccaccggctcttcaagctcggaatggagggggaagagcgcagagggctggctgggaggaactcgggtgggcgtgaaggagacgagggcaagaaaagaaacttcccttcttccaggagggtcttcgaaaccctctccccacagcccctctcgtcattagcatggcaatgaggagtttctgtaattcgacttggaggggcggatgagccctggaaactcagagctcgccggaaaaggccgggggcggccgggctcttcttccccaccttccctctctcgtcgctctccgcccctttctctttcccactcagttttgcaccgggagccctccgggatgcggagctactcgaccgccggatttttaggggtaggaggcgggggagagagatgacgctggcggacgtggccagcgcgggggccgggcggtgcgctgcaggccatctgccggcgccctgagacccaggagcctccgcgctcccgcgtgggcctcacagggccggtccacagctccaacatagtagctgaactcccttcgttgcgttcctctttttctggaggggaatgttagaagagagagagagcttccttttataaccttcctcattctgctgcacgtctagagtgggtgtgggggctggcaggtgggaggggcggtggacaaatggctgatggtggacgggacactttaccccaacgac

SEQ ID NO: 44012 - DNA, 30 bp, Homo sapiens
  chr7:27163863-27163893
  hyper
gctccctcgctcgcccggcgcgggtgattt

SEQ ID NO: 44013 - DNA, 1056 bp, Homo sapiens
  chr7:27190213-27191269
  hyper
caggactacaggtagtctctccgattgcagaatcccaaagccagagtgttccctgaaccagcgtgcgcccccagaacgccttgggacgcgcagtttggacagaagcagccatgacgtgccaggcggcctgtgcaaccagtctccatggtgctggagtgggggtgggggaggacccgagtctataacggcgtccagctccggtcaggggtagccgaggcggggagatttcccggccatataggctctgggtgatcgccccccaggtccccttgcgtccccctctaccctgcttgctgggaaatctctgaggggccagtacagcagtcgcgccaggctgcaagaggcgggctgcagctggcgccggtcccggcgacggccacggcgtggcagcagcgagcgccagcacggtcgcaataaataatcggcccgcggcagccgcagtcaggaaggcggcggacctaggatgcaaatgcgccgctttatccgccccgagcgcacgcagagcacgggctaacgtcctaaacatccacagccccttcctatttatcgaatccataccaagatattgtctcaagttggggaaacaacaacccaaacaaaaaacaaacaaaaagaacctcggactcttttcttgtcgctgtccgaggagttctcggggcaaatctggtctgatgtgcacttaggccgagctacagttcgagccaccgcgctacgcaaagccaccgccagcagcacgctctgcgcttcctcccgggcagctccaccatcctctccccgctcgcggaaggtggggagtgcggtcgccagtccgttgcgccaaggtggattggggggtccccctatcgcccagactcggtttgcgtccttccttcaaccttagctgcgggaccctgccacgcgcgctaacagcattatgtcctctgcaccgaaacttcccaccaagtaacacccaattaatcccatcctctcctccaacacagaattccacccacgcacctattccccctcccagcgcttcagacacctctctcatcgaaaaaccgggcgaagggaagc

SEQ ID NO: 44014 - DNA, 104 bp, Homo sapiens
  chr7:27191549-27191653
  hyper
ccttttgggcttcacggggtcgctagggaaggggagagagacgacccaagggatgctgccctgtgccttggcgctgtgccacggagggccgaaggaaggcgggc

SEQ ID NO: 44015 - DNA, 145 bp, Homo sapiens
  chr7:27195456-27195601
  hyper
ggagaaagagagacagaatagcgaacaaacttaatgttaaaattccaagacaaatggagttaaataaatttacgaggatcgaacccattaattgggccataaaaagttttatgagcctcatttacatacaatgctatgggctcca

SEQ ID NO: 44016 - DNA, 26 bp, Homo sapiens
  chr7:27195866-27195892
  hyper
cgcctttggcgaggtcactgcagagc

SEQ ID NO: 44017 - DNA, 364 bp, Homo sapiens; identical to SEQ ID NO: 5447
  chr7:27196152-27196516
  hyper

SEQ ID NO: 44018 - DNA, 160 bp, Homo sapiens
  chr7:27196529-27196689
  hyper
cggccccacgcagcaccccccaccccgcccccccgccgactcctgctagtgagccctggaccaagcttgggatcctccccatccctctcctgtccgcctgcccagaccctggaagggtctctgtcccccgcaacagcctgccccgcggtggccttgtggg

SEQ ID NO: 44019 - DNA, 9 bp, Homo sapiens
  chr7:27203994-27204003
  hyper
ccttgtggc

SEQ ID NO: 44020 - DNA, 679 bp, Homo sapiens; identical to SEQ ID NO: 5450
  chr7:27204090-27204769
  hyper

SEQ ID NO: 44021 - DNA, 524 bp, Homo sapiens; identical to SEQ ID NO: 5451
  chr7:27205265-27205789
  hyper

SEQ ID NO: 44022 - DNA, 28 bp, Homo sapiens
  chr7:27206082-27206110
  hyper
ggtccccggccctcgaccccacgcacac

SEQ ID NO: 44023 - DNA, 95 bp, Homo sapiens
  chr7:27209101-27209196
  hyper
ctgaagtaatgaaggcagtgtcgtgctgtcgagagaaaggtggatcccaacaacaggaaactacctaaatcaccgaccagttctggtgctgcccg

SEQ ID NO: 44024 - DNA, 20 bp, Homo sapiens
  chr7:27209768-27209788
  hyper
aggcccccatgcagtccagc

SEQ ID NO: 44025 - DNA, 33 bp, Homo sapiens
  chr7:27209886-27209919
  hyper
cgcaaaataaccggcctctgcaagcctccctgg

SEQ ID NO: 44026 - DNA, 588 bp, Homo sapiens
  chr7:27212395-27212983
  hyper
ggctctcagctcagggccccccgcttccaggccggatttgccttttcttcttcccgcaacgaagattcccgcccctcagcaactttgaaaaaagcatgggggatcgtaaactcgaacttcgccggttaatgggcttatttattggcgctggcggctgcttattttggatgccttacaaacatccgcgctatctgcgggcgagctactttccctccctccccctccccccgcgtgggccgcgccgcgcaggctgggcagggaccagggctctgggtcctcccggccacaggaaagagcgcacaggagggggcctgctcgctggtgtcctcgtccctagtcagggggagctgaggccagcgccgaggacgtcttgctgtggggcgctaagccggacatgaattttactgcgtccccacgcccaaatattaaaaagcaagttcacaaggtcagcctgcctgcagcttgggccaaggccggccggctgctgcgcgggctcctagttttctgatccttctcctccttgtgtctgcctgtctgcccgcctgactgcagccctctgcagccctgcttacccagggaatccttctc

SEQ ID NO: 44027 - DNA, 1073 bp, Homo sapiens; identical to SEQ ID NO: 5454
  chr7:27213188-27214261
  hyper

SEQ ID NO: 44028 - DNA, 386 bp, Homo sapiens
  chr7:27219441-27219827
  hyper
tcttagtatcagaagcgaacaaaggccaagaatcatgctggggttcccggctccccggcggctttgacattgatcggaagtgcgccatctcgtggcggctgcgcgcctaggttgggccggagttccagccccgagccgagagacggaaaccagctccgggcagagagagaaggagagaggagaggatgtgcccagcccgctgctattgagatctcatttttacatctaagaaatcgctgcaaaaccccagccgggtttatagcggcgcattccaaatatgcaaattggccggccccggacgggtttacgaccacattgtcacagccatcggaggatgggcttttatagggctcagaaatcaaacccgcgcccgcccgccgcccgcc

SEQ ID NO: 44029 - DNA, 32 bp, Homo sapiens
  chr7:27223160-27223192
  hyper
ggccaccagcttctgcctccccggccagcctt

SEQ ID NO: 44030 - DNA, 1836 bp, Homo sapiens
  chr7:27223221-27225057
  hyper
cggaagccccctaccctaggccttcgctgagcaccacggccacacggccatcctgcacacggcagagcagcggctctatcttaggtagggtgaagggaaagggggcttcccgaagctgcgggcaggctctacttgctccccctttaaaaaaaaaaaaaaaaaaaaaaaaaagacccacaagacaaaaaaaaaatcgcttttgacagattgaataacaattgtgaataacatgcagttgggcagaaggaggcacgtaattgccaccacgccagaggaaaatggcttcctttggacaaaaaggccaactttgggttaatttgttcttttaatatattgctagagctaagcgggctactttatctgttaaacgcgctcctagcgccgtcgttaaacagcgacgcctttgaatcccggccgggactggagtcccggcgcaacacatggcttttataaaaatctccggattacctcgctatcaaaagctcccgaagcccttgcagggggaatttacaggcgcccacctccggctccccagcctggagctggccccgagcggggtcgagctgctgggcttgggagctgagaagggaaaaaagggaaaaggggagttgtttttttttgcaggcatgccttggccggtgggtatttcacggccaatttcagcactcgccacgtgatcccgccttttataacaaagttttgttgggggaaacctaaaggcccttcataaaccttatatgcttataaaacagcatataaaaatttaacagcggtgctgcgctagatttccaactcccctttcataaagcgcagggcgctgcctttatacgtactggagccgccggccttgtcctcagtgtggccggaagacgactcggggctgctgctgctctcggggcgccgccgccgctctttctcctctgctgccgccgccgtctcccggcagccgccgccgccgccgctgtccgaacttgaagttgccggcgcgcccgttgcagccgccgccgccgccgcggaggtcgccgtggccgccgggggccccttctcggcgctcttgtccccggggtagtcggaggaggcgaggttttccggggtgccgtaggctgtctcgaaaaactggtcgaaagcctgtggcaggacgccgttcctgcccacggtgctatagaaattggacgagactgcgggggtggggtggtggtagacgttggccgagctcttggccagcacgtcgccaggcacgccggccgcgctgggcgcctgcaggcagtctctgtgcacgagctcctccgcggagtagcagtgggccagattgccgcgggggtgccatttagtggcgggctcaatggcgtactctctgaaggtcacttcgcgcacgggttggacctggggcaggttggaggagtaggagtatgtcattgggcgcgaagacggggtctggggcagaaaagaagggaggctggagaaatctggacccgagacgtagtaagtacaacttggcaaatacatgttagaggagcagggaccacgctcatcaaaatccattattgggctaccttgggctctccgcagtagccgagcttaacatgattctccactgcagctgcctctttgaagcggatccgtgaagtagaaatttggagacgtaagctgacgtggaaatctatccccatccttagcagggaggtgctggtcatgtgacccgatgttgaaattgacaagctgctagctagtccgggccttttccccccccctttccttttttttttttcctcctctcccctccctcccggcttcctttctttgtagccacctcaggggaagcaacagatcgtcact

SEQ ID NO: 44031 - DNA, 21 bp, Homo sapiens
  chr7:27225249-27225270
  hyper
gggtgggtgagggatgccctg

SEQ ID NO: 44032 - DNA, 129 bp, Homo sapiens; identical to SEQ ID NO: 5458
  chr7:27227499-27227628
  hyper

SEQ ID NO: 44033 - DNA, 943 bp, Homo sapiens
  chr7:27227757-27228700
  hyper
cgaattccggagaaaaggctggggctgagaaaggcgctccgggagcggctggcagggcaattcggcaggctgcaccgaagccgagtgcccggagggacttgccgcccggaagggggtgtgtgggggcgctgccgtgaagatggatgagggaaaaggtttttgatatcagcagaagggaaaacgcctggagtggccgaacacttttagttgcccagcaggaataggagacgggtactcagctccccaaggctgcgcaatatcccagctttgcccgctcctgccctcgtgttcggaatatgctggcggtgtgaatgtgaaggtttctccaggcaggcggctggggcgaggggtgggcgcagctctgaggatcagaccaaatctaggggaaaaaggggaggcagaccttcgggtccttggttttgactttgctctgagcctatgattgactcttccgctttgcaggaggtccaacagccgagcttagcccaccgggctctgggaaagacccgactgaggctaaagccgccccggaaggccaagtccgagttccatttcttgaagaggccggcgcgcgtaaggctgtgacattggccctggcgactggcttcccaggagctgttctttctcaggagctccacagcgcgggccatctccagaaaactgtcttcagagtgtatttccttttatcgtcaacccagagccccaccgcggctaatgcaagaggccaaaaaatgtttggaggaagaaaaacaaaggcaggaagtggcggcggcctgacggtgcgtgtgtgtctgcagagaagggagggagccggctcagtctcttcttgtttttccaaacttcaaggtccaggcagccctctgcagggccgggccccattgctccccgcgcggcattggaggtggccgcccggagaggagaaggccaacgcctgcgccaggct

SEQ ID NO: 44034 - DNA, 792 bp, Homo sapiens; identical to SEQ ID NO: 5460
  chr7:27232195-27232987
  hyper

SEQ ID NO: 44035 - DNA, 498 bp, Homo sapiens; identical to SEQ ID NO: 5461
  chr7:27237871-27238369
  hyper

SEQ ID NO: 44036 - DNA, 589 bp, Homo sapiens; identical to SEQ ID NO: 5462
  chr7:27238583-27239172
  hyper

SEQ ID NO: 44037 - DNA, 1163 bp, Homo sapiens; identical to SEQ ID NO: 5463
  chr7:27239225-27240388
  hyper

SEQ ID NO: 44038 - DNA, 30 bp, Homo sapiens; identical to SEQ ID NO: 5464
  chr7:27241188-27241218
  hyper

SEQ ID NO: 44039 - DNA, 68 bp, Homo sapiens; identical to SEQ ID NO: 5465
  chr7:27244542-27244610
  hyper

SEQ ID NO: 44040 - DNA, 520 bp, Homo sapiens; identical to SEQ ID NO: 5466
  chr7:27244797-27245317
  hyper

SEQ ID NO: 44041 - DNA, 30 bp, Homo sapiens
  chr7:27245747-27245777
  hyper
gcggttcctttgtcccgcggctccagcccc

SEQ ID NO: 44042 - DNA, 336 bp, Homo sapiens; identical to SEQ ID NO: 5467
  chr7:27250160-27250496
  hyper

SEQ ID NO: 44043 - DNA, 256 bp, Homo sapiens
  chr7:27252562-27252818
  hyper
tgtctgcagcctgtaattatgcgttcaagatgtttaatgtgtgcaaatgcattagccgctttcgctggtgaaaaccctagctgggggcggggtagaggcaagtctggagataattatgtcgtacagtcgcaaacattattccgttcttactgtaaacggccccggccacctttacgagaaaccaggaaacttctgagagttactagcagcgtttacgcgggcaaactgagttctttttctttctctcccggattgt

SEQ ID NO: 44044 - DNA, 210 bp, Homo sapiens
  chr7:27252895-27253105
  hyper
cggagaggcctacgcaggtccccggtgcccgcggccctcggaggccgggccctgcgtcttggccaggcactgggtggcagctgaggctggtggcccggagccctcgcggccgcgggcaggccccttcttgggcagggtcgggcactcccgctgtccagggctcttcggcaccctccttccaatcaggtcgctctcccctgctccccagac

SEQ ID NO: 44045 - DNA, 661 bp, Homo sapiens; identical to SEQ ID NO: 5468
  chr7:27264930-27265591
  hyper

SEQ ID NO: 44046 - DNA, 484 bp, Homo sapiens
  chr7:27274929-27275413
  hyper
actgtctagagaagccgaggttaagtggctctgacctatcacccatcccgcttagggtccagctcagagagcgggcgcatagggcctggtggaacaggctgccctctggggatgggggattggggccgctgctccgggcagagccgcgggatccgagccagcaaggatgctgggactcgccgcgacttccgcctctggcgatcggcagtggggggcgcaccaagacagcagttcgggagctgcgctttgtcaccgaggcggcgaggggcggagggcgcagaaaggggccgcggagaaaggacaaggcggccgaccagctcccaggatggaaagggaccctcaaggggctccaggcagcacctggggcaaggggagggactgatactcccggccggagcccaacctgtggcgcgtgcttcagtcctgagccagcggctccctggcttctgggctggcatccgtcctaccctcctcccgctgcaac

SEQ ID NO: 44047 - DNA, 180 bp, Homo sapiens
  chr7:27275466-27275646
  hyper
cgccaggcttctgggctgggatcgcgcagtccctccacgtcgcggcgccctgaggcccctcccggtgagccacccggccttcgtgccttgctccccggataccaacctcacctggctcccgcgcgtcgctcaccgcccgcggggacagcggccgcatccgcccaacccacttgggaaggg

SEQ ID NO: 44048 - DNA, 35 bp, Homo sapiens; identical to SEQ ID NO: 5471
  chr7:27278958-27278993
  hyper

SEQ ID NO: 44049 - DNA, 131 bp, Homo sapiens; identical to SEQ ID NO: 5472
  chr7:27279237-27279368
  hyper

SEQ ID NO: 44050 - DNA, 594 bp, Homo sapiens
  chr7:27279453-27280047
  hyper
cgccgggcctggagcggcctccacctcagctgctatcaccccctctccgctgtcatgggattgcccaggcttaatggggttgtgcagggcttcacttgctctcggaatttaccttccttctcgagccgtgccgcgaataaccttcacgacacagtgataacgatgttattaaatactccccccacattcaccgcccaaaaaaccaaaacagtgttcttatccagtcctctctttttttgtcttctttcctttaaaaacccaaccgctcttaatgtgaggttgatgaaaggatgcttttggaagaagtgacatttggttaaaacgttttccccctaatgcgccggtggaaaggggcgggggtgggtgtggttccctaggctcctaagactggccagtcagctttgaaagagcggggcagaagtcgggagagggctggggaaggctttgggctgaggggatgtgtccctgaagcttcagatctggagcccaagggaggcaacctccctctgaaaagccggtcctcagctccatccagccctctccgcgggatgtaagccctgctccgtagggcccgacccaggaagcagactaagt

SEQ ID NO: 44051 - DNA, 1229 bp, Homo sapiens
  chr7:27282065-27283294
  hyper
atcaaaagcttatttaattaccgagtcccgctgcccctgcggaactcgccgcgcgcgttaagctctcttttctttctgcggaattccatttgcatcccctctgcctgggtgtctccctctctcagtgtgtgtgtctctctgtctgttttcacactctcctccccaatcgagcgaggcccacacctggcgcatcactgccgagccattagctgcgggtttcctttcatcttcgctgtggcagacgtttctatttatccacttgcgctcgccgagtggcgtcaccagcggtactgtaatgacgattgcagcaggaggatgacagcttagaaagaagagggcaatggggcttcctcccagaggcggtgcggcacagaggagcgctcgcttcacaaggtgaccctagctcccaccgccaccgccgcggtcgcggtccagaccgcgctccagcagctccgcgccctcccaggcacccggcctttctttctccctcttgcaaccaagatccgtccggccgctggagacccagggagccggggttaggaactcacttggggctttcccctcccccaccggagagccccgggatggagagccgaaaggacatggttgtgtttctggatgggggtcagcttggcactctggttggcaagagagtctcaaatttgtccgaagccgtgggcagcccgctgccggagccgcccgagaaaatggtgccccgtggttgcctgagccctcgggccgtccctccggccacccgggagcgcggcgggggaggcccggaggaggagccggtagatggactcgcaggcagcgcggcggggccgggcgccgagccccaggtagctggggcggccatgctcggcccaggacccccggccccctcagtcgacagcctctccggacaggggcaacccagtagctcggacaccgagtcggatttctatgaagaaatcgaggtgagctgcaccccggactgcgccaccgggaacgccgagtaccagcacagcaaaggtagccaccgtgcccctccgctccccgggcctcccactgcgcccacccttcacttcggcgcaggccaggaggaagacactcccttcccctagggcaggatggctggggggacccacctgagcaactctctctgctatctgcgttctggcgggggtctcctactgtgttctggcattggcgggactgagggtgacagcagtgccttgagtgcggggtgc

SEQ ID NO: 44052 - DNA, 75 bp, Homo sapiens
  chr7:27284594-27284669
  hyper
cctacagccccacttcaatggcgtttgtgtgtctgtgtctgtacacgcctgtgctctggactcgctgtgcagggt

SEQ ID NO: 44053 - DNA, 132 bp, Homo sapiens; identical to SEQ ID NO: 5475
  chr7:27285386-27285518
  hyper

SEQ ID NO: 44054 - DNA, 204 bp, Homo sapiens; identical to SEQ ID NO: 5476
  chr7:27285620-27285824
  hyper

SEQ ID NO: 44055 - DNA, 32 bp, Homo sapiens
  chr7:27288912-27288944
  hyper
tttgcaggagggaaaacggaggctccaggtct

SEQ ID NO: 44056 - DNA, 30 bp, Homo sapiens; identical to SEQ ID NO: 5477
  chr7:27289537-27289567
  hyper

SEQ ID NO: 44057 - DNA, 79 bp, Homo sapiens
  chr7:27289788-27289867
  hyper
cattattccccaactgcggaaacaccagccaccatatgtccgccggagaataagcgtgagtgtcgcggtggacagttgc

SEQ ID NO: 44058 - DNA, 178 bp, Homo sapiens; identical to SEQ ID NO: 5479
  chr7:27290940-27291118
  hyper

SEQ ID NO: 44059 - DNA, 788 bp, Homo sapiens
  chr7:27291314-27292102
  hyper
gggctgggcaagccgaggaacagcgagcccccggacgctgactgcaggacgtcccagtttgtgcccgggtctccgtccctccccgtacggggctcgtacccccgggcctgggtctgacccacagggcgctgaggcctttgtagctgaagtcggaaggcctcgttgcgagcgcggcacaggttgctggtagcttctggactctggaggcttggccttccttctaagccgatggcggggaaagaacctcgtttccacagcttccccgacccccgccgcttgccatttggggacgggaagcgcgcccgggtcgcttcacgtccctctgggccggagccctttccatggctggctcctctgggggcccttgggcctgtgagcagcgtctacttccctcagagaagaatcctttccttcccccatcgaagtgtccctttctgtatcctgaaataacccctcctgggtgaggccagttcccctctgtcgccctcctcccgcaggcgtccgggagcctcgtgaggaccccgtgcagttgagtccaggcgacaggtgcctccccaggtgtctacttgccctccctcaacctgtttagggaaagaccagaacgatgtgcgcggggaggtggttttgtttctcccgaaactggcgctcttgggtaaaaccgcgtgccgcgtctacgcgggctctgttagtgtgcgtgtcccagaagagtgggccttctaggcggcactctttggagaagtaagtgaggtgaactcagaacagagaagcgggaacgatcgtttgatgtg

SEQ ID NO: 44060 - DNA, 115 bp, Homo sapiens
  chr7:27702685-27702800
  hyper
tttttgaacagtgacgccaggcgccctggcgctgcccccaagctcgtgcctcatttacagcctgcgggcgggagtctccttgtttaccaaagcagagggcgtgtgggaggcgggg

SEQ ID NO: 44061 - DNA, 30 bp, Homo sapiens
  chr7:27779468-27779498
  hyper
tgccctttccacatcgctggtgagttactt

SEQ ID NO: 44062 - DNA, 30 bp, Homo sapiens
  chr7:28060166-28060196
  hyper
cttacgttgtcctacggcaggcatggacat

SEQ ID NO: 44063 - DNA, 30 bp, Homo sapiens
  chr7:28220032-28220062
  hyper
caggagtttccgcgcgcctggcacccccgc

SEQ ID NO: 44064 - DNA, 297 bp, Homo sapiens; identical to SEQ ID NO: 5481
  chr7:28448993-28449290
  hyper

SEQ ID NO: 44065 - DNA, 123 bp, Homo sapiens; identical to SEQ ID NO: 5482
  chr7:28449658-28449781
  hyper

SEQ ID NO: 44066 - DNA, 239 bp, Homo sapiens; identical to SEQ ID NO: 5483
  chr7:28449857-28450096
  hyper

SEQ ID NO: 44067 - DNA, 39 bp, Homo sapiens
  chr7:28450672-28450711
  hyper
ctgtacctgatcagcgcgcaatccgcccttttgtattat

SEQ ID NO: 44068 - DNA, 60 bp, Homo sapiens
  chr7:28725631-28725691
  hyper
gagccagagctaggcgcaaaagaagggccagcacattacatcatcgcttggcctggaatc

SEQ ID NO: 44069 - DNA, 1729 bp, Homo sapiens; identical to SEQ ID NO: 5485
  chr7:28995413-28997142
  hyper

SEQ ID NO: 44070 - DNA, 479 bp, Homo sapiens; identical to SEQ ID NO: 5486
  chr7:28997166-28997645
  hyper

SEQ ID NO: 44071 - DNA, 587 bp, Homo sapiens; identical to SEQ ID NO: 5487
  chr7:28997676-28998263
  hyper

SEQ ID NO: 44072 - DNA, 609 bp, Homo sapiens; identical to SEQ ID NO: 5488
  chr7:29185639-29186248
  hyper

SEQ ID NO: 44073 - DNA, 987 bp, Homo sapiens; identical to SEQ ID NO: 5489
  chr7:29234079-29235066
  hyper

SEQ ID NO: 44074 - DNA, 30 bp, Homo sapiens; identical to SEQ ID NO: 5490
  chr7:29602702-29602732
  hyper

SEQ ID NO: 44075 - DNA, 1788 bp, Homo sapiens
  chr7:29603025-29604813
  hyper
taaatgacaatccacagaaagcgcctgcaacggcgcctggctggcaaacagcggacttgttaattacagcctttcaactaagggcgcctgaaactcgcaaacattttgctcgggtgtggattcgctcccgttagttacaaacttgggatcccgggacccggaaagcaagggggaaaaataaatcgcgatggggccaagggacagctgctgcggcaacttttacccagcggagcccacctacagcctcagcctccgggtctcaggtctccgccgtttcttctcaaggagtcggtcgggggagcggcactgcacagcttttctccaatcagacacctcaaggctggcgcctgatccaatctcctcccctggagggtgggaacgcgaagttcctacctgcacctgtggcagcggtgaccgcctcctgggttattttcttttctcccccagctgccccagggttctggtttcccgaatcacttggcaaataaccagcaggtgggcagatgtcttttttgcgttcctacggacgcgtaggcaagttcgatgcgccggagtgaacagccagggtcccatctctcagccggctcccgggcggtgctagcagggaagagggacgcgccggcgaatgaaacactactagcccggaaagccgccctggaccttccacccgggcagcgagtctggcggcccctcgccgccgccccctccgaccagaacagactgcgctgcgagccccgggcttccgccgcagcgcgcagcaattggaggtgccagaggagaccagcagcagcacttgatttagctgggctgcgggaattccgacctgtacactttccagaagcctgatctctccaagtccgcgcccagggactcgagccccggcttccaggttgacccgagcgcgcccccttcgtgctctcggccgcgttcaccgcgcgaggcctccgggtcctgttaagcccgagcaggtgagcgactgggggtggttcggcgtccgccgagacagagcctggccccgggggtcaccctggggtgctgcctggtacctcccaggtacccgcctcccggagccctaagagaggctgaaaaccacggacgctccaggactccgttttctgtacttttgagtaatttgccatcttttccttgcgcaattcgtacaaagcccttccgtgctcacaaagttgatgattgtgaagaagaaaatgtaggttagaggagaggaagcagcatcaggacaccttaccaccactgttagtaaatgacttgggggtacgggttgcttttccgatctgcaaagtaggagggaatgggatgtttgcagacgcagttgctaattgtgcctgagggcgtgggtgccttttgtaccgaaagaacttttggccgttttttcttgtattgttttcaagtcgctgcccgagtgtgtcctcagggcatcctggggaggagccggtgttgcggtttcggggcgcagccgaggccgccccgccgcctcccgtaggcgatcagacttcctctccctggcggttccgggaggagaacctcctacaacaaacaccgccgaagtttccctctccagcgcgatcgccaatcccaggagcgcccggcgcgtgggctgggaaggagccgagcggaaacctggaagtgagccgcggcgcaggcgaatcctgccgttgctggtggcagcgcccaagagaccccgcacagaaagtgggctgggagtctcgcttgctgtacccgcacctaagtgctcagaagcggcctttcgctctgcagagggggggtctt

SEQ ID NO: 44076 - DNA, 370 bp, Homo sapiens; identical to SEQ ID NO: 5493
  chr7:29724331-29724701
  hyper

SEQ ID NO: 44077 - DNA, 55 bp, Homo sapiens; identical to SEQ ID NO: 5494
  chr7:29725076-29725131
  hyper

SEQ ID NO: 44078 - DNA, 740 bp, Homo sapiens; identical to SEQ ID NO: 5495
  chr7:29846007-29846747
  hyper

SEQ ID NO: 44079 - DNA, 1247 bp, Homo sapiens
  chr7:30028510-30029757
  hyper
atttctctcggccctcgcgagtgaggtcgccaaatactcgacgcctcaagagcgagccgaggaggcagaggccgaccaagccggcctctcggcagccccgcccggcgccccgcggagaacgcccgggtgcggctcgagggaagttgtgtcaagtcccacgcgcggcccgcggagaacccaggggcggcccgcgcgcgtcggcctagcggggagggctgctccgggacacggtgcggcggccgcgggcgagttggacgcgctggcagagccgggccgaaggcggcgggcgtctccgggcagccatgttcgcggcgcccgcccgcgcagcaggtacggcacctcggggaaggtgcccggctcgccccagaccccagggtggcgaggccaggggcccacaggcacatcccagtgggcagcaggttggctgccaggaaaaggaaacccaggaagagcagcgcggggaacccggctgcggtgcgggagcccggggccggcatccctccactgcacccccgcagtccccgagccgagtcaccccggcttcaggccgaggccacctctcctctgaccgcccccaggctcccagcccgcccgggccagcaccgggaatcggcctggggtaacgctacccgcgggttcggagggacagcgggaggagatgaaacgcaggaggtggcgatggcgggtggggtgaaaccgccgggaaagcagcgctgcaaacgccctgcgctcccagacgcggctcacctggggcggcgggctccgggctccgctctccgctctgcggtgctgaggctgcggccgccgagggtgcgggtgctgccgggtccggattactgcggcgacctcgggggctgcagctgcagtggcggaggcggccgccgggcgcttccccctacccagactcccggcgctggggcccgccgccccccgcagcagctggcccgactcacgtgaccgcgggcccaccctccgcctcccccaccccggcccccggggccccgccgcaccccgcgcgtctggctgcacgggccgcggcgctgctcaccgtcgagtagggagggggcctgggagctggaggagcggccgagagggcgtatctcgccgcagaaagtggccccctctttgctagatttttatttcttggttgtggctctcaaaagggaaaacccgggcttcaaggagccaggcccagcatccttttggcgcctcttcccgacgtttggttgctacgtccgggcctcggc

SEQ ID NO: 44080 - DNA, 34 bp, Homo sapiens
  chr7:30066335-30066369
  hyper
tggctcttataacgcggccgcctgggaatagcag

SEQ ID NO: 44081 - DNA, 247 bp, Homo sapiens; identical to SEQ ID NO: 5498
  chr7:30067777-30068024
  hyper

SEQ ID NO: 44082 - DNA, 169 bp, Homo sapiens; identical to SEQ ID NO: 5499
  chr7:30517955-30518124
  hyper

SEQ ID NO: 44083 - DNA, 668 bp, Homo sapiens
  chr7:30721274-30721942
  hyper
ctcccctttttgggctgtcaccgcatggagcacgggaattgtgggcaaatcactggcttactgagattagacgctgtattgggggtagaagcagaaggcgcgcccccaacactgtaaggggtccttaacgcccgcggtccgcggtaccgcggccgtcagcagctttgtaccgctgggtccggaatcctctttactccctaaaccgccttctcaggaggccggtgtagagcaggcagcgagggccgggggcactcacgggtcgtgttgtacttgacgccgttgaagtactcggggcacggcctctccacgagggctccggcagcgctgcggggccagcacgttccgatctggtccaaggtcgtgttgcagtaggagtagggacctggcggcgggagagagcgcagtagggctcagaggggcccgcagggacgcggggctctcggagcgcggggtcaggggcgcacccagcgcgcgagagaaggagcccgcgcagcctccgaccgctcgcctcccgcctaccctcggggtccaggggtggcccccagccgtccaagagcagctcttcagccagcgccaggctgcagttggcctccagcaggctgtggagcagtgccgcgtccatcgcgtcccgcagccgcgtgcggagagggagtgggagtgcgcgcccg

SEQ ID NO: 44084 - DNA, 369 bp, Homo sapiens
  chr7:30722018-30722387
  hyper
cgatctcccgggcagcctttgggcgccacctccggtcgcccagagctgtcaagtggggaccttcccggagaggagccgccgagtgcacggagctgcgggtacagccgctccgccgcggccaatggctgcgccggggggcggggccgggcggctcctctcggaggggctcagtctccagcccccgggccctccaccctgcccaaagtacggcttctcagttcgcagctctcttccactcgcggcgtccagaggagggcggtgggctggagagcgtgggcctggggtgacggaatgctctgtgcggggatcgcaggcccccgagctgcagggggcagcaaagcgcgcccacctgcccgcctgcccgaggag

SEQ ID NO: 44085 - DNA, 463 bp, Homo sapiens; identical to SEQ ID NO: 5502
  chr7:31091703-31092166
  hyper

SEQ ID NO: 44086 - DNA, 457 bp, Homo sapiens; identical to SEQ ID NO: 5503
  chr7:31092241-31092698
  hyper

SEQ ID NO: 44087 - DNA, 166 bp, Homo sapiens
  chr7:31092713-31092879
  hyper
cggatcgggaaggcagggctggagggtcccccggggctaggtaccgcaatccgcacggggtttgaggggtgggcaagcaatgtgctaggtgggggttggggtaggggccagtgtagaatgcccctctgtggtgacacatccgggattgttcaaaagagtgtcgtct

SEQ ID NO: 44088 - DNA, 120 bp, Homo sapiens
  chr7:31092894-31093014
  hyper
cggaggggctggggttggggatgccagggcttcagtggtccccagaagaaacgccctgcggggtctgtggggaaacgcaccggccttcccaggttgaagtgggcccgctgagacccctgc

SEQ ID NO: 44089 - DNA, 386 bp, Homo sapiens
  chr7:31232601-31232987
  hyper
tctgcatctgagagcactccacgcagattttcttggccggctccagctggaagccttcggtgtctccttttgtgtgcgcgggagcctggctgcggattgccgcgctgcccctagaggtcagtctgatccagggattgtctcgaatccgcgcagctctggacccgaaaggagaggctcagggagaggataatgcggttgccaagtgccaggcttggcctgggtgagaacccggggctgcgcgagcacggtggcctcggtgcgtcccccggctgtccccgccgcgctgggcggccctgccgcaagttctctctactttctcaacacgggtttgccaaagtcagaaaaggttgggatttttcttcaacgtgatatgactggggttagct

SEQ ID NO: 44090 - DNA, 622 bp, Homo sapiens; identical to SEQ ID NO: 5506
  chr7:31375701-31376323
  hyper

SEQ ID NO: 44091 - DNA, 145 bp, Homo sapiens
  chr7:31528305-31528450
  hyper
ttgtttctaactgagatgtaccgaaccgtgaaaggatgtgggctggacatactaactccaaggagcccgggtatcattgtagtccatgtcaatggcgccccctggtgttcgggggcgcagcagccctgtgcgagtcctgcagcag

SEQ ID NO: 44092 - DNA, 30 bp, Homo sapiens; identical to SEQ ID NO: 5508
  chr7:31568350-31568380
  hyper

SEQ ID NO: 44093 - DNA, 331 bp, Homo sapiens
  chr7:32110360-32110691
  hyper
cacagaagcgatcagcgcgcagctaaagggtttggaggtgaaaaggagggctgggtggggaggagagaaagtgagaagggagagaaaagcggcggctgagcaaagcgggagccggcgcgggcggtggggcctgacccggacgccgcgcacccggctccgccccgcgcccagcgccccgctcactccctggccgcgcctgccttcgcgcccctctgttttctctcacttaccagcagctctgctgacaagcgagaaaactgacaagtgagaaaagtcgtctgtcagcgcccgggctggtgtctgggctgtcaccgcgggcgcggagggaggg

SEQ ID NO: 44094 - DNA, 300 bp, Homo sapiens
  chr7:32110703-32111003
  hyper
cgccgtctgccgggcacacgctgggctccgaccccggccgggcacactcacccccgcagggcagccgcggccaccaccgacctgcggagctgcgtgggcttccggaaccctcacctcaacaagagctcggctccgcgcgcaagtaggagggaagggaaatccttatcctcccggggccagggcacgcagaagccgcgaggcttcgcggaggttgggcctggaggtcccccacagcctcactctcgcacccgccacagaaccggatccattttgaaatattgaagcgactgatggggacga

SEQ ID NO: 44095 - DNA, 226 bp, Homo sapiens
  chr7:32337756-32337982
  hyper
cactctattagtctgtcttgacgtccgcctctatctctggggcctaggtgtttctatcagtgtccccgtgtctggatgttcctgccgctctgtctgtgtgtctctatcatgtccacatcttcctgtcgctttctgtctccctctctcggcactatcttcatctctccatcgcagcgtctccagccctatttccacccctcctttcccccggcctgccttattaaaa

SEQ ID NO: 44096 - DNA, 174 bp, Homo sapiens
  chr7:32338043-32338217
  hyper
cgccgggtcggagcccgcgaggggtgccgggggggacagcccagggtgcggcttctgtcccgacccagtcgccgctcccgggggctcccgcccggagagcaccctccggccccagcccgacccctgagctccccctgcccgcttagaaaggaactctgaccgccaccggagagg

SEQ ID NO: 44097 - DNA, 681 bp, Homo sapiens
  chr7:32338283-32338964
  hyper
cgatgctgaaagtggcgctccggcattttttgaagccctccttcctgttgccggcgtccgtcatggctcggccggccgggcaggggcctcgcagcgagaccagcggcgtctgcggtcccccccacggcggagtgagcagcccggggctcggcggcgaatcctcccccggccgcgccgcgctgtcactctcagccccgccgcgcgctggcagctgagcgcctggagacaacagcggggacccaatgtcaacagctaaagcgctaggagctcggcggaggcaggagccgtcgcgactgccccatctccaagccgagttccagaggcggcgagaggagtgtcaggaagggaggacgcgcgcccgagcgcgtggacggggctgaccggtgggcgcggagatccctgcctggccacgctactctctgtcagccgcggatcccgcgcgccacaggaaagtctgttttctacttcaccttctccttccgtctctggtggctggggggatttggggacccaagggaatggctgaattggcgtcgtgcgtcttctagatatgttttctctggcagaccggggagcttccagaaagcacatcaacagatggaaaggcaaacccctcagccatgagatgttgccgaagtttactccaaacaaggaagtcgggaaaatcgccacgcccacttc

SEQ ID NO: 44098 - DNA, 352 bp, Homo sapiens
  chr7:32467303-32467655
  hyper
ttgtaaaagaagttatggacacgaggacgagaaacgggaaatcctgcgggagatagcgctttctcttttcccccagaaagtctccaggcagcagctctgtgagatccttaagcaaggtaaggaaactcacccgctgcgctgcggcttcgtggccagcagggctgggacatactcgcctcacgcttcagcaccggggacagctcctgcctcgccaacttcggcagctcttctcgatgtctcgccgcgggctgtgcctcacaggctacgggaggggagagtgtctccccacgccggggtcccggcctctgggttttagggagcgcgaatgggtctccgacagcaacgggagcag

SEQ ID NO: 44099 - DNA, 123 bp, Homo sapiens
  chr7:32467946-32468069
  hyper
cgcctaacagtctggggtggatgggacttggggagtcgctatatagaggctgtccggaggctttactggaaattgaggggaggaaggggcgtggcattaggcgagggatacttttttctccac

SEQ ID NO: 44100 - DNA, 30 bp, Homo sapiens; identical to SEQ ID NO: 5514
  chr7:32529846-32529876
  hyper

SEQ ID NO: 44101 - DNA, 292 bp, Homo sapiens
  chr7:32767519-32767811
  hyper
cctgtgaaattaatctcgcagggggagcgaagccacggttgcgggggagcgaagccacggttgccgggaagcgcgggccacccctccctccctctcattcttcgtcctcccctcgcgcgccacccgtttttcctctttctccgttaataacggctgggtggctgggggaggagggaaggtggctccggcggagtctgggcgggcgcctcccactcagccgccagtcgccgtgggagccggaggatggcggcggtaacagcggccgccggagaggaggcggtggggaggcccg

SEQ ID NO: 44102 - DNA, 376 bp, Homo sapiens
  chr7:32768219-32768595
  hyper
cgcacgcgcgcgtactcggctcggatctaccttccagtagcagcggagtggccaatgggaccgggaccagggctgggggccggggggccgccgccgcggggaggttcccggctcaggtgcccagcgctcaccagcccagcgcctcgggcggcgccgcggtggccccggcagccccgcgcagctgtttcctggggggcgtggcgtcgggggcccgcgcggcgcagtcctccttcagcatcccgaacagcagcagcggtccgcaggactcgcaggactcggtgcacagcagccctgaggatggcggcggcggcggccagcaccggccggtgggcgggagccccggcgggccgcgcctggtgatcggctccttaccagc

SEQ ID NO: 44103 - DNA, 1045 bp, Homo sapiens
  chr7:32981926-32982971
  hyper
tctacctagcagcgccgtggccagtccccgccgcccattctctcttcttccgggcctcgccacaccaacactgcaggacccgtgtcctcgtcccttctccgtagcagaggatgaaaagaacggggtttctccatgtcgcagtggcccagggaactcagaggtggagcgcgggggcagcgtgctcggttgaacttgcctgttcggtccacaaatgccgagcaagcgccaataactcttggcttccccaaaagaggcgacgcccacaccaaagcgggggcgaggagcgcaagccgctgccgcctccccgggccgaggcccccgcccacccgcgccgcggcctccagggcccctccgtggccgggcgggcctcgctccccacccagtgaggactagaagtcccgtcgcaggcactaggttcctcacaggcccgcacccctgcctgggtcctgggggcttggaggacccagcccagcgcccaacacggcgccgggcgcccctgttcccagaaaacgggcggcgcgcggactgcggcccagacggctgctcgagactcacaaggactccaggcgcttgagctgctgcagctgctgggcgtcgtgccgccgccgcttctgctcccgggcccgctgcagttcctgatccagcggctcccgcggccaccacgcgcccccagccctcgcatcctcgcgccccggccaggacgacatcgcggcacctgcggcgcggctctggctgcggccaagagggcacttcctccgtgcggcgccccttcccgccgccgccccgcgactcgcccgggaggggccccgaagtcccggcctcggccgccagatgcccgcctgcccgcggccggccccaagtcagtgcgcagagccccagagcccagccgccggtgggcggggagcgcccgctggcggcggctggagccgaggcggggcggggccctggttgggagcctggggaagcttccaggagcttcagggttcccgccaggccacactcatctccctgcccctttgaggttcccgaccgaggcaaggggtct

SEQ ID NO: 44104 - DNA, 895 bp, Homo sapiens
  chr7:32996716-32997611
  hyper
gggaaaattggatccacggccacgtaggagcccctcacggcaccaaacccggtgtctccagggacgggcggagaccagcgggtgggcttgggcagtacgcgcttttctcttccgactttgggccaaagccttgtccggagatcacagtgtctcgctcggggacacgccctctctaggcccagacttggtccccactggagttcccagcccccctccccgctgcggcacgcacattcccaatgccgggcggggcagggcgcagcaggcccgccctcggcgcgcggccaggctgggctcctcccctggagctgcggccgggagggcgggcggccggggagacggggtggcggctgcagcccgggtagggccaggagacccggtccacgtttgcaaacgcagccgaacgcccaggccgacccgtgccgcccgagcgccgcgctgcgtccgcgccactcttctcgccgccccgatggcgttccggggctggaggcccccgccgccaccgctgctcctgctgctgctctgggtgaccgggcaggcagcgcccgtggcgggcctgggctccgacgcggagctgcagatcgagcggcgcttcgtgcccgacgagtgcccgcgcaccgtgcgcagcggcgacttcgtgcgctaccactacgtggggacgttccccgacggccagaagttcgactccaggtaccgcgcccttggcgcccggcgcggcctcagcggatgcgcgtccctctctccggacaggcctttccctcctgccggacctcccctagctccgccccgtgcagccgcgctcctcccttcttccgctgcccagatcctcccggaccccagaccctccgccgcgggtgagcctcccggccctcacgtgccctaggctgccagccgg

SEQ ID NO: 44105 - DNA, 30 bp, Homo sapiens
  chr7:33102640-33102670
  hyper
attaggccgtggttcgctcgagccccgccc

SEQ ID NO: 44106 - DNA, 83 bp, Homo sapiens
  chr7:33943415-33943498
  hyper
tcccttctcttatttttcccacgtcacagcaacgtgctcgcatcagctcctcggtgtgtcgcgatgttggcaatgttgcacta

SEQ ID NO: 44107 - DNA, 1559 bp, Homo sapiens
  chr7:33943753-33945312
  hyper
ccaacacttgccaagcgtccctcactcccacctcgcgccttcgtactttggttacaaaaatcatctctctgcgattgcaccccttttgagtagagggtgccactgcgtggggaggaggcggcgattcagcagggggatcacaggagctgactccccgacacccagtgctgcagaggcgagagggcgcagccgggctgagagagcgacggagctccgagctgcagaggccgccgcgcggcggcccccgccagagatgagcggtggggcgggggttcctccctcttttcgggtgaatgaatgattagtcaaacaccacctccccgccccggtccgcccgagattggaagggaggagtctcggagcgactgttcattttttaaggacgaaaggcgtttgcctcggtacgtttttaaatcgaccttgtgtgtgtttcaacttcggtcatccctagtgtcaggacgcgcagacagctaagcacagaacacatctctaaggccacttgcccctctgtccgctcagccccctgagttcgctgtcgcgcccccgccagagggaagcaaagcagggcatgaaaagttgcgggggccctactgccccgggtgtgtcgctccttcccaaaggtggggcacccgggagcgagcagggtggtggggcgcccctgcgtcccgtttgctgctccctcgctggattggggcacccgggcctgagcgctagtgctgcggcatccccggggctcccccaagaaagggaggaggagccgcgctcgcccggacagtggagacgcgccttctcggctctggtccgcgccctggggccctggcctccctggaggggctggggaactggaagctgggccgagagagttcccgctgcagctatcgcgcagtccctcctgcgcccgggcgcccccagcgggttccgggaggcgcccggtgagcccacgtctgttgcggcggagcgagcgcgctccgggagggccgagagccggcggggctggcaggaggtgaggagtgcgggagtggaggacgctgcggcagcgacagcgacagcccccgaaacagtagcggcagcccgggcggcggctgagcggcagtgcgcagtcggcagcgccgcagctcctctcagtctatctccggctgccgcaacaccccttcctcctggccccctctccggcgctgaggggctgactgctaagccactgcaagcaactccctcaggaaaaaaaaaaaaaaagccgcatcggaggagcctggccgcaggacccctcctccccgggcgcccccacaccttggtctctccccccgccctccctcacacccccccgccccccagctctcgggcgcccgcctccctccttcgcggacggtctcccgacacgccggctgagagcccttttcgactgtgagctgcggcagctgagcagaggcggcggcgcgggacctgcagtcgccagggattccctccaggtgacgatgctctggttctccggcgtcggggctctggctgagcgttactgccgccgctcgcctgggattacgtgctgcgtcttgctgctactc

SEQ ID NO: 44108 - DNA, 30 bp, Homo sapiens
  chr7:33972651-33972681
  hyper
ctgtgctgccatctcgtggcagatctcaga

SEQ ID NO: 44109 - DNA, 30 bp, Homo sapiens
  chr7:35226217-35226247
  hyper
ctgccagtagcttcccggcgcgccgcccct

SEQ ID NO: 44110 - DNA, 49 bp, Homo sapiens
  chr7:35226473-35226522
  hyper
gaaagtctctacgatcgctgaggtatcgggcagtcagtgcccgttgcca

SEQ ID NO: 44111 - DNA, 84 bp, Homo sapiens
  chr7:35226556-35226640
  hyper
cgtggcagagccggcgtgagtccggtgggtctgatcccagagcctcaggttgacgccacttccttggcacggaacagcgtttac

SEQ ID NO: 44112 - DNA, 21 bp, Homo sapiens
  chr7:35293065-35293086
  hyper
tccccagtcctcggcggacag

SEQ ID NO: 44113 - DNA, 295 bp, Homo sapiens
  chr7:35293182-35293477
  hyper
cgttggcccgagaggagagttggggcttgggggacgccgtgaactccatggtccccagcacgcggtcctggccagggacggggtcgtccgaactgccgtccagattccccaagggagacaaagacccgaaacacagctcaaagtttccgagagcagtcacagcggggccagggactccagaagtgtcagctccaacgactccagagctgcacactggcctctattccccaccgcaaagccccagagccgcagagacttcgaaggcagccggagaggagagggcccaccgagcact

SEQ ID NO: 44114 - DNA, 15 bp, Homo sapiens
  chr7:35294031-35294046
  hyper
cgcccgagatccggg

SEQ ID NO: 44115 - DNA, 51 bp, Homo sapiens
  chr7:35296953-35297004
  hyper
ttaacgaatgctaacgaatgctcccttagctgggagctgcagggaccggtc

SEQ ID NO: 44116 - DNA, 216 bp, Homo sapiens
  chr7:35297137-35297353
  hyper
cgcttctcagcacaagggcatctgtctactcccgaacatggccggagattcctgtccacagcctccctccagctctttctggtagacactttaaaagcgacattaacgggcttcggtgcctttggattcctaaattaggtttacggaaaaggaaagacttcccaagaacagtgagaagaggaactgcagcccctccaaggccgctgcggcgcgttc

SEQ ID NO: 44117 - DNA, 546 bp, Homo sapiens
  chr7:35297470-35298016
  hyper
cgacgaacaccccgcgggttttagtttatcgagccaaagtggtcccggagaagcgctccctcgcagccaagctgcaagaagtggccgggaacctacaggcctcgggccgacccaggaagcctccgcaccagaaagctcgaggagcccttacccaagtcttgctcgaagggcaaagcaaagagccagcacccctgagtgtcactgaagttcctggatggggtgtgagtgcgcgcgttccgtccgagacctcagtctcgcccagctatagagccgataaagggatgtcttgtgggcgtaaggcgcttcgcgcccatctccaaggccgatgtggtcaggaggtgaggggaaatgtccttctggcagaagcccgcggtgctgcgacgttgacccgcctggcctcaggctcagggcggcgggcagcccagggcacatgtagtttcagcagccgcgctacgtgggcgggggaccccaggccaccccacgtgtccgccctgggcctcctccgggtcccaaggcgcggcgcctccaggccttgtagcgtcttcc

SEQ ID NO: 44118 - DNA, 106 bp, Homo sapiens
  chr7:35298121-35298227
  hyper
cgagctcactaccgcagggaccggccctcagagccccgggcctcctcccggcagtggaagaatcagcgtgctaacattgtgtgcaaaactcgcagcgtgatcaaga

SEQ ID NO: 44119 - DNA, 128 bp, Homo sapiens
  chr7:35300880-35301008
  hyper
caacagagactgccgcggggcgggggagaaggtggtgaggggggtcgcgcatcgctcagtgcaggtctgtgctttcacttggcctgcgctcaggtcagtgcgccccttaccggagcacccatggcctc

SEQ ID NO: 44120 - DNA, 713 bp, Homo sapiens
  chr7:35301101-35301814
  hyper
cggagccttagtttccctagttgtgaagagggagggtgtgaccatggcccggagctctccgaaaggctgtgcggattgctcggtggcgggatgtggagcgcgtcttctatgatgccaggtgctggccaagcgctcgatgcaggctgctccagttaggtcgatgcgatggcgggaagcactttcctctgcaatggagagacgccgacaccccgagcccgaaggcttgcaaggcgcgctctcgccactggggtcggggatccgtgggttctctatcccgcttacccactccatccttagcagctgtcgtcggtcccagacctctaccttggagagaccaaggcggcccagagcccaggagactactgcgcggtacgccaggatccagaagtggattctgacttctaaagacccctcccaagccaacgctatcagggtccctgcaagcggttgactgtggcggaggcagaaccaaaacctttgctctgcccgcggcgctccagcctctcacccaggacagtgctctgggctccagccgctgcagtggggtcgggacacagacgccgagttagaagccccgccgctgcaggtccctgcttggtcggcgcggtgacggtgtcgctggcggcggcgggggccttcctttggctgcccggccatttaatcagagctattatcagacagggcttgcaggatggcgccggccgagctttacc

SEQ ID NO: 44121 - DNA, 30 bp, Homo sapiens
  chr7:35577105-35577135
  hyper
cctatcgaacttcacgctaaggactgctcg

SEQ ID NO: 44122 - DNA, 30 bp, Homo sapiens
  chr7:35734821-35734851
  hyper
acatggacctcccccgtccccgccatccct

SEQ ID NO: 44123 - DNA, 308 bp, Homo sapiens
  chr7:35839771-35840079
  hyper
gacagcgacattcatcgctacagtagaaactcacacaatcgcagccctttattagtattttgttacccagtagttcctgtgtccattcatttcctcaactggagtgtgagctccaagaggaccgaaccgggcaccgacaaggtgagccaatatgaatgtggcgagtccgcaatgggggctacagcggccgacctctggggctgtgccaggccactagagtgtgatggcgcgagggaagggtcggggaaacagggcctaacctcacttttcaccccgaaagtcaagatagccacggaaacagggatgaa

SEQ ID NO: 44124 - DNA, 30 bp, Homo sapiens
  chr7:35841563-35841593
  hyper
gcgagtcttgagaacggagggagaatcggt

SEQ ID NO: 44125 - DNA, 911 bp, Homo sapiens
  chr7:36192381-36193292
  hyper
taagccccctaagtcccgcctctgcgctcccggggcctacccccgcgctcatggccccgcccccgcttttcctaccccatcgcgccctggccccgctcccacactctatgaccccgcctctcgcactccaggcccgccccacgcgctccagggttctgctctccacccatttgtgccaggccacgcccccacacccatggctcctcctctcgcacgccagggcctcccctcgcgctctctggttcgttctccaccctcttgagccttgatgccgccccctcttccatggccccgcctctcccactccaggcccgcccttgcgctctcgggttcctctctccacccactggtgccaggcctcgccccgcgccagggcccctcccccacgtgccctcgggagtcccggggaggagttgccgcgcggaggaggcgtggccgcggtgcctgcggaggcgcgagcggcgcggcgcggcgcggccgggactttggctttgacaccgactgcgagcgggagccgtgcggctggtgctgggtctggactggctctggcggatccccgcccgagttgggcgcaggactttttgccggggtaaacgcaactgcggcggcgccgccgcaagccccggtgcagcctcggcggcgggtttcgccgccgctgccgccgcctccgagcagccctgcggcttctattcactctgggagagcgatgctaagtttctcccatagaaagagccgggacacgcagaccgaagcggcgtagtcggcttccagggcctgaccagtgacccacacccgcgcggacgcctaggctggaggcagggggcccgtgctgtcccgggctgggctcaggcttccgagccgcaggtggaagaggaaccggcgccccgcagagcggccgagaggtggggcgc

SEQ ID NO: 44126 - DNA, 39 bp, Homo sapiens; identical to SEQ ID NO: 5524
  chr7:36217588-36217627
  hyper

SEQ ID NO: 44127 - DNA, 31 bp, Homo sapiens
  chr7:36406484-36406515
  hyper
ccccgcacccccgccgcggccagcccttccc

SEQ ID NO: 44128 - DNA, 30 bp, Homo sapiens
  chr7:36407027-36407057
  hyper
cagccagtgggtaacgcatattgactgatc

SEQ ID NO: 44129 - DNA, 30 bp, Homo sapiens; identical to SEQ ID NO: 5525
  chr7:36429891-36429921
  hyper

SEQ ID NO: 44130 - DNA, 30 bp, Homo sapiens; identical to SEQ ID NO: 5526
  chr7:37078723-37078753
  hyper

SEQ ID NO: 44131 - DNA, 119 bp, Homo sapiens
  chr7:37487145-37487264
  hyper
caaatggccccctaggcgggagagggtcactgggcggggagttcctggctgtgcggtcacacacacacacaccgactcacacacacacccacaacaccccccccacacacacacactca

SEQ ID NO: 44132 - DNA, 130 bp, Homo sapiens; identical to SEQ ID NO: 5528
  chr7:37487323-37487453
  hyper

SEQ ID NO: 44133 - DNA, 210 bp, Homo sapiens; identical to SEQ ID NO: 5529
  chr7:37487755-37487965
  hyper

SEQ ID NO: 44134 - DNA, 1106 bp, Homo sapiens
  chr7:37487984-37489090
  hyper
cgcacctccagcgccccctccctccgctcccactcccactcccgccatccccggagctcagacttccccaactgcagagcgccccgacgcgcccgcagccctcaccctgccgagcgcggcggccacccccgcccgagccgcggcgcccccagggaggaaacaaaagtgtctccgcggcgcccggagtcccccggagcaggacgcctcctcccggccccagtcccggccccctcccctgccgcgccgaggtcagcgagtcggggcgcggcgccagcccaggaaactttacgaacctgcttggggtcgcaggacagcagcggcaagggttcccggcgatcagagctccggcgacccgccaccattgaaggggaactggaggctctgtcgcccagcgtggggccgcggcggcgtgggtggctctgcctctatcctgtgcccatcctcgcccgctcccgctcgccccagcacacgcacttacactctgggtcggccggctgctgcaccgccggctgccgctgctctcacttcctcttccttcctcctgctggccagagacacattttgcatctgcaaggcatccggagatcagccgcgaactctcctcccgagcggacgctgcggagttgcagccgccgcccccggcacctgcgccaggacactcgtggtctgcgcgttcgccttgcgcccgcaccctgcctggtccctgcccactgcactttgcctagggggatgcccacgactttttgaagtccccctacttaaaagacagaaatgtcaaacaccatgcatgcctcagatctgctataaataatatgtgtgcagagcatgacttcgatgagctcacacacggcgtttggaggcactaattaactccgtcaccctcatagcgccatctccgggaggccaaaagcgagtagcatcttttcacatccttttttaatttttggcaaccggttccggatattaaggggaaacttcggtgggctgtttgaacgctactttaagacgtgtttgttttgacgctgtgcctctacccttggacagagtggcaaaaaaaaaaaaaaaaagtttcctccctctccgtcgacatctatgtatttactaac

SEQ ID NO: 44135 - DNA, 30 bp, Homo sapiens
  chr7:37873312-37873342
  hyper
ctcaaccgccactacggaagtgcacactgc

SEQ ID NO: 44136 - DNA, 1126 bp, Homo sapiens
  chr7:37955576-37956702
  hyper
ccacctcctacaagcctcagacgcccctggcagccttaggtgtggccgcccagttctcgattggcagccacagccccgggcgcctcctcgcctccctccatccttcctacggcctcaccctccgggaggtccgtgacgatggcttcaggcgagatgcacacgccacggtcatagacaggcagctcgtcgcaggccaggctttcgggccagctgtggttgtacatcttcatgaggggctcgcagtcgtcgcgcgcgcgttggcacaccgacttgcacggcttgatagggtcgtgcaggaactccagggtgcaaatgggcgcgtacatggcacagaggaagaagcgcagcacggcgctgcagttcacgtccaccagctcctcgtactgctcgatggccaggatggcgttctcctgcgtgctgtggtgcaggtggttgggcatccgcgtgatgttccagggcatgtgccggcacatagggatgcgcaccgcctcgcagggcgcgccgcgcacgcccagcgccaggtgcagccacaggcacagcgccactaggatggagaggaacatggcactgccctctcgcgctgcgaccccggcagacagaaagcgcccttctcttcctgccaccctcatctttcgctgtcccttcgccgaggaagaaatcctctggggcgcaggagagtttcttcccccaaactccagtcggcagcaaagcggggccgcggggtccggccgcggagctccgccgtctggcacacagggcacgagcagcgccagctctcagccttcggggcgcgaacccgcccgggcagctccagtcccggactccgcagctcggagcgcagccagccacggccattgcgggaccctatttatcccgacacctcccctgacgtgggctcggaacgctcccttggcagctgcagccgcggcgcgggctccccctcggccgccccacccccaggcccgtcggtgcagaagcggtgacatcaccccctctgggccgcagcccagggctggaagcctgctttccccctaaagtccctcctttttagtctggccagtcttttttcttcggaccaagaaaaagaacctctggcagttgttttcgacaccggatacaagagggt

SEQ ID NO: 44137 - DNA, 371 bp, Homo sapiens; identical to SEQ ID NO: 5532
  chr7:37960165-37960536
  hyper

SEQ ID NO: 44138 - DNA, 585 bp, Homo sapiens; identical to SEQ ID NO: 5533
  chr7:37960562-37961147
  hyper

SEQ ID NO: 44139 - DNA, 720 bp, Homo sapiens
  chr7:38217487-38218207
  hyper
catttccatgacattttcccacgagctggagcataaacccccaccgaataactgaagggaagcggaaggcgcagaaacgcggacgaagaggaagcgggcgcttgttaaaccgtgcgatgcacaatgcgggaaagtccaaccagctccgtgtttcaaagctggatgcccagatttcccacccattcctacaggcagaccggctcgccctctccctccttcccgcgtcgtttactggtcagtagaagattgacatgtcatctggccaataggttggctcctctatggaggcactcaggaaccagtcgggtctttggtccctcgagcgagatgcgagctgtgtgcgtcgacgtcagcgtgctgacgtcacgggccggaggtcccggggctgctgggtgcgggcggtgggctgcgcgttgtccgctggactgggtcccggtcacgccccgccaagccccgcccctcaggccggggcgcgaccgcggatccgcagttcccgggccagcctggggcggccggccaggaaccacccgttaaggtaggctgggtttctcgttcccctatttgacaggttggaaaactgagtctcctgggtcagatgacttacatgggggcgtacaggggacccgcggacggaggccatatcctggtcctgttctgtttcctgagtcctgcgcgagcctccaggggaggaggaggggcgaggcaggctgtgctcataat

SEQ ID NO: 44140 - DNA, 312 bp, Homo sapiens; identical to SEQ ID NO: 5535
  chr7:38670351-38670663
  hyper

SEQ ID NO: 44141 - DNA, 215 bp, Homo sapiens; identical to SEQ ID NO: 5536
  chr7:38670956-38671171
  hyper

SEQ ID NO: 44142 - DNA, 30 bp, Homo sapiens
  chr7:39015690-39015720
  hyper
caggagggcggtgccgccggggtgcgctcc

SEQ ID NO: 44143 - DNA, 866 bp, Homo sapiens
  chr7:39453505-39454371
  hyper
cctaaatgtgcgcttcgggaaaataacgagcccctcaagatgccccacaaacgacggtcccctggtccgaggagccgggcagcgccgcgcagccgtctcgcgtgggacccacccgcgggcggagccaggcggcagggctgccccaccgagcttcaccccagcaacccctttaactttcttaaccctgtattccccaaccgaacacttcccagagttcacgctggcagagcccacttcaaaaaatgctgcaggaagccattcacactcattcctatccacgtttttaaaaatgcgaaatagtgatttaaatcagaacagaacctcttccaatgggggtttcctttgcaaccggggcttcgcggtgatttctgtgctgttttgagggcacacacctacataacacgtttgcagagataagggatctcaaactgttcccaaaagtcccagggactcgtaatatgcaaaccgagggcaaatgaacgtgggaggatccgaggcgctcgctgaaggggctctcctgcagtgcccaggcagagggagagtggagggggcggctgtggagtgaagggcggaagtgccctcgccgtcctgaggcctgggaccctcttgatggtaaatggcgctgttgagccccgatgcgcagggactccgcgggcggcggacttgacaggaagctttgctgcggggcggcccagctgcggacgcgcgggacgtcagggccccagcagaagcgccgggctgtgcgtccttaagactgcgggtgcggccccgcccaaggtcgccccgccctccatccttctaccccgcccccccaccacatttctgaaatgaaagagttatcaatcgctttagggttaacttaaaga

SEQ ID NO: 44144 - DNA, 343 bp, Homo sapiens
  chr7:39605668-39606011
  hyper
atagtttaccaaagcgcgcgaatgtaaaacccagaccatggtaagactacggtggaaatggaaggtgtctcactgagggtcccggttgccttctgcaaaggtgaaggtcgtgccggccacgcgaggaaatctgcctcgctcacaactcacaggcacacatcaacactgccaaccgagggagcccaaaatcaccgcaagcgaaaggctccggcggcggccacgggccacagcccgcctccgcgcacacgcagcccctcccgagcctccactcgccgtcttcgccccgccttcggaccggaaggagttgttggcgcttccggtggcctgcgaccccgtaattgcc

SEQ ID NO: 44145 - DNA, 30 bp, Homo sapiens
  chr7:39773212-39773242
  hyper
gaaggaagacgaggcgaggcaagcgccaag

SEQ ID NO: 44146 - DNA, 30 bp, Homo sapiens; identical to SEQ ID NO: 5539
  chr7:39872836-39872866
  hyper

SEQ ID NO: 44147 - DNA, 30 bp, Homo sapiens
  chr7:40174448-40174478
  hyper
gcccttggtctgaccgacagactagaagct

SEQ ID NO: 44148 - DNA, 30 bp, Homo sapiens
  chr7:40866647-40866677
  hyper
ggtatgcatagttaacatcctgacgaatga

SEQ ID NO: 44149 - DNA, 52 bp, Homo sapiens
  chr7:41745339-41745391
  hyper
gcctgatttactggcgacttcacaaacccaactccacgctggagcatttgca

SEQ ID NO: 44150 - DNA, 128 bp, Homo sapiens
  chr7:42267583-42267711
  hyper
ggttctggtttcctccgacggtggcaagggatgtttttcacgcctttcaccacttttgcccgcgcctgcgtcccctgcccgaggtcccaggccgcggcggcggcgcggtgggttcattagcgggcgcg

SEQ ID NO: 44151 - DNA, 140 bp, Homo sapiens; identical to SEQ ID NO: 5541
  chr7:42267821-42267961
  hyper

SEQ ID NO: 44152 - DNA, 2120 bp, Homo sapiens
  chr7:42275702-42277822
  hyper
ataaaaggccgggtgcggggtggagcgtccgcttcggacaatctgcttaaaagtcgcttcacaaactctgcaagtttgggatcaatatttacaccctctctgccttctcccgcccgttttcccgctgctactcaagaaagtaactgtcccctgctgctctgtgtaaacgcggcaccttaaatgattattgcatggaccacggttactttgtgtgtctgtgcgcgctgcccctggaaaggaaaagaaataagagaatcccaaatcatatacagatggtacaactttcacttttcctctatgacgacgaaggcgcgcctctctccatccgctcacaccacacccccgccctccgaagcatagcccgggctggagaagccccagcggcggcggcccccgcggcggaggtccccgcgcgcacccaccatgcctcccgcctccttccgcccatcccgagcgccgtgcgcgcccgaagcccgagccgtagagcgccaccgcgcaaaggaaggagccaggcgcgtgcggggctcgcggagttcttctgaaccctttggatgggggcggaggcgaggggcgccgccaccactgcggcaaacttcgtcccccctccgggaggtgaaattctccaatccgtctccggccggtccgcgggtcggactcttcggaaaggaccttccaggaggagggagcgaatgcaagccttgctcggacgcctcaccggcggctctctaaatctgggcgccttttgacagccattttcactccatcccgtccccacgctggggaccacctctggccccggaggcgcgggcgcggccgcaggagcgggctgcggggtccgcgaaacaaagaacttcgagcgggacgtacctgcggcggcagcggctgtcaagtccccgaacttcccatagacccgcggacggggcgcaggctggcggctccccgctccgcgcggccgcgggcggctacggctaccgcgagcggccgggctgggcgcggggtgcgcccgccgcgggcatggtgcggcgcgggcggccgcggggcgcgcggggaaggcgggagagcggcgcgggtgagtgggagcggcgggtgtgcgcgagtgcgagtgtgcgagcgcgccggtggcgctgcccctgcccgctccctcccgctcgtgcagctccggcatcagtttcggggatcgtgtaatccgatcccttctgactcacaagccctgagtgacagttctgatttggttcaaccgcgggagggaggggaaagagaaagaaagaaacccccagccgtacgcctctcctggcatccaatcgactttctggaaaaaggtcccatcccggcctggtgccccgtgctgggtggagaagccccccgccccgacctggcaccgcctgcactactcacggggtggaaaagttgtccctcggctccgcgctcccctcccgcgcgctccctccttcccttctctcctcctcttcctcctcctccccgcgctcctcctcccccaagttttaacagatgttgccggactctcctcgctccctcgcactctctcttcctccgccccggcccccgcccagtcccttttctttcagccactctcgggctcggaggggacgcgctgagcagcaggacgcctgccgccgcagggggcgaagttgggaaaacttggagtgctgctcgccttacttttgctttctcgctccttccaggccgcgccgggagcccccgcttctcccgcccgccgggtccccaagcccggagtgggtcccagctgcgaggcgggcggcggcggctgggaggcggcgcgtcgcgggccggggtcgggggctgggggggagcccgggcgccgcgagccacgcgcgcgctccctccccgccctccgccgccgccgccgccgccgccgccgcctcctcctcctcctcctccttctcctcctcctcctcctcctccgcccctccccggtcttcacacagacacattcatgcctgctcctcctcttccccctacttgaccccgcgccctcccggcgcgccgaagccccacccacccggcgaggggaagggggcccgggcgtgatgtcacccgcgccctctctcttctctctccacaccgccaggacacccccc

SEQ ID NO: 44153 - DNA, 132 bp, Homo sapiens
  chr7:42533256-42533388
  hyper
cggttgctctgccgggctgcgggggcggtgccctggaaggaggggctgtgcatctgcaccatttctaggaatgtccgccctctgggaacccagccctgaagtgctctgagaatgagccgtgtttacggaaag

SEQ ID NO: 44154 - DNA, 861 bp, Homo sapiens
  chr7:42927724-42928585
  hyper
tgtaagtaccaaaaacgcttaaactttcacactgcggttgtgtcactgaagcagtgcctgaaatctaatccctgagtgtgacgccgccccaaagggccccaagcaggtagatcccatgctgatgctcttttatcctggcctctcagctgttgaggagagtaattgccgggctaaactgataaagtttcattccaaacaattagcctagtctgcaggattgcagtcgcggcttggacaccatcccggtgtctgtcccccgcagagggcttgctaccttgctgtatcagctggcccagcaggtctggggccgcgcgctgcttacaggcgctggatctcgctgctcgtcgctgcgcgctactaggtcctgctgtcgtccgagtcgcctccgggactctccggaattgtagcggctgtagccggctccttgcctgcggcgcggagggcaggtcccagtggtaggaggatgtgttccctttgcagaatcagaccccctcctgggactgtggggaccctctgtcgccggcctccattggaggatgcgttgtccctggagctgggtgcgctgttgcgtgacctggggcctgggtggtgggcgggcctgtccatggcaaagggcacggctgcgcgctacttcccgagaacccgccagcaggctcttgggaagcagcgatttctccttagtcacagtcagagagggtgatgcgacacactgggcttcactgtgctcgtgaagcggagccagggtgaaaggatcatatggcctaaccctaaccctaatgggagtaacttcacctgcgtcccacaggccccgcaagagtgacgctgccaggcaggcgccgccctgttcggttcctgctgctg

SEQ ID NO: 44155 - DNA, 30 bp, Homo sapiens; identical to SEQ ID NO: 5544
  chr7:42952074-42952104
  hyper

SEQ ID NO: 44156 - DNA, 30 bp, Homo sapiens; identical to SEQ ID NO: 5545
  chr7:43016820-43016850
  hyper

SEQ ID NO: 44157 - DNA, 208 bp, Homo sapiens
  chr7:43151999-43152207
  hyper
tggtgttggatatgcccagtacgcgtgctgggtgttggaaggatggggccggcggtaacaagaatcgatatatatttaccgcgggggcgggggtgggggtgcgcggaggctgcagggcggggcagcgctaatgagagcaagcccggcttgtggttggttctggagtctggtacccacagaggagcaggcagggagggaggggatgcaa

SEQ ID NO: 44158 - DNA, 786 bp, Homo sapiens; identical to SEQ ID NO: 5547
  chr7:43152413-43153199
  hyper

SEQ ID NO: 44159 - DNA, 464 bp, Homo sapiens
  chr7:43153229-43153693
  hyper
cgacttgcagacaggcagggagggagctgccggggcggggagggggggggaatgcgtccggtccatttttggctggaggtgcgcttcctgctacccccacgttcccgggcggtgacaatgcagcaaaatccgagggctcaaacaatgtggcccctccatccccggctccagggcattctgattgctctgccgctttgacgtcccggccacttggctgattttcagagccatgatgcgcggtgtctctgtcttgcacacagaggctgggcaccataacttcttccctgccgaatttcagcgcgtagggggagctggcagggacacaggctgcagagatgcccggcttcctgtggttccgggcacagcgcgcctcagtctgcattgggctgacaccagagagcatgtggggattttcctagttgccgaagaagatattatttgacgttgctgtagttttgtgctta

SEQ ID NO: 44160 - DNA, 30 bp, Homo sapiens
  chr7:43494863-43494893
  hyper
gatatttgacagctgcgtgttgaatataca

SEQ ID NO: 44161 - DNA, 30 bp, Homo sapiens; identical to SEQ ID NO: 5549
  chr7:43622364-43622394
  hyper

SEQ ID NO: 44162 - DNA, 30 bp, Homo sapiens
  chr7:43623207-43623237
  hyper
tagggcagccgagtcgcaccagcgccccct

SEQ ID NO: 44163 - DNA, 30 bp, Homo sapiens
  chr7:43769077-43769107
  hyper
ggcttgggaaagcacgggtaaatgcccgcg

SEQ ID NO: 44164 - DNA, 30 bp, Homo sapiens
  chr7:43769341-43769371
  hyper
tttttttctgcgtccggttattgcaaatgc

SEQ ID NO: 44165 - DNA, 30 bp, Homo sapiens; identical to SEQ ID NO: 5550
  chr7:43896240-43896270
  hyper

SEQ ID NO: 44166 - DNA, 30 bp, Homo sapiens
  chr7:43909283-43909313
  hyper
gtgaatgctcatcccgccgctgttcgctct

SEQ ID NO: 44167 - DNA, 13 bp, Homo sapiens
  chr7:43945613-43945626
  hyper
ccggagcggctct

SEQ ID NO: 44168 - DNA, 30 bp, Homo sapiens
  chr7:43965676-43965706
  hyper
ggaaatggctgtaacgcatccagccataag

SEQ ID NO: 44169 - DNA, 30 bp, Homo sapiens
  chr7:43965920-43965950
  hyper
gtgcgggtggccagcgtaacccgggcagcc

SEQ ID NO: 44170 - DNA, 30 bp, Homo sapiens
  chr7:44084056-44084086
  hyper
gacgggctagtctgcgccccaggatccctc

SEQ ID NO: 44171 - DNA, 35 bp, Homo sapiens
  chr7:44122204-44122239
  hyper
ctacttgggccagtcggagcgctggggagggtccg

SEQ ID NO: 44172 - DNA, 185 bp, Homo sapiens
  chr7:44144264-44144449
  hyper
atggcggccgtgcgcggggcgcccctgctcagctgcctcctggcgttgctggccctgtgccctggagggcgcccgcagacggtgctgaccgacgacgagatcgaggagttcctcgagggcttcctgtcagagctagaacctgagccccgggaggacgacgtggaggccccgccgcctcccgagcc

SEQ ID NO: 44173 - DNA, 30 bp, Homo sapiens
  chr7:44240568-44240598
  hyper
ccggaagtggattgcgagccaggaggagga

SEQ ID NO: 44174 - DNA, 83 bp, Homo sapiens
  chr7:44349523-44349606
  hyper
cgcctgagcagccagaaccaggccgaggccgcgcggctcgcgaaggacacgcgggaagagcctttccgccggctgagccgtgg

SEQ ID NO: 44175 - DNA, 15 bp, Homo sapiens
  chr7:44349655-44349670
  hyper
cggtggccgagaccg

SEQ ID NO: 44176 - DNA, 230 bp, Homo sapiens
  chr7:44364448-44364678
  hyper
gcggatggggccacgcgcaggagcaggcgcaagcaggtcccgccacccccgccgcctgccgctcgggtgggggtggggacagcgcacccgcgtcggggacgaccctctggggccgcagccgacccctcccggcgctccaggcccgggggccacccccgcgcgcccctcctctctgacctccccgccgccaaatgcgtcacgtctgccgggcgctccggggacacctgctg

SEQ ID NO: 44177 - DNA, 383 bp, Homo sapiens
  chr7:44364698-44365081
  hyper
cgcgagcccggagccccggcccggcagccgcgctgggcagagctgggcagggccgcgcgcgctgaggtcaggcagccaggcccggggccgggggctcgcgggtcggggccgcgcggggccgtgcgcttgggcccggagcccagagaagccggcggcgcgcgggcccgcagtgcgcctggagccggcggcgcggagggtcccggaggtcccggccctctggggtccccggcccagcccgcgcgcgccgctgctcttacttgccaatatcctcgtagagctggtactcgtcggtgaagcgggtgcaggtcaccgtggtggccatggcggcggcggacgggctcggcgtgcgctcggctgcgctcgggcggcggcgactccggctc

SEQ ID NO: 44178 - DNA, 467 bp, Homo sapiens
  chr7:44365117-44365584
  hyper
cgggagacacctcggctcgcggcgccaggcgggggccgggctgggctgcgccgggcggcgagcgcacgcgagatctgctcgctccgtcctcgccaggagcgcgccgcacacctacgcgcggggaggcgcgggcgccgctgtcaccgccgccgccgccgcgcccgccccgcccgccgccccctgcacgcgccttccccgcgccctgcacacgctgctcctgcacccgcacccgcagggcaccggcgccctgcatctgcacacgcgccctgcacacacacccttgccccgcacccgcaacgcacctgcacctgcacctgcactcacacgcgcgcccgcccccgcccgcccccgcaccccacacacacacccgcgccctgtactgacgccttcatcctctacccgcaccacgcccgcacctcgcgcacgcaggccacttgctgctgccgacccctcgctctcacataaca

SEQ ID NO: 44179 - DNA, 56 bp, Homo sapiens
  chr7:44530399-44530455
  hyper
tagacaaaagagcccgacaagggcagcaaggaggttcctacgcggaaggaagcccg

SEQ ID NO: 44180 - DNA, 30 bp, Homo sapiens
  chr7:44646088-44646118
  hyper
gcgcggctctgtgacgtcacgaatcggtcc

SEQ ID NO: 44181 - DNA, 30 bp, Homo sapiens
  chr7:44646790-44646820
  hyper
cctgtttggattaccgcgcagaccttggcg

SEQ ID NO: 44182 - DNA, 30 bp, Homo sapiens
  chr7:44789103-44789133
  hyper
tgaacgacgctgagcggccagcccccagct

SEQ ID NO: 44183 - DNA, 700 bp, Homo sapiens
  chr7:44924078-44924778
  hyper
agcttatccctctgtcgttcctggatttctttcatctcatccgcataccggcaaaaggcgcctccgaacttgccccaggctttgaagggtacggtgatggcattgcggtaggacggcttcacctcgctcactcgcagaaacaccccgtatttgttgcagcccacatcgaagaagaagcgcttggagtccacggtgatggaggtgccctccgggagctctccatacaggccgccccctgggcccccggcgccgcctcccgggccgcctgccagctcgtcgtcctcgcctccgtagtcgtctatgagcttcgccagcgcgtcgcggaactcgatgaggccctgcgcaggcagcgcgatggtctggccgctctgcaagccgcccggcccggggcccgcgccgaagccgccaccgccgcggttgaccgtttggcggatgcgcaggaagcggccgcgctggttctccttgaggtccaggtagtacttgcggttctcacgcaccaagaattcgctcttgagcgcgcgccgcggcccgccgccctcctcggcgccagccgccagctgctcggggctgctagggcccagctgcgcgtagtgttctatgaagtcgcccagcgagtcgcggaactcggcggccaccgccatggacagcgtgaggcggctcttggaaccgcccgcgcccacctcggcgatcttgaggaagc

SEQ ID NO: 44184 - DNA, 556 bp, Homo sapiens
  chr7:45026072-45026628
  hyper
cccagcctcccacgccgcccgccactgaacccaatcccccaggacccctacctgggctcaggaatggtcaggcaacacgtggggcccaggatggcggtggatgactagactgccgaagaccgcgccgctgcgactacgaagtacggagtacggagtacaggtctgccagccaagactgacgccgcgcgctgcgccgcgcacctcgacgtcaccgcgtagtcccgccccgaagccgtgcgtggccggggccacagcgtttggggtagatgacgtcacgcggccgcgggcgctcgcttggtagggtgtgctggggcgtagagtttagggtcctgaggctgcgtctgcgtgtcaactcagtggagtctctcgaccgccctttgttaccctcctttagtgaccagaaggctggagttacgtaatctgcccctacagctaaaaggacggaggcctgacggcgtggcctggagggacgcgctgagcccctaatgggtggtgccttcctggtgcggccgcacaggcggggccgggcggaatccaagcacgatgtggacacgga

SEQ ID NO: 44185 - DNA, 112 bp, Homo sapiens
  chr7:45128760-45128872
  hyper
ggggtgggcgcctgcgcccggtcccaccctttccacagcatttacgagggagggtttcagggccaattggaagctgggttgcctcagggtggcattcgcccgtggccaggaa

SEQ ID NO: 44186 - DNA, 30 bp, Homo sapiens; identical to SEQ ID NO: 5554
  chr7:45129095-45129125
  hyper

SEQ ID NO: 44187 - DNA, 30 bp, Homo sapiens
  chr7:45197426-45197456
  hyper
catggagactggagcgctgcggcgcccgca

SEQ ID NO: 44188 - DNA, 189 bp, Homo sapiens
  chr7:45299683-45299872
  hyper
cgcgcgcaatcagatccgggttagcaggatgcatctttgaggtccccaaaccaagccacctgcacggacccaatatctctggcgcgtcccgaacgccgtggattggcgtctgccgccccctgccggcggcgcgctgcactgcagacactgaactcgcccaatgggtgcgctgagggtggaagaccctga

SEQ ID NO: 44189 - DNA, 267 bp, Homo sapiens; identical to SEQ ID NO: 5555
  chr7:45613546-45613813
  hyper

SEQ ID NO: 44190 - DNA, 712 bp, Homo sapiens; identical to SEQ ID NO: 5556
  chr7:45613857-45614569
  hyper

SEQ ID NO: 44191 - DNA, 424 bp, Homo sapiens; identical to SEQ ID NO: 5557
  chr7:45614580-45615004
  hyper

SEQ ID NO: 44192 - DNA, 102 bp, Homo sapiens; identical to SEQ ID NO: 5558
  chr7:45615102-45615204
  hyper

SEQ ID NO: 44193 - DNA, 597 bp, Homo sapiens
  chr7:45927981-45928578
  hyper
ttttgaacactcagctcctagcgtgcggcgctgccaatcattaacctcctggtgcaagtggcgcggcctgtgccctttataaggtgcgcgctgtgtccagcgagcatcggccaccgccatcccatccagcgagcatctgccgccgcgccgccgccaccctcccagagagcactggccaccgctccaccatcacttgcccagagtttgggccaccgcccgccgccaccagcccagagagcatcggcccctgtctgctgctcgcgcctggagatgtcagaggtccccgttgctcgcgtctggctggtactgctcctgctgactgtccaggtcggcgtgacagccggcgctccgtggcagtgcgcgccctgctccgccgagaagctcgcgctctgcccgccggtgtccgcctcgtgctcggaggtcacccggtccgccggctgcggctgttgcccgatgtgcgccctgcctctgggcgccgcgtgcggcgtggcgactgcacgctgcgcccggggactcagttgccgcgcgctgccgggggagcagcaacctctgcacgccctcacccgcggccaaggcgcctgcgtgcaggagtctgac

SEQ ID NO: 44194 - DNA, 1382 bp, Homo sapiens
  chr7:45960034-45961416
  hyper
ccaacagctaaacatcggtaccgctcccctcagctccggaaacctttaacccattttcactgaaagcgctttgcaatttacaagtactctgcacttagagaatcgagcaagtagagggccggctggggagggtccctccggcgaccgccttcacctttcccggagcgccttcagtttccccacatattatctccagtgagaagaaaagcggagtctcccgcagcggcacccagcaacccccaggcccttcggcgccagtgcgccgggtgctgcacgcagcgcacctggcgcgggcggctcacctggagctggcggcgctggcagcaggtaggcgcgcaggcggctgacggcactagcgttgacgcagagcccgcggccgtccagcagcgcctgcagcggtcgcgcctcgtcgggcgacggctggcagcgaaggccggagccacagcgctcggtgtagatgccgcacggctggccctcgctcagtgcgcacgtcaggcagcagccgcagcccggctcgcgcaccagctccgcgcacacggcgggcggaggcgcgcactgggccagtgcacgcgcgtcgcacggctcgcagcgcaccacgggacccaagcccgccgagctcgcgccagcccgcgccaccggcggcccgcggagcagcaccagcagagtcagcgcagcggcccagagcgtgggtcgcgcccgctgcatgacgcctgcaaccggggcacgctgcttggcaggctgggcgcgcagggatggggcgacagtacacggcgcgaagctgtggaatccaggcaggaagcggctgatcctcagcgcccagccgcagtgctcgcatctgggcggcccgggcgcgccggccgctatatagaagccggggtggcccaggacacgccccggaacggcgcgcccaggagtgggggttgggaggggggcgggtcggcgcaggcacggctgcgggggcccgtgcttcgccctgagcagccggggccgagctcgggggcgtgcagctcgagactcgcccgggcacctgctcctcgtgcgcacgcccggagcccgggtcaccttgtcgtctacaagaaccaaggtgtgcccggccaccccggcactccaggccacctcagcacccccggtcaccccagtcactcctggccaactcagcacccccgatctccttgaccccgccgcccttaccccttccgctctcggggtgaggtctccctgcggcgagccggtgtcggggaaactggcatacagcgctccgcattcgtgtgtacctcgtggagctttctaaaatttaattccgttggcaggcgaagtcttgggacatttctgacttacatttgggtctcagggagccaaggcactgcggggtttaatttaca

SEQ ID NO: 44195 - DNA, 212 bp, Homo sapiens
  chr7:45962039-45962251
  hyper
cggtgagacctccgcgggaggagactttcctgaacgctgttgaaattggacgcttgccttaggaggtggataggtgacttgaaggagccctttgcagtttggagtagtaatagcaaatcaggagctcctccattcccctccagcacgaagccttgggtgaagttaatcttcattcatcatttctgtctctcctaatcgatctctcgcccagt

SEQ ID NO: 44196 - DNA, 96 bp, Homo sapiens; identical to SEQ ID NO: 5561
  chr7:47294095-47294191
  hyper

SEQ ID NO: 44197 - DNA, 30 bp, Homo sapiens; identical to SEQ ID NO: 5562
  chr7:47621010-47621040
  hyper

SEQ ID NO: 44198 - DNA, 31 bp, Homo sapiens; identical to SEQ ID NO: 5563
  chr7:47621315-47621346
  hyper

SEQ ID NO: 44199 - DNA, 222 bp, Homo sapiens; identical to SEQ ID NO: 5564
  chr7:47621698-47621920
  hyper

SEQ ID NO: 44200 - DNA, 916 bp, Homo sapiens; identical to SEQ ID NO: 5565
  chr7:48075043-48075959
  hyper

SEQ ID NO: 44201 - DNA, 263 bp, Homo sapiens; identical to SEQ ID NO: 5566
  chr7:48127994-48128257
  hyper

SEQ ID NO: 44202 - DNA, 267 bp, Homo sapiens
  chr7:49812750-49813017
  hyper
tttacgtttcttactcgtaaacgtctatttctctgggtttctgaatgcaaagacgagaaagtctcaacagtctgctaaactaacacggccttcgaatcccaatctgaacacagtagctgaaacaagctgtccacaaagaggaaagccagagggggccaattaggaaggaagaaattaaagaaaagagaaaagccaagatgaaaggtccagcgcaaagtgaatgactcgactggagaatggcagccctggcagggtctgcggccggct

SEQ ID NO: 44203 - DNA, 283 bp, Homo sapiens; identical to SEQ ID NO: 5568
  chr7:49813809-49814092
  hyper

SEQ ID NO: 44204 - DNA, 629 bp, Homo sapiens; identical to SEQ ID NO: 5569
  chr7:49814121-49814750
  hyper

SEQ ID NO: 44205 - DNA, 133 bp, Homo sapiens; identical to SEQ ID NO: 5570
  chr7:49815116-49815249
  hyper

SEQ ID NO: 44206 - DNA, 116 bp, Homo sapiens; identical to SEQ ID NO: 5571
  chr7:49815656-49815772
  hyper

SEQ ID NO: 44207 - DNA, 166 bp, Homo sapiens
  chr7:50343323-50343489
  hyper
tgctttacgatgtcccgagtccctccagtctcgccagcggggcgagcgtgagggtgccccgaccgaccagcggccccgggtgcagggtggcgggcccggcggcgcgcgtccccctccccctcctggcggcccgcacgtgtcgcccgcgccgcgcccccacgggtta

SEQ ID NO: 44208 - DNA, 765 bp, Homo sapiens; identical to SEQ ID NO: 5573
  chr7:50343974-50344739
  hyper

SEQ ID NO: 44209 - DNA, 30 bp, Homo sapiens
  chr7:50428412-50428442
  hyper
cactctgacgactgccgagctccgcagccc

SEQ ID NO: 44210 - DNA, 965 bp, Homo sapiens
  chr7:50860137-50861102
  hyper
ccctaatttccataacgcacatgctccaaggcagtcgtcaggcaggcgtttggagaggcaatcagcaaaggcgaagagttgcatcagaaatttccttctgcaaacggtaccgctcttatcacatttccacggctggcgggcggctaatccgcgagccctcaacttggtgttaggccccagcggcggctaacgggtcaccaacagaaccaaaaaaaaggtcctccgtacgaggctgggccggctcgggatttgggagtgtctggcaccactgtcccggacgcccggacgcccgggcgcgcgcgccgcggccccgccgcgcagtcggagcacccggggctgcagggacgcctgggcgcccaccctcccaggcggcggcccccaggagcgcggccttgaccgcagcccccgccacagcccgcgagccgccggcgtctgacaagatggttcaagaatgcaccgcttggactccacacctccccccaggggtcgggaacgcagcgcggagagccccgcggggcgcccggctgcctccgcctccgccgcgcgcccgcagccccagtcccgcctccgagcaccgcccgctgcgggcccggggcgccggagcccccggcccggaggcgacgcccttccgcccgccgcgcctccgcggggcccggcgtccccggccgcggccgcccagcgctcagacaatgacggcgcggggacccgcctggccgtcccgggccccgcggggacgccaaccacaaagtaacttgccgccgcgctccccgcccaactccgtacctgccgcgcgcggctccccgccgcctccgcgtggctgcgggcgacactcggcgtggccggcggcgggcgcgggtccccgcggggcgaggccggcgctcaagactgtcccgggcgccccgcgccgccggcgctgccgccacccaggggctgcgcggaaactttgggctccaccgggtctccga

SEQ ID NO: 44211 - DNA, 514 bp, Homo sapiens; identical to SEQ ID NO: 5575
  chr7:50861127-50861641
  hyper

SEQ ID NO: 44212 - DNA, 1741 bp, Homo sapiens
  chr7:51383370-51385111
  hyper
gactgcgcgctaccccgcggcccagcctgcaccgctggccgggatgagcacggcgcacctggctcggggtctgaataatgagcagggctgctcgtcctgtttgagggaaattactctttctgagagtcaaatcctgaatgtgacgtgtaatccctgcacgcaaggtgtggggatagcaaacagaaaccgggagaggtttgggcaaaagcggaatcgcgaagacagggatgggccgccagactcgcgggtccgctacggatgtctgcgcctcaggcctggccccactaggacgccccttccactgccaggggagaccctggaataaaggcagggagggagagctgctgccatgaaaccctccgggcaatccgaacaccttccgagaacgcggggcccgggcggctgcgaagccggggagccctcccctccacgctgccgggagagccgatcctggggctgccgccgaggccgggagagggaagacttgatgggaaccggccaggggcaagcccgcagggaagaggccggagtcaaaggccgggcgtcccctcgctccccgctccacccctacggcaaacacttggggggcctgaggaaagctcggagctgagtgggggctgtgctggcggggacccccataaggacgcctgcatacaaaccaccccgcgcgaaaagtgcgctccggccccggcccgacacggttacctgggcaacgacccgggtgcccaaagtacacagcacgcaccaccacccaacaccagcacccaacaccagcaccgcaccacctgctccaccactaccaccagcacccgctggggcggcagagagggcgccctgcccgggagcgcgcggtgcggacgcgggcgtccgagcccagggaagccccctctccaccccgcccgaccgcggggccgcttacccggtcgggggcttggccgccgaggcgcgcggcgcgtccatggtgccgggggccgggacgcgggcggtgctccgggcccgccgagtcaggcgctggctaccgccgccaccgctgccgccctcattcactttttccgcgctgacccatcgtcctcccacgcgggccggcggaggacagcggcggagcgcggcggacggaaggggctggaatcgtctctagcgggcgggggcgccgggagcgcagggaggggctggcggcggcgcggggcgggggcgccgggagcaaggtgcgccgcgcccccgccccggctgctctgccgcgcccaccggagcgccgcccccgccccgccccgccccgcctgctcagagtcccgacccggcccgcggcgagcgtccggggaaggaatcctccggcacctgggccctgcaccgacacccgcgggtgcggcagagggcttctccccgtgctcctccacccctggggggagcgcgaccctctctgggcggagtgggggatcccggggccggcgcctcctggcggagttgggggaggggaaccacctggagcctggaggccgtgcgagggcgaggtgggcggaccagcccgggaggactgacgttggagggtgagaagtgagtgtccggcaccgctctctgacctttatccgtgcagcaaatgtctagtgcgtagggtcgcaaagtgggagtcccgaccgggagcgtcaggaacacctgggaacttgttagaaatgcagatttctggggcccaccaggtcccacggaatcagaaacagtgcgggctggagcgcggcctcgctttgct

SEQ ID NO: 44213 - DNA, 149 bp, Homo sapiens; identical to SEQ ID NO: 5578
  chr7:51693437-51693586
  hyper

SEQ ID NO: 44214 - DNA, 30 bp, Homo sapiens; identical to SEQ ID NO: 5579
  chr7:51793410-51793440
  hyper

SEQ ID NO: 44215 - DNA, 330 bp, Homo sapiens; identical to SEQ ID NO: 5580
  chr7:54609621-54609951
  hyper

SEQ ID NO: 44216 - DNA, 412 bp, Homo sapiens; identical to SEQ ID NO: 5581
  chr7:54609991-54610403
  hyper

SEQ ID NO: 44217 - DNA, 421 bp, Homo sapiens
  chr7:54612303-54612724
  hyper
ctgttttgcagcaaaatttaccgagtttccgcggaacgtgacggcgaccgaggggcagaatgtggagatgtcctgcgccttccagagcggctccgcctcggtgtatctggagatccaatggtggttcctgcgggggccggaggacctggatcccggggccgagggggccggcgcgcaggtagcggagcccgccgaccccgcgtctccccttcgctcgcccggtcctcagggtgtccggcccggggctgggggccgaggtgctgcctggacacccctggggacctgcccggttctgtggaagcgagtgacccccagggcttctagggagggaaagggaatttgtcctggggacgcgaagttaaaacccagaaggaagtcctgctgcccagtttcttcctgttaaaccgggaagcgcctcctc

SEQ ID NO: 44218 - DNA, 744 bp, Homo sapiens
  chr7:54614067-54614811
  hyper
tagttgagcgagaggcggcgcccctgcgagccagcaagagaatctggggccaggagcgcggggcgggacggcaggcgggatggtggccggaacaaaggcgcgaaaattcgtcccggagcacttcaccttcactcacgccggccgccccacccctggcgcccgcccgcctcacccctggcgcccccccgcctgcccgcccgcccacccacctccgggcgcgcgtccgcacgggtcaacccgcgaaaaagacccggcggctcccggccccgcctccagagcgcagcatccgcgcggcagggacagcgccgggacagcgccgggacagccccgggacagccccggggaaagcgcggggacggcgtggggtatgccagggacagcgtggggtatgccagggacagcgtgggggcggtgcggtctgggcctggacaggggtggccacgcccctggtcgctcccctgtccccaggtcaccctgacggccctgcccggagccgcgaaggctatgctcgcgtgggagcgggtggtcgggcgggcctggcgcgggactgagcgttcgctccttgcccgcaggtggagctcttgcccgacagagacccggacagcgacgggaccaagatcagcgtgagtgcggggcgcgccaagggccgcgggcccaggctcgggacgcacagcccttccctgtccccgagaaggcggcttgccagcgctgcaggacagccggacagccgggtgccccttgctt

SEQ ID NO: 44219 - DNA, 273 bp, Homo sapiens
  chr7:54732060-54732333
  hyper
gctgttgccgggcacaggctccgggcacacgagggggttccgtgcagcccgctttgcagagggaacggaggcgcagagagcctggcccgggcgcgcggccgcgagggtcgggagcagggaatccaccgctgcagctcagctctgggcaacgctgccacctgctgtcccgcgcagccgcacagcggcccgggcgtcccagcctccgcgagaaagactgtgcctgacctgcacggaggatgacgctgaccggccggtgatgaggaagccaccaag

SEQ ID NO: 44220 - DNA, 30 bp, Homo sapiens
  chr7:55086194-55086224
  hyper
ccagcctctgatccccgagagggtcccgta

SEQ ID NO: 44221 - DNA, 1396 bp, Homo sapiens
  chr7:55086550-55087946
  hyper
gtccaccgcctccggcggccgctggccttgggtccccgctgctggttctcctccctcctcctcgcattctcctcctcctctgctcctcccgatccctcctccgccgcctggtccctcctcctcccgccctgcctccccgcgcctcggcccgcgcgagctagacgtccgggcagcccccggcgcagcgcggccgcagcagcctccgccccccgcacggtgtgagcgcccgacgcggccgaggcggccggagtcccgagctagccccggcggccgccgccgcccagaccggacgacaggccacctcgtcggcgtccgcccgagtccccgcctcgccgccaacgccacaaccaccgcgcacggccccctgactccgtccagtattgatcgggagagccggagcgagctcttcggggagcagcgatgcgaccctccgggacggccggggcagcgctcctggcgctgctggctgcgctctgcccggcgagtcgggctctggaggaaaagaaaggtaagggcgtgtctcgccggctcccgcgccgcccccggatcgcgccccggaccccgcagcccgcccaaccgcgcaccggcgcaccggctcggcgcccgcgcccccgcccgtcctttcctgtttccttgagatcagctgcgccgccgaccgggaccgcgggaggaacgggacgtttcgttcttcggccgggagagtctggggcgggcggaggaggagacgcgtgggacaccgggctgcaggccaggcggggaacggccgccgggacctccggcgccccgaaccgctcccaactttcttccctcactttccccgcccagctgcgcaggatcggcgtcagtgggcgaaagccgggtgctggtgggcgcctggggccggggtcccgcacgtgcgccccgcgctgtcttcccagggcgcgacggggtcctggcgcgcacccgaggggcgggcgctgcccacccgccgagactgcactgtttagggaagctgaggaaggaacccaaaaatacagcctcccctcggaccccgcgggacaggcggctttctgagaggacctccccgcctccgccctccgcgcaggtctcaaactgaagccggcgcccgccagcctggccccggcccctctccaggtccccgcgatcctcgttccccagtgtggagtcgcagcctcgacctgggagctgggagaactcgtctaccaccacctgcggctcccggggaggggtggtgctggcggcggttagtttcctcgttggcaaaaggcaggtggggtccgacccgccccttgggcgcagaccccggccgctcgcctcgcccggtgcgccctcgtcttgcctatccaagagtgccccccacctcccggggaccccagctccctcctgggcgcccgcg

SEQ ID NO: 44222 - DNA, 82 bp, Homo sapiens
  chr7:55087982-55088064
  hyper
cggagacgtccgggtctgctccacctgcagcccttcggtcgcgcctgggcttcgcggtggagcgggacgcggctgtccggcc

SEQ ID NO: 44223 - DNA, 30 bp, Homo sapiens; identical to SEQ ID NO: 5586
  chr7:55322292-55322322
  hyper

SEQ ID NO: 44224 - DNA, 116 bp, Homo sapiens; identical to SEQ ID NO: 5587
  chr7:55593335-55593451
  hyper

SEQ ID NO: 44225 - DNA, 30 bp, Homo sapiens; identical to SEQ ID NO: 5588
  chr7:55639103-55639133
  hyper

SEQ ID NO: 44226 - DNA, 194 bp, Homo sapiens
  chr7:55640583-55640777
  hyper
cgtgatgggaaggccggcctgggggtgggaaggcccaccgaaatagatggtccccacacctcactgcttccttggatgtggctattttttatgccagtgttctcctgctctgaccctacttgaacttgaccgcaaccggccccgccttgcaggccaccctcccgcagcagaaaactgtgcggagctcgcgctgt

SEQ ID NO: 44227 - DNA, 30 bp, Homo sapiens
  chr7:56032097-56032127
  hyper
ctgcgcttgggcttcgcgctttcccgcagc

SEQ ID NO: 44228 - DNA, 30 bp, Homo sapiens
  chr7:56032952-56032982
  hyper
ttgaaatttaaagccggccgtggatctaaa

SEQ ID NO: 44229 - DNA, 210 bp, Homo sapiens
  chr7:56119351-56119561
  hyper
aggagccgtgcagccgcggaccaatgagcgggcgccggacgacctgtggcccaatggcggcggcgcgcgggcacgctgggggccggccagacgggccgacttttccagaagacccggatagttcctcccggccacgccgcgccggctctgggcactcagcatcgtttccttttcctccgctggagcagctatggcggcggtgaagaccct

SEQ ID NO: 44230 - DNA, 30 bp, Homo sapiens
  chr7:56174010-56174040
  hyper
agtccggacggccgcgctttggtctcaaac

SEQ ID NO: 44231 - DNA, 10 bp, Homo sapiens
  chr7:56355476-56355486
  hyper
ttgggcgccg

SEQ ID NO: 44232 - DNA, 73 bp, Homo sapiens
  chr7:56355715-56355788
  hyper
cgctgcagccgtgacggaggactacggcgacgactagggccgctctcccagctctctgcgtgccgcgccgctg

SEQ ID NO: 44233 - DNA, 30 bp, Homo sapiens; identical to SEQ ID NO: 5590
  chr7:57351679-57351709
  hyper

SEQ ID NO: 44234 - DNA, 31 bp, Homo sapiens; identical to SEQ ID NO: 5591
  chr7:57714733-57714764
  hyper

SEQ ID NO: 44235 - DNA, 31 bp, Homo sapiens; identical to SEQ ID NO: 5592
  chr7:63040542-63040573
  hyper

SEQ ID NO: 44236 - DNA, 72 bp, Homo sapiens; identical to SEQ ID NO: 5593
  chr7:63767202-63767274
  hyper

SEQ ID NO: 44237 - DNA, 438 bp, Homo sapiens; identical to SEQ ID NO: 5594
  chr7:63767573-63768011
  hyper

SEQ ID NO: 44238 - DNA, 319 bp, Homo sapiens
  chr7:63774382-63774701
  hyper
gctctgatcctagttcgcgtctccactgttccatctcctccgttcctggagttcctcggtgactctactatagcttctgttatcctgtgacctgcaggtactgggagatccatagggaggacggcggaacatctggaggctgggaaatggtgagtgcgtggagtgggtgtcccgagaatggggaagaggctgtttgaatccggccggaaccggctgcggtggtatctgggccttctcgcggtctgctctggagtctgcatccccgagtccccgcgggcacagctcaatcctcatttccctccatcgcagattaggggct

SEQ ID NO: 44239 - DNA, 157 bp, Homo sapiens
  chr7:64030434-64030591
  hyper
gaggtagacctgagtggtgtacggctggtggcgggtctggaaggagcaggtgtagaggccctcgtcgccgagccccacctcggtgacgaggatggagaactcctcgggggtgttgatgagcagccgcacccgcgggtccctggtcctgcggtcgttg

SEQ ID NO: 44240 - DNA, 22 bp, Homo sapiens
  chr7:64030697-64030719
  hyper
cggcaggagagttgaactccag

SEQ ID NO: 44241 - DNA, 64 bp, Homo sapiens
  chr7:64337971-64338035
  hyper
gtgaacgccactgttgcctggcgacgggtccctgcgtcatggcggagaaggggacctctgtgga

SEQ ID NO: 44242 - DNA, 349 bp, Homo sapiens
  chr7:64348618-64348967
  hyper
aggagggcgctccctcgtcagatgtccctgtctctatgggggtccttcctcctgtgagctccgtggcctcgcacaggctgctcaacacctctgagctcaaattcctgctcccagggggaagcgggttatgaagatgagagggagagagagcgagctgtaagggaagcaggtgacacggggctggacagggaagggcctggctctcaaggaagggagcttctccaggtggcttcctcctctgtcaaatgggcccacgaataccctattgatggtgagaattaagagatacgaaacccattcgttctttattatgatgatttttattttcacagtagcacttagcacctgc

SEQ ID NO: 44243 - DNA, 790 bp, Homo sapiens
  chr7:64349041-64349831
  hyper
cgcgtcttcggcaaagtcttcggggtgagaggtccggctcctggaggacagcgggatgggagagtcccgttcacacccagccccgcagagccggatagaaacgctgccactgccgactccatgctgccgggaagtgcactgtggaggccactttctggaaagaagaaaccgtctgaacacaaagttgctcaagccatgttcatctatctgccagggaaacggaggccctgagtgccagagtccaagtcaccctgcaagagaaaactctggtggagcccagggtgtccagcccctgtccacccagccgccgtggtcaaggttaataagggcaaggggccaagcagaaccgcctacaaggaaccgagtgtccacaaagcaggaagcgaagaacgtttctcctacctagagcgcagccgttttgcggaaggcacagtccgggctccgggagccaagcagggatccgggcctcgttgcggaggggacgcccgggctgagctgagctcacttgctggcggcggcagcccctgcagtcatggggtcaccggcttgtggagaggggctggcgctgttccttggccccgctccccgcccgcaaagggccgggaggtcgggctcccggcagtgtccaggctctcgcccgccggtgcctgagccgtacccaccgcgtcccctccgccccaacagctggtgctgagggtccggcccggggtcatctggcagggccgtgcggctcctgcgggtgaccaggagcgcggagccccttcccactcgggctcgggtggcctcacct

SEQ ID NO: 44244 - DNA, 130 bp, Homo sapiens
  chr7:64408116-64408246
  hyper
tagagcctggagaccgccgggagcccgacttcctggcgctttgccctttggggagcggagccaaggaacagcgccaacctctctccacaagccagggaccctacgacccaccgccgcaggtgagctccgc

SEQ ID NO: 44245 - DNA, 21 bp, Homo sapiens
  chr7:64408292-64408313
  hyper
cgagccgagactgtgccttct

SEQ ID NO: 44246 - DNA, 30 bp, Homo sapiens; identical to SEQ ID NO: 5597
  chr7:64691764-64691794
  hyper

SEQ ID NO: 44247 - DNA, 104 bp, Homo sapiens
  chr7:64700521-64700625
  hyper
caaggaccagcccgcggaacaccccggcccctcggcgcctgccctgtccttctggctacgggtccaggagggctggcatgagaccaatcgcgaccctgcggttc

SEQ ID NO: 44248 - DNA, 767 bp, Homo sapiens
  chr7:64712192-64712959
  hyper
ctcccttgctgccttaagtcccgctgtccctgtcacccgtgttcccgtggctctgggcccctgccacgccaggcgtgctcttctgtttctggctgtcccaccggcgatgctgcgcttccacaccacccggcgcacaggcgttggtagatgtggaaggtaccaagagcggcaggaggaaggggcgcgcggacacccagccccttcccgcgcacccagagcaggaagagcagcgcgcacccggtcagcgacgcggcgggctccactgtggcgcgcgcactccgagcacggagggctgcaggctcacgccacctggctccgcgcccatcccaatccgcacccgccgcccaggaaccggggctcaccctccgcctgacaattgtctcggggtgccgagggtccgtggcccgttgcccgggaggtgaccactgaggagtcgcgctgggtatcggaccaggaactcactgctttcattggctgcggaggtcagaccgtcccaccctcttctccccgccgccgcggcaaggccagggcgaaagggacaagtgcgctgctggggtcctctgcgctgtgcgggtccgggactcagggttcccggctgctaacaaggctgcgtagcttccccctcccctcctccttaggtggcaacttgtggacacacccattaagcggtcaggcgtcaggtttcctcccgagaggtgggaggcgccctggccttgattcatcgtgaagctaggcaggagatttcccagccacggagggtggaaagc

SEQ ID NO: 44249 - DNA, 596 bp, Homo sapiens
  chr7:64734190-64734786
  hyper
tcaatctgtcagagtaggaaccgtcctatcaggcacgcagttggggaggagggcgtggcttccagcgtttggcgcggcctttgtctctggctcaggccggagcctgagatccatctctactgtcccgcgtgttgcccctcgggagcactaggtgactttgtcacatcctctgttgccctgagatctggaggtactgggaaatgcatagctaagatgccaggacatcctggaaaccaggaaatggtgagtacgcggggttgggcatcccaagaggggagagtgggctggttgaaaccagcggaaccggcctccccacggtcagctcccgggtccacagacctgagtccccgttggcgcagctgggccctcagtacccccggagagtggggtggggggcggtgcaagacggcagctgagccagcggactttgacccctcaccgtcctcttcccgcgccgcgacctgcctgaaactctctgggcagcgctgcacccgcagccccgactctctcccagattgttcagggatgacagagggtcattagagcagaatcccgactcggtgggtgcgtgggaggagctgcggccagtggggtcc

SEQ ID NO: 44250 - DNA, 2 bp, Homo sapiens
  chr7:64973912-64973914
  hyper
cc

SEQ ID NO: 44251 - DNA, 148 bp, Homo sapiens; identical to SEQ ID NO: 5600
  chr7:64974033-64974181
  hyper

SEQ ID NO: 44252 - DNA, 741 bp, Homo sapiens
  chr7:64974273-64975014
  hyper
gggctaaaagccgcaaaaagccgcggaggggggagcgaaaagcagtgggagctggggcaaaaaaccacaaaaagccgaggcagcggcggcagaaaacctcggcagcgggggcaaaaagctgcagcggcaaaaagcggcgacgggggcaaaaagccgcggtggcaaaaatgcgcggcggcgggggaaaaagccgcggcggagtggggcgaaaagcagtgggagctggggcaaaaaaaccacaaaaagccgcggcagcggcggcagaaaacctcggcagcgggggcaaaaagccacggtggcgggggtaaaaagcagcggtggcaagaagccgcgacggtgggggcaagaagccgcggcggcccaggcaaaaggccgcaaaagccgcggcgacgggggcgaaaagccgcggcggcggaggcaaaaagccgcgacggcagggggcaaaaagctgcaaaagcctcggtgcgggtgaaaaaagtcgcggcgagaaaaagccgctgaggcgggggcaaaaagccgcggcggcaggggcgaaaaccagcaaaaagccgccgcggtgggggcaaaaagcagtgggagctggggtaaaaaaccacaaaaaaccgcggcagcggcggcagcaagccacggcggcgggggcaaaaagccgcggcggcaaaaacccggggtggcaaaaagccgcggcgccgggggacgaaaagcttcaaaggccgcttcggcgggggcaaaatagtggaaagg

SEQ ID NO: 44253 - DNA, 117 bp, Homo sapiens
  chr7:65037618-65037735
  hyper
aaaagccgcagcgggcgaaaagccgcggcagcggggggccaaaagccggacgggcagaaagccgtggcagcggcgggcaaaaagccgcggcggcaaaaaggcgcggcggcgggggca

SEQ ID NO: 44254 - DNA, 594 bp, Homo sapiens
  chr7:65509013-65509607
  hyper
actgtgacccagaaacgctggtaaatgaatgagagaaggagggggcacattgaaaggcagccggacacggaggtgctcggccccgcaccccagacacaggttgtggaggttcggaggggcttgagtcccgttcgtccctgtccctatcccggggccctcccggacagggccagccagccccctgccctcacttccgtacgagggtcgcccagtccccacggctctcggctctcagaggtccaactgttaggctcctcgcgtaccaaaagggacgcgtccagactagagtctggacttccatgaggtccagactcgtcgcctctggctgccagcagacaaggaacttcacactctacagctctccccaccgtcgccaacagcgccaaagtgccagctccgcacgccaaggtgcaagccaggagcgccgcgcttcatgccgggagcttggcggactcggaacctcgcgccgcaggttctcctttctcgggggtgggggtgttggggggggtgggggcgtgttcctgtatccttcgcccaggccgacttcagactgctgagcgtttgcggacaggattatctcgtgttttctattgt

SEQ ID NO: 44255 - DNA, 39 bp, Homo sapiens; identical to SEQ ID NO: 5604
  chr7:65541036-65541075
  hyper

SEQ ID NO: 44256 - DNA, 30 bp, Homo sapiens; identical to SEQ ID NO: 5605
  chr7:65579918-65579948
  hyper

SEQ ID NO: 44257 - DNA, 30 bp, Homo sapiens
  chr7:65670826-65670856
  hyper
cgtctcgccgggatcggacatttgccccca

SEQ ID NO: 44258 - DNA, 30 bp, Homo sapiens
  chr7:65878896-65878926
  hyper
aggctgtgtaggtgcggcccccaacaccta

SEQ ID NO: 44259 - DNA, 30 bp, Homo sapiens
  chr7:65958581-65958611
  hyper
gcccgcgcctgtgacgtcagctgaggcgcg

SEQ ID NO: 44260 - DNA, 138 bp, Homo sapiens; identical to SEQ ID NO: 5606
  chr7:66094048-66094186
  hyper

SEQ ID NO: 44261 - DNA, 30 bp, Homo sapiens
  chr7:66119836-66119866
  hyper
gtgcgcggcttctccgtctaacgtgctcgt

SEQ ID NO: 44262 - DNA, 30 bp, Homo sapiens; identical to SEQ ID NO: 5607
  chr7:66206243-66206273
  hyper

SEQ ID NO: 44263 - DNA, 150 bp, Homo sapiens
  chr7:66309957-66310107
  hyper
ctggggagcgccttcgctgacgtcacaggcgcgggccctcggcgacgcaatagcgccaggccttccgcgtcgtcagagtgacggtacagtgcctggagctgggctgttttgtcttcagagtggtgcctggtaaccgcgacttccccgcca

SEQ ID NO: 44264 - DNA, 238 bp, Homo sapiens
  chr7:66387046-66387284
  hyper
gagtcgtttgaacgccgtacccatcggacagctggtgaggaggcctttgtggaagaatctgatgtctgagtttagttctcaactagcaggtgacagccctcactggctgatgaatggtgagcttctctgaagcctgctttgtaaagattgtggcttccgcctgaactgcttctttcctgcctcaaaggtgagccgctacgggagggaatgggaagaaaaactccgagactgctgatga

SEQ ID NO: 44265 - DNA, 30 bp, Homo sapiens
  chr7:66461678-66461708
  hyper
cttatttctgggcacgccccctttcccctc

SEQ ID NO: 44266 - DNA, 31 bp, Homo sapiens; identical to SEQ ID NO: 5608
  chr7:68161974-68162005
  hyper

SEQ ID NO: 44267 - DNA, 2540 bp, Homo sapiens; identical to SEQ ID NO: 5609
  chr7:69062231-69064771
  hyper

SEQ ID NO: 44268 - DNA, 533 bp, Homo sapiens
  chr7:69064833-69065366
  hyper
cgccccgtcccggcccagacccccgcggaggaagcggagagagtccacctcggcagaagaggacatcattgatggatttgccatgaccagctttgtcacttttgaagcgctggaggtaagggggaccccccttcccccgggttccctttatgcacgaccccactcggctgcgcccggctctcctgcctccctcgccgcgctccgggctgtctgtctgtctgtctgtctgtctgtctgtctaggctgaggtcttattgttggtggggggagctgggggcgcgggcagacaggcagcaggagggagtcgcaaagccgtgcctggtctcgtttcctcgctcgcctttcccctgcgccccctccctgcaccccctccacagcagatgggcagaaagaaaggggttcgggcatcacaacaatgcgccccctctccacagagagctctgcccccactccttcctcctctccctccccaatcatggcttcttggctggtggaagtctctttgctgggtttggggcgcctgtggacggttc

SEQ ID NO: 44269 - DNA, 30 bp, Homo sapiens
  chr7:69538625-69538655
  hyper
tgtttctccatttatcgaatggaaggtaat

SEQ ID NO: 44270 - DNA, 30 bp, Homo sapiens
  chr7:69553461-69553491
  hyper
ggtttctactcttatcgttgttatttcctg

SEQ ID NO: 44271 - DNA, 30 bp, Homo sapiens
  chr7:69677254-69677284
  hyper
ctagttgctgccttgcgctttttccgcagt

SEQ ID NO: 44272 - DNA, 30 bp, Homo sapiens
  chr7:69807320-69807350
  hyper
ttgcgggggggaagtcgcttgccagaagat

SEQ ID NO: 44273 - DNA, 30 bp, Homo sapiens
  chr7:69827455-69827485
  hyper
caaatgtttcttccccgggaaagtgaaaca

SEQ ID NO: 44274 - DNA, 30 bp, Homo sapiens
  chr7:69917036-69917066
  hyper
agtgctgtgtgactgcggccttgggcagtt

SEQ ID NO: 44275 - DNA, 30 bp, Homo sapiens
  chr7:70041731-70041761
  hyper
ctggaatagtcttttcgtaatatattaata

SEQ ID NO: 44276 - DNA, 582 bp, Homo sapiens
  chr7:70060813-70061395
  hyper
ggtggggcagttttgtggttccggcaccgacaccgtccctttcacacggtactgagccgcgggctgcttcggggcggccctccccgccccgtgccttgccgggatggcagagcggatcagaagctgcgcgcgctctgcctgcgcgctttgcctgcgcgctttgccgccgcaacccgcgcagcagccaatccgctggtgcactgcaggtgacctcccccgggcccgggaataaattgtcaagtttccccaccgtgggtgtctttgctagccggcgagttgcagtcttctgagctaattaggagacggtcatgaggagcgaggcgggccggggcgctccgcgggccggggcggggctggggcgggcggcgcgcagctcctgggccgaggcatccgcgagccgcgggtagatcgctcgcgtctgatcgccgcccgggagctcccgcggagccggctgccaggactcgttccagctccagtgcggggctgcccgggcgtccagaggcggcggacggcgtgccggcaagtttccccggcacctgccagtgcccgcgaacccacctcggaagccagacccggggaggc

SEQ ID NO: 44277 - DNA, 30 bp, Homo sapiens
  chr7:70084964-70084994
  hyper
gcacagtcctgttgccgagaagcgcttagc

SEQ ID NO: 44278 - DNA, 30 bp, Homo sapiens
  chr7:70085970-70086000
  hyper
ggcctgagctcagagcggggaggaccatga

SEQ ID NO: 44279 - DNA, 30 bp, Homo sapiens
  chr7:70092963-70092993
  hyper
gggatactctttccccgtctttcacctggc

SEQ ID NO: 44280 - DNA, 30 bp, Homo sapiens
  chr7:70119677-70119707
  hyper
ctattgaggctaattcgtgaaagaaaggtg

SEQ ID NO: 44281 - DNA, 30 bp, Homo sapiens
  chr7:70142308-70142338
  hyper
tcccaaatttctgaccgtggctaggctttc

SEQ ID NO: 44282 - DNA, 30 bp, Homo sapiens
  chr7:70160670-70160700
  hyper
tattctccgcgttcccgcctccaatctgtt

SEQ ID NO: 44283 - DNA, 30 bp, Homo sapiens
  chr7:70161177-70161207
  hyper
aaagggtactcgtgtcgtttcccctgaaga

SEQ ID NO: 44284 - DNA, 30 bp, Homo sapiens
  chr7:70170333-70170363
  hyper
tcgagtaatccgctccgtgcatttcggatt

SEQ ID NO: 44285 - DNA, 30 bp, Homo sapiens
  chr7:70259342-70259372
  hyper
tgaggggaaataagacgcaattgttgacat

SEQ ID NO: 44286 - DNA, 30 bp, Homo sapiens; identical to SEQ ID NO: 5612
  chr7:70294249-70294279
  hyper

SEQ ID NO: 44287 - DNA, 44 bp, Homo sapiens
  chr7:70294496-70294540
  hyper
tccagaaatcaggccgacttgctataaacgccccattccgtcca

SEQ ID NO: 44288 - DNA, 30 bp, Homo sapiens
  chr7:70294766-70294796
  hyper
ccaagttgctacatccgtttgcactcagag

SEQ ID NO: 44289 - DNA, 30 bp, Homo sapiens
  chr7:70333599-70333629
  hyper
ccagctggagtagagcgctgtgggctgcaa

SEQ ID NO: 44290 - DNA, 30 bp, Homo sapiens
  chr7:70373975-70374005
  hyper
cttgagtttgtctcacgcagcttggacttg

SEQ ID NO: 44291 - DNA, 30 bp, Homo sapiens
  chr7:70384684-70384714
  hyper
gtgcctgtctgttctcggctgaatgttcct

SEQ ID NO: 44292 - DNA, 30 bp, Homo sapiens
  chr7:70388688-70388718
  hyper
tcgccccctccccaccgaggacacacttct

SEQ ID NO: 44293 - DNA, 358 bp, Homo sapiens
  chr7:70596057-70596415
  hyper
tgaattccagtatttcgagttcctgggttttgggaagaggaagaggtagtggaaaaccaggagccaaatgaatatgcttcttataataaaatttgaacagagcagcgggtgggcctagaagcagtgactggggaggttagaattcttgcacgcagagaacccccccaagcccgctcacgcccggcctggctccgaaggtctcagaatccgagcctccaggccagattttccctctagccattcctggccacgcagcgcggagccgcgagcacacagaaaaggatgtcttcatcgccaaccgggatggaacgaacccgcccgctcagggagtactgagaactaaagggtccctccagcg

SEQ ID NO: 44294 - DNA, 257 bp, Homo sapiens
  chr7:70596453-70596710
  hyper
cgcggtccccactctccagaagcccccgccctgcccgggtgcgcgcgcgcacgagtcggcgaaccggggagctgtgcgctcggcagcctgcgggcggcggcggcggccgccgacagcctctcggggacagggtggcgaagagcggcggaggaggagctggcgccgccgccgctcccctcgggccgcgccccgccctccgccgccacctgcgcgtcccctccgggctcctcagctccggggctgtgtggctctcggtg

SEQ ID NO: 44295 - DNA, 504 bp, Homo sapiens
  chr7:70597367-70597871
  hyper
ggcacctgtgcgccgctccctctgtgcctcccgggcagccccgcctgccggcctcggagtccgcggcgccggcggctagaggtccagaggcgaaccacttgctggtgcagaagagaaaccctcaaatccctggcctttcgcggagacgcctggacggggccgtgcgccgtggactgagcaggcgtctcggggagcacttctgcagagcgaggacttccatgtgagcgattccgttctccccaccaccaatccgacctcccagccgtctccgccgcccgagcatccttgaggtgggacgagcaggggcttggatccctgccggccgtctggtgtgtgaggcttgcacggcccctggctgccccgcgcctcgccggagcccgagggggcgcaggtccggggcgagggccggccgggctgtttgatggcttcactgagaagagtcaaagtgctgttggtgttgaacttgatcgcggtagccggcttcgtgctcttcctggccaagtg

SEQ ID NO: 44296 - DNA, 81 bp, Homo sapiens
  chr7:70597990-70598071
  hyper
cgctgctggaggacatcgtgtaccggcagctgaatggtaaggacgcacgccggcgcctccggggctcgacgcgggcgggcc

SEQ ID NO: 44297 - DNA, 30 bp, Homo sapiens
  chr7:70601107-70601137
  hyper
ttgttttgggtaatgcgtgtcccatctgtt

SEQ ID NO: 44298 - DNA, 30 bp, Homo sapiens
  chr7:70611826-70611856
  hyper
aatcacaggcgaccacgttcagacaccaac

SEQ ID NO: 44299 - DNA, 30 bp, Homo sapiens
  chr7:70651397-70651427
  hyper
caggcctaagctgagcggggcctctgcctc

SEQ ID NO: 44300 - DNA, 30 bp, Homo sapiens; identical to SEQ ID NO: 5614
  chr7:70734445-70734475
  hyper

SEQ ID NO: 44301 - DNA, 15 bp, Homo sapiens
  chr7:70868708-70868723
  hyper
cagttattccactcc

SEQ ID NO: 44302 - DNA, 30 bp, Homo sapiens
  chr7:70926804-70926834
  hyper
tcatcttggcgctctcggccacagatgtct

SEQ ID NO: 44303 - DNA, 30 bp, Homo sapiens
  chr7:71062903-71062933
  hyper
cctgctgtaataacacggtactttcatttc

SEQ ID NO: 44304 - DNA, 30 bp, Homo sapiens
  chr7:71117865-71117895
  hyper
acattgcaattgcagcgagagaaagtgagg

SEQ ID NO: 44305 - DNA, 30 bp, Homo sapiens
  chr7:71120821-71120851
  hyper
ggtttgtgggaagagcgtttgggaagagac

SEQ ID NO: 44306 - DNA, 30 bp, Homo sapiens
  chr7:71190931-71190961
  hyper
ccagctgtactaggccgggcgcggtggctc

SEQ ID NO: 44307 - DNA, 89 bp, Homo sapiens
  chr7:71198520-71198609
  hyper
ttgatttctccccggcggagcagcgatgcggatggggatgaggggtggtcagaggagaccagagctagcgaacacgttcccttctatga

SEQ ID NO: 44308 - DNA, 241 bp, Homo sapiens; identical to SEQ ID NO: 5615
  chr7:71217102-71217343
  hyper

SEQ ID NO: 44309 - DNA, 30 bp, Homo sapiens
  chr7:71242950-71242980
  hyper
ttgtttttctttggacgttatccagtttgg

SEQ ID NO: 44310 - DNA, 171 bp, Homo sapiens
  chr7:71800933-71801104
  hyper
cgctagtccggagaaactaggaacccgagtaaacccagactgtccggggaagacggatcccacccccacctgggcgccagacccatccagctgcttggagctcagagactaggtcccagccggactgcagaggcctctctggttaccccttgcaccctggcgcccccggac

SEQ ID NO: 44311 - DNA, 140 bp, Homo sapiens; identical to SEQ ID NO: 5617
  chr7:71802206-71802346
  hyper

SEQ ID NO: 44312 - DNA, 133 bp, Homo sapiens; identical to SEQ ID NO: 5618
  chr7:71802389-71802522
  hyper

SEQ ID NO: 44313 - DNA, 187 bp, Homo sapiens
  chr7:71802577-71802764
  hyper
cgccgccttcactacttcatcccaggtgcccacaccctagatccacgattacacctgagcccagggggaaggcggggcgccgaagtggaggggccaatggccgaaactgcggggaccagcattccgcgtgaccgcccctggagacgtccagggaggcacggctgccgcagggcatcgcccacccacc

SEQ ID NO: 44314 - DNA, 31 bp, Homo sapiens; identical to SEQ ID NO: 5620
  chr7:75924332-75924363
  hyper

SEQ ID NO: 44315 - DNA, 1004 bp, Homo sapiens
  chr7:75931591-75932595
  hyper
cattctatctcacacgcgtgtggttccaatcctgcctctgccacttctcagttgtatgccccaacccaacctgtctggctctgtcctccttaacagaaggacggccctggccacgggccacagccagcaacgcttaagcaccagggccggcgagtgccctgccgtggcacggctccagcgtcgcgctctcgaattcatttgctttccttaacgagagaaggttccagatgagggctgaaccctcttcgccccgcccacggcccctgaacgctgggggaggagtgcatggggaggggcggccctcaaacgggtcattgccattaatagagacctcaaacaccgcctgctaaaaatacccgactggaggagcataaaagcgcagccgagcccagcgccccgcacttttctgagcagacgtccagagcagagtcagccagcatgaccgagcgccgcgtccccttctcgctcctgcggggccccagctgggaccccttccgcgactggtacccgcatagccgcctcttcgaccaggccttcgggctgccccggctgccggaggagtggtcgcagtggttaggcggcagcagctggccaggctacgtgcgccccctgccccccgccgccatcgagagccccgcagtggccgcgcccgcctacagccgcgcgctcagccggcaactcagcagcggggtctcggagatccggcacactgcggaccgctggcgcgtgtccctggatgtcaaccacttcgccccggacgagctgacggtcaagaccaaggatggcgtggtggagatcaccggtgagcccccctgctcctgcaggggagaggaggaggctagcagggcgggcagggccgggggcgtgcggttgaaacgggggtcccgggggcctggggagttaaacgttggcccagcaccgggaaaaacaggactcctgattcccttgctcaggaattgggagtgcgggtcgcttctaagggcgctttctgctctgtaatccca

SEQ ID NO: 44316 - DNA, 344 bp, Homo sapiens
  chr7:75932654-75932998
  hyper
ggcaacatagcgagacgcgcccccccgccccgaccccgcgccattacaaaaaaaaagcaaacaaaaatttttttaaagatcatcgatgaagagagaaaatgcgcttttctacagagtccccttcccacccacagccccatccccagataagcggggagttccctggcgcggtgccagtttctagccgctgagtgggcgtgtgcgcggctccaagtgcgcctgcgtactgctcactccccagctccgcgccctgctccgttcctcccaaaactctgaatcgaagaactttccggaagtttctgagagcccagaccggcgggcacgcccccatccccaaccccctc

SEQ ID NO: 44317 - DNA, 30 bp, Homo sapiens; identical to SEQ ID NO: 5625
  chr7:75933279-75933309
  hyper

SEQ ID NO: 44318 - DNA, 30 bp, Homo sapiens; identical to SEQ ID NO: 5626
  chr7:75947513-75947543
  hyper

SEQ ID NO: 44319 - DNA, 30 bp, Homo sapiens
  chr7:75987592-75987622
  hyper
gtgaatgggaaaggcgccgcccagacacca

SEQ ID NO: 44320 - DNA, 30 bp, Homo sapiens
  chr7:76022355-76022385
  hyper
ttaatagagttttgcggggtctagatttag

SEQ ID NO: 44321 - DNA, 30 bp, Homo sapiens
  chr7:76751285-76751315
  hyper
atccgggccagcgctcgcccctacctgagc

SEQ ID NO: 44322 - DNA, 386 bp, Homo sapiens
  chr7:76751572-76751958
  hyper
gttggcttgactaggcgatgtaaacatcagctgcgtaatccccaggggcaagttgggatttgaaagctctgaactctgacctggaccccttgcctaagtccaccccctttcgctaaggccgacgggatacgtagttctaaagcggtggaaagtcgcagagctccgcctcttagaaaccacatatcccaggaggcaatgcgcaggggagcacgggtaagagggcaggtgttagaatcgctggaaaggcgggcgccctttgtttcaagaccattggctattggaggggcggtacatgggaggccactggccaatgggaagcacggaagggggcaacgagggtaaagctgcatggtcaccttggataccaaggacgcgacttcttgttt

SEQ ID NO: 44323 - DNA, 30 bp, Homo sapiens
  chr7:77167570-77167600
  hyper
catttacccgcgtcccgcttctcctctcct

SEQ ID NO: 44324 - DNA, 30 bp, Homo sapiens
  chr7:77167847-77167877
  hyper
gcgcccccccgcctccgccaccccctactt

SEQ ID NO: 44325 - DNA, 30 bp, Homo sapiens
  chr7:77326827-77326857
  hyper
ggagagagcactggcgtcagctggaagcta

SEQ ID NO: 44326 - DNA, 52 bp, Homo sapiens
  chr7:77427836-77427888
  hyper
agaggtcccttttccgcggtaattggaccatttgtccgccagtgcaaaccaa

SEQ ID NO: 44327 - DNA, 149 bp, Homo sapiens
  chr7:77428715-77428864
  hyper
gagatgtcagctagcggccggaggagcgggctcgggagggggcggcggctcgcgcgctggaggaggtggaaggagggtcgctgccctgccccctctgagcaggcggcagtcgagttttctgatcccaacacggcggagtgggtgcttaa

SEQ ID NO: 44328 - DNA, 30 bp, Homo sapiens
  chr7:77648552-77648582
  hyper
ataaattaaaacgccgtgagacggaaccta

SEQ ID NO: 44329 - DNA, 37 bp, Homo sapiens; identical to SEQ ID NO: 5628
  chr7:77649268-77649305
  hyper

SEQ ID NO: 44330 - DNA, 171 bp, Homo sapiens
  chr7:79081651-79081822
  hyper
ggggttagtcagtacgcacgtgacgcgcgatgcccacatgacacgaccgtgagcgggggagggggacacggagtgaagaaggggaaaagttacagaagacccgtcaaagcgcccaaagcaatttgtcccttcttttcttcgccagcggtggctcacggatccctaagggac

SEQ ID NO: 44331 - DNA, 863 bp, Homo sapiens
  chr7:79082171-79083034
  hyper
agtcgaatccccggcgaaactcacttgcactgcgggtgctctctggcccccaccccatcatcgcgcaacacacccccttcaacatgcgcggccaccctttcattgccctgcgccccgagcggtcccaccgcccggcaaaacactgagcaagccgctgctctcaccttgcttgacacacttgagccggagggggtccttgcagtgtttgatcacggccagcacgtccctgatggtgagccccgccacgggggtctcgttcacctccagcagcagctcctccgacaccaatttgctgccgctctcataggccaccttgccgggcttcacctcccccaggtaggggaactgtccattctcggcgccccccttcagttcaaagcccagctggccctccgggttcctgccaatgacactctcatggactttgctagtccagtggcttttctttttcaagcttttggacatggcagtggggcgagtcgcctcagttcctgggctccttggggttaggggggctggtggtgagagaatgaggatggaggagcaagggggcccagggggaagaacagcagactttgccttcgcccccctctattcggtgctttccctcttctttggatggagtgtggacgaggaatggggaggatgagagggacggctgggcagaggtaggagagcttggatgaggttgtgctgtcccttgaatgacactcaaggctgtggccccgcagcagaggaagcagtggtggtggcgtcggcggcggcggcggcggcagccggagcgagcagtagccgagctggtgagcgggtgtggtgggggtggggaaggagggtagggatgccgggggccactcctgcgtggt

SEQ ID NO: 44332 - DNA, 635 bp, Homo sapiens
  chr7:79083190-79083825
  hyper
cgcgccgggtggggagccacggagggcttcgccgctgcctccctccctccctccgcagcttgacccggtagtgaaggcagagagagaggcaggctgggtccgcctggcagcctacgggaggaggcgggagccgggaaggaggggagcctaggcccggcgtggggaggccggcaggaagggcctcgagcccagtgcggacctttcttcagcctctgtgcgaccgagccgcgcgccaggctcctgtgcgaggaggacgcgctgactccctccgacctgggctccgatggagcagaaatagcgggacctggacttgtggcgcgcctggtgccacatctcgggctctgcgagcgtcctggcgcgggatcctgccgtgagaaggagttggggcgggggacccggcggggcattgcgggagaaggcctgggatccctgggagccttgtagcgtgggggagttcactgtgtagagaggtttcatgtcttcatctatatagtcacttatttgtcttaaagttctcgaaattccctcttagagaaggagaaagttagagaactggaggctgcgtaccctgattacgcagaagggaagcagcctcgcattccccggggcaggcccccgcccgcgcgtcccgccag

SEQ ID NO: 44333 - DNA, 30 bp, Homo sapiens
  chr7:79084032-79084062
  hyper
aaagccgccagagtccggcttgtacctggg

SEQ ID NO: 44334 - DNA, 31 bp, Homo sapiens
  chr7:79763898-79763929
  hyper
ctccgtgtgagtaaacggaaagaaattaccc

SEQ ID NO: 44335 - DNA, 893 bp, Homo sapiens
  chr7:79764136-79765029
  hyper
cgcggaggccgagctcggctgggcttggcgaggctgcggcgcggccaccggcgggagtgcagcggccactgtacccagagattcaaaaccccaaacccgggacttgggggcgctgagccgggccgggaagcagagcctggtcgtgaggaacagccgcccgttgctgtctgcccctttgcggacagcgtctccctcgactccgcttaggaagtggtgggggcggcgtggcccccgtcgggaggcgttcgaacgcccgctaggagagagaaaggattcccctgtgcttggagcccgcactcgggcgcggagggagcggcggcaggctctcgctttcggcaccatgggctgcacgctgagcgccgaggacaaggcggcggtggagcggagtaagatgatcgaccgcaacctccgtgaggacggcgagaaggcggcgcgcgaggtcaagctgctgctgctcggtaagggcggccgggtcggggcccgggggtcggcgggggaccgggtgcggcgctgcgcggccctcggcgtttggaaacccggagggaagggggaggaagcgcccgaggaggcttctgagcgggagctgggtccggcggtgcggaggcaaggcgggtccccctctcccggtgtctggtctctctccgccccggcgggcgaggactccccgcggcggggcgggcgcgtcacttcactcggatgctttcgtgcgacccagcaaagagcccaggcgcgagtccgaggcggcgggtcgcgtggaaaccctttgctttgaagtttagctcagccttgtaaagatgaaggggcattcgcggctagaaaatgaaaacacccccccccccgcgccaccaaccccctcccggaaaacccttcttcgtgtgcggtgtaggttgtgt

SEQ ID NO: 44336 - DNA, 30 bp, Homo sapiens
  chr7:79765379-79765409
  hyper
atttgccaggtacacgcaaggcttttattt

SEQ ID NO: 44337 - DNA, 510 bp, Homo sapiens
  chr7:80548257-80548767
  hyper
gaaattctttcttcccggtcctctgagtttctttgtaaaggaatctcagcgctgcagtgccgcggcacccggagctcttctccgcgtcgctcaatcaagcacctcggagtgaatggaaagtggccggaggccgggggcgagcgctcttggtgtccgattacagcgccgcggcgcgcggctccggctgccccggcgcgccgccctgcaggctcgcatcaccaccgcgcagccccggccgcatctccgccagccgcgaggccccaccccgagcgcgcccgcgagagcctggcagggagccgcgggggcggaccgggcggggccgacccttagagctcgcggctggccagacgcaagaatgcgcggccgcaggctggagccctagctccgcaaccctgctcctttcgcagtccgcggcggagtgagcaacttgctgggtgcgctccacggtttttgttgccggcggctctcgaagacttacacaggctttgcctggccgtaaatatcaaagtg

SEQ ID NO: 44338 - DNA, 508 bp, Homo sapiens; identical to SEQ ID NO: 5633
  chr7:82072053-82072561
  hyper

SEQ ID NO: 44339 - DNA, 454 bp, Homo sapiens
  chr7:82072646-82073100
  hyper
cggccggcgctccctgcccggcccgccgacttacgtgacggccgaagggaacggctcctccgacgaggggccgatgagcaaagattggaaaagtgtcagagtcaaggccagcaggcagccagcagccatcttcgcgatcgaagatcaatgccccctccctgcccaagcgggggaaggagcggcgctggaaaccgcgggcggaggaagagcagcacacgccgccgggaccgcgggcgtctggagggctggctgcgcccggggcccgaggcgcggagccgcgcgggggacggcaagggcgggagcggacgccgaggaaggggcggtggcgggcggacccactagcgtgcgtcggctgctccgcgccgcggccgccttgcctccgccgccatcaagggcgactttggaaacagacctcggcgagcccgccggcgctcgcgcgctctcgctctccctc

SEQ ID NO: 44340 - DNA, 270 bp, Homo sapiens
  chr7:82073318-82073588
  hyper
gcagtcgggcggagacgggccgggagcagccctccatacaaggcagccaggaactcccaaagtcggcgccggctcgctcccgccgcccggcgtgcgcaggcggagcggaccagccccgcggggctcccgggggacggccagccgcccagcgggcatccacaggctgcagaggctccaacccaggacttggctcgcgtcttcgggggttatttttgcacatgcaggcagcgttcccccccagccctactcccaggcgcagaatccagtgcc

SEQ ID NO: 44341 - DNA, 71 bp, Homo sapiens
  chr7:82791619-82791690
  hyper
tgtacatatatgcccggacatatacatcatgctgtgcatgcctgtgcatggaaggcgactccgcagcggcc

SEQ ID NO: 44342 - DNA, 93 bp, Homo sapiens
  chr7:82791916-82792009
  hyper
gagactcggggccgccgcgctccctcctcgcgccgcgtcccagtcgagaagcccgcggccaggggagcagtcagagccggggtccgcctcggg

SEQ ID NO: 44343 - DNA, 297 bp, Homo sapiens
  chr7:82792128-82792425
  hyper
cgccaggcaacctttgcagaagacacctcccggacgccgcctcggcgccccgagccggggagaagcagatctgagcggtgccagccgggcgccgtccgcccctcccaccgcgcaccgcctcctcgcccgcgccctctcagtgcgcaggcgcctctcggaacaggtgatgcccgcggcccacgcccaccccatcctgcgtcgctccggatccttcctcgctctcagcaccgatttaaaggagcccagtgaacgcccggctaaaaacagggaagaaacaggcgacgtttctttcaggca

SEQ ID NO: 44344 - DNA, 437 bp, Homo sapiens
  chr7:83277833-83278270
  hyper
tgataatgtgccccgcggatgccatgctgccgtgttcaccgtccaagccctcgctcctcactttaaggagggtctgagttttacttaggacttccctccaggggcagcgtgcgagaggctttgtcagaaatcgaacgcgttgtcatcagaaagcacagttccgaagtgccatttgtcaggctgtatttggctatgtaaaacctttctttcctcgggacagttgtttataagccgggagcaagaggacattccaaagagtgagtcttcagagccatgtcctgtctagagcgctcttcagcaactacgccggtagattcaggaagaagctgtatttttcagtcacttgggcaaagctgttcattcagaaaaaaaaaaaaaaaagagagaaaaaaacaaaaccgagcacacgcactcccttctcccgtggaggtcctctc

SEQ ID NO: 44345 - DNA, 57 bp, Homo sapiens; identical to SEQ ID NO: 5638
  chr7:84814641-84814698
  hyper

SEQ ID NO: 44346 - DNA, 12 bp, Homo sapiens
  chr7:84814919-84814931
  hyper
ccccagctgctg

SEQ ID NO: 44347 - DNA, 241 bp, Homo sapiens
  chr7:84814985-84815226
  hyper
cgtctcctcctcctgtcaacttccctccttgcactgtgacggaggcaaagcaactcagcccaggaggttgaactcgagtcatcagagaaggagaaacagtgccgaaaacggcccgtgcgctaccagggtagcccattaacgcattaactccaggctcgttgggcagaagccgggaggaaacaccctggggaccgcactcctggttaaatgcccagcacgagtcaaatccggcctttccaaa

SEQ ID NO: 44348 - DNA, 565 bp, Homo sapiens
  chr7:84815396-84815961
  hyper
cgcccattcctcttccaaaacgctacaacaaaaaccaccacgcttcccttccttcttccttgcccctttcccttctcccagaccaacaaggaaaggagcgagcgagggcgcagatgccctttggtcaagtactccccggatgttcccgactaaagcgtctccaaatgaacctgcagcctgcggaagccggggacacattcatagacgctctctgctgcccagaccaggaggggtggtgggggaaccaggaagccagggagagagcaaagttcctggacgcgtctcaggaggaaaactttgtgcagtgctgccaggcggaggctcgtcagaaggctccgcagctgctgaggcggggtgggactgcgccccaggggccgcgctgaagctggcgccgcgattactgcgcaccgatttcgcccactctctgtccgctcccgggagccttctctgtctcaggacggttccttatctcccaaaccatgctcgtcctccacttcggacccacagccacccccaaatcccggctatccccgcttagcaccgcggtctccagcacaccctccca

SEQ ID NO: 44349 - DNA, 170 bp, Homo sapiens; identical to SEQ ID NO: 5641
  chr7:84816299-84816469
  hyper

SEQ ID NO: 44350 - DNA, 1073 bp, Homo sapiens
  chr7:86273043-86274116
  hyper
aatttgggagaatgcgaaaaagcagcagcccagcattcccggatgggcgtggcttttctccaggggctgtccaattgaattccttcagagggagaagattgataagggttgctaggaaacaggagcgtctgcctcccgcctgacccagagattgttctgcacaaaccctctccaggggctcgcagtgtgcagttgagtcgcgagtacggctgagctgcgtaccggcctccctggctctcacactccctctctgctcccgctctcctaatctcctctggcatgcggtcagccccctgcccagggaccacaggagagttcttgtaaggactgttagtccctgcttacctgaaagccaagcgctctagcagagctttaaagttggagccgccaccctccctaccgccccatgccccttcaccccactccgaaattcaccgacctttgcatgcactgcctaaggatttcagagtgaggcaaagcagtcggcaaatctaccctggcttttcgtataaaaatcctctcgtctaggtaccctggctcactgaagactctgcagatatacccttataagagggagggtgggggagggaaaagaacgagagagggaggaaagaatgaaaaggagaggatgccaggaggtccgtgcttctgccaagagtcccaattagatgcgacggcttcagcctggtcaaggtgaaggaaagttgcttccgcgcctaggaagtgggtttgcctgataagagaaggaggaggggactcggctgggaagagctcccctcccctccgcggaagaccactgggtcccctctttccccaacctcctccctctcttctactccacccctccgttttcccactccccactgactcggatgcctggatgttctgccaccgggcagtggtccagcgtgcagccgggagggggcaggggcagggggcactgtgacaggaagctgcgcgcacaagttggccatttcgagggcaaaataagttctcccttggatttggaaaggacaaagccagtaagctacctcttttgtgtcggatgaggaggaccaaccatgagccagagc

SEQ ID NO: 44351 - DNA, 39 bp, Homo sapiens
  chr7:86274257-86274296
  hyper
cgtggggcaggcgcagccgggaaagttgaggtagagcat

SEQ ID NO: 44352 - DNA, 61 bp, Homo sapiens
  chr7:86782565-86782626
  hyper
tgtgggctggggcgcggggacagtcctggtggagcacggaaaatgcggctgtaaagttgta

SEQ ID NO: 44353 - DNA, 148 bp, Homo sapiens; identical to SEQ ID NO: 5645
  chr7:86848938-86849086
  hyper

SEQ ID NO: 44354 - DNA, 103 bp, Homo sapiens; identical to SEQ ID NO: 5646
  chr7:86849533-86849636
  hyper

SEQ ID NO: 44355 - DNA, 30 bp, Homo sapiens
  chr7:86974846-86974876
  hyper
cgtcaggcacggggcgggacccttgcagct

SEQ ID NO: 44356 - DNA, 30 bp, Homo sapiens
  chr7:87079053-87079083
  hyper
ggagtccatttgtattatcacatagccaaa

SEQ ID NO: 44357 - DNA, 30 bp, Homo sapiens; identical to SEQ ID NO: 5647
  chr7:87104709-87104739
  hyper

SEQ ID NO: 44358 - DNA, 30 bp, Homo sapiens
  chr7:87124806-87124836
  hyper
ggctagacctggcactatcccaaaataaca

SEQ ID NO: 44359 - DNA, 981 bp, Homo sapiens; identical to SEQ ID NO: 5648
  chr7:87229459-87230440
  hyper

SEQ ID NO: 44360 - DNA, 987 bp, Homo sapiens; identical to SEQ ID NO: 5649
  chr7:87256906-87257893
  hyper

SEQ ID NO: 44361 - DNA, 536 bp, Homo sapiens
  chr7:87257922-87258458
  hyper
gtgtgtgtgtgtgtgtgtggagctcgggtgccaagggcgagccgtcagtccccgggtgcgagtccctgctgtcttccacacccttcctccctccaggctcctttcctacatccttcccgcgcccccacggttgcggaccgagcgagaacccccttaagcaggtgtggggggcgtgcggggtggcacgagacaaaaggggcacgggggtaagcccgccatggcctcccggagcctggggggcctgagcgggatccgcggcggtggcggcggaggcggcaagaaaagcctgagcgcccgcaatgctgcggtggagaggaggaacctgatcaccgtgtgcaggtacggcagcgcagggcgaggggaaccagcctcccgccggggctgagagctctgggcttccgcgcgggtccttgggggtcccgggcatgatgggctgccgcccagtgcccccgcctatgttgcgccagccaaatctgtgagcgcgcagctccttggacaggggcccgggtctggacaccgtcgcagccctggacttt

SEQ ID NO: 44362 - DNA, 30 bp, Homo sapiens
  chr7:87505484-87505514
  hyper
gggccgggctccggcgctaactgcatccac

SEQ ID NO: 44363 - DNA, 30 bp, Homo sapiens
  chr7:87564330-87564360
  hyper
ctgcctggaggagacgcctcattgatggag

SEQ ID NO: 44364 - DNA, 30 bp, Homo sapiens
  chr7:87849176-87849206
  hyper
ggagcccgggtagccgcccagcagcgcctc

SEQ ID NO: 44365 - DNA, 372 bp, Homo sapiens; identical to SEQ ID NO: 5651
  chr7:87849419-87849791
  hyper

SEQ ID NO: 44366 - DNA, 379 bp, Homo sapiens
  chr7:87936056-87936435
  hyper
tgagctgaagcagataagggacgggagccttgtggcgaaaagtgacccacctgagggagaggcgcttccaaggaggaagcgtccagcgccaacggtgcgcgccgcgggccgggcgggtagagggaagtttcgccgcgcctgcagctcagcgctgtggcttgtggctctcgctgctataagaagccagagaagggcgggacggtctgctggatttcgcaagagaagcggaaaagaacttgtttcctggaagagttcaagctgagaatcccagcagctggaaggaccggaacttctatactgcggtgctgctgatggtgccgctgacccccgggaagcggggattttaagggttacacccgagcccttggcatctgtgcat

SEQ ID NO: 44367 - DNA, 351 bp, Homo sapiens
  chr7:88387816-88388167
  hyper
caggcacagacaaggcgaggtgaggcagagatggattgcagaaccgcattaagcaaccgcggggtggaggagagtgcagggtgtctccaaaccctgggagggctatcttctcctttcagagcacatttctgcccaggtctttttattctcagtgcagctcgctccctggtggcttaaattacggtaaacgaaataaggtccgttaaaaaccacttctgagaggggtgattattgggggttttgaaagcacagaggtcttatagagaccaaaaatatgtgcctcgctaagatacagaaaggcttgtaagtgaatcttcataactctgggtacgtgcatgtatatgcacatat

SEQ ID NO: 44368 - DNA, 655 bp, Homo sapiens
  chr7:88388246-88388901
  hyper
cgcatctaatctgtctgccctatttgtggctgcacagctcattcttgcaaccggctggggagctgttgcttctgccaacgccgccgtcagccagagcgctgaagaaaagctgaaggccagcaggcaacgaaagagtaaagaaaacgccctcctcctgcccatctcctccaccacagcctccccagtcctcccaggtgactcccaaacagtagaaagttggctcagagatagggcagaagaaccggggggctgggcggctgaggccgggaggtgggagaggcgggtcctgcagccccgagagccccccgcggctgcagcggcagctgtcacctcctggcctcgccccacagcacacctgagcctcctgggcagccccgagcccacagctcccagcagaggcgctaactgccctcctcaagcacaggtcgccgcgtccccaactccctgtcctcaccccggcccgcccgtctcctcctccgccctctcccgactgcagcgggggcagcgctttggcgctcccaaggactccccgccactctccccacaaagcagcggcggtggcggcggctgctgctggatcttcacactgcagccagcagcccaggacgcccccggccggacgatgggtacccgcgcctgagcatcccccgggcag

SEQ ID NO: 44369 - DNA, 250 bp, Homo sapiens
  chr7:88389046-88389296
  hyper
cgccgggtcccctccgtgctctgtgctgtcgccgccgccgcctctgtcagagcagcagctgtcggcagcaggagccccgcacggggcgcggagcagggacgcgctgccaccgcctccccctgcgtcctgctggccgcgtcttctcgggaggtggtagtcgctgttgccgctgagaaacccgcccgctttccacggctggtcgcctggtgaggagttgagactctgcgcctccgcccggacccacatggct

SEQ ID NO: 44370 - DNA, 126 bp, Homo sapiens
  chr7:89783801-89783927
  hyper
cacctctgggcagcagcggcagccgagactcacggtcaagctaaggcgaagagtgggtgagtcccttgaatcgttctcactggccgtttgctcctcgagtccgcccgcgtgtccctgcaaggctgg

SEQ ID NO: 44371 - DNA, 196 bp, Homo sapiens
  chr7:89840693-89840889
  hyper
tggggtgggaatcgcgtaagaaaagcaatttctagagcggaaaggtgaccccacattacaaaaagaaatggagtagaaaaataggcttgactattctaaagctgcttcagaaagaatctccggaagaccacggaggaaccccgcaggggagccaggcggatactcagccgctcgcggtagaagggcgcgcaaagct

SEQ ID NO: 44372 - DNA, 105 bp, Homo sapiens; identical to SEQ ID NO: 5657
  chr7:89841066-89841171
  hyper

SEQ ID NO: 44373 - DNA, 237 bp, Homo sapiens
  chr7:89841213-89841450
  hyper
cgccgcggcagccaccctgcaaccgccagtcggaggtgcagtccgtaggccctggcccccgggtgggcccttggggagtcggcgccgctcccggggagctgcaaggctcgcccctgcccggcgtggagggcgcggggggcgcggaggtgagcgggtcggggaggagcgcgaaagaaggtagcggcggcggagttgagggtcaagatgcagtctgcgccacgcgctgcatccatcctc

SEQ ID NO: 44374 - DNA, 622 bp, Homo sapiens
  chr7:89874390-89875012
  hyper
cgcaagcctgcaaactcgccctgccgggcgcggagtgcaattaggctttggggtggtttggctctccggctttccgtagcctctggccccgccccctagcaacgcgctggcttgtgttaacaaccggcccgggatcagaggtctgggtcaactggggggcggcagcggcgctaagcggactgtatggcggtggcctaggcccctggcggaattttgggacctttcgcgactctagcgactctcaggctgccttcccttctcggtggcggggcctctttgggcccagcggctgcgggcgcactgtaggacaggaagatccccccactctccaccccgccgccaccggccatgtggacagaggaagccggggcgaccgccgaggcccaggaatccggcatcaggaacaagtctagcagttccagtcaaatcccggtggttggggtggtgacggaggacgatgaggcgcaggtatgagcaggtgtctgtgctttcagaggtggagggggtgggagtgaagtctcgagacggggtccagacctgggggtggcaagggtggaactggggacaggagtgaagatgggggaagccgcgggatggagattccaagcgcagagctaatcct

SEQ ID NO: 44375 - DNA, 30 bp, Homo sapiens
  chr7:89950656-89950686
  hyper
gtgagggggcagatcgtgggtggccgcgct

SEQ ID NO: 44376 - DNA, 56 bp, Homo sapiens
  chr7:90032793-90032849
  hyper
cgctgagagggagacgctccaagaggctcctcagtgtgggcgagtaaaatgccctg

SEQ ID NO: 44377 - DNA, 30 bp, Homo sapiens
  chr7:90225144-90225174
  hyper
ggcccgtttcctttcggtaacctccccaca

SEQ ID NO: 44378 - DNA, 1058 bp, Homo sapiens
  chr7:90225566-90226624
  hyper
gtacccggcccgccccgcctcctccttcggccgcaccactccccctgccggccgcgcttctctccgttacaaaggagggaaaatgagccgggcggcggcggcgcggcgcggggccaccacggcggcggcgagcgcggccgcccccggcaccacgtaaaccgcccccgcccgcccagctgcggcccaggccggagcggagcctgccgtcctccgcctgcctgctgctcgcctccctagacctgcgcgtcgcttcccggcccgccgaggaggtggtggaggaggaggcgccgctttccccgcggcgcgcgccctcgccgttgtctgagctgtgcctggaccagtttggggaagttgtcggggctccgcgtcgcccagatgtgtgacctcattgagccgcagccggccgagaagatcggcaagatgaagaagttgcggagaactttgtcggagagtttcagtcgcattggtgagtagcgcgctgcccccggcccccccagcgcccgctcccctcggcctgcgcccccgccgcgttcctggcaccagccatgcagctgccagcggggctggcgtggggtgcgttgtaggcggggatcgagggcacagtgctagggacccgggggagggcaaggacgtaaaggaaagagacccctcttcctcaggatctgggggttcatttgtagattctctcaagcctacaatatgggttctcccctcctccgccactagtgctcgccctttcgcgcgcgtgggggacgggcgaggggacccctcggcccccaccgcgcaaggggctgcgcggctgcttgggccacttgttattttttgcgcacaggcttggatattgggcgtttagtcagtaatttagctttggaaattggtgaaacgttagactgtgccctggtattgtttaacgtatccaacctaaagggaagtgggacagttaccttgggacctattgttcggtacttcgggtcctggaaagcgagatttgggtgttcagtctcgaggtctctgaatcttcccgctgctggagagaaatgcgcgctgtggagttgtct

SEQ ID NO: 44379 - DNA, 195 bp, Homo sapiens; identical to SEQ ID NO: 5661
  chr7:90893323-90893518
  hyper

SEQ ID NO: 44380 - DNA, 30 bp, Homo sapiens; identical to SEQ ID NO: 5662
  chr7:90895012-90895042
  hyper

SEQ ID NO: 44381 - DNA, 164 bp, Homo sapiens
  chr7:91569951-91570115
  hyper
cctctggcacactccgtctctcctacccctcagctcggccgccacctgtgagccgttgatgtgcgggaagggcgctctctacggcgggatcctcgctggtaggaggcaggtcccaggcctggcaagggttgaccccggagggctgggccggggcggcaccccag

SEQ ID NO: 44382 - DNA, 269 bp, Homo sapiens
  chr7:91763835-91764104
  hyper
gtcacagaatggggcgggatgttccgctggccacgccccttaaataacactctgtgaagccgtggtcttcttgcgcgggatagggcacctgaggaagcgggctgcgcctgtggcacagtggtacggggccggaagataacttacctgaagaggcgatcaatccctgagaatcgcgggcgacccgttttttgtgtgcccgggtgcggggtgccgggacacggcgttgaaggcgctgagcggagggatctcagggcgagctcgagcggcga

SEQ ID NO: 44383 - DNA, 30 bp, Homo sapiens; identical to SEQ ID NO: 5663
  chr7:92157245-92157275
  hyper

SEQ ID NO: 44384 - DNA, 30 bp, Homo sapiens; identical to SEQ ID NO: 5664
  chr7:92158278-92158308
  hyper

SEQ ID NO: 44385 - DNA, 144 bp, Homo sapiens; identical to SEQ ID NO: 5665
  chr7:92219763-92219907
  hyper

SEQ ID NO: 44386 - DNA, 1229 bp, Homo sapiens
  chr7:92462187-92463416
  hyper
tttgacttgtctttcggctcgctgtctggcaaggtcaccggctctggctcgcggctctgtcgacaaaacttaactctcactctgtaagaccaacaggtcgcgcaggacctccccagtcgccctctgccccgcacctttctgggcctgaggattcccggctcggccctccccgcgcgcgcgaggccccagatggcgagggcgcagctccctggctcacctgaccacgttggggtgctcgaaggtctccaggtgcctcagcaccgccacctcgcggatggtggagagcggcatgccctcctcgccggtctgcacccgcacgcgcttcaacgccacgaaacggcctccgttcttcaagtcgcgggccttgaacaccttcccataggcgccctccccgatctccgccacgcattcgtactgctggtcagcgcggcacaggccgtccttctccatgccgcctggacgccgcccgccgcggcgccgctggggcgggcggggggtgcgctcaactagctggcggccgccgctcgcctactccggggctccccggagatcggtctagctttacttgctccccgccggctcaggcgctcgggcgctggggctttcgccgctgcagaagctggatggagagacctccccgcggggctggcgtaaccctggtgccgccgccgcgaaactccgcctgcagagtcgccgccgccgccgccgccggaggagcgagccgatccctcctcttccctcctcgaagcgaagtcctcaacacagacacgattacatagcctctgcccaagcgcgtctcagtccagaatcattgcacctaaaggaggagacgggaggataagaagaaagtgcaatcagacagcccagaagccttcctcggggttcctccagactcccctcctcctcctttacgaagcctccatcgctaccctccgcgcgctcctgccctctcccaagccgcttaatccttcctggttcctccgagaaaagcgaagttacttttctttccctgcagggctgaagccgtcttcgcgcggagaggttgcaggggcccctcggggatgagcgagcggcgcgggacgcagtggaacgggagggggcgtgccgagcagcccagagtgtgccgggagcgcgggggaggggaggcgccgggcacgtcaatgtcacggcttaatatttatccctatatcattgtgttgcgccgctaccctccccgcctcctgaggccc

SEQ ID NO: 44387 - DNA, 86 bp, Homo sapiens; identical to SEQ ID NO: 5667
  chr7:92463862-92463948
  hyper

SEQ ID NO: 44388 - DNA, 30 bp, Homo sapiens
  chr7:92464876-92464906
  hyper
tttccgcattcctccgcgactacaaaggct

SEQ ID NO: 44389 - DNA, 253 bp, Homo sapiens; identical to SEQ ID NO: 5668
  chr7:92466275-92466528
  hyper

SEQ ID NO: 44390 - DNA, 30 bp, Homo sapiens; identical to SEQ ID NO: 5669
  chr7:92861591-92861621
  hyper

SEQ ID NO: 44391 - DNA, 572 bp, Homo sapiens
  chr7:93203659-93204231
  hyper
gtgtggctccagggactcaggcgctcaagcttcagcgcccatctcctgggcaggagatgtcagccgcagggtgaggtgcggacgtgcgcacttctccaacccgggaaggtccgccagccgcgcggcgcagcccacccagacgctggtgggctggctttcctagtttgatgcgagagcaaactgcgttagtctcagtcctccctctccgcccctctcctggttttctgacactttaaatctgtcttaggtggttcagacccaagtctaggttgtattatcagctaaaagacaactgttctttcccctggcttgctttctacctccccagagtccaggaggctcaccttcccggcgccttcctgcgctctcccagctgtgaagctgtgcgcaaacttctcctgacttaagagtctcaatcctagcctgcgctcccgccccacccccgcccgcctcccgacaggcggcagaggaggtggcagcagaattgatgagagccagccccccttcccggaccccgccaccccagtcagccccctcctgtcccaggagagggaggggcgagctggtgagct

SEQ ID NO: 44392 - DNA, 301 bp, Homo sapiens
  chr7:93204298-93204599
  hyper
cgctccagtcagggctggggctcaccctgcgagtccgggagactaaagcgccgcgtaaacacaggaagcaggcgagggacccgagttagaccttgagtagggagggagaggggggcgacagtctggactgggagacagctttctgggagccctgtcccctccccggagaatgcaaattccggagggaggtgagtttccacaagaaccttatcccagagacattgtgaccctggcttcttcagccgccactccggggacagcactagggagcctgtggagggagggtcggtagtgggctagg

SEQ ID NO: 44393 - DNA, 127 bp, Homo sapiens
  chr7:93204906-93205033
  hyper
tccccctaaagccctcgatgtcagcaggagtccgggacaatccaataccaggcggggcgcagcggaggctggcaggcacgccctgggaggcaggcaagttgattccaaggacgagtcaccctcaacc

SEQ ID NO: 44394 - DNA, 420 bp, Homo sapiens; identical to SEQ ID NO: 5671
  chr7:93519345-93519765
  hyper

SEQ ID NO: 44395 - DNA, 483 bp, Homo sapiens; identical to SEQ ID NO: 5672
  chr7:93519854-93520337
  hyper

SEQ ID NO: 44396 - DNA, 40 bp, Homo sapiens
  chr7:93550989-93551029
  hyper
aaaaaaaaaaggagcgggggtgcgcggagaacacaaagta

SEQ ID NO: 44397 - DNA, 250 bp, Homo sapiens
  chr7:93551238-93551488
  hyper
aggtcctaggaagctggggcacgctggcgtgacaagcgtcccggagaaagccaagccctcggggagctggggaccgcagcagggctgcagtcacatcctgcgcgggtgggcggcgggccaggccttcagttgtttcgggacgcgccgagcttcgccgctcttccagcggctccgctgccagagctagcccgagcccggttctggggcgaaaatgcctgcccttcacatcgaagatttgccagagaaggaa

SEQ ID NO: 44398 - DNA, 30 bp, Homo sapiens; identical to SEQ ID NO: 5674
  chr7:93633785-93633815
  hyper

SEQ ID NO: 44399 - DNA, 30 bp, Homo sapiens; identical to SEQ ID NO: 5675
  chr7:94023973-94024003
  hyper

SEQ ID NO: 44400 - DNA, 30 bp, Homo sapiens
  chr7:94138894-94138924
  hyper
ctgggctcaggtagcggccagtaaactagg

SEQ ID NO: 44401 - DNA, 709 bp, Homo sapiens
  chr7:94284358-94285067
  hyper
tatgttcatagtacaaatgcacgcaaatatttgtggccgaatctcggcaacccgctggaaaggattaaacgtgcggttgccgtgactaaacgcattcattcaccctacaagatttaggaaaatgtaacgttgcaagggaagcaaggtctctgtgtaaacctcgtaatcgccaccaaaagtcggtagctgggagccttcaaagcccgccaaacacactggaagcatccacagctgttttaaattggttttggtttctggaaatagcgcactcggtacggcagcatctctggcctccagccggggttaaccctgacctgaacgccctgtttagctcccagcatttcatgattccgcttccctgctccgtaaaaccgaagaaaaccgagatttccgtcaccgagaaatgcacttagcaagagggggaaattcggtgttttaaatgtcacatttttgtgttctctaccactatcaagaaaaggaaaaaagatgtgtttgtgtagcggggacgcagcttgacacccatttcctttggctcgcatcgcggtcgcagagcccaatcgcggggaaacgggccccccagaaaaacaggcaacgacccccagctctttgctacagggatcgggagaggactaccctggggctgggcggggagggggatgttgggaacaggaattggagatggaatttctgcgcccgcagagcagggagg

SEQ ID NO: 44402 - DNA, 1067 bp, Homo sapiens
  chr7:94536847-94537914
  hyper
gccggagaggcccctcgcccacggccgagggggtggggcggcctcgcctcgggccggtgcttttcgcccttccttggccgccagaggctccctctctctccctctcccgggattttgctgccgggctccctctctctgcggccctagagttaatcccatcagccgaggtgaggcacctgttaccccggccttcctcacccccgcggcctctcctccattacaccgcggccgccgaaacggcccggcgtggcgaccgcacgtgggccaaaccccttccccggccggcacccctggccccaggccggcccgagcgtgcgggcgcgtcgctgctcgggccgccgcccgcccgcaatggcgttggggagcgcagcgcgcctcccggggccgcccgccgcgggcagggagcgcctgggggccgacgcgcgagtggaagcggccgccgcagccgccctacgcgctgcgccgtgaggagcgggttgcggtgtacccagcgggccggcgccgagccgagccgccgcgtccaccgtggggcggggggcgcctgcgaggagggggtgggagccgcggcggcccgaccctccccgcccgcggcgctcccgctcgggtaagggggaggctgagcgcggggcgaggagttggggagggtggagaggaggaaaaaatcggcttgtacaaaggctgagttgcaggctgggggtgggggtgggttgtggtggaggagcaataggttgaagatcggaggcattatcagtgggatctattgtttcctggcacattgggaggaaaaacaaagggatttattttcattaccctgtaattttttttcttttctatttttttaaatgtggccagggagctcgtctctctccgtgtcacagtgggatccgcctggcagccgccgggagctgcagccaatgtgttaggacttcaggtgcttcttggcacaaagctagactgcgacctcctaccatagcgcttggcgtcacctgctctcccggtcctgccccagggccgagggattgcgtcccgaaccgggcttgggaatcggctgcctctcaagttggtgt

SEQ ID NO: 44403 - DNA, 465 bp, Homo sapiens
  chr7:95025595-95026060
  hyper
ccaggaacatctccccgactaaggacaggccgacccccagcaggaccagcgccacgagcttccccatggtctcggggtgcccagcggcgactgcgcggcgccgagagctctcgggggcgcggcgggcggttcctgcctcgcgtacggattggggcccgctcggccccgcccgcacacgcctcctacttacctgagcggcccgggtgccgcagcagggcgctgacgagtcccgccgagccccgccgcccgggttcaaggccgccttcacgcccacgattccttgttttttgggcagaggtcaaggctcaacggagagggagcccgggaccgagttgtggtgggagtttgctcctaacacccgcgaaatcctacctcaattcctcagatggcctgagggagaaaccggagggcccgggaatggcggggagctccagttcagagccggaactccggacttctgcaagg

SEQ ID NO: 44404 - DNA, 438 bp, Homo sapiens
  chr7:95064140-95064578
  hyper
ccccgagcctggggaccgccgaggaggggcgcgcgggagtcccacctacctgagtgccagaagcctctcgcccaggagcgccagcgcgatccccagcaagcccacagccaccagccgccccatggcgcgggagccgggcgcgctgcctcgctccggcctggccagcagctccgtgggcggtgccatcttcccggctcgatggtgccggccgcgctccgccccgtcctccgcctaggccgagtccctgcgtcggggccgcggaggctccgccctgggcctggccctggtctttgtcctcacaaacctatttccccagataccttcgggacggcccggacacgccttacattaggctcatgatgtgaaactttgaattccttcacttcctttttcaaacaacccacccgaaaccctctagcagcccgcatacctttctcg

SEQ ID NO: 44405 - DNA, 401 bp, Homo sapiens
  chr7:95225922-95226323
  hyper
cctgaactccaggtcgcgccaatcagatcagagaaagaactatgggctccgcccctccagccgcggtcatcacagaatggcctggcacggtgaccacggagtgccctggcaccggtgcccgcggctgtgacggaaaaagggtgggaagaacagggaagaggaagcagaaacaggtatctggggcaacgtgggcttaagattagcctcttgggacggggctccgagtcgcgtgggctggggtcccgcccaggctcgcccttgtttacaactcggaggctgtctcaatgtcaagtactcctggccacaaactgtttccaagagtttggactccgcgtgctcattggtccttgctcagagcagggcttttacagtagccaacaagctgcgttcaaaagtatggg

SEQ ID NO: 44406 - DNA, 30 bp, Homo sapiens
  chr7:95402174-95402204
  hyper
aaccaggctggagccgaggcccctgcagcc

SEQ ID NO: 44407 - DNA, 768 bp, Homo sapiens; identical to SEQ ID NO: 5679
  chr7:95704889-95705657
  hyper

SEQ ID NO: 44408 - DNA, 607 bp, Homo sapiens
  chr7:96621749-96622356
  hyper
cgccgcgacgccgcgcgcgggtcaggctcaactgcgaaccttgccaccgagctttcccgcgggaggcttcgaatataaccttgcctatttctcgcctactgagatttctttccagaaaaggacattctcctgctccgaggagatggatccctgaggtccccatgcccgcacagggtgtcctggaggagtttagaggacactcctggggcccttccctgtgtagtacgcttattcccgaggtgggggctgagaatcgaagagcagcgccccccacactgggattgggggtggtcgaggggctacagatgcccgcattgggcttcttagcggcctaggctgatgcctggaggtaggggggattgggtttggctggcgactagctttaatgcccatcgagttcctgggacacccaagttcagcacttctgcatgaaaccgaaacggccagggaggggcggagtgggccgaggctgagggagcggcggtgttgacgccctcttcccacccaggatcgatcgatcggtagggaattttttatctttgggaaggagaggtgaggaagcggacctaaaacgaggggaaaattcgaatttaatatcctgtatagg

SEQ ID NO: 44409 - DNA, 30 bp, Homo sapiens
  chr7:96622654-96622684
  hyper
atgataaggctcgcacgtgagccaactccg

SEQ ID NO: 44410 - DNA, 30 bp, Homo sapiens
  chr7:96625571-96625601
  hyper
attctggagtccaccggcgcttgggcaggt

SEQ ID NO: 44411 - DNA, 130 bp, Homo sapiens
  chr7:96625840-96625970
  hyper
tcataaaaaagaaatacgaggtgtgtgtgtgtgtgtgtgtgtgtgtgtgtgtgtcagagagagagaagagaaggggggtatgaagtagtttatattcactgccttcctttaaaacgtcctaccagctgga

SEQ ID NO: 44412 - DNA, 30 bp, Homo sapiens
  chr7:96626384-96626414
  hyper
tctaacagacagtccgaactgctccaaacc

SEQ ID NO: 44413 - DNA, 30 bp, Homo sapiens
  chr7:96627806-96627836
  hyper
tagacccagcccagcggccaaactggcacc

SEQ ID NO: 44414 - DNA, 30 bp, Homo sapiens
  chr7:96628948-96628978
  hyper
accagcaaaatggacgcaacctctcaatgt

SEQ ID NO: 44415 - DNA, 243 bp, Homo sapiens
  chr7:96633257-96633500
  hyper
ggtctctaagcagatcgaaagtcggggtccagaccgagaggatcttcaggtctcgtccacccaatctcaagcctctggaagggcgggctgccggcgacctcctccagtcccgggacccggaacccgggaccctggacgccggtgcgggcgggcctgccctcctctgtgcctggcccccagtctggccctcctacctgttgaccaggcctgaaccacgcaccggggctccgctgtctctgcttg

SEQ ID NO: 44416 - DNA, 470 bp, Homo sapiens
  chr7:96634465-96634935
  hyper
cagagtggcagggacgtcaagaaaggggggcctggatttaatgcgggggtggggtcactgcttctaagcacaggcaacctacaagggtgcaaagggattgaaagagagcagcccccagttggctgtttcaaggctgagatattggcaactggggctccgggatttggggcacgagctgcggcgggaagcatcggcggccggccgggcagaggcgcctccctccccaacggccccgggcgccacacagcgcggcccccggctgcagctccggctgggattggaactgcggaaggtaggcgaagaactctgcaagtcgcgcacacgccagtagaagccgtgcgcctgtgacgtcagggggcgactgaccaatggggaggcactgccctttggagacaaaccattcgactcgtggcgtctgcatcaagtctgaaagcagacgcgcaactttcgcagaatccaccttaaaatct

SEQ ID NO: 44417 - DNA, 212 bp, Homo sapiens
  chr7:96635239-96635451
  hyper
agggtggaggaaacccgggagaaggctttctccagcccccaaagtttttgatgatgaccatgactacgatggctgacggcttggaaggccaggactcgtccaaatccgccttcatggagttcgggcagcagcagcagcagcagcagcaacagcagcagcagcagcagcagcaacagcaacagccgccgccgccgccgccgccgccgccgcag

SEQ ID NO: 44418 - DNA, 103 bp, Homo sapiens; identical to SEQ ID NO: 5683
  chr7:96635486-96635589
  hyper

SEQ ID NO: 44419 - DNA, 352 bp, Homo sapiens; identical to SEQ ID NO: 5684
  chr7:96635619-96635971
  hyper

SEQ ID NO: 44420 - DNA, 340 bp, Homo sapiens; identical to SEQ ID NO: 5685
  chr7:96636033-96636373
  hyper

SEQ ID NO: 44421 - DNA, 252 bp, Homo sapiens
  chr7:96636600-96636852
  hyper
acaggggccccgctccgcccggacagctgccgccttgctgcgctgcgcaccccagagagcctccggcaccgcctccgctgcggcaaagcgggctgtttgtctgagggcctctggcgctcccttggcccagacgctgcacattgttcgggccagggactgggtcaaggagattacgcagacgctgggagcacacgggcagagtggaccaagagaggtcggggcatcatagggatttttcgaggtaacccttat

SEQ ID NO: 44422 - DNA, 298 bp, Homo sapiens
  chr7:96639200-96639498
  hyper
gcggccctgtcgccacgctcgccagcgctgcctccagtctgggacgtttctgcctcggccaagggtgtcagtatgccccccaacagctacatgcctggctattctcactggtactcctctccacaccaggacacgatgcagagaccacagatgatgtgagttgcccaagggaacaccctagggaaacgtctgaacaaggaaaagaggatccgggacctgcttgtatctgcgaaaaggagccaaaggagcaggcttaggagagctcataagtgtggcaagaagccgactaggctcattc

SEQ ID NO: 44423 - DNA, 791 bp, Homo sapiens
  chr7:96645974-96646765
  hyper
tctgggtgtgcctccgggagggctagagagctctaggttggcaagatcccagtgaccattgggaggcgcgcgatccaaggggttgcagggatggggcggagaggaggggcggttgggtagcctaaaggtccctctcccagaatacaaggaagcgctaagaaggaggatgtgggggcagtgttccagcaggcatcccaggctcttccggctggagagctcaggagactgagcggtgtcaaggctggagtgagctatagggtgcgctgggaggaggtgagcgcagcctggctttggcgcgctgtgggtgactcccaggacggcgcggccaggacgccgcgagccgtggggcgtccggtgggatcaaaggaaccagaggaggccagccgacgcgtctgggattgtgggataaggggcgggagagaggagattgacatgggcggggagatcctggcctggcctgtgtcaccggagggggttgtgtgcgtttgtgtctttgtgcggatcaacgctctcgggcctgaggccgtgccctgggtggatccgagtgtgagtggacaggctcccgggtgggtgcccagacgggagggagagcgagcgagcgagatcaagggcagcgaggtctgcgggttcctctgtgtgtgtgtctcaggccctgtggctcagcactggagccgcctggcacccacaggaatgcggcttctctcggatccccaggccgccccttgtcccacaaggaggtggccgccaggaaaaaggggggaaaaggggcagaaatccgcctagctcaaccc

SEQ ID NO: 44424 - DNA, 586 bp, Homo sapiens
  chr7:96647006-96647592
  hyper
aggcaagtggaaaccggaaggggcaggcagaggggtcacccagtgcgatgtcaagagtggggccggctggtccgggaatatgctggggagtggagcacgtttatattcgacgtaggaaaaacaatggagaggaagagaaggtggaagggagggcaagggagagaaacatcacatagatatttttagactttgctgaagatctgttatttttacatccttgggctcgggacggcagggagttaaattcccctgagagaatccccatggggccagggaaagcccgctgcagactggtttaccagaatatttttgtccacggctcccagaccaagctaaaaaataaaaaccgcacgagagaaaaggcctttgcgagtggaagaagtgaggttggcacaagggaaggaatcctgaaaccaagtctgtgtccgcgcggcgttggtctgggccacctcgcaatgaggctttagtgatcttaacgacaagcagcctcaaagctagggtggaggagtggtcatttagaaagagcttccctctttctctagaagaatccgaaccctcccttccctcagctcggccgcgcccggtg

SEQ ID NO: 44425 - DNA, 30 bp, Homo sapiens; identical to SEQ ID NO: 5687
  chr7:96648028-96648058
  hyper

SEQ ID NO: 44426 - DNA, 15 bp, Homo sapiens
  chr7:96650421-96650436
  hyper
tcgcccgcgccttcc

SEQ ID NO: 44427 - DNA, 15 bp, Homo sapiens
  chr7:96650751-96650766
  hyper
cgcgagcccggcggg

SEQ ID NO: 44428 - DNA, 81 bp, Homo sapiens
  chr7:96650995-96651076
  hyper
cacctcgcgacccttcggtggccgtggcctgaagctcccgtaggctcagggcacgacccttcagtttctccgctccaggcg

SEQ ID NO: 44429 - DNA, 413 bp, Homo sapiens
  chr7:96651136-96651549
  hyper
cgaggaggctctacattgttaagaaaaccagatagctgctctgggctgcctaggccgccctagaaataaccctccgcttgctttcaacccgcgaaattggccccacagctccggaggcccgctacggggtgggggcggggggcgcggttagtgggaggtatctccagaccgctgatgaataccatccccaccgtctcaaggcctgactcaccgagttaaagcataggggctgatgtctttgggtctgttagtttctcacgggtactgtcaaaacagctccagtcccatcgagactgaaccgcgcgacccaaccagacgtgcagctcaggcaggtctagtgcatggcagcgccgtatttacctgtgtttgtgtcaatcccagcgaggcggccagctcggcgcgttccggcaagg

SEQ ID NO: 44430 - DNA, 14 bp, Homo sapiens
  chr7:96651948-96651962
  hyper
gggattcagctctt

SEQ ID NO: 44431 - DNA, 491 bp, Homo sapiens
  chr7:96652017-96652508
  hyper
cgtttccgcccctccccaggcttcaagaacaccagcccctccccaggcttcaaggaggtggccctgggccgtgaccctacttctgtcggcgtctgttcgggcgcccgcagaagccagactcttgggcagggaagacgctaaccgaggtctccaaagttcaaagacccacaagcaaactgctccttcacttcagcagcaagcggtcggggccgccgcagacagagggtcgattatgcaacccccataatctcgctgcagatctgcgagggcacagatgtgtctggtttcttttacaaatagacttaatatgttcttggcaaaaaaaaaaaaaaaaaaaagaaatcttccacttatgcacggaatacagagagagtgaaagaaacgtagacacctcaacccggggctctcttttaaagttcagcaagagtcacacactgagaaggaaccggtggtggggtgttttcgtaggaaaggggcggcaggtcaggatg

SEQ ID NO: 44432 - DNA, 941 bp, Homo sapiens
  chr7:96652878-96653819
  hyper
aagtttcaaagcggacgaaaaaggaggacggaaagacaaattgtgggcgcctatggagacagaaaaaaaaatctatcctacaacgtgacccctcagcaaccctcctccacctttaaatggctttttgtttttggaaatgcctggataaaccgcaaaactctcggcgcgctcttctctggctggctacaactccttaacccccccacccccacccagcgtgctcagggcacccgcaccgtgctagcttgtggcggctctcaaactaatcctgactgagtttttgaggcagccttctattcccactcgcaccaacccagcacgcttaccaaaattcccaagtaaccttctctttgttacgcaaacgccaggagctgcttgattctttcttctctccacccctatcccctttccagcctagccggcttcctggccgggcaagctgggaattcagcgactgaagggccttggaaggtgccggaggggagagacgctagttcgaacctccacagggctctcctactaaaaatccctaaaatgctggcccgagaaactctctttgttggagggtctgagtcctactcccttctgccgcgtgcgcccccactgccgtgaaccgctgtgacccccaatctaccaccccatctcgcgcccccagcgtcctagtcgccctgtatctgcccagccttccccctgtccatgtacctggctggttggtggcgcttgggacgcggttgtaggcgccgccgtactggtggtaggagctagcgtagctatagtcggcataagctttggctgggtagctcccggcggagccgttcacgccgtgatactgatactggtaggggttgagagctttgccataggaagccgaggtaggagagcagtagccgtgcggggctccccccgtagggctgtagtagtcagaatcggtagctgaagac

SEQ ID NO: 44433 - DNA, 335 bp, Homo sapiens
  chr7:96653862-96654197
  hyper
cggacgtctggaacggagcttggaagtcgccggatcggatgctggggacccttctgtcaaacactcctgtcatcgctcacgggcggcggcagcggctgtccttgctgttgtggcggcggcagctgccctagttggctgtggggctgctctggtctaagcagacatggctgtgggagcgagggaggaggaggaagaggaggaggagagaaggaggaggcggcggccgcggcgaggaggagactgggagtcgtgaagtctctgtctccggccggctgactgctggctgaggcgcagcacagccttggttaaatccttaattgcgcgcttacgcacag

SEQ ID NO: 44434 - DNA, 678 bp, Homo sapiens
  chr7:96746746-96747424
  hyper
tctctctttcaaggcctgtgtcgtcaggacgcaggccagaagaagccacgacgaggcgcaggcgcgactccacgagggccacgcccctcctagagaaggaccgacccgttttccgcccgcagcggagcttgggtttccgggaggacctgattgtgcaagggaccaaaccggatagaggtcgcgcgccctctttcgtctgccttccggttcactaatacgcaagttcgcagaagtgcgggaacgcgccgtccctctgcgcaggcgcagtcggcggtcggcgtggggcgctatgccggggcggcacgtttctcgagtccgggcattgtacaagcgcgtcttgcagctgcaccgtgttctgcccccggacctcaaatccctgggcgaccagtacgtgaaagacgaatttaggagacataagaccgttggttctgacgaggcacagcgtttcttgcaagaatgggaggcaagtgacgctcccttctctttgcccaagacctttggggttcctcggtgtccaggtttctagttccagtcccccatgcggggttaaacagagcagcaacctgttctgtttgaaatagcgtaatgctgttcaggtaacactttccaaagtttctcccacgggtttctcactagagcagatcctgttacttcagcgtccccaattcagttcaactt

SEQ ID NO: 44435 - DNA, 330 bp, Homo sapiens; identical to SEQ ID NO: 5690
  chr7:97361092-97361422
  hyper

SEQ ID NO: 44436 - DNA, 135 bp, Homo sapiens; identical to SEQ ID NO: 5691
  chr7:97361520-97361655
  hyper

SEQ ID NO: 44437 - DNA, 1193 bp, Homo sapiens
  chr7:97361998-97363191
  hyper
tgatgatctgaattactggtccgactggtacgacagcgaccagatcaaggtgaggccccttcccaggacggcccgcacccttcttcctgggctcgggagctgtcaccttcccacgcaacagcaccctagttaacgtggcacgcaccgccaccacggaaagaggcagcggttgcgtgcgagaggatggaaaggggcactatttcccgggttccccacgggattttgtgcccacgattcaagtttcttcccgagggctgcaccgtccggcccaggaactccctgcagtagggatgccctcccggatgagcccgagatcctcacaaggcgggaaatctcgtaagatttcatcccccaggacctgggatttcgggggctccggtccagctgcactgccctagcgtctgggcacgggcagaggagggcgcctgggtcgcgggcagcagcgggcacacgcgcgagctgcagggggattggagggccggaggctggagggaagttaatttcctgccttcacgtttgttttgcggacctgaggatgtagcttgaagtctccctttagaaactcgtaggctacaggcgctggggagcgcgcctcggaaaaacggtgaaagtcgtctgtaaagcgttgtcacccttccccaccggagccccagccccagatcccacacacctgtgtgcatttagggcggtgaggactctacaaagccggcaccgagacaagacaaagtcaggtggcggcgcagcagatgagggaaggtccccgggctgggaggaaagagcggaaagcgctcgaagcttgaagacgccgagccagctgctaactcgccctggcaggcttgcggggggcgggacgcgagttcggcggggaggggcgcagagaggcagcgcctcgggagggaccccgctcagcccgagcgtggggaaggccgcctccccacgcctcggggccggagtacagcggggggaagggctcgggttgctgggtgcctcgctctggttgccttacacgccctttgtccgtgcttttgtctcccaggaggaactgccggagccctttgagcatcttctgcagagaatcgcccggagacccaagcctcagcagttctttggattaatgggcaaacgggatgctggtgagataggcgaccgtccctaggtgtcttgggcagcccgccctgtctgctcactccttc

SEQ ID NO: 44438 - DNA, 37 bp, Homo sapiens
  chr7:97501886-97501923
  hyper
tcttttgtttccagcgccttgcgtctcagtgcgcctg

SEQ ID NO: 44439 - DNA, 63 bp, Homo sapiens
  chr7:97680615-97680678
  hyper
tttggctccgcccccgccctgctgtatccatggtaaccaggtctccttcgcaaggctggacca

SEQ ID NO: 44440 - DNA, 30 bp, Homo sapiens
  chr7:97736111-97736141
  hyper
ccggtgtggactgacgagtggctggccgcc

SEQ ID NO: 44441 - DNA, 30 bp, Homo sapiens
  chr7:97736838-97736868
  hyper
ataggctgcggtgccggccctggacctgtt

SEQ ID NO: 44442 - DNA, 30 bp, Homo sapiens
  chr7:97911375-97911405
  hyper
gcttcgggacccggcgccgccgagggccag

SEQ ID NO: 44443 - DNA, 52 bp, Homo sapiens
  chr7:98030098-98030150
  hyper
gggccctgggcttacccggtaggtgctctccgtgagccggttcacctcctcg

SEQ ID NO: 44444 - DNA, 191 bp, Homo sapiens; identical to SEQ ID NO: 5694
  chr7:98030419-98030610
  hyper

SEQ ID NO: 44445 - DNA, 142 bp, Homo sapiens
  chr7:98245936-98246078
  hyper
ccccgggattcttcccgagcgttttccgagttggcgcggggggtggaggcggggccatggagcgcgtcccggggaccgttgcatccggaggcggccgtcgtgcggctccttcccgcctcgagagtgaggtggccgggccttg

SEQ ID NO: 44446 - DNA, 203 bp, Homo sapiens; identical to SEQ ID NO: 5696
  chr7:98246304-98246507
  hyper

SEQ ID NO: 44447 - DNA, 1240 bp, Homo sapiens
  chr7:98246533-98247773
  hyper
cgccccacacgccggccccctccgcccctcagcttaagaaagggcgcgcggacccggcaggccagagtgccgagcagcgcggtgggtgcggctgtgagacggcaggagacttctgccccgcggtgcacgcgaccctcgagacgacagcgcggctactgccagcagcgaaggcgcctcccgcggagcgccccgacggcgcccgctcgcccatgccgagctgagcgcggcagcggcggcgggatgctggcgctgctggccgccagcgtggcgctcgccgtggccgctggggcccaggacagcccggcgcccggtagccgcttcgtgtgcacggcactgcccccagaggcggtgcacgccggctgcccgctgcccgcgatgcccatgcagggcggcgcgcagagtcccgaggaggagctgagggccgcggtgctgcagctgcgcgagaccgtcgtgcagcagaaggagacgctgggcgcgcagcgcgaggccatccgcgagctcacgggcaagctagcgcgctgcgaggggctggcgggcggcaaggcgcgcggcgcgggggccacgggcaaggacactatgggcgacctgccgcgggaccccggccacgtcgtggagcagctcagccgctcgctgcagaccctcaaggaccgcctggagagcctcgaggtagcggcccgcggggagcgcgggggacctggaatggggacgctcccgagtcgggggcggaagactcgggaggatggggaaagggggcctggccctggggagggtgtgatcgtccgtgggggtgagctggacttgagggtgaaaggcggggatctagatcctgctcgggaactcccctgcgtggtatcccttcccacaccgctgctcttgctggaaggaaacgtttaaattccacccccgcgcgtcgggactgccagcgggatccgccgagcacttcccgaggtccgggctagcgaacccagacggccaagccgcgggcgccaaatacccggggacgcggtagcctctatcctcttgcaaatctccaaatctccgcgagccgggatgcgctcccgcaggccgtgcgggttgctgcgaggctgccgcgggaggtcagctgccccgggcatgtggtgtttctttctttaaatcaggtcaggctgagctagagggggcggaagtctgggggcggaggtcgcagggaggcgagcgcagggggtcaccggcgaccccagagcgcgcattagaggggcaa

SEQ ID NO: 44448 - DNA, 80 bp, Homo sapiens
  chr7:98971520-98971600
  hyper
ccaccgcgaccggccgaggtaaggttttcactggggtctcttccatctgcctggccgccaggccacgtatccactgaaga

SEQ ID NO: 44449 - DNA, 30 bp, Homo sapiens; identical to SEQ ID NO: 5700
  chr7:98971837-98971867
  hyper

SEQ ID NO: 44450 - DNA, 123 bp, Homo sapiens
  chr7:98972089-98972212
  hyper
cggctcaggctgcgcgcctggctcccagcctcagtttccccattggtaaagcattgacggtggttgcggacggcttctgcggacagagccttgggctccgacgtctgcgcgggtaccggcagc

SEQ ID NO: 44451 - DNA, 31 bp, Homo sapiens; identical to SEQ ID NO: 5702
  chr7:98990958-98990989
  hyper

SEQ ID NO: 44452 - DNA, 30 bp, Homo sapiens
  chr7:99005908-99005938
  hyper
gctttctaggccggcgaggacccagagctt

SEQ ID NO: 44453 - DNA, 31 bp, Homo sapiens; identical to SEQ ID NO: 5703
  chr7:99028318-99028349
  hyper

SEQ ID NO: 44454 - DNA, 186 bp, Homo sapiens
  chr7:99036531-99036717
  hyper
ggcgcaagggccggcgcgggctccgggcgctcccggcatccctcgggcggcggcggcggcggcggcgaggcgaagcgaaggaggagtgtgtgcggcggggccggcggcgggtaaaggcgagaaggctgcaggagaccgagggggagccgggccggtggggccgccgccgccgccatgcaggaaatc

SEQ ID NO: 44455 - DNA, 31 bp, Homo sapiens; identical to SEQ ID NO: 5704
  chr7:99070937-99070968
  hyper

SEQ ID NO: 44456 - DNA, 30 bp, Homo sapiens
  chr7:99098005-99098035
  hyper
tatcgtcctagccccgcccgacgcagaggg

SEQ ID NO: 44457 - DNA, 30 bp, Homo sapiens
  chr7:99102466-99102496
  hyper
gacctacttcaaatcggggcgcagagcgtt

SEQ ID NO: 44458 - DNA, 30 bp, Homo sapiens
  chr7:99103028-99103058
  hyper
gcttcgtgactggacgggggtcctgtccct

SEQ ID NO: 44459 - DNA, 30 bp, Homo sapiens; identical to SEQ ID NO: 5705
  chr7:99149791-99149821
  hyper

SEQ ID NO: 44460 - DNA, 155 bp, Homo sapiens
  chr7:99155658-99155813
  hyper
cttcccaccagggacgcaactgtcagtttcctccgtctctctcggttctattccaatctgctcatctcccctcccgtccccgctttccccaaggacctactgagatttcgatcccacaacttagtgggtcccatctcacccaggccccgcaatcc

SEQ ID NO: 44461 - DNA, 1137 bp, Homo sapiens
  chr7:99155931-99157068
  hyper
cgggccgcctccttgcagggagtctcaaggatgggctggcgtcagggaggggcccagggggcgctttcccaacactggtcgcagtcattgttggtataacggctagagacgcccagtgagttagcatggagggcagtgggaccggaaaaagacgtggaaaagctgcgaaaacgagccttcgaatcatggacgcgcgggcccagctcctcctccgagttcctcatccggggccgtcactcacatccggggccctcactcacatccgggaccctcatccggggctctcacccacatccgggaccctcatgcctgggcggaggagggggggccctcattcgggaccctgcactccgtcgccggaagtgccaccgagaagcgccggcctcggggctgtctacagcggcccgggagaggctgtggtggccccgagcgcgagtgtgtaggtgacaggacagcggccaggcccgcccctcccctcggtgagtacccggaagccgttttggggtcgcagcggggtggcagcttgttttgccttcacgggagtagaaggaggcggcgtccggccgcggccgacggtagttcgcttccccgagagtgcgcggaggcccgggtgcgaggagggcctgtttctcttcagccctggttcattcacctcgcggaccgagggccccgccgtcaggagccggcgaccgtgccctggtgcgagctggtctgtatgtcctcactggtccttttgggactttgccttggcctaaaagggaagtgggaggagggcagcgccgggcaaggccttctgaggaccgagctgggagccgggcaggggcccagggcgagggtggtgggagggggacggcaccctcatgcgtccttgggcctgaaggacgccgctcaaacctgttcgaaccgcagctcttacctgcgttgctctcaggattccgggaaaaggccggtctagctggtctgagttagcgaagggcctgaccccaaaagtggagttttattcgccaagcccgtgtagtaaatcggagtgggctgacggtgttaccaagacatttcctagggggcctgctgttttatttatttaaatgagtttatttacgtaaacgcgggcctgtcacggtggttcacgccgtaatc

SEQ ID NO: 44462 - DNA, 150 bp, Homo sapiens; identical to SEQ ID NO: 5708
  chr7:99595185-99595335
  hyper

SEQ ID NO: 44463 - DNA, 132 bp, Homo sapiens
  chr7:99595462-99595594
  hyper
cgccagtctccggctgttgcgccctgggcgccgcctctctccggcccccctttgtttcctgagccagctgggaagactaaaagggtgggtcctgggagcggcccatggttcgacccttcttttcaggcatcc

SEQ ID NO: 44464 - DNA, 30 bp, Homo sapiens
  chr7:99613229-99613259
  hyper
tgtctgtgtcgaggcgtcgggagggcctaa

SEQ ID NO: 44465 - DNA, 141 bp, Homo sapiens
  chr7:99679772-99679913
  hyper
tgcctccgaacaaaccgagttttttttgtttcttgtaaaaatgccccctttaaattacccacatctgaagaaaacattccagtccatcacagagttgacatgaggaaaaaacccgtgtacaggtgatgagagcagagaaga

SEQ ID NO: 44466 - DNA, 200 bp, Homo sapiens; identical to SEQ ID NO: 5711
  chr7:99680212-99680412
  hyper

SEQ ID NO: 44467 - DNA, 30 bp, Homo sapiens
  chr7:99698329-99698359
  hyper
cgcagctctctccgcggccgccgcgcggaa

SEQ ID NO: 44468 - DNA, 30 bp, Homo sapiens
  chr7:99699630-99699660
  hyper
tcgggccgggtgggcgccagctccctccca

SEQ ID NO: 44469 - DNA, 30 bp, Homo sapiens
  chr7:99717165-99717195
  hyper
ggaccttcaagaggcgccacaaaacggagg

SEQ ID NO: 44470 - DNA, 30 bp, Homo sapiens
  chr7:99724820-99724850
  hyper
gaagggagtctgggcgataccattttgggc

SEQ ID NO: 44471 - DNA, 30 bp, Homo sapiens
  chr7:99746460-99746490
  hyper
cctcatgctagaggcggggctaaaggccag

SEQ ID NO: 44472 - DNA, 30 bp, Homo sapiens
  chr7:99756004-99756034
  hyper
agtacagatggttgcgccggggcagcgccc

SEQ ID NO: 44473 - DNA, 31 bp, Homo sapiens; identical to SEQ ID NO: 5712
  chr7:99775637-99775668
  hyper

SEQ ID NO: 44474 - DNA, 31 bp, Homo sapiens; identical to SEQ ID NO: 5713
  chr7:99869133-99869164
  hyper

SEQ ID NO: 44475 - DNA, 30 bp, Homo sapiens; identical to SEQ ID NO: 5714
  chr7:100027486-100027516
  hyper

SEQ ID NO: 44476 - DNA, 31 bp, Homo sapiens; identical to SEQ ID NO: 5715
  chr7:100064074-100064105
  hyper

SEQ ID NO: 44477 - DNA, 30 bp, Homo sapiens
  chr7:100076547-100076577
  hyper
ctctccgggggccgcggctcatcctgccag

SEQ ID NO: 44478 - DNA, 30 bp, Homo sapiens
  chr7:100077132-100077162
  hyper
agcttgcagggaggcgagggattcccttac

SEQ ID NO: 44479 - DNA, 59 bp, Homo sapiens; identical to SEQ ID NO: 5716
  chr7:100091121-100091180
  hyper

SEQ ID NO: 44480 - DNA, 1082 bp, Homo sapiens
  chr7:100167115-100168197
  hyper
acaggaaggacacctacaggccgagcggggcgtggcaggagccagcagggtgcatggaggccccgttccaaagccctctaatcgccagcgccaccaccgctgccacaagtccgatcactggcctcacaccgaggctttctcggttgccccgacgacgtgtccggaccgcagtcagctgatcggtagagacgcccccacgctctctgcccctataaaggctcagtcttggggtcgaggccgcctctcttggacttccctactcaaactccagttcctgggcgacgtgaggattagtctcgtggggtgggggttccggagcggtcggcggagggagggaggtagtggggagcccaggccaggggcaacagtcaccgggacactcgctgtgcgcagagtccttgccccaaacttccagtcgggagcccgggagagacgctgggcatcaagacgggtggcagcctgcccggccgctgctcccggcccgccgagttcgccacctcacccccacccctgctggcctctccccgtgctcaagacacgagacccagccgtctctgcctcttctgcagccactttattgccttcgcccctgaatgaagcccgcaggcggcggccccggggagagccgggaatggccgccgtgcccctcagccagccgctgccctgggcctgccctgccgacgtgcggttctgcggccacctgcgcgcagacccgccgcgtcccgagtgttccgagagcgagcagaagtttcgcgcgtgccgagcgcggctccagcgcagcctgagcctggcgggtgcgtgcaccaccagcaagtgcgcagatgcgcgccagcaccacctgatcgtcctctacacccgcgacagcagcctgcgcgtggcggcggcaggcgaggcggagcagcaggcgtgatacaacaccctgctcgaggagcgcggtgatgccggtgaggcccgagccccgggcttccgggggcctcgggggcttctggctgtggtttctccgtggctcgcccctcccccaggtcgccgaaagttcaaacattaaaggggcaggtttagagttctccgggcacaggcccggc

SEQ ID NO: 44481 - DNA, 30 bp, Homo sapiens; identical to SEQ ID NO: 5719
  chr7:100183957-100183987
  hyper

SEQ ID NO: 44482 - DNA, 466 bp, Homo sapiens
  chr7:100202379-100202845
  hyper
actctgctgcagggccggggagatgggatctcctaggggaagaggcgcggtgcggccgcgggtcggggaggggccagaagggggcgtccagccagttcctcctcccgcttccaccgcccgccagtgcgccctgcggccccagacttccccgagccgcgctcctcccggccgctctctgttaacctgcccccatcttacctccccttcttctcgtcccctcatcctgagccccagacatccgagctgcctgccggggctcccagcctagagttctcctgaagctgaccgagggtctccaccgccccccacccccgctcctctctcccctccccagagcaccaattttgcggggggcggctggagaaggcccagggaaccctgaccacgcccaactggcccgagtccgattaccccccgggcatcagctgttcctggcacatcatcgcgcccccggaccaggtaccga

SEQ ID NO: 44483 - DNA, 238 bp, Homo sapiens
  chr7:100203045-100203283
  hyper
tcctggtataacacgcgggcctgtcacttgtgagtgcgccaggacttgaccttgccaaccacgacgaccgacacccctgcagggtcccatgggtgtgtgtggtcctccgtgctgtggtgtgaacgccttcaggaggggggcccagaggacgcgggaggtgggagtgggagctgctgcaggcacccagtaggagatgaggtgcaggcgcccaggggtgtcccgccgcgcagtccccgcc

SEQ ID NO: 44484 - DNA, 329 bp, Homo sapiens
  chr7:100224186-100224515
  hyper
atcactttgatcgctcgggtcctccagcctgaccgatctatgagcactgcgtgtccaggactgggaagagagcatccagaggaccgggactgtgtaggcggggagagagaggagcgcgcagacggggccaggtccaggaggtggagccccaggggaggggcgggacactgggggcggggcgaggagggcggggcctcacccgcattatgcgcacgttgtacatgcgtgtcagtcgctcgtctctctcctccgagctgtagatctcctgccgcagcttttccgccgcccggatgtagtccccccgcgccgagtacacccactgcagggtc

SEQ ID NO: 44485 - DNA, 72 bp, Homo sapiens
  chr7:100253769-100253841
  hyper
gtagggccctgtgcgcgcggggcgtctggggaggaccgagcgcaggggtggcgggagacccgagcctgagac

SEQ ID NO: 44486 - DNA, 214 bp, Homo sapiens
  chr7:100253997-100254211
  hyper
cggcccgtgggcggtggcgggatcagcaccgaggcggccggacagctcccgggatccctggcggggcgggactctcagcggccaattgggaggccggatcccccgctccaacggcgccgccgattggctgccaggcgagacaatgaccgaccgggggcagctgctttaaaggggaagatacactctattaagcggccaggaggagatggggcag

SEQ ID NO: 44487 - DNA, 30 bp, Homo sapiens
  chr7:100270816-100270846
  hyper
aaaggcccagtgggcgaggctgaggaaatg

SEQ ID NO: 44488 - DNA, 44 bp, Homo sapiens
  chr7:100271245-100271289
  hyper
ggagcgactgggcccgtctttgctccctcggtggggttttgtct

SEQ ID NO: 44489 - DNA, 30 bp, Homo sapiens; identical to SEQ ID NO: 5722
  chr7:100303267-100303297
  hyper

SEQ ID NO: 44490 - DNA, 1031 bp, Homo sapiens
  chr7:100424501-100425532
  hyper
aggggtagtcagaggccggcccctccactccgaggcccagatgttgggggggaggtcccaggagtgacggggtgcgcccccccccgcaaggaaactcaccttccaaagctgcggccaacgaagcccagcagagcagcacccggagctccatggcgccgcctcactcgggtaggatccgaactgagtttggggggccctcgcccccccaggtctgactctccctgggcgggtggacgccgatactccgcgcgggactcctcgtcggggccctcagcgcgggcccatgcgagcgtgcggggcaccgggcggcggcgccaagtgtggccccgcgtctgtgccgcgcgcgcgggcggcgggcccggagcgtgctggcagtggccgcgccgggcgggcgcgcagcaagacgtggctggagttggggtccctccggggcctcggggtcccgccccgggtggcgggggctgagccggccgctcgcggtctccccccctccctggagtggctctgctcgcgccgccgggccgagtgctctcctcgcgggcggggatggtgggagcccgagcggggacggagcgggagggagggagactgcggcgcggagccgggcgggccgggccgggcaggggctgagctgcgctggaactgggccgggcggcgccgggcccgggagggaggggcgcgcggggggcgggggcagctctcccaacgcgggggctccgcgagtgagccccgggcgcgctgattggagctcacgctactgaataattcatgagggaagcggagaggggcaccgagtggagcaggtcgggaagttgagagaaagtttggagaagggggaggggcggcgggtgaggaaccccgggaccgcccagatgtgcgccgtggcggtgcgcgctgtccaggaccgagcatgtcggggctggggcccagggacccccgggacaggcccgaacccggctggcaccagggagcagagaaaacacacacccagcagcaacacggagggccgcccaggcgtgcacgtaaatgtt

SEQ ID NO: 44491 - DNA, 30 bp, Homo sapiens
  chr7:100425812-100425842
  hyper
cgcgcactaagctgcgctagggagtagaga

SEQ ID NO: 44492 - DNA, 30 bp, Homo sapiens
  chr7:100464756-100464786
  hyper
gtgcggggcccggacgcatccgtggacttg

SEQ ID NO: 44493 - DNA, 89 bp, Homo sapiens
  chr7:100609019-100609108
  hyper
tccaagcccatccccgttgccctacagtggagccctgccctggagctctgctccgtcgccctaaagtgtagccccgcctccttgatggg

SEQ ID NO: 44494 - DNA, 30 bp, Homo sapiens
  chr7:100609360-100609390
  hyper
tctacggtggattccggccgcttgtctagg

SEQ ID NO: 44495 - DNA, 131 bp, Homo sapiens
  chr7:100660479-100660610
  hyper
cctgctatggttaccgttgctatgaaggagggcggccctgctgacccagagccagccctgtctcccgctccactctgacctcacccctgagtccagggctgaacgcacgctcctccgtggcccccgcttcc

SEQ ID NO: 44496 - DNA, 30 bp, Homo sapiens
  chr7:100660894-100660924
  hyper
cctacaacaacttccggcccaccctggaga

SEQ ID NO: 44497 - DNA, 234 bp, Homo sapiens
  chr7:100728512-100728746
  hyper
ctactcagagaacccgccctcaggtagttccctgtttgtgacatacacacacttagccctgaggctggactgacaggccgacctggctggtggactccagcccaagcctgccagctgcctgccggggtgggggccttggcgggagaggacggggccgggtggggaggaaggcggggcctgaggctgtgcgaggcgagtcggtgtgtccctggctgggacggaagttgcaccaca

SEQ ID NO: 44498 - DNA, 314 bp, Homo sapiens
  chr7:100770177-100770491
  hyper
aatgctcttacacacgtacacacacagagcagcacacacacacacacacacatgcctcagcaagtcccagagagggaggtgtcgagggggacccgctggctgttcagacggactcccagagccagtgagtgggtggggctggaacatgagttcatctatttcctgcccacatctggtataaaaggaggcagtggcccacagaggagcacagctgtgtttggctgcagggccaagagcgctgtcaagaagacccacacgcccccctccagcagctgaattcctgcagctcagcagccgccgccagagcaggacga

SEQ ID NO: 44499 - DNA, 2095 bp, Homo sapiens
  chr7:100806065-100808160
  hyper
gcccccggtcacccgcgggtgagctctgggagttcgggctcaggacccgggaggggggtctggcaggtcccgacgcagcccggggacaggggcagggccaaggggcagggccggggcgcatgcaaacaccgagggggagcgggcaacacggaggggggcgccggcgcgcgcgcgcggcgggggcgcgcgggggcgggaccgggaagggcagtcacgggcgccggagcagcacgtgctcgatgtaattctccagctcctcctgctcctgcagccggcgctcctccgcctccgcctcctcctgcgcgcgccgcgcctgggcctcccggccgggatagtggcgcgaaggcggcaaggcgtggtggtagtggcggcggcgcaaggccgagggcggctgcagtgtccgcggccggatgtagttggggaaagggtggtacggccctggcgggtacacctcgtcctcctcccgatcccagggcgggagcacctcgttccagtccggcagctcgtctcgtgcgggagcgggggcggggggcgggggctgcggggagcggacgtgggtgggggcgggggcggcacgggggggcggcacgggctcgggaggggcgttcttcttccgcttccgcttctcctccacctcctcgatgatgctgaccacgtcgtccgctggcaggtggagtttggtggacagctcaatgaggctgtcgatcgtctgcggatccatctcctcgtcgtcctcctcctccccgccctcctctgtcccctcggcctccttccgccggtggcccggcgtctcctcctgggagcgcttgtcctcggcgccggcttccccgtcctcctcctccgcgaacaggagcgcgttctgccgcgccctctccgcctcctccgcctctgcctccgcctcggccgcctcctcatcctcttcccccaccctctcctccccgccgcgtctctcctgctccgcctcctcctcctcccttgcactctctcgctcctccgccgcctcctgcagcccccgacccccgaggccgcgctgccgggccccgccctgcagcaaatactggagcagcaggtccgaggcgaggtcggccagccgctcttcctgcgccgcggcctgccgcgtggcctccgcctgccgccgcccggcctccacctgcgccagcccttgctggagaaggcgctcgcccgcctcggagccgcccaggagtgcgctctccggccggcgcgccttggggaacggggcggccacgccttggtacgccttggacaggggtgccaatgcctcgcctaggtgtgttttgggggaggacactccttccccgaacttgtgggtttcgggaaggggcccgctgtcgggcatacgcgcctggaattgagagggggccgggggcggcaggggcgcgcgctccgggacacgcgcctggaactctccccaggaagcgcgccatacgcgctctggccccgggctctccagattcactcgggtcagcgtgtgcgtgcgggtttccgtctctgctgccgccgtctcctgctggcgcttggcgctacttggactgaaatctcgcagttcctggagcagggacgctagcgcctcgagctcctcggagggatcgctcgcctcgggcccattctccggagtctgagggcgaggcggagccgcgggctccgggctctccggcgccgggaggctgtgggtctggctgcgcacggtctcggtcagcagagcttcagctgcttcttcctccggcccctgctgggagccgcttggtgccgggggtgaggcgggacggtcgagtgcctgcagcagcaccgcggccagcgcccggggatccacgccctggaaaagctctccctcgtcctgcggctcggaattccgagcgcctcggacctctggggcgctgccatcctttggcccgggcactgcgtccccggctaccggctctttatgctcagagctgagaggaggaggctgcgcctcagggcgaccagggggtgctgcccctaacccgttgatcagcagaaggcagaagagggcggaagccgacaatctgagggctttcatgaccaagaggctgccggagactgaaaaatagaaggg

SEQ ID NO: 44500 - DNA, 675 bp, Homo sapiens
  chr7:100808389-100809064
  hyper
ccatctcactgccatcgcccacgtactaagcagcagcaatatgggggaaaaaaaaatctctgctccctccccgtaggactccccggatggtgcgtgggcgacttcagcagcaagagaaaaagctgcgactcccccgtttaccggggacccttaccagggggctccccgctgtgtttgcaacacccccatcgagaggagagagaaccctccctcacgcccacggctggctgccgagggtttgagggacgaacagcggagtatttaccagctggtgtcacgacgcgagaggtggagaggagggtcggggcagggtggggacaggggaagatcgggacgcgtccgcctcggctccgagcggtggccggggtaggagcgacggtcgaggtctggcgtcccgtgggctgggctcagctgggtcggcgcggctccgggcggctagctcgctccggcttcagcacgctggacagcgcccgcgcctccaccgccttataaaggggagcgcgcggggtcacgtgggcgcgccccgccccattgacgtcaatgttcattcatggggaagcgggcggccgcccggaggaggaaggacgcccgacgattggagggtgcctgcctctcccggcctgcgcctgcgcgctggggccttcggctgaaggggtgtgcgctagcggagctccg

SEQ ID NO: 44501 - DNA, 231 bp, Homo sapiens
  chr7:100809331-100809562
  hyper
gaaggataaagattcaagagccgaccagggggccgggttccccaccccgagaccacgcgcccaaggacggcgtgaacctgagtgcagagggacagatctgcacgcctgcgggcgctgtccgcgaatcggcagtgcgggtggcagccccctgacaggggcagatgggtggatcttgcggttttggtaatcccatcgggaagggtccgagtcggaagagaaaagggaaagaat

SEQ ID NO: 44502 - DNA, 30 bp, Homo sapiens
  chr7:100809982-100810012
  hyper
gacgcacagatttgcgcaaagagaatccat

SEQ ID NO: 44503 - DNA, 30 bp, Homo sapiens
  chr7:100815470-100815500
  hyper
gagctggcacatgacgttgaggccaacgag

SEQ ID NO: 44504 - DNA, 232 bp, Homo sapiens
  chr7:100815781-100816013
  hyper
gtgacagcaggaggcgtgccacgtcgccgcctgcctcggacacggcctcggtgggcagcggcgagaaggtgccagaggtccgcagcgccgccagccgcgcgcccagcccggccagcagcgcggacgcgttgaatcggaccaaaaggatgccctgcggggggcacgagtgagcgcggggagggggggcgcagcagggctggcgagcccggcgcctctcggcaggcatcttcac

SEQ ID NO: 44505 - DNA, 286 bp, Homo sapiens
  chr7:100816641-100816927
  hyper
gtgccaccttgacccccgggtgctgtctcttgaccagctgcgagcagaagcgctgcagcagcccggccacgcccttcccgcgctcccagggcgccacgcgcagcccctccaccagcaccgtctccccggcgtcgatcacgttcaccgactccagcgcgatctgcggaccgaggccgttagcgcggggccctccccgcctgcgcccctgccagggctgtcggttcactgggctctcctcttcccacacgctgagcactccgcgtcaccacccgggcaccaggccagg

SEQ ID NO: 44506 - DNA, 125 bp, Homo sapiens
  chr7:100823225-100823350
  hyper
ggtccccctgaggggcggtggccttctgctgccccattctgcggtggaggagcacgctagccccctccccagtccccaggcccggccgcccccctacctcgccggagccggagctggagccaggg

SEQ ID NO: 44507 - DNA, 431 bp, Homo sapiens
  chr7:100823380-100823811
  hyper
cggcgggcgcagacacccccggtgccaagagagaggtccctttggagcccccaagagtcaaaggaggatgacgcgcggggactcggccgcgctgtcggagcccgactctaacgtcggtcagcgctggggcagcgccgcagctccgttggcgacgcgggccggggcgcccatcggttcaggggttcgggtggcacgcgtggctcccccggcgacgctccggcggcagcttcgaggggcggagaccccggcgacgcggaagaaacccgggacggatccggagcggactcgtgccctgctggcggggccgggggtcggggtgcgccctgggcagctgggtggcctcaagccctactggcgagactccgccctgtgtcccggctggggagtgggactgaggatggtggtgtctcgggttttggtggtggtgatgc

SEQ ID NO: 44508 - DNA, 177 bp, Homo sapiens
  chr7:100845023-100845200
  hyper
ttcacttccccacctgcagtcacccagcggacaggcgaggccaggcggtggggcgcgcctccgtgaggaccaggtgtctgtcggcggggacaccatagcgcgcctggtgctcctcgaagagctgcgtgagtcgccccacgtagcgcgcttgcagcgtgtccacctgggccggactgg

SEQ ID NO: 44509 - DNA, 178 bp, Homo sapiens
  chr7:100845248-100845426
  hyper
cgggaggcgatctgggctgggatccccggttctcctcctcttttcctccttggggataggcgggaacagagttcagggctggcgcggtggccaaaggccagtctgggtggccccaacccgggacggggagggagcgggccctgggccaggatcgcggggcggaggccggggctcacct

SEQ ID NO: 44510 - DNA, 39 bp, Homo sapiens
  chr7:100845444-100845483
  hyper
cggaagggcagcgggaggccccggcggcccaggaacagc

SEQ ID NO: 44511 - DNA, 30 bp, Homo sapiens; identical to SEQ ID NO: 5734
  chr7:100860804-100860834
  hyper

SEQ ID NO: 44512 - DNA, 30 bp, Homo sapiens
  chr7:100861358-100861388
  hyper
agtcaaagctgtggcgcacgcgcagaagta

SEQ ID NO: 44513 - DNA, 30 bp, Homo sapiens
  chr7:100895789-100895819
  hyper
ggggcgcggcgccacgccacctggaagtga

SEQ ID NO: 44514 - DNA, 373 bp, Homo sapiens
  chr7:100951612-100951985
  hyper
agatggcctggtagatgcagccggcacgcacctctcctctgacgggaaccgaaggagccggtaggttttcacacttgcagcagatccgctaagagaacgcgggattcagccgagaagccacggggagcccgaggagcggagcagaggcacccaggcagcctgcgcggagaaattggatcggcggggacggcctgcagctcccgcgcgcggggaaagggtgagtgagagaccccggggctatgcagttcccccagggacttccacagccccccgaccctcgcggacctccagaatagggggcagcgggcgagagattccccagcggcgttgcaggagcccacgtggagcccacgtggagcccacgggcttcctt

SEQ ID NO: 44515 - DNA, 30 bp, Homo sapiens; identical to SEQ ID NO: 5735
  chr7:100964951-100964981
  hyper

SEQ ID NO: 44516 - DNA, 35 bp, Homo sapiens
  chr7:101006043-101006078
  hyper
cgcctcctcggccccggaccgccgagggttaacaa

SEQ ID NO: 44517 - DNA, 85 bp, Homo sapiens
  chr7:101006293-101006378
  hyper
cccgcgggctgctgcgcacgatgaagctggccctgctcctgccctgggcgtgttgctgcctctgcgggtcggcgctggccaccgg

SEQ ID NO: 44518 - DNA, 179 bp, Homo sapiens
  chr7:101006948-101007127
  hyper
cggtggtctctggccgcgcccaccctgtcccttcctttcttcgcttccccaaccttcgccccctcgttccgggctccgagtagaggtggttccgaccgccgtggctggggctggggctctgcccggggcgttcggccgctcacgtggctctgccgctcacctgcgcggctgcggctttg

SEQ ID NO: 44519 - DNA, 30 bp, Homo sapiens; identical to SEQ ID NO: 5738
  chr7:101386936-101386966
  hyper

SEQ ID NO: 44520 - DNA, 199 bp, Homo sapiens; identical to SEQ ID NO: 5739
  chr7:101447356-101447555
  hyper

SEQ ID NO: 44521 - DNA, 30 bp, Homo sapiens
  chr7:101457160-101457190
  hyper
ccaggggatctacacgataattagattgag

SEQ ID NO: 44522 - DNA, 30 bp, Homo sapiens; identical to SEQ ID NO: 5740
  chr7:101457432-101457462
  hyper

SEQ ID NO: 44523 - DNA, 80 bp, Homo sapiens; identical to SEQ ID NO: 5741
  chr7:101457689-101457769
  hyper

SEQ ID NO: 44524 - DNA, 468 bp, Homo sapiens; identical to SEQ ID NO: 5742
  chr7:101458245-101458713
  hyper

SEQ ID NO: 44525 - DNA, 191 bp, Homo sapiens; identical to SEQ ID NO: 5743
  chr7:101459182-101459373
  hyper

SEQ ID NO: 44526 - DNA, 90 bp, Homo sapiens; identical to SEQ ID NO: 5744
  chr7:101460880-101460970
  hyper

SEQ ID NO: 44527 - DNA, 30 bp, Homo sapiens; identical to SEQ ID NO: 5745
  chr7:101499999-101500029
  hyper

SEQ ID NO: 44528 - DNA, 112 bp, Homo sapiens; identical to SEQ ID NO: 5746
  chr7:101559393-101559505
  hyper

SEQ ID NO: 44529 - DNA, 49 bp, Homo sapiens; identical to SEQ ID NO: 5747
  chr7:101671376-101671425
  hyper

SEQ ID NO: 44530 - DNA, 80 bp, Homo sapiens; identical to SEQ ID NO: 5748
  chr7:101713617-101713697
  hyper

SEQ ID NO: 44531 - DNA, 139 bp, Homo sapiens; identical to SEQ ID NO: 5749
  chr7:101740642-101740781
  hyper

SEQ ID NO: 44532 - DNA, 125 bp, Homo sapiens; identical to SEQ ID NO: 5750
  chr7:101747614-101747739
  hyper

SEQ ID NO: 44533 - DNA, 78 bp, Homo sapiens; identical to SEQ ID NO: 5751
  chr7:101754976-101755054
  hyper

SEQ ID NO: 44534 - DNA, 68 bp, Homo sapiens; identical to SEQ ID NO: 5752
  chr7:101758485-101758553
  hyper

SEQ ID NO: 44535 - DNA, 50 bp, Homo sapiens; identical to SEQ ID NO: 5753
  chr7:101801838-101801888
  hyper

SEQ ID NO: 44536 - DNA, 106 bp, Homo sapiens; identical to SEQ ID NO: 5754
  chr7:101813724-101813830
  hyper

SEQ ID NO: 44537 - DNA, 190 bp, Homo sapiens; identical to SEQ ID NO: 5755
  chr7:101821747-101821937
  hyper

SEQ ID NO: 44538 - DNA, 60 bp, Homo sapiens; identical to SEQ ID NO: 5756
  chr7:101833091-101833151
  hyper

SEQ ID NO: 44539 - DNA, 50 bp, Homo sapiens; identical to SEQ ID NO: 5757
  chr7:101837120-101837170
  hyper

SEQ ID NO: 44540 - DNA, 98 bp, Homo sapiens; identical to SEQ ID NO: 5758
  chr7:101838785-101838883
  hyper

SEQ ID NO: 44541 - DNA, 673 bp, Homo sapiens; identical to SEQ ID NO: 5759
  chr7:101839912-101840585
  hyper

SEQ ID NO: 44542 - DNA, 67 bp, Homo sapiens; identical to SEQ ID NO: 5760
  chr7:101842080-101842147
  hyper

SEQ ID NO: 44543 - DNA, 103 bp, Homo sapiens; identical to SEQ ID NO: 5761
  chr7:101843349-101843452
  hyper

SEQ ID NO: 44544 - DNA, 846 bp, Homo sapiens; identical to SEQ ID NO: 5762
  chr7:101844638-101845484
  hyper

SEQ ID NO: 44545 - DNA, 167 bp, Homo sapiens; identical to SEQ ID NO: 5763
  chr7:101847669-101847836
  hyper

SEQ ID NO: 44546 - DNA, 58 bp, Homo sapiens; identical to SEQ ID NO: 5764
  chr7:101848392-101848450
  hyper

SEQ ID NO: 44547 - DNA, 304 bp, Homo sapiens; identical to SEQ ID NO: 5765
  chr7:101870645-101870949
  hyper

SEQ ID NO: 44548 - DNA, 190 bp, Homo sapiens; identical to SEQ ID NO: 5766
  chr7:101877330-101877520
  hyper

SEQ ID NO: 44549 - DNA, 266 bp, Homo sapiens; identical to SEQ ID NO: 5767
  chr7:101882598-101882864
  hyper

SEQ ID NO: 44550 - DNA, 9823 bp, Homo sapiens; identical to SEQ ID NO: 5768
  chr7:101891690-101901513
  hyper

SEQ ID NO: 44551 - DNA, 129 bp, Homo sapiens; identical to SEQ ID NO: 5769
  chr7:101916635-101916764
  hyper

SEQ ID NO: 44552 - DNA, 68 bp, Homo sapiens; identical to SEQ ID NO: 5770
  chr7:101917513-101917581
  hyper

SEQ ID NO: 44553 - DNA, 114 bp, Homo sapiens; identical to SEQ ID NO: 5771
  chr7:101918516-101918630
  hyper

SEQ ID NO: 44554 - DNA, 118 bp, Homo sapiens; identical to SEQ ID NO: 5772
  chr7:101921218-101921336
  hyper

SEQ ID NO: 44555 - DNA, 85 bp, Homo sapiens; identical to SEQ ID NO: 5773
  chr7:101923327-101923412
  hyper

SEQ ID NO: 44556 - DNA, 58 bp, Homo sapiens; identical to SEQ ID NO: 5774
  chr7:101924094-101924152
  hyper

SEQ ID NO: 44557 - DNA, 82 bp, Homo sapiens; identical to SEQ ID NO: 5775
  chr7:101925130-101925212
  hyper

SEQ ID NO: 44558 - DNA, 66 bp, Homo sapiens; identical to SEQ ID NO: 5776
  chr7:101926002-101926068
  hyper

SEQ ID NO: 44559 - DNA, 939 bp, Homo sapiens; identical to SEQ ID NO: 5777
  chr7:101926311-101927250
  hyper

SEQ ID NO: 44560 - DNA, 30 bp, Homo sapiens
  chr7:102104792-102104822
  hyper
cccattgcagtccacggccttcaggcaccg

SEQ ID NO: 44561 - DNA, 30 bp, Homo sapiens
  chr7:102105109-102105139
  hyper
ccccagatgcagagcgacgtttgtgggcgc

SEQ ID NO: 44562 - DNA, 231 bp, Homo sapiens
  chr7:102389176-102389407
  hyper
cacgcagctttacccgcgttgccccttccgtgcttcccattggccagtggactcccatgtaccgcccctccaatagccaatggtcttgagacaaagggcgcccgcctttccagcgattctaacacctaccctcttacccgtgctcccctgcgcattgcctcctgggaaatgtggtttctaagaggcagagctctgcgacttagaactacctatcccgtcggccttagcgaa

SEQ ID NO: 44563 - DNA, 30 bp, Homo sapiens
  chr7:102714856-102714886
  hyper
gagtttggggtttccgatctgggccttgtg

SEQ ID NO: 44564 - DNA, 30 bp, Homo sapiens
  chr7:102920308-102920338
  hyper
ccgcgcctgcagttcgtgcacctcttcccg

SEQ ID NO: 44565 - DNA, 101 bp, Homo sapiens
  chr7:102921427-102921528
  hyper
gatcgctgaggtatcggacagtcagtgcccgttgccaacacggagggaacgggccgagactgcgggcaacacgtggcagagccggcgtgagtctggtgggt

SEQ ID NO: 44566 - DNA, 30 bp, Homo sapiens
  chr7:102937734-102937764
  hyper
catttggtaaagaccgctcagcatcatggt

SEQ ID NO: 44567 - DNA, 88 bp, Homo sapiens
  chr7:102985259-102985347
  hyper
caccctcccacccccgccaacgtgtgcggtaacctagttctatactgactgagatccggctggagaccaagtcgcacgagagaatggt

SEQ ID NO: 44568 - DNA, 1041 bp, Homo sapiens
  chr7:103085749-103086790
  hyper
ggcccggcccaggtgcgcactagatgaggcagtcaaccaagtcaattggttcccgatcaactaaatctctcctaaaaataaacactgccgcgagcttcgagagttcagcgtgtcagagcctctatgatggcagagcacctgccgcgatgcctgattggtagggagaaggatttcccgggagggggccaataccaaattttagggctgttaggctctgagcagtcccttcgtgaccggataagtcagagacccggggtttgagccttgcccggcgctgagcggagggcccagtttcgggaccacagccttgctccctgggagctccgggcggccaatgccgggcaagcccagcccggcacaggaggaggcagggcccgtctccggaaagagggccagaggcagaactgagggcctggttttgtgtaattcgatttggatacaaacaggccagacccaaactggaaacggcgaagggctggattagcaccgaagggattcgaggaggcaaacgggaagtaaaaatgctgtgtggagctgcagagggcaaggggacaggggttgcaaaggaaagagcttcgtgagactttctccttcccggcgtagggaccagcagagtgcgggcaggtcagccctgtcaccggttcgtttagggaaaaagcgcgacatggggcctgggagacaggggcagaggcggtgacagcgagggcccctgctcgggtgggcccgcgggcctcagctcagtcccctcccgagggaccgcgacccccggccccgcggccgcccgcgcgcactcaccagcccgggctgccctgggcggagccgccccgccgcgctccacagccgctgcctcttcgacgcgcgcgctgcctccaggtgcggctctaggaggaggcgccgcgggcagtgccggccgcgccccgcgactcccggtaacccgagcccgccccgccccgctagggccaggccccgccgccaccctccgcgctgggacgccggggcgcgggcatccctgccgcctacggatctcttcccaagcaccta

SEQ ID NO: 44569 - DNA, 30 bp, Homo sapiens
  chr7:103087708-103087738
  hyper
cctttggctgggagcgctggtgctgttctt

SEQ ID NO: 44570 - DNA, 640 bp, Homo sapiens
  chr7:103629154-103629794
  hyper
agcgacagcccccaacgcccccccggggacccatctggggggaccgggagcaggacaaaggtctgaaatccaagtcctaggagtaaagaaacaaaatgcgcaggttcaatttaaagtgcctgcggtaagtacggggagtgagggggaaagacaccggcctccaagaattctcaggcgtttagcacaagcaccagctcattaccaggagatgcgttcggggagtggggacatggagaatgaatcccaacttgtgactccattctccactaactttattctcgctccctggaccaagcgcatcgctggggccagggttgtcatggttcttgtttccaaggccccttggaagaaggaaagggatgagaaaggtgcgctggcgggcgcacccggcggcggcgagcgcggaggtgctgcggtacctaccatggtattcttgtcccggaacgtagtaggtggggttgcccgcaatatgcagggaaatgagcacctcgccctgctccccatccccttccagctccccgtggtgggtgcacaggaaaaagaagggcgaaaagcgggggtaatagccagccgccgcgcgcgccctcagcgtcgcccccagcaacagcgctaggaggaaagtctgccgggcccagccact

SEQ ID NO: 44571 - DNA, 746 bp, Homo sapiens
  chr7:103630363-103631109
  hyper
cgctgagcccgcgactcttctgcgagggacgtcaaagccccgcagagggcacctcccgtccagctgtctgaaggggaaggccagcccctttggccgtcagtgtgccctgtttttcctgggaggatgcgtgagggaaggagaggggcggcagggacggccgctggcgccggtttctttgtctgagccggctgcgtcccgcgcccctcggggctcgcagtctgccagtccgggcggcccgcactcgttctgggaatccgcccgaggccgcgaaccgctaggggccctcgcgctcccttcccacccaggccccctgtccctcccgccgcggccgcccggcccctcgcggcagcgacagagcctcatctgtagaggattttaaaatgagattaagcgaaagtggaattggcagactcgagtggtgcctggaaatggtgatttgtgctgctcggttgtggggaattgtaaggcaggaagggctggcggagctaagatccgacaggctctcttcgccggactgttctgttattcattgcttctgggctcttcaggcagagatgggtgttgtaattttttaaatcagtgtttatttcctttaaatgtcggttatgaccaatggccctgaaatcgggggagggaaaaacgttcaggggagatgctggcagcggtgattgaagcgggtggtaatgagcggctgcacatgaactgcagggaagtgaaataatccataagcacgtttttaaccgagg

SEQ ID NO: 44572 - DNA, 513 bp, Homo sapiens
  chr7:103969008-103969521
  hyper
gagccgggaggctgtgccaggcgagccggaggggtgctccgcgctcccccgccctccttccgggagcgaggatgcagactctgaaactggtgctgctgggctgaggcggaggcaggggagttgcagcgcgcgaggctccgtgagtgtgtctcctgcgcgctgagaggcggggggaggcggaggaccaggaggaggaggaggaggaggaggagggggagaatgcccggagccgccgccgctgccgccgccgccgccgccgcgatgctcccggctcaggaggctgccaagctgtaccacaccaactatgtgcggaactcgcgggccatcggcgtgctgtgggccatcttcaccatctgctttgccatcgtcaacgtggtgtgcttcatccagccctactggataggcgacggcgtggacaccccgcaagccggctatttcgggctcttccactactgcatcggcaacggcttctcccgggagctgacctgcaggggcagcttcacggacttctcc

SEQ ID NO: 44573 - DNA, 116 bp, Homo sapiens; identical to SEQ ID NO: 5784
  chr7:103969562-103969678
  hyper

SEQ ID NO: 44574 - DNA, 391 bp, Homo sapiens; identical to SEQ ID NO: 5785
  chr7:103969693-103970084
  hyper

SEQ ID NO: 44575 - DNA, 39 bp, Homo sapiens
  chr7:104652242-104652281
  hyper
aacttaatacagtttaaaacacggcttttattccgtatt

SEQ ID NO: 44576 - DNA, 38 bp, Homo sapiens
  chr7:104652580-104652618
  hyper
aaagagcgaatcccaccgacaaaactatattcttaagg

SEQ ID NO: 44577 - DNA, 30 bp, Homo sapiens
  chr7:104653111-104653141
  hyper
cttcaggccgccaacgccgaccgcaccaca

SEQ ID NO: 44578 - DNA, 30 bp, Homo sapiens
  chr7:104653768-104653798
  hyper
cccccttttttcttcgagatcactgtctgt

SEQ ID NO: 44579 - DNA, 184 bp, Homo sapiens
  chr7:104654731-104654915
  hyper
gggcatagacactccgagcagcctcgccgtcgtctctgcgttcctgttgactgcctggctgccccctcccctactcctcggttcctggtgaagaggctgcgcgctgctgtttggggagggggtgtgtggagccgggtcctgtgtccgcagtggctgctgtcggggggtcgcctgttcgcggagg

SEQ ID NO: 44580 - DNA, 158 bp, Homo sapiens; identical to SEQ ID NO: 5786
  chr7:105162871-105163029
  hyper

SEQ ID NO: 44581 - DNA, 36 bp, Homo sapiens
  chr7:105221970-105222006
  hyper
ccctctacccggcgcggtcacgtgacacgcctgact

SEQ ID NO: 44582 - DNA, 138 bp, Homo sapiens; identical to SEQ ID NO: 5787
  chr7:105331661-105331799
  hyper

SEQ ID NO: 44583 - DNA, 190 bp, Homo sapiens; identical to SEQ ID NO: 5788
  chr7:105516544-105516734
  hyper

SEQ ID NO: 44584 - DNA, 30 bp, Homo sapiens
  chr7:105517432-105517462
  hyper
tgcttccagcttgtcgctctctccccgcgt

SEQ ID NO: 44585 - DNA, 30 bp, Homo sapiens
  chr7:105517674-105517704
  hyper
cagtgggtagatgtcgttctgaaacgcagg

SEQ ID NO: 44586 - DNA, 31 bp, Homo sapiens
  chr7:105752146-105752177
  hyper
ccagggagctagacctcgagtgggcaccggc

SEQ ID NO: 44587 - DNA, 30 bp, Homo sapiens; identical to SEQ ID NO: 5789
  chr7:105753119-105753149
  hyper

SEQ ID NO: 44588 - DNA, 40 bp, Homo sapiens
  chr7:106239343-106239383
  hyper
tcagaagctgtcacgcgacacttcccgttccactgctcta

SEQ ID NO: 44589 - DNA, 565 bp, Homo sapiens
  chr7:106508305-106508870
  hyper
tcagaagaaggggcagtggtacgagatctacgacaagtaccaggtggtgcagactctggactgcctgcgctactggaaggccacgcaccggagcccgggccagatccacctggtgcagcggcacccgccctccgaggagtcccaagccttccagcggcagctcacggcgctgattggctatgacgtcactgacgtcagcaacgtgcacgacgatgagctggagttcacgcgccgtggcttggtgaccccgcgcatggcggaggtggccagccgcgaccccaagctctacgccatgcacccgtgggtgacgtccaagcccctcccggagtacctgtggaagaagattgccaacaactgcatcttcatcgtcattcaccgcagcaccaccagccagaccattaaggtctcacccgacgacacccccggcgccatcctgcagagcttcttcaccaagatggccaagaagaaatctctgatggatattcccgaaagccaaagcgaacaggattttgtgctgcgcgtctgtggccgggatgagtacctggtgggcgaaacgcccatcaaa

SEQ ID NO: 44590 - DNA, 1325 bp, Homo sapiens
  chr7:106684837-106686162
  hyper
gcctgggaagcggggcgagtggccagcccgctcctggacgcgcggacaggtggacacgaaggcggcctcgctgggcctccctccgcctctcccggcccgggcgcgcagccctgcggtggtctgacaggcgggtgcgcggcgccagccagcggaggttgccatggtttccgggggtcacgtgggcgcgctctcctgcgccccctcccgcgcaccgcggcggggcgggggcggggcgcccgggcgggggagaggcgcggccgcggctggagcgggaggagcaggagatgctgccagccctcccggggccgcgctcgctcagccgccgccaccacacggagcagacgcgcgccgggagccgcgggccgggccagccgggccgccggggcccagtgcgccgcgctcgcagccggtagcgcgccagcgccgtaggcgctcgctcggcagccgcggggccctaggccgtgccggggagggggcgagggcggcgcccaggcgcctgccgccccggaggcaggatgagcatcgagatcccggcgggactgacggagctgctgcagggcttcacggtggaggtgctgaggcaccagcccgcggacctgctggagttcgcgctgcagcacttcacccgcctgcagcaggagaacgagcgcaaaggcaccgcgcgcttcggccatgagggcaggacctggggggacctgggcgccgctgccgggggcggcacccccagcaagggggtcaacttcgccgaggagcccatgcagtccgactccgaggacggggaggaggaggaggcggcgcccgcggacgcaggggcgttcaatggtgaggaccagaccccccacttcgcgcccccggatcccctcgctgccccccaccgctccccgctgtgctctcggatcttgccgctttgcgcacccacctctccccgcattctccacctttccctaccttcccatctcgcccaccccctcagcatccatttctgtctctcccactcgcccaccttcctactccgctctctgtcataccctcttcccttcctctagaggtgggagagctgggatgttacgcttccctcttaccctttgccccctctgcctgggccggttggggtgggcatctgctagaaagacaactttcgctgtggttggaggtatttcgcttagaggataccattgtgcataaagaaactggcccgcttggcgtcttctttcagcccttgtatttattaatggaatgtcgaaagagaaaaggagaaccgtgtttaatatgattggctttactgttgttaggacggtagattcgctaaaagaagcatgaaattg

SEQ ID NO: 44591 - DNA, 198 bp, Homo sapiens
  chr7:106808941-106809139
  hyper
tgttagcagaggcccggaggaaaagaagaggcccaagctttaaaacactcccttcctccgccccctcccttttgtcccagacaccaaaacaaacgagctgatacacgtgtccctatgactcttgtttactatcaagactgcgctgtgcgagcgcctctgggatacgtagtccagctcttccccggccagcagtctccc

SEQ ID NO: 44592 - DNA, 30 bp, Homo sapiens
  chr7:107204705-107204735
  hyper
ctcagaacaggggccgcgcggcgtaaggca

SEQ ID NO: 44593 - DNA, 30 bp, Homo sapiens
  chr7:107220573-107220603
  hyper
aaacgtggtcgcgccgcctgtgacctcagc

SEQ ID NO: 44594 - DNA, 1550 bp, Homo sapiens
  chr7:107300981-107302531
  hyper
cccacagggcctggcccgcccctgacctcgcaacccttgagattagtaacgggatgagtgaggatccgggtggcccctgcgtggcagccagtaagagtctcagccttcccggttcgggaaaggggaagaatgcaggaggggtaggatttctttcctgataggatcggttgggaaagaccgcagcctgtgtgtgtctttcccttcgaccaaggtgtctgttgctccgtaaataaaacgtcccactgccttctgagagcgctataaaggcagcggaagggtagtccgcggggcattccgggcggggcgcgagcagagacaggtgagttcgccctgaagatgcccacaccgcccggcccgggctccactcccggggaggcctcgagggttgcggatgggactcttaagtggtcacggatcaggtgggcagggggcagtacagctttctttctgagacgccgagagcgaacaggctgctcggaaaacaggacgaggggagagacttgctcaataagctgaaagttctgcccccgagagggctgcgacagctgctggaatgtgcctgcagcgtccgcctcttggggacccgcggagcgcgccctgacggttccacgcctggcccgggggtctgcacctctcctccagtgcgcacctggagctgcgtcccgggtcaggtgcggggagggagggaatctcagtgtccccttccagccttgcaagcgcctttggcccctgccccagcccctcggtttgggggagatttcagaacgcggacagcgccctggctgcgggccataggggactgggtggaactcgggaagcccccagagcaggggcttactcgcttcaagtttggggaaccccgggcagcgggtgcaggccacgagacccgaaggttctcaggtgcccccctgcaggctggccgtgcgcgccgtggggcgcttgtcgcgagcgccgagggctgcaggacgcggaccagactcgcggtgcaggggggcctggctgcagctaacaggtgatcccgttctttctgttcctcgctcttcccctccgatcgtcctcgcttaccgcgtgtcctccctcctcgctgtcctctggctcgcaggtcatggcagcgccaggcggcaggtcggagccgccgcagctccccgagtacagctgcagctacatggtgtcgcggccggtctacagcgagctcgctttccagcaacagcacgagcggcgcctgcaggagcgcaagacgctgcgggagagcctggccaagtgctgcaggtagcggccgcgcgggcctgcgtagagagaagcggagcggggcgtccacgccttggggagggaagggcgtccccagcgggcgagagtggggtgcgggcggcggagcccctgggcgccagctgcttctcccagaggcccgactttcggtctccggtcctccacgccgcccttctggtgggagggtggctccatcagtctcgggcccgaaatgaacttacctgggaaactcgcctttggggagagtgggttctaggagccccgtctctctttttcctctctga

SEQ ID NO: 44595 - DNA, 30 bp, Homo sapiens
  chr7:107383812-107383842
  hyper
gtgttcgagaggttcgtagcgtcacaagcg

SEQ ID NO: 44596 - DNA, 323 bp, Homo sapiens
  chr7:107531674-107531997
  hyper
aaaggaaaatacagcggaaaaatgcagagctggagtcgtgtgtactgctccttggccaaggtgagggccgagtaggtgaggtcgtgttgagccagaggcacggaaggtcccgctcagtgggtccggtacgcggcttaaccgtgttgggctggcggaggcgggcgcctgggccgcaccacccctggccccgcctctgcactggctcagcccggccctgggctccgaggtggccgctcatcctgcagcaggcgagggacggggctgggcccaggctgtggcgagtcctttcgggttgtgtgacggccggcggtcacacatgccac

SEQ ID NO: 44597 - DNA, 125 bp, Homo sapiens; identical to SEQ ID NO: 5796
  chr7:107642429-107642554
  hyper

SEQ ID NO: 44598 - DNA, 1275 bp, Homo sapiens
  chr7:107642796-107644071
  hyper
tccattccagggaagcgccaggtcctgctgtttctggtgccatccggagacaaacagagatggttaattaaagccacatggcccccatctgttcccagaatgaagcctccgctcagctcaggcactctcctgggcaatggatttttggagagccctcctcggtcagcaccgccaaccccagggaacctgccctctgcggtggggaaacccagggtgaaccggccgagggtgcaaaaccctgagcgggggccgcgggaggccgcaggggccggggcttgggcgcagagcccgggggatgagggtccgcggcgctccgcgtgcgctgtctccagccaccaccgaagcaagggcggtggcgtttaatcccaggggcgtcatttccatccagtccctctcccaagcccccaggatcccacgaaggtgagcaagcagcttttgggttttccttccccatgcccaagtccgtccgcctccccgcaccgtttccacggaattacctaagaaactgaaagctagcaactggagaagccccatgccggctccctgcagccacggggacgcggcagaggagtggagaagacgcccgccgagccgcctgccctttcttcccgtcttcctttctggagaggtggaaaggaggggaaaaaaggcaaatgttcaaagagagaagaggcgcccttccatttcctgtcgctcccacggaagcggggggtgggctggaaagtggggaaaatcgtgcagccactttgttctcctcacccggcgacgcgagctctcgccctgctccgggagcccccgagcccaaagaagggaattagaaagtttagccttgggaggaacagagggaggcgcctctgctcatgcgcatacggagagccggggctgaaggggcgggcggccgcaactctgcgaggaccgggtgaggtcccggtcccaccccccggggcgcctcttttgtttgaaagccgaatctgcgatcgctgcggggctggggcgcttccaggtcccagggcgggtccgccccggggtgcgcgtcccagaacggcgcgcggcggggccgtccagcgaggggggcggatgcgtgggggcgtctccgaggtgggttttcaggttgcccagccagggggccggcgggacctaccgcggactcgcgcatttacgttcgcaagaagtgaatcaccaaacgtgcccacggctaaaactctcgtgcggtgcgctcggggaaggcgggttaaccctttagaaacagggtcgacctgtcgtgtttgttcttta

SEQ ID NO: 44599 - DNA, 349 bp, Homo sapiens; identical to SEQ ID NO: 5799
  chr7:108095228-108095577
  hyper

SEQ ID NO: 44600 - DNA, 1084 bp, Homo sapiens
  chr7:108095780-108096864
  hyper
cgctgcgagatggatgctccagggcgggtaatcactcctggctcaacacagcatcccgggcggagcggatgccagatcccaccgctaagagcctgggctgggaaagcaatctttccaggcagcccccagcccggtgcgccggccccgacaagtcccagccctcggaggcagggcggggcgcagggactcccgggacccgcacctgtaaggccgacaaagcccccgcaagcgccccacccctctgtcctccgtgtctctctcgttccgcctcgattccccgagccctctccaggcagcgactggagaagcgaagtcggcctcgcccccgaactccgtggtcagcacaggtgtacgcacttccgaacaaagcccacgcccagacgtgtccgcaggggcccgaacaggcacacgcccgtgcgctcccggcccggcccccgcgctcctcgccccgccggcactgtggcgtgacgccccgcgcctccgtgtccaagcccgggaagccgccgtgccgggcccgcaggctctccatgcccaactgcccacgagcaagagctctgggcagggcttcccggaaagcgtggggtgcgggcgcggagcagaagttggccacaggctggagggggtggtgggtgccggcgctgctggatttcagctgtgccttcacccaagcgcaggtccccctgctccctctcggcgcccgcgggagtgtcgggggcctgcaggggagaagggagttggagatctgctttgcccctcctgcagcgctgccagcccggtgagcgctcggctgaaccccgcggcggtgtccaagtgacaacgcagcagcctcgcgcgtcctcctccgctccagccgtcacccccgagcaggacccagtgtcaccgccagacgcgcaaggagctacttacgttctcgcgccgcgccctccgctcagctctggcgcgactgcccaggaccctggaccgccggtgtcctccgttctcgacgaagctatcccctctggctgctccagccaggcggcccctgcgccgtcccccgcgcccgcgcgtctgaggctcggactgcggcgcgcgtccgccagcgacc

SEQ ID NO: 44601 - DNA, 558 bp, Homo sapiens
  chr7:108097135-108097693
  hyper
acctccgtcagcctgcgagcgcgtgtggcggcgggggtgggggtgcggggacggagggcgggagtgttccggggctaggatggctgggatttagctacaaaagatgttccagaaaatgggtagtttttgaatgccactctcatgggtttagctttctgtgggaggtctgtggtcttctagttttttcttttttaaaaagcactttcttcgaaattcatcagttggggtggttgagattgggtgagtggttttgggggttttgttttgtttttgcaaccgttctttccaaacactccccgccgccccccaccaccgcagaaaaaagagcttttagcataaggcggatgctatctatccgcggtagaaactgggtcttctggtcccaaggaatagggttagttcggatttgcttatttacaaatgggggagtattatggagattttttttttttttttttggcaatgtaaatcgagaattaagattttccaactgtatagtatttgagtaaacacactgcttgctgcatagttcaggctccgaagcgcacgtctccactc

SEQ ID NO: 44602 - DNA, 30 bp, Homo sapiens
  chr7:108166530-108166560
  hyper
acgtccactccaaccggcctgcatcagctg

SEQ ID NO: 44603 - DNA, 30 bp, Homo sapiens
  chr7:108210046-108210076
  hyper
cgacggatgcagggcggccctcctcactga

SEQ ID NO: 44604 - DNA, 46 bp, Homo sapiens
  chr7:111202651-111202697
  hyper
ccgcccgcccaggtcgggctcaaaatgcggcgtggatctgaaagga

SEQ ID NO: 44605 - DNA, 30 bp, Homo sapiens
  chr7:112090479-112090509
  hyper
attgctacttaaggcgtcgtggcctcccct

SEQ ID NO: 44606 - DNA, 30 bp, Homo sapiens; identical to SEQ ID NO: 5803
  chr7:112149590-112149620
  hyper

SEQ ID NO: 44607 - DNA, 20 bp, Homo sapiens
  chr7:112429891-112429911
  hyper
aacagcaatttctctccctt

SEQ ID NO: 44608 - DNA, 181 bp, Homo sapiens
  chr7:112430003-112430184
  hyper
cgcccagttgagggggaacccttgcgaaatacggagaggcgctcccacaccctccaatctccaaccaccactgtcaactcctccagaggcaggtatcctaccccggccctgggaggccgactgggcggagcttggggtccggaccacgcggagccctggcagtgtctatgcctagatctcg

SEQ ID NO: 44609 - DNA, 141 bp, Homo sapiens
  chr7:112430224-112430365
  hyper
cgtcgccaccaacgcgctctcccaaccctcggagtcagttccaaaaccaaaccaaaaaggaggagagcagacaaggcttcagcctgcgactgagaacagggaggcggcacgccttggggaacgagggcccgaggccatacg

SEQ ID NO: 44610 - DNA, 45 bp, Homo sapiens
  chr7:112430590-112430635
  hyper
gcctgccttcctcaagccaaagtcgactcctgggacctggaatca

SEQ ID NO: 44611 - DNA, 374 bp, Homo sapiens
  chr7:112726513-112726887
  hyper
actgagcatccaggcagggctcggcggcgcctgcgcgctggagcctccttgagctccagccgcgtcctcccctgtcgcagcggcaccgtctcccccagtaacgcaggggccgcggcggcggcggctgcggtggcgagggcggcggcggggctgcttcagcctctgtggaaccagcaggaacccctacctgactccagagctggctgggtttattgactgccctgtccaatccaactggcagcattaagcttttgtcccttcgtggctgcttctgaacttttccctccccgcatttgtagtggggggctggaaaggccctttcaggacctcaggcccatcctcttcccaaaggcagcgcacgaggaagtcacagt

SEQ ID NO: 44612 - DNA, 593 bp, Homo sapiens; identical to SEQ ID NO: 5807
  chr7:113722690-113723283
  hyper

SEQ ID NO: 44613 - DNA, 418 bp, Homo sapiens
  chr7:113723338-113723756
  hyper
cgagttcaaggaattgcaaataaatatattttatgaccacccatcaacaaactacgtgccaccgtggcggcccctggtagccgggccgtgtctgcagtgtggccaggggcgggggctgaaaaggaggcggccggagaggcgaagcgagctgcgagccccgggcctgaactttcacctctcgaacccgggcccagcccattggctgcagccgaggggtccaccgagggcagcggctcctgacaggacctgttttcccaactccctggacagcttccctgcgggatgggttggtggcccggggcatggcagcaggcgaggaggagataatgggggcgaagttgagcgggggcacttgggagctgcgggctcagtttcactgagaaaaaggccccggaagggtacgcgtccactctataaa

SEQ ID NO: 44614 - DNA, 30 bp, Homo sapiens
  chr7:113723980-113724010
  hyper
tcccgctcacttactcggtacacctggaga

SEQ ID NO: 44615 - DNA, 1700 bp, Homo sapiens
  chr7:113724594-113726294
  hyper
cggtgtgtttaccgacgtgggtgccagggctgcttcctccctgggagagccgcgggttctgaaggaaagggttggtgccaagtgtgtgtgtgagctcgcgactgccctttagagaaagggcgcgctgctctttcaggaaaggaaagattcaaaggcacaagttagtgcggttcgcccgtctccccaaccaccaccacccctccctcttctgccaccggaggggttcaagttggccgttctttccccagggaggagggccgggaagcagccgggggccaggctctgttcaccacggcctattggccgcagctatttggaggaaagtttcagcgcctctcggaacgccacgctttgcgactgacttgcgagcaaagcagcgggctcagtctgcggcgcgcggaaaaggcggccggcgaagagtcgcccggcccgcgggcaggggagggaccggagggagacggcggggagggagcgctggcccccctctgggctggggctccggaggaagcccctcgccaagattccggtcgtgcgtcccctccggggcccgctctctcctccctcggcctttcccctgtcaccgccctgggtcccaagcaggccgcccagccgggtcacacccggtggatagaagccgggacccagggctggcggctgggcccgtgcatcccccacgcgggcgcctcggctttgaagtgcgcgcggagcaggctctgaccgtttcttctttcctttctttccggttacttttgctcccctcagtcactgataggacccttcccgaaaacctcagactctctaagtcccagcttggcggccccttccttccaagccgcgccccggtgacctgggctgcgcgaccacgaggaagcccgagaactccttggcccaagtgagacaggaaccagggcaacaatgaagagaaagacactcggcctctctccaccccaggccgcagaggcgcacaccgtgaaaagaaaggccaatcagcgctttaacgcacgctcgggtctccctttccgactaccatgtacttttaactccctgccaccgagggctttggatcccttcgaggctttctgcacttcaagtggaatcccctgtttcatttgccagcagctccgtctgctgagaggacgtactttggggactgccaagaagcagcagacacaactcggctttgccaatacagcatacggttttgttctcgcctccctccccacccccttccctgactcgccgtctggggcgagctggagaaggcggagcaggaggtggggagaagggtgggggtgggggaaggtctggcgtagcacaaacaagttctccagcgggttgtttacatagcaggtggacctgacgtcagccaggaggctccgctgcaaatccgaacaatattcttccccgcgtttccccctccttaaagaagttagggaacggggggagataggtggacgggggagaaaggcatcctaaccagctggttccaaacctatcaacaacaacaacgacaataacaacgcaaagtaaaacaaaacaaacaagtggtccggcggtacttcagaatcctctgcggcgtcctgtcccccaccccgcccctccgaggagaggcagccccgcgagcagtgtgtgtacagttcgcattgccaacaacacgcgcgcgcggccgggtgcgcgcgcctgccagcgcacattcacac

SEQ ID NO: 44616 - DNA, 1257 bp, Homo sapiens
  chr7:113726353-113727610
  hyper
gcggctgcgcgagacagcgcgagcctccgagaaagcgcgagacacgccggcgcgtgcagctccgcggccgccgcttcgccctagctctagccccgcgccacccgcagcccgcccgcgaacgcccgccccggttatttatgcggcggccgcgtccgctggctgcggcttcctcggccccccccctccccgggcgcgccccccactcgcggcagcagctgcccggactcgcgcgtgggtgtgttgtttgggggcttctgcctcgccgccgcgggtgccacctcccgggacgctgcccacggcgtccccggtcgcggtaagtttcttggccctcactctggcgcgctacacctccgcaccccaccctgtcccagccacctccacgctgggccgagctgcgactttactctgctccgcgctcctcccgcggtggcgacaaagtttcgccccaaaggcagcgccctgcttgccggggcgagtgtgacatgtgtcaaatttgggctcggcgttggggtcgcattccggacccagcatcaccacttgttgttctctttcattttgctttgtgatgggggaaaaaggggtggagaggggagatttgctgttggctcacggatgatttttagtttggataatgcaaaatgttgcttcgtccggagagacctcggctggaggagaatgtgtgtcgaaacaccagatgtgtgtttgtttactctcttctttttaattgtttgttgtcttttccccttcctccccgcacccccacccccaacctcgggaggagaaacaacagtaaaaacatctggcggttagaagcacacactttattgatccaactgctgacctttatttactcagttgggcaagtgcacgcttctcgcgtctaagttgggcacttcagcgttcatctcagaagtacttctccaggaaggagagagatggaaaggggacactcctgtttctggagtcaagaaactcctgggccctactgacgcttcgggataaccgtgcacagggatgactgctgccttgatcgcgttcctttccctgtccacgcgttagcacgaccggcttcccccggtgtctggcctggttttacttttattccgctttagagaggtcgcctggctgtttgtgggtgggtttggggtgaaatcgcacctcgcggcacttggtgaggggacgtgggaggagcgcagacacctttcggtgatagggagggcttctcacttggctgttacctggaagtccacagtggcc

SEQ ID NO: 44617 - DNA, 3 bp, Homo sapiens
  chr7:113727622-113727625
  hyper
cgg

SEQ ID NO: 44618 - DNA, 62 bp, Homo sapiens; identical to SEQ ID NO: 5813
  chr7:113727753-113727815
  hyper

SEQ ID NO: 44619 - DNA, 41 bp, Homo sapiens; identical to SEQ ID NO: 5814
  chr7:114562235-114562276
  hyper

SEQ ID NO: 44620 - DNA, 1055 bp, Homo sapiens; identical to SEQ ID NO: 5815
  chr7:114562326-114563381
  hyper

SEQ ID NO: 44621 - DNA, 30 bp, Homo sapiens; identical to SEQ ID NO: 5816
  chr7:115117409-115117439
  hyper

SEQ ID NO: 44622 - DNA, 42 bp, Homo sapiens; identical to SEQ ID NO: 5817
  chr7:115850423-115850465
  hyper

SEQ ID NO: 44623 - DNA, 30 bp, Homo sapiens
  chr7:115850740-115850770
  hyper
ggacccataggacgcgttaacatggacctg

SEQ ID NO: 44624 - DNA, 30 bp, Homo sapiens; identical to SEQ ID NO: 5818
  chr7:115851035-115851065
  hyper

SEQ ID NO: 44625 - DNA, 30 bp, Homo sapiens
  chr7:115851444-115851474
  hyper
gcggttgtcaccagcgtctcagcgcaggga

SEQ ID NO: 44626 - DNA, 30 bp, Homo sapiens; identical to SEQ ID NO: 5819
  chr7:116140113-116140143
  hyper

SEQ ID NO: 44627 - DNA, 164 bp, Homo sapiens
  chr7:116164618-116164782
  hyper
gaggtgggaagggacggcttaggacagggcaggattgtggattgtttctgccgccttggttgcccatactgggcatctctgcaggcgcgtcggctccctccacccctgctgagatgatgcactgcgaaaacattcgctctccccgggacgcctctcggtggttc

SEQ ID NO: 44628 - DNA, 425 bp, Homo sapiens
  chr7:116166324-116166749
  hyper
gggggaggcaggcgcgccctgcagagtacagaggggtgtggtgtcctctgcgagatcctcttaaaaagctggctacgcgcaggcggtttctgtgcacggagccgtagctgtcggagcggttagttcgatttcgagctcgaggtttcccccgccgccaggctgacttctcatcgcttgtttttctttttgcatttttcctcccaccgccgttgccgccctccccgtcctggccgtccgccctccgccctctgcagggacatctctacaccgttcccatccgggaacagggcaacatctacaagcccaacaacaaggccatggcagacgagctgagcgagaagcaagtgtacgacgcgcacaccaaggagatcgacctggtcaaccgcgaccctaaacacctcaacgatgacgtggtcaaggtaagc

SEQ ID NO: 44629 - DNA, 30 bp, Homo sapiens
  chr7:116311758-116311788
  hyper
tccacttctacctccgcctctaacaatgaa

SEQ ID NO: 44630 - DNA, 30 bp, Homo sapiens
  chr7:116502764-116502794
  hyper
gcccggagtctggtcgcgggggaagggcat

SEQ ID NO: 44631 - DNA, 188 bp, Homo sapiens; identical to SEQ ID NO: 5822
  chr7:116592939-116593127
  hyper

SEQ ID NO: 44632 - DNA, 30 bp, Homo sapiens
  chr7:116593338-116593368
  hyper
gggggcaggggccacgtgatcgctccacga

SEQ ID NO: 44633 - DNA, 30 bp, Homo sapiens
  chr7:116594406-116594436
  hyper
accaaatggattgtcgaagggaccggaggg

SEQ ID NO: 44634 - DNA, 30 bp, Homo sapiens
  chr7:116962611-116962641
  hyper
cacacacacacacacgtctgtgctagagct

SEQ ID NO: 44635 - DNA, 293 bp, Homo sapiens; identical to SEQ ID NO: 5823
  chr7:116962853-116963146
  hyper

SEQ ID NO: 44636 - DNA, 244 bp, Homo sapiens
  chr7:116963330-116963574
  hyper
cgtccgctctgctcccctccgggcgcagccgagggagggggtgctgcgcctggcgggggtggggagaaacgcggggttttagacacgggtgcatgaaatgatggcaagagatgtctggggatgaggtgaggcggggaagggggaacatcgctgcatggttacgagcacacgcgaatacaggaacctttagggaagctccaggccaaagagcatccgtgggctctcggagcgtgcgttccggatt

SEQ ID NO: 44637 - DNA, 240 bp, Homo sapiens
  chr7:116963787-116964027
  hyper
gggccaggcctctgcgaaatgacctgttggctttgattccttggtgctgggcttaaatacagagcccatagggaggggaacttggagggtccatgaccctcgggacctaacccagcagtatctgccaaagcacccaggaaagatgcagtttttacgcacacccagctcctctccggagctgcggagcgcaaaagatcacatagagaggaaccgaggcagccaggcgttcgccgggggtgt

SEQ ID NO: 44638 - DNA, 30 bp, Homo sapiens; identical to SEQ ID NO: 5825
  chr7:116964457-116964487
  hyper

SEQ ID NO: 44639 - DNA, 19 bp, Homo sapiens
  chr7:116964798-116964817
  hyper
cgccggccatggggagggt

SEQ ID NO: 44640 - DNA, 792 bp, Homo sapiens; identical to SEQ ID NO: 5827
  chr7:117119486-117120278
  hyper

SEQ ID NO: 44641 - DNA, 30 bp, Homo sapiens; identical to SEQ ID NO: 5828
  chr7:117512788-117512818
  hyper

SEQ ID NO: 44642 - DNA, 30 bp, Homo sapiens
  chr7:117513086-117513116
  hyper
gtgggcataggggtcgcactggacgcagac

SEQ ID NO: 44643 - DNA, 30 bp, Homo sapiens
  chr7:117514002-117514032
  hyper
ttaaatttcattgccgccagggtgttttta

SEQ ID NO: 44644 - DNA, 986 bp, Homo sapiens; identical to SEQ ID NO: 5829
  chr7:119912398-119913384
  hyper

SEQ ID NO: 44645 - DNA, 487 bp, Homo sapiens
  chr7:119913416-119913903
  hyper
cgtgccggccccggccccggccccaccgcgccaacgccgcccgcccggccgccccgcagccccgccgccccgcagccccgcaccgcgctggccaggctcccgcgacagtggccccgcagtaagttggcaggagcgagtcccctccgttctcgcctcccccgcaccttttgaacttgttgctgctgctctgctcgcctgcgcctggcttttggaaggtgaaaaggaggagggaggcacggagggatgggggaagggaaagaagagctcgcttgagctttatttatgctctctcggcgcatcggattcggctgctcgcgagctgctttctctcctcttccctttccgggtgcacggcgaggagaaagtctctatgcaactaagccccggcgcgcacttggccaggtatgtaccgcgggagcggcgcgttctgcgcggaagcagatgctgctgccgccacggcggcggcggctgccagctcctgagctct

SEQ ID NO: 44646 - DNA, 588 bp, Homo sapiens
  chr7:120496862-120497450
  hyper
ctcccaagggcaaaacggcagcgatctgcagggggcgggggagagagaacacgggacatctcaccatcacgcttcccacagcctgcccgtccctcctccacccgccctcagcagggtccagagggtcccgaggcccagtgcattcgagacatcgcctcatcaaaaatcatttgttaaaatcataatggtaactaaactcccaaaagttccaaaccggcttcagataacacctgctgggaaaagaaaagagcaactatccggatgaatgaagtcgcacagtaaactcgcgttctcaggggacacgcggcggagccctgtgcattctgatgagacgctcttgaaaacctccctcactccacgcccctcctcgaggacagctgtgctcggcactgtcctgaaggtgagaaaccacactgccccctaccccggacacgtcagaggcgccaccggcaagcccgagagaatgagcgcccttctagttaggacagttcctgggcactccaactccgcacccctctaccccgtcccgcagctcgggtgtgaatgcaagggactggggcggcggggcgggggcgggggcgggggcga

SEQ ID NO: 44647 - DNA, 120 bp, Homo sapiens
  chr7:120497835-120497955
  hyper
cagcgggcaggaaaggcgacagacgcgtggccacttaccgtcggcgctgggcccggtgccccacgcccgcctggggatagtcggggacgcacggcgggggctcatcggggcagggaactt

SEQ ID NO: 44648 - DNA, 205 bp, Homo sapiens
  chr7:120498179-120498384
  hyper
ctgcacaaactctcagcgcatgctcgagccgctggctgccggggttgggtcctagtgggtgtttcttgtccctctcacccagcgagagtccccaaagggacgcttcacctctgcaggatagggtccagaagataatgcctaggaacttgggagaagtccgtgcagtaaatccctttaaaatggtggcgtcgaaggaatggaggct

SEQ ID NO: 44649 - DNA, 30 bp, Homo sapiens
  chr7:120590932-120590962
  hyper
tcagctctaagggccgcgatgttgtaccta

SEQ ID NO: 44650 - DNA, 31 bp, Homo sapiens
  chr7:120628097-120628128
  hyper
ttgcactattagcagcgtccacccgaaggtc

SEQ ID NO: 44651 - DNA, 533 bp, Homo sapiens
  chr7:120628557-120629090
  hyper
tcagacatcagatacgtttctaaattctgcagctctgggtgggcagcctcatttggggaaatgctagctgctgtttccaaagtggggaagcccacggtttcggacacagggctgacagcgctgctccagcagcccccagggccagaggaacccggccttagctccgccccgctctgcccggccccgggtggctgcgatgccgaggtcctctgctcccgccgggcgtgcagcgggcgcgcgcgcgtgtgtttatgtgtctgtgtgcgtgtgtgtgtgtgtctctctctgtgtgtgtgtgagatgaattggagtcatacgactgggtgtttccttccgagtggttttcatcagcaatccattaggaaatcatggaaactttttttttcctggctaaaaggatgaaaactgagtaagtacatagaactttgaacttgagacggaatgaaacaaattcaagcaaaaaccctgacagtaaccatgtccattcaaattgcgtatgccctttttatgttaaaagccgtgaatacttacag

SEQ ID NO: 44652 - DNA, 1191 bp, Homo sapiens
  chr7:120969511-120970702
  hyper
actgaggctgggggagaagggcggggacccttagacgagtgacctaatttttcggaaaacatctggaattggggagcggcttaacgctacgggcggccgtgtcttacaggtggttgggcattgcctccttcggggttccagagaagctgggctgcgccaatttgccgctgaacagccgccagaaggagctgtgcaagaggaaaccgtacctgctgccgagcatccgagagggcgcccggctgggcattcaggagtgcgggagccagttcagacacgagagatggaactgcatgatcaccgccgccgccactaccgccccgatgggcgccagccccctctttggctacgagctgagcagcggtgagtcctgggtccttaggggttggtgggggacggaaggcgacaactcctccaccggttcctgcaaataaagtaaatagtgctacgtggtcctgtagctctctaagttccagaagaagccctttagtgcacggggattgagagctacaaaggccagacctggggagcaggtgcgagcctggagggaggtgactccccagttccagagcggagctctaggggctggagctcttcctctttcctgcggtgccccgccagagttggaaaaaaaactctaattctcctaccccgccgaccccctcggaccccgtagcgcccccctacgtgggtgaccagctggagaaacatgatgtcggcagcggggaatgcggctgccgcatctgctttgatttaaccaactccgctgcgcaccaaaccccggacaagtggctaattgcagcgaagccccacctttattggctcctaggagcaccgagttgacagaataatggtgacttttaaagcgactgtccgcgaccacccaacgtgcggctaacctgagcaggaccacttgtgcgcttctcgtttctttggcttttctatctttccctcctcggcgcactcccgcggcgcgggaagctgcaggaaaacaaagttccacttccacgtgcgtagtgacttggtaaggataaaggtacagggagccaggattgttcctggaatatcaacagatccaaagaatgttaggactggggcgctgaaggatgcgctgtcgtttttcatgttcatttccgttccccctccgcctttgacccttgtccacgcagtccctgcgcgcacccccgccgagcc

SEQ ID NO: 44653 - DNA, 48 bp, Homo sapiens; identical to SEQ ID NO: 5836
  chr7:120970733-120970781
  hyper

SEQ ID NO: 44654 - DNA, 30 bp, Homo sapiens
  chr7:121036714-121036744
  hyper
ccatcctagagatgcgccagttaggtcatc

SEQ ID NO: 44655 - DNA, 567 bp, Homo sapiens
  chr7:121512766-121513333
  hyper
ccaggcgcccccaccgcattctgattggacccacttaagcatctgcagaaaacaataaaatgaaaaaaactcttagaggtgaaactcaaaggtcaacctctggctgtgcgggacaatgggtgtccggccttcccttcccttcccttccgaagtgatgaaggagttccaatgttctgcgaacactggaaaccccagcggatccctctaactccagggcagcgaaaccactggcagcggacagagggaggattgtcggtgtgtgaattgctaccctgggatccggacccagagcggcagccgcgcccctccgccccccgcgcgaccccgggtccgaggcacgctcccagcggagcggtcctgcgcccccgccccctccaggagccgcggcgcgcacagccgggctggagcgcgcacccggcactgaggcttcgctgctctcggagcgctcagaccgcggccgccgcagccggcgaaagaggcaaagtcccgcacgccggaggacatgcgcctcggctagcggccccgggccccaccaccgtgcggctttctccagattattcctctctc

SEQ ID NO: 44656 - DNA, 567 bp, Homo sapiens
  chr7:121513392-121513959
  hyper
cacacacacacaaacacacatacgcacgcacgatctcacttcgatctatacactggaggattaaaacaaacaaacaaaaaaaacatttccttcgctccccctccctctccactctgagaagcagaggagccgcacggcgaggggccgcagaccgtctggaaatgcgaatcctaaagcgtttcctcgcttgcattcagctcctctgtgtttgccgcctgggtgagtgagaagagctcggtggggtttcagctccgggatcggtgggatgagggtgggagcatttcagcgtgtccgcgacttgccgccgccgccgccatctagccaggaggaaaaagggacagccaactgggctcccacggagcgggcggccgcgcggtgcaggcagctgcgtgggatttgcgcgccccctccccgccccgcgccctcgccccttccatcggcccgcgggcattcgtgccccgggccccaggagacggagctactggagacggagggctactcggatccctgccgccaccgttcttctctcctcttttgcaaagtgtagaaatcgccttttagatatac

SEQ ID NO: 44657 - DNA, 30 bp, Homo sapiens
  chr7:121514473-121514503
  hyper
ttcatgattttccatcgcgatagaatataa

SEQ ID NO: 44658 - DNA, 30 bp, Homo sapiens
  chr7:121783362-121783392
  hyper
ctctcgcgctcgagcgctctttctctctct

SEQ ID NO: 44659 - DNA, 199 bp, Homo sapiens; identical to SEQ ID NO: 5840
  chr7:121863465-121863664
  hyper

SEQ ID NO: 44660 - DNA, 179 bp, Homo sapiens; identical to SEQ ID NO: 5841
  chr7:121940065-121940244
  hyper

SEQ ID NO: 44661 - DNA, 157 bp, Homo sapiens; identical to SEQ ID NO: 5842
  chr7:121940433-121940590
  hyper

SEQ ID NO: 44662 - DNA, 255 bp, Homo sapiens
  chr7:121940797-121941052
  hyper
agaaacaccagagcccgagctcacagcggagccgctgattaacacttgaagcatttcaaggacctggcacccgccacagtttggttttcatccatgtttcctccttgaatggaagtatattcgtctataaacatacatacacatgtaaaaacacggaggctccgtttgccagctgtgtacaagtcagtatgtgccgtcaggatgcaaacaatagatacctgtctatctatgattgtaatgcgtttgaggagatgt

SEQ ID NO: 44663 - DNA, 439 bp, Homo sapiens
  chr7:121941875-121942314
  hyper
ttagcaggtgcatgcaagaggcgaaaggccaggggatgcagaggcttctggtcggccctgaagtgtggggcccaacatgccctggggtctgcagacgaactcggaccaggagctctagtctgccgctgcctcagcgtgggggcacggctgaggctgggaggacccttagcctcgatcactggtggccctggtggagcccgggctgcaggggccccggggttggcagcggcggctgcagaggaggcagcgtcatcggcggctgctgcggtagcgggggcggcggttcagtgcctggttcgccagctggcgtgcgggccagccccaggctgctgtcgtgcagcttgcggacatgcttcttgaggtcaaagttcctgcagaaacccttgccgcacgtggggcaggtgaaaggcttcttgtcgttgtgggtgtgcatgtggaa

SEQ ID NO: 44664 - DNA, 250 bp, Homo sapiens
  chr7:121943738-121943988
  hyper
gcctcggctgaaatccgaggttttgaacgcgattttttccgacagaagctgggcgctttctttcatgtaatgctgcagctgagcctgggacaggtctttgaaagctactccagaagggtatttctccaccgccgggaccaccagtttattcctttcggctaaatacgtttttggctgcgggtgcaaaggggaactgaggaagtaggaggccaccgggtggatgttcacgccggctgccgggtggcatggg

SEQ ID NO: 44665 - DNA, 288 bp, Homo sapiens; identical to SEQ ID NO: 5846
  chr7:121944176-121944464
  hyper

SEQ ID NO: 44666 - DNA, 30 bp, Homo sapiens
  chr7:121944887-121944917
  hyper
tgagtgaggttccccgcccagaaaaggcgg

SEQ ID NO: 44667 - DNA, 1177 bp, Homo sapiens
  chr7:121945133-121946310
  hyper
gctaaataaggaaacggagtctaattcaggggcaaacgccaggctatatttatcaaacgccaagctccagaaagcctcggctaggaagcctcggcagtgaaatccgaggtttcgctgcttggttccactgggcctgggtgggccgggctgggccgggctgggccgggtcagatctgtgccacctccgcagacctatttcttcctccagggctcggggttgcccgctcccggaatcccggagtctccgcggcccgaaccgagtctggaccatttagaagacgccggcaggtaactggcctccccaaacgccccgaaaattaaaagccttaggaggcttgttctgtgtttgtggttttgtaaaggcaatgcccgcggcaataggcctgggaaagtcgcactttcatccacaaagttgaggagttgcaaggaataattgggtgtcacaccacaagcaaccttgactcgatcggaccccacccaggatacacacagacgcgcgcgcgcgcacgcttccgagtttccattgagagtctggaaagagcatttctttcttaagtacctgcgctcagctagagctctcccggagcattttaaatactgaatgccgagcggagaagggaaacagagtgtattaatccccactccggttgccggtgtctgcaagcctcctctaagcagcgcaggcggcagcctggatgtctgtgcgcatcaaggagacttgccggcgccagagttgtgtccacaggtgcacttgtgcctcccaaagagcgcgcgtagagaccatttcccctgcaacgccccccagccgaacacccgccgggtgtggcacctcggccgaaactcctggggcggcgcggtggagcgtgtggaggtttccgggaagacgcctacggctgcggctccgactgtgcgggctcccgccgcccaggcaagagcgtccaggagcgcgctggaagctgcggcgcgcaccttccccggcgcagtctcttgccagccggcgatcacgcagagctgaaccccgcagctaggcgcgcaggaagggctgcacagagtttgaagacacggcagctgtaagctggcgtgaggaggccaaaggagcgcgcagagctgcaagcaaagggcggtggggcctggaccctgaagtgagtggccgaccgcagcagctcaaggtgccatc

SEQ ID NO: 44668 - DNA, 40 bp, Homo sapiens
  chr7:121946564-121946604
  hyper
gccaggcaagctacccgggtccctccgccccactctaact

SEQ ID NO: 44669 - DNA, 127 bp, Homo sapiens
  chr7:121946855-121946982
  hyper
cctcgtttcaggcctcgaggtggcttcaggctgggacaactgatgcagcagagaagggcagagcgcccggggggagaaagcaaagaggcgctacactccaaggcggccctttggaaccgtccttggc

SEQ ID NO: 44670 - DNA, 342 bp, Homo sapiens; identical to SEQ ID NO: 5850
  chr7:121947097-121947439
  hyper

SEQ ID NO: 44671 - DNA, 256 bp, Homo sapiens
  chr7:121950008-121950264
  hyper
aaccatattcaagacacggttcgactgtttccttgacactacccacgaagtttaaagcattttttatgttattttcaaactttcttaagtgatcccatgaaataaaagtcgataatagaaattaaaacaacacagagcaaagaacgagcttagtgaaatggagaagcagtagaggtaaataaaaatcctcgagctagaaagctctaagaaccgcttataaattcagttacctcctgaactccggccgatggccact

SEQ ID NO: 44672 - DNA, 124 bp, Homo sapiens; identical to SEQ ID NO: 5852
  chr7:121950428-121950552
  hyper

SEQ ID NO: 44673 - DNA, 76 bp, Homo sapiens; identical to SEQ ID NO: 5853
  chr7:121950994-121951070
  hyper

SEQ ID NO: 44674 - DNA, 153 bp, Homo sapiens; identical to SEQ ID NO: 5854
  chr7:121951857-121952010
  hyper

SEQ ID NO: 44675 - DNA, 133 bp, Homo sapiens
  chr7:121952043-121952176
  hyper
cgagggtgggaagggaagttgaggtctggggtaaaaagccggaaaaagaaaggaacaaggctgagaatcattcaaagattaaatggggtcggctcccgttgcttgcgaagacggatgaggagggagagagttg

SEQ ID NO: 44676 - DNA, 214 bp, Homo sapiens
  chr7:121955701-121955915
  hyper
acctcccttcccaaccgcagccacaggggctgctgttagcgatgctggccctttctgagaccagagttcccttgcccctccccgtctcctcctctcctcccatcgggctggccatatatataaccggagaactggacaattctagcaagttcacagacacgccaggggctaggctgaagatcctcagagctgcgtgtgatccaaaaggaccctg

SEQ ID NO: 44677 - DNA, 278 bp, Homo sapiens
  chr7:121956303-121956581
  hyper
cacatgctcgcactccggtgactactccctgaaagccaatgagcggttgaccctctggtgacatctggaacccaggttcagagtttcgctctcgcctctactcccttaatattttactcaatgtcacagaggagaacagcttaaggcagccctgctccccatcttcaatccgaagctggggtatcccagagaaagtctcgctctgagctcctgctggggcacctgcccagccatgcccctcgagggcgtcgctgctctcaacccctctccgctactgc

SEQ ID NO: 44678 - DNA, 122 bp, Homo sapiens
  chr7:121956954-121957076
  hyper
cgcgaacatctctccggaacatcgatctatcacctccctttaaggacccggaccgggaaatttccattttctgttttgggaataagaaataaaagcgaccaagctcttgccctaatttcccc

SEQ ID NO: 44679 - DNA, 98 bp, Homo sapiens
  chr7:121957253-121957351
  hyper
cggctgagtgacctctttccctctcaagcacaccttcaaggagccggtggaccctctcaccgccggtagctgcaggctgagggcggcgccaggccagg

SEQ ID NO: 44680 - DNA, 1226 bp, Homo sapiens
  chr7:122525927-122527153
  hyper
cctcagagactaacaaaaatacggtgtcctgcgtttcgcagaaggacgggaggcgtcccagagctctcccgggagaaaaacccagggagaagtggtggtaggaggcgcccggtcccgcaactcaccttctgctgcctccgggccatgtcggtgggctgcttggcgttgaaggggtacgcgatgcacctcacgacgaagacgtagagctgcaggcggatcctccgctcctgctcatcgtccagctgccgctggggctcgtctcgcccctcgctgagcacagaggggctcgggctcacagatctggccgcgccgccgccgcccgcgcgccccggcgcgtcccgccgcccttcccgagtcggggctggaggagctcgctgcgagctgccggctgccaccagcacatcgcggctttcctcttccagcccctcgtccgactcctcttcgctggaagacgggtccagcatggtgctcggggatccccgccgctcggcccgcggtccccaagcgcctcacccccggcggctgcgcccgcgggtctgagggagccgcggggctggctgcagcggccgcagaacgaaaggaaaactggccagggctttccggacacgtcgagttagattcaggagtgtttcctaccaccagggcgaaaggggcgggcaggagccgggaggaggattgggaggggggagagggggagccgccgggactgaataggcggagttagcgttgggggtgagcttgggcgcctcaggaattgctccgccagccccgggcgcgccgacccagcggttccccagagcccgccggcagaggcggagccgcccgagcgcccggacgcaggtggggaacctgtggcgcctacaacaagcaacacgtggaattgaatgttgaagagccgcgcggggccgcggagtgcgcgtgcgcgcgccgccgctgctgcccgggcccgcctggagccctagcacacagtttgcaaaggcggggagcggccgagcgcgatggcccgtgtaagcgtccaccggggctgctccgactaccctcaccctaccacctgtgatcttttctccagcaggtggaggtggaatggggagcggggagggactgttccctagcaagaggttagggggagcggccgagacatctccccaacccgaatcggctgcctaggattgaaccccagcgcggaaaagcgggactggagcccttcaccacgaagtatctttgcg

SEQ ID NO: 44681 - DNA, 117 bp, Homo sapiens
  chr7:122527422-122527539
  hyper
tttgagcgccctcccggtgtccagcactgttagccttttgcggagcccgcggtgactaaggcacatgacactcagtcgctggtggttctggcctcaagtcggcgtcttgtagctgcg

SEQ ID NO: 44682 - DNA, 30 bp, Homo sapiens; identical to SEQ ID NO: 5861
  chr7:122844521-122844551
  hyper

SEQ ID NO: 44683 - DNA, 30 bp, Homo sapiens; identical to SEQ ID NO: 5862
  chr7:123173180-123173210
  hyper

SEQ ID NO: 44684 - DNA, 158 bp, Homo sapiens
  chr7:123174505-123174663
  hyper
cgtcggaccaggaggccgcagtcaaaatctgttctcctacctgtgtacgaaaccaaactattctcgtcgaagtgctttcccaggctcctaagacgcagcttccatactcgccgcgttctcagctgttggtcgtatcctagcaacggccctggcaccac

SEQ ID NO: 44685 - DNA, 30 bp, Homo sapiens
  chr7:123388385-123388415
  hyper
accagcagcaagggcgcgggccgaggcccg

SEQ ID NO: 44686 - DNA, 30 bp, Homo sapiens
  chr7:123389154-123389184
  hyper
ggcgcgggggagcgcgccggaaacgcgcgg

SEQ ID NO: 44687 - DNA, 1588 bp, Homo sapiens; identical to SEQ ID NO: 5864
  chr7:123672010-123673598
  hyper

SEQ ID NO: 44688 - DNA, 189 bp, Homo sapiens
  chr7:124404308-124404497
  hyper
gtgctgtttccccggcggggacccccaggctcatggattccttcacccaaggatccattctgggccagcgcccggcccgggagtgcaattgtccacccttcgtgccccgccagtccattggccgtcttggacaggggcttgtggtgggaaccctggagtttcccggctctccttggccagtaaaaaaga

SEQ ID NO: 44689 - DNA, 627 bp, Homo sapiens
  chr7:124404543-124405170
  hyper
cggaaatgccagcgcctctgggacccttctcttcctcctctgagatctgaaggaagagctggagggccgtggggttccctctccccaaagtttcagaaggctcctgaccccgagcacctttccacctccaggggccaggtggcctggttggaggtcccgggggtccggctgccgacgcctccgcccctctgcctgcagccgggtcacggcccggggccgccggcaggtcccaggagggtcccgcaagaaacgctgccccctgctcctccctgggtgctcgggctcgcagaacgtctcttgcagaatttcccggtccccaggcgtccctgccgcggcgctggatcactgtaggtgcacagctctcccccagacaagtttcgtttctggacgcaggggcgaccccgagggcagaagaggcagacaccttgagcagtagcagaagcagtagccgcgacatgcgggcgagaagcgcgcccggggctcgcatggcttggtgagggcacacccggcagccgcagctcctgcttagttaggatcgacacctgctgccgaagttgctgctgagagttaggcacatgtcacatactcacccccgcccgggtagcggggaaccggagattagggtga

SEQ ID NO: 44690 - DNA, 725 bp, Homo sapiens; identical to SEQ ID NO: 5866
  chr7:124405509-124406234
  hyper

SEQ ID NO: 44691 - DNA, 3130 bp, Homo sapiens
  chr7:126891134-126894264
  hyper
ggcaaataaggcactccctcccggggtgggacttgcttaggggacttaagggtttctgcaaccggcgagggggtctgttttcacccccgctatcttgggtgcgcagacactctctgacaccaggcttcacagtttgggccacgggggaagtaattccccagggaaccgcgggggtgcggttttgcgcaactgggtgactcgcgtgtccctccgcatttcatttgcaccaagggagcgcgtgtcagacgaagggaatttttttttcttttttggtgattctgttattttttcaccaactgtacgaagctcaagggatatccgagctttctggctgggcggatgggcttcgcgcttggcatggctgagcggtccatctctacctctccgtttctatctctaccataacagcgaccactcagcccgccaggagcccctgtttcccagcgcaggttcctttttcttctcagttccttgggctgttgaagccgggttctgggtagatagagactggggccgtggggagagcgccaggctgcttttgcctttcccgcgccccggggcattccggcgcgctggggatgcagcctccgcccccgccgcacctggccgcccgagcgcccgcgcccacgccccgcgcggggccgcccgaaactggggccgcgccagccgcgggagctaccgaggagctgttggggtgcgtttgcctttgctttttaaacaagatccccgagaccttttctccatccccccaacccccagcaggacacggaactccggcgtttctcgaaagccacaaaagaggggcacggaaatcccaagctcgccgtgctaactcggagaacgcaaactcgaggcagagcgtgcgccgtgcggggatgtgggtgtcgaggaccccgaagcgcccggcttcccccgcgacccccatcctccctagatcctggttagacatccatccagcccacgctcagagggcgggggttaccccgactcatcccggaagccgctaacttcagaaatccctcctgttaggttcgcgaaacgaaggtacctcgtcatctcggcggggcaagtccggattccaccagggcaggtccgggaggtcacccagggcagacgatccgaggcagagcgctttaaaatcctgccgccgcacgcccagtcagagcgccgagcgcgcctgcccccttcccgtcacccttcagtctcccattcgccgactaaacttttgggggatcacatctccaagccttgggagttccgggtaaagtctccctcttttctgaacctctttactgtaatgtaatcatgggcagacaagaggggtggctgccttgttctttgcaacgtaaaatcaacagacacccaatcaagctccaatgcccggccagcccctcgccccctggtgcccactctccttctccccccattcccgtcacctccgcccgctatttctctcacagactacggacatgcagggccatctacttgtgctcaggaaaaacaaatcactagagtgatatgagaaggaatggtgcacctggctgtccgctgaaaggttttagagaagaaaacggaaaggggaataaaacggggggattctccttttccaacaagcagggcgttttggggaagtttgggggccaggggctttttgtcccgtggttcggcacttgctttcctcggagccgctttctgctgccgggcggcgagtcttaccctgctccccgcagagggcgcggtgaggaagcccgccgggggcccgcagctccatgtcagcgccgccgccgccgccgccgccgccgcgtgaggcgagcacagcggccgcacttgtggctgatctctgggctgagggggctgagctggcctagcaggcgccaagtctcttccatgtgaataacaaatactcccaccggcggccgcgattggtctgcgcccggcgcctcccgatcctccgcccgcggccattcacccggcgcggcgcggggagccgcggccaggatcgcgcccgggatcgccaatcgcttcgcgccaaccagtcacctcgggaagcgggaggaggaacccccgaggggcgggagcctctggatttcggtgtcacccagcggccctggcgcgggcagggagggggaccctcggcccgcggatccccctccgctcttcagcctgaagcgacgaggagaccagaaatgtcaatagttctgatttttaaaaatcatccccccttccccgcccccaagaaaaaggggaggacccaactacagagtgagagggtgggaagaagcgggagcggtagaagaaggaatatggttgtggaggagcccagcggctccggctgcctggcgagcccgggaccggcgcggggaggcgcgacgcccgcccgagcacagcgggcagcacccgcgagcccgggtccccggtgaacacagctccagaaagcgtcaccgagaataacacatggtagatgacaagtgtcccgccacatgctttcttttcgggaatgcttaaagtagagccggcaagccgcgcggttcccttgcaaagtttgcctggcgccgcgcggcggttccgccatttgtcccgccccgcggctctggcgattgtctccccactccccgcccccgagggtctgagggacgcgtgcaacagagtccccagggctcgaggtaccacacagcgcggtccgctgcgggcactgcgcaggaaggggcatgggtggctaccgggacggtcattttattgagatgattcaaggagccgcagacgcggggcaggaaactccgggggagccgtgctcgggttctgcagggaaacctcgggattcccttcgcatgccgcatgcggaaacctgccgggctcgacgtgcacagtccagcgctcctccccactagttactgcccaggccccccgatcctgcacccgccggaatgagagaaagtagcccctcgccgcccagctcccgggtagctgctccggccgggccttgcgttggtgagaaagttccatctagaggcggccgcgcgcaactgcaggcggcgccctaggcccgggcgagccagggagagcggggcgcggggggagagggggcagcccaggagataaggaggatggagaaggacgggagagaccccga

SEQ ID NO: 44692 - DNA, 14 bp, Homo sapiens
  chr7:126987825-126987839
  hyper
cccgtggagacggc

SEQ ID NO: 44693 - DNA, 163 bp, Homo sapiens
  chr7:126988120-126988283
  hyper
ggtccccagggaggaaagacaaagatatgcgggttagaaaccaaggaaagagcgccgacgcctctcagccccgcaagagctgcagacccacgggcagtgcggtgccactttcgcccaacagggtgccaagagagaaaactgcggtggtcataggaaaacagat

SEQ ID NO: 44694 - DNA, 30 bp, Homo sapiens; identical to SEQ ID NO: 5868
  chr7:127032060-127032090
  hyper

SEQ ID NO: 44695 - DNA, 30 bp, Homo sapiens
  chr7:127033346-127033376
  hyper
tatcctggcagctccgcttctcaaacttga

SEQ ID NO: 44696 - DNA, 30 bp, Homo sapiens; identical to SEQ ID NO: 5869
  chr7:127225735-127225765
  hyper

SEQ ID NO: 44697 - DNA, 30 bp, Homo sapiens
  chr7:127228670-127228700
  hyper
cccttccgcccccgcgtccctccagccccg

SEQ ID NO: 44698 - DNA, 30 bp, Homo sapiens
  chr7:127260376-127260406
  hyper
ttggtctgacacctcgtcttgggctcttga

SEQ ID NO: 44699 - DNA, 293 bp, Homo sapiens
  chr7:127291484-127291777
  hyper
gaagagaccgaagaacgagggtcactctcccctgtatacgtggcatgtccttcctctgagacatttattcctcccaccaacaaacattaatggaacgcctcacaagtgctagaccccagcgacacaaacaagggcgaggcacactctctgactacaaaaagggcgcgcggccgcgtggcaggtcaaagcccacatcggtaggaggttccacaaagctctgattttccaagttctctccatacttttagccaaggtaaaatgtcggaagtcgagtggagcgggtacggagattc

SEQ ID NO: 44700 - DNA, 30 bp, Homo sapiens
  chr7:127292374-127292404
  hyper
tgacacctccagtccggccagccgctccac

SEQ ID NO: 44701 - DNA, 438 bp, Homo sapiens
  chr7:127744130-127744568
  hyper
tggaacccggggtctggctctcggcaacgcgccctcggcccgcagcctcctgccccctgtgccccgcttcggcccccagcgcagctgcagaggggcccccctcgacgcatacactcaagagcccgaccgcgcggctgaaatcgcggagctcggagccgcggctggctgagcgatcgcggttcctgggctgcgtgcgcgccccttggagctgaaaggagcgccaggatcgggggcgctgcaccgggctgggcccctcaacgctcgcagaccgggccgggctgcagctggagatggcagcaatcccgggaggtctccgggcctcttcagggtgcgtccaggaggcgggttccgtgcgacgcggcgcagcccacccccacgagaccgcttaacttcgcgggggcagcctcgggcgctcggagacgcggaggcccagactgc

SEQ ID NO: 44702 - DNA, 217 bp, Homo sapiens
  chr7:127775615-127775832
  hyper
gtgccccccacccccgtttccacctcccgcctgcaccgccgggagctccggaggagttcccggggacctagaaacagcggcgagagcgtgagaggggaagagctgggggtccgggccaaaaggaggatggaggggctaggcttctagagcgtgggaaggggtcccagggaccgagccaagtggaaggcttgtccaggcccccgcctgctcccctgga

SEQ ID NO: 44703 - DNA, 1801 bp, Homo sapiens
  chr7:127806867-127808668
  hyper
taaaggaactctgcccgcctggccggcggagagccgcagagagaggacgctcacaaaagtcggtcgctacccggcccaaacgattgtggagccggcgagagcaactggtcccccagtcctcctccctggaggaggtgcgggggcgcggcaggcgggcttggcccaccccagccgaggagcttgtgggggacggcgggcggccggctggacccctgcagggcttcccccactttcgggagcccgagcggccgagggagaaagggcaggggctctccgccgtccgtctgggagagcagctcctcccagtcgggcccgcaggtgtgggtggggaggggccgtgtccgcctccgtgctaggtagagggtgggaggagggaccttgtctgtccccctcagctgggtaggaaaccccgactcggacctgtccttgagcgcgggggatctgggcaccccctcccccagcaggttcccgagagtccgcccgagggtagacagacctaggcgtggtgtgcacgcgcgcgtgtgtctgtgggtgtgcgtgcgagcgaggcaagagggtcttggcgtcccccgcaccctctctgccgggttctatattttgcctttctttgttctcaaaatagtaggcgagcgcggccggcgctgccctggcgaggggtgggggctccgcgctcgctcgcgcgagccgagttagctgcagggttacaaacagtatctccctgctcccccggcctgaattaatgtgttactatttcgggcgagccagtgtttccaggggaaacctaatgacgcaatgacgtcaatgcaggtcagcagcagactctccgggagggcgggcgggctcccggctttcgggctcggcgcagtctgcgggcgggagggcgccggcgaggtggcgagggcggctggcgcgggggcgcgggagccccggctaagcccggggacgggagggcgccccctcccagcgcccgaacccaggcaacttcccgccgcccgggcaggagtttctccgtagcccacggacatccgggaggcttgtggagggcaggcgggtaacccccactcccaccccacctttatccaggggcagccagaggagccagcaggtcgggactcgctgagggggctccacgcggggcctcccacgcacaggtacgcgctggtcctcggggtgtccccagtttgggagggagacacgcacagtcgctcccgtccacactcctctcgtgtcctggctccatgactgggagtctggggaaagaagaatgggtgtctgagacctacccctccgccggtgtcgccccgctctttctgggcgtaggagcgggctgcctgcccctctcccgcaccttcctggtctcgggctagaactggggcttcccatcggccgcgcttcccttaggggcgccatctgaggtcggaagcaaagctggaggggcgtccaggccagaggacgcgggctggggcgggagcctcggcagcctggtgggagctggtgcccactgcagggtgcgtgtacggggctgcctgcgtgtgcttggtgtgtgtcacttctgggagcgtaccccgtgtgtccacggggtgtgtatgcgcccacggaagtcctctgtgcatgcgtgtctgtgccataggcgtgggaacacctcgtgcacccatggtacttgcccggagagtaggaagccagcgagggagcggccctgctccagggtctcttccctgctcatccctccagctggcccagattacaccctactcacacccgggtcgcggcccactttccccatagccgcagcttccggcgg

SEQ ID NO: 44704 - DNA, 27 bp, Homo sapiens
  chr7:127841245-127841272
  hyper
actgagccacccaaggtcacccgggca

SEQ ID NO: 44705 - DNA, 158 bp, Homo sapiens; identical to SEQ ID NO: 5874
  chr7:127841338-127841496
  hyper

SEQ ID NO: 44706 - DNA, 261 bp, Homo sapiens
  chr7:127841625-127841886
  hyper
cgcctccttcctccgccggcttctctgtctgcctcccactgtccctattctgcccttcacagatcgttgtcattatcaagtcctacactttgagagcagaaaacgaccccgtacgtggtgggtctccgacatctgtttattacgttggaccgcatgctgcatatgatccagccacctcgctctactcctgtggctgcccttcgtcctcgtcgccgggacccctctccctgcctcccagacgacctgtgccttaccccttcc

SEQ ID NO: 44707 - DNA, 30 bp, Homo sapiens
  chr7:127983951-127983981
  hyper
attccggaagtgctcgttgcccaaaagaga

SEQ ID NO: 44708 - DNA, 30 bp, Homo sapiens
  chr7:128046279-128046309
  hyper
ggacacgccccctccgccgctctacatcca

SEQ ID NO: 44709 - DNA, 30 bp, Homo sapiens; identical to SEQ ID NO: 5876
  chr7:128049961-128049991
  hyper

SEQ ID NO: 44710 - DNA, 30 bp, Homo sapiens
  chr7:128050601-128050631
  hyper
ttgttatgttaccccgtaacaagggagtgg

SEQ ID NO: 44711 - DNA, 77 bp, Homo sapiens
  chr7:128337470-128337547
  hyper
cttggggcagcccggcgccactgccggcatctacgcaccctgaacgcgcccgatctggtctcatctcggaagctaag

SEQ ID NO: 44712 - DNA, 15 bp, Homo sapiens
  chr7:128337787-128337802
  hyper
cggaagctaagatgt

SEQ ID NO: 44713 - DNA, 30 bp, Homo sapiens
  chr7:128379302-128379332
  hyper
tggctactcggggacgctatgcgacagcgg

SEQ ID NO: 44714 - DNA, 30 bp, Homo sapiens
  chr7:128470202-128470232
  hyper
ctgtcggccctccccgccaccttccagcgc

SEQ ID NO: 44715 - DNA, 548 bp, Homo sapiens; identical to SEQ ID NO: 5877
  chr7:128470508-128471056
  hyper

SEQ ID NO: 44716 - DNA, 30 bp, Homo sapiens
  chr7:128502891-128502921
  hyper
ccgtacggcggaggcggggtttcagtggct

SEQ ID NO: 44717 - DNA, 113 bp, Homo sapiens
  chr7:128509597-128509710
  hyper
gaggcggcagtcagcgtccggccgcccctcggtgccccgcccgctccaggcaggccccgatcccggcgtggggacacacccggagccgctgctgctcacggtcccgccggcgg

SEQ ID NO: 44718 - DNA, 240 bp, Homo sapiens
  chr7:128509981-128510221
  hyper
ccccgaggagcccctgctgcccggatacctcggcgcgcagggtcgctggcatctcggctccggctccgcgacctgggagccgccgccgggccgggggcttcgggcgggtaagcgcagcccacgccccctcccgggcggcccccagctttgccaccgccggtgccgacctttgtggctcgcctttgatcatgctctgcgtcagcgtggtagtccttctccggaggtttgggctctccctgc

SEQ ID NO: 44719 - DNA, 56 bp, Homo sapiens; identical to SEQ ID NO: 5878
  chr7:128579007-128579063
  hyper

SEQ ID NO: 44720 - DNA, 30 bp, Homo sapiens
  chr7:128694377-128694407
  hyper
ggaggaagacaaaacggaaaagcacggccc

SEQ ID NO: 44721 - DNA, 168 bp, Homo sapiens
  chr7:128695027-128695195
  hyper
cctggccttttttccggtttttccacttgattctagactcttgagtccacagattctggcgctcccgtcttcagtcgctgacttgccctcagaagcctatcttgggaggccacacaccagtgtacctaaggttcgtttacccggaccggaagcgacagcaccgatacc

SEQ ID NO: 44722 - DNA, 30 bp, Homo sapiens; identical to SEQ ID NO: 5879
  chr7:128784427-128784457
  hyper

SEQ ID NO: 44723 - DNA, 30 bp, Homo sapiens
  chr7:128784916-128784946
  hyper
ttctgggtgagtctcggggtcgagggcacc

SEQ ID NO: 44724 - DNA, 302 bp, Homo sapiens
  chr7:128828287-128828589
  hyper
ccgggcgcggggcggcggcaggcggggtcaccagatccccctagcccgggcccctccaggcgccagggacgctgacgctcgcgctcttcctctctcgcctcccctccccacctctccgctccttcgtccagtccctcccccagcctcggcgcaggggggccgggcttggctccgcgaggcccgtgcattccagagagcccagcgagctagagcaacaaaggagccgggtcgccggcggggagagttcggggggctgcggcgcgctggggcgaaggtggctgctgggccgcgggctggcgcgg

SEQ ID NO: 44725 - DNA, 570 bp, Homo sapiens
  chr7:128828807-128829377
  hyper
gtttgcgaagttgggcgccgaggggccggggcgcgcggagcgtccgggggggcccgggcccggattctctgggcgcacaggtcgcctgagccgcctccgcggccgccgaggtcgtgcgtgtggccggggggctccgaggagcaggcgggggcgccggggcttttgctgagttggcggggttggccatggccgctgcccgcccagcgcgggggccggagctcccgctcctggggctgctgctgctgctgctgctgggggacccgggccggggggcggcctcgagcgggaacgcgaccgggcctgggcctcggagcgcgggcgggagcgcgaggaggagcgcggcggtgactggccctccgccgccgctgagccactgcggccgggctgccccctgcgagccgctgcgctacaacgtgtgcctgggctcggtgctgccctacggggccacctccacactgctggccggagactcggactcccaggaggaagcgcacggcaagctcgtgctctggtcgggtaagtgcggcggagccgggtctggggggcgggaggtgccgcggtaagatgggg

SEQ ID NO: 44726 - DNA, 30 bp, Homo sapiens
  chr7:128865251-128865281
  hyper
tcaccgaggcgccgcgcacagtcaagaagg

SEQ ID NO: 44727 - DNA, 30 bp, Homo sapiens; identical to SEQ ID NO: 5880
  chr7:129142636-129142666
  hyper

SEQ ID NO: 44728 - DNA, 309 bp, Homo sapiens; identical to SEQ ID NO: 5881
  chr7:129418306-129418615
  hyper

SEQ ID NO: 44729 - DNA, 399 bp, Homo sapiens
  chr7:129418755-129419154
  hyper
cgctcagagccggcctcagtgcccctgcccccggcgggtattactgtacacggtgtccgggagcccgggttggaagagcaaacgaatggctcagcctggaggacaccgtggaatcgggcgacccctgaccccgggtgacaccctcactgcccatagtcctgggatgcgctgaccggtgaggcgccagaggcaagccgtccagccgccgatcttggggaagggctgggaacctgggtgccactagcgctattaacaggaatggggcagttgagggcggggaacggtgtctcattcgcgtgcgccggggttcccgggatgagtggccgcgaagtggaggcacacgggaggtctgagagccgctttcccccagagactgggcggggcggctccgggccacgg

SEQ ID NO: 44730 - DNA, 30 bp, Homo sapiens
  chr7:129420488-129420518
  hyper
gtagggccactggacgatctctgcagtctc

SEQ ID NO: 44731 - DNA, 526 bp, Homo sapiens; identical to SEQ ID NO: 5883
  chr7:129421182-129421708
  hyper

SEQ ID NO: 44732 - DNA, 545 bp, Homo sapiens
  chr7:129422115-129422660
  hyper
ggagctggactcggacggtgagggggcggcccccggggacctgataccctggatcccttacggctcagggctcaggcgggggaagaggtggctcaggacgacctggggtcctcactttgctggcctgtccagcgcatcctaagcccgcgtgtatcctaccccctccttctgcagatccaatgtccgtctggcaattgccccattccctctcgctggagagatcccttccgcctcgccacaggcgtcccacgctgcccggagtcgtgcgccccgggacgggtagttttgggttcctcgacgcttggccaggtttaggaaagacccgctgtcttccttgctgcccccacctaggagactcggcgccttgcgctccgtcctttttaatggtgtcgcggcttgtccctctggcttgctccctcctagtccctaccccacacggctcccttcgccagctccatgacaatcccactcgtgctgaagaccttgggcaaagaagtaaccatcggtcttcccctcccttcccattcctccggcggcaggactag

SEQ ID NO: 44733 - DNA, 32 bp, Homo sapiens
  chr7:129422936-129422968
  hyper
atgcacatgtgagcacgtgggtacttggcgac

SEQ ID NO: 44734 - DNA, 379 bp, Homo sapiens; identical to SEQ ID NO: 5886
  chr7:129423125-129423504
  hyper

SEQ ID NO: 44735 - DNA, 1584 bp, Homo sapiens
  chr7:129424363-129425947
  hyper
aataaaataagcattcgggatgctgaagcctgcaggagttgaatcagagggcgagctgcagagcggaggcactggggcggcgggccttgcccgggctcttggctcccatgaatcctcgatgagtagagaatcgtcgctcggagcaaaggcgagaggagagagaagcgtgcgggtgcggcccttgctgctttttaccaggcgacaccccggtcgactttgacccccgagcaggtgaaacataagcgtccaccccagaggggtcccctacccaagtcagaggagaaggtggcctgccaggttaaaggatcgagtccagcctcggtttcctcatctgtaaaataagccgagaacatccgcgcctctttctggagaaggctgggaggatgccagagagaaactgcgcgcaggccctggcgaggagcccctccggcccatgcggaactctgcacaggctgggtccctccagggttagaaacccagcttccccacccctacccagcagggacccgcgctgcatcccctaacgccccccaaccctctgcacccagacccaagagccggccttcgacgcaccacatgcgtggagcccgggtcccagccctgaggaccaggtttcagggctcagaagactccagcgaggttccctcgcagattgtgtctgcggtcgttgggggaggggccccgcagccttcagcagattatccaaaggtcagtgacccagatatggttttggccacgggccatgtttcacttcctgtgccccaagcagaatttagctgaataattcggaccccaaaccaaacaaaacgctcttatttccgtttggggattcttcggagttgggatttttctgtctcaaattagaataatctgcattattaaccacttaacagttatttgttggttggctgcctgacctttctgagcctcagtttcttcgtctgtaaattgggagcttacccaggtcggaggactgttggaattggaaatattcgaataaggaagtgtttttgcaagtgctttgtaagcagcaaagcgcttcttcaggggtcaatttttttttagctctgcagtcaccacccaaattcggaagatcgttgtgcctttcttggatgagaatgcccggctccagcccggggatgggacggtcttttccttgctaggagtccgctgtggagggggcgatgcgctctgtccaggacctaggagtccctttctccctccaccctcggctcacagcgggcagctcccccgacgcgtaccgcctctttgcccccagcctgaggtgcgctcttccccaggacgcctcctctgtcctctgcacgccgccggccctgctggggttgctttctgccgcggcgtcttcgcgaatatcccctcttgctgtctgcctgggcgtccctccgggttaccgcacaccgcctccgaccctcccagggcgcgggaggaggggcagggcatccgcgttcgtgtctgggccctggcggggagtcgcgtggtccaacccctcgtttttaagaggagggatctgaagcccagctaggcttctaattccagacagagccctacggagcccagttctct

SEQ ID NO: 44736 - DNA, 30 bp, Homo sapiens
  chr7:129592835-129592865
  hyper
ggggcgggtctggtcgctgagaggggtggg

SEQ ID NO: 44737 - DNA, 30 bp, Homo sapiens
  chr7:129709788-129709818
  hyper
ctgtttgattgggacgtggcttatacaggg

SEQ ID NO: 44738 - DNA, 30 bp, Homo sapiens
  chr7:129710355-129710385
  hyper
ctggtgggaccgggcgctgcccccttcccc

SEQ ID NO: 44739 - DNA, 443 bp, Homo sapiens
  chr7:129913007-129913450
  hyper
cgtgctcaaggtacacggtgcagggacggttcttcctctcgatgtttctagaatctccctcctcccaggctagccggcagtcccagcttgtgctacagagaggctcctttttattactttttttttcttttcctcctaaccggtccttgctggttttgagtatccactcccccacccccgcccccttctttttctttctctctgttcctgagcaagctgacgcaggtctgcaggagtgaattaatgctcacgtcctgagagatgagctcctggggaaccggggcaaatgcgccaataggagccgaggaagggggaggtgcgggccgggggaggttgggggctgggggctgtaattcaagctgggagttctctgcctcccctccccttctcttttttttctttcctctttaaacacacacacacacacacacatacacgcgcac

SEQ ID NO: 44740 - DNA, 30 bp, Homo sapiens
  chr7:130667105-130667135
  hyper
tgtctctctacaacccatggcaccaaccaa

SEQ ID NO: 44741 - DNA, 30 bp, Homo sapiens
  chr7:130680505-130680535
  hyper
aaagctttgatcctgttaaaatgtacaagc

SEQ ID NO: 44742 - DNA, 30 bp, Homo sapiens
  chr7:130742091-130742121
  hyper
ttaaacaaaggtccacgtgatagatttctg

SEQ ID NO: 44743 - DNA, 30 bp, Homo sapiens
  chr7:130791156-130791186
  hyper
caccccaccttggacgtcaccctcctcgga

SEQ ID NO: 44744 - DNA, 30 bp, Homo sapiens
  chr7:130791790-130791820
  hyper
gagaaccgagacaccgcgtcctttctaatt

SEQ ID NO: 44745 - DNA, 30 bp, Homo sapiens
  chr7:130792590-130792620
  hyper
tccctgggatgaatcgggaggagcggtgga

SEQ ID NO: 44746 - DNA, 30 bp, Homo sapiens
  chr7:130794763-130794793
  hyper
tgctgcagcagctgcggttctgctgtgtca

SEQ ID NO: 44747 - DNA, 30 bp, Homo sapiens
  chr7:131013192-131013222
  hyper
acaaagtgtaaagccgaggagtgtctattc

SEQ ID NO: 44748 - DNA, 121 bp, Homo sapiens
  chr7:131240425-131240546
  hyper
ggaaggtccacttacgactctgtacctgccccagcacgggctcaaggagttgagcctgcacacattacttagaaaaaacctctgcaaacgggtaagtacatcgcccgcgtgggccgtggct

SEQ ID NO: 44749 - DNA, 529 bp, Homo sapiens; identical to SEQ ID NO: 5890
  chr7:131242579-131243108
  hyper

SEQ ID NO: 44750 - DNA, 201 bp, Homo sapiens
  chr7:131514696-131514897
  hyper
cctgtaaagccccagcccacccggaagcccccactttggcgctcctgggcttggatcccgctgtgaggccgggggcaggtgatcatggcaggcggtaggactcctctcactctctgccccagaccccgcctgggagcctctgccgccctctcctgctccagcaggcaaggccaggaagccgggagtgcttgctgtcaatat

SEQ ID NO: 44751 - DNA, 31 bp, Homo sapiens; identical to SEQ ID NO: 5891
  chr7:131630395-131630426
  hyper

SEQ ID NO: 44752 - DNA, 1047 bp, Homo sapiens
  chr7:132260160-132261207
  hyper
ccggtgggcagtgccgccacggtcgtgagggaggggagcctcctcttttggaggactatatccctcgtgcttcccccttctagttctctttctcagacacacaccacgaaaggcatgtgacaggtgttcgccagccggaggcaccggggaaggcagccccatgtgcccagggagggtagggaggtgagaggggacccaagtcctgtgtctccaagtcctgtctgcttgctgctaagcaggcactgaggctgtgaataaggtcttaccttttaaggaggatctgacccccgtaccttccctagacaagcaacatacgcggcgatgctttaagccgctttctgcctgaaatctcggcgcattcccggggaagcagtgccacgcttcagaaaggcgtttgtgctgcctcttactggggaaacgcagtgtctgtttcatatgcgccgccctacagaactgcagccccaaccgcctatctggcctcctccccgggcgctgggccaccactctctccaaatatgcgtccgaatatctgtgggtctgtctcccgttgaaatcccagggtgtccaaaggccacggggccgcgatgacactgggtaggtctccggaaacctctcaggacttctcccattttaaagcccagctagggacgaaaggggctgggagctgaaaaattgctccctcaacctccccgggtgggaggcagagccgggaatacacagaatcccaccccgaaagtcccgggaaagagaagtctgagtccaggagcgtgagaggagaacacacccgggaaatccctgctccggccgctgcacctccgcgggcgtccaggtgggacgtgggcaggtgcgcgagcgccgtgtgtgccggtgtggatctgtgtgtgtgcctgcgtgtgtgcgtgtgcgtgtgccgcgggctggctccgggacactgaggactcccgggtcggcccaggtctgtccgaccttgctgccctcgccgcccgcccggccccactccccggcgggccggctccttacctggacgcgccgcgtttccctccttca

SEQ ID NO: 44753 - DNA, 248 bp, Homo sapiens; identical to SEQ ID NO: 5893
  chr7:132261256-132261504
  hyper

SEQ ID NO: 44754 - DNA, 539 bp, Homo sapiens
  chr7:132261534-132262073
  hyper
cggtggcgacgccgggctgccccccttcgtccccacccccgcgggctgaatgtccttgatgccaagcgggcacagcggcgtcactccgcgccgcccatgctcgcccggtcgggccgctgcccgggcgcggcgagtgcgcgggggacccgccggggagcgctctcggcgcctctgcgcgcctctctgggtagcggcggccgccccccggcagcccgcggccggccgcgccgcggcagcccccacccttgccgagacactcgccgggcagtgccctggggccggggctggggggccgcgggagccgccggctgctccccggggaggcgcggggctgcggcggtggtggctgcggcggctggcgctgcggcggcggagagctcggccgcgggccgagccgggcctcccgggcgcgcccccggccccccgggcgggctgctcgcaaagtttgcagggggcagggagcggggccgccgctggctcggccgccgccggagctcccgggctgcctgctgccgccgcggctcgctgctgctgtgcat

SEQ ID NO: 44755 - DNA, 142 bp, Homo sapiens
  chr7:132262338-132262480
  hyper
tgccggctctcctccgcaccaacgtttgccgacacccccctgggtcccctcggcccgcacggagctaccctggcggtggcgatgtggggcggagagaggggcatacatgggtgaccggagcgcacggcgcgcgctcagaggg

SEQ ID NO: 44756 - DNA, 187 bp, Homo sapiens
  chr7:132299530-132299717
  hyper
atgtaaatacttgggaaatgccggagacacctcccaccgcggaactgagccgcggagaaaagcaagctgcagagaaagaggaagcagatgtgcagagaggcggagatggaggagtggctgggaaggtcgcctgtgtcccgccggcttccaagttccagagccttccggagcctcttctgaaatcctg

SEQ ID NO: 44757 - DNA, 30 bp, Homo sapiens; identical to SEQ ID NO: 5896
  chr7:132340264-132340294
  hyper

SEQ ID NO: 44758 - DNA, 30 bp, Homo sapiens
  chr7:132767027-132767057
  hyper
tggtctcgatctggcgcggtgggtgatggg

SEQ ID NO: 44759 - DNA, 174 bp, Homo sapiens
  chr7:132937635-132937809
  hyper
gagaaggaaaactacgactcccagagtgcttagagagaacacgcgcgtcgtggcctcaaaacttgctcccttagtcccgcctcctcacttcagtgattggattttccacttccgcgcctctggaattctcttcacccattggtggagactcctgcggggtcaaatacagaattt

SEQ ID NO: 44760 - DNA, 97 bp, Homo sapiens; identical to SEQ ID NO: 5897
  chr7:134001928-134002025
  hyper

SEQ ID NO: 44761 - DNA, 601 bp, Homo sapiens
  chr7:134142985-134143586
  hyper
aggcacttctcggggacgctgtgtggtgttgaggttttacagggaaaatgctaaccttggcgcctcctgaattatcaactagctacggggtgcccagatttttctcccgagttccagacccagggcaccccgaggcggcgcctggccgaggagctccgcactgcgccttgttaacagctgggtccgggcaaactcgcgccacctaattctctgccctctaccggcttgagatgcttattcctcagggagggcaagaatcgaaacgattgagaccaactatttacaagtgaggcaaccgggctacaggtgcctcgagggaaaggaggctgggtctgcgctcccacaccttgccgacggctccacgtccctgtctgcgcccgaggtccaccggtctgtgaagcccactttccccgcctccctctcgcgttgtgccgcttggggcgcccgctaggacccaaaatgcggactggtgggccgcccatcaagggttgcccgcggtagggcgggggctcccgtgagctgctcccaaaccccactcgcaggatgctgccctgacgcccagggccaacccggggagccaaggcccccggtctctgcaagg

SEQ ID NO: 44762 - DNA, 439 bp, Homo sapiens; identical to SEQ ID NO: 5899
  chr7:134143700-134144139
  hyper

SEQ ID NO: 44763 - DNA, 178 bp, Homo sapiens
  chr7:134331361-134331539
  hyper
agcctgcccgctggcgtcgaagccaactccttactggttcaggtatgtgctcgtctctagagtaaaccaatcagagccccacttcttactcctgggatttggtaaacggaagagacctctcctgttccgggagtaggccgggaccgtggatgagtgacagttcgactttccaataggc

SEQ ID NO: 44764 - DNA, 86 bp, Homo sapiens; identical to SEQ ID NO: 5901
  chr7:134832829-134832915
  hyper

SEQ ID NO: 44765 - DNA, 30 bp, Homo sapiens; identical to SEQ ID NO: 5902
  chr7:134855649-134855679
  hyper

SEQ ID NO: 44766 - DNA, 30 bp, Homo sapiens
  chr7:135405128-135405158
  hyper
ggaaatactagcatgcgccttgtacagccc

SEQ ID NO: 44767 - DNA, 30 bp, Homo sapiens
  chr7:135405190-135405220
  hyper
tgatagagtgcctggcgcttagtaggcatt

SEQ ID NO: 44768 - DNA, 446 bp, Homo sapiens
  chr7:136553579-136554025
  hyper
atttcaccaggaaatcgccgaggtacccgaataggtgttgcctcccaaaactaattcctacttccccaagcactttggtgaagaaatgaatccagcccagctcgccgaggcatccaggtctccattctattttggtctccaggctcttcgtgaaagccaggtttgaaagtcttgtttgcttctcctttagtggtttggcgtggagggcgggggcagcgtcaatttaactccagtctaaaccacgaacaggtcacagactagccaagtggctgagacgagtgtggggtgcgtgactctgcctgcgcgcgcgccagccccgcagctctcgccagagccttggggtcggttctctcccgcctctcccgcctctcccgccccacccctacagtgtctcggcatcaactaatcttttccttttcttttgcaagatcaagggagaaagagaa

SEQ ID NO: 44769 - DNA, 477 bp, Homo sapiens
  chr7:136554103-136554580
  hyper
cgctccttcaagcctccaccacctcgcagccggggaggcaactggagcgaaaccagcgacaggtaagggccccgcgctgtgcagctctccgcttacccactccaagggccctggcaccagggggtctctcccttcatatccccccaagccggaggctcaggggtcggggcttgggggaattggagggaggtcctccccacgtgcagattctcaaacggaaactttggatcctggggcttggagggttgcgagcagtgatggcgggtctgaaaggaaggggcaaacgaggcacagcgcgaggcgaggtacccctacgattccgacggtcactgagtccagccgaatgtggcgaaagcagcctgggagctgcgctgtcccggcgtcgctccctattccagccccccattccctctactgttgctgacccccctcccgccacccactccagatgcagccatggacaagacaaggagagct

SEQ ID NO: 44770 - DNA, 15 bp, Homo sapiens
  chr7:136554625-136554640
  hyper
cgtcttctgtgcgtg

SEQ ID NO: 44771 - DNA, 702 bp, Homo sapiens
  chr7:136555139-136555841
  hyper
cctggggcccctcacggggtaagtagagactcatctgggagaggtgaaaattccccagaattattgacacacacggcggcacaccctttgcctccgtccgcctccagcatccgcatccctttctctatcttcctgcccattgccgtcctcgaggctgccctgagatacagaattgtcccaggctgagtccaccgacccgccagtccctggcgatgatgccaaggctcttgcatgtacggaaataccagcagggaggttcgccaggggcagagaggctggaggagaacagagaattggaggtaaacgcgtaaagccagcagaactgtcggtggacatttcacccaggccgccctcccgcgtctttaagtcagttcaccgccacagcacgtctgtgactgcggccacccagggctccaagtctgccagcccaggcgccgcgagccaagaagagcgcggcgcctcccactcctcaagctccggaatcccccacatcgactttctatttccctgtcttcttttcttttttgtttgttttgcttttcctgctcttttcttagcgctgggtggcagtgggtatgcggcagccgtgtgatttgcccatcccctagtacacgcagccagcgacacaagcacacagcgaccagtccccacgctgtgccacacaccctccagcggtccggcgcgcagcccctgctccacagc

SEQ ID NO: 44772 - DNA, 166 bp, Homo sapiens
  chr7:136556012-136556178
  hyper
cgggccgggctgtgcggagccctgagggctcctgcggctgcagcgctgcaggccgcccgcgtctcgccccgccccgccgctgggcgtccccgccaggagcccacccgcgggcggcagcttttctccatgctgcccagggaagttcgatgcctggtgctgggatgcg

SEQ ID NO: 44773 - DNA, 307 bp, Homo sapiens
  chr7:137028150-137028457
  hyper
gccctccgagaaatcgtacgttcctctcacttactttgagttggaaacgtcctctctggcgctcagtctgcctttgttgcaaggggcgaggttgctaccgctgagtccaggtacccggctcgctgcagctcctgcttgggccgctgctgctctccccgccttctggacggatgactcactggtctctttcttcccctctctccactttggattttcctctgctctggggctctcttggcgggatttttggactggaaggcggggaacctgatcctgcctttgactcaattacgccctgacagggagg

SEQ ID NO: 44774 - DNA, 165 bp, Homo sapiens; identical to SEQ ID NO: 5909
  chr7:137531046-137531211
  hyper

SEQ ID NO: 44775 - DNA, 626 bp, Homo sapiens; identical to SEQ ID NO: 5910
  chr7:137531262-137531888
  hyper

SEQ ID NO: 44776 - DNA, 279 bp, Homo sapiens
  chr7:137531908-137532187
  hyper
cgccctgggtcctgcaccgtgaggctggggggaccaggaccggcgggcgcccaccttggtcctgagcccagctgccgacgctgggccagcaccctctccaccgccgccctccagtgagcagagctgggctcaggcagcagcccctgggcgcgggaaggtagcgggagctgcatttaggggaggggggaggtagcaggagctccgccagtgggaaccttggagtgaattcgtcggcgggtgccaagtcgaagcgccgacctcctgtctctggactggggc

SEQ ID NO: 44777 - DNA, 22 bp, Homo sapiens
  chr7:137532373-137532395
  hyper
cgttgttcgtataagaagaggc

SEQ ID NO: 44778 - DNA, 30 bp, Homo sapiens
  chr7:137686691-137686721
  hyper
tgccggggctaaagcgggatgtgcatccaa

SEQ ID NO: 44779 - DNA, 178 bp, Homo sapiens
  chr7:137686992-137687170
  hyper
gggagtgtctgtgacgtcaccgaggaactcctcctgcttgagcgcggcccgctgtctgctgtcgcctacagctgaccaatagagggcttgggtccggaagtgatggactggaggcttgactaatgtgaaaggggcgtctgaaaggtacagccaatgaaatagcgacaagaatacattt

SEQ ID NO: 44780 - DNA, 30 bp, Homo sapiens
  chr7:138144669-138144699
  hyper
cggaccgaatcaggcggatggtcgttaaca

SEQ ID NO: 44781 - DNA, 30 bp, Homo sapiens; identical to SEQ ID NO: 5913
  chr7:138665268-138665298
  hyper

SEQ ID NO: 44782 - DNA, 142 bp, Homo sapiens; identical to SEQ ID NO: 5914
  chr7:138720771-138720913
  hyper

SEQ ID NO: 44783 - DNA, 30 bp, Homo sapiens
  chr7:138794504-138794534
  hyper
actgaggcgtgtgacgcaagtcctgagagc

SEQ ID NO: 44784 - DNA, 30 bp, Homo sapiens
  chr7:139025166-139025196
  hyper
ctacggcgcaggcgcggagactattgcgca

SEQ ID NO: 44785 - DNA, 30 bp, Homo sapiens
  chr7:139025744-139025774
  hyper
aaatgtcttctcagcgtgttccatatcaaa

SEQ ID NO: 44786 - DNA, 30 bp, Homo sapiens
  chr7:139043703-139043733
  hyper
ggcgtgagccaccgcgcccggcaaggaatt

SEQ ID NO: 44787 - DNA, 30 bp, Homo sapiens; identical to SEQ ID NO: 5915
  chr7:139043994-139044024
  hyper

SEQ ID NO: 44788 - DNA, 271 bp, Homo sapiens; identical to SEQ ID NO: 5916
  chr7:139167555-139167826
  hyper

SEQ ID NO: 44789 - DNA, 499 bp, Homo sapiens; identical to SEQ ID NO: 5917
  chr7:139168114-139168613
  hyper

SEQ ID NO: 44790 - DNA, 350 bp, Homo sapiens; identical to SEQ ID NO: 5918
  chr7:139168658-139169008
  hyper

SEQ ID NO: 44791 - DNA, 30 bp, Homo sapiens
  chr7:139208208-139208238
  hyper
agatggtgagcaggcggctggggagatgga

SEQ ID NO: 44792 - DNA, 30 bp, Homo sapiens
  chr7:139475750-139475780
  hyper
ttctctcaactcaccgggagtgtccagcag

SEQ ID NO: 44793 - DNA, 30 bp, Homo sapiens
  chr7:139477942-139477972
  hyper
ccgaagggcagagccgcgccggcggcccga

SEQ ID NO: 44794 - DNA, 197 bp, Homo sapiens
  chr7:139478236-139478433
  hyper
tcgcccatctcacagccggttggcgctcgcggaggtaggagtggaatgaatgaatgaaggagtgggcgcgcgccgtgctccggaggagggcgggtgagtggaggagcttcggaaagccacacgaggtcagaggcaccgaagccctgccgtgcacgccgcggaaatgcagcccccggggtggtcgctgggttcctgcc

SEQ ID NO: 44795 - DNA, 30 bp, Homo sapiens; identical to SEQ ID NO: 5919
  chr7:139762241-139762271
  hyper

SEQ ID NO: 44796 - DNA, 30 bp, Homo sapiens; identical to SEQ ID NO: 5920
  chr7:139876505-139876535
  hyper

SEQ ID NO: 44797 - DNA, 876 bp, Homo sapiens
  chr7:139929833-139930709
  hyper
ccctctgtcaagaccataccacggctgttttgactcctgggcttccgccctttagtttacacatttgatgattccgtttgaaaatcgcaacctgaaatactcctcttctaggctggaggcggggttgggggcgggggcggtgggtggcggaaggagggccctcaaacaaagatccgctttctcctgaacaggtgtcaggagaccaagctttgacctccagctccctggcctccgggcgcgggccctgggctgatctggcggtggacgtgcagggcagcgggcccgcgcccaccagctgtggcaagtttctagtaagagagggatagagacaggcggagaccgctggggagtttcccggtgctcagccatcgcataggggggaacggacccttttgtgggccctcgggtccccccgtggtccccgctggcgcgctcgtcctctgccacccccagatctctgcgcactccccactcctgggcgttcgcactgccccccggcgcactctcgccgccccggggtccgaagcaccgcgcactccaccccgcgacgcgcgcatccctcgaccctcgcgcgtccacaccgccgctgcgcctcgcgcccccgcacccccgcaaccccacaccacgccggccgggcggggccggatgcgcagacgtgcagcacgtgcgctgcgcagcgattggcagcgccgcccccacgccgccccgccagggaaagggtgtcccgtgccctgccgcggctgctggtcccgcgggcgggggctgtcggggcgcgcgggccgggccgtgggggtcgccgcccgaagtgaccggggaacaatgacagcccgatggggaagggcggcggcttccctagagggccggttctctggctcg

SEQ ID NO: 44798 - DNA, 30 bp, Homo sapiens
  chr7:139931030-139931060
  hyper
gcggctactgtttcccggcctgggacggct

SEQ ID NO: 44799 - DNA, 30 bp, Homo sapiens
  chr7:140098063-140098093
  hyper
agggggcgagcggccgaccctgcctgggcg

SEQ ID NO: 44800 - DNA, 172 bp, Homo sapiens; identical to SEQ ID NO: 5922
  chr7:140098302-140098474
  hyper

SEQ ID NO: 44801 - DNA, 237 bp, Homo sapiens; identical to SEQ ID NO: 5923
  chr7:140103656-140103893
  hyper

SEQ ID NO: 44802 - DNA, 178 bp, Homo sapiens
  chr7:140340054-140340232
  hyper
ccccgaggcgcgagacggcggcgtccgggctcagtcctgggagtcagcccgagcccgggaggaacgcctggatcgcgctctgcacagtcccgggaccaggcgggaactcagactcccgtctgcagagccgcttcccccgtcagggctcaggccgcgcgagccgtttcctccctccccc

SEQ ID NO: 44803 - DNA, 567 bp, Homo sapiens
  chr7:140340368-140340935
  hyper
cggctggcggcgcggctcgggggcgggcggcggcgggtgccggggacgccatggccctccgccctccgcccctttgtccgccgagcctcccccggccgcccgcaagcccctgggggtccccgccgcgcgcgctcccgtggggtccccgccgcccccggccccagcggcgcgcttccctcggccggcccagcgcaggctcgcccgcggcccctgcctcctcctgccgtggctccgcgacgatctgcgcgacgcgcgccccctcctcccgacccatcccgcccggcccagtgagctaatccgcagctggcgggcgcccggccggttgccacggcaacccctctcccagggcccggccccgcgcggagctgcggtaaacaggaccttctgccggactcgccccctcgcctctcggggtgggggagaggtggcttaacccttcctgggaggacgcccgccgcgcgcgggctccattccacccaggcccgggcggattcgcgaggtgcttccggcctgaggcttagacctggacgtccaagcctggggaacggcggccgcgtgcccggcccc

SEQ ID NO: 44804 - DNA, 87 bp, Homo sapiens
  chr7:140373220-140373307
  hyper
tccgagtgccctcgcgatgccaggctctgctggcttctgctgggcactttgcccaaggtcgtctccctgtgcggggacgtgggtgag

SEQ ID NO: 44805 - DNA, 30 bp, Homo sapiens; identical to SEQ ID NO: 5924
  chr7:140396871-140396901
  hyper

SEQ ID NO: 44806 - DNA, 30 bp, Homo sapiens; identical to SEQ ID NO: 5925
  chr7:140453121-140453151
  hyper

SEQ ID NO: 44807 - DNA, 30 bp, Homo sapiens
  chr7:140624455-140624485
  hyper
ctggcccggctccgcgccgccaccaccgcc

SEQ ID NO: 44808 - DNA, 232 bp, Homo sapiens
  chr7:140714397-140714629
  hyper
caaagctacagtgccgaaggccgtgtgatgagcagagaaactgagccttctactgttaaccaatatggaagagagtaattgcgcctgagaggaaattacggcagcggaaacgcgggtattctacgtttaagaaatcccccaactgaggcagaaaaaggccaagttatttgtgtgatgcacgtgaaccgcccgagctggtcactaatgaagtggattcgccctattcctggcg

SEQ ID NO: 44809 - DNA, 590 bp, Homo sapiens
  chr7:140771397-140771987
  hyper
tccccagggcaactctttacccggcaatgccggacctcgactttggggtgagggtgaaaacgaggggtgagcattagagtgaaaaacccagcgtttgatgccgggagggagggtcccagcctttgcggcgccgtctcacgtgagcagagcaggggggctgaagttgggatgaagcggggcttgcctggggcccacccgctcaaggtctggggtccggcgctacctcccagagcccctgcagagcctaaatccagcggccacccttacaaaatgacaaaccctgcatcgaggtttcttttaaccccaccttccctcaacgctcgagctctccagcgttttcaaaatatctactaacggaccaccccccatccaccattaaatttctctcgtcttgagtcgatcagccaaatttcttctttctgttcctgccgaggagggagggcaggtggaggtgggtgtgtgtcggggtgcctggctctggcttgggactggactggggctggccggataactccgcagccgctctcagctcagtcctaggtggaaacgcctgtagcttgcaaggtagcgcctgtggctttctggggaaa

SEQ ID NO: 44810 - DNA, 338 bp, Homo sapiens; identical to SEQ ID NO: 5927
  chr7:140772337-140772675
  hyper

SEQ ID NO: 44811 - DNA, 1932 bp, Homo sapiens
  chr7:140772716-140774648
  hyper
cgctgtcgagtgagccggcatctcggcgcccgggtgggctgcgaagaaaatggtgcaatctgagagcgactgagcccagctgggcagagcagacggggtgccagagtgccaagggctcaggtgcctggagaaaggggcggattgtttggaggggccgggaccggggttttcttcggtgcctgcggcattttctttgcacctgggcggcaggctcccggggctcccgggtgccagatgaagtgaggcggaggcgtcgcgggagagccgggtccggaggcggtcgggtggacactccaggcagaagacggcgctgggaagagctgcgtgacgctcgggggctggcggctgggccggcagcgcgccgtggcggcgtgacctgtccatggtgttgaaggcgcggtgggccgagcccctagcgccgcgcgcagtgagcgctgcctggtgcaccctccgccgcgcagcccgcccctcgcgtccgccagcagccgcccagtctccgcagatcccaggccgggtctcgtccggtaacgccgcccgggtgaacacgctgtcggcccgaggggccgcctgaatggcgatgccagaggcagggcaccggggagctcgcggggaaaggtcggccgagagcgtgcgtccgcggggagtgcgcctctgagcgcagcacgcgggtcagaaggagcaaccgacctgctggtgaccagagaacggagattttaagaggacccgacccaaagaggaagaacatttctgggtgcgcgccccaggtctttgcttgcagacggggagggggagaggctctgagccagagacccaggagggactccgagaagccggccccagcacctggaggtttctttcgcccgccggccgcatccggggcgttctacttcacccggtggtccagtggcgcctcctgacagcaccccccgtccccctcagagagacaggcgagttctgtcccgtcaccatcctgcacaaagaagccccaccgcagccgaggacacttggcatttagtttccggcccgagggcagcggcgcccgaagccgggctgggagccgaggcggctgcttcggggcagtcgcttcctgcggggcggggagggggcgggaggcggccgcgctgggttcgccgccgccggaggctgcacctgcctcagaggatgcccaggagcccgcgggagcctctccggatcagaactttttaggccgcccgcccccatccccgcagtccccgggccgtgctccggtaggcgggggccgagggggcgccgcggcgcgagtccctctcctgccccctcccccagctcggccgcccgccgctttgttccgggtgcggcgagggaaggcgaggctgcggcggatcatgcccatggtgtagccgccaagcggaggcatggctgccggaaggttactgctctacactggcctctcgctagcgctctgcgccctcggcatgctggccgtggccatctgctcggaccactggtacgagacggacgccaggaagcacagggacaggtgcaaggccttcaacacccgccgggtcgaccccggcttcatttacaacaataacaacaacttgccgctccgggcgagccgctcgcgcctggaccgctgggagggcaaactcctccgggcccggaatcgccggcagctgttcgccatgagccccgcggacgagtgcagccggcagtacaactccaccaacatgggcctctggaggaagtgccaccggcagggcttcgaccccgagatcgccgccctcattcggaaaggtaagcgccgggcgcaaggcgtggcgctgcggagagcccggcgcctttaggccccgcagcccctcgcgtctccttcccaggccacaggctatcaggtctctgggttccaggcggtccggttatccaggcctggctgagcctcggggccaggacttg

SEQ ID NO: 44812 - DNA, 646 bp, Homo sapiens; identical to SEQ ID NO: 5929
  chr7:141211324-141211970
  hyper

SEQ ID NO: 44813 - DNA, 30 bp, Homo sapiens
  chr7:141250958-141250988
  hyper
atcaaatattgttgcgcaaaggatggatgg

SEQ ID NO: 44814 - DNA, 775 bp, Homo sapiens; identical to SEQ ID NO: 5930
  chr7:142985428-142986203
  hyper

SEQ ID NO: 44815 - DNA, 30 bp, Homo sapiens; identical to SEQ ID NO: 5931
  chr7:142986414-142986444
  hyper

SEQ ID NO: 44816 - DNA, 219 bp, Homo sapiens
  chr7:143042654-143042873
  hyper
caggccctcctgcagcgccacctgtgtcctgagcgcaggctgcgcgcagcccaagagatggcgcggaagttgtcggagctgccttacgacgggaaggcgcggctggctggggaggggctccccggcgcgcctccaggccggcccgagtccttcgcctttgtggatgaggatgaggacgaagacctctctggcaagagcgaggtgaccgcgccgggaagg

SEQ ID NO: 44817 - DNA, 30 bp, Homo sapiens
  chr7:143059576-143059606
  hyper
ggcgcccggaggcgcgaggagagggatggg

SEQ ID NO: 44818 - DNA, 30 bp, Homo sapiens; identical to SEQ ID NO: 5933
  chr7:143060022-143060052
  hyper

SEQ ID NO: 44819 - DNA, 107 bp, Homo sapiens; identical to SEQ ID NO: 5934
  chr7:143105719-143105826
  hyper

SEQ ID NO: 44820 - DNA, 469 bp, Homo sapiens; identical to SEQ ID NO: 5935
  chr7:143105844-143106313
  hyper

SEQ ID NO: 44821 - DNA, 608 bp, Homo sapiens
  chr7:143579682-143580290
  hyper
gcacacccagacccacggcgcacccatcgcgccccgcacccccgccccggcctcccgccctgccctcccccccgcagcacccaggccgagtccaccgttgctggccccttctccagcctgccaggcttttggagagggccactcaccaggtcaccctgcgatttccacgggggcaggtgggagcgggcagagcctggcgcagagaggaatgcacagggaagaggcttccctgtaccagtgactgggcgaccgagccgggatttgggagcggggaggaggctggagctggaggagaggaggggtttccacgggagtcccctcctccccacttcctcccaggctggagtgggagctccagggggcggcgcttggcgggggacagcgcttctttgtgtcgccggccctggtggcttggcattgctgtggcttagggacgcctggagaccccatcctggcagtgtggacggctgtttcattaaagatacaaacttctctgactctacattagtaagggaaaggctgagcaaattgtgggacaaacattctgcttagtattattcagttcttaggaagagcttgaatctccatttagtcggtgaatataccgt

SEQ ID NO: 44822 - DNA, 127 bp, Homo sapiens
  chr7:143598478-143598605
  hyper
gttgggccaaactagcggccagctctcggctgtttaccagggaactgtatcacccagcacttgctgcttcaggccaaatgcattccagactaacattcagcctgaatccccgcgccgctctcaccgc

SEQ ID NO: 44823 - DNA, 30 bp, Homo sapiens
  chr7:144074913-144074943
  hyper
tgaagtaggagagccgtgtagtaactgaac

SEQ ID NO: 44824 - DNA, 30 bp, Homo sapiens
  chr7:144533077-144533107
  hyper
cacagactggagatcgcaggctgcgggagc

SEQ ID NO: 44825 - DNA, 580 bp, Homo sapiens; identical to SEQ ID NO: 5936
  chr7:145812810-145813390
  hyper

SEQ ID NO: 44826 - DNA, 317 bp, Homo sapiens; identical to SEQ ID NO: 5937
  chr7:145813403-145813720
  hyper

SEQ ID NO: 44827 - DNA, 340 bp, Homo sapiens
  chr7:145813945-145814285
  hyper
cgccgccggccgggaggcgaaggatgcaggcggctccgcgcgccggctgcggggcagcgctcctgctgtggattgtcagcagctgcctctgcagagcctggacggctccctccacgtcccgtaagtagccgtctcctcgctctgctctggagcagtttcagtgcggcattgatgtttggcaccagggtatcaactccgaagtgcatcgcagtgctggcaccctgatgtgtttgtgtctccgctgtcacacacttgcagccactgcagtagacaaactcgaaacccagcgtttctgttttggaagagacagggttgtgacgctggtgatgtttctggaaag

SEQ ID NO: 44828 - DNA, 30 bp, Homo sapiens
  chr7:145814654-145814684
  hyper
atgactgatgcagtacggtacttgggacac

SEQ ID NO: 44829 - DNA, 30 bp, Homo sapiens; identical to SEQ ID NO: 5939
  chr7:145815251-145815281
  hyper

SEQ ID NO: 44830 - DNA, 30 bp, Homo sapiens
  chr7:145836197-145836227
  hyper
ttggttgttaaccctcgtgattgcgtgggt

SEQ ID NO: 44831 - DNA, 30 bp, Homo sapiens; identical to SEQ ID NO: 5940
  chr7:145864150-145864180
  hyper

SEQ ID NO: 44832 - DNA, 30 bp, Homo sapiens
  chr7:145883062-145883092
  hyper
tgtaatgtatcataccgagagaggtgttaa

SEQ ID NO: 44833 - DNA, 153 bp, Homo sapiens
  chr7:145981900-145982053
  hyper
agtgataacaccactcgtctctgatcagggactcatttgtgccatctggattagcaaagatttcccttccatttctctgctccctgcctcccacaggctatgactatgcttcttgtggtttcatcgcttgctgctgagcggtgttaataacta

SEQ ID NO: 44834 - DNA, 30 bp, Homo sapiens; identical to SEQ ID NO: 5942
  chr7:145984491-145984521
  hyper

SEQ ID NO: 44835 - DNA, 30 bp, Homo sapiens
  chr7:146042514-146042544
  hyper
tcattctgttgttgacgtctcttcaatctc

SEQ ID NO: 44836 - DNA, 30 bp, Homo sapiens
  chr7:146051335-146051365
  hyper
acagacatcctgttgcgtggtctgccttgc

SEQ ID NO: 44837 - DNA, 30 bp, Homo sapiens; identical to SEQ ID NO: 5943
  chr7:146072421-146072451
  hyper

SEQ ID NO: 44838 - DNA, 30 bp, Homo sapiens
  chr7:146188564-146188594
  hyper
caactcagattagggcgttttggaattatt

SEQ ID NO: 44839 - DNA, 30 bp, Homo sapiens; identical to SEQ ID NO: 5944
  chr7:146415862-146415892
  hyper

SEQ ID NO: 44840 - DNA, 30 bp, Homo sapiens
  chr7:146657554-146657584
  hyper
cagtttttctttttacggagttcatagtgg

SEQ ID NO: 44841 - DNA, 30 bp, Homo sapiens
  chr7:146658239-146658269
  hyper
tgacataaagtgacccgtgaacccatttac

SEQ ID NO: 44842 - DNA, 30 bp, Homo sapiens; identical to SEQ ID NO: 5945
  chr7:147729233-147729263
  hyper

SEQ ID NO: 44843 - DNA, 30 bp, Homo sapiens
  chr7:147959647-147959677
  hyper
ttgggcccttcctcacgtcactctaacttc

SEQ ID NO: 44844 - DNA, 31 bp, Homo sapiens
  chr7:147960160-147960191
  hyper
gagaagacgtaaggacgccttgctcgtggta

SEQ ID NO: 44845 - DNA, 704 bp, Homo sapiens
  chr7:148036378-148037082
  hyper
gtgtgtattgcccacgggtgggaggatgcaagtacaattacgttttttaaaactccagtccagatattggcttttccttggatacttttgtgtggctctcccagtacagtcagatccgccgccgcagcctagcgctccaccccgggttttgcgtcctcccctcacctgcctttcagtggtgcggggtttgatcccgagagcggtggactcaaagctgcccgccgggactcgggctgccggccgacaaaggacggtcctcgggggttctgaagtctgacccggccagtgggaaagccacctgcatcacaaagcgaggggcacacctgaaccggggctggcgggaagaggcaagtattgcgcgcgggctggctcccacatggagctgcctcccggtgcaagtgttgcaagggtgcgctgctccagcccggggagcgcgggaggcggcggagagagcgtccgggtgatgagcggggcactgtaactggattttaacacctctgcaagcagcgcttttggtcaaaaaatttccgattcttgatcttctctctgcaaggtcgggggttctttggggagtaaatcacagcgtttgggtttgcattcgaagcactaccaagtctactccacagggtcactgcacggggagcaagtaaaggaaaacgaggagaatctgagagtgctccttcgtgcagtgtgtgtgtgtgtgt

SEQ ID NO: 44846 - DNA, 30 bp, Homo sapiens
  chr7:148038075-148038105
  hyper
tttgtttcttctgaacgggtctgcaaggcc

SEQ ID NO: 44847 - DNA, 305 bp, Homo sapiens
  chr7:148394978-148395283
  hyper
tgacttcgaagtacacgtgaaaacaatactattttatatcacgactcatgccatccgtatgtgtaatcaaagccttctaagtcttgatatgtccttacaaagacgaaggatagagtgaatgtcaaaatttgccaaacaggagttactgaaagtctgaaggggaaagcctagttaggttttatcttagaagtgatttttaaaacgaaacacgcagataagctcgagctttctggagccgattcctaaggccttgcaggtggtaagggggtcgagaattggctgaggttcctcggaagtccgcgccg

SEQ ID NO: 44848 - DNA, 30 bp, Homo sapiens; identical to SEQ ID NO: 5947
  chr7:148506156-148506186
  hyper

SEQ ID NO: 44849 - DNA, 80 bp, Homo sapiens; identical to SEQ ID NO: 5948
  chr7:148506411-148506491
  hyper

SEQ ID NO: 44850 - DNA, 90 bp, Homo sapiens; identical to SEQ ID NO: 5949
  chr7:148507423-148507513
  hyper

SEQ ID NO: 44851 - DNA, 101 bp, Homo sapiens; identical to SEQ ID NO: 5950
  chr7:148508711-148508812
  hyper

SEQ ID NO: 44852 - DNA, 185 bp, Homo sapiens; identical to SEQ ID NO: 5951
  chr7:148511049-148511234
  hyper

SEQ ID NO: 44853 - DNA, 108 bp, Homo sapiens; identical to SEQ ID NO: 5952
  chr7:148512013-148512121
  hyper

SEQ ID NO: 44854 - DNA, 35 bp, Homo sapiens; identical to SEQ ID NO: 5953
  chr7:148513817-148513852
  hyper

SEQ ID NO: 44855 - DNA, 122 bp, Homo sapiens; identical to SEQ ID NO: 5954
  chr7:148514300-148514422
  hyper

SEQ ID NO: 44856 - DNA, 77 bp, Homo sapiens; identical to SEQ ID NO: 5955
  chr7:148515085-148515162
  hyper

SEQ ID NO: 44857 - DNA, 201 bp, Homo sapiens; identical to SEQ ID NO: 5956
  chr7:148523535-148523736
  hyper

SEQ ID NO: 44858 - DNA, 30 bp, Homo sapiens; identical to SEQ ID NO: 5957
  chr7:148525927-148525957
  hyper

SEQ ID NO: 44859 - DNA, 120 bp, Homo sapiens; identical to SEQ ID NO: 5958
  chr7:148526815-148526935
  hyper

SEQ ID NO: 44860 - DNA, 30 bp, Homo sapiens; identical to SEQ ID NO: 5959
  chr7:148543654-148543684
  hyper

SEQ ID NO: 44861 - DNA, 30 bp, Homo sapiens; identical to SEQ ID NO: 5960
  chr7:148544315-148544345
  hyper

SEQ ID NO: 44862 - DNA, 30 bp, Homo sapiens
  chr7:148581693-148581723
  hyper
ggaccgggagacatcgcgggggcccggagc

SEQ ID NO: 44863 - DNA, 30 bp, Homo sapiens
  chr7:148680410-148680440
  hyper
gggacccctgatcccgggggggccactgaa

SEQ ID NO: 44864 - DNA, 30 bp, Homo sapiens; identical to SEQ ID NO: 5961
  chr7:148788313-148788343
  hyper

SEQ ID NO: 44865 - DNA, 30 bp, Homo sapiens
  chr7:148822706-148822736
  hyper
agcctacaacaggccgagaaacagatcttt

SEQ ID NO: 44866 - DNA, 30 bp, Homo sapiens
  chr7:148823220-148823250
  hyper
ccccaatccagctgcgacagggacccgagt

SEQ ID NO: 44867 - DNA, 30 bp, Homo sapiens; identical to SEQ ID NO: 5962
  chr7:148845054-148845084
  hyper

SEQ ID NO: 44868 - DNA, 30 bp, Homo sapiens; identical to SEQ ID NO: 5963
  chr7:148857608-148857638
  hyper

SEQ ID NO: 44869 - DNA, 30 bp, Homo sapiens; identical to SEQ ID NO: 5964
  chr7:148892477-148892507
  hyper

SEQ ID NO: 44870 - DNA, 159 bp, Homo sapiens
  chr7:148936557-148936716
  hyper
ggctttgcctgaaacgcggaacctggtcttgacttttgagtgactgagccctcctggtgcccgcactctggccgggagtgccaagcagcgttctccctcccgccgcacgggggcacaatgggaagcctgcacagtgaggaagagcggctggagccggtc

SEQ ID NO: 44871 - DNA, 359 bp, Homo sapiens; identical to SEQ ID NO: 5966
  chr7:148982134-148982493
  hyper

SEQ ID NO: 44872 - DNA, 30 bp, Homo sapiens
  chr7:149111875-149111905
  hyper
aagcccggaaacccgcggggcttttctaca

SEQ ID NO: 44873 - DNA, 122 bp, Homo sapiens
  chr7:149112126-149112248
  hyper
tgcgcagagggaacgcggatttacccggcatggtctttggaaatcagtgtgctgtggaagcaggtcttgctagagccaagaaacctctaaaagccactattcagggggcacccggatttgaa

SEQ ID NO: 44874 - DNA, 37 bp, Homo sapiens; identical to SEQ ID NO: 5968
  chr7:149112420-149112457
  hyper

SEQ ID NO: 44875 - DNA, 30 bp, Homo sapiens
  chr7:149119392-149119422
  hyper
ctggttcggggctgcggccgggcggctccc

SEQ ID NO: 44876 - DNA, 442 bp, Homo sapiens
  chr7:149119681-149120123
  hyper
gggcacccagcagcgcgctcccgttctcatcagacgggagaaaaaacgcccaggcagaggaacgtctaaaagtcaagtcatcaaaattaatgtaatcgagaaaatgtgcatatttaaaatatggatagagacgcataaatacatctttaaaataaaaatataatcgtttgtgttaagtccttgctccattggctctcagctgcactcacagcaccagtgagaccgacacggttgtgccccatcccacaggcgccaaatggagggcgcagggttttaggagctcgcgtagggcctctcgggcggcagcaatggagccgcgaggccggcggggagaccgaggacgggacccgctgagctctgggtgagctggggggactcgaggggacctggatgggccagaggcctggcttggggaagggccccttcccggttccccaaggtc

SEQ ID NO: 44877 - DNA, 30 bp, Homo sapiens; identical to SEQ ID NO: 5969
  chr7:149120634-149120664
  hyper

SEQ ID NO: 44878 - DNA, 30 bp, Homo sapiens
  chr7:149157788-149157818
  hyper
agtgtcgagcgagccgcccggcggcgacgg

SEQ ID NO: 44879 - DNA, 310 bp, Homo sapiens
  chr7:149411417-149411727
  hyper
taccaccccagcaaacaggcacgcaaaatgtgacacgaaggtaggtcatggctgcggcgagcgggggcgcgggcgaaagacgtgaggatgtacgggggcctggcagctgctctgtcccacccacgcccggccggaccctcgacccctttcactccaggtcgggtttccccgaccgcggcctctgggaaagatgggtccctcttcatccccaccatcagcccctggcacatgggacgcgctgagtggtggctgcgggaatgaatgagtgataagcggcgcgtacccgcgggcttgcacgcccacagccgcc

SEQ ID NO: 44880 - DNA, 530 bp, Homo sapiens; identical to SEQ ID NO: 5971
  chr7:149411834-149412364
  hyper

SEQ ID NO: 44881 - DNA, 30 bp, Homo sapiens
  chr7:149471029-149471059
  hyper
tgtgcttgcgagaacgggtccttcgaagta

SEQ ID NO: 44882 - DNA, 30 bp, Homo sapiens
  chr7:149535387-149535417
  hyper
gccaatagcagcttcgagagccgctcacct

SEQ ID NO: 44883 - DNA, 704 bp, Homo sapiens
  chr7:149570352-149571056
  hyper
gcctctgcctggttcgctgcagatggatgtccgcgaggacgccagccctccgcctcccgccgggtccctgaacgccggcccggccggtccaacctcattccgcttcccgccatcgaaacgcgaagcccccgccttcccccaaacgtctcagcgccgctggggcctttctggctgcgccgcctccgaccccaggccccggtccgcgcccgccgctcgctagtcctgggagtgaggagaacgcgtgctgaggacccggccagagggacagcggggaccgccctcccgctgcgtctctgaaagcgaggccgttcctcccgcgtccgacccccgcggggccgtcaggttcggggcggcccaggctgcgggtccgcagggcgcttcgggccgagccggcgcggcgcgtgaagggcaggggacgccccgaaagaccgctggggtgggaccccaagctccaggggtctttggaaataagaatgcggcgtgacgttggctgtgcgggcgcggggctgacgcggaccctataacccatcgccgaaaccgggcggccgcgcccctattcctcggcatttctctctgtccgcggccctgctcagccaatcagcgagtgggctcctaggcaggtcctgagtgacagcgcggcgggctggatcaggagatgcgcgtgcgcggcccggcccggctgatcgcttcgggtgctcgactcc

SEQ ID NO: 44884 - DNA, 31 bp, Homo sapiens; identical to SEQ ID NO: 5974
  chr7:149571412-149571443
  hyper

SEQ ID NO: 44885 - DNA, 238 bp, Homo sapiens
  chr7:149744520-149744758
  hyper
cgggacggcgatgaccgcgatctggcgccacggagcctgtctgggggcgcccggagagtcgtgggctgggggagggcgcctgattcccccccccacagatgcccccggccgacgcgtctcgctgcgcgctcagcccggagcccccgccgccgtcccccgcccccgagaagctcttacgtcctccttgtcaccatcgctccgcgcctggtactggaaccggggccggccatccgcgccg

SEQ ID NO: 44886 - DNA, 30 bp, Homo sapiens
  chr7:149745025-149745055
  hyper
agattaaaaaaaaggcggtggggaggcagc

SEQ ID NO: 44887 - DNA, 30 bp, Homo sapiens
  chr7:150053705-150053735
  hyper
agcacaacccatgtccgttgctctttaaac

SEQ ID NO: 44888 - DNA, 30 bp, Homo sapiens
  chr7:150065986-150066016
  hyper
gctccatggacgggcgccgcgtccctgcac

SEQ ID NO: 44889 - DNA, 363 bp, Homo sapiens
  chr7:150075301-150075664
  hyper
gaagaaaataaggtccgcctgcccaacagcaaccgtttgtagagtctcagaggcccagcttctgtctgtatctacctcatgccccagaggcagcttctagcagctccggagagcatcctgccagtgggagttgacccagctgcgccccctttgagggagaagtgtgaggaatttccttacaatggggtggggagttgcgaagatactccttcctgaaggtctggcagtctggaccggggtggcaactgggcggagatgattccgctcacgggaaccctacctagtaacccgacctagtaacgtaacctcagagccgttcctcagctagaaaacaaagggattaggccgggcgcgggtttgtaa

SEQ ID NO: 44890 - DNA, 30 bp, Homo sapiens
  chr7:150101918-150101948
  hyper
cgagggcagctcctcgattcggcccctttg

SEQ ID NO: 44891 - DNA, 819 bp, Homo sapiens
  chr7:150497118-150497937
  hyper
ccagccagggtccaggcgtgcaggcggcagaaggtggacgggacgcgccagccccaggcctctcctcccgctctccagccgtttttctggggagaaacacctgcacccagctgtccctccctcctacgtgagtcctcctggaaaccaggttggaggaagaaagacgtcctgtggacaggacggggtgggggcatggccctggggactcctcgtgacagagggtcctgcggcaagagggtctcccgggccgcggaggccctgcctcacctgcagtcctccgggagcccgcggccgagcagagcggacactagctgaccccgagcaggggagcgacgggagggcggagacggcagatgcacgggtgggggctgcggccccgcccaggctgcgcggtttcccgaaaccagctgcggcccgggggcccggcaaagggggttccgcccggaggagcggaccgggcgggagaagaccgagcccccgcgcgccccctgcgctcccactcgcgcacacttgcacgccggccctggccgggcggggctggaggcgagaacgaccccacgggctttcccagggccgtccgcccgcggaccctcccagctccccagagcccagtgaccctcgcgcagcaggagaaccccagacggaccccaggccctgcagcctgtcatgaacccgaggggctgaagttcagccccacccccgcctcccctccccgcctccccctccaactctcaacccacttctccagccagcgccccagccctcccgccgcccgctcgcaggtcccgaggagcgcaggtgaggcggcaccccactccc

SEQ ID NO: 44892 - DNA, 30 bp, Homo sapiens
  chr7:150574011-150574041
  hyper
tggacgctagatggcgccgctgagctcccc

SEQ ID NO: 44893 - DNA, 30 bp, Homo sapiens; identical to SEQ ID NO: 5977
  chr7:150595720-150595750
  hyper

SEQ ID NO: 44894 - DNA, 875 bp, Homo sapiens; identical to SEQ ID NO: 5978
  chr7:150671456-150672331
  hyper

SEQ ID NO: 44895 - DNA, 30 bp, Homo sapiens
  chr7:150676514-150676544
  hyper
ccagggcggggaggcgagtgttgacagctg

SEQ ID NO: 44896 - DNA, 220 bp, Homo sapiens
  chr7:150685651-150685871
  hyper
cctaccacccgatgccgttggctcctttcctatcccctgggtctccccctcccttcgtggtgtctgatcccacgattgtgctgaaatcgctcctcctcggctctctgctgccctcatgtggctgtctcaagaagggctggggctaccagggggcgcccaggatcaacacaggagccccttcagaccggcaaccgcgtccacagcccggaaccctcagcat

SEQ ID NO: 44897 - DNA, 1354 bp, Homo sapiens
  chr7:150714958-150716312
  hyper
tgagggtgtccgtggcgcttcacatccataagggcaaaggaacagatgtccccaaccccagccacatccacagtgaagtgatgaaaaaagtcgataatctccagggcacgagggcggaaccagaaaagcagaaacagcggggtgaggagcggggacaggagctcctccaggagggagacctggggaagcagcggtgaggctgagcaggggtcgctgaggggcccacgcgcgttatcaggaccaagcagtccccagcgaccctcgccagggcaagaagcctccccacccagtcactccctagactcctggtatagtccgtttgtctcatgccctctcccagacagaccctccgcgcagacagaccctccgcgcagacagaccccacaacttcctcctcagcccgccgtcgcgcccaccctcaccgctcggtactgcagcagctgcgccatctgccggtaggcgcggtccctgccgccggggccgggctcctccgggaggtagtgcatgtgggccagggctgtctgcagcaggagctgcggcgcacgaccctggcactgctcttccggaatgaaagacctgaaaggcgggatccgtggggggaaggggcctgcgattaggaggacgcgcggtgggatgtagggctagagggccccagtggtgggagaggtaaggattcggggggaacctcacatggccccagatcagagaaaccaacacacaccaccaccccgggcatctgccgtcgcacctggcgacggtggcggtgaccccgagcgcggtcatggcggtgagcacgtgctccacggctagcacgtcctcgtcgtagacggtgagcacaagcagcgcggcgaagagtgcacccgcgaagaaaacgagctggcgggccagcagcgtgcgcaggggcgcggggggcgcagcggtgcgcaggaaggcggcggcggggcggtaggcgcgggccaggcgcgcgcgcagctcgtgcggcagctcgttgaagtggcgcagctgcaagcgcgccaggcgggaccagccgcgcgcccccagcgcgccaggctcgcgccgcagcagctccacgtggctatagaagacgtgcagaacctgccaggccagcaccagcgggctcagcgccaggttcagggcggccagcagcagcactgtgcgcccccagcgcgctgctagggcgccccgctggtcgctgcgcttgtaggcgtgcggcagctcccagcccccgcggaagagcgagaagggaccgcggaagagcagcaggtcgacattgagcgccaggccgcggctgaggaaagccgcactgcctccccagggcagcgggcagcgggccggcagcaggcctttgttggcc

SEQ ID NO: 44898 - DNA, 30 bp, Homo sapiens; identical to SEQ ID NO: 5980
  chr7:150725068-150725098
  hyper

SEQ ID NO: 44899 - DNA, 297 bp, Homo sapiens
  chr7:150748196-150748493
  hyper
cccccacctcccgtccgccccgctccgcccgcgggcgtctgacgcggcccggtggcccgcagatgccatgcttcgcaaggactcgtgcgcctgccccaacccgtgcgccagcacgcgctacgccaaggagctctccatggtgcggatcccgagccgcgccgccgcgcgcttcctggcccggaagctcaaccgcagcgaggcctacatcgcgtgagctgcgcggggcgggcgggctcctccgagccgggggctcccgacggggcggaacggggcaggccaggccgtagccctagtgcg

SEQ ID NO: 44900 - DNA, 166 bp, Homo sapiens
  chr7:150754921-150755087
  hyper
tcgtatttctgcatcgcggcggccgcggggacccctgcgggccctcggttttaagactctggccccggcgttgcagaggaggcggcacctgagcctccagccccgccccgtctgcccgcgcagggccttctggggcttgtagtcctaaaacgactaggtctccccg

SEQ ID NO: 44901 - DNA, 30 bp, Homo sapiens; identical to SEQ ID NO: 5981
  chr7:150755882-150755912
  hyper

SEQ ID NO: 44902 - DNA, 30 bp, Homo sapiens
  chr7:150777639-150777669
  hyper
tggcgcggagtcggcgaagtcgggggcccc

SEQ ID NO: 44903 - DNA, 116 bp, Homo sapiens
  chr7:150778107-150778223
  hyper
tctctcccaaggggcgaggactccccgcccgccagcccgcacacactcagacacactgcaagagtgaaaacttcacagttactttaatctgcacgggttccggggaactcctctgc

SEQ ID NO: 44904 - DNA, 943 bp, Homo sapiens
  chr7:150784072-150785015
  hyper
atatctacgccatctacgacctgatcgagcgcatcgaggatttggcgctgcagaaccagatccgggagcacgtcatctccatcgagggtgagcggagccgggggctgcgggagccggggcgcagtggcctctccggcgccggccgagggctccacaggccgtgcctggccatgctctccctgtcgggggtccttgcgcgcttgaggaccaggccacgaggtttgccgatctgtgttgcagaaccggcgggcagcttcgccatatctcgttcggggacactttggggttgggggttttctgctgactgtgttccagggcgcgaaggtggtgtcgcttgggggggccgggaccagatctgtccaggcctggccggggaaggtgggcgcggcagagggcttcagctgcggggaggtggggtcgtgaccggggaggcttcttagccgctgcccgggccctgctccgcagtggggcgggggatcggagcctcgcgttagtggatggcagccttcccgggcccagcgcccgcaggcccggagggtggcgctcgccgcggcgccctctcccgacgcacaccccctacgccgcggcggccaagcgggagcgggccgggcctggcgctgggctgaggctcagcgaccgcgtgggaggcgccggcaggtccatccgcgctttggccgggtcatgagcctgacggggatccgcggctcctcggtctggaggcagctgctgggcagccgggtgctgaccgaccgccagggacaccgcacccggagtcggggaccggaaacccccggccactgcgctgcctagcgcttttttctctgggcccttaggccctggactttcgaccgctgagggcacaggaagtggtggcacgctgctggcagatgcctcgcaagccctggtgtggtgggtgctggaggcacccgcaggcaccccggtg

SEQ ID NO: 44905 - DNA, 343 bp, Homo sapiens
  chr7:150864053-150864396
  hyper
ggtgaaccggcctcccgccagccctggtcggccctagcacttaccgggcagacttggaaaagtctctgagaagtgcggaggcggaggtggtgggggctctgccactttctcccgggccggcagcagctcatcagcttccagcccaccctctgggcgtcggccgcctggctcggggttgtttcgggcggcagtggcggcggcggcggcagcggcggcggcgagctcctggggcccgtagaaagcgtcgggcggctccgcgaagctgggcagcgcggtggtcagcgccaccatcgagggcacagcctgacccagccccgcgcagaaggtgttggtaaggcggccg

SEQ ID NO: 44906 - DNA, 465 bp, Homo sapiens
  chr7:150864610-150865075
  hyper
cgctaccgcctccggcccgctgcatcttgttcggagctgcggccgccccggggcgctcctctctgggcgcctccgtgcgccccgcggctcgggcgccccgcgcggacacgcagggctcgctccctggctcccgggccgaggtggcggcggggcgcgggctcggcgcagtgtggctccggcgccgcgctccctctctctcataaggagggagggggcgggcgagcaggcgggctgggggtgtcgccctccggactcatccatcttcctcaaattacgcttcatttcctccctccgcccgccgccgccgcgcccggctcccgctccctccgcagagcccgttcccagcggcccggccggccggcccgggacccccacccgccccccgcggcccaaccaactattattaatggagattgatgaggccggacacgccgctttgtgaaagtttgcggccgacgagaaggc

SEQ ID NO: 44907 - DNA, 34 bp, Homo sapiens; identical to SEQ ID NO: 5987
  chr7:150869803-150869837
  hyper

SEQ ID NO: 44908 - DNA, 30 bp, Homo sapiens
  chr7:150924394-150924424
  hyper
ccaagagtgagacccgccttgaggactact

SEQ ID NO: 44909 - DNA, 30 bp, Homo sapiens
  chr7:150929280-150929310
  hyper
aattgggagaaaagcgctctcgagggtggg

SEQ ID NO: 44910 - DNA, 30 bp, Homo sapiens
  chr7:150942337-150942367
  hyper
cagcctgtctctaccgtgggcacacaaaag

SEQ ID NO: 44911 - DNA, 48 bp, Homo sapiens
  chr7:150948762-150948810
  hyper
cgcacttggggcaggccgtgcgcctgtcgggggcgagggcggccgccc

SEQ ID NO: 44912 - DNA, 30 bp, Homo sapiens
  chr7:150974438-150974468
  hyper
catctgcacgcccacgagtcacacacgcag

SEQ ID NO: 44913 - DNA, 390 bp, Homo sapiens
  chr7:151038573-151038963
  hyper
gctggcaaactgagcccgggcgggaagtcctggaagactgagcctggggtggcgttggacaccaactcccaggtcctcgccccacacggccacatcctcgcccagccccgcctccgcttagctccgccccgtcgcggctccgccccgcggtaaccacgcccacacaaccgtatccccgcccacagctggcttcgccttggccccgcccacaaccctctttccaagcggcggcggcggcggcggcgcgaaggcgacagcggcggcgggggcggggctggcctcacccggaatgaaaacaaacggcggccgctgccgcatccgggcactctgctggtcgcggcgggagtggcgtggcgcaggtgaggacacggcggccgagtgtcctcgacc

SEQ ID NO: 44914 - DNA, 127 bp, Homo sapiens
  chr7:151106438-151106565
  hyper
gcaggagctggggtccgcggtctggggccggtgagctgcggcgaagaggtcagggagggagtgggagggtctaccttgcaggagcgcgcagcactggccgtccgcggtgctccagagccgggccgtg

SEQ ID NO: 44915 - DNA, 399 bp, Homo sapiens
  chr7:151106589-151106988
  hyper
cgctgcccgtcggggctcaggctcagccagttgatgcccccgcggtggtcggcgcagaccctcagggccgacccgccgccccccatcccgctggcagggcggggaacaagaaggagctgcgccccgctagggaggggcgccccggggtccgcgcggcggctccgtacgactgcggcccgcggccatcgcggggaacggggagcccgactcctgcggaggcacgcggcgaggggagggtgaaggaccctagctccccgctgcctccagcctctgggcccgcgaacccagggcgctgcggggggcggcccactcgggacctccgccctgggtagagtcctgggcgcgcgggcagagagaacccccttcccagcaccgctcggaggatccacaccccaccgg

SEQ ID NO: 44916 - DNA, 266 bp, Homo sapiens
  chr7:151107395-151107661
  hyper
cgcgcgccgggaactcatttggggcgcagctccaccgacccctcggctactcgcctccaccaggcaagccaggtcctcccatgctctgagccctaaggactctgcccgaggggctctcggggacttgggggcggtcccccaatggagggtgcgacagggaaagccccgagtccgccctccctgggaaatcacgcgcacacccaggattctactttggtctggccggagtggggatgaggtgcgagccgctgcggggtcggtggagc

SEQ ID NO: 44917 - DNA, 282 bp, Homo sapiens
  chr7:151136925-151137207
  hyper
acagggggcgaaggcggagccccactcggtttccttggggttgagggacgcactcaccttccccgagcgctgcgccatggtgcgccccgccccttccgcgggtccccgtttacaccgggcagcgccctgctggctcagcgccgccccggacaaaagatttgctgggccggccccggagcgttagtgctgtcgggcgtgctaagcccgaggggccaccaggcggttgggacccgccgcggccaccctgtgccaccgcgagtgcagcccgccctgcccggggtc

SEQ ID NO: 44918 - DNA, 30 bp, Homo sapiens
  chr7:151145539-151145569
  hyper
ggttccaggagcctcgccccctgctgggga

SEQ ID NO: 44919 - DNA, 199 bp, Homo sapiens
  chr7:151215382-151215581
  hyper
caggcggtggaaagcgcagttggggagtgcatccagtgagcggcaggcaggtacaagcttcccatgacagatagtcaccccgttccgcaatcacgggagcctcggaaccctcgctttcacctccccatcccctcaactgtggcccggtgcacgccttctatagacagttacttcaaaacagcccgaaaagatgaactaa

SEQ ID NO: 44920 - DNA, 65 bp, Homo sapiens
  chr7:151217152-151217217
  hyper
ctaccgcgctgttgggcgccggctaggtttgaaggcttcaaacttccaaccggttaggggcgggc

SEQ ID NO: 44921 - DNA, 30 bp, Homo sapiens
  chr7:151217470-151217500
  hyper
gcgtcaccgacggccgaaggactgtgggaa

SEQ ID NO: 44922 - DNA, 397 bp, Homo sapiens
  chr7:151572747-151573144
  hyper
gccacacctcccaccgccctaccccgctacgtggaggcgaggaacagtggccgcgggctaccggggcgccttccgaaaagagaaccactacgcggcccgccgcccctctggctggacaaagtgaagccgcaggcagatccgagtcgccaatgtcctcccgggcggctggcgcggacggggctgaagttcaatgcagcctgcacggattagggagctccgagcccccaaataccacagagacccaaagtacactcccggggcgggggaagggaacggcggcagaggagacccccgctccaggcccagaaacgcccggagagaaactggagcggagggggtgcattggaagacgcagctacacagctccccccaacccccgccccgctgctttccccac

SEQ ID NO: 44923 - DNA, 30 bp, Homo sapiens
  chr7:151574933-151574963
  hyper
ttgcgcagtggatccgcggtaagtgcgtgt

SEQ ID NO: 44924 - DNA, 693 bp, Homo sapiens; identical to SEQ ID NO: 5993
  chr7:151722450-151723143
  hyper

SEQ ID NO: 44925 - DNA, 77 bp, Homo sapiens
  chr7:151723167-151723244
  hyper
cgtctcctgaggcttgttcgcgggcgtgggggcgaggaccagggcgctggcctcgttttcgcgtatttaggacggag

SEQ ID NO: 44926 - DNA, 33 bp, Homo sapiens; identical to SEQ ID NO: 5995
  chr7:152133405-152133438
  hyper

SEQ ID NO: 44927 - DNA, 31 bp, Homo sapiens; identical to SEQ ID NO: 5996
  chr7:152160442-152160473
  hyper

SEQ ID NO: 44928 - DNA, 30 bp, Homo sapiens
  chr7:152161182-152161212
  hyper
cgaactaggtcacgcgctccgcgggtcggg

SEQ ID NO: 44929 - DNA, 30 bp, Homo sapiens
  chr7:152373188-152373218
  hyper
agactcaactttcccgccaccaacgccatt

SEQ ID NO: 44930 - DNA, 30 bp, Homo sapiens
  chr7:152373448-152373478
  hyper
tgtaaactttggttcgttattattatatta

SEQ ID NO: 44931 - DNA, 30 bp, Homo sapiens
  chr7:152457591-152457621
  hyper
tactgccctccctgcgcttttccagtatga

SEQ ID NO: 44932 - DNA, 114 bp, Homo sapiens
  chr7:152591571-152591685
  hyper
ctcccccttcgccccggccctcggtgggcgcctctgacctgggccgtagtttccaggcccgcgcgtccccgaggcggacgccagagggcgcgcgccccccactcctgcccgcgt

SEQ ID NO: 44933 - DNA, 124 bp, Homo sapiens
  chr7:152622389-152622513
  hyper
ctgggcctgggaggccggtggcgggagcctcccctacagtgaggtgggtggggggcgccacacggcgtctcagggagaggggagaggcggcttctgttccgggaagagggaacggtggaggccg

SEQ ID NO: 44934 - DNA, 308 bp, Homo sapiens
  chr7:152622545-152622853
  hyper
cggcggggatcgcagggccgaggggccgggcgcgcgcgggggagggacccaggccaggggccgctcgcctcggggcggggtctctggagagcgcgcagaggggacgcttcgtgaatgcctgccggcctgaaggatgtcgctgatctctgcccccttcgccaaggccgggccaggcgagtaggggcgcggcctgagcccctgcggtgattccccaggtgtggaatcaaaacagatcccagagcgcgatccgcggggcttttggaaggagccgcccagggctggagattccgacgcaaagacccggaggc

SEQ ID NO: 44935 - DNA, 21 bp, Homo sapiens
  chr7:152623254-152623275
  hyper
ggcagggagggacgtgcggct

SEQ ID NO: 44936 - DNA, 95 bp, Homo sapiens
  chr7:152890308-152890403
  hyper
ctcacagggcccacaaggtggcgcgtgagccgcagagatggcgaggagccccgcgggcgaagaggctgggcggcggggtgaggaggaaccctgga

SEQ ID NO: 44937 - DNA, 30 bp, Homo sapiens; identical to SEQ ID NO: 5997
  chr7:153583852-153583882
  hyper

SEQ ID NO: 44938 - DNA, 28 bp, Homo sapiens
  chr7:153585221-153585249
  hyper
cccgcgccggcctcggtgctccgagtcc

SEQ ID NO: 44939 - DNA, 70 bp, Homo sapiens
  chr7:153585293-153585363
  hyper
cggggcaggcgccagtcgctccgctccgttccagacgccgccgccgggcgggaccctgctccctggattg

SEQ ID NO: 44940 - DNA, 33 bp, Homo sapiens; identical to SEQ ID NO: 5998
  chr7:153749741-153749774
  hyper

SEQ ID NO: 44941 - DNA, 65 bp, Homo sapiens
  chr7:154705760-154705825
  hyper
gccgagagggactgcggacccactcttggcttcctctttagaggagagatggagcggggtccgaa

SEQ ID NO: 44942 - DNA, 533 bp, Homo sapiens
  chr7:154861684-154862217
  hyper
tccagtccacccctagagggacgtgtgggggtggctaggggaacgttttgaggaaagttcattggtcaacttgttcaacgtggcaaactcatttcaggcaagagaggcagcaccgtggacagcgccaaccctcctgctcccgggcggggcgaggtggcagcaccgcggacagcaccacatgtggtggcgcacactgggagccgccaggcgcggggagcgcagcagcaccgcggacagccccaaagccgcgcgctctgagccaggaggcggggagagatggccttatcagctgatggcttacgtagggctagatctccacttggataaggcaggtctcggtgggcgcgccagcattcgctctccggagctgcagcctccgaaggggtggcgggggcaacagggacagaaggcaggtcccagaaagcaggttcccccaaaactggcttccctagcacggagttaaggctgcagccggctgcctagagagaagggtgggcagggagacaacgcggtgagagcgactgctctgacgc

SEQ ID NO: 44943 - DNA, 30 bp, Homo sapiens
  chr7:155089015-155089045
  hyper
ggccacaaggggcccgaaaaaatcacccaa

SEQ ID NO: 44944 - DNA, 2314 bp, Homo sapiens
  chr7:155164456-155166770
  hyper
aaggcgagcggaccgcgctgcacgggtccaggctgggtgcccctctcccctggggtaaagaggcagcacaggttgggacagctagatgggggcaatccaggcgtcctgcccacggtttcctgggagccaacaaaggcgccgagacctcacccgtgtgaggcaaccgccccgtggtcccacagagcttctggaagtctgcgtcccggccttcccgatgcaaggcgccctctccacctgcctcggccgtgagcaggttcaggagggcgagaaaggttaggccgagcggaaccgcgcggccagcgttacgcagggtgccctggacacccctaggcgcccacctggacttgttcccacctcctctcgccccttgccttcttaacccgcattacccgtgtaggcctggggtggaatcggactacttgttcgggatttgctcgagaacattctagggagaaggcacgcccggctttgggcttggccgagagtttagggcaggagcgccggcggggagctccccgggtgctggagaatgcgtgtccggaaagaagtagggcgcgcttcgtggatgcaaccagggccgtctcgcgcactttcttcctaccctgggacagcgcctgaactggagctgggcgcacacactttacggagccagctcgggttcttacgccctggctcacccccgcccgccgccccaggatgcaggtgctgcggcgctccctggtagcctcccgcgctccctgggggcgcgctttcctccatttcagggaagtccccggacaggtgcccacgttttacgctgtccggtagaagcccgcgggctcaggccgacttgcgcggccgcttctccccagggagagaagctggagcttcccccacgcggccctaaggcggggccggctgggccggagtgggcgcggccagggtgtcccagcgcgccccctgccgaccgcgcgctgcggggggcaactccacctcccctggggaggcctcgtccccgctgcagggagactaaagcgtgggtccgcgaccagccggtttaggaacgaaaactctggaactaaaaacaaaaaataaaactggtgagtgcgcagcgtggtcagtgtttccctctgggtaatgcttggccaagggggaagatcgagtactcccgcccacatccgcctcccccaggagggaggattccctctctgctcacccaccctgacccacgcctcccgccaggtccactgctcagacaaatctgtaggtttctgagtatccgtatctcgaaaagcttcaatgcacaaacgaggttttaagcccatcgcggcttcgcaaggggaaggggctgcttccctaaaaacaaaacacaacaaaaaaggcaagggggtactcttgcagatggactggaattagtaatttagccagggtctcttccaaactcactgcaaaattcgccagcgtctcattcttcacacacggggcaccacacgagaatcaccccctccccagaattttgcaaagcacgtttgctgagttttctcgcctttccttccgacaagctcgaactggaaccagcgctctcccctctagacctgcctccgcgccccacccttcttcccccacacagtccctccgcagggagaattcaggtgctaaaaatgctcgggcctcgcagcttcctccctcctcctcggttcctcgaatgacccaagctgcctctttccgggcccttggaagacggtgcgaattccgcggcggcccgctctcgccagcgccacagccctgactcccacccggaggcctgagttcaaccgctttcgcttccttgcgggccgttcaaccctctgaatacgcagattcatttatttatgttttttaatgtagtaagtgggcagctaaatgaattgcaatttgtcatttttatggttaatttgaaatctcgctcttgttgcctaatcctgttagttggtggcaaaacaaggagaaacgcgtgtttcggcagcagtgattctaacaggcgttttatgttaaattacagcagaacccagaacaaaagcaggcggcggacttgcagtcccagcggcctcggccggtccgcgctgccggtgtgagccccgaaggaaagcaccccaagctggctgaccccgcgcacccccggccacacccgcccatcctggcttcgagattaagaagcccagtttggcaccccaattatgtttggcaatgtccccggtgccccagacccgcactccgctgcctcctggcttctcatgcccgcgaagcacggcctcgccctgggcgcggggcatcaccggcgcggaggcccgagggc

SEQ ID NO: 44945 - DNA, 66 bp, Homo sapiens
  chr7:155167023-155167089
  hyper
tggagctgggggagcgggagcaggggcggcccggcgggcgggccgggacccggcttttccggctac

SEQ ID NO: 44946 - DNA, 486 bp, Homo sapiens
  chr7:155167174-155167660
  hyper
cgctggcgaggcgtttcttgtccccggcgcccgctcggtgccgtctcagtgagtttgattgaaacgcggctgcgggaaggggtcgacagaggcaagctgcgagcaaggcgggggtgggggcgaggaaggggacccggagagctcccggagggcttggccggccaccgccgcgcggcgctgctcggggactgctactttgcaaggcggcggctgcccctgcggggttcgggttgcagggtcaagtgtcacgtcctccgcaatctccaatattcctgtaatgtatttaaatggacgaattcattacgcggggccgtgtgaatggggcgaggccgcgagcgcggcgcgatcagtagcgcccactaacagttcgttctgcacggcggagcgcgagaccgcggacccacggaagccccctcaatggtgtttgcgtcctcgccgccaccggcttggtagggtcctttagggaaggaggaagagttcaggcac

SEQ ID NO: 44947 - DNA, 337 bp, Homo sapiens; identical to SEQ ID NO: 6005
  chr7:155168225-155168562
  hyper

SEQ ID NO: 44948 - DNA, 708 bp, Homo sapiens
  chr7:155170270-155170978
  hyper
gatttcccctgaacaggctggcggtgggaagcaggcattggagtcccacggctcactggactgcagcagcgagcccttcacggttgcaaaggaaggaaattcctagcggggcaactcttcagcgtccgccccacagacctagcacgatgtccttttctgtctcaagatacatctggctgggcttccctaaaaccgggcttagttggactccttggacctggggatgaattcttgccaactatctccaaatatttcccctacaccatgccagtgcaattcatgtctccaaaccccctctcctccacaaaaacgaaacaaaacaaaaccccaggtccaggagctcaggcccaggccggatccaagacgcggcagccaggcagccccgccgcgagcctgtgcgggcttgagccggcttggcccccggaagccccagccccgcgctcggcagcgtgcgcccagcgcccagaagaagcagctccaggcggccgcgctccccgtcccgccgcggtgcggtcggatgcccagctcgcgtccagacccgcgggatgcagacccggatcagtcaggcttgagggctgctccgcatagaccaacgtccggggaaggcacacagtggccgagggcccgcgcgcttgggctacggctgtgatggtatctgcgctgcttgcgccttggggatgggaggccgcctttgctgactgaagggcc

SEQ ID NO: 44949 - DNA, 900 bp, Homo sapiens
  chr7:155174107-155175007
  hyper
tttgaaatgtcatgaacttggcgctttcagaccaaaccgccgggctcaggcccgagacaatgggattgtcagagggccagcgcggagctttttctgcgtgttcacggagcgttaagcctttatcccacagaacggctctgtctgaccgggtcagacaaaagccaacttgcatcttccgctccgaggggatctgggcagagcccgggtacagccctgcgcggccccagggagaggggggagagggcgcgtgtccccagccctgccaagtggcgtggggagcgcgaggccctcctcggtcagagccaccaactctggtctccgtggacatcccccttcccccgcccgctcccgaggctctagggcggcctcctggccgctgccttctcgcacccagggtcttcggcctgggctccacacctcaggcccctcaagtaatcggcctcttggtggccgggcactgcctttccggctgctctctgcacccgtctgcccctccggcctcccctggcggctacaggcgtccggggccctcgctccccagctccaggcgtcccgggagccaggcgcgcagcggggcgagttctcgtgtccgtgtgagcgcgggcgtgtgtatgcgtgcgcgtgcacgagcgtgagtgtgcgtgagcgtgagtttgagtgtgcatgcgggtgtgaatgtgtacatgtacacgaatgtgagtgtgagtgtgcatgagcgtgagcgtgcgtgtgcgtgcgagtgtgcacgagcgtgactgtgagtgtgcgtgcgtggaagcgcggcggggagcctggctgaaggcctgctgcctgcatggctgtcagagaaaaacagaagtgggagcctgctgcgggctccgagaggacttgatgggagccctggcgcgcgctgggcaccgc

SEQ ID NO: 44950 - DNA, 902 bp, Homo sapiens
  chr7:155241406-155242308
  hyper
aggctgcgctgagctcgagctcgccgcccgggtggacccgccctgttcaagcgcggaggggcggaggcctggttgggttgtagcgtggtgcggagcaggacgccgcctcgtgccatggtcactggagacgcacgcccatcttccctcccgggcccgtcgatcctgccatcttccgctcccggccgctcgtgggtgttcgtcatttagaccttccccgtgcttcatgggacgcaagccctcccccagagttcggttttgcaaaagaggtctggagccctcgctacagatcccctccctgggccacggaggatgagaagggtcaccgagccgagccgtaatcctgcgtaacccctgacctctctccttccctgcccccacggcaccccatcgtcccctccccgtctccgaggtcctccagaaaacagcgcagaattgtgcagatgtttaggagatgtgaagatgctggagatgcttaggaggcgacggttacgcgaggagaattgcttccaggtgcgcttctggaacgcacggagatcccccggcggggaaggggccggggctcgcgtcacttagtgtctgctcaccgatttccctctgaagagggggcccagggcctctgctgagggagcggggaggcggtgcgggcccctcccgggcacacatgggtgtccgctccttcctccccctcccctcccctcgcacggagagcggagagcggagagcggagagcgacagggaggcagccgaagacttgaattttgaaaggggagctggcggcgaatggtgaatgagacagctacttaggaagcgagtccagccagcccgggaggcggtggagacccacgcccggaagtaaccggattaggtctcagaatgtgatcgccccccgggtcccgggggag

SEQ ID NO: 44951 - DNA, 139 bp, Homo sapiens
  chr7:155242379-155242518
  hyper
cgcctctgggcgttccgacggggtggcggtgggggtcgggggaggcccttgagaaccgtgcggcccggggagagcccacccattgctgagccccgacacaggctttgaagttgctgcagtggctcagcccctcccccgt

SEQ ID NO: 44952 - DNA, 834 bp, Homo sapiens; identical to SEQ ID NO: 6009
  chr7:155242699-155243533
  hyper

SEQ ID NO: 44953 - DNA, 681 bp, Homo sapiens; identical to SEQ ID NO: 6010
  chr7:155243755-155244436
  hyper

SEQ ID NO: 44954 - DNA, 31 bp, Homo sapiens; identical to SEQ ID NO: 6011
  chr7:155244946-155244977
  hyper

SEQ ID NO: 44955 - DNA, 471 bp, Homo sapiens
  chr7:155246272-155246743
  hyper
gcccccctccccgggcgagcctgggctaagtatcaagtcaggacagaagggcggtccccagtcggctcctggcccactctgcttccccaacacctagggagcttgggctcagcacaggcgcttctccagcgatcggggcagaaccaggacgtgcaatgcgactgcccccccctccccgctccccggcagagcttctgtccgcgccaacccacccaccaggctctgcccgcgccacgcgcgcccctggcaggcctggggcggggaaaggcgaagcgctgggcacgcgagggcctgtgcaccccagttcctacgacgctcctggcccttttcaggcccgccgctgccgcatttaaccccctccttccgggggttattctgaagaagtctcagaccctagacccagcctcccagaccccgtccccgagctcgcccggtgggcctgtaggccggtcctccttcgcccagaggaga

SEQ ID NO: 44956 - DNA, 621 bp, Homo sapiens
  chr7:155246858-155247479
  hyper
cggtggctctctgctcgccccggggaaggtgttgctctcctatcggccccaattccccgcccggcgcctggggcttggctgcggggctcggctcccagccgagggcgcagggctggccaggcctgctttggctgaggtggagatctcgctctcagggattgttgggcgtctctgccccgcgagtaacgagaccgccgcgagcgaacggctttcattgagtccatttttccaagtgtcaccacgtcaagctagagaagcgaggcgagtggaggggacgcagaggggccggaaaagtcacccttctctggcctcgttttcagataaaaacgggagcctggctcggcatccgggcgcccggtgtctccggggcgcttcactgaggttttgtttgcaaaactagcgtccgtgtcctgaagcgcacggcgtctggaagctgctttcctgctcgccctctccgaggcccctctttgtgcagcgagcctgagaaatatggaggaccgtcctccgcaagcgggtggtcgcgggcgctctccgattcctgggtgaagctagagggaaaacggggttcccgggtcagtgccccactttccatcccgggagaaactaatgtccggagagggc

SEQ ID NO: 44957 - DNA, 487 bp, Homo sapiens
  chr7:155247650-155248137
  hyper
cggccgaggccggtcctcatgcgcgcttctcgaagcttcctgaaacaccttgcggagttccgtgtgtatagaactcagcaccgcccagcccctgggcagctcaactttctgcagccccatcccagcttccccggccctttgaacggtgacccctcttaccgctttcccagagttgtttcgtgtttgggtccactctggggggcccggtaccctctagttatctctctcttcatttatttctctttctcctattcctccctccacctctcaccttcctcctttccaggagagcgacccacgaattcctcttcctccagccaaccccagggcccagcccgcagaccctgcgagggcaggtctctgcccaccggcccgccaggcgccctggaggtgacgctctgcttcccagagtctctgttgcagccacgaattggggtctgggtcgcaggaaagcacagggctgaagcccagcgtcttggggccattt

SEQ ID NO: 44958 - DNA, 726 bp, Homo sapiens; identical to SEQ ID NO: 6015
  chr7:155249577-155250303
  hyper

SEQ ID NO: 44959 - DNA, 55 bp, Homo sapiens; identical to SEQ ID NO: 6016
  chr7:155250323-155250378
  hyper

SEQ ID NO: 44960 - DNA, 589 bp, Homo sapiens
  chr7:155250669-155251258
  hyper
cgccccgggcggcccaggcggcggcgccggagcccgaggcggccggacgcggagaggagcggggagcccgggaggcggcccgcgtccccgccggaccactgcgactgtctagaccccggctgcgcggcgaagtcgaggacttggctctgttgaatctctcatcgtctgggcgagcggggcggctcgtggtgtttctaacccagttcgtggattcaaaggtggctccgcgccgagcgcggccggcgacttgtaggacctcagccctggccgcggccgccgcgcacgccctcggaagactcggcggggtgggggcgcgggggtctccgtgtgcgccgcgggagggccgaaggctgatttggaagggcgtccccggagaaccagtgtgggatttactgtgaacagcatggaggagaatgaccccaagcctggcgaagcagcggcggcggtggagggacagcggcagccggaatccagccccggcggcggctcgggcggcggcggcggtagcagcccgggcgaagcggacaccgggcgccggcgggctctgatgctgcccgcggtcctgcaggcgcccggcaaccaccagcac

SEQ ID NO: 44961 - DNA, 203 bp, Homo sapiens; identical to SEQ ID NO: 6018
  chr7:155251346-155251549
  hyper

SEQ ID NO: 44962 - DNA, 193 bp, Homo sapiens; identical to SEQ ID NO: 6019
  chr7:155251661-155251854
  hyper

SEQ ID NO: 44963 - DNA, 112 bp, Homo sapiens; identical to SEQ ID NO: 6020
  chr7:155251890-155252002
  hyper

SEQ ID NO: 44964 - DNA, 30 bp, Homo sapiens
  chr7:155252228-155252258
  hyper
acttgtcctaccatccggttatcccggctg

SEQ ID NO: 44965 - DNA, 440 bp, Homo sapiens
  chr7:155252633-155253073
  hyper
aatcatcaactgcattccatgcgggtctgcggctgggaaccgccattagaagtggactgtttgaccccgagctggcagcggatccccgctgcccccaaaccctcaactattttgcgggggtcatttgcccagatcacagcaggagtgagccaacccttgggccgccatcccgcagaactatgcgtgcatatttctgatgaaattcagatttctcagctagatctgaaatttgctccattgttctcgtcttcctcctttgttaatatttaattaacatacaggctcacaatgccgggcgaggagactcggccgggctttgtgcggcgcgggagttcgctgagccagcccccaacggcccgggagctgggcagcaccgcccggcccggcctggcccggcccagctcagcccagcccaagtcgcctatcttcatgggctttaa

SEQ ID NO: 44966 - DNA, 383 bp, Homo sapiens
  chr7:155254934-155255317
  hyper
ctggcggttcagcctcgagtggccttgggcgagtcacttccctcttggggccccagaatccttacccggtgcctattgggtggcacacctctgggtaacctgacttctctctgtccaccgtatctacccaggtcccaggtctcgaaaaccaaagaagaagaacccgaacaaagaggacaagcggccgcgcacggcctttaccgccgagcagctgcagaggctcaaggccgagttccagaccaacaggtacctgacggagcagcggcgccagagcctggcgcaggagctgagcctcaacgagtcacagatcaagatttggttccagaacaagcgcgccaagatcaagaaggccacgggcaacaagaacacgctggccgtgcacc

SEQ ID NO: 44967 - DNA, 709 bp, Homo sapiens
  chr7:155257753-155258462
  hyper
aggaggaagtgttcaaaactacggtgctattccagtgactacatttttttaaattttgcgaagttcaacaggtctccctccggctgggtgctcactggccctgccacccgtgctggaccgaggcgctttcccctggggacaggaactttttactccactgagacaaagagactctccttttcaaagtgtcatttttgtttaccttttgttgtttcccccccaaaacaaaagactttgtacaacttcctaagcaggattgggggagggatcagcttcgcctgtgctgaccgcgcctctggattccgctcatcaggaagtgtttggggtctttgagcgagtgatctacgcgttgaattgctgtttttccaaactttcatggcttaaaaattttttttcttctccctgtaaaagaaactcagagactggtgatctgttaccgaagacgactttttaggcgttttctgtttccccaggcagctgggccgttggcgttcccaggcggaagcggggcctctgggctgggcctctgccctgccaggaagcggtctgggggctgcccctcgggattttcagaaccctggaaggagagagctggggtctcaccgcggagactcccgagttctcgttgcctgggcccgagctgcgccccagggtcatcgctgatggcgcgagaccacgcattccccgcgaaccccgacttctgaacagt

SEQ ID NO: 44968 - DNA, 49 bp, Homo sapiens
  chr7:155258814-155258863
  hyper
cctcatggagagccgcggctgtgccacctgcctgctttcgccatggaga

SEQ ID NO: 44969 - DNA, 163 bp, Homo sapiens
  chr7:155258914-155259077
  hyper
cgctggttcctctcgggcctcccgggctctgcgtgccgcggatctggacccggactgcagacaccgccccacgactgggcccccggccagactgttaccccacaggaggagggttccctaagtgtgcagaagaggaaagctcatttataaagtccttgctcct

SEQ ID NO: 44970 - DNA, 503 bp, Homo sapiens; identical to SEQ ID NO: 6025
  chr7:155259119-155259622
  hyper

SEQ ID NO: 44971 - DNA, 124 bp, Homo sapiens; identical to SEQ ID NO: 6026
  chr7:155259833-155259957
  hyper

SEQ ID NO: 44972 - DNA, 852 bp, Homo sapiens; identical to SEQ ID NO: 6027
  chr7:155260038-155260890
  hyper

SEQ ID NO: 44973 - DNA, 594 bp, Homo sapiens
  chr7:155261070-155261664
  hyper
cgcggtccgggcgcgcgctgcctgcgcggaaggagccgcctccctcctttcagcgaacgcattcggggttcccccctcccgccaagtcctttgtctggaaggggactggcaggctctgtcgtcgccgtgtgcccccctcctttccccagcctctaccccctccaactaactttcctttcttcccttctcttttcttccctctctggatgggtaatcacaggctccgctgccaagcgcgctgcgaggagccgctgcccgttcccgtcggtgcccctccccgcggcagcctggccgagtccgcccagcctgcctaggacgtccctgacccgcgcgctcagtttcattcagtggccgtgggatgttgcatctgagtttttcctttaggccaaaactttgtcccgaggtttttctgagagggttttattctccaacagcaacaacaacatgcgaattcttaaaactagtatttatttcgattcaggcagtcagggaaatggcagaatcaccagccgtttgcagaattctacgctcgccaaggcaagtactattagtatattttctcccaacgttttcgttgtaaaatacacatgacaa

SEQ ID NO: 44974 - DNA, 190 bp, Homo sapiens
  chr7:155262412-155262602
  hyper
gcaccctccacagcccaggtgcggttttcagtagggcccttacaccttcttgcttttcccagccaatgaggcatccacgctgctgcttaggagtaggggaaaggatgtaatgcacgcgagaggcagtgtccacaccgtgagaaaaaagtgggacggtggcaggaggtgcgggagagtgggacaggattct

SEQ ID NO: 44975 - DNA, 630 bp, Homo sapiens; identical to SEQ ID NO: 6030
  chr7:155264016-155264646
  hyper

SEQ ID NO: 44976 - DNA, 281 bp, Homo sapiens
  chr7:155301650-155301931
  hyper
ttttgtctcctttcctaggagcgaatctcttgaaagttctctccttcgtcacagggtcttcctcaagcttgtagtcgttcattcgctcacagactttctccaaaagatccgttaggaacgcctccgactgagctagggggatctaagaagaaagacagggcgaggaaacttgtcttaatgttaatgttacttcaaagaccttccggcgagtccacatggaaacgccacactctccctgaatgcaaacgtgtgccacttccctagcacgggcccagaagacg

SEQ ID NO: 44977 - DNA, 567 bp, Homo sapiens
  chr7:155302328-155302895
  hyper
ctgcccttggctgcgcgtcccccacgctgcagccgcgcgatggcccgggctggggtggacgtggggctgggagaggaaggggctcacggacgggcgccccatctcccaggcgggctcctcggctgctttctttgggaacagctggtgcacgtccccgcgcgcccctctccctccggaattcggcgaggattcagctggaccctttggccaccacctccgccccgggcgcgggtcaaagagcacccctcgcccttggtaacggagacaaaacgttcggggccgtctagacaggtcaaggtgcaggatgcggcgtccccgcggctccttccggaagggggcgtggagccgccaagggcgccggaccgcgccgcagcccgggcctttgcgggctttttccctctccaccctctgctgatcaaagtaggaagtttgcatgacaaccgcagtgaaaggggctgaatcacaaatgaactcgatttctgcagtgttgatctatccagcctccattgtcccctttcaggcgcagtatgaacccttccggtgccagcggccgcgctacattcacag

SEQ ID NO: 44978 - DNA, 261 bp, Homo sapiens
  chr7:155302963-155303224
  hyper
cggcggcgtccccttgaaagcgcgggcggagggtgcgcttgtgttcttgagacccaggttccattacaaaccacccagcatcgccaccggcgccccccgtttcaataaggaagccactttgtcaaaacattctaaaagaaacttgggaagaggacgcgtcagagaaataccgccgccgattaactatcagctgcgcctcccctgtgcacaggtaacatccctccttctcccccacgactcggctggagcttgattttgagc

SEQ ID NO: 44979 - DNA, 938 bp, Homo sapiens
  chr7:155325790-155326728
  hyper
cagttagagtaaccaagcatacgccgtacagtgacaacatctgcgtggctcacaccacacaggcagccgcagaaacagcgcctcccaaacggcgcggcctcgctcaccctcaaaacccactccgcgcccgacgggaacggctggagggaggaaagagccaggcacctctcgttcggggtctgacattgtcacctggcagataagtgagtctgctcggatgtgccggctcggaacatgcccgttcgtcaaagagggaggggaaacaaaacgagcttgtgcctcattcccggtggctctccacgcaaagttaacgtttgtttactctaagcatatgcccaggtgaggcctgcacagccacctcgccgcgggtgcagggcgcgcctcagaatgacagcgaggtgcacgctccggcccgcgcagagcggggccagctccgccacccagcgcgcgggaagccccgcagcaccagcagggcccgtcgcttcgctccgtcccggtccggcgtgaaacccccgaggggaaaagcgggtatcaaatgtgaattccactcgtccacagcgccgggcgttatgaaaatctgagcacctttgaccggagaagcaatagctatgggattaaggcgaatttcttacggagaggagaaagatgtgcagtttgtaattacctgctccctgtagtacagtccgtccttcacgcctggatctaacgggacaaactctcagcggctttgctctcccggcattgtttcagcacccaccaagaggattaaaaataatctctttcccttttaattttgtgtcccccacatcccctcctcctccccacatcccctggggacagcataaatttttaatccctgaggtttgggagggggagggggtgttaaccccttgttgaggtggcggccggaggactggaagcccggggggaaaggtccc

SEQ ID NO: 44980 - DNA, 30 bp, Homo sapiens
  chr7:155437083-155437113
  hyper
gggagacgggctgccgtaaagcttcgcttt

SEQ ID NO: 44981 - DNA, 231 bp, Homo sapiens
  chr7:155580181-155580412
  hyper
gggccgcccctgtctcgggccctgccgcgccgcccgcccgctgcaggccaggactgcgctctgtctgcccacggcccccgcctggcacacacgctggggacctttcctcagtgctgcctcgacatccgaaggggctgggacgcccgtccctggtgggagcgagcaccggggcgggtgaggggtgcgccgcgggaggctctcctgccccgcggaggagggtcagagagaaag

SEQ ID NO: 44982 - DNA, 201 bp, Homo sapiens
  chr7:155580725-155580926
  hyper
accctcgggcctggaccgtcaatgccggctccgctcacaccatctgtgtccacgcagagggtcgggccgtgggagccgcgagtgtctggcccacacttctgttcttaacctcgcaatgtattcaggtttccccaggcggagcgctcagcatatcgacagctaaaaatccaaccaaggccgggcgcggtggttcacgcctgt

SEQ ID NO: 44983 - DNA, 630 bp, Homo sapiens
  chr7:155600561-155601191
  hyper
ctctgcttggagtctggttgtcgccatggagggacagcttctatccagggccctaactgtagcgtgggttggggggactctttcgagagggtggggcgaggacgctggccccactgctgcggcgctttaaggggacgtgacaaattgcgcaacaggaaaagtcctgtgtatctggcagcaataaaacccagtaatatggttgtagagttcaacatgcaacaactgggggtggggtagggctgggggccgccctggtaacaggtcagtgcctgcatgtttgtgggcctgccagcagttaaaaaaaaaagtcggaagggcagagtttgagtgaggtcatcttgaggattgaacgcgttttacatgaaaatcaatcagtaaaccagggtcagtgtagagctatgatgtgaggcccgttgcgcgcaggcgcacaccaccaacacgcacagggacccccatgcaagccccccaccccaccgcagctccctcccctggggctgtgccgaagaagctttaaacagcttcccaggagggcagccagggagagggcggcagggtgaggatgacctggcccccagctctgtgagctgcgccacttgggcaggcatggaggaccccgggcagggagacccg

SEQ ID NO: 44984 - DNA, 187 bp, Homo sapiens
  chr7:155601888-155602075
  hyper
accggcagctcctgcgttccggaactgctccgaaagttccactggggacgatctcgccatggttgagggacttgggcggcagtcacattagagacccagagacagggagggagacagaagaagagggtcacgcacctggggcagagcctaggtggttatttaaaatgagggcggccgagcaggctcc

SEQ ID NO: 44985 - DNA, 1067 bp, Homo sapiens
  chr7:155602345-155603412
  hyper
ccttttgtgttgggaacgggaatagccactgcccaaggaaaaaagtatttgttttcgtttcgttcgtctgagggaagttgacagaaggtcagaagttcaaatgctgcctgtgcgcgcggcggcgagagtggccgggcgcggggccgctgggccctgcgtcccccggcagggcggacgggggtcggggggaggcccccgggctgggggctccggctgggacgcggaggcctagaggccaggcaggcggcggactggggatgggggcgcgtcccagggcaggccggcggagcccgcgatgcgccccggcccctgcgcgggcgcccccatctccgcgcccccgccgccggggacactacagcgagcccggcgctgctgttagctcctgcggtgcctgcgctcccgcgcgtggagcagcagagcccggcggctccagcccagcccctcgcgcactgaaaccctagccgcgggggatcgataacccgggagtaagtggggctgcaggcgtctgcctcgctgcgcggctctgtgcgcttgcagctttgcagcagggctgcaaggcccaagccctgggaaggtgtgcgagcccaggaccccttctgcggtattggcctcccgcagagcagggcagaagctgacccactctggctctgggacctcgggtatccacgcccccgccgctctctccgcagtgcctccctcctctcgggttccgagggaccctggcaaggcccctcctccgcggggagtgagggtgacgagaggatgggcgcctcgggctagccggagaactccctccagccagctgcacgcaacgggcaccccatggcccgtgcagagttaattgtggatcgcgctgctgtctggcactggcgcgcgcgtccacactcgcggtccagatttaaggtggtcgggagcagatgagggagagcaaggaaatcaggaccatttcccattcctctcccttccgacagctggagcaggctaccttgcctgcccctcgcctttctcggcctcaagcaagcctgggaatcgggtcgggaagcagggcggcacggaggtagctcctc

SEQ ID NO: 44986 - DNA, 216 bp, Homo sapiens
  chr7:155604804-155605020
  hyper
cagcagcagcatctcgcccatggaactgatgacttccgagctgtccccgtgcgggtccgtgcgcgagtgcgcgcggcgggtgtgtgcgtgtgcgctctctcttgcgctttcccttcctcgctccggctcgcccgctcgctctctccctcgctggctgcctcgctctttctcttcctatataaccttgcccgccgcggctgcgggggactctccacc

SEQ ID NO: 44987 - DNA, 30 bp, Homo sapiens
  chr7:155605478-155605508
  hyper
acagtttaaacccccgcaagcttcagtcat

SEQ ID NO: 44988 - DNA, 374 bp, Homo sapiens
  chr7:156409138-156409512
  hyper
cccaggagggaaccagcaaagcggcgttggcgccccggtctttcctgcgttggcgctggccgcggggcccagcacccgggacgttggcggcggcagaagggaaggccccggccgccctgctccgctccgctacagctgcaggcctctgcggtgacgggtgggggcaaaaaccctgcagaaaagtcaccgtcacacgcagagtccaaaactcccctttccccgctggaaccactttctccaaggagctccgccccgcgctctccccgaccccgtgcgcccccagacctcgcgtcccccgcgctctcccccgccgcgccctcctgccccgcgcccctcctcgccccgaccccgcgcccctgcgcccgggctccagc

SEQ ID NO: 44989 - DNA, 4 bp, Homo sapiens
  chr7:156409727-156409731
  hyper
cgcg

SEQ ID NO: 44990 - DNA, 916 bp, Homo sapiens
  chr7:156433064-156433980
  hyper
agccgccgggggctgcggactacagcgaagccggcgcggggctcggccctcactacacgaggcctgggcgcctgcacgcccccgtgcttcagcccgcggctcccgaacacccccgccaggcgatccccaaaaacgcccgctgcgcgagcctcgacgggaacgcacctgcgtctagacgctgacgccgtgcgcggggcgggggccggcgagcatgcgcagtgtggtgtggacagggcgtggttggcaagcatgcgcaatgtgggccgggcggggctggcgagcatgcgcagtatggggcggggcggggcagggctggtgagcaagcccgcggggagcgagcgcggaggcgggcgttgctacggcaacggtgggcggccagggagttgcctgagggaaaaggggcagacgtccctgggttccggtgttcgcggaggagtcgaggcacggagaggcttcgggggagggacggaaagaagggtggcccgccaggcgggcggggtccatggattcggggtgagggccgtccgcggcctcgctttcgcctcctccgagccgggccggcgatggccgcagctgtgaggcgaggtcgggtcccgtagcggcgcgcagcctccttgggggactcggggtcctggttagtttccacagctccttctatctgaggggtacgaatttacggctgcctaaagccttagaacagtgatcccacgtcggtaattttagaacccggtaggaccggctgccatcaggggccccaggtgcagggtggtgtcagctttgagaggaattggagcctcgtcaccgcgcgcttcctgcatgagtggaacctcagaaaacggtcagcggggttcagaaggcaggagataacaccaagaccctacgtaggattgcatctttacgtcgtaggcttggtctc

SEQ ID NO: 44991 - DNA, 145 bp, Homo sapiens
  chr7:156701793-156701938
  hyper
cgccggcgactcactgcgccaggccgggccaccgtgcagaacgcgcgcggatctcacaccccaccatgcggaacgcgcgcgggtcacacaccgcaccgtacggaacacaggcggatcatgattcgttctcccctgctcctggggc

SEQ ID NO: 44992 - DNA, 339 bp, Homo sapiens
  chr7:156792491-156792830
  hyper
cgccccggcccgcgggcgataaggccgcgcctttgttcctgcccccagctgggtaaaccgcgccccgcctcgctcgccgtctcgggggcacctttgtccggcccggggcgcgcattgtccgcacggtgtgtactcggggaggggcgccaggtgcgcgggcggaatgtagggtcggcgcggggccggggggcgggcccggggccggggggtcctcaggaagcctcggccgggcccgcctcctccccgagggtcccctgcagccgcggatgggggagcccgggggcggagcggggcgcggggggcggagcgggggaggcgcgaacccggggacccccgcgc

SEQ ID NO: 44993 - DNA, 30 bp, Homo sapiens
  chr7:156793031-156793061
  hyper
cttgcccttgtggtcgggagcgccgcggca

SEQ ID NO: 44994 - DNA, 23 bp, Homo sapiens
  chr7:156794450-156794473
  hyper
attacaggcgtaagccactgcgc

SEQ ID NO: 44995 - DNA, 399 bp, Homo sapiens; identical to SEQ ID NO: 6043
  chr7:156794955-156795354
  hyper

SEQ ID NO: 44996 - DNA, 234 bp, Homo sapiens; identical to SEQ ID NO: 6044
  chr7:156795401-156795635
  hyper

SEQ ID NO: 44997 - DNA, 267 bp, Homo sapiens
  chr7:156795899-156796166
  hyper
cggcctgctggaggcgcaggggccggcgcaggtccggggcctggctctgctggaggacgggggaggggcggccctattaacagcgtcttcctttgatgtcgctcttccccgcgtcccagaggaagcgcctgtcccctgggggtagagggacagaccctccgcggaggcctggggcaccccagctccaggccgagcccccactcttccctggctgcccagtgttggtgagggcgctgaggctgggccggctgagcccaaggggaaaat

SEQ ID NO: 44998 - DNA, 308 bp, Homo sapiens; identical to SEQ ID NO: 6046
  chr7:156796431-156796739
  hyper

SEQ ID NO: 44999 - DNA, 1429 bp, Homo sapiens; identical to SEQ ID NO: 6047
  chr7:156797005-156798434
  hyper

SEQ ID NO: 45000 - DNA, 620 bp, Homo sapiens; identical to SEQ ID NO: 6048
  chr7:156798526-156799146
  hyper

SEQ ID NO: 45001 - DNA, 117 bp, Homo sapiens
  chr7:156799290-156799407
  hyper
cgcggccggcggcacttccccaggaggttcgactgcgcctgggctggggaccaaagggcagtgaggcccacagccggctccggtcctcgccccagcccctcccgttgctgcttgtac

SEQ ID NO: 45002 - DNA, 245 bp, Homo sapiens
  chr7:156800317-156800562
  hyper
ttatttacataatttcgcacggttacatcacagagaattttatgacctcaaaacgagacttcccttgatttcccaggagcctgacaagtgttggacaataaaagaaagaaagcaaaggaaagaaaggaggccagccccaggcctggatgagctcaggtcccccgggatgggcagtttgctttagaggatggcccacgccccctgctttagtcaaacaaggccccgaattcccaacttgacaatac

SEQ ID NO: 45003 - DNA, 30 bp, Homo sapiens
  chr7:156800933-156800963
  hyper
ccgtgggcaacttagcgtccttggctctgg

SEQ ID NO: 45004 - DNA, 474 bp, Homo sapiens
  chr7:156801397-156801871
  hyper
gggtctctttgtttgggtgttcggcggctgaaagcgttgagccatatacatctgctcggcccgactcataagtagctgaccccgatggggcgagcggggagagccagagccccagagagccagagccccggagccccagcccggagagtccgcgtgtgccaggaaagcctgaggggcccaggcctctggcgaggtgtcccgcccggatggagaggaagctgcccgaagcccagcggctctggggtggggagaacaggggctccctcggccccaccttggaggggcattcgttaccttgttgggcgcccaggattccagggcaggcacctactgttgagagtccccccatagctggttcaagccaggccacctgcctcggccatcgcaccccggatccaacgcccttccagaggagggcagcgccctggtaagagccgggggttccctgggccttggccttgcctccccgggcct

SEQ ID NO: 45005 - DNA, 2671 bp, Homo sapiens
  chr7:156801943-156804614
  hyper
cgccccagtgggggacctggcccaagttcctttccccggtgataagccctgacccccattcccgggcctgcctaattcagggcgctctcggctcgccttcccccggcgacttccttctcctgcagccttcgggttaatcattagatctcagtctcacacctccaactgccccttcccgttaagagaggaagagaaggcaaggcctgcgcatggccattttaataattcgctgcccgtctcatgcctgggggtccgggcgagtcctcgcaggccccgggcagagccgaggcggcttcgcagctcttcccccgctcgctgggagccaagcgcagagaggggcaggcggtgccggtggaggatgcgcgaggccctcccgccacgcgcatccacgggggccgcagggtactcacagttgaagtcgggcatcttaggcaggatcatgcccgcggtggacgcgcgcagccactggtccagctggaaggtgccggcgcccagcttgatggggtcggcggggtgcgcggggtgcgcgccttgcacctgcgggtacgagtaggagagcgccgggtgctggcccgccagcgcagccgccgccgccgccgcggagtagccgtagaccgggtggccgtagagcgccgcctgcgccgggaggcccgcgccgccctgcgcgcccccagggtgcagccccagcgccaggcccccagcggcggcggcggcggcggcggcggcggcagcggccgctgcgcccggatgcgcgtggtggtggggccccccgtgcccgccgcccgtgccgccgccgccgccgcccgcgcccaggaagcccggcttgggcagcagcgcgcagtgcgcggccagcaggcgcggcggcgacgggctctcggcgcgcaggcggtcggcgggcgcagccggcggctccgaggacgcggggctgcagctgccgctagtcccgccgctcgccccgccgccgccgccgccacctccggtgccagatgcggcggcggcgagcgacgtgaccaaggccagcggcgcgctctgcgcagaggcggctcgtggggggtccaccgccagcagggcgtcgatgcggaaatttttggatttttccatcggctcgtttggggctggcgctcagggcccggtggcgggcgacgcggccgtgtgcgggctcgcggagtcagtgcgtgcggtgcaagcccgggggctcggtattgttatggtggttatttgccaataatcaaagtcgccgccggaaactcagccgagggtgaccatggtcccggcgcctcctccgtgcgggccccgccccgggccgcgctcgcacaaactcccacgcgagtgcttccccgcgtccgggcccgggagcccggttctttgcgctgcagccctcaggcgaccgcgcggaggccgctgccgccgtggtggggacccgcgcccctccgcgcacttgaagctcagcgcggcttccgattggcgcgcgcagcgggggcccggggagggccgcgggctccgccattggccgaggggcgcacctgtcaccgtcccggccgcccgccgccccgcccccgcgccgcgaggtcctaagcagcccgggctgttgcgcggcgctggcgggcggggacaccaacggggagtggatactccgaggctcaacctggggcctctgcccgccctcccctgggtgcggagccggacggcgggcactggcaacccccgggcccctggagagccccgcggcggcccaagacccgctcccgagacacgtgggcccctccggacttggttggtccctggagccagctgcgcgcgtcctctccggcctccttgtcggcgctggagtgggtccacgtctgccttgcggagcgcggtggttccacgctcctgagcgcccacgctgcgcagacctggccgctctgcgaggcgacggcagcgcactgaagaccgtggtgtttcccaagccctccctgctctcgggcctccagggcgcagcaggggagggttttgtccccgtggccaaagctctgcaggtcgaaccttatctgctatgggaaggccccgcattttcaggtgtgtgtgcgggggtgtgggggtgtaaacgcgcatgtgagtgtgagtttggcctccacgaatcctctctgggagcccctgccccagtcaaggcggagacggtagatctgggcgctctggcctgcagaacccaagtcggcttgcagacgtcgcccacgtgcctgctcagtggagcgggtcctcggtgacaaggctcttcctcgctgccgagggatgcccatgggcttgcgggagtcaaggcccacacacctcggccctgaaaaacccgtggggcccggcatccttcggaagccctgccgctgcgacccccggccagtccccgggcaggagcggggaaaggctatgtctctcgtgctgccggggcctcctgggaagtggagaggaaagggcttcccgtgagtgagcgaggcacggagtgagcatccaggtctcacccctcccccacacgcacacttcaaatatttacagtaaaaccacttccaagggcgtttttgaagctgaaagaatccacacaggggtcgggaagtcaagcggcatcaacaccaggctttgtcaatagcgccattagacccagttatcttccccagcaagcgtgagaactgggagggagttc

SEQ ID NO: 45006 - DNA, 291 bp, Homo sapiens
  chr7:156808932-156809223
  hyper
gagggttacactgacagataccggcagctctgcaacccgggaacaacgcagacaacatacaactcgacagagtcacagaaggtggcgtccatcgcgcctggatggtgactactgccctgcgggctgctgggtgggtgaaacacacagggaagaagcacaaatacacacacagatgtggctcagggacatttgaatgcttcagtgtgtgaattttttagcgcattctgactcgaaattatggctgaatagtggcgcactaatgtccaagtccatgttcgataatggcaggaa

SEQ ID NO: 45007 - DNA, 50 bp, Homo sapiens
  chr7:156809462-156809512
  hyper
acagtgttcatgtcccgggctgggggcccgcctgggaggggctctatatg

SEQ ID NO: 45008 - DNA, 2 bp, Homo sapiens
  chr7:156809643-156809645
  hyper
cg

SEQ ID NO: 45009 - DNA, 145 bp, Homo sapiens
  chr7:156810031-156810176
  hyper
acacctgggagcagcatgggccgccctctgcctcaccgaggggcaaaccggctgaggacccaggcacgaagagtgtcaccagctctgaccacaagccccgtagaccagggctgcgtccataatcggggttgatggcattagttat

SEQ ID NO: 45010 - DNA, 94 bp, Homo sapiens
  chr7:156810427-156810521
  hyper
cctccccgcagtctccggggccctgtgctgcaggcaagataatttggctaatgaactcgttaaagggcccctggtgacccgccccggcttcccc

SEQ ID NO: 45011 - DNA, 203 bp, Homo sapiens; identical to SEQ ID NO: 6054
  chr7:156810597-156810800
  hyper

SEQ ID NO: 45012 - DNA, 1008 bp, Homo sapiens
  chr7:156811302-156812310
  hyper
cgacattctgtaaatgagataatgatccataaacccggatgatagatgtggcgtgcctgcgatgtcttctctaaatgagctgctcgcatcgactgctaataatggtgagtttatggaagcgatttcagcgcaaactgcgagagggtcttcttactctaatcagcctgcctgagctaatggacgagggggtcaggctgagagttattgacacgcccgtgcccttaacctgtttcccaataaagctgattagtttttgtcaattcatcagctaaccactcttgctggaactgcatcaaagccttatttgctcaggggaaatcaacaagtcacagatcagctccattaaggggcccggcccggcaaggacagtcctggagccgagggacgccccgacggacctcgggcctcccccgaggttcgcagaggggctgacagcgtggccccccttaactccgagcaccacgacccggatgcacataactgtgtccggaaacttctctttctctgcaggtggagcagcgcctgtgcggctccgcgctatggctccaaggctccggccctggcgtctgggctcggtcggggacagtttccacgcgaggcggagcctagctggaggtcacagggcggtggagagcgagggcatgagggagggagctgggaaccgcgcagtgtccgcggccacgaatctctcctacgcgtccccatgaggcgacctaaggggaagagtgcaggaccctaggacccccccaccccgggcagcgcgggcctgagcttgggggacaggcagaaggggatcaaacccgcacccagcgcagactcctacttgctcagtgacttcgcaagctcgtgggagggagctgggcgcgcccgagggcacctgggctgaggttccagtagctggctctacctgcgcttcaggtgagcggctgcaggaagggccctcccaggtatccctcggctcccgctggcaggagtgagcccatcggccgccgccggcggaggtgaccc

SEQ ID NO: 45013 - DNA, 979 bp, Homo sapiens
  chr7:156812846-156813825
  hyper
aattttgttgtaatatatctgcgaaccggggactcccgggcagggaggcaggattctcccggctggggcggtctgagtagctgggtctgagcctcgggctgagaagagtaaattctgcagaaagggccgcgtccgatcggcgcaaacgttcggttcgtagcaggagcttctccaggcggccaccgaacccaggtccaggactcggcactcctggagccctcctccccacgcagaccgcgggggctgatttaatagaatgtcgatagaatcattcgatgccttttagcttgtgatctttataaatgtccctctattaaattagaaaatgattctcttctcgtttaattgtattctttcgtttcttatttccaattaattagtcctatcgacgttgcaatattttaagtgacttgagtccgtttccagttagaatatatgggtcagcacatgcaattttatacccgacaggactatataatgtgggttttaactactcgttcctcatctgtcttaaacatctggccaggatgcgccacccggcctcctcgcagatccttcctggggcaggtgggcaccacgcgggaccctcccgggggctcccgcaggcgcctcttgctgcccggggccaagggtcgggcagcccatagcgtccggcctgggcctttacttggaattctttctgttgaagacttggtcccagcccagtggttctgggataagaagaccccgcagaggggcccagcgccgcgttcctacgagacacctgagctgcactgtgtttccacgggctaggagagcggtgactccccagcctccccgtaggcctcgctcgcaccgcagagggatggctggcccgtgccgctccgcggttcccctccccgggcggatccgcgcagggagagcccggcgggcctgggcttgggcctgggcctggttcgggggtgcaggccaagaggggcgccaggccgggctcccctac

SEQ ID NO: 45014 - DNA, 243 bp, Homo sapiens
  chr7:156813986-156814229
  hyper
cggcgcggacacccgggctgcgctcagcccccacccccacaggcttcccagccgtctgcccgagttcggcttcaacgggagcggggctccacttttccttaattgacgaagtcacggattcctcccgggcggatttatggggctgcgcgttgtgccggcgcccgctgcttcgcatctgcgcgcccgcccggtgccgggccccgccctccgcctcagccccaagctcggcccgcgggcccggcc

SEQ ID NO: 45015 - DNA, 4 bp, Homo sapiens
  chr7:156815095-156815099
  hyper
tccc

SEQ ID NO: 45016 - DNA, 194 bp, Homo sapiens
  chr7:156870958-156871152
  hyper
aggcaagcttgggggcagggacgggaagcgaacccacgaggtgcagagagcagagggctcccctaaatccgaagctatcccctgccctcccttcctcgcgtggcttcccgggcgcgctctgcctgtctgcggggactccaggcgtccttgtgttttcagctcccggctcttgcccgcgcgtgtggcccggctgg

SEQ ID NO: 45017 - DNA, 77 bp, Homo sapiens
  chr7:156871282-156871359
  hyper
cgagctccagaggcgggggatctgaacactggcctgtgaaccccgagaaaacccccggtttgcagaccaggtgtcct

SEQ ID NO: 45018 - DNA, 30 bp, Homo sapiens
  chr7:156931980-156932010
  hyper
aggcgacttcaagacgcggcccaaggtgtc

SEQ ID NO: 45019 - DNA, 232 bp, Homo sapiens
  chr7:157129085-157129317
  hyper
ctggcgaagtctccacgcgctcccgttcgccggggaacttagggtatccgggcttccctaaattgacaagcgggggccggcgccttcgcccgccttcgctggccgccgcttggtttgttcttcttctccttcggggacttctccgcccgcgcccgcgcccgcgccccagctttcgtcccgctgtgcggagatgccacccagctccaccgcaggaccgcggagcgagaggcgg

SEQ ID NO: 45020 - DNA, 30 bp, Homo sapiens
  chr7:157129670-157129700
  hyper
ccgtgccgccgccgcgtgacgcatttcctg

SEQ ID NO: 45021 - DNA, 215 bp, Homo sapiens; identical to SEQ ID NO: 6058
  chr7:157130644-157130859
  hyper

SEQ ID NO: 45022 - DNA, 30 bp, Homo sapiens
  chr7:157150828-157150858
  hyper
ccccgtggtcttgcccgatgcctggcacag

SEQ ID NO: 45023 - DNA, 116 bp, Homo sapiens; identical to SEQ ID NO: 6059
  chr7:157156193-157156309
  hyper

SEQ ID NO: 45024 - DNA, 267 bp, Homo sapiens; identical to SEQ ID NO: 6060
  chr7:157361385-157361652
  hyper

SEQ ID NO: 45025 - DNA, 74 bp, Homo sapiens
  chr7:157361751-157361825
  hyper
cgggggccggcgagaggaaaggatggcggatgtgagagggggaggaaggacgcgggctgggagaatccaagtga

SEQ ID NO: 45026 - DNA, 309 bp, Homo sapiens
  chr7:157476664-157476973
  hyper
ccatgaatgcctggccggcctattcattatctctcttctattagtaattttctgctccgtattcagcctcccaactcttcatttcctcccgtctcccagcgtacacagtgcctcttatgtcaggccgggcccgtttttatcttgtaatcataaaggccaccaaagcaattatcgccggtcttgactggaaaagctggtcattaattagcctccttttgccttcggtgcagcggattagctggtgccgggactgagttaatggaaacgcgggttaaatgagaaaagacgcccggattttcctgcctggat

SEQ ID NO: 45027 - DNA, 494 bp, Homo sapiens
  chr7:157476994-157477488
  hyper
cgaggttctccagcggcgggaggcggtggagccgccgcggagagggagggaggctttggagagggagggaaggaaagggggagggagagggaaaggggggagagggagaggaggcgcggggtgggggaggggagtgagcagggagccgggagagggaggaggggcgggaaccaggggagcggcccgaaccccgtttggtccggaccccgcagccaccgctgggtctcgccgccgggtcgcccttcgcgtggagatccggtccgcgccccctccccggtctcctcccctcccctcccctccgcccccctccctccggcccacacagcctcttccagaaagaagtcactctagagccgcgcgacccagccccagagtccgccggggtccgcccaccgggtctcctgcgcgcccctccccgcccctccccgggcacagcccgttcacgaaacctaaggcgccggccacgcgccacctcccccgggccggggtctcct

SEQ ID NO: 45028 - DNA, 109 bp, Homo sapiens; identical to SEQ ID NO: 6065
  chr7:157477710-157477819
  hyper

SEQ ID NO: 45029 - DNA, 16 bp, Homo sapiens
  chr7:157481533-157481549
  hyper
cgtccctcccccctcg

SEQ ID NO: 45030 - DNA, 314 bp, Homo sapiens; identical to SEQ ID NO: 6067
  chr7:157481759-157482073
  hyper

SEQ ID NO: 45031 - DNA, 36 bp, Homo sapiens; identical to SEQ ID NO: 6068
  chr7:157482200-157482236
  hyper

SEQ ID NO: 45032 - DNA, 30 bp, Homo sapiens
  chr7:157482493-157482523
  hyper
acctgcctctggaacgcctctccctgcagg

SEQ ID NO: 45033 - DNA, 1404 bp, Homo sapiens
  chr7:157482782-157484186
  hyper
aggccgagagaagagcgctggggagaagtcccggaggtcctagactccttggggcggtctctgcggggcgctgggccaggacagctgccaaccctccaaatctgtgcgctcagaaggagctgccctttgcccgctcctcctcacaggcccaccctagacccacttggggatgatcccaggcgcagctctcccctgccggcccaagcctttgacaggagtcctgcggcgaggcagagaccccctgaactgagctctccgacgccctagttgcccgttagagcccccatgcgcgccctccagccttcgaaagctctcttcctcgccccaccacctacgcgcctggtgatgctctcgtgggcccttcctgctccctccgcccccatcccagcctctctcgcctcttccagggcccacccaaccgcactacgagcgcccgcgccccgcccggcacccctggttacctgcagctgggccggcgcccagcgcccgcgcgggaggaggtgggggcgtgcgccgggccgagcggcctcggggcgcagcagctgcgggtagcggcagcgccatcatcacagccagctgcttccctgcgctggagccacagactagcggggtcatccgcttctgaccacaaacttctagggcggccggaggagacaaaggtgccgcgcgtcgctgctccagcagcagcggctgcgcggcggcacgggctcggagcccgcaggcgccggagctctgcgcggccgctcggcccagctccgcgtgctccgccccggcccggcccccgggctaggcacgctgggccggggcgcggcgcgggcgggctcagggcgggctccggacggtcccggtagggccgccggccgcgcgcgtagcaccaaccagcgcggccgccgcgccccgccttatatccggcccggcgcgcacccggccggcggcggcgcggctcgcggcccagccaccggttgctatagcgatgtccccccccccccccacatgttgctgacagcaattggctaaggggccgcggctctccaaacaccctctcccgcccgagactatgaatggacatcagctttgtcagtcattggtacaacgccgaagccagggccttcgccttttctttcttttcagtgtttctccctttcatcgttcatactgggcaagttcagggtagcaccgaggggagagagacctcggccagaaaagtcaaggcgcgcggctctgctgtgacctttgtcctgggaggggtgggtggggtgcgtcgccactcttggcaagagaaaattgcacggcatatcgttcttcccagttaccttttccagtgttgccgttcgggcctttttgctccctttccaaatggaagcaggccaatgattcagggcgagtagacgagagcccctctgc

SEQ ID NO: 45034 - DNA, 14 bp, Homo sapiens
  chr7:157484471-157484485
  hyper
acccccggcccctg

SEQ ID NO: 45035 - DNA, 908 bp, Homo sapiens
  chr7:157484507-157485415
  hyper
cgagaagagctagggtctcggggcgactaggaccactgagcacctcccccccgcgcctcccgcccatgctctctctccccaggccctggaccccgggccacagccacaggttggggcaccccggtgcgcggcgcccccgcggagctggcgagagccggagagctgaaacccaacatctgtgtgtacaatgcgctctccgaggcccacagctgcaggaacaaggagaagaaaggaagaggggggcgcagatcttgtcacacgcagatgacagtctgcggagggctctttagtttctccttttctggaaaccccagcggccccctcctaggcccccctctcccaccgcctggccattgttccctgcgcccgggacagctggagacggcggcccgcgccactcgacgcccctcccgccgcacacccggctgcccgcggcgcccgctcccggcccctccggggccaactcctccacaccccccacctccccaggccaggcccaggcggcgcttccacagtctcccctcccctcccttgcactctggcgctgcccctagacctgctcggtgcagagggccttgcctggcgcttttctctcacaaacctagttctgtaaaacctgggggcgagccccagggggcagggctcagaggcgggggttgtccacagatatgagtacggtgccgtccgctgcaggcccctgtctaaaagtggccgaaggaccccgtttcctctgactgcaggcccaggctgagttccgcatttatttttgtatttatagggcaaggccagagcgcttcataaagctccagggcaaagaagtggcctcgcatcgggccatggttcccgcaggcctgagcgggctgcaggaggcccggtgcggctcggcgggggcgcgagaggcgagaaac

SEQ ID NO: 45036 - DNA, 30 bp, Homo sapiens; identical to SEQ ID NO: 6071
  chr7:157732029-157732059
  hyper

SEQ ID NO: 45037 - DNA, 362 bp, Homo sapiens
  chr7:158379364-158379726
  hyper
ctgccgtgaagctgccgccctccctttcctcccgcggctgccacggaggaaaaatgtcctctgatttcggcggcgctgcccgcgggggggtgcgggggacgcaggtagaagcgggtgcagcgggacatccgaggcccggcccctcgcggcacacgcggcggaacacgagcggggggcgcacccacgccggaccagggccgcgcgctccagggccaggggagtgccgagtggcggggctcggggcgtgaggcccaggagccggggtagaggcaggaggcggcgccggggaggaaactgaggcaggggcgcgagacctgctccgagcccccagtgaggacagagaggcgcgcgacccgtggccg

SEQ ID NO: 45038 - DNA, 196 bp, Homo sapiens
  chr7:158380862-158381058
  hyper
ggggacggcgggggcctaagccgcgcccttggcccggacgggaaggcccgaacctactctgctggggacctgggcaggcggcctctacccgcggggccccgcgcgcgtcgaattaacgccttccaaccgtttctttaatttaaacgtaacgggccacttgcgcatcggggcgcgcggaggtggacccagtcgacct

SEQ ID NO: 45039 - DNA, 30 bp, Homo sapiens
  chr7:158649013-158649043
  hyper
ggggcgggttggggcgagtcaagagcccct

SEQ ID NO: 45040 - DNA, 128 bp, Homo sapiens
  chr7:158769828-158769956
  hyper
acgtcacgtacagcactgagacggagccctaatgaaaactgtggctctgggtgataatgacgttactgtgggttcatcaactgtagcaaattcgccctctgctgggcgttgttggaaatgcagaggct

SEQ ID NO: 45041 - DNA, 154 bp, Homo sapiens; identical to SEQ ID NO: 6072
  chr7:158936493-158936647
  hyper

SEQ ID NO: 45042 - DNA, 154 bp, Homo sapiens; identical to SEQ ID NO: 6073
  chr7:158936936-158937090
  hyper

SEQ ID NO: 45043 - DNA, 172 bp, Homo sapiens
  chr7:158937202-158937374
  hyper
cgagtcccgcaacccggcgggaccggagctcagcgcttcacgctctccgggaggaagctccggaccccgggcgaccccgctccctctcccggaccccgcccgcgctccagcacccgggaggaaggcgaagaccggcgggaggagcgctcttctcggaaggggagaaccgggt

SEQ ID NO: 45044 - DNA, 469 bp, Homo sapiens
  chr7:158937576-158938045
  hyper
cgcagctgtagccgagcgcccgagcgcgggggccgccccctccgtcccggcagctggagcgcgctcaatgcacgcccgtcccccacgcgccccgccgctccgccccccgcccctgtccccgccccgcgctgccccaatcctcgtctccctcctcccccgagaacccccgctccgcgcccctcctcaccgccccccacttccccttccgctgcgccccgcgccctctcctcgcccctgggctctctgtccccgccgcgcgcgctccctctggtctcctcgacccccccagcctctctctccgttctcctcccctcttccctggcccacgcccccctcccggccgcgcctccccgatctgtgggcggaggggctgggaagcggggtgctcagtgcgcgcccggctccgagtagagagaactgggggagagcggccggcgcggggccgggagaggaggaccgggccaggtgt

SEQ ID NO: 45045 - DNA, 77 bp, Homo sapiens
  chr8:356767-356844
  hyper
cgcccccacgcctccacgcccggcactctggacgcgcgcggacggaggggcagtgcctactacgcaggcgcacgctg

SEQ ID NO: 45046 - DNA, 46 bp, Homo sapiens; identical to SEQ ID NO: 6076
  chr8:494134-494180
  hyper

SEQ ID NO: 45047 - DNA, 111 bp, Homo sapiens; identical to SEQ ID NO: 6077
  chr8:495721-495832
  hyper

SEQ ID NO: 45048 - DNA, 30 bp, Homo sapiens
  chr8:681197-681227
  hyper
ggtcctgagctgagcgccgtgccttccggg

SEQ ID NO: 45049 - DNA, 75 bp, Homo sapiens
  chr8:686809-686884
  hyper
gctgagagacttgcccagggtcggtgaccgcccagggatccccataccagcgcgtctagctcccgcgttccgatc

SEQ ID NO: 45050 - DNA, 55 bp, Homo sapiens
  chr8:687162-687217
  hyper
gggggaggttctgcctccagcacccaagcggcggccgcacctcgcagtgagaccc

SEQ ID NO: 45051 - DNA, 128 bp, Homo sapiens; identical to SEQ ID NO: 6078
  chr8:687513-687641
  hyper

SEQ ID NO: 45052 - DNA, 138 bp, Homo sapiens; identical to SEQ ID NO: 6079
  chr8:687837-687975
  hyper

SEQ ID NO: 45053 - DNA, 241 bp, Homo sapiens
  chr8:688498-688739
  hyper
cgaggcgctacccagcgcagggttttgtaactaagcctcccccggcagcggctgttgctgtctccggctccttcgctaacgattgcaggagaaataatgaggatgtaattattacagccctgcgcggagggctggggggcggcggacgcgggctcctctgcctgcgcgcccaggtggggctgggctgggctgggctgggctgggctggactggacgcctctccccgcccggccctccctca

SEQ ID NO: 45054 - DNA, 21 bp, Homo sapiens
  chr8:689295-689316
  hyper
ggtcccagagcctggcggagc

SEQ ID NO: 45055 - DNA, 170 bp, Homo sapiens
  chr8:798794-798964
  hyper
gttccagtgtaggaacgtgccagggtttgttccagtctaggatcttgtgatgtgtgttccagcataggatcgcgcggtgtctgttccagcataggaacgcgcggtgcctgttccagcataggaacgcgcggtgcctgttccagcataggaacgcgcggtgcctgttccag

SEQ ID NO: 45056 - DNA, 30 bp, Homo sapiens
  chr8:799238-799268
  hyper
ggatcgcgtggtgcacgttgcagcatagga

SEQ ID NO: 45057 - DNA, 30 bp, Homo sapiens; identical to SEQ ID NO: 6080
  chr8:1772378-1772408
  hyper

SEQ ID NO: 45058 - DNA, 30 bp, Homo sapiens
  chr8:1921725-1921755
  hyper
gcccggcgggcaggcgcggggcagggaagc

SEQ ID NO: 45059 - DNA, 309 bp, Homo sapiens
  chr8:4848953-4849262
  hyper
cagtgacctcaactgcgaccgcctccagcctcacgactccgcaaacaggtcacgaattatgccccacgcatcaaaaactctgcgcctgccttcgccacagcgggagccgccacccgggcgcgcgcggcgcagctgcccacggcagtggccgggcgccctcctgccggagcgctcctccccgggaaagccctgctgcttgcaagcgcctccggtgggccctggagcgcgctgccgagccccggggcccagcgccgacgcccccggggggaggcccgaccttggtcacccgggctttgctaggcaagggga

SEQ ID NO: 45060 - DNA, 1026 bp, Homo sapiens
  chr8:4849296-4850322
  hyper
cggcgactccggcgctggcgtcaccagcccccttcctgcctgcagccccttcccaggccggtacaggagctcgcacttgaccccgcaggcgtggaggagacacggtccctggtccctgtggggttaatgaaggagctccacggacccactgcctcgtgggccagacaatagcgcagtgagagctacgtccgagcgtcctggaccccctccgcgcgcacacacttgcgcacagcacctctccagctccatgcacgccaggggcctgggaccctgggctccacttctcggcttctacagccaggttctgggacctgcagcgcgcaagaggagctctcttccacggggctgccccgcagggcccgaggcgcccaggactttgcaacccctgccctgttcgccccagaatcatccagagcagcccccgcccactacctggccctccacaccctccctcccgcctccgcctcagcctcatcctagcgctgcagcccacccgcgtgggggcggaatccgcccggcacacacgtgtgcggattattaagcagccgagctagggccgccgcggtctccacgcagcaacctctgctaattgcgggggaaggcagccggagcgtgcggaactcgagggaaccgagagtgagctcagaggctgagttgcctgcctggaaaggaggaagccccgggcccagttaggcttggagtgcaggggaaagggcgggaagttttgcggagttgcgtggcaggtgtttcctctccacgcaggggctcggctggaaaaagccaggtcctgtcccttgggctcctgccctcaccccgctgcgacacacacgccccagcacacctcacagggcacaaccctcttttccctagactttagctgcctcgccttccaattcccagccagtccagtgctgaccagaggccgctgccagtcgggccctgctcagcaggcgctgcctccgcagccggcaatgtcagaggcaccggccaaggcatccggactgagccgggcgggtgggcagaggg

SEQ ID NO: 45061 - DNA, 154 bp, Homo sapiens
  chr8:4850418-4850572
  hyper
cgcagacacccccttgtgagggtggatgccggtgaggaggagctggtgctgagcggtcagctttcacggagccctggacgccccgtggaggcaagtgcagggaggggaagcccaggcggcacgtctctcccccgctctccaggcagatctggag

SEQ ID NO: 45062 - DNA, 498 bp, Homo sapiens
  chr8:4850993-4851491
  hyper
gccagccttgaggtcgcagcctgtaggctacttagaagaaaacattccccaactcattcagggagaaaaccaagctcacagagccccaagcccaggagccacccagagaaactccttcccctgaccagcgtagaaggaggatacccgtgcgcccacagtgaatgtatctgacttggaagccggtccagaactcctagcctgtttcacgcaccttgccaacaccttacaacttgcaaggagcgaagtccgggggagaggaaagcgggggcgaccttctagaggcagctactcctcgccggctgaggacgttggagagggaaggaggagaggaggaatggggtgtatgggtgcgaggaggccgggccggcggagacctttgcctattggtaccaaaacccccgtagagagcccgaactttccaggccggcttcacccgggacgctttcccaggcgcgtcgggtccggggagaaagtcctgggaactgcccctcagccacc

SEQ ID NO: 45063 - DNA, 241 bp, Homo sapiens; identical to SEQ ID NO: 6084
  chr8:4851508-4851749
  hyper

SEQ ID NO: 45064 - DNA, 895 bp, Homo sapiens
  chr8:4851780-4852675
  hyper
cgcacactcgcgtccgcacacggggcctccgagggctctaccgcctccccggccaggagcaagtccgtcttacccttcgctgcagtgaggagcctcgcgcacagcaccagcagcccgagaagcaggagcagcgactggaatctcctccacgcagtcatgtctgcagatactccacacgcacgcgacaccgatggctcctccgaggaaggcagggctatgagcggagccaaataatcacccgagggcaaggcgagccggagagagagcccggtcccaagacccgccgcgcatccgacgcctcctgaaggtctgggcgcccggctcgcttccctctcatagcatcgggtcccgagccactgcagggctgagctgctccgagcgcggagacccgggctggcggggccggggccggggacgagcgccggccgagccgggcaggaaggcaccaaggcggcgaggctgcgggagggggagaagcggggagaggagcgcgcgcagccaggagagacctggagaggaggcagctggagagagagccagcgagtgggagatgcggggaggggggcgcgggggggaggagagatccagtctagagagaaaaggcggagagcgcagaagaagggctgctagtggcacaaggagccgctgccgtggaggctggactcaaccatccttacccacagagaggggaccgaggctgggcacggcgcagtcccagacagacagagcccagcctcggggcctcgggctgcccgcaccgtgctgcgcttcattcggcctcagcgcagcagcgcgcaggctggagaaaggagacttgttgggcgctcgggtgggggaagctcacgccgcacaccggggaggaacaatgtaatccggcaactccagcaaactggag

SEQ ID NO: 45065 - DNA, 44 bp, Homo sapiens; identical to SEQ ID NO: 6086
  chr8:5997931-5997975
  hyper

SEQ ID NO: 45066 - DNA, 31 bp, Homo sapiens; identical to SEQ ID NO: 6087
  chr8:6638106-6638137
  hyper

SEQ ID NO: 45067 - DNA, 150 bp, Homo sapiens; identical to SEQ ID NO: 6088
  chr8:6673900-6674050
  hyper

SEQ ID NO: 45068 - DNA, 1538 bp, Homo sapiens; identical to SEQ ID NO: 6089
  chr8:6691843-6693381
  hyper

SEQ ID NO: 45069 - DNA, 30 bp, Homo sapiens
  chr8:8217417-8217447
  hyper
aaattgtatacaagtcgattgatcttgata

SEQ ID NO: 45070 - DNA, 31 bp, Homo sapiens
  chr8:8313040-8313071
  hyper
acttaatttaatcctacgttaaccttgaaag

SEQ ID NO: 45071 - DNA, 216 bp, Homo sapiens
  chr8:8639884-8640100
  hyper
cggataagagctcaggatttgggtgcgtgggctgaagcatgcgcattaagaggcaaaaggacggcgcttgactggtataggaccttctaggaacattcaactagtaagggaagaacacctcaagtgagcatgcgcacaactccagtaatacactgcgcatgcgccccctcccaagcgctggcaggcctctgcgtatgtggacggccaaccccaagg

SEQ ID NO: 45072 - DNA, 376 bp, Homo sapiens
  chr8:8750283-8750659
  hyper
gcgcaggaccaggacgcgcaggctgcccagcgccgaccccagcccctcgggtacctcctccaggccgttgttccccaggttcagtgcctcaatgtccccgaggttggccggcagcacgagctggggggaggcgggggactcgagcgcgtcggccccggccccggggcaggccccggcggcggtaagcgtgagctggcgcaggttgctccgcagcttcctggcacgcagggcggcgtcccgccacagcctcgcggtcttcaggttgccactgtccatcccagccatggcggggccccgggccgacagcctcacgcggacgcgggagcccgcagctacatgccgcgccgcgccccgggccctccggctcctgcccctg

SEQ ID NO: 45073 - DNA, 31 bp, Homo sapiens; identical to SEQ ID NO: 6091
  chr8:8820809-8820840
  hyper

SEQ ID NO: 45074 - DNA, 118 bp, Homo sapiens
  chr8:8821040-8821158
  hyper
tccagcacctttggcagctcccggccccggggtgcgaacggcggccgtggctcaccgcttcaggagcaggcgaccaggacactaggaagagaagcccggaccagggctagtttgtttc

SEQ ID NO: 45075 - DNA, 30 bp, Homo sapiens
  chr8:8860450-8860480
  hyper
cgccgccgcgggaacgcgagcccggtaatt

SEQ ID NO: 45076 - DNA, 30 bp, Homo sapiens; identical to SEQ ID NO: 6092
  chr8:9007918-9007948
  hyper

SEQ ID NO: 45077 - DNA, 875 bp, Homo sapiens
  chr8:9760513-9761388
  hyper
caaaaacacagtcacggaggaaggtgttgacccacatacaatgagtcctgagcccagagaaaaatctgcacacacaagcactccgcaatgcgctcccaggcgaccccctccccacgcacaccgcatctgtgctgcacagatctgcttctgtcacagaatcagcttctgtttctctccctgagtctgtttgcatctctaagcccctgtctgtcacaggctgcacacctccccaccccacgggctccggtgcgggacaggcagccggagggagctccagacccctcccctcgcgcccgcggccgctgcgcggaggtctgcggagggcgcctggctcggtcggtcgctccttccttggcgggccctcgccgacccacggtgctcagccagccccattcttggcattcaccgcgtgccttaattgtatggacatttaaatcaaggtccgctgtgaacacggagagagaggcctttctcctgaggaaggaaaggaggaaggaaggaaggaaaggtgaaagaaaggaagaggggtgggtagaagatggaataagaaaaccaggaaaaagaaataaaaagcggcgcgtgtgcgtgcgcactgacagcggggagagggatgggggtggggaacgccggaggaagggaccacagcatcctccccgccgcagctcccccaatcacacagacaatgagataacagcgacgtcttccaaaggctctttgttctcccccatcctttcgcatccaggctttttcctgcaaagcggagggggtggagggatgggggtgtgggtggaagtgggagacggaggggtgcctcccccgtgttaattaccccggctcccctcgcccctttccccgcgcctcgcctcccctgcagc

SEQ ID NO: 45078 - DNA, 73 bp, Homo sapiens
  chr8:9762042-9762115
  hyper
aggtaaagggtggacgtagatttaaaaggtcactcgtgtataatgcggctggatccccgggtcaaaaaaaggg

SEQ ID NO: 45079 - DNA, 14 bp, Homo sapiens
  chr8:9762675-9762689
  hyper
gttccgcacgccgg

SEQ ID NO: 45080 - DNA, 546 bp, Homo sapiens
  chr8:9762751-9763297
  hyper
cgccgaacccaaggtgctttgtcccggcggccacacaaggtcttcggctttttgttctccttttttaagagactggccgcagtccccagcgattcagccggcccaaccaaaggcagtggatctactgaaatgaaaaggatcgagataatacacaggcagatgaataaggggggggatgctggaggtgcaggaagcatcctgggagcggccgccacggccaagcccgaactgcttgctgccttcgctggggaaggcgcaggaggcgagccggcgctggtggtcgctccacctggcaggaggaaatgataaccatgataaggaacgtgatgatgatgatgatgatgatgatgatgatgatgagcatgatttaaaaaaaatcagtctccctcttggtgaaccagagcatgcgtgccggagggactgcactgctggcggcggcggccgggggaaggagagcggcgcaggaggcaaaggttgaggaggcagcaccctcggatgaataataacaccgcgccgcgcaagttgcggagccgcctggaaatccag

SEQ ID NO: 45081 - DNA, 243 bp, Homo sapiens; identical to SEQ ID NO: 6094
  chr8:9763518-9763761
  hyper

SEQ ID NO: 45082 - DNA, 262 bp, Homo sapiens; identical to SEQ ID NO: 6095
  chr8:9763787-9764049
  hyper

SEQ ID NO: 45083 - DNA, 551 bp, Homo sapiens
  chr8:9764195-9764746
  hyper
gggccgctgcggcgacctgagcgccggtgcagcctcccccaccccgcctgggcgggcgtctgggcaggacagctgcggggggttgggagaggagtcggggagagggggacgatcgccccatcccccgcccccccgcagtcaaggtgaacatgaaggagagccggcgcgcgtgcccgcgcctgggaggcgcgcggccccgcccctcccggagccctccagcgcgcccgggccagatggacgcccgagattagaggcgcagaagtgcgctccacgacgggcccacccgtcccgcggacatcagacctacttcggggaggcgccttttgttgtggtggccgtggcggtgtttgtgtctttccgggagcacagggtgagcttggccttcaggaatgactcagaatgaatccgcctataagagccaaactaaagacgaccccccgccccagccccccaaccataacccaacgcctgccatgagaaaccttcggactttccaaggggtcagtgcctcagccacgaggggcagccctgacccgcgcggttcacgcaca

SEQ ID NO: 45084 - DNA, 30 bp, Homo sapiens; identical to SEQ ID NO: 6096
  chr8:9912494-9912524
  hyper

SEQ ID NO: 45085 - DNA, 186 bp, Homo sapiens
  chr8:10058671-10058857
  hyper
tttactccagccccaccgtgaccctcctctctgctgctcagtgtagtagcagctggattagtcagtagaaacacttgatacgtcagtccagatccctcaggagcatgcggtatgggttgggttggcatggggttaataacatgacccgatgagattgtacttcttgatgaccggcagttctgagag

SEQ ID NO: 45086 - DNA, 30 bp, Homo sapiens; identical to SEQ ID NO: 6097
  chr8:10587290-10587320
  hyper

SEQ ID NO: 45087 - DNA, 114 bp, Homo sapiens
  chr8:10587893-10588007
  hyper
gggcactcgagaccctcgggccaagggtaggctcccagcagcgaagccatggccgcacgcgggtcgcctcgcttcgcctggcggggcaggcgcggacctggccctcgcacgggt

SEQ ID NO: 45088 - DNA, 30 bp, Homo sapiens
  chr8:10697350-10697380
  hyper
gtgcgtaactccctcgccggcggactgcag

SEQ ID NO: 45089 - DNA, 30 bp, Homo sapiens
  chr8:10847825-10847855
  hyper
ggctggggtactggccgtggtgctgaaaag

SEQ ID NO: 45090 - DNA, 30 bp, Homo sapiens
  chr8:10872633-10872663
  hyper
ggcgcctctgatcgcgtgatatgggtgccc

SEQ ID NO: 45091 - DNA, 1160 bp, Homo sapiens
  chr8:10873135-10874295
  hyper
aagcggggctggctgcgttcgggacccagcgccccccaggccctccaaagactggttgagctcagaaccagaaggagcgagggagcagagaaagccgggggcgggctcggggtaagacaggaagggagtgagattaaggtgagaagtgggaggggaaggagggaaaccgagaggaattgagggtgggctcggcgtatctagagcagtccgcggaggacgctgaggctcgccggggaagtgctgtgcccgaggcgccccaaaggtgggcggcggtgccagctcagacccacgcctctgtccaagtcccgactcctgcggactcggctgcaggcgggctccatgagggcgggcagcagggctcagacgatccggctcggtttggtcagcagacccccggtaacgccccgcaccgtcggcgatccctgcccccttccactgcgcccccacaagccccgagctcgccagtccttccccgcggcgctccgctctgtggccccctcgcatcccaccgtgggggtgcagctcccctggcacagcccgacggtgggagagggcggccagctggactaaaagccccgtccccgggcgggaccttcctccccgcaccctgacgcggaggttggccgggggcctctgcgtccctctgccccgcgccctggatggggagggtctgggctccgcgccgcgaggcagcgcgacggctgcgggcgacttggcgtgcggtgctgaggaccctgggggagtgtgcgccgcggggacgccggggactcggggtcctagtgccaccggacgcagcgggagtagcgcaggtctgggggcggggtctctcgaggcgcagacaacaagctagatcctgagccctctgcttcaaagcgggtagcgccttcgcccacgccttccctcccaccatccctgcctggctgccacccggaagtccccgtccgcgccccgacagcgccgccctccggctggctgcagcgcgggccctcggtagggggcgttccaaggccccgcctcctcgtcactgccacggatgacgacgccccaggcccccggccccgcctccgcctctgcctccgcggccagcactggggagcgtcctggcctgcgcttgctccccaacccctccttgccccgctctgagccggcgcgtccttgct

SEQ ID NO: 45092 - DNA, 31 bp, Homo sapiens; identical to SEQ ID NO: 6099
  chr8:10898619-10898650
  hyper

SEQ ID NO: 45093 - DNA, 192 bp, Homo sapiens; identical to SEQ ID NO: 6100
  chr8:10950048-10950240
  hyper

SEQ ID NO: 45094 - DNA, 36 bp, Homo sapiens
  chr8:11058130-11058166
  hyper
tccacacggagaggcgacacaggcgctgcgcccccg

SEQ ID NO: 45095 - DNA, 622 bp, Homo sapiens
  chr8:11058198-11058820
  hyper
cgggccgcgccgtggacgtagccggcccccatcatgggggggccccggctggtgagcccctccacggcgcccagcccgccgcccgtgtagtcctgcacgaaccagcggaagctcaggctctgcaccagcagcgacggcaccagcacgaagaagagggtcagcccgaagtagacgtagtcccccttgcggtagtagtcgagggccagccacaggtcggtgcccacgtccccgaagaacaccagcagcgccagcacgatccacaggcagtcgagccacggccgctccacctgcggcggcggcggctccggccgcgcggccgagggcgtcgggggttggcggccggcgccgggggccgcgggaggctgcagcggctggtcccccccgtcggcggcggcgctgcggcgcggcttcctgcccaggagggagcgcaggcaggcggagcggcagccccagtagcacgaggaggtgttgcagcagtggcagatgtgcatcgagctgctctcgccgggctcgctgccgtcgccgccgccgccgcagccgcctcccccgggctccccgtcctcctcgccgccgctgcccaccgcctcgtccaggttgtgcagctgagcgaagcccaccccca

SEQ ID NO: 45096 - DNA, 135 bp, Homo sapiens
  chr8:11059039-11059174
  hyper
ggcgagccccccaatcgcacggcgcccgcagctccccagccctaccctcccggccaagatggccgccctcctgtgcctcagctgctgggcgggggaccggggggttctccccgccagggctccccttcccctctt

SEQ ID NO: 45097 - DNA, 172 bp, Homo sapiens
  chr8:11059210-11059382
  hyper
cgtttcagaatccggctggcccgagtgaggcggtccaaagtgatccctggagggggcagtgccagacgttttggggtccccttcctcagcgtcgcagctcacagctttcctcctggagaaacgccccctaacaccctcccggctgctggtggaggggcgggacctctgaggg

SEQ ID NO: 45098 - DNA, 895 bp, Homo sapiens; identical to SEQ ID NO: 6102
  chr8:11204526-11205421
  hyper

SEQ ID NO: 45099 - DNA, 264 bp, Homo sapiens
  chr8:11205445-11205709
  hyper
cggggttggcagggcgcgacactcgctcccctccacttttgaaagggcttcccacgccgagaagaggggcgggcatggccggcccggcgaaaccggtttgtacagactttgggaagccatcgcctgcggagggtgggaccccacagcttgtccacctgcccaggctgagacctcgtgtcctagtcctggatgccccacgggtttctcgtcccgggcagcggcgcacgggaggagaagactcccggtctgcagtcagacctccct

SEQ ID NO: 45100 - DNA, 30 bp, Homo sapiens
  chr8:11205993-11206023
  hyper
aggcaagaagccaggcgcacacagctaggc

SEQ ID NO: 45101 - DNA, 30 bp, Homo sapiens; identical to SEQ ID NO: 6104
  chr8:11324802-11324832
  hyper

SEQ ID NO: 45102 - DNA, 393 bp, Homo sapiens; identical to SEQ ID NO: 6105
  chr8:11536630-11537023
  hyper

SEQ ID NO: 45103 - DNA, 180 bp, Homo sapiens; identical to SEQ ID NO: 6106
  chr8:11537156-11537336
  hyper

SEQ ID NO: 45104 - DNA, 474 bp, Homo sapiens
  chr8:11540255-11540729
  hyper
gttactatcctactggtcagacgtagtagtccccgtttgtgcaaaaacacctcttggccgtggcgatgtggggagggagtgtggtccaatagtccttctcacttctcagaggttgacacagaatctaacagttaccctcttagaactactccggagaattcggtaggtagtagctagtttccacaccggggacctgctttgttaaatgctatgggtgtggggacaagatactgggttcagagaaagttctgggaagagtcttgaggtggaaacagcctcggtgcgcgggggtttctcgacagctctctggtgtctcttaccccctaggttttcccagccttctcgccggattgccttggaaagctcttggtgtggtggccactggggtttgctccagcagagataatggaggggctcgctatctaatctggacagcagcaggaacaatccattagacctcagcatttatccgga

SEQ ID NO: 45105 - DNA, 199 bp, Homo sapiens
  chr8:11540851-11541050
  hyper
cgtattatgcttgctgatgccggtaaatagtaattctacccattgtgactgttaggaagtagcagaatccttttgggttggaggtatcgttttttttcttttaagaagttcaatgagctttacattgtctcattcaaactcacccatcaaggggcgcggttcgattccaactttcaccgtattccttgagactaggtag

SEQ ID NO: 45106 - DNA, 253 bp, Homo sapiens
  chr8:11550352-11550605
  hyper
ccgggggctgaccccgagcgccgccgagtttgcgccgcccgccgccccgcgctcgcctccagccgcctggggttccgcggcggccgtcagcgcgcacctcatcaataaggcctgccaggcgccggccccgcggccatccatcacccgggctgcacccccggccgcgcaccgaggcttctgccagcgcctgcggggcctctgcgtggagtgggccggcagcgtttttctacccggcaacaaatacatggcttta

SEQ ID NO: 45107 - DNA, 456 bp, Homo sapiens
  chr8:11554710-11555166
  hyper
caccagaagtcccactctaaccggagagcccctgtccttctgtcaaacacacgcacaggactaacgagggggatgagtggaaaccagccgcaaagaaatggagtgggaggttcttctttaaaatccattccgttcagaacacagtgaacaccctttgacagaacaaggactatctagctattccaagctccgtgcctcccctttcttgagactgttgttacaagaaaccgatgatttctaacaataggaacctcccagctggggaagcggtgttcggaggggagcagcgctctcggtgggcacctgctgcagttggggagggagaggtggtcgtggaggccactttcccctccaccgccagggaagcctggtctgtctgaaggggtcctcgcctgcgccgaggatggccggacggccgggcctccggccccagcacagcccccctttcagaggacc

SEQ ID NO: 45108 - DNA, 210 bp, Homo sapiens; identical to SEQ ID NO: 6109
  chr8:11555473-11555683
  hyper

SEQ ID NO: 45109 - DNA, 258 bp, Homo sapiens
  chr8:11557879-11558137
  hyper
tccgggcgaacagggcggaggctctacgtccactccgtatccccaagaaagagtgtccgaggcacggaccatagcaagtgaaggaaggtaggtcgacgtggccttgcagctgaattcgttctccatttttccttcagcagggacgcatcctgctctgcaccctggttctcggcgctgcgcccgcggaggctcgtgcagggcaggctgcccgtgcgggtgaggactgagtgccgcgcagggaaggagtatcgcagaccg

SEQ ID NO: 45110 - DNA, 37 bp, Homo sapiens
  chr8:11559706-11559743
  hyper
cgtcagatggcaccccgccagacactaagccccaagc

SEQ ID NO: 45111 - DNA, 341 bp, Homo sapiens
  chr8:11560525-11560866
  hyper
aggctgggaatccacgattgatttcctactacggaagcgggtggcgttcccagcctgctttcggagcagcacgggtttcgtgcagggtgttatcccgaccccttcccccatccctctaatctggcttgagaagcccgtgctggagagaaaaacgcggccttaaaaaaaaaaaaaagtttaaccgaaagcgtgagagccacccgccggctgttatctggggctgaaggctgcggtaatcgatgggttatttttacgcggtaatagggccctgtgattgctctattaacctttagacctgtctgagggactctccggctcgcagccccgctgcgctggggcct

SEQ ID NO: 45112 - DNA, 928 bp, Homo sapiens
  chr8:11561267-11562195
  hyper
gaactagcatccagccgggcaccccgggtgacccagtgccccacacaagatcgagagttgagcccaagaggtcaccttcttctctactggccccgcccctcgcccgccgctgcgggatgaggaccacaggaagggggggcggggagggagaaagggaactcattaataaagctgaccctgggcaccacagcgaacccaatcgacctccggctgggttgcgggtgattccccgctccctggcggtagcacttgggcattttccgcggagaccccagagcctggactttgcctgctgggggagctttccgcacagtcccgcagcctgcgcccagcggaggtgtagccggggccgcgcacccccgccccgcccttgcacgtgactcccacaggccagtcagcgccctagggccgagttgctgggccggggacccgagccgcgagctggggacttggaggcggccggcgcaggggccgcgagaggcttcgtcgccgctgcagctccgggggctcccaggggagcgtgcgcggaacctccaggcccagcaggtagggcttttttcttccctttctttgctccttcccgcggtcccccaaactcggagcttctccgcctttgcttgtctggaggtagagaggtagctagtgggaggaaaagagacgtgcgctactcacttcaccgaaattgcccaacccctgctctgcttttgactttgccttagcaacttctttaagtcaaagtaagacttgggggcaaaacagagaaatattggaagcgcctttggattctttccgtgtgaacttgaacgctttcaatccctgtccccgtgtgcacattctccaacccttgtttgcatatcgcaggccggggcctgggtggtgatggtggccgcgtgaagttaccgggactgacgggcccgggacaggctgc

SEQ ID NO: 45113 - DNA, 828 bp, Homo sapiens
  chr8:11562235-11563063
  hyper
cgcccaccagcgactccggggacgcagggtggcagtgccaggcagctccgctgggcctcaggggcccccgggagccgctctgaggtgcggagaggctgctgagtggcggaactattcatgccctttctggccggcctcctcgccctcggggctggggtccagggactgaatgctcctctggaagctcaccaccccacctgcccgcgctgcttctacctgaaactggccaagggcccgagcccggaccggagccgtgacttccctccgccggccacggggctgcccggatccgccgggttatgtcgcttggctttgggctcaggggtcaccgtgggcagaggggggtgccggggtcgcggactgccaccaggttgaggaaaggaggggccttttggctggggaaagagcgtggtgggggacccgcggccgatggaatccctggggcagcgcggcccgcaccgtggaggttggggaagcgcctcggggaagtgtttcctgtgttcccagaaaaggaagacaaccgagagcaggtttcaggcttttaaagaaagcctggggtgtggaggtgatgctccgcacacgtctgtgtctcctcccctgctgcggccggcttggttgtgccggctagcgtgcgaccgtcctcctcgctgcaggccgagagcggaggcgtaaacccaggccagcgaggagtgtcctataaagggacggggacttttcggcgcttgcaattctcccattctgaaaaatagatcggaagagggctattggttgattcttgaaaggggagcgcatttcctgttggcctgcgaatttggggtgaactgggac

SEQ ID NO: 45114 - DNA, 96 bp, Homo sapiens; identical to SEQ ID NO: 6114
  chr8:11665927-11666023
  hyper

SEQ ID NO: 45115 - DNA, 162 bp, Homo sapiens; identical to SEQ ID NO: 6115
  chr8:11726003-11726165
  hyper

SEQ ID NO: 45116 - DNA, 397 bp, Homo sapiens
  chr8:12809462-12809859
  hyper
ggcccgcgcgcgcgctcccccacggccacgcgcgcaccctgccgcccgcacccccgcgcgccctccgtctattttttcctcttcctttcatcctcacactctaaaataggtcaaggggtggaagttacacctggtgcagccctcggctctgatgcaaaagcagcttttgcccctggctgcgggacagcgctgtgactactcgcaacgggagagctgctgccagtcgccacaccgtgcggaaagcgccggcgaccggagcactgacaatggtctgcataggggagcggagagaagcttctgttgcgccctagatccgctgcctcggcgcccgcccgcagggaggagggggcgcgacaggtcgtctagcgcgtgccccggagcccgcgcccgggtctgg

SEQ ID NO: 45117 - DNA, 1237 bp, Homo sapiens
  chr8:12989586-12990823
  hyper
ttccttcctctctccggcccaggaactcgctcctcggcctccttgtccgggtcaagggggtgggcatccccaagggggcatttcagggacacgattcagcgacccatctccgggaaaaaaaccaaaactgtgtgtgtgtgtgtgtgtgtgtgtgtgtgtgtgtgtttcctagcaagaagcacgtttgcaagccacggggcttgctaaactaccccaacactctccaggtacctgcggccaccaaaccgagacttccctggccaggtctgagttaattcccagcgcttaaagtatcttacccaaaaatggttgaaaaggaaaacaagtttttggtgaactttcaggcagtgatgaaaaaaaaaaatttccaagcgccactagggtctaaaatgttcccaaacagtaaactctcccggagttcactttgattttggactaagctggtgaatgacaggagatcagtacgagcgcagagcagtccccagaggaaaggaaggtagaaggcggtgtcgccgcgcccctcgagccagagccgcgagcccccgcccggctcaaggaggaaagtgaaccagggcttcccttcacgggttgcgaccgatccggagcccgcctggtgcgctggcccgcggtccccaggcaaaaggtaatcaagagtcactcctccaaaattcaaactccctccccaaactgcgagtcctgctatccccacaccacctccaagaaaatccggagactctgcagaaagcgtttaaagagcacagaacaggcaccgacttgacaaggcggggtgacactttctcgcggcgggtcccctccgcagcccgctcccgcggccagcccgacggcaagacgcaagtctagcttacgtgttaggatcatggtgtccggcttctttctgcacatcaagcacggcaggcggcggcggaagcgctgtggggaagtcgaggcaggcggaggcggctcggcttccgcgtcgggacccacggcggcacccgagacgcgcgccctcgcggtcctcaacgcatccttgctcgccgctccctgcccctcgtcacggccccagaaagaaagcggggttttctaaagatcgaaacgagggagcgctcagggagttgggcgagaagtccgtgagccggcgctcctgatgcggagaggtgcggccatgtcctggctgggagcgaagcgccctcgctcgggcagtcggagcgaactgtctcccgcgcgctccgccagccgg

SEQ ID NO: 45118 - DNA, 305 bp, Homo sapiens
  chr8:12991084-12991389
  hyper
aaggctggaatgtttcccccacgggcctccacgttcccagcgggaagcgccgaaaagtcgccaactattggccccgggtgcaaaggcaaaggtcacaaggcatttacttggcggaggtgtccggcctggaccctagtgtgccttgagcgtcccttctttttcttggtagctctgcgtactttttacctgtcttttatcctggcgggaaccacgtaaatttgcgggaacggaggggaagcggagaggaagggatggtcagtgtttccagatctgtaaaaacgagcgaagggtacctgtcccttgga

SEQ ID NO: 45119 - DNA, 509 bp, Homo sapiens
  chr8:13133801-13134310
  hyper
aatgacatccagggctctggccgtggagtccctgatgtgatcgctaaaggacctccggagaggggctcgcagggggcgcgccatcacgtgggccttggggtcccccatccgctcgcagacgccttcagcgcagcccgggcgccgcgaccatgcctcggtactccgccccgcgctgtgctcccggccgcaggctgtcgcctgccttcaggaggccggcattgcggctggcactgcggccccgggaagcgccaactgcaggcggcctcctggcccgcggccaagcgcgcgcggcggccacatctggaaagacttaccctgcgccggcgacaccctcgcggggcgcgcgagctgcagcacagctatccggaggcgtctcgcttcctgtgcaacccaatgactcacctgggtccgcgccgggctgctcctgggtcacatagcaggtcttcccttcaggggcagtccaggtgacctcgcgttttcaaagggaaacgcagcgccgcaggcaagca

SEQ ID NO: 45120 - DNA, 44 bp, Homo sapiens
  chr8:13424065-13424109
  hyper
tagatgcatttaggcgggcgtacacgttcggatttgtcacaggc

SEQ ID NO: 45121 - DNA, 30 bp, Homo sapiens; identical to SEQ ID NO: 6119
  chr8:13624575-13624605
  hyper

SEQ ID NO: 45122 - DNA, 200 bp, Homo sapiens; identical to SEQ ID NO: 6120
  chr8:15094366-15094566
  hyper

SEQ ID NO: 45123 - DNA, 438 bp, Homo sapiens; identical to SEQ ID NO: 6121
  chr8:15094645-15095083
  hyper

SEQ ID NO: 45124 - DNA, 252 bp, Homo sapiens; identical to SEQ ID NO: 6122
  chr8:15095136-15095388
  hyper

SEQ ID NO: 45125 - DNA, 30 bp, Homo sapiens
  chr8:15095899-15095929
  hyper
caggtgactgacttcgcttctctcttccca

SEQ ID NO: 45126 - DNA, 85 bp, Homo sapiens; identical to SEQ ID NO: 6123
  chr8:15398263-15398348
  hyper

SEQ ID NO: 45127 - DNA, 30 bp, Homo sapiens
  chr8:16859436-16859466
  hyper
cggcggccgctccccggcaggaggcaacag

SEQ ID NO: 45128 - DNA, 1202 bp, Homo sapiens
  chr8:16884157-16885359
  hyper
agccttctcccatcaaaagtccggaagctgcccttcagtcgtcaaagtgtttgccttaatttgcaatcgttatgacttgagccaaatgcttatacctcatttgtgtcgtatatgtgaagatacaattgcaaatcgttcacgaccttgagtcaagaccttgagtttcctgaggtcaggagaccgttagggaatgtgagtgtcccagacgggcgctgagcccagctcggagacccaccccgcccgtagcagcggcgcgggccccagagagccccgcactcggccgcgcctcagttacgctgactcggctgtgcccgcagtgtcgcgctgtcgcgtagccaggtgtcgccgggctggcgcggttatttatgactgcgtggttgggctgggggttcggggccggggagcagccgggatccgccgcctcttccatgatcttcccgggccgaaccacgggaccgctacgctgaaggtggcgtcgcgggtccccggggccgcgcgagtgtaggggtcgctctcggccggccgcgaagctcgcggcaccgacttctcgcgagatttcggcgacccccccccccgcccccgcccctccgttctctgccccctcccagctctggtgtgggcggcctccgctatggctgcgctgcgaaggctcttgtggccgccaccccgggtgtctcctccactctgcgctcaccagcccctccttgggccgtgggggcggcctgcggtgaccaccctgggccttcctggccggcccttctcctcccgagaggatgaggagagggctgtggcggaggcggcatggaggcggcggcggcgctggggggagctgagcgtggcggcggcggccggcggggggctggtcggcctggtatgctaccagctgtacggggaccccagggccggctcgccggcgaccgggcgaccctcaaagagcgcggccacggagcccgaggacccgccccgcggccgggggatgctgcccatcccagtggcggctgccaaggagacggtgagtgcgcgagcgcgcgtcacacctgcgcgggggatgtgaccttcgtgccgggtacgcaggaccctggaggctgtggggacggtgcaagcgctgtggccgcgggtgaggaacttcccgtgagcgaggctgacacctaggccggacagcctaggatccggtcacccacgtattgggaagaccagtgatg

SEQ ID NO: 45129 - DNA, 129 bp, Homo sapiens; identical to SEQ ID NO: 6126
  chr8:17013472-17013601
  hyper

SEQ ID NO: 45130 - DNA, 914 bp, Homo sapiens
  chr8:17354230-17355144
  hyper
tggaaagtaaacggggggaccaaaaccccacttagaactctgcttagaagattcggaaatgcccttgaggtttggtcctcccaggagagcacgaagtttatcctcgcgcgcagcctctcttccccggcccgcgcccaccggcctagcccggggctagcgcccgcccacgtgtgctcggctccaggcaaaccccgctgagcagcggccgcacaccgcccaccccggggattggtcagcgcggccggggcccggcgggaggcgggctcggggtcgcgttccgggagcgcggaggaggcggtgccgcccggccccgcgccccgcccccgccccgggtggctacacagaggggcgcccacgtgcccagccctccttctgcagcgcggccggcgggcgctcctcttcgcgggaccagcgaggcggcggccgctgctccagcgtcccccagccgcgggcccccgacgcgctgcagccggcagcccaccgccgccttcttggcgcgaccccaacccagccccagtaagttgctaggtctccagccccgccgagaggccgcgggcgaggggcagcccggacgctggggccggcggggaaggagcggggcgagggcgccctggggccggcggggaactagagggtcgagggctcccggggacgagtccagctgcgcgcagctgccctgaggccgcgctccagcgagtcttcgtcagggagtcggggccgtgggctggggctgaagccgtggaccttcgtcctcggggctgcgccccggaatgcgcctcgcctcgtccggtccctgtgcagccggctctgcccggggacttcggggaccgctggaactgggagaggggctggcacggcgacttcgcggggacccttcagtcactatttccagaggagctcggcgcacccctctc

SEQ ID NO: 45131 - DNA, 175 bp, Homo sapiens
  chr8:17434526-17434701
  hyper
gggaagaagtgctgcgcaccgcggctccgccagggggcaggagaagtcacattacacagagaactaaaaaaaaaaaaaattccccaactttttcccccaaaccttgttcctcctgaagaaaccgaatcctcccgcttcggcgtcccaggagcccgcccctcgcccgccgcctccc

SEQ ID NO: 45132 - DNA, 1258 bp, Homo sapiens
  chr8:17658161-17659419
  hyper
agtagcgaggcgccacgaggggtctttgggacctgcagcaaccctattccacccgctttctcggccccgcttgcttctgctgagaaggggccctgcgagaaggctgggaccgccgggcccgggtgggcggcgtaaggagtccacagtcaagcccctcggtcactttcaaggtgacagcgacgagatccgcatccgtcccttccgcaggctctgcgctggcccacgtgagacccgcctccgctccgccggcgctgccgccccctttagccctcagcttcggcccccaggcccctggaacgccccctcccctccccgaggaccggtcccgtcaccctgggcggcgcgctcgcctgtcccctccccaccccggccgccgggcagcgggaacagattccagcgcgcacttacccgcagctccttcaagcgctccgggagcaaagacgcagaggcggggagggctggcgccctttgcaccactggcggggtcgccgagaacccgccccggaggtctcgggggcggcgtctgcacctgggggcgcgcggcgcggcaccaccccacgcctgcggcggctaccaggcgggacccggagccccggcctccccgcctccccgcctccggggccgccagggggtggagcagggcggggagttcgggaaacttgtaaatagccgaactcgggcctcccgccccaacccggggcggctccttccgaaggctccactccagcggctcgctgcgggagaccaaggccagccgccgtcccaggggacggccctcggggaacctgaatgacgtgcgaggccgtacctcggggcgctggactccgctcgggcgctcccgctctccgctcccgctctcgggtcccaatcccgacgctccgcgcgctcccggactaagtgcggacgcgccccacgccccccggcgccagcccgggacagcgctgcacctgttgccacgtgcgacgcggcgctcagcggctgccactgccgccggcgcacctggctgcaccgcgcgtcccgggaccacgctcgtccccgcaggagcccggggctccgccgcacccagcgctagggcccaggccgggccgcggtaggtgggggatctgactcctgcttgcctctggccacctgcaggccgaggggcctcgcaccgcggggcgtatagaaggtgggaaggttgcagaattatcagggcggaagcttgcaaggaaggagtcgtgattgtctcttagaagggctgattcgcagtctgtattat

SEQ ID NO: 45133 - DNA, 30 bp, Homo sapiens
  chr8:17780153-17780183
  hyper
agggccccacgctccgcgatcagcgccgga

SEQ ID NO: 45134 - DNA, 267 bp, Homo sapiens
  chr8:17940759-17941026
  hyper
gggcgtcaagaggctcggacgttacgcatgttcagtaaacaacagtgtaacctctggctaaatattttctcactctaggtctacttcctcttctgtaaaatgaaagagtcacgctcgtccctcactgtctcttgcagttaggaagtccgtagccctgtgacttgctcgtgggaaagagccacgggacaggcgatcccatgacttgggtgcaaaaggccacagggggccctttggggcctgctctgggctgctcgcaccgcccaagct

SEQ ID NO: 45135 - DNA, 30 bp, Homo sapiens
  chr8:17941553-17941583
  hyper
ctccggcccggcatcgctctagcagccaac

SEQ ID NO: 45136 - DNA, 30 bp, Homo sapiens
  chr8:17942554-17942584
  hyper
gatgaagctcagcacgctgccgaaatctcg

SEQ ID NO: 45137 - DNA, 30 bp, Homo sapiens
  chr8:18272865-18272895
  hyper
gattttcataataatgtgggcattcacagt

SEQ ID NO: 45138 - DNA, 30 bp, Homo sapiens
  chr8:18671751-18671781
  hyper
gcccccagccccacccgccgcataccttcc

SEQ ID NO: 45139 - DNA, 981 bp, Homo sapiens
  chr8:18870316-18871297
  hyper
agagttattctggagcggaaatcctggatcccgctatcgggagaaccagtgtctagaaaatgaaatcgtggtgcccattccatcctctgcctagtgggcgtttaacatcctttgacatcgaggggaatggcaaaacgaaacatttattatttaggtcaccaacaacattctaaacccacgtcctctaatcggtgttaatgtgtttaaaaaaaaaattcagaacatcattcgccagaacggaaagctgaaaacggcggataaagttaaatgcatgtaaaacagaatgacttaaacatctgtaaaagctcctgggaattgcaccgaataatcttcccttgtccgtttgctcgctcaattcaagtttgtttagtttagtctttttttctttctttctgacagaaacgtgatagtccctaaatacaagctgaccgggcaaagaaagatcggcatacgaggtcctctttcatgttgccttcttttgatagcttttctccaaagtctgaggttttcaaagccgaggtatgaactaaaacccctaaaccttaacaccacaaagttgaccctgctgggctcctaaaaaacacaaagcaagcaagcgcgaagagaaaaatcgcaccctgcacctatccagacagcacaaacccaggtggccccgggatcctgggggacagagcggcgacaaagcaacacaaaccccacgtcgaacagcggcgccgcgtgcgcaccccgcgcccgcgccccggccccggagctcaccgctgcgctccttccttccatcttccatcgccagcccggccgcgcgccgaaaccgccgccgggcgctccggggccgcagcctcagggcgcgagtgccggcggccagcgccgcgtgctctttgttgagctcccgggactgccgagaggcggcggcccgcgcgcaccctggcggaggctggcgaggctgcgagcccgcggcagccgcccgcccggcccccagtaacg

SEQ ID NO: 45140 - DNA, 320 bp, Homo sapiens
  chr8:18871512-18871832
  hyper
tgcctcccgcagccgcgcgcccgccctgggcccagcctccagcccgcgagcgaaaacctgcctgttgctttgtcttcttccttcacagttttcccaccctgagaaaagtgagaggtgctttccctggtgtttcctctcaggaagggccgtgtgactggagccgcgagttgggcgccgtctcgccggggctggaggtacgcgggcttcgggacacgcacctaggcgtccctcggggtcccggcctctctgaccgggctcccccggcaccgatccgcggccggagcgtttagtcccggggacccgtcgagccctgaaagggc

SEQ ID NO: 45141 - DNA, 71 bp, Homo sapiens
  chr8:19125227-19125298
  hyper
aagcgggtctcctttccgactgtagccctcagaggacttctgtgtattcccggagccggtggcttccagag

SEQ ID NO: 45142 - DNA, 545 bp, Homo sapiens
  chr8:19171176-19171721
  hyper
caagagctgttttgcgtccgggccggagtatttgctcagcccgcctgcgccgcttgggacgcctctgcctttccctccctcccttccccgacggcttctggcggccaagtggatgtggcgggtgatcgagccaccctgcccaggggcgcccagcactggtaggtgctgggggtggggcgaggctttggggagagtgtgcgtggggtgggagtagggggaagggaatttcctcggaggttgcatgggtgcatgggaggcgcaggggccagagcgggcgggcggaagcctcacccccgcctccaccccttcgcggcgcccggggcgggctcaggtgcggggttgggcggcgagagcggccgcggcgggtgtccggtgtccggtgtccggtgtccggtgtctggagccgctggctaggtgagcggcggtccccggggcctgggggcttgcagggggtggcgggggaacttcgagggagagggtctgccggggctgaggaccttcggggaagttctggaatccggcagggacacgcggcgcgtgcttcc

SEQ ID NO: 45143 - DNA, 30 bp, Homo sapiens
  chr8:19172033-19172063
  hyper
actcgggggtcacgcgggcaccggaaggag

SEQ ID NO: 45144 - DNA, 31 bp, Homo sapiens; identical to SEQ ID NO: 6132
  chr8:19266668-19266699
  hyper

SEQ ID NO: 45145 - DNA, 19 bp, Homo sapiens
  chr8:19614761-19614780
  hyper
ctgcgcggccgccgcggac

SEQ ID NO: 45146 - DNA, 786 bp, Homo sapiens; identical to SEQ ID NO: 6133
  chr8:19796822-19797608
  hyper

SEQ ID NO: 45147 - DNA, 412 bp, Homo sapiens; identical to SEQ ID NO: 6134
  chr8:19797677-19798089
  hyper

SEQ ID NO: 45148 - DNA, 30 bp, Homo sapiens
  chr8:20054580-20054610
  hyper
gacgttggcctgcacgcgtttgccttcctc

SEQ ID NO: 45149 - DNA, 635 bp, Homo sapiens
  chr8:20160990-20161625
  hyper
cgaagacaaagacaggaggacagacgcacagtcacctcctctgggccgggccggagaagcggcgcccaccctgcagaggggagaccctgacagctccacgcggagacaaagacacctcgacagccacggacacagacagacaaagaccgacggacgcgcggacgcacggacggtccggcccggcgaggggaaagcggtttcccgcagccagggcagcagaccctccaggggcgaggagatccccggccaccgcaccttacctgccccctgcgcctcgggcgcacttgagactttttttttttcccagtgtttcccggtgtgttcccgtctctctttttccagagctgctgagcgggccgggccggtcccactgcgcgggatgcagctcccggctcccactcactggccgaggcgggcagagaaactttcggcctccccgcccggccgctgccaacccgccagctccaggcgcgccggcctctgcgcgggtcccggagccggggcggggcggggcggggcggggcggggcggggccggcccggggcggggccagagccggcgccgctgattggcagcgagctgccggcagcctggtctgtgccgctcggcggcctttgttccgggctgacagctgg

SEQ ID NO: 45150 - DNA, 30 bp, Homo sapiens; identical to SEQ ID NO: 6135
  chr8:20293185-20293215
  hyper

SEQ ID NO: 45151 - DNA, 242 bp, Homo sapiens
  chr8:21776836-21777078
  hyper
gggtcccggggcggcgacagacctcggcccccatccaggagccctcaccacgcaaacgagcagaaggcagcgccaactcccactccagcgcccgcctgccggagcgagcgcggcccctttaaaaaccatgtaaacaaagctttgttcccccagctgcccctccttcgcgctcccccggcccgctccttcctcccacccggcgtctccgggccgctgacgttgcccgcgcctttacgccgtcc

SEQ ID NO: 45152 - DNA, 31 bp, Homo sapiens; identical to SEQ ID NO: 6137
  chr8:21867535-21867566
  hyper

SEQ ID NO: 45153 - DNA, 83 bp, Homo sapiens
  chr8:21868698-21868781
  hyper
agtcccacaaaagttcggaaaatagtagaaagggggcgacgaatggtggctcatgcctgtaatcccagcactttgggaggccg

SEQ ID NO: 45154 - DNA, 125 bp, Homo sapiens
  chr8:21906318-21906443
  hyper
aatgggttatctgaagcggggcgggggatccgaccaccgaacacccctggaaacgagcctgcccgtccccggccgggcgtggccacggcaggtgcaggcgcggcccgcagcgctggggcccccag

SEQ ID NO: 45155 - DNA, 30 bp, Homo sapiens
  chr8:21907630-21907660
  hyper
aatcccagtgaagaccgcgccgtgttgggg

SEQ ID NO: 45156 - DNA, 31 bp, Homo sapiens; identical to SEQ ID NO: 6139
  chr8:21966148-21966179
  hyper

SEQ ID NO: 45157 - DNA, 30 bp, Homo sapiens
  chr8:21976724-21976754
  hyper
ggatgctgaccaggtcggccacctccacac

SEQ ID NO: 45158 - DNA, 30 bp, Homo sapiens; identical to SEQ ID NO: 6140
  chr8:21987846-21987876
  hyper

SEQ ID NO: 45159 - DNA, 159 bp, Homo sapiens
  chr8:21988132-21988291
  hyper
gaggggtcggactccgggatctgcaggatgcggcacacggcgcggatcggccgcaccagcttctgggccgaggccgtaggttgcgccatgggacgccgagactccgtgctgcgccgcggggagggccgggccggggctagggagcgggtgcccccggag

SEQ ID NO: 45160 - DNA, 122 bp, Homo sapiens
  chr8:21988552-21988674
  hyper
ctcctccagcaccctgcgggaaacaggagcccgtgattcggcggccgcgcctgggcctgccccctcccgggccccgggggcttccgccaacgccccggcgatgccaccggctgcgcacgggg

SEQ ID NO: 45161 - DNA, 30 bp, Homo sapiens
  chr8:21998782-21998812
  hyper
gggcgggtagcctgcggtgccccagacacc

SEQ ID NO: 45162 - DNA, 220 bp, Homo sapiens
  chr8:22089409-22089629
  hyper
ggtcacgggcagtggcgtgcgcttgctcctctcccggctgccaaggaggctgcttccatgccccgcagccagctcctgtctggctgtgcagcgcgtcgctgctgcccctggtgagacgatgttcccagctgagcagcgcaagaagagaggcaagagcgaaatcaaagcagcgtggaggagagagaggcagagaagggagaaagaacgagagagccagacc

SEQ ID NO: 45163 - DNA, 71 bp, Homo sapiens
  chr8:22102541-22102612
  hyper
ggaggggagcgaagcgccgcctgataaatactgtggcccagtcccgcccccctaacgtcacttccgccccg

SEQ ID NO: 45164 - DNA, 242 bp, Homo sapiens
  chr8:22224958-22225200
  hyper
cggcggaggagccccgcaccccaggctggggcagtgggtgggggcggggacagccctgcgccgaggaccgggcgccgctcccgggcaccggcacacgcccggacggctgggtggaggctgcacctggccgtggtgccgcgctggcgaggggagaggtcaaggcgcggcctgtccgcctggagggtgcgggatgctagagccgcagaagggtgcccagagcgtgggtcgccgcgccgaaggct

SEQ ID NO: 45165 - DNA, 107 bp, Homo sapiens
  chr8:22408651-22408758
  hyper
cacccttatcctctttaggggcgcggcacgcccgggggggccgctcccttgggctgatttcctccctgtgcttgcacgtgtgtgagcgtccccacgtttgcagtgta

SEQ ID NO: 45166 - DNA, 71 bp, Homo sapiens
  chr8:22419404-22419475
  hyper
gacctgcccacaggcccggcccggcaacatcttccagtgggtgagcacagtggggcggggccgagggctgc

SEQ ID NO: 45167 - DNA, 30 bp, Homo sapiens; identical to SEQ ID NO: 6145
  chr8:22437178-22437208
  hyper

SEQ ID NO: 45168 - DNA, 30 bp, Homo sapiens
  chr8:22462095-22462125
  hyper
ggacactaccgaggcgcgacttcctgacgc

SEQ ID NO: 45169 - DNA, 30 bp, Homo sapiens; identical to SEQ ID NO: 6146
  chr8:22549553-22549583
  hyper

SEQ ID NO: 45170 - DNA, 30 bp, Homo sapiens; identical to SEQ ID NO: 6147
  chr8:22552223-22552253
  hyper

SEQ ID NO: 45171 - DNA, 30 bp, Homo sapiens
  chr8:22552609-22552639
  hyper
cccgccgcctctcccgccaggctccccact

SEQ ID NO: 45172 - DNA, 115 bp, Homo sapiens; identical to SEQ ID NO: 6148
  chr8:22562486-22562601
  hyper

SEQ ID NO: 45173 - DNA, 189 bp, Homo sapiens
  chr8:22722334-22722523
  hyper
aaacaccacgggggccgctgggcaccgccgagcgccaggctggtgaactgacccgcagcgcaccccatctgtgtgggaaggtcggggcaggggacccagggcgggatggcggtgctggaccccgatgaggccccttcacggccactagggggcaggagtgcggggcgggcagcacgagggggcaggtgt

SEQ ID NO: 45174 - DNA, 30 bp, Homo sapiens
  chr8:22722802-22722832
  hyper
ggaagagcggcgggcggatgggaattaccc

SEQ ID NO: 45175 - DNA, 30 bp, Homo sapiens; identical to SEQ ID NO: 6149
  chr8:22723193-22723223
  hyper

SEQ ID NO: 45176 - DNA, 31 bp, Homo sapiens; identical to SEQ ID NO: 6150
  chr8:22857229-22857260
  hyper

SEQ ID NO: 45177 - DNA, 30 bp, Homo sapiens
  chr8:22857657-22857687
  hyper
gcagcccttgcagacgcgccgctccgccct

SEQ ID NO: 45178 - DNA, 140 bp, Homo sapiens
  chr8:22925641-22925781
  hyper
aacaatggcattggcgatgagcggccccgcacgcgtaggggcgcagccgctaaggaggggaaggggcctctccagctgcgcccgcgacgactcccgcgcacggaacggaaccactgggccgcagcgaccacaggggagtt

SEQ ID NO: 45179 - DNA, 30 bp, Homo sapiens
  chr8:22926238-22926268
  hyper
gccagggaccgcggcggggactcaccaaca

SEQ ID NO: 45180 - DNA, 30 bp, Homo sapiens
  chr8:22926896-22926926
  hyper
ccgctttccaggcgcgtcttgatcttctcc

SEQ ID NO: 45181 - DNA, 459 bp, Homo sapiens
  chr8:22960511-22960970
  hyper
gagatgcaaggggtgaaggagcgcttcctaccgttagggaactctggggacagagcgccccggccgcctgatggccgaggcagggtgcgacccaggacccaggacggcgtcgggaaccataccatggcccggatccccaagaccctaaagttcgtcgtcgtcatcgtcgcggtcctgctgccagtgagtcccggccgcggtccctggctggggaagagcgcacctggcgccgggagggggcagggagacggggacacggcagggatgcctggccctggtcacctgcggccgggcatgtccgggcaggacgaactcgccgtcggagtcaggggaagaactgggtccccgggctgggcaggagggacccggccgcgagggagcagagaggcggtccccctggctgccccgagcccgcgaagggagggaagttccagaatcgagagagggagggagtcaagg

SEQ ID NO: 45182 - DNA, 198 bp, Homo sapiens; identical to SEQ ID NO: 6152
  chr8:23020932-23021130
  hyper

SEQ ID NO: 45183 - DNA, 512 bp, Homo sapiens; identical to SEQ ID NO: 6153
  chr8:23021192-23021704
  hyper

SEQ ID NO: 45184 - DNA, 102 bp, Homo sapiens; identical to SEQ ID NO: 6154
  chr8:23082554-23082656
  hyper

SEQ ID NO: 45185 - DNA, 112 bp, Homo sapiens; identical to SEQ ID NO: 6155
  chr8:23082729-23082841
  hyper

SEQ ID NO: 45186 - DNA, 30 bp, Homo sapiens
  chr8:23197238-23197268
  hyper
gtattcagaggacggcgactcctggtgcca

SEQ ID NO: 45187 - DNA, 30 bp, Homo sapiens
  chr8:23218852-23218882
  hyper
cccaatatttcccatcgctggctcagagac

SEQ ID NO: 45188 - DNA, 374 bp, Homo sapiens
  chr8:23260872-23261246
  hyper
gactcacggcgctcccgcgctcccaacagcctttcgagcaggctgggggttgaaccgggttcaagcagtggacgctacagctcccgggcgcagcccccggggtccccgcccccactccgtcccagcccagcacgctctacatccccaaaaccacagccccgagggcagtcactgtctcccgacccgtcccccgcgtgccccactcctcaaagccagaattccggagacgctgtccctggagccacgctgcactctccaagacgcccagcacacaccgagacttgacgggctctgtcccgcctgattacgggcgctcgggacgatccagggacccagcgcctcgctccccgggcgcgccagcagccgcgccgcgc

SEQ ID NO: 45189 - DNA, 475 bp, Homo sapiens
  chr8:23261271-23261746
  hyper
cggggccgcccggggcggcaggaggacccgttagcctgcacgtcctcgcatcgctccccgcaagaagtctttgggaacccccaggcactgtcgagaggcagccccgcgcaggacgaagcctggagaccccatagggacgctcccgctttctcgcgaaccgcttcggggagggggtggcgcgggaagcgctcttacttggtttcagggatccgcagtggccgggctgggaccgcgctctccacggtggtccccctccgcttccgccgccgctgagcccctttctcgagcagagggggcggctctggtctccgatggctggagaaagcaagcaccaagcgtaggtagccgcgcgctggagtcgcgcgtttactcttttcccccttacttttaactagaggaggatggcaaacccctccccggacccacccccttccccgaaggcggccgccgcagcaggcccggcctccggcctctt

SEQ ID NO: 45190 - DNA, 30 bp, Homo sapiens
  chr8:23330024-23330054
  hyper
tcaccactagatggcgtccgagctcgcgct

SEQ ID NO: 45191 - DNA, 130 bp, Homo sapiens; identical to SEQ ID NO: 6156
  chr8:23386070-23386200
  hyper

SEQ ID NO: 45192 - DNA, 30 bp, Homo sapiens
  chr8:23387346-23387376
  hyper
ccccgactttgggtcgccgagccgccggga

SEQ ID NO: 45193 - DNA, 45 bp, Homo sapiens; identical to SEQ ID NO: 6157
  chr8:23539859-23539904
  hyper

SEQ ID NO: 45194 - DNA, 147 bp, Homo sapiens
  chr8:23559454-23559601
  hyper
tcttcgtgaacttcccggatcctcaagttcccagctcttcagcccccttcccgccctcccgtcctcttctctttcttccccaacagctgtcattaattggaggatggtaggcccgctagatcaccatctccattcaccgccgatgcc

SEQ ID NO: 45195 - DNA, 1003 bp, Homo sapiens; identical to SEQ ID NO: 6159
  chr8:23559665-23560668
  hyper

SEQ ID NO: 45196 - DNA, 30 bp, Homo sapiens
  chr8:23561988-23562018
  hyper
ttcatgggatctcacgccaggagaaaatca

SEQ ID NO: 45197 - DNA, 179 bp, Homo sapiens; identical to SEQ ID NO: 6160
  chr8:23563844-23564023
  hyper

SEQ ID NO: 45198 - DNA, 476 bp, Homo sapiens; identical to SEQ ID NO: 6161
  chr8:23564192-23564668
  hyper

SEQ ID NO: 45199 - DNA, 215 bp, Homo sapiens; identical to SEQ ID NO: 6162
  chr8:23564702-23564917
  hyper

SEQ ID NO: 45200 - DNA, 30 bp, Homo sapiens
  chr8:23566784-23566814
  hyper
gagtgcctggtctacgggtgtttacaatca

SEQ ID NO: 45201 - DNA, 49 bp, Homo sapiens; identical to SEQ ID NO: 6163
  chr8:23567533-23567582
  hyper

SEQ ID NO: 45202 - DNA, 105 bp, Homo sapiens
  chr8:23567657-23567762
  hyper
cgctggcgcccaggaaagccggggaggaaactaggaagggaggcgacagcagaaaagccagagagtccagagactcctaggcaggcctccgtgcagccccaacag

SEQ ID NO: 45203 - DNA, 646 bp, Homo sapiens
  chr8:23571964-23572610
  hyper
gttctgggacagaccgtcgggggctgactccgggggtttgcgggcgccgagctgcctccgcgcgcgttccactccttcagcgtggaaaagaaaaccctcagcggccagagaggcggcggggccttcccggatcgctgattcggggagccgcaggcggggacgctgctgggcgacgcttatctgcgccgcgctcgccagctccgtttcaattaacattccagtgccgccgcccgccgcgggagcggagtccccaccagcccctggaaaaataaactctaggcctagcggctgtgcgtgcgtgtgtgtgtgcgtgcgtgtgtgcatgtgtgtgtgtgtgcgcgcgcgtgtgtgtgtctgtagagccgacagagtcccagatcagtgcagtccagagctgcctatccccgggtcgcggttccctgcggggtcgagcctgcgccgggctgcagctctctgtcccactgcgcggcgggatggcagctgctcttttaataaactagcagtcggcggtctgagccctacaatatccccaaagcctggtgtgcgatggaacacatggctgcgtccccagaccccgagaggggagttgcacacacattgctgaccttgagggtcagacagaccctttctcgtctagtttttagca

SEQ ID NO: 45204 - DNA, 51 bp, Homo sapiens; identical to SEQ ID NO: 6166
  chr8:23583965-23584016
  hyper

SEQ ID NO: 45205 - DNA, 307 bp, Homo sapiens; identical to SEQ ID NO: 6167
  chr8:23584093-23584400
  hyper

SEQ ID NO: 45206 - DNA, 200 bp, Homo sapiens
  chr8:23584581-23584781
  hyper
cggcgccagggcgggtggtggagctccgcgcaggccggggggaaccgcaagaggagccggggcgggcggcggccccgggcgggtcaggggcggcgcgagcccacacagagcggtgaaactaccaggggccctcccactcttcccggactccggaggagctaagccggcagggatcgctcgcccaccctgagcactttacc

SEQ ID NO: 45207 - DNA, 30 bp, Homo sapiens; identical to SEQ ID NO: 6168
  chr8:24770327-24770357
  hyper

SEQ ID NO: 45208 - DNA, 25 bp, Homo sapiens
  chr8:24771099-24771124
  hyper
gcggcctgggcccacgtggagcggg

SEQ ID NO: 45209 - DNA, 954 bp, Homo sapiens
  chr8:24772121-24773075
  hyper
aatccgctcccagctcgaaagccactcagaccagaatatgcaccaggccgaagagtggttcaaatgccgctacgccaagctcaccgaggcggccgagcagaacaaggaggccatccgctccgccaaggaagagatcgccgagtaccggcgccagctgcagtccaagagcatcgagctagagtcggtgcgcggcaccaaggagtccctggagcggcagctcagcgacatcgaggagcgccacaaccacgacctcagcagctaccaggtaggaaccgcggctgcgcggccagcctgcgccagcgccagcgccgcgcgcccccgacacttgggctcgtgcccaggcgccctctccgccgcgctccctggtggccgctcgctagagcacgcgcgccgcagacctagggtatttgcggatcagcgtcctcgcccatctcatcctccacactccgcccccacccacctgccccagctgctaagggtcttgacctttttcagaaacgtgcatcttttccagttctaattttgcacgcttgcacgtttaaagcaggagggatgaattcggtagtggataaatcagcaactttaggatagcttatgcagaaacgcgtgtattctctacttttccggcagtgatcggaagagctctcaaaattggcttcagcccaaagggctcagatgggaatggccaggtcagccatggagtttccccatgcatgtttgtgtcctgttgagacgtgttctaagtccactggtctccgtgcgtgatgtgcccaggaagtgtcctattgtcttactgatcttgtatgttcatttgagaatcgcttagatttaaaagaaaaagggggtgggacggggggctgggagtcaggtgtcagcgaggtttgcagaagtggagggagacgggaggaggccagggggaaggggtagcaagtggtttgcgaaggaagttgctgt

SEQ ID NO: 45210 - DNA, 694 bp, Homo sapiens
  chr8:24812769-24813463
  hyper
ccggtgcagcagcacggagcacactcccagactacagtggcgcccgcactcacgcccttcaagtgccccacccctcccacacagtggccaaggagccaagccctatccctaagagctgcgtgcagccgcaccacccctggtctccactttctgggcgcaccaactcccccccttgctcgagtcccccgcccccctgtgtttctggccgtgccgcacctgcatagcgctgatgtcggcgttctgcttgtcctccagctcctgcagctgcttctccagcgcttcattcatgccccggcatgcttcgatttccagggtcttggccttgagcagacgacggctctcggacacctcgtccttggcggcgcgcacggcgtcggtgttcttggcggcgctctcggtcagcacggtgaagcggctcttgaaccattcctcagcgttctgcatgttcttggcggccagcttctcgtactgcgcgcggatgtccttgagcgcggcggaaaggtcgggcttggtcacgtccatctccacggagatctgcgcgtactggatctgcgcctgcagttcggcgatctcctcttcgtgcactttcttcagaaaagagatttcgtccatcaagctgtcgatgcgcttctcgagctcggcgcgagcgagcgccgcctcgtcggcgcctttgcgcgcttccatcagccggccc

SEQ ID NO: 45211 - DNA, 275 bp, Homo sapiens; identical to SEQ ID NO: 6173
  chr8:24813618-24813893
  hyper

SEQ ID NO: 45212 - DNA, 398 bp, Homo sapiens
  chr8:24814010-24814408
  hyper
cgtagctgaaggaactcatggtggcggccggtggctccccggcccgcggcggcggtgggagcccggagagagaggacaggggagagagggaagggggaggatggatggctgtgtgcggctcggcgccgttctgccacccctatttatacgccgggaggctcctgacgcagcctgcgatcgatcacggcacgccggccagtgggggcagcgcgctgctgcagccaaggcgaggattctgcgcaaaagggaaggcggggtcgagctacggcccgaggagctgcggcggtcgtcctttccactttgctcagagggccctgattttctctgagatcccatgccccctcactcatttcccttctgtactcactcacgcagcccctcccgtcctgcattgccca

SEQ ID NO: 45213 - DNA, 30 bp, Homo sapiens
  chr8:24814991-24815021
  hyper
ctgaggcagccgcgcgctccgcagccggga

SEQ ID NO: 45214 - DNA, 295 bp, Homo sapiens
  chr8:24816310-24816605
  hyper
tcttaagtccatcagcgttttttttctttctttctttctttttttttttttttttttttctttttttccgcggctcctccctgaagcctttgactgcagaggaggctgcccagaaaggagaggggcggcgggtgctgcagagggatgcttcagagagaagaaaccattggggcacctgctgcctgccgtcccctgggtagctggaaaaaagaggaacacaggagcaaagggtgagaatgggaccctttcctgtgctgaacccggcccacagagtgggggaaggggcagatccaca

SEQ ID NO: 45215 - DNA, 1888 bp, Homo sapiens
  chr8:24857552-24859440
  hyper
ttggtagaacgcagcgcagcaatagccgccaagtcccctcctgggtacagtacagctccacagcgcccctgctggtggcttgggaagggcgcgcaagcagagaaagcaagtgtcagagccgggactggcctcccagggcatcgcctacagcttgtgctctgagagtcggggtcatcatagctgcgctcttcgatggacactaaatgcgggacatctgttttacactcaccctccctccccgcgtggcaggagacctacactctcccgctatgcgcgctccgcggcagctgccgctgcaccattcattctctcctgcagaagttcaatattgctgcaaatatcgagaaaaaaaaaaaaagcgctgagagggggagggagggagggaggaagggagggacagcgagccagcggccactgcaaaggggcgaagggcagtcccgcggtcagtaagggccactgaactttctgcccaccggtcatccggagctgaggactgggacatggtggggtgcgtcggcgagggtcccctgaccctgcacaaacccaggggtgtggtgtggatgacccgggaagccgcacccagagctggcggtatgtcaggccatagagaaaaagggatgttcctaggctaaaggagacatcggggctggggatgacatcccaaaactcccagcgccggggagctcaggctcgggcggtgcctggctcccctccccggttcccgccgcaggaggctgctgagtcactcccgcctgagccacggccgcccccagccagccacgcgattggcgggttagcccgggcgcagcgccctcttcccagctcccgcacccccagggcttcccgcaggcagagggtgggagccccggcgagcgaccagttggggcttggtaggaaccccctaaaaatgcgccccacttgtgcattcgtgcatgggcgcattttgggagtaaacaatacataaccttcttcgcattcaaagggtctggactcaaaagagggctcagccttgctcctcgggagcaacccctgttttaaatctgggaaatggtgatgccagtggggaaagggcttctccgggcccggggctcccgagctcctggtgccagccgtgttgctctggcttttgtattttaactccgtgggcttctgtccccatccccatgtaaggccagtgcccccttccgcgttttgccgaaagtatcttcaatgcccgtttaaaaaactatgtctgcgatttctccatctctgctctttcccagttcctctcttttctcttcttcaggccccctcctgtccttcctcatcctttcactgagcgggttcaggccctagttactaccgcaggcaccagccacacccggggagatgtgtgctgttttgtgcaagacgctgcggtcacccagtccggaattctgctggtctacaccgagtgccgcaacaccaccaccacctccgcacacatacgccctccttgaacctcttccccatgaatgctttggcttttaaggaactttgtggcgtttctgctctttcggaggcagctgcccgaggcagcttcccaaggcagaacagggactgactgctgaggttccgcggggtcggggaggtggagaagccagttcccaagtggctcgtcgcgggtgttagagtccctcgttactaaggacgccgccgcccgcgcgccaggcttggggaccagggtgactctgccctttctgggcggaatacgggtgaaggctgtctttggggatccacaggtgatctgtgccgttctcattgtattctcaactctcatcccttccaggttagcccgatccctttaatgcaaggatcggtgccgggaggaaagagagcgtgggccactctggaacggaggctggtgttt

SEQ ID NO: 45216 - DNA, 30 bp, Homo sapiens
  chr8:25041358-25041388
  hyper
ttgacggagaaaagacggggatgcgccttg

SEQ ID NO: 45217 - DNA, 1377 bp, Homo sapiens
  chr8:25041593-25042970
  hyper
cttgcaccagctctccggtgataaaagttctgctttccaggctctaagcggtggccccgggagattcagtctgccctgagtccggcttctcccgctcgcggcgcgggttcaagctccagggggtgaaggcagaagtcaactgctcattcattcaacaaatatttattgcgcgcccgcttagtgccaggcaccggaggtgccccgagcaagaagccgctctcgctgatccgtttccgctccccaagtgtccggcgcgcgccgtgggagcgcagcccgcatccctcgcccaccggccgcccggcctgggcgtgcccggctcctccagcgcagccctctgtcgggagccggacccccgggacccagcctccggggtatcagccgggtggggagggcgggagaaaggcaaagtgccgccagcgtcaaagtcccgccggcccaggaagccgctccagggaagcgcgcgaggcggagccgcagtcggcccccgcccggcagagcgcagagagcggcgcgggcgggagaggccgggcgcccgcggctcggaggcggccccggcgggcggagggtgcggccggcgggagggactggggcggcgccaggaggggcgcgcactgctgcgctgcagcccggcccagcaggtgaccgcgggcggcgcgggcacgggcacgggcgcgggcggcgcggcgaggaggcggcccgcggagtccagcgaagtttggcggaacatggcggaagcgtctggggcacgcaggagcgcggggcggcggcggccggagcccgaggagctgtagcagccttagtcgccgccgccgcggggcgaggtcgccgccatggcccgctggatcccgaccaagaggcagaagtacggggttggtgagtgcgcgccccaccttgtcccggcccgacccacgcggccaagttcgcggacagcggccctgccaggtttgcgcagagcccggcggaggaccctggccgggggctcggcccggctgcgcagctctgggagccggggacggtaggagtcctctccagggagcgccgatggggaagtcgcccagggtttggggactccgagtgcttccaagtgcagctgagcttcgggaccgtaatcccgctcttgcatcccaatctccggcacttcacaccagggaaatgtcaacgcgaggggggcgcgcctgctgctcttttggggccgcagctctgtggctcgccccggtgcgcccagcgtgggtttcacctgggagtaggtgaccagcccgggtcggcacatggactggtgctcattgtcccagtgctttctgccccccgctttcgtaggttcttctcagacgccccttaagtgaggagttgagggtggaaagccgccctgcccccttt

SEQ ID NO: 45218 - DNA, 224 bp, Homo sapiens
  chr8:25897084-25897308
  hyper
accccggaaatgagccgctggaccctctggtggtccctcgcccagactaggagtcgttccagggctttcactcagtaactccaagtggagttactggaaatctaccacaagaggcccggcgggaactccagccgatcccaaacccggcccggggttgcccagcccgcttccaccactaccactgacaagggcacagtggagactttccacgtagccggaggaaa

SEQ ID NO: 45219 - DNA, 36 bp, Homo sapiens
  chr8:25898086-25898122
  hyper
ggggtcagagacaggcgaagagaagccaagtggcct

SEQ ID NO: 45220 - DNA, 74 bp, Homo sapiens
  chr8:25898395-25898469
  hyper
cgtgcggcccggaagccggctgctaggcgccggctcaccgttgctgtagaagagctcaccgttgctgtagagga

SEQ ID NO: 45221 - DNA, 263 bp, Homo sapiens
  chr8:25900429-25900692
  hyper
cctcgcgaccagccccggggatcgctggccaccacaaatgagatgaccgacatagggggccctccctcccagaggtgctaggtggggaaaagccaaactgttaaaaggcgagaacctcctttcctggggccaacgcgatccccactcatgctgcgttttctggcggcgccagccgaacccagtgactgtgaaacccaagttgggggacccggaaggcgccctcgagcgtgctgagtgtgtgcacacgcttcccagccaaccgg

SEQ ID NO: 45222 - DNA, 688 bp, Homo sapiens
  chr8:25900780-25901468
  hyper
cggcgctggggtctcccaggttgaaccccggtgcgcaagcaccttcattcactcttttgaaaggggtaacattttggctaagctctcccccactaagtctgctccttccagcttcaacaaactttttgatcccgggaaggaaggaaagcgagggaggcgtctttaaggagcccagctaaggaaatgcgcggcacagttggctctgcggtgctgccttatttcccttagctcgcaggcgggccagtcccgaagcgctgcggaaagccgcggccgccgcgctgtgcggtctgccggagggaaatccgcgctccccgggccacaggagggagggaaccgccgccggcccaagtcccggagcgataaaacttctgctttctccgctccaagggtagaggccggttcgctctacccgggacacctggccagtttgggaaagggatcatttctccgtgtgatgttggcacttaaatgtgggtggccaggagggcagcaggggaagcgagggtagtggaagaagttcatcggctctttgggggtagaagggctgcctctctcgcagacaaggacctggaggccacaaatcccaactcagtagtggtgatgagagagtgggaccgtaatgtcttcgtagggtggcaccccggacatggtatttactatcccagcacgcagacgcctaaacacaaag

SEQ ID NO: 45223 - DNA, 158 bp, Homo sapiens; identical to SEQ ID NO: 6180
  chr8:25901684-25901842
  hyper

SEQ ID NO: 45224 - DNA, 30 bp, Homo sapiens
  chr8:25902965-25902995
  hyper
ctcatttgcatggacgcgcgggattggccg

SEQ ID NO: 45225 - DNA, 1258 bp, Homo sapiens
  chr8:25903194-25904452
  hyper
gttcggcctggctgcgggaagcctccctggatcctgcctctagatgtaggcttttgtagcctgccgggaggcacgttcgttcccggggttcggatctgtgtgcatgcttgtgagcgtggccacatgtgcttatgttttgcgcaaacgtcccccagagcacccagctccctgaatggctccccaggtctcctggagttccatggtgatatcagatgttgtgtgcggcttgcacgttgctgagagtggagaacatatgaaagaaggcgggggatggggtggggcggacaagcgaggggcaagtgctgctcaaatacagtgctggggaaaacggtccaggacctaaggaaaacacccgcgggcgggcgggcgcgagcggcagtcgcacccgtgtggaggagaggttgctgacagatcgaggcgggctgagtgcgcgagcggccggggagtattcccgcgggtcctccggttccctccccacctctccgttcccgaagcccccggtagtgggcggggagggacgggggagtcgtggaaacttcgcccaccgcgcgcggtcgccgcggtgctggccgcgggctggtggccggcaggcggtggcagcagcctcaccgaacagctgaaaccctagacggttttttaactgcgcggggctgctcgcggtgcctattaaacatcctcctggctgggtgtcattttcttgcttctccttttgtattctgatctgcgcatagatctgctgctgctgaaatctagaacaccagcgcgaaaacagatttgaagacaatgaatgcaaatctgtgctcaaagaccatctgccgtggaggagacaatcagctgttcgtagttcgagcgattgcgccccagtctcccggtctcattacggggagggcatttgcgagcgcctggactgcgttcagggcactttctcccctcttgggtctcagatttgagagaccagatcccttaggtgtaggtgagcgctcgcaaatgaactgctagagtttgccgctagaggacacagcgccttgcaactggtttgcctaggctgacaggaagcttgcacttcaagaaaactcggctctctcgagaaagggaccggtgcgcgcctccacctccccaagggacaaaccgcggcaccacgctgcgtgcgcgggattgcgactaggaagtgctggtccgaactgcggagattcgcttgaaaacggatagggggttagggagtttgcggggcgggtgcacggaccgtctctgcacaggc

SEQ ID NO: 45226 - DNA, 825 bp, Homo sapiens
  chr8:25904803-25905628
  hyper
ctttataaatctctccgaacctcaagcaactcccccccacccccttcgtctggggtctgcgcccagcggggccaaagccttgagttccttggcagagagtgtggaacagccgtgagcccttcaagacatgcctatgagcccggtgatttttttttcaagggggctttgatcagctgtacctccacgttgccccggaaaggtgcgcagggcacccggagaggcctctggtcagcagtgggcctgggccaagccccaacagtttacccctcaggctcaggttggctggggttaaagggcaaagtcagggtcgagggcaccagcttttctcggcggtaacagctgccacccaaattatgccccctcaggaagcgaatgaattgttcctttctcccagctccctgctgcccgccccaaaacagacggggccgcgctcggcgggcgcccctcctcccagccaaccccccgagacgcgctcaggggcctcggtgccccgctgggaggcaatttgggggagccgtggtcccgaactttgacagagtggggcttccccactacttgccggctgcgctaagggcgccccccgcggcagtgctgctgggagctccagggatggctgtgtggctcgctgcgggcgttgaagttccctgttggccaggctgaagtgcctgcgcgagcgtgaggggacaaggactgccttgggcccagcgtggcggcgtttcggccaacccagttggggttaattgcgtctgtataggttttgggtaggaatgctcgcggagtccgccacccgcgcgaaacatgcgttggttgggggaatgagcagcg

SEQ ID NO: 45227 - DNA, 297 bp, Homo sapiens
  chr8:25905695-25905992
  hyper
cgatctcgtgcaacacaaaacctgccccgagctgtgcgggggcctggcaagcgcagctgcggccccgggaagcccaatcccgcgggactgcggagcccacgcgctcctcaggctccggccaactagctcggttctgcctctagcccgggtcaagaaaaatccaaaatgaacactatgattaaaattattcacaatctatttatacaaaactgggggtgtctgtcttttaccctgtccccttcttcatttacccttcccaaatgaccctcacccccgtttttttcatgtttctgtttc

SEQ ID NO: 45228 - DNA, 30 bp, Homo sapiens; identical to SEQ ID NO: 6183
  chr8:25907203-25907233
  hyper

SEQ ID NO: 45229 - DNA, 9 bp, Homo sapiens
  chr8:25908063-25908072
  hyper
cgcctcccg

SEQ ID NO: 45230 - DNA, 16 bp, Homo sapiens
  chr8:25908502-25908518
  hyper
cgctctcctggccggg

SEQ ID NO: 45231 - DNA, 30 bp, Homo sapiens
  chr8:25909284-25909314
  hyper
ttggtgcacgcgggcgtcagagggcaccgt

SEQ ID NO: 45232 - DNA, 83 bp, Homo sapiens; identical to SEQ ID NO: 6184
  chr8:25910857-25910940
  hyper

SEQ ID NO: 45233 - DNA, 175 bp, Homo sapiens
  chr8:26148853-26149028
  hyper
tggcgagacgctggcgcggcgcaggccctgccggccgggacacggagggcggggcacaggcgcagcaggaagggggcgtggccaagagccgcccggccgctcccccgcccctccccctccgctctccgccccagcccggcggctccgccccctaggtgacgtcactggccaggcc

SEQ ID NO: 45234 - DNA, 30 bp, Homo sapiens
  chr8:26149285-26149315
  hyper
ggaagcggagaccccgaggaacccagcagg

SEQ ID NO: 45235 - DNA, 67 bp, Homo sapiens; identical to SEQ ID NO: 6185
  chr8:26150335-26150402
  hyper

SEQ ID NO: 45236 - DNA, 30 bp, Homo sapiens; identical to SEQ ID NO: 6186
  chr8:26150768-26150798
  hyper

SEQ ID NO: 45237 - DNA, 145 bp, Homo sapiens
  chr8:26305931-26306076
  hyper
ctggtgcagccggctcgtttttacctcgtctgtgctctgtgtttggggtgtgtcctgcggcaccgtccctgagcgctggaacgtgcgcggccccgcagggcagtgcggccggggaatgcaccgagctgcgcgcttccagcgccgt

SEQ ID NO: 45238 - DNA, 30 bp, Homo sapiens
  chr8:26306315-26306345
  hyper
ccgagccggggcagacggagaacgcccctg

SEQ ID NO: 45239 - DNA, 170 bp, Homo sapiens
  chr8:26370012-26370182
  hyper
actgtgggggtggttggtaaccgcatttaatcctgggctgacaatgggactggatccctggttacacggccctacgcggtggccctgcggtaaacggcctctcagcccaaacccaccctggttactgagcatgcccagaactccctcccgggccaccaaaggaggggcac

SEQ ID NO: 45240 - DNA, 221 bp, Homo sapiens; identical to SEQ ID NO: 6188
  chr8:26370518-26370739
  hyper

SEQ ID NO: 45241 - DNA, 30 bp, Homo sapiens; identical to SEQ ID NO: 6189
  chr8:26371338-26371368
  hyper

SEQ ID NO: 45242 - DNA, 1121 bp, Homo sapiens
  chr8:26371675-26372796
  hyper
ggtgggtcgccggctcgccagccctccttcctttctgtgcaccttgcggtgggcggcgaacggcagccgcggcagcagctagggggcttgtgcacacagcgagggagacttagggactggcagacggacggacggacggcgaggaccctacccgagcccccgagccatggccgagagaaagcaatccgggaaggcggcagaggacgaagaggtccctgctttttttaaaaacctgggctccggcagccccaagccccggcagaaattctgtggcatgttctgcccggtggaagggtcctcggagaacaagaccatcgacttcgactcgctgtcggtgggccggggctcggggcaggtggtggctcagcagcgggacgtcgcccacttgggcccggacccgcagccgccgtactcgcggcagggccggcgcgccggcggagagccatctgttgaatcgggccggaaggtggagatccggagggcctcgggcaaagaagccctgcagaacatcaacgaccaggtcggtgtgggggttgggggtggagacggaggacggggcgcggggatcgcccctccctcgcccctgagcccggcgcgcccgccttcatgccccgccctggacctcgcctcccgcatctgcacgcgcaccccgccctacccgccccttctccgcgcagggtgcggcgaggctcgggctgggcggtgggcggccgtgcgcccacaaaggctgcccgcgtctccttgagcttgagaggtggggcgtgggcatagggaatgggctgatcccctgctggggcgggcggtggtcgtctgggagggggttggccgcggttccattcttctgaaaccctcccgggcggcttccgattgcagctgcggctgggtgccccaccctttttttgagcggctcagagcgtgcggtggaggctttgcgtgaaggcccgcggctccccggtggtcgggaggggcgggggttcggacggccgctccctacagcctccgcccgcgccttctgcgctcacgtcccgagctccgaggccaggaccatggtcagcgccccccggaccccctccgagcaccgcaccgcccttgactcctgctcgcagcgtgagaagagccag

SEQ ID NO: 45243 - DNA, 65 bp, Homo sapiens
  chr8:26435019-26435084
  hyper
gccgcggcggcctccgcggattggcgcgcaggcgggcagggaccggggcgcgcgcaggcgagtgc

SEQ ID NO: 45244 - DNA, 62 bp, Homo sapiens
  chr8:26435403-26435465
  hyper
gaaagggagtggctggcggcgcatgcgccacggtggccgacttgaaccgaggcttttattgc

SEQ ID NO: 45245 - DNA, 30 bp, Homo sapiens
  chr8:26436289-26436319
  hyper
cttggaaaaaggagcgggtttgagccctaa

SEQ ID NO: 45246 - DNA, 30 bp, Homo sapiens; identical to SEQ ID NO: 6192
  chr8:26436703-26436733
  hyper

SEQ ID NO: 45247 - DNA, 1390 bp, Homo sapiens
  chr8:26723049-26724439
  hyper
tttgagctgccccaccgaaggctcctgctctctccagcttctaggagcacaggtcaggggacgtaggtgtggaatatgtgctgagacccaggaggctgcggggcatcgtttgaccgcgtccacctgaaagagcgcaaagagaaaggcggctttgagctaggcgccccagggaaagaggctgtgctgagcttgacgggttgggggacaccagttgggagccgggttggttctgcggtccagaagctgcttcgcccggcagcggtggaggcgacttcggagctcatctcgcgcccccaccactgggaacctgcctagcgcactctactgagtcacctctgcccgagttcaggatccgaagcgaaaaacaaacaaaaaaacaaatccccaaaaccccaggctccagcgctcgaagtctggatttcgagcgcaggtaccacgaaattaaaatcctcgaagccccggaggggcgactgcggctggcgagtgtgtcgcacggatcctagccggggaattctggaggatgtactcggtttccgttagaacaggttgcctcgcagtcacctggagggggcggcctgggagagggaacagctgcgacccagggacctcagggccaggaccacgagcacgctcactctcacgccggtggaattcgcactcgggtgtgcagagcgcaccggtctgtccaccagccaagctggcttgagagccaggtcccgagcgaagccgggagggacccgaagacagaaagcgacccaggtctgtccacgacgcctttccaagcctcactgttggccacccgaggggctccagctgccagccgtagcgggactggcgggggacggggtggggaggacgtccctctgcagagggagctttgcaagtgacagtcactgcggattttgcaggcgtaaacattaagccggcatgccagcgggcaggggccgccttcgattttctgggctgggggccaccatctgcgtaagaaacctgggtttccacaactgcgaacctaccgcagggactcggcaggacagcgcggcgtgaggaagtgcccaccttgccttctggggttgggccctgaggtgggacctcgggcaaagactcttgttaaaatcgcaagttggagacctcacaggtggtattaaaaacgtgccactgcagaaacccttttcctcctacctcgagggtgataaacacagggttaaaaagacacttgttcagtagaaggcaacttcgcagaagatgtaagggaatcgggggtggggtagaggggccggtataaaacctggtggaaaaagcgggaggcgctgggaaaagtgggggttccgtctcaccagacggcgggggaggtctgccctcacccactcggccctgcgggacgccggcc

SEQ ID NO: 45248 - DNA, 509 bp, Homo sapiens
  chr8:26724484-26724993
  hyper
cgcgggggatgtggacccggcttcggtcccgggagctgcctgcctgctcttctctggaggcggagaggggaccgtgtctccgaggcaccaaatccttgtccttttgcacccgctgactcacccctccaccactgatgtctttaagctcctgaaccgctgtcactttacctgcattttttaaaaagagtcaaaataagaaaagaaaaaaaaatgcagataaccggtaactccacaatcacccttttaatattcagctccccgacaccagaaaagaatagcaaggaactttgcagctctcgctgacgtaactcaggcagtagcccagctagtaccgtaatctcctgctgctaccgtattactctacggcaacaggcacaagtgcgtatacagctgtaatgttttcctctggcctagagggggttgggttctagcgtttctttaaaaaggtttgtgtgtgtgtgtgtgtgtgtgtgcgcgcgcgcgcgcgcgtgtgtgtgtgtagagtcatt

SEQ ID NO: 45249 - DNA, 31 bp, Homo sapiens; identical to SEQ ID NO: 6195
  chr8:27099006-27099037
  hyper

SEQ ID NO: 45250 - DNA, 79 bp, Homo sapiens
  chr8:27168527-27168606
  hyper
gagggtgtggttggtgcgcaggtcggcgggtgacgcgcggtctttgcacactgggcaggtgggcgacacctgcacctcc

SEQ ID NO: 45251 - DNA, 30 bp, Homo sapiens
  chr8:27168992-27169022
  hyper
ctgcccgcagttcccgcctcctcaggtccg

SEQ ID NO: 45252 - DNA, 251 bp, Homo sapiens
  chr8:27327201-27327452
  hyper
gaggaaggagcagggggaaagcggtgggtggtctgggatctccttcctcgggccagcggtgggaagacaggcgcaccacatcgatgagctgagcgatggacagtccaaagcgcacaatcaccacgtctgaagtgttgggcaccgggcgcgcccagcggttgtagccccggaagaggtgtttgaagagccggtcctcagtctcggtatgcgagcctccctgcggcaatgccgtgggactgggagaggagagt

SEQ ID NO: 45253 - DNA, 205 bp, Homo sapiens
  chr8:27348567-27348772
  hyper
gcagagggcggagtcccgttaagggggtgtggggaggaggcggggccagggcaggggcggggcagagccgggccaagctgggcgggtcatgcgccctggccttcgcgcatctcccaggttagctgcgtgtccgggtgctaggctgcagacccgccgccatgacgctgcgcgcggccgtcttcgaccttgacggggtgctggcgct

SEQ ID NO: 45254 - DNA, 246 bp, Homo sapiens
  chr8:27449812-27450058
  hyper
tccccgtcctcaggccgcttcctttcctggtttccaggtcctcgtttctcccagcgctgccctccccatctaagcccaagtcgccgtgagcccgcgctgcccccttgtggccaaagccctccccagctcaggaaacgggaacgcttggcggccaggctgagagtcggtgcgcgtgacccggcttctgctcgcagcatccaagaagttgcaataacgtggaaggatggggaacggcgcctccctggc

SEQ ID NO: 45255 - DNA, 91 bp, Homo sapiens
  chr8:27472370-27472461
  hyper
caccgggctgggggcgccggggggcgcatcatcaccacgaatagctgtgctggctccaggagagaccctgaggtgcggccgctcggcgctt

SEQ ID NO: 45256 - DNA, 76 bp, Homo sapiens
  chr8:27491096-27491172
  hyper
gatcaaggagctctcccggtgagcccccccattgcggccgcagcgcgggcagggaggacgccgcgggagcccgggt

SEQ ID NO: 45257 - DNA, 213 bp, Homo sapiens
  chr8:27491478-27491691
  hyper
ggggcgcggcgctaggcgcccggcggggcttccccaggctgcgaccccgcgggaccctccactcctcccgccgcctccgcagcccgcgcgccggagcatgagtcccggccggagccccacggccgcgggcggcgcctaggacggcgatccgcgccctggaggatccgccggccgcccggctccactacagctccagccgcctgcagcggggcc

SEQ ID NO: 45258 - DNA, 31 bp, Homo sapiens; identical to SEQ ID NO: 6200
  chr8:27694968-27694999
  hyper

SEQ ID NO: 45259 - DNA, 65 bp, Homo sapiens; identical to SEQ ID NO: 6201
  chr8:28242820-28242885
  hyper

SEQ ID NO: 45260 - DNA, 30 bp, Homo sapiens
  chr8:28243919-28243949
  hyper
ccgtagacagtcggcgctcaataagtgccc

SEQ ID NO: 45261 - DNA, 30 bp, Homo sapiens; identical to SEQ ID NO: 6202
  chr8:28244371-28244401
  hyper

SEQ ID NO: 45262 - DNA, 56 bp, Homo sapiens; identical to SEQ ID NO: 6203
  chr8:28258794-28258850
  hyper

SEQ ID NO: 45263 - DNA, 276 bp, Homo sapiens
  chr8:28347826-28348102
  hyper
gtctataaatcccgtcgctggcatccggggtctcttaggcaacaatgtgtgggctcctgattggccgcgagatccaggagggctggctacaaaattgggcacggggataaaattaacaagtgtggcggccaagagcgtgggagggactgcaatgtctcaatataaccctagaatgaagacgcgtcgaatcctgaaacaagtagcgttgaaaaccttcattcaagacgtagtgtgtcccaaatcagccctacctacggagcacgcccagtcacattg

SEQ ID NO: 45264 - DNA, 30 bp, Homo sapiens
  chr8:28352544-28352574
  hyper
gatccccgagggtccgcatctgaaatgaag

SEQ ID NO: 45265 - DNA, 127 bp, Homo sapiens; identical to SEQ ID NO: 6204
  chr8:28560084-28560211
  hyper

SEQ ID NO: 45266 - DNA, 30 bp, Homo sapiens
  chr8:28748664-28748694
  hyper
cctgggctgaggggcgggcgtgaggtcctg

SEQ ID NO: 45267 - DNA, 334 bp, Homo sapiens; identical to SEQ ID NO: 6205
  chr8:28748908-28749242
  hyper

SEQ ID NO: 45268 - DNA, 30 bp, Homo sapiens; identical to SEQ ID NO: 6206
  chr8:29120171-29120201
  hyper

SEQ ID NO: 45269 - DNA, 30 bp, Homo sapiens; identical to SEQ ID NO: 6207
  chr8:29120766-29120796
  hyper

SEQ ID NO: 45270 - DNA, 31 bp, Homo sapiens; identical to SEQ ID NO: 6208
  chr8:29172530-29172561
  hyper

SEQ ID NO: 45271 - DNA, 809 bp, Homo sapiens
  chr8:29205973-29206782
  hyper
aaagacagccctcgcggaaaaagaaagaaaaatcagcaaaatcgccttagcagttcaaccaaaggtcaacagcagcgtttccccagcagctgacaggtcaaatgggcaggaaacaactgcggggaacaaagccccccgctgtccggcaggggcgaacccggctcctccgcactgaacagttttgttgtgctttttggaggggagaggtttccgccccctttccagctcccttcctcccgggtggacaggtcggaagaggagcggaaaggaaaggaagggagggaggcggcgaaggcgcctgcgggggggaggagcggctctttgatgggtgtgggggggtctgaactgcctaccgggctcggaagcgcagaccctacccgcgcggaagaatgcgcggaatgcggcggcgggaggcggaggcgcagcgcggcggggggcgcccggaccccacgcgccctgcccgctccctagcccgagggccgcggacccaccctgccctgcaggtgtggcgggcgccaggtccctccagggactcggacagcacgcgatttttccaggatttccgactaccaaatgtgacaagacagtctcgccgccgagagtttcgccagggctcgctaaaatccggcacgcgccgccatcagatagtcgaaaatccgggctgaacaaaaggtgatcattctccgctgcccggatttgcaggcgctagaggaccggttccgcccggcgtcccccagatacccagtccttcagcctcccgctcccagagcctggatctagcccgggacggggattggccaccttccaag

SEQ ID NO: 45272 - DNA, 1264 bp, Homo sapiens; identical to SEQ ID NO: 6210
  chr8:29206997-29208261
  hyper

SEQ ID NO: 45273 - DNA, 414 bp, Homo sapiens
  chr8:29209536-29209950
  hyper
gagcaagggagttacaggactcgctcgcagtttcggaggctgcagagtagcgtattccattccggggcgcgcgtggaagcccgacccaggcagcgagggcaccggtacccgccgggtctctcccgcccaagctcaccctctccccatgcctttgttccgggcggagcggctttcccgagctctcacctccggtcccgggggccatccctgcactccccgaccggagctcggcggagcctccacttccgagaccttcgactggcctcgtcccccactgggccccgaatgcctcgacccccgggccctactcggatgagctgtaggggcaccgcttgggcaaggtgatatttccttttgctccgggctccaaaatggcttacgatggcactgcacggatcctttctctttttaaaa

SEQ ID NO: 45274 - DNA, 57 bp, Homo sapiens
  chr8:29387334-29387391
  hyper
aaacaacaaaccacgcggcgttctctggtggctgtgctgggacgagtgggcggaaac

SEQ ID NO: 45275 - DNA, 70 bp, Homo sapiens
  chr8:29387618-29387688
  hyper
aacccttgaggatacggctcaatggtgtacccacgtggagttcattatttatctccgaaagccctgtctg

SEQ ID NO: 45276 - DNA, 30 bp, Homo sapiens
  chr8:29509600-29509630
  hyper
tctcctctttgcccaagctgcccttagtca

SEQ ID NO: 45277 - DNA, 31 bp, Homo sapiens; identical to SEQ ID NO: 6213
  chr8:29939478-29939509
  hyper

SEQ ID NO: 45278 - DNA, 2259 bp, Homo sapiens
  chr8:30241416-30243675
  hyper
cggggggccgcgggacgctcaggaagcgaagcggggaaggctccgggcgcgtcgcaggacccgcgctggagatgggtttgaagccctgtcctgaaaaagccggcccggagtgggctgtccccggtgtccctcgagttctcatgctgtcattcaagcagcagaggaagaaccgggtctggctcgggaagggtgggcttagggccaggggtgcaaatccctcggtaaaagccggcaaactaaaagtcgcacacatcccaggtcccggtccaggccccggcggggcagggtccccgaagtcccggggcgcgcagacgccggggcccccgggggccaagggaacggcgggacccgacctccctgccctcggcctcccgggccctcgccctccgaccagccgctgagtcgggggctggggtcgccgcttccgcccgcggcccgctgcccctccccggcgcgcgccatccggccgccggcccctcctcccgcggggggctccgtcccgcgccccgtccctccgggctgcagccggcagcccacgtccagggagggcggagggaggaggagaggcgcggagaggagggaggggagaggggagggaggaaggcgagagaaagggagctgcttccatcccggacttcccagagcctgcctggagcgcgtactcagcggctctcgggtcccagcgtcccagccgcggcccgcgctcctccgccccgctcctcctcctcctcttcctcctcctcctcctctctaggcacccccgtcccctccttccagcggctgcagcccccagccccaactctccgcgcttactcctgggacgcgcgtcctcgccccatcctttgcttccttccttccttccttcttccttcctcccctggctcccgccctccctctccaggtcgccctcccggggcccgattgtctcggtgccccgctcccggcccgcgccctgccccgtctctcccttgcacttcctgagtcgcccgccgccgccgtcgcagactcgccgcgggagccccagcccaacccgagcccgacagccactgccccggctccagctccagccccacagcccgcggcgcccgcccgagggagccccggcgcccggggaaggctccagtgggctagcgcgccctcgcccagccccgcgccccagccctgcccggcccggcgaggaaggaccgggaagatgaacaacggcggcaaagccgagaaggagaacaccccgagcgaggccaaccttcaggaggaggaggtactgggcggctcggtgtggtggcgggggcgacgcgggacccagtgcgggcggccggcggggcgcgggcccggggcgcggcggtggaagaaggttcaggcatggcccgtgccccggacgcagccccacagtgtggcccggggagggtggatctcgggagcgtgtgtttttgtgtccacgcgcgtctgcgggccccaaattgcgtaactccaaggacttttcggagacttttgtaagtataatgctcagctttgtttgcccgggatttataagtggaaccgagagctgactcctgggtgacctcagataatcgggactcggagggtcaggacttagggccggggctggaaattgtgtatggattcagggtcggggggggagcagtttaaggaagaaactcgggggaaagttctcgttaaaagatacctctattccctgccccctccctttccgtgttaaaagttcttggtgaaatatctttctagccgaggttttttggattaatagataactcatcagccacattcttctctgctgagtcaaagaccccgagcctgggcggtgaacgcttgtgattttaggggccgtgcagctgaggggagcagagtaagagggttaaaaacgcagcaattcaccaaatgctcatcgagggtattttcataggactttgacttctgagcatgcattttaggtggtgcgtccgtaatcatgatgaaagttttgtgactgcggagcgttccttcggtggaaacaaaattgagtagatgtggtcagaaggggagtcggactcaggaacaaacgtttcagaattcagtaggatatttgtggtatcctaccaaatgactctttttgcaggtacgttatctggagtccaagaaattatttctggcgtacttcttaacatcccacacagttgagttcttaaacattctagaggaacttgagagtgtgtgtagatgcaggaaagtgcacgtctaaatatgacccgaaaagattcacac

SEQ ID NO: 45279 - DNA, 30 bp, Homo sapiens
  chr8:30601557-30601587
  hyper
ctccccctcaataacgacacggccgtcagt

SEQ ID NO: 45280 - DNA, 30 bp, Homo sapiens
  chr8:30769457-30769487
  hyper
tcccttcactgagccgagccaggaagccaa

SEQ ID NO: 45281 - DNA, 89 bp, Homo sapiens
  chr8:30769693-30769782
  hyper
gacagccggcgcaggcgggcatggtccgagcgcgggctctgcaggggagaatgaggcgcgcggactgccagtcacccgggcggcgttcc

SEQ ID NO: 45282 - DNA, 287 bp, Homo sapiens
  chr8:30769822-30770109
  hyper
cgagttgcggtcccggggcggcggggctcccgccccctccccgcccccgcggatatccccacgcaccacgaagatccccacgcgccctgcgcaacgcggctgctccgcgctgccttctgctgactacaaactgcgcctccagggagccagggcgaggcggaggccaccaccaagttgtggcgctctctcctctcgctgcctcagagcagcgagtttctcctcagctgcaaacaaggacgcagggccagctccgtggggctcagcgggggcagagggagagcgaaagc

SEQ ID NO: 45283 - DNA, 58 bp, Homo sapiens
  chr8:30890540-30890598
  hyper
cgccgcccgtcccgcgctccgcggccccaggtctccagccggcgggcactcacatcat

SEQ ID NO: 45284 - DNA, 100 bp, Homo sapiens
  chr8:30891027-30891127
  hyper
gggaatgaggaccgggcggcgggaatgttctcacttctccggattccaccgggatgcaggactctagctgcccagccgcacctgcgaagagactacactt

SEQ ID NO: 45285 - DNA, 30 bp, Homo sapiens
  chr8:30891356-30891386
  hyper
tgtactcggcagcgcgggaataaagtttgc

SEQ ID NO: 45286 - DNA, 1131 bp, Homo sapiens; identical to SEQ ID NO: 6218
  chr8:31496427-31497558
  hyper

SEQ ID NO: 45287 - DNA, 384 bp, Homo sapiens
  chr8:31497576-31497960
  hyper
cgtcgccgccgctgccgctgctgccactactgctgctgctggggaccgcggccctggcgccgggggcggcggccggcaacgaggcggctcccgcgggggcctcggtgtgctactcgtccccgcccagcgtgggatcggtgcaggagctagctcagcgcgccgcggtggtgatcgagggaaaggtgcacccgcagcggcggcagcagggggcactcgacaggaaggcggcggcggcggcgggcgaggcaggggcgtggggcggcgatcgcgagccgccagccgcgggcccacgggcgctggggccgcccgccgaggagccgctgctcgccgccaacgggaccgtgccctcttggcccaccgccccggtgcccagcgccggcgagc

SEQ ID NO: 45288 - DNA, 529 bp, Homo sapiens
  chr8:32077880-32078409
  hyper
aacatttgcccttgtattccacgcatcaccttgacagcctgcataatataagggacggagcggagcaggggctcggggtgggagcctggaaagaaaactggggctcaaggaggtttaatatcggttagtagcttgggatccttcggataacggctgggcaatgaaaataaaaagccccatttccagaaatcaaagaacttggggagaaataaacacgctggttcaaaggaggggaaaatatatcagaactagtcggacctaagggagcagatattttccaaaaatatccttcccaccagccatgctgcagatgtgtcactgtggctcagaggcaggccatctgctgcagtgtttccctggaaacccccagcaacgcccctcccggagctcctccgcggtctcccccactccatccccgcgcagcggaggagcttgccggtgatgtcactgctgctagctgggagggaatcccaggacctgcgtccctcgggtagagccaatcatggtcggctctggatgctggaaacct

SEQ ID NO: 45289 - DNA, 30 bp, Homo sapiens
  chr8:32349021-32349051
  hyper
gttcttctgtgcaaacgaagtagaagcttc

SEQ ID NO: 45290 - DNA, 30 bp, Homo sapiens; identical to SEQ ID NO: 6220
  chr8:32405412-32405442
  hyper

SEQ ID NO: 45291 - DNA, 477 bp, Homo sapiens
  chr8:32405759-32406236
  hyper
cctccaacctgcgggcgggaggtgggtggctgcggggcaattgaaaaagagccggcgaggagttccccgaaacttgttggaactccgggctcgcgcggaggccaggagctgagcggcggcggctgccggacgatgggagcgtgagcaggacggtgataacctctccccgatcgggttgcgagggcgccgggcagaggccaggacgcgagccgccagcggtgggacccatcgacgacttcccggggcgacaggagcagccccgagagccagggcgagcgcccgttccaggtggccggaccgcccgccgcgtccgcgccgcgctccctgcaggcaacgggagacgcccccgcgcagcgcgagcgcctcagcgcggccgctcgctctccccctcgagggacaaacttttcccaaacccgatccgagcccttggaccaaactcgcctgcgccgagagccgtccgcgtagagcgctccgtct

SEQ ID NO: 45292 - DNA, 592 bp, Homo sapiens
  chr8:32406351-32406943
  hyper
cgcagcgcggcccgggccccacgatcctcctcctgctcctcctactcctcctcctcctcggatgccgtggcctctccctccccctctccctcgcccgtcctcttcgccctgcgctctgagcgcccgttgagtcgcgcggtgcttcccctcctgggggccgccgctcacctgggcgccgagtcctaccgggcgcctacgcccagagctcagggcaagggacagcagtcccggccgcaccctcccagagtcccgggagcgcttcgctccctggcacggcccctccccagcgccttagcggctgagcccagcccgggagtgggacctgggctataggagtcgaggctgcgtgcgcgcgtgccccgcgccataagcgctttgcacgggggccgtgtgccctctagcgggaaacgctggaatgggccgcctggagggagagccggtcccctcggtgtgcctggcagcgcagaagtgggtggtcgagcaagaggccgcgtgggaagttagcttcggcgttttggggcacagggcaagcgatgtagagtgcgcgccggttcatcttgattcagtcctgtgctacggagactcaagagca

SEQ ID NO: 45293 - DNA, 30 bp, Homo sapiens
  chr8:33342762-33342792
  hyper
acacccggggtttgcgcagggaattttgcc

SEQ ID NO: 45294 - DNA, 30 bp, Homo sapiens; identical to SEQ ID NO: 6224
  chr8:33370084-33370114
  hyper

SEQ ID NO: 45295 - DNA, 30 bp, Homo sapiens
  chr8:33370678-33370708
  hyper
tccgccagtactgccgcaacaccttcttat

SEQ ID NO: 45296 - DNA, 675 bp, Homo sapiens
  chr8:33371776-33372451
  hyper
ttagctggtttctggagctagcgttttaaagcctgtagccacaagcgtttgaaaattcaaattctagcgtcaaggtagaagcccccagctggcgtctggggcagccctgagggaggtgggtcgtcgggttggcggatccggcttgggcccgccccgccagtgtcggcgccgggtgcgcagggacagcagagcgctgtcttgggcatgggtcgcaggcggcgcccggaacgggccaggggagctggaggctgcagactcgggctcggcgggtgtaggaaccagtggtgtttgcttgggttttgagaaggcgcgagaagggtcgcgcctgtgcgaccgccctgtgttgggtcccccacgccgcgtcggcattgcttgttccctcttcctgcgctttcctggagggtagaattgcgtccgattggccttcagttcccgaggagctgcttccatttaggaccttgtgactctcatagcttccacggtttcgcaggagcccgaggaggcaaacttcatttgtgccactgcacaggcgggagcttcggaccctgggaggggtggcgcgagagagacgtgtcgccagctgctcggagagggactcttattcagcctctaaggcgtcaattgcgcctccagggttccaggagtccagagaaagcccttcggggtcttctgacc

SEQ ID NO: 45297 - DNA, 30 bp, Homo sapiens
  chr8:33457211-33457241
  hyper
tccgaaaggcggatcgccggcgcagacagc

SEQ ID NO: 45298 - DNA, 30 bp, Homo sapiens
  chr8:33457468-33457498
  hyper
agacacggccccgccgagccccagcagcac

SEQ ID NO: 45299 - DNA, 30 bp, Homo sapiens
  chr8:34704372-34704402
  hyper
ccatcatctcttattcgaagtagtgtaata

SEQ ID NO: 45300 - DNA, 30 bp, Homo sapiens
  chr8:35094038-35094068
  hyper
ggctgctcaccaggcgcctcctctcccttc

SEQ ID NO: 45301 - DNA, 30 bp, Homo sapiens
  chr8:36858467-36858497
  hyper
aatatgtaattctgaaaaaacgagggttct

SEQ ID NO: 45302 - DNA, 30 bp, Homo sapiens
  chr8:37552642-37552672
  hyper
gttggagctgcctacgccgcgtcccgagaa

SEQ ID NO: 45303 - DNA, 967 bp, Homo sapiens
  chr8:37553217-37554184
  hyper
ctgcgattgggcgggcgcggcgatccctttgaagtgtggctgccgatcgcggctatttgacgtgcggctcgaggaaggcgaaggtttttgtgttgctagccggggccagcggcggtggcggcggcggcggaggcgtcggtggaggaggggaggcggcgaggaggcgcagctcccgctgcaccgcgatcgacgctgcggagcgagcccacccgccccgggagctcgcctccccggtgctcccccgccctccccgcccccccagcggcgctgcctcctccaaatgagcgattcgcccgctggatctaacccaaggacacccgaaagcagcggcagcggcagcggcggcggcgggaagaggccggcggtgccggcagcggtgtccctcttgccaccggcggaccccctgcgccaggcgaaccggctcccgatcagggtcctgaagatgctgagcgctcacaccggtcacctcctgcacccggagtacctgcagccgctgtcctccactcccgtcagccccattgaggtcagtccccggccgctgcccccgggcgccggccccattcctcccaccgcgaccgggaccctgacccagctcccagcgccccggggctcggtgcgacacccaagtctggtcacgctggcgggctgagtgaggaggggaagaaaaccgagggatcagagcccaccagggcttccccaggcttccccgtggaagggtctccttccacgctcgcccttcggagctccgtgttttctctcggattggatttgctcctggagtcccctctgggtcctttacttttcctctgatccccagtttccagccaggagttggtctctgctgggtcttccccgccccccacgccgggctgttttctttgaagccctggctgcccgggtcccacttcgcctctgtcccatccggtgagggcgcacggcgccctggcgctcccgatcccggatcttt

SEQ ID NO: 45304 - DNA, 30 bp, Homo sapiens
  chr8:37593820-37593850
  hyper
atccccaaagtcaacgccttggaaaggttc

SEQ ID NO: 45305 - DNA, 30 bp, Homo sapiens
  chr8:37594581-37594611
  hyper
gaatccacgccctgcgctcacgggcccacg

SEQ ID NO: 45306 - DNA, 86 bp, Homo sapiens; identical to SEQ ID NO: 6227
  chr8:37595292-37595378
  hyper

SEQ ID NO: 45307 - DNA, 121 bp, Homo sapiens
  chr8:37655254-37655375
  hyper
ctgcgggggacaggcgcaccccagagaaaggcaccgcaggcgcccactcacctgcacaggtgaagtggagagcacgcctgcagggcacccacgccccggatttccagcctggactagggtt

SEQ ID NO: 45308 - DNA, 515 bp, Homo sapiens
  chr8:37655475-37655990
  hyper
cgtcccggactgggctggaggagtctccggatttacctggctggccttgtcccttcaattggggtcatcccatccttgccccctggcctgccagcgccgcttccagccggtctccttagggcaaggggaggctgggctcagaaaagtcggcccttggaataccggcgctcctgggctgcaggagaccctggcgtccccatccctctagaggcccctctcccacggcgccgtttgtgcagtgagctctgtgctgggtcccgcgtccttgcctctcctttgcctctcctggaagtaactcgagctttggctgtttctccattgacttcgcgcaaagattgcgaagaaagaaacgcggctggggaagcggggttccctcaccgcagcccacccgggcctccttccgcgacttccctcttagtcagggcctcagtacgcctttgctttgctggcagcgagcgctgcagcgccgcagcccgaccccaagcctcctacaagggggtcgcaagtcccagcag

SEQ ID NO: 45309 - DNA, 155 bp, Homo sapiens
  chr8:37656049-37656204
  hyper
cgcagctccacgcacgccgtggatttgagggtcgggcccccgcggccgccgcttcctttcctgtcccaaatccagcctaagagccgcttccctttccctgtcctcctgaccccagtggcaaccgtttctccaccgccccttgcccgcagtcgggg

SEQ ID NO: 45310 - DNA, 227 bp, Homo sapiens
  chr8:37756347-37756574
  hyper
aaaaaaaaaagcgccccagatacggccccttcttccaagaagacccaaagctggcagagctgggcgggacagccgcagaaggggaagccaggtgagaacaccagcaccggccgagggctccgtcccgaaaggccttccccgctgctgcccggcttactctcgaagggtccagcgcccagaccgccctgccggaggggtccgcgcccccaggccgggccctcccctcc

SEQ ID NO: 45311 - DNA, 743 bp, Homo sapiens
  chr8:37756610-37757353
  hyper
cgcggtgcagatcccgcaggtccacctcggcgcggcccaggaacttgtcgaggccgagcagcgcgcggtgcagcacggtgagctgcagggtggcggcggccgcgggtccggaggacagcagcgatggcagctcgaaggtggcctcctcgcgccacacgggcgcgcccaggctgcgctccgacacggaggtggcgtacttctccttgcccacctggatcaccgcgtacgcgtcgctcgtgcccccggggcccttggcccgcaggccccgcgcctgcagcaccgtcacctgcacgtgggttggggaccacacggcccccaggccccggccagccgagaccattagggacatggtgacgataacactccagaagcgaggagaagatcgccgcgactggcggcctccacggcccgccccggcgaccaggccactttaaggcttccggccacacccccgccaggccacgcccctcatggccaaggccacgcccctgcccgagccgcctgctccacctgctgcgccgcgccccgccccgccccgccccgccccgccggcctcagcagcgcgggcagctccgggcacccgggcgccggaggcggggctggcgcggccaggcaggcaggggatcacgtgcgcaggggcgggcgcatcgagaatctaatctgagaggtggtaggtgacggatggggtccccagctgccaaaggtcgcacggcgggaaggagctggccgaagcactgacttgg

SEQ ID NO: 45312 - DNA, 775 bp, Homo sapiens
  chr8:37822756-37823531
  hyper
ccggtccctctgccccggttacctacccgtcgagccgttggcaaagcctgggctgcgctgggctgctccgggccgcaggaacgcccgaggggaagagggccgggcgggcggcggcgcagggctccggaggcaggcgacggccgcagcggcacagaagacggcggaaggcgctgcgaaagtccgggctgcggcagtagatgagcgggttgaaggcagaattggcataacctagccagttcagggcaaggaaagccgggcccgggactagagaggggccccccagggcgcgcagcacgttggccagaaagaagggcaaccagcagagagtgaaggtgcccatgatgagacccaaggtgcacagggcccggtgttcccggagaggcaggaggcgcgcgggccgccggccgcaggcgggcaccccttcgggcggagcgcacgtccccaccggggccggggccagagagcgcgacggcgccggcggagactcctcgggcggaaagcggcccagctccccgcgcagcaagcgcagctggcgcgtagccaccacgaaaacccgcgcgtagacgaagagcatcacgagaagaggaaggtagaaggagacggaggaggacagcagcacgtagggcatgttggaggcgaaggcacagcagcgcgggttggagtggcagcgctgcgcctcggcgtcggcccctacgcgccaccactggctcatgatgggcgcaaacgacaccgcggccgacacgacccacaccaggaccacagctgtccgggcgca

SEQ ID NO: 45313 - DNA, 59 bp, Homo sapiens
  chr8:37823789-37823848
  hyper
cggagtccaggcgatggccacgatgaccagcaggttgcctcccacggtggccagcaccg

SEQ ID NO: 45314 - DNA, 105 bp, Homo sapiens; identical to SEQ ID NO: 6235
  chr8:37887620-37887725
  hyper

SEQ ID NO: 45315 - DNA, 30 bp, Homo sapiens
  chr8:37887937-37887967
  hyper
gggtggggctgcggcgcggactacaaatcc

SEQ ID NO: 45316 - DNA, 216 bp, Homo sapiens
  chr8:37888749-37888965
  hyper
ccagcagcgcctcccgggcacctgtggcacgttccccatttacgcgagtgggatctccgcgggggggaccctggcgccacggccagggctgtgcagaaaaacacgttcttctgtccggggagaggaggaggcaccgtgtgacctccctgggagaggatgaggaagaggaagctgagctggcacgggtgggggggccagcctcgggctgccctcagg

SEQ ID NO: 45317 - DNA, 30 bp, Homo sapiens
  chr8:37963269-37963299
  hyper
ccgcccgaggaagacgcgggagggaggccc

SEQ ID NO: 45318 - DNA, 428 bp, Homo sapiens
  chr8:38008203-38008631
  hyper
ttgggtggcctgagcctcatccgctgagagctggccaacccctcatcgcctccttcccgcagcgctcacccttcatgttgcgcatgtgtctgtaggagctcccagcgcacagcttgaatgtcgctagcagcattgtttcctggcaaatgtggcagtggtggggtcgctgccgctgctgctgccgccgctgctgctgcctcttctctcaagggtggttcttcgtccttcctgagcccctcaagcttcgcctctgagtcccgcagctgcagcctggacctggtgttctgcgtcttaaatgtcccccgctgaaggctgtgcatcatcatcaggagataaaaacgccatcactcactgtgcaaaggaaggggtcaaggatagagcgattgcctcacactgctgctttggccgtttgtggggagcttggggcg

SEQ ID NO: 45319 - DNA, 30 bp, Homo sapiens
  chr8:38034152-38034182
  hyper
cctcttaaggaacacggtgtcttccttcgt

SEQ ID NO: 45320 - DNA, 44 bp, Homo sapiens; identical to SEQ ID NO: 6238
  chr8:38089776-38089820
  hyper

SEQ ID NO: 45321 - DNA, 30 bp, Homo sapiens
  chr8:38238618-38238648
  hyper
tcctaacactttaacgacctccatcccctt

SEQ ID NO: 45322 - DNA, 30 bp, Homo sapiens
  chr8:38239402-38239432
  hyper
gcagccgctggggccgcgcgaggaggaggc

SEQ ID NO: 45323 - DNA, 30 bp, Homo sapiens; identical to SEQ ID NO: 6239
  chr8:38240879-38240909
  hyper

SEQ ID NO: 45324 - DNA, 608 bp, Homo sapiens; identical to SEQ ID NO: 6240
  chr8:38323126-38323734
  hyper

SEQ ID NO: 45325 - DNA, 526 bp, Homo sapiens
  chr8:38323755-38324281
  hyper
cgcaccgggcttgctccgggaggggcgcgtgacgccaccgcggggcagccgagaggggaccgcgggctccgggcagggcaggcgctcccgcagctccagctataacacaagggagagaaagcaacgctttggttccagaaacttccatcgtcaaggccagttctggccagacgcacagccaaagagcccccctagtctagcggatgaaccgttcgcgagtggcaccccctaaaaccttggccccatctcccaagatgcctctttactgcgcaatccagaaagcacccggaccgccgccacccaccagcggcggcgaataacttggtgagatcttaaataactcgggatccaagggaactttcttttctcccccgaatctcaacgccgcatctccaagtctccagaaatgttaaggagggaggtggtcaagacaggctgaagaatctgagttttaatttgggggagggggaggggaggaagagggaagttaataatgcggctgcggtgtacccgtgtggggtgaaac

SEQ ID NO: 45326 - DNA, 241 bp, Homo sapiens
  chr8:38324507-38324748
  hyper
ccgcaaacatgggtcgtagcctcacttttctcccaaccccaaacataacggtaggggaagcgaggtgcagaggggtctgggccagagaagcatacgcatcgctgccgagtgaaccacaccggacaaaaaccctcatcccttcccccacctctaggaaccagattgggaccgaacggtccttccgcccccatcccacacctcggcttaacgaccgtgggttgtcctcccgttccccaaactt

SEQ ID NO: 45327 - DNA, 1505 bp, Homo sapiens
  chr8:38324811-38326316
  hyper
cgctctcagctcaagcagattcagccatttggtgacgacacctccttaaaacctattccaagagaagctaacctagccctccacgtcctccgcagttcatctcccaccccatccgaccccaacccgcaccccaggctttcccgggggtggaaaaggacttaggaatgccccggatttttagcgttgagcccaaagctacctgctgaattgggggtgaatccccaaaaggggaccaaaaagacatggagtggaatgcaacacacacacataacacacacaacgcatcccacctcgccgcccactcccgccctcctccccagtccaggaaaccgcgggcctcgccgccttcgccccgggcctgtccctcccgggactcactgaggagccgccgccgcctcgccagctcccgagcgcgagttggaggaaaagttgggcggcgggaagagcggcgggacgagcgcagggagggggcgcaggagacgcggacggagggaagggaggggagacccaaggggcgcggatcgcccgggagggagccaggaggtgaaaggggcgggcggcgagcggagggaggcgccggccccggctgggctgcggcgggcaaagcgcgcagccgggaggctccggcgccgggggccgctcgggacgccaagcccgccccagatccgggggcgccgcggctcttacctcgctcggcgtggaggttccgcctcgggagagtccgccgtggcttgtgcgagcgggcgtgtgcccgcgtccccggctccggcccgccgcccccgggctctgttcgggtcctggcggggtcgcaagagctccgcggccggcgctcgactcccggcggcgctcggtgctcggcgcctccagcccgggcgggaacaatggagccggagctggtgccccggaggcggggcggggggagggctcccgtccgccacccggggtctccagaccttgtgcccccctcctccagaacgcagcggcggcgcctcactttccttgcagaccgggctccatcgccctgcggaggccccggcgccgcggcgtgcccgactgcagcacgggtaccgtgcgccctgcggggcgccccgagctcggaccggagaaaagtccttgggttccgcggcttttcaagcagcggcgcgctcgcggccggggaaggcgaggtcgccgcaatgcgctacgaggggtctcggtcccgtccggacgtggccgcccagctcccggcacacccgggttcctccgcgcgctgcggctgcaccggcgtcccggctcccgctagctgccgcccgccgccgaggacgccgcgcctgtggccgcaagagcgctccgagcgctatgcgccggcggggcgcgagggctcgctctctcactcccacccgcgctggtccctcctccgcctccgccccctgcagctgcctgctgggccttgtagttccccagccgcggccccaaaggacggggagcgggccgagctgtccggcgctctgcccttctcttcctac

SEQ ID NO: 45328 - DNA, 31 bp, Homo sapiens; identical to SEQ ID NO: 6244
  chr8:40047837-40047868
  hyper

SEQ ID NO: 45329 - DNA, 30 bp, Homo sapiens
  chr8:40851621-40851651
  hyper
tatcaagaattcgccgtttacttcggttga

SEQ ID NO: 45330 - DNA, 234 bp, Homo sapiens
  chr8:41165684-41165918
  hyper
ttctgaactttctacgctttgggtttttgttttttcctcccgtctcagaggttaaaaacttcgatagggactcggagtcctcctagaggagagggaagctcccctgttatttaaagcgcaaggctttgtttcaggtatgggaaaggcgaagttggatcccaggaagagcggctccggggaccacagcgagtccctgcgaggccaaggcgcagagctgccgctcccgggccagcc

SEQ ID NO: 45331 - DNA, 151 bp, Homo sapiens; identical to SEQ ID NO: 6246
  chr8:41166000-41166151
  hyper

SEQ ID NO: 45332 - DNA, 413 bp, Homo sapiens; identical to SEQ ID NO: 6247
  chr8:41166266-41166679
  hyper

SEQ ID NO: 45333 - DNA, 243 bp, Homo sapiens; identical to SEQ ID NO: 6248
  chr8:41166745-41166988
  hyper

SEQ ID NO: 45334 - DNA, 268 bp, Homo sapiens
  chr8:41167025-41167293
  hyper
cgcgcagccaatcagctcccggcggggcgagccgcactcgttaccacgtccgtcaccggcgcgggagccaatcgcctccctcgcgagcgggttcggtttactagaaccagacgcggctcaacaccccttaaaaaacaaaaccaaaaatacataaataaaagggggaggaggaaagagacaaggggagaaaaagaaggggaatggatcacggcgtggggtggagagagaccagggcggacgctgtaattaactcgcattggcttgcaga

SEQ ID NO: 45335 - DNA, 204 bp, Homo sapiens
  chr8:41168153-41168357
  hyper
aagggtccccactagggcagacgccaagaggacggtatcagcacaacagctcggcccccaggaacagaagtctctctgccaccttctacctcgaattcctgagaattcttcgtaggtttcaaacattcccctgagagggagggttaagctctggagagctgggagtgagacccggactatcccgggacagaagaccacagcaaa

SEQ ID NO: 45336 - DNA, 30 bp, Homo sapiens
  chr8:41179541-41179571
  hyper
gggaagcacactcttcgttttcaatacaag

SEQ ID NO: 45337 - DNA, 30 bp, Homo sapiens
  chr8:41347780-41347810
  hyper
ggaagtgacacagccgggaaactccgcccc

SEQ ID NO: 45338 - DNA, 48 bp, Homo sapiens
  chr8:41436143-41436191
  hyper
cgagggctgctgggcgttggagcaccaggaagcgccttcccctgtcat

SEQ ID NO: 45339 - DNA, 30 bp, Homo sapiens
  chr8:41511299-41511329
  hyper
cagccgtccgggctcgccctgcagctcctc

SEQ ID NO: 45340 - DNA, 16 bp, Homo sapiens
  chr8:41624633-41624649
  hyper
cgcagccttcaggcca

SEQ ID NO: 45341 - DNA, 30 bp, Homo sapiens
  chr8:41625112-41625142
  hyper
tgggaaagttaatgcgaagcgctctccgga

SEQ ID NO: 45342 - DNA, 457 bp, Homo sapiens
  chr8:41686164-41686621
  hyper
gttaatttgattgttctggttcgcactacaatgaccgggctggagagggggcgctcgtaatgaaacaggaactgctcctcgcgcccgctccagagtcctttacatctttggggagagggcatacggggagctacatttcattttcctgaagattttccacgcgaaagtgctggggagagagttgggcctgggaggctgcgccttcttcccgcgaatcccgaaaactgcgcggcaaaggcgggttccgcagaagtcgcgcgtgacccggggcgccgccctcctcggggcccattcggatctgccgcccgtcctctccagagcgccccctggcgccctctaggccatcttgattccaccgccgcagttgaaagaattaataaataaatcctagtctcgcgtctagaccggtccgtgagggtcccctgctcaccggacaccctgccgcaatctctgctgt

SEQ ID NO: 45343 - DNA, 16 bp, Homo sapiens
  chr8:41733637-41733653
  hyper
cctagagctcggagcg

SEQ ID NO: 45344 - DNA, 360 bp, Homo sapiens
  chr8:41753392-41753752
  hyper
cacctagggagaagccgggcagagctgcccccccccggcccgctccccggagcctgcagccgcgtttacccaaaccagctctcctggaaagccagcgggtgcggcgcgcccgagcagggcagcccaccacccgcagccggcagccaaggccgggaaagttggtcctagagcagcgcgggcctgccgggtgctgtccaaggtgctgaaaggtctctgcgggcagctggcgggaggattctgcgcgccctcagcctcccggccacccgctctgcccttccagcctgccgccctgtccccttcccggccgcgcagaagcctccgtccctcctctacgcccaccgagccttccccgctcgggtg

SEQ ID NO: 45345 - DNA, 1438 bp, Homo sapiens; identical to SEQ ID NO: 6254
  chr8:41753770-41755208
  hyper

SEQ ID NO: 45346 - DNA, 30 bp, Homo sapiens
  chr8:42010409-42010439
  hyper
acaacagggcaagccgccaacagcgatcaa

SEQ ID NO: 45347 - DNA, 35 bp, Homo sapiens; identical to SEQ ID NO: 6255
  chr8:42040328-42040363
  hyper

SEQ ID NO: 45348 - DNA, 30 bp, Homo sapiens
  chr8:42128637-42128667
  hyper
taaatcggtgagcacggtctgtctactttc

SEQ ID NO: 45349 - DNA, 30 bp, Homo sapiens
  chr8:42249554-42249584
  hyper
gcaggctaccggggcgcggggggccggggc

SEQ ID NO: 45350 - DNA, 147 bp, Homo sapiens
  chr8:42751622-42751769
  hyper
gtacctctccaccgcgaaggaactacctcgccagttcccggcgacagaggacagattatttccaggaccgctcccgccacccctcccgggcaacccactagacgtcccctttctaatttggagtgcgggtgcgggcgcacgcgcact

SEQ ID NO: 45351 - DNA, 34 bp, Homo sapiens; identical to SEQ ID NO: 6256
  chr8:42807055-42807089
  hyper

SEQ ID NO: 45352 - DNA, 30 bp, Homo sapiens
  chr8:42948452-42948482
  hyper
gctgaagcaatagtcggtcaacacaaaatc

SEQ ID NO: 45353 - DNA, 30 bp, Homo sapiens
  chr8:42996191-42996221
  hyper
ttccctgagggcctcgcccccgaggacgtg

SEQ ID NO: 45354 - DNA, 280 bp, Homo sapiens
  chr8:42996734-42997014
  hyper
gtctttcccctctcgcgcccttttcttggtcagaatacgaagttttagtgtctgtgtatggagttcaaacgacccctcctctccaagcagaagctggaggagaaaggcgttgtgaattttggaaaagcggctcagaggattacattttgtgcgatccttgatccacccaaccttcatctcctgcgctcccctcctttaaaattgcaaggaccccggggaggttatgtaatctgcctgatcacaatttgtcagggactgatcccgccgaacactctttgca

SEQ ID NO: 45355 - DNA, 592 bp, Homo sapiens
  chr8:48100164-48100756
  hyper
ggagccgctgcagccgctgcacgctgcacacacacggcacagtccctgggtccgggagccagagcagcgccactcggagacgggatggttccgtgggttgtgtaggagcacaggaaagcggaggccgggccacacagcaccgcgaacccagcagcccaagcccagcggaccaagcagccacccccgggagccgccactgcctggagcagtcaccggcgggagcctccatttccaggagccgccaccgctgggagctgccacagccgggagccgccaccgccagaagcctccatctcccgggagccgccatcgctgggagccgccacctccaggagccgccacggccaccgggagccgtcaccgcagggaacctccatctcctggagccaccaccgctgggagctgccacctcaggagcagcggcagcactgggacccgccgggccccctcgcacccagcggctctgcaggtgccctacacccgggaggggccgagggagcccacgccgccggcgggaccgcagggatttgctggctctttctgcgctgaggggtcgcggcgcggggcggaggtcgggtggggaaagctggag

SEQ ID NO: 45356 - DNA, 86 bp, Homo sapiens
  chr8:48100826-48100912
  hyper
cgcaatgtggcagtggaaggcgcagggtctgaccccggccgcggccgccgcagcagctgatctgtcaaccccggccagagccgagc

SEQ ID NO: 45357 - DNA, 202 bp, Homo sapiens; identical to SEQ ID NO: 6257
  chr8:48604759-48604961
  hyper

SEQ ID NO: 45358 - DNA, 1724 bp, Homo sapiens
  chr8:48649724-48651448
  hyper
ggctgtagcttctttgcgctcctatgtcccaagaaactgcagcgggcacccggcggctctggctgcgccagggcagggcgcgctccgctccgggccgtcgggtctgaggtatgggtcgttgctgagtctctcccgccccggccgcgcgttaccggcagtctgctgtcccggcggccggcaggaagggcgggctgggcagctgcttgaagaactgccggaggccggccaggtcccgcgtgagctgctccacgcgctggtgcagcttctcgttctcagccgacagctccaccaacttctgctgcatctcctggttgcgccgcttggccttgtcgcggctcttgcgcacggcgatgttgttgcgctcgcgccgctgccggtactcggggctgccgcggtccgggcccctcttgccggcgctcttctcccgggcggggccgggcgcgggggtctgcctggggctgctgcgcggcggctccggcgacgtgggcggggtgggctgccctgcggccgccaagctcaccacggtctgtgcgcacgcggccacctgcgcgggcaacagcgagccgggcgcgtcgccgtcgccccagtcgggctcgcgcttgagcaggcggggagcggcagggcccgggcccaaggggcgcgcggggccgccgggaagaagctccaggggccccgcgccgcccgccttgtgattgctgttgaagaggtcggcgaagagctcgtcgtggcacagctccagggtgggcacggcggccatggagtcgatgtaggcgctgaagtcgatggcgctctcgtcgtcgtacatggcgggggcggcggcgcctggctcgcctagggcccctggctcggccccgcggcccggcttgcccgcccggcccggttcgtagaagggcgcaggctccgcaggccagggcgcgccgcgcgccgggccgtccaggctgaagagcgcggcgctcatggcggcgtcgggccgggctctgcgtccaagcgaggctgtcacctcgctgggcccagccccgccgccttttctagccccggctgacgtgcacgccccgccccgactccggcaccgcgggggcgccccggggccgcgggggaaggggcgggggcgccctgggagccccccggagccgccccgagccttcccggggcgcgccccctctcagttcctccccggggccccctccccggccctggggacccccagcccacgttgcaggagggtgcccgcgctgctgctccctccccggcccgggccggcctgcgctgcgctgctgggaatgacactccctctgccagcactccagggccttctcttcttcctgtttgtgggcttggaacctcctcgctcctcggggttgggagtgaaatcaaaaccaggacttggccgcagcgcgcgcgtcccaggccggctcctgtcgccggagggcggggggtggagacccgtgggagaggacccgcgcgtccaaggacgccccccgaccgtgggcacgcgcgtgaggccctcgccccgcgcctccaccgtgggaccagatgcgggaagaggcgtgggggaccagacgtggggacagcggcggcctggcaggcggggagggctgcccgcaccgcactcgggcgcctcggggaatccgggccggttctcgctgctctcctcggaggtcccgggtccggccggccctgggggtcgaggcccagagacgcggctgctgcgtcctggccgaaag

SEQ ID NO: 45359 - DNA, 30 bp, Homo sapiens; identical to SEQ ID NO: 6262
  chr8:48872807-48872837
  hyper

SEQ ID NO: 45360 - DNA, 20 bp, Homo sapiens
  chr8:48920488-48920508
  hyper
atttatttttttgaggcgga

SEQ ID NO: 45361 - DNA, 30 bp, Homo sapiens
  chr8:48920843-48920873
  hyper
cagcagcgaggccccgcgacccctcggccc

SEQ ID NO: 45362 - DNA, 30 bp, Homo sapiens; identical to SEQ ID NO: 6264
  chr8:49292935-49292965
  hyper

SEQ ID NO: 45363 - DNA, 290 bp, Homo sapiens
  chr8:49293216-49293506
  hyper
tgcgggcagggctggcgccgggagtccccagactcccccgcagtgggaagcacctctcccattcacgccgggcaggacacctggccgggcgggggaggcagcgcaagggccggccggggagtacgggactcgagccggggacctgaggcaggagccaagcatcgtcgcagggcaaccagcagaacggagagggaggcgcgggggcgaaggctggcgggagccgcgctgagggcaggagcccggagccccctagggcagcgccgatccgcccgccccgtcccgccgagctg

SEQ ID NO: 45364 - DNA, 435 bp, Homo sapiens; identical to SEQ ID NO: 6265
  chr8:49309321-49309756
  hyper

SEQ ID NO: 45365 - DNA, 178 bp, Homo sapiens; identical to SEQ ID NO: 6266
  chr8:49309797-49309975
  hyper

SEQ ID NO: 45366 - DNA, 529 bp, Homo sapiens
  chr8:49468662-49469191
  hyper
aatgtattaggaacatttccccggtcggtcattagcgcgcgctctccccgcgcccagggtgcccccgtgcccagggtgcccccgcccggcgcctccgcggtcccctcccgcgcgcacctttccgagtgccagtggggcggccccgagaccgcaattgctctggcccggattgacgagcctccgatgcccatttactgcgcgcggcagccactctggagccgcggcacatctggatggagtcagctgcctagcgccaggggccagcacggcccagccagcggagcgcggcggtgagcgctagggaggccggcgcccgggccgcctccgcggccgaccccctgtccccacccgagcaggatttcctgatgtaaacacagcggctctgcgagaacagagctgctctcctgaatgtgtcatttagtgttctttatctgcttggggtcagcatagcgacttagaaaaacagcagtcttgctttgaatttaaacagcgaagaagccagagggtcctgttccgtatggggggaggg

SEQ ID NO: 45367 - DNA, 169 bp, Homo sapiens
  chr8:49833817-49833986
  hyper
gcggcatcttgccagcgggtctggcgggcgcccggcgcggataacggtccggcgggaggacacggcggtccctacagcatcgcggcgggccaggctcgggcaggggccgtgctcaggtgcggcagacggacgggccggcgcctctgaagtcacccggctcctttacgaa

SEQ ID NO: 45368 - DNA, 448 bp, Homo sapiens
  chr8:49834210-49834658
  hyper
tcggtgagccccgcccgcgatccacgctctctgggagctaggaggggcgcaggagccggggtctctgccctgcccgcctggcttccagatgtggtgcagcgccagcgcgcggggacacagtgtccgccaggagaaggaagggccgccctgcaccacaccaggccagcctctggtgttaatgagagcctatatttggaagtggcatctggagaggtttgccttgcacaaagaccaaataattacctcttggcttttgaaaaaggaagggggaagcgggaagacaaaggcgcctgtgagcgcggaggacgctctcctgggactctggcctggagcgggactgcagccttgcgtgcggcgagggcgctgcgctactcagggcttccgcgaagccaggggcagcgcggccgcgtgcaaattaagtactcatgtcaccgtgttagctatggtg

SEQ ID NO: 45369 - DNA, 177 bp, Homo sapiens
  chr8:50822180-50822357
  hyper
ggattccccaaacacggttttagagagaatcacaacctttaatagatcctctgttaaaaaagactgttagagaaagttgaccaagggcttcgttccacggcgaccgtttcctgcgtgtgcagctccacacagcgaccgcggcctgcaatgtgcggagcacagcgcggccccttccag

SEQ ID NO: 45370 - DNA, 1137 bp, Homo sapiens
  chr8:50822494-50823631
  hyper
cgtcccgagtgattcccggctcagtaacgtttctcctccagggagcccactggaactccactggctgtgccgcctcctcgcccgtcccccgcgcgcgccgcaggccggtgcttggagagcgcaatgtccccgggagggaagatcccctacctggaatggatggttccagaccagcgggaacgcgctctaatccttgatggaagcaagcgtgggaggaaagcacaacgtctaggacttccctgtagtgtcagaacaggaagaagaacctgagaagtcgccggggaagggaggccaggagcaggcgtccggccccttcccacagcccgggagaaattagtgttgcgccccgcccctcccggacccccgtccccaccacacacaccagcgcccctcaccagtctttctcgaatttcctctcatgtctatcaataacctccttgtgcagaaatctacactgcacaagttaggagtctgcaagggcgggcggtgttacagtctcgctctttccattttccccttttactccacatagtttcaaaggtccacatggccctggttttgaccagttttccaacagtttcaacgttatgtatttcaacttcccgtctcagttcactggcgtctgcacccgttgccgagtgtgggtggctgagccctgggtgacagcactcgggaccacgcacccatacccttctttatgctcgttgtcagccagttgccaagagcgggagtgaagagcctgcaaggcccgggagagcgcggattccggagtagggaggcgagggggcagcgtgggagaccagagggaaaatgggctgaaaagccaacaaaaaaaacaacgtaaattgggctttgctctggctttacaaaggcagagattgtcgagccctctgactgtctttgtgccttctttatcccgtcctttgtgaaataagccgttttctgcccccactgcaggagcctaggctgtgggcgactcgctagcactgccctgggcctccaagctgcctgctcgctgagctcagcgctgacactcacaggagctgcgttcgccggatcctctgagaggctctgcaacgatcccgatccaattcagcagcgttttaaaaggtagccgagtgcagatgctttttcctg

SEQ ID NO: 45371 - DNA, 179 bp, Homo sapiens; identical to SEQ ID NO: 6271
  chr8:50824128-50824307
  hyper

SEQ ID NO: 45372 - DNA, 92 bp, Homo sapiens; identical to SEQ ID NO: 6272
  chr8:50824352-50824444
  hyper

SEQ ID NO: 45373 - DNA, 23 bp, Homo sapiens
  chr8:51149016-51149039
  hyper
ttttttttttttgagacgcagtc

SEQ ID NO: 45374 - DNA, 30 bp, Homo sapiens
  chr8:52811753-52811783
  hyper
cccccctcagggctcgctccgcccccaagc

SEQ ID NO: 45375 - DNA, 213 bp, Homo sapiens
  chr8:53477523-53477736
  hyper
ctaatctcaggcttcccaaagcgagtgcctcgcccagctcctaggggaatccacggagccccaggcgcagggcaaaggatggggcgggatggggacatcgtacctgcgctccgggagccgctgggagtccggccggccccggccgcggggaggaaaagcaacggcttgggctccttatccgtgacgcgcgctcccctgcgcccccggggcctc

SEQ ID NO: 45376 - DNA, 799 bp, Homo sapiens
  chr8:53477944-53478743
  hyper
cgcgcctgcccttgtctacgtcccgggggtcggctggagctgcactgggactcggtcctcagtgtgccgaagcctaagcgctgcggggcgcggggcgggaacgggaggcggtgcctggggccacggggtcgtcccccaggatgagggcgtgtcccagcgcgcgggaccctcggaagtccgcgctgggccgggcgggcaccagcctcggactcagcgggtctcagggctccctgcgcaacgcctgcctcggatccggaccccgggctcgctctctggtcgccgtccccgggaggacccagtagggtaactgccgcgtcgccccggcggttctccctgggctctgtctcccgccgcctccaccccccgagcctcggggtccgtcacggcttcccctggctggcggggtcagtagaacccgcggcgcctaggtccggacggaaaaaagcagggccggggtgcggcctggatgagcggagatctccgcgccttgggctcaaaggtgcggggtgcgctctgctgccgagcccctgctcgctcaggaacactggccacgccgtcacgccagccgcccctgccccaggtctggaggcccgacctgctctcctaggcgcagcaccgcgttctcttccgcgtgggggagcggcgggcggaagaggtctggggctgggcaccggggacacgcgcccagctcccctggcctccctggggggagtggccggtttcagtgcttccccaggtgaaatcgccaaggttgaccagtgcgcccaaaaaagcagccggctggatttttcttcaaatt

SEQ ID NO: 45377 - DNA, 30 bp, Homo sapiens; identical to SEQ ID NO: 6276
  chr8:53626223-53626253
  hyper

SEQ ID NO: 45378 - DNA, 65 bp, Homo sapiens
  chr8:53853448-53853513
  hyper
gcctgactcccccagcgtccggctccgcaactgcccgccactcctggccagcgagggaggagccg

SEQ ID NO: 45379 - DNA, 937 bp, Homo sapiens
  chr8:53853579-53854516
  hyper
cgacctagcagatcggaagcgctgcgactgtgcccgcaggttgaccttgccaagccctccaggtgatgcgcggccatgccgggtgaggagaactgaggctgagatcgccacactgagggctccctaaagccgaggtggaggaagaggagggtagaggaggagggcggtattgctgggaaccgccccctccctgccctgctccctgctgccccacccgagccctggcagtctggaacctggctggagtcggaactctccgcgccttcgaagggaggcccgaggacgctgccggcgcccccaggcgtcggctccgcgcggcccctgctgtagctggcgcacagccccggcgggtccccttgtcctccgcgcgctctgggaagacggtcaggcgcgcgcgtttggcgcccacccctgtgagacccgcttggcctggcgccgcgggcggggaccgctgccgaggccgccagcgcctcttcaactggggaaaacacaacaactcgggatgccccatcggagtgtgtatacacctgtgtgtgtgtgtgtgtggtgtgcgcgcgtttgcggaggcatgaaatgcggggaaagaggctggcgcttggcagtgactgcctagaatatgatacgaatagtgatccttctttctgtctgcccctactccttttctttgccttttccctttcctatccgtgatctcccctgaaaatgtcagactcccggagcaaggaacccggagtagcccgggcgcgcggttccggcgccccctggaggagccagcggccgagtgcttagcgtcggaggatcgcggggctttgtggtggagcactccggctgagcgcgcttcacagcgctgtggcacactggtcatcgttgcttatagaggatgccaagccccacccccattcccccaattggcctcgtctcttgtcttacttagatc

SEQ ID NO: 45380 - DNA, 67 bp, Homo sapiens; identical to SEQ ID NO: 6278
  chr8:54163282-54163349
  hyper

SEQ ID NO: 45381 - DNA, 432 bp, Homo sapiens; identical to SEQ ID NO: 6279
  chr8:54163694-54164126
  hyper

SEQ ID NO: 45382 - DNA, 27 bp, Homo sapiens
  chr8:54164390-54164417
  hyper
cgcaggctcgcccggcccactaactgc

SEQ ID NO: 45383 - DNA, 93 bp, Homo sapiens; identical to SEQ ID NO: 6280
  chr8:54754897-54754990
  hyper

SEQ ID NO: 45384 - DNA, 712 bp, Homo sapiens; identical to SEQ ID NO: 6281
  chr8:54789093-54789805
  hyper

SEQ ID NO: 45385 - DNA, 840 bp, Homo sapiens
  chr8:54790022-54790862
  hyper
ggaggggcgcgtcccctgtcctcctcccgagcgagacgaacgctcagcagctcgttccctgggcgccaagaccgatttccaagtcgcccactttccccctcgagggagctgttggcgcttctccagaagcctcctcggctcccagctccagcccctaaaataaaagcaccttgccagagagcgggggaggggagcagctgaacgaggagaatgaaaatactgggagaacgaccccattctccaggaaaaggtaatgaggggaagtgaaacagtgtgaacttactcggaaatgcaaaccgagttcaactcacccaggagcaaacaaacgacagcaagacaaatcagccaccgcactcgcggcttcccagaaagggcctcatgaatgagaatgggttgctaggtttccttccctctctcctgacaatcgcttcccacaagacttccaccgccgaaagaatacaggccgggcctggtgactgcggagtgagggaaccgcgccaggcccacgaggccgctcgcgaccgctcccgccttcaggaccctggagagcggccgccgcgcccctgggacccacgcccaacccagaacacccgcgctcgcctcccgcgcctcaccaccccagcactttattcgctgcttcccgcctccaccttcattttttttggcaaccaccgctcttgtttttcacagacagattaaattgttttttgtttggcatgagggggtgtttggattggccgagctacattccggtttgtaactacactaaacgttagtgtaccaagaaactaagagcgtctcaaagatgacagtctgaacgtggcaggtgaccttaaaaag

SEQ ID NO: 45386 - DNA, 35 bp, Homo sapiens
  chr8:54791910-54791945
  hyper
tctcaccttctccggcgaccccctcccgaggctcc

SEQ ID NO: 45387 - DNA, 486 bp, Homo sapiens; identical to SEQ ID NO: 6283
  chr8:54792184-54792670
  hyper

SEQ ID NO: 45388 - DNA, 2079 bp, Homo sapiens; identical to SEQ ID NO: 6284
  chr8:54792701-54794780
  hyper

SEQ ID NO: 45389 - DNA, 123 bp, Homo sapiens; identical to SEQ ID NO: 6285
  chr8:54794826-54794949
  hyper

SEQ ID NO: 45390 - DNA, 165 bp, Homo sapiens; identical to SEQ ID NO: 6286
  chr8:54795139-54795304
  hyper

SEQ ID NO: 45391 - DNA, 30 bp, Homo sapiens
  chr8:54935213-54935243
  hyper
ataggagactgctacggggaaaaatggaac

SEQ ID NO: 45392 - DNA, 237 bp, Homo sapiens; identical to SEQ ID NO: 6287
  chr8:55366130-55366367
  hyper

SEQ ID NO: 45393 - DNA, 697 bp, Homo sapiens
  chr8:55366951-55367648
  hyper
cgcccccacagacttgctctccagcgccaacccggatctgcctaggtgcccacgggtccttcccgatcgacttgagtgtccttcctccagcccctgctttcccagcatcgaaaacacaaaagcctgccggaaatcacccagcctttgcctggtcactcaggggcccacggataagcgtggctctgattcctccaggtcagccccacggttcgccacctacccgagttaatttctgcgcccgctgaccaaaggccccaactggcaacgggcacagcttcttggtgcgctagtcgcttccttgcccagcctttagagcctcgggtccggcccaaggacccggggacgtgagcgcaattagtagccaggagccctgcgaccctggaccgtgcagtgctaacgcacccgaacggctatgcgagcggtgtactcggctcttacttgtgaaagttgtttcccccaaccccctgcgtaaatctcttgtgttgagaaaagcaaggcttgcaggaagccactccggatgtttgctgctttacatgtggcatctgtggctggctctgataacgtcccggggcaccacgtattaaagtgaagagactgaaatagaaggctccacacaccgcgcgcgggtcagcgacgtcgccgccctccacactgccccccgaaatataagacaagcgaatgatcagaagaaatgaga

SEQ ID NO: 45394 - DNA, 273 bp, Homo sapiens
  chr8:55370159-55370432
  hyper
aatagaatggacgctcggtatgttcatctaaacgaccttgggcaagtacgtcgattccaaggtacaatcagccctcccagacggcttttcgagtctccctaaccccggtgggagaggacgcggcgccagagcccagctccggctagttttcccgggggcaggtgtagccttgggcgcggggccgggggaggggcaaggggcgggcgtggggttggactgggacgtgggactcggaccacggcctgggcgtgggcctaacgacgcgggaccggc

SEQ ID NO: 45395 - DNA, 146 bp, Homo sapiens; identical to SEQ ID NO: 6290
  chr8:55370567-55370713
  hyper

SEQ ID NO: 45396 - DNA, 197 bp, Homo sapiens; identical to SEQ ID NO: 6291
  chr8:55370835-55371032
  hyper

SEQ ID NO: 45397 - DNA, 203 bp, Homo sapiens; identical to SEQ ID NO: 6292
  chr8:55371172-55371375
  hyper

SEQ ID NO: 45398 - DNA, 285 bp, Homo sapiens; identical to SEQ ID NO: 6293
  chr8:55371439-55371724
  hyper

SEQ ID NO: 45399 - DNA, 74 bp, Homo sapiens; identical to SEQ ID NO: 6294
  chr8:55371993-55372067
  hyper

SEQ ID NO: 45400 - DNA, 168 bp, Homo sapiens; identical to SEQ ID NO: 6295
  chr8:55372416-55372584
  hyper

SEQ ID NO: 45401 - DNA, 68 bp, Homo sapiens; identical to SEQ ID NO: 6296
  chr8:55379162-55379230
  hyper

SEQ ID NO: 45402 - DNA, 161 bp, Homo sapiens; identical to SEQ ID NO: 6297
  chr8:55379295-55379456
  hyper

SEQ ID NO: 45403 - DNA, 107 bp, Homo sapiens; identical to SEQ ID NO: 6298
  chr8:55380036-55380143
  hyper

SEQ ID NO: 45404 - DNA, 62 bp, Homo sapiens
  chr8:55383182-55383244
  hyper
ggtgccgacttcaacctctctgctcaggcctcttgagttgcgttaccagcttaccatgtatt

SEQ ID NO: 45405 - DNA, 257 bp, Homo sapiens; identical to SEQ ID NO: 6299
  chr8:56013635-56013892
  hyper

SEQ ID NO: 45406 - DNA, 173 bp, Homo sapiens; identical to SEQ ID NO: 6300
  chr8:56014011-56014184
  hyper

SEQ ID NO: 45407 - DNA, 367 bp, Homo sapiens; identical to SEQ ID NO: 6301
  chr8:56014376-56014743
  hyper

SEQ ID NO: 45408 - DNA, 18 bp, Homo sapiens
  chr8:56015034-56015052
  hyper
ggtgtggaggcatcatgg

SEQ ID NO: 45409 - DNA, 476 bp, Homo sapiens; identical to SEQ ID NO: 6303
  chr8:56015185-56015661
  hyper

SEQ ID NO: 45410 - DNA, 57 bp, Homo sapiens; identical to SEQ ID NO: 6304
  chr8:56015749-56015806
  hyper

SEQ ID NO: 45411 - DNA, 30 bp, Homo sapiens; identical to SEQ ID NO: 6305
  chr8:56686331-56686361
  hyper

SEQ ID NO: 45412 - DNA, 31 bp, Homo sapiens
  chr8:56791958-56791989
  hyper
gaactcagcgagaccccgagcatcacctcgg

SEQ ID NO: 45413 - DNA, 978 bp, Homo sapiens; identical to SEQ ID NO: 6306
  chr8:56792219-56793197
  hyper

SEQ ID NO: 45414 - DNA, 44 bp, Homo sapiens
  chr8:57025775-57025819
  hyper
cgccctctcctttcaggagctccggggcgcggtgggtgtatgtg

SEQ ID NO: 45415 - DNA, 279 bp, Homo sapiens
  chr8:57026042-57026321
  hyper
agtgaggctcccctgcgtccccctcagggtggccggcggcgccatagatgacttggtgtaaagtgacgttgccaccgaactccatgatgatggtccctaggctattggaccctgcgggcgtgcgcgtgctggcagccaccacgcgcacgatgttatcgtggcgcagccttgctacgttgagctcagcccagaaactccgccgagatgctagtcggttcttggtgcacttgttcacttgctttatggccacaggaacaccgcggtaagtcgccttgtaca

SEQ ID NO: 45416 - DNA, 215 bp, Homo sapiens; identical to SEQ ID NO: 6308
  chr8:57069522-57069737
  hyper

SEQ ID NO: 45417 - DNA, 378 bp, Homo sapiens
  chr8:57069850-57070228
  hyper
cgcgggagaaggctggtgggtacaggttgcctccgggccggagcgcccatgcagggcgagctgcgctccgcacaaaattgcggtgggggcgccagaccgccttgctccgcccctgagcggggcgccccggcccaaccccctgagggaggagggtccaggtgccgcagactcttagcccctggcccggcgtccgcccggcaggttctggcactcctcgttggtaagccccgttatttcgtgcgcagtgtttacagaatataaagttcttcaggaaacgatgttataggagaaacgcctggattttccccaaactatcagagagtatcttaactatcaaaaaaaaaaaaaattcatttcagttaacgtcgggaatgagac

SEQ ID NO: 45418 - DNA, 30 bp, Homo sapiens
  chr8:57122975-57123005
  hyper
gcagccacacaccccgggctcacacctccc

SEQ ID NO: 45419 - DNA, 30 bp, Homo sapiens
  chr8:57124332-57124362
  hyper
gcgtgagccattgacgtgtttggagctgga

SEQ ID NO: 45420 - DNA, 541 bp, Homo sapiens
  chr8:57232274-57232815
  hyper
gagcagggaacctgggcagaacggaccgaagaagagggtccggggaggcatcctgccctctgctccgggtggggagggaggctggcagctcacccccgggggcgaggggtctgcgttagccgtagccacgggagcccgggcttctgggacgctcagccgtgcgctacccggtgcagctgctttctcaccagctcgcgggtgggtcctgccgcggctcggcgacccgcgcccccttgcgagcgacccagcgtgaaaccagcccaaagggcggcctcgcccgacccccgccagcgcgacctcctccgggagccagcacccaggaccgacgacctcggcaacttacccaggacactctccctagctgtccgcggagaagccggcctcgtctgccccaggcacccgagtccctggctcggagctcagtcaggttcaggtgtttatccaggcgccgcccaagtccaagggcgggactgccgcggcagcgccaggggtggggccggccgtagccccagtgcgcgacgtgggcagcactcccatcttc

SEQ ID NO: 45421 - DNA, 197 bp, Homo sapiens
  chr8:57358464-57358661
  hyper
ggggccgagcaacagcagccaagtgcaaagtgtcaggaaccgcgccatggactgcgaggagagagggacgcgtgcttcgagcctgcctgggcgcagaacggggtccctcggcaggaccctcgccgcgacagcctcagcaggggatcgtcgagcaaaagcccgcaggaatgctcctttctggggccccgccctcccgg

SEQ ID NO: 45422 - DNA, 285 bp, Homo sapiens
  chr8:57358806-57359091
  hyper
gccgcagaccaggggcgagagagcgggagccgggggaggcaggacattgactggggtcacaaagaagaaccagggaacgctgttggggaacccatgcaatgaaatgtgaagggaaagagggcgggcagacgtccccaaacccgctcagcaaagacaagcttcgggcaaattcactcacgttgacgctgttcggatggagcaggccaattggaaaagccgggttcagacacgactctagagggaagagaagaaggcaagtgtgaggagggcgggcgtcggggagaa

SEQ ID NO: 45423 - DNA, 352 bp, Homo sapiens
  chr8:57359259-57359611
  hyper
cgccccaatcgccggcgggctgcagctgacgcaggccctacgccagccccgcgccgacgccttcgcgggaggggtcggtcccccagcacccgcgcgccgctccccccgccgagctcgggtgggggccacagggggcgctcggtggctccccacacggccaggtgacaaacccaaggcagttaggaagtttggggagagtgagataggatcaagtttctccgcataaagtcactgaaattgcaccgtgggatgcgggctccagggagggaagcgaggtgggggcgtttggaaggatagatggactggcttagacttctggaatgtgctggagacccagcgggccggtgaacct

SEQ ID NO: 45424 - DNA, 14 bp, Homo sapiens
  chr8:57360611-57360625
  hyper
ccgcggggctccgg

SEQ ID NO: 45425 - DNA, 33 bp, Homo sapiens; identical to SEQ ID NO: 6314
  chr8:57360769-57360802
  hyper

SEQ ID NO: 45426 - DNA, 81 bp, Homo sapiens; identical to SEQ ID NO: 6315
  chr8:57906851-57906932
  hyper

SEQ ID NO: 45427 - DNA, 134 bp, Homo sapiens
  chr8:58906980-58907114
  hyper
gggggcgggatggaggcggggcggggtgtacgaggggcgtgtacactggctcagggacacgcgctctcggccacagcaactggctccaagttccctccctcactctccggcgaagcctgcctgagccctcccac

SEQ ID NO: 45428 - DNA, 283 bp, Homo sapiens; identical to SEQ ID NO: 6317
  chr8:58907135-58907418
  hyper

SEQ ID NO: 45429 - DNA, 587 bp, Homo sapiens; identical to SEQ ID NO: 6318
  chr8:58907483-58908070
  hyper

SEQ ID NO: 45430 - DNA, 30 bp, Homo sapiens
  chr8:59572542-59572572
  hyper
accattgcaggctgcgttttaaatatttta

SEQ ID NO: 45431 - DNA, 2619 bp, Homo sapiens
  chr8:60030067-60032686
  hyper
cgaggagcttctccacggggaagtgtgtgtgtgagagcctgcctgtgtgtcaacactgtccaagactcggagctgcgactcggtcgcgtggtgcggagtccagggctgagaaggcagcgcactaaatatctctgtatcaggtaaaaaagccgtttggtgatgactcgccaccaggcaaatgttgggagtcccaacgatttttcccgtggaatgcaccgagggtcgccatggatgtgcctgcaggggctgtgagtatcaggcagatttatcaccaagcgagagttgggcgtctaaaaggcccgcccagcgttttagagaactcaattctctctgccaacgttcatccaacgggactgcttagacacgtccaactagccctaggcgtgggcagtcgtgcccctgcgaccactctgggggaccggtccctgcgtgtcctccctctctgggatgagagagttcgagaagccgggagagtaaccccctccctcgtaccccctgactgtcctataggtggacccagccgaactccgcagcagcccaggccagcgccccacctccgggtcaccggcatgatccgcctctccccgggcccccgcggccctggcacccgaggtcagcgggccgtgggtacagctcagccgcggaccctgctccgcgagtgcgggagctttggacttgaacgcgacgtgctcgcccggctcccaacaaacttgcaatttccgcgcgcaccccttaaacaggaactgttccccaaaccttgacccagctaccccgctgtgctctggcccgcggacctgtgtccgaacccgggctcggctgccggaaccggtttgagaaaacaaaagagttgtggggcagttttccctgtggggggcaggggcgcctcccaggtccctgcaccccgactcccggctgctcccctggcaactaatccggagaagggaagtggtgccacgagcccccactgcccggggagggagggagagagaagggggaactgggaaataaactgaattctcttactctgcctccgttcctggaccccagacacacccccaaagtattccacggttttctcttattatttttttaaacgccccccggcaaacctaggcagggatccttagccgcgaacagcaggaaggaaagaatccgagcaaatcgtgtcactttccgcacaatcgcggtgtttggcaagcccccggagctactccacaatatttactacccaagcgcacgcaggctgcagcgggctgcgagccgagcgcgcccgggaccggcctccgccaagccggccccgccgcggcccggccaccgccgctcccctcccaggatcaagcagcaagaacacggtggaaacaaaagcagagcgttcaccttgttgcaatagtaggggtccaggcagggagaaggtcccagacagggagcgtcgggcgcagcggcgggctgggctggaggtggataaaatcttacgtccatttcactctcacatcaagcaactccttttctttttccttttttaaaaaaaagtgttcagcaaaacaagcttagacggaacagagtgaggtgtctgggctcaggagtaaaagaaacaccttccttccctcacatccgtttgtggtttgtttaagaagaagaggaaaaaaaaaaaaaagaggggggaaaagcgctcaactctcccccaagccgcggcgcgcacccgtcggcgccgagcgcgcagcctgctccaccgccgcctcttggtcccgccgccgccgctgccgccgccgccgggcaggtaacttcatgcgctcattgtcccccccgcccgcccccccatccccgcctcccgcgcccctcgcagcccggcacacgcgctcgggctctaggtactgggcgttttattggagattctgagttgttctgcttgtagtttattttctccaccttggaggcccgggatgtggggggtgggggggtggggcggggatccagaagggacagggcgggaggggggcgagcgtcccgggccgggcggggtagggagcgcggccggacgcgggctcgtcaaggcccaatggctgctgttcggaaccagaggccggggaccggagaaaggaggagcggagaaggagaaggaggagagcacggcctggctgggacagaagcggtgggaccctgggaggcctccgctgtgcccgtgccgcgctcctcgggaccagcgcgtcgcacacaaaggggctgccgagccagagccaccagcggcctcagggcaccgtggggagcgcgcagctagggggcgctgtggcgcaccccgccccgcagccccgcccccggccctccccggccccaccccactcccaccgccctctccgcggccgtccccacccctatctccgcgacccccactcctcctcggctgttccccaaccctgtcactgtgctcccctccctactcccggcccgtagtggaggtgactttcctgcgcagcgccgcttctgagggcggagaacccacagggagtgcgacccctttgcacgctgtgagtgggcaactgtccgagggactcgagccgatcgaagggtgaggaccagctcgcctgggggtggacggcctggaaaagccgcccctctttggct

SEQ ID NO: 45432 - DNA, 30 bp, Homo sapiens; identical to SEQ ID NO: 6321
  chr8:60699763-60699793
  hyper

SEQ ID NO: 45433 - DNA, 966 bp, Homo sapiens; identical to SEQ ID NO: 6322
  chr8:61193291-61194257
  hyper

SEQ ID NO: 45434 - DNA, 30 bp, Homo sapiens
  chr8:61566019-61566049
  hyper
cgggatccgttttgcgtctgcacttcaggc

SEQ ID NO: 45435 - DNA, 789 bp, Homo sapiens
  chr8:61822238-61823027
  hyper
gggggacaagagttgcagtttcgaaacagagtggaggctcctttaatcttgacagcccgaatgctacaggggtcacagcacatctgctccggaggaaagacaaagggcaaggtggggccacggtagcccgcgcggggctcttggcgggctgggggcggcgtgcgccgagctgggcgcgagtggaggggccggcggctttgtgcgcccccgccagtgcccgcccgcagccccgccgcagcgtttaaccttgacttctccctcctcgcttctggcacgggaggaaagcctgtccagatgggcgtcctgagtgtgacgacgtcccctcccgcccccgcgctctcgcgcagatgtcgcacgctgccctgggtcccgccacaccgcccaccaaggccgcgggccctgcgcgcccggggcaggcgggcacatcccgcaccctctccgcccgcccgcccccggcgcccttcgcattcccttcttcggccctggcccctcggaccggagcgcccaggccagctcagggtgttcccgtgggggtctccggaaacaatggtgagcctgtgctctgctggctggggggcgtcgtccccgcagctggcgcgtccctccaggctgagcgcccagcgccccccgcggccctaagttgggccacctggcggggcgctgcggccgggccgggcggggacatctgaggcccgacagacccgcgctcatggacaagtgtcgcccgcgccgggcagggccgtggagacagaccacgcagtgacaggccggaggcggctcgagggatcc

SEQ ID NO: 45436 - DNA, 30 bp, Homo sapiens
  chr8:61936318-61936348
  hyper
aggacggcccagcgcgctggccctgaaaac

SEQ ID NO: 45437 - DNA, 256 bp, Homo sapiens; identical to SEQ ID NO: 6324
  chr8:62200448-62200704
  hyper

SEQ ID NO: 45438 - DNA, 31 bp, Homo sapiens; identical to SEQ ID NO: 6325
  chr8:62626392-62626423
  hyper

SEQ ID NO: 45439 - DNA, 51 bp, Homo sapiens
  chr8:62626672-62626723
  hyper
cggcctccgccccgcgcgcctaaaggaggagcgtcgcgggggatggaggcg

SEQ ID NO: 45440 - DNA, 215 bp, Homo sapiens
  chr8:62627198-62627413
  hyper
cttcccggcctcgccccgcccccggaaggctgagtgacggcgcctgggacccaatcgcaagggcccttacgaggcggcggtaccctgccgcgctccccgcccctgctcacttagggctgttcgggcgctacgcagctgcctgtgagcgcgagcctctttcggctttccagtttgtctcggtcctttggaacgtggcaaacgtggaagccgagagg

SEQ ID NO: 45441 - DNA, 1289 bp, Homo sapiens
  chr8:63160402-63161691
  hyper
gtatcttaactatccgagatcttctttccaaatccttctcaatttatttctgtgaagatatatttatacctattccggaaaccttctccatttctagaaaaagctacgcatcttcttcttcctcgacttctcttttctccctcccggtgaggatttcaaagggtatgtgagaaaagaaccttaagccaggtctccccgcggcgtcctggctagtcccggcgccctgggcgggtgcatcgctccgccgcagcgccccttgccacccaactctgtccaactttccctttcagactccagcaggggcgccctccaggcaaccggctgtggcgggcagaagcaagctcggatgggagacccccgagctgcgtgcccagcgccggctcaacagacttgcccgcgcagcgcccgcgggccccctcgcatccgggcaggttccggagctgggccttgcgctccccggcgcccgcccaccctgggtgtctcgcgtcccggcccttcctccccggaacccaagctaacccaactcccatcctcgccacctctggggcagctcaactaagccgtgtcccctcccttgcaaacgcgtccgaccaccctcccaacccccagcacaaccctcagcaagaaagcccagctgggtctacccagttacaccggtcaacgagggtctccatcgccgccggccgccctaattcacgctcattcatattcattctcttttctctctgtccctcttcctttctccccaaagactcttaactagacaggccgatcctccccagcggcactccctttcattcttcccttcccaccacacacacacacacacacacacacccggacccagacagcccactccactttccagacgcccacctcctacatactcccctcccctaaacagacattcacccactcgccatctgtagcctccttccaaccccccgccccgcccgcctggctccccctccccaagaaacagacctgcacagtgggacgcagggacccccgccagacgctcgggtcgtgcgcaccgcactgacctcggcccgccccgccgggaaactaacaaaggcgggcgcgagccccgagccctggagccgcgagcggcggccgcggggccgaggagcctgggccgggccgggcggggactactccggagtcaggaggcagcagcggcggaggacgaggatctctggcagtcagcgccgctcggacgccgccggcaccatgggctgctgcaccggacgctgctcgctcatctgcctctgcgcgctgcagttggtgag

SEQ ID NO: 45442 - DNA, 30 bp, Homo sapiens; identical to SEQ ID NO: 6329
  chr8:63951061-63951091
  hyper

SEQ ID NO: 45443 - DNA, 30 bp, Homo sapiens
  chr8:63951627-63951657
  hyper
taccgggtggtctccgcgtccttccctttc

SEQ ID NO: 45444 - DNA, 94 bp, Homo sapiens
  chr8:63998149-63998243
  hyper
ctttctagctttgtcgtttccatgacccagagaaactggaggaccagctctggattctcggaacatctacagcctcagcgcccacgccgggtgg

SEQ ID NO: 45445 - DNA, 434 bp, Homo sapiens
  chr8:63998448-63998882
  hyper
cggcgcgagcgggacgccagcttcccgggcccggcgccgcagcgccgccaggcccggctgcagcaacggagagtggtccggtagcgcgttgagctgcggccccgccgagggctgggatcgcgcctctgccatgcccgccgccgctgctgcggccgcagctacccgggcacccgggaaaagcgcgcgccccgcgccaccctcggccccgcctctgcggccgctgcccgtcgcacaaccactctccagcctggcagggcggtctccggcctcgcacgccggacccgcggcgagcagagctgcctcttaaaggaaaccgcacagtgtccccacgggtgctagccacctgtttagcagctttagttagggaccccagctttttcccagcgagggaagccactgatgttcaaacaccgaggaaacgatgtcaaagttag

SEQ ID NO: 45446 - DNA, 420 bp, Homo sapiens
  chr8:65281382-65281802
  hyper
taatagaggatggccggtgacccagtaaggactaaaccttgcgctggtttattgtggcaagctgagaaaggggctttaggcccgggaccccaggcactgacccgcacacatcccgcggatcgcctattcattcgcacagccctccagtcgcccaggctcccattgtttgctgagcaacaatggagatttcgcagggaaagtaaagctcttttcagattcctctctgatgttttgcatttagggaaacaccgacctccactttttcccccgacattttccctcctggcatttaaagctgttcgttttcggggaaacttctgtgagtttcgcgcttgttcgaccaacaccagtgttaggaggaggcgagaccggtggaaaaaggagagccccagagatttcccgtgtgtgtgtgtgtgtgtg

SEQ ID NO: 45447 - DNA, 179 bp, Homo sapiens; identical to SEQ ID NO: 6333
  chr8:65281825-65282004
  hyper

SEQ ID NO: 45448 - DNA, 108 bp, Homo sapiens; identical to SEQ ID NO: 6334
  chr8:65282332-65282440
  hyper

SEQ ID NO: 45449 - DNA, 444 bp, Homo sapiens
  chr8:65283647-65284091
  hyper
ccgccggcgagggagcggcccattcgtgggaaacgcgcccaccgcttgggttctttcctaaggcctccccaccaacaaggctgaaattccaaggccctggaagatgaggcaaagctagcattgccagagtcgggggagaggggaggatgctgggtaaagtgcccacccggggtggtctaaagtcgtcaccccacagagcagattctgctgctaaccagagcagagagccgcaccttcccagcggcgggccccagtgcgcacagcgtgactttgcctcccccaggctcagcaagtcgttgacgatctttagcagtcccgcatcccaggtcaataaactggaaacggatagaatgagaatcatggatgagagataaagggcagcggggtgatgcgcatttcttgtagtgcctccaaaaaaccgtggtctctcgccgctaataaaac

SEQ ID NO: 45450 - DNA, 452 bp, Homo sapiens
  chr8:65286574-65287026
  hyper
ggccagccgcgggccgggccccttggttttcaggacttattcttgccggggttggctcgcacgccagcatcgcgccttcggtgcgtcttttatctccatctcaaatatgggatcttcttgggacgaggactgaatgagggtgggagagagggtgtgtctcacggcgcccaggagggagaaattgtggttctgagaaggtattttttggcctcttgaaaatgtgcaagaattccgcgggcccaggctttctttgtgtggcgggcagcgccaagcgctttgtgcttcacaaggagaaaatggcgagtcctattgtgtttaggccattttcttccggtactaggattttcccaagttcgaaatacttcttgagaaagtagccttctcgtgcccaagaaagtgtgaatcgctgaggctcggccccatggcctggcgtgggtgctgacctcagttta

SEQ ID NO: 45451 - DNA, 1469 bp, Homo sapiens
  chr8:65289212-65290681
  hyper
aaggcacattcgtccggaatggcattcgtgataagattaaacataaacctaaaccttggcctcgggggaaggcaggctgcggggttgagaagaggagatgcagattagctctgcttttgctgcttgcgcacataattaagaggcggtccctcagctggagcgtgggctgtgtccggcctaaggtgcttattttcctgttacttggccaaccgagtgtgagtgaacaggagcccgagagcttaaatgtgggatctagataaggtgtcgactgggttgtgggcgtttgtctccatgttagggagaggcaactgagaacggtgactttggcttgttttgagagagcctgggttttgacagcaggacggcgaagggagcgcttggagaggctggaagctcgacgtcttagggagctgcctgcgggcactgggttgacgccaagaggttgtcggcaagggcagggctcttgccctctgctgtacctaggctctgcaactgggggctgcgagccttctgcggctctttggtttcaaggacacagcgagctgctcaggactttgggagccaacatctgtctgactggtgacgtcagcagcccgtgtaatcctcttgtgctgaaggcagatgccttatttgtttggctggagcgagccattaatccctaattctggatcagcaagcgagggggaaagaccggaccgctccgacccaccccctccctacccccacctcccaccttaaagcaccttataccacggaaggctctcagcctcttctttcctctgcgaacgcgctgagcagcgattgaaaacgttttggtcctctgcaggtttgaacagggctagcaggtctctctccggatttctagggctatgggtatatgtaattctttctctcatcgatcgtttcgattctcttgccggtcttgcagtttgcagggtcctaaacgaagaggggtggagattcgagagtgcgggtctggcgtgtggtccaagggagggggtgaggctgggaaagggggtgcagaatgcgggaacggctgggactgcacagaaggaccatctgcggactcgttttcactgctccagctcccgaaatcgtttctctggacgcggcagtatccgcagcgcatgcaccctcctctggacttccgcagcccagacctgcgcttacagtcatcgcgccaccccctccccccgggctgcgggccccgcgctccgtgggctcagggtcccctccgcgtccccctgaagcctggggacggaggtcgcgaccggccgactggggtcctgtcctcttgtcaccttgtatccctcgcatgctccctcccgcctcgtgtccctctccccaccctccccctcctctctcccgcctccctaacactgcgctttgattctgtttttcaggggcgcattctggggtctctgcgcaagaccagctctcagctctctctcctttcctcggactctgga

SEQ ID NO: 45452 - DNA, 30 bp, Homo sapiens
  chr8:65291272-65291302
  hyper
agaacatgcaatagcgtggtccttaaaaac

SEQ ID NO: 45453 - DNA, 94 bp, Homo sapiens
  chr8:65292571-65292665
  hyper
ctgcaggggttgggaacaaaggagaggagctaagaggatgcaccaaagtagccgcgccctccctgcctggcgctgtccgcggtgctgaccgtgg

SEQ ID NO: 45454 - DNA, 15 bp, Homo sapiens
  chr8:65293265-65293280
  hyper
cgcatcccagccggc

SEQ ID NO: 45455 - DNA, 30 bp, Homo sapiens
  chr8:65487802-65487832
  hyper
ctgtgggttttaaatcgcaaagctaaaaat

SEQ ID NO: 45456 - DNA, 858 bp, Homo sapiens
  chr8:65488196-65489054
  hyper
cctggccttcaaagtcgccaaagtggggaaagaccacgcaggagccaggtgagaccctcgcggtgggctcggggacttgtgtgtgcacctcgcgctgagaaggctgcctcccggggctcagggtttgtcttcaaggtctgttcaaatttaggctaactcgtccccaaacagtagtgaggaccagtatgttttctgtaaaatagatacagacaaggaaaatcttttcgaaagaacgctatacgaacaagtttcaactttcccacagtcgaaatttttggaattgccaagcaacttggaaagactagcaagacggggggcccttggctcactgccaggaatgcgccagctcgcgctagtcccccagcgtcgtcaccctcgctgtcctcctcctcatgagcccacacatgtggacccagtctctctgaagtgagctttgtaggactcggcggcgaaggggacgagaaaatacagatgacaaaacgacgccgaaaggcttgacctctggggctaatctctctgcctccgagtagatcccgcgctcccaaatccggcgggggcgcagtatggtgaaccccacacctagctccctcagctgcgtgggtttcaagctgacccaggcgccaccaggcagccccgagtgggcgagtcaagtgcaacttcaaggtcaatgtgcctctgactggggcctggagagctgccaagaatgctgggcttggagcgctggggtcgcgccccgctactgcgccttggaccccgcagtggagggcgctgagaccgcacccccctccccgggcagttttcaggagagggtccagctggggtctccgcggtggggtccagaaacgatattccgggttg

SEQ ID NO: 45457 - DNA, 120 bp, Homo sapiens
  chr8:65489462-65489582
  hyper
ctcaatgcactaatttcaatgcggtgctgtctgctgaatattttaaactcctttcaaagcagtaggtgtattccctcccgcagtaacaaaacgatattcatctttacacaaggtgctctg

SEQ ID NO: 45458 - DNA, 1062 bp, Homo sapiens
  chr8:65489646-65490708
  hyper
cggcctcgataagccaaccagcccagaaccaggggcgctgggctgggtgttcctcggggacggcgcccactgcccgcttggtccctggagtgtcccgagctgcctcccatacccctgctgcggacagagtgggggcagtcctctgcctctgtttcccaactgctttggtaactcagtgactctctgtgaaactgcagagtcagaggacttcccttccgtagttttcattctaagcggtcatctgtgagtcagaagatttcgccgtggcctgatttcccaccctttctgcccgcgcaagccgaaagcgctcatgttggcttttcctttgccacttttccaacttgccagttccatcaggagcccggatccttgcccagcttcttggcggagccaagttcgagcgcacagatttcccgagctccagcggccagggggcactgtgtgagcggctgacgtcacccctccgcccggccgaaaccaggcggcgggatcccacacagttgaggagagggagccgaggccgtgacttagggctggcgacgattaaaccaagtaacgagacaccgggcagatgtgttttcattgccctgtaagataaatgcagtgttaagtgcctgacaacttcccagaagcaatcagcaaaagtttacgagtgcataaacctcaaagaccattccctatcggttgttataaggccggtatttagagcttccataaattcttcggccttttcccaaagcaaagttttcagcgactattaagcagccacctcctccgggaagactagggggattttcttgaattacaaaaggaagaggcttttggctcctaccgagtaaaatgaagttgtgcaaaagtttgttccagaagcttggatggccagggagaggagggaggtggcaggaggtcgtggagatggggtcgggaagggccacgagatgcgctcaagtgtttgttgcctaagggcgaaagacaaaggtcctgcgaagatcctgggtctagctgagctggcagggcctttgccgccctcagtgtcgcccctgctctgccatcccggctctg

SEQ ID NO: 45459 - DNA, 67 bp, Homo sapiens
  chr8:65490762-65490829
  hyper
cgcccttcaaatgtccacttcgggccggcaagaatcctggcgccccgcagaaggtggcagcccacaa

SEQ ID NO: 45460 - DNA, 43 bp, Homo sapiens
  chr8:65491384-65491427
  hyper
aaaatacagacatttttgtgtcgccctcacccttcctttatga

SEQ ID NO: 45461 - DNA, 1239 bp, Homo sapiens; identical to SEQ ID NO: 6340
  chr8:65492339-65493578
  hyper

SEQ ID NO: 45462 - DNA, 148 bp, Homo sapiens; identical to SEQ ID NO: 6341
  chr8:65493806-65493954
  hyper

SEQ ID NO: 45463 - DNA, 523 bp, Homo sapiens; identical to SEQ ID NO: 6342
  chr8:65494076-65494599
  hyper

SEQ ID NO: 45464 - DNA, 501 bp, Homo sapiens
  chr8:65498611-65499112
  hyper
cgcacccgcacgcagtctgcaatgccctcaccagtccccgcagctgggcaacccctccaagaccctgtgttacgcttaaattcctctccctcctatcgtacccaccatccatccttacagcagggaggccgagactcacagaattcccttctccaccaactcgcactcttggtctagcacgcggaaaccgaacctttctacgcggcccgaccttgcgattgctccagcatgagtggcattgacttttccaatgtaatgacttatgaaagatataatcatgtgttaaattgaatcctccgtttaactgttaatggtgtgctctgggcacatttacgtatttgatgctatggtaactaattaccactagaaaaaaggataatacacttcccagactttgaaaaataatcatgagttcacttcccggctcgcagcacatcgtggcggccctgccgggaggagcgaggaaacgagtggaaacccgaaagtgtgctcatggaatgc

SEQ ID NO: 45465 - DNA, 394 bp, Homo sapiens
  chr8:65499628-65500022
  hyper
aaacagggctgggtaggataacgaggagagtgtttgtgctgggacctggcaggactggaggaggaaaggagccgccttccagcaggtccagcatccctaggttgcaaacacaccaaatgacgtccacgcagcactcgcgcccaccgcgctgtttttgcttgcgcagtgctcccgaagggattcgggatccgcatccggagggattcgggatccgcatccgaagagcaccccttctctcaggacttcccctgggaccgacgtttccagtcacccctgcgggcgcaattgtccttcaaccgccaagctccttgggacaaaaagagaacttcaggggctctgcctcaaactgtccttcgagggtggctcgaggatcgggttgtcccctgtatggcag

SEQ ID NO: 45466 - DNA, 196 bp, Homo sapiens
  chr8:65710887-65711083
  hyper
aggaagccagtaccccgcagcaagttctgactgtctgcactggaaatcatggagggggactcccctcgccatctgggtcgcgcgcggcccgcggggcccagggcgcatgcgtggcctggcggccgaggcgcttacctggtgcgccggacaagcaagcagagggccaggagcagcagggccgcggcgagggccaggc

SEQ ID NO: 45467 - DNA, 185 bp, Homo sapiens
  chr8:65711221-65711406
  hyper
cggcttctctcggcggcgccccctagtccagggccggagaggctggcctgcccgcagcgcagacaggaatgtcaccgtggtctcccaggctgaatgacaaaagttcgtggactgccccctccccgcctatcctccacccacgcgtaccgccccgttcccccaccgtttccgacccggcagcttct

SEQ ID NO: 45468 - DNA, 30 bp, Homo sapiens
  chr8:66546600-66546630
  hyper
tggccctaactactcgccgtccaccaagcc

SEQ ID NO: 45469 - DNA, 30 bp, Homo sapiens
  chr8:66557532-66557562
  hyper
tgtggttgctgtgtcgcttttcgcctccta

SEQ ID NO: 45470 - DNA, 30 bp, Homo sapiens
  chr8:66753074-66753104
  hyper
agaaacgaaggagtcggggagactacagca

SEQ ID NO: 45471 - DNA, 1500 bp, Homo sapiens
  chr8:67024928-67026428
  hyper
ccagctctgtctacagaaccccgggcttcagtggcgtcttcctaacccggcttgcctgccgggggcgttccgagaccctcggggccttcccttcaccccgcgggagttggaccggtggcgctggtaaggcctcccgggctcaaagtgcaacggacactgcagaaatccaaactgctggcattcgcggtttggggacgccagaggaggtaatgatttctggtttgttaacctcaagtgacaataatgccgagccaggcaggagctggacctacaatcttctgatgcgtggtcagacacgttatcccttgcgccactggcctaccacgctactccttcagtcgccgttggattactgtgtgttgagaacacactcggcaaccactttaaaggacaacgcaggctggtaaaggaaaagtacgacaagggggggcggtggaatcgcagggtcttggcatcgcggaccccagacacctgggttgagggcctttcccgggtcagtcaggctagcgagccggagcgttctgtctttctgcgcacgcgtagagcacacaggccggctctggggctctgcgctcctcggattacgcatgctcagtgcaatcttcggttgcctggactagcgctccggtttttctgtgctgaacctcaggggacgccgacacacgtacacgtcccttcgatagctcagctggtagagcggaggactgtagctacttcctcagcaggagacatccttaggtcgctggttcgattccggctcgaaggagacaagtgcggtttttttctccagctcccgatgacttatggcactttccttgggtgccttcagtgacacattgcattccaacgagcagtttgaaagtctagcgctttctccccattttgggcctcccagcctgcacggtaattctttttagccattcgccctgcgggaacgtgtccgggcaggttcccagcgcagctgtgggtctgcgcttggccgagcgactgccgggtcacgacttctgcgtcttcttaacccgtctttggcattgcccgggccccgagtcacacaggaggcagcgccggctccagggggccaggcggggaccttctcctcagagccccgggcagcttctgcgacccgagggctcgcaacggctgccgtgaggaggtggggggtccgcgggaagaggtatctggcgctcccggaacctgggaatcagaaagagagaacacaatactaaaaacacgaagcctaaaaatgacacaatgttatggagacaaggcggcacccgggaagctgtgcccgctcccttcgatagctcagctggtagagcggaggactgtaggcgcgcgcccgtggccatccttaggtcgctggttcgattccggctcgaaggagagacacccccccccccattattttgttgctttgaaccaaaaaagtctgtcttcagcgctcaatgttctgacccttctctaaaggaacagataataagccgtgcccagccgtggggg

SEQ ID NO: 45472 - DNA, 454 bp, Homo sapiens; identical to SEQ ID NO: 6344
  chr8:67026487-67026941
  hyper

SEQ ID NO: 45473 - DNA, 30 bp, Homo sapiens
  chr8:67341291-67341321
  hyper
gccggagtttgggccgccactgtaggaaaa

SEQ ID NO: 45474 - DNA, 210 bp, Homo sapiens
  chr8:67344491-67344701
  hyper
agaacccgaggcctacggagcagttaccttctacggcaatttcaagggtggatggtgcgagcgccgctggggcagctggcgttctggttcttactccgtgggaaaatggccctgagcccgactggcttgaggcttagacaggtgaccccgcgaagcgggtgggcaggcgcggccgaggggcgggaggcgggcagcctccgtgattggccg

SEQ ID NO: 45475 - DNA, 285 bp, Homo sapiens
  chr8:67344809-67345094
  hyper
cgtgagtgcggggccggcgggcgggcaggggaccgcagggtgcccacgcagccccctgggtgtgacccgctcagatcctgcgcagtcttctccgcttactttcaagaattcggagaatttggataccgccctgggctcccaccgcgcgccaggcggaacagcgaggtcacagagtgcgcgatgcagcctctcagggcgcagtgaggcagcctttactctgcttgtctaccgttaaagaaactgaggcccagagaggacctggtcccacatcgtagcaggcagtgg

SEQ ID NO: 45476 - DNA, 450 bp, Homo sapiens
  chr8:67417574-67418024
  hyper
aggagtgggctaaccgcgtttcccccgcccggcaggtggtgatcgagtcggacctgtacacgcaccagcccctggagctgctgccccaccgcggagaccgcagggaccctggcgaccgccgcaggtttgggcggctccagaccgcgcggccgcccacagcccacccggccaaagcctctgccagacccggtacgtgagtcccggccccagctccccgcacctccctgggcgcagagacccactcagagccaccacaagcccaggtcagggcagcgttggcggtggctgcggcctcagtcgcgccaggtgaccaagcacctgtgctttcccaagtaaatgctgtttccaccacaaaagcacctgctctcaggcctcaccttagcctcacacagcatcttctacctataaaacagtcactcctaggtttgcgtaatgagcaaagatgctctt

SEQ ID NO: 45477 - DNA, 52 bp, Homo sapiens; identical to SEQ ID NO: 6348
  chr8:67524785-67524837
  hyper

SEQ ID NO: 45478 - DNA, 30 bp, Homo sapiens
  chr8:67525264-67525294
  hyper
accccggcccgcagcgccgctcttagcccc

SEQ ID NO: 45479 - DNA, 30 bp, Homo sapiens
  chr8:67525834-67525864
  hyper
agcgggtccggaagcgggcggtggagaagt

SEQ ID NO: 45480 - DNA, 30 bp, Homo sapiens; identical to SEQ ID NO: 6349
  chr8:67625265-67625295
  hyper

SEQ ID NO: 45481 - DNA, 44 bp, Homo sapiens; identical to SEQ ID NO: 6350
  chr8:67837265-67837309
  hyper

SEQ ID NO: 45482 - DNA, 30 bp, Homo sapiens
  chr8:67837938-67837968
  hyper
gcgcggtgcggcgacgctgtgtgccacaca

SEQ ID NO: 45483 - DNA, 15 bp, Homo sapiens
  chr8:67873406-67873421
  hyper
cagccacctgtgaac

SEQ ID NO: 45484 - DNA, 252 bp, Homo sapiens; identical to SEQ ID NO: 6352
  chr8:67873798-67874050
  hyper

SEQ ID NO: 45485 - DNA, 508 bp, Homo sapiens; identical to SEQ ID NO: 6353
  chr8:67874164-67874672
  hyper

SEQ ID NO: 45486 - DNA, 858 bp, Homo sapiens
  chr8:67874755-67875613
  hyper
cgaccggctaaggcaggtcgggcggaggacctggcccaccggagaggctacgccgggggctgaggcggcttagagggtcattaatcaaaccctccggcggggcgggctcgggggcggggcgtcctcctggccccgcccctcggctcactgcctcacgctgctttccccgaggcgcctcgctgagggcggcgtgtggagagtttggggtgtctgccgccggctgcggtggggccgggctggaggccgcgggtgaggcctgtggttaacctcgcgctgccgaggtcttacctcctcgagtccagtctgattccaggccgcttccaggccggtgcccagctgaggcgggaacgctgcagtttggttgagcgtgacttttaggctctgtgaggaaaagtcgagcgcgccacatcgaggcgctagccgtttattctaccacaaggtaaaagattcatgctgtcctagttaccctaaagctgggagatacactgcacttcctaccagaccccgaatgctctcagtgtctgtaattctttaagaagttcctagagcagacagcccttggatcgtgggcacttctccccggggacggggaccctgctgaccgcctccgctgcccccgcgggggccaccgctctttaattatttgggcgaaacattcttttctggttttgcacttgtggactcacgggaagcgtgacttgcagcgaggcaggacccgatcccaggcttctttagaaagcggacgctgcgccccaaggcctgttcagagccgccccaggaagccgtgggtccccgaccgccccaaaccgcagcggtttctgcaggtcctggacccgtcgccttcgtaggtgaaatcta

SEQ ID NO: 45487 - DNA, 438 bp, Homo sapiens
  chr8:67940670-67941108
  hyper
aacatggttctagggtttcctcggtccccacgcttattccccgcgggcagctcaccgctcgcgggacagtccggtagctaactccagtttggtcggtttcatcggcgccgggtccctacgcagaccagcggcggttgctgggcgaccagacgcgctgtccaagcgccgctcacgagaaatctcgcgacatcgcaggctgctccctccccggtgggtccttcccctgtgaggcggcggccgggcgctgatgggcactgacggtggtcactaggccgactccgactagagtcctgttagcttgaagaggccgtgaggcatcggtcaccgcattgttttagtggaccagttagtagccggaacaatttttggcagaccaccatttccccctaccggattatcctgccatcggctttgaccgtttcagtgcccaacaaccac

SEQ ID NO: 45488 - DNA, 13 bp, Homo sapiens
  chr8:67974198-67974211
  hyper
tttctgggccata

SEQ ID NO: 45489 - DNA, 3 bp, Homo sapiens
  chr8:67974225-67974228
  hyper
cgc

SEQ ID NO: 45490 - DNA, 30 bp, Homo sapiens
  chr8:68256144-68256174
  hyper
ggcccgagccgcagcgctacggcggcccgg

SEQ ID NO: 45491 - DNA, 473 bp, Homo sapiens; identical to SEQ ID NO: 6355
  chr8:68863997-68864470
  hyper

SEQ ID NO: 45492 - DNA, 361 bp, Homo sapiens; identical to SEQ ID NO: 6356
  chr8:68864545-68864906
  hyper

SEQ ID NO: 45493 - DNA, 306 bp, Homo sapiens
  chr8:68864942-68865248
  hyper
cgcggggatttgttggtgccccgagactcactgagttgcgggggccttggagacctccaggtctgaaaagttagctctagagaagagagctccagtccagggaatcccggctgccctatcttccctcacttttcttttacccgcctccccagtctgctcaagtgcactgtgtaattgattttccttcttgttctttcctggagactttgttttaaagctttggttttgtgattaaaggtccagtcggctacatccaggtacactaagttaaaaaaaatccttgaatgtgctcgagcttgagttcgt

SEQ ID NO: 45494 - DNA, 278 bp, Homo sapiens
  chr8:69242788-69243066
  hyper
tgaggagaggctcagaaggggcggtggggacgatcccctttcgaactgcatttgtagctgccaaggagtagccaacaagcaccagatttatgtgcactttgaaagaagcaccttcaccattggctttttaagcggcgctgtcgctagggagcggctggtagggcgagcagcctcggggagcagcccgggctgtttgttccgtcaccggggaaaggaggtacacacagtcgcgcgcgcacggacacacacacacacgcacgcacgcacacacaccggtg

SEQ ID NO: 45495 - DNA, 618 bp, Homo sapiens; identical to SEQ ID NO: 6359
  chr8:69243284-69243902
  hyper

SEQ ID NO: 45496 - DNA, 954 bp, Homo sapiens; identical to SEQ ID NO: 6360
  chr8:69243963-69244917
  hyper

SEQ ID NO: 45497 - DNA, 30 bp, Homo sapiens
  chr8:70405189-70405219
  hyper
aggccaggccttcccggctgccggcgctcc

SEQ ID NO: 45498 - DNA, 30 bp, Homo sapiens
  chr8:70744328-70744358
  hyper
gccgaccccggccgccgaagtagctgacga

SEQ ID NO: 45499 - DNA, 909 bp, Homo sapiens
  chr8:70744865-70745774
  hyper
gctgctctcccgccccgggctgcagtccagtgccttcgtccatggcgcttagaattcagatttgatagctgatggcacccaagcactccggcacgtttcatccaccggcacgaggggccgaagccgggcccagtcagtcttgcccacctgggactggggctgggggcgcagggccgcgcagcagggcatcctcaccagctgcgaggcgcccagtgcatcctgatcacagacacggcttcaaggctccgcagccgcgtgccacagggggcaggggtccgcgcggtactgcgatgagccctactcggcgtccctctccgggcggtagcttgaggcaggcgcctcgcgcgtcccgggctcatcccctccgccgccgccgccgccgccgccgctgggcccgcggccaggagcgagtgcaccctgcgccgggggtgggggggcacttagcgctgctgtccgtacagcatcccacctcgctgcgccaggggtaccgggtgttcgccgcctgggctcgcggcaccctcgggagtgaagctgccgacctgcaaagcagaaagagggcggtcagcgaagagcggctgcggcttggggctagcgtcccagcgccccggggaccagggttaggtgaccccgaaccgtccctagagggacggaggagctagtcaggagcggagccccggaggactaggcagcagccggctgcagtctccagtcccggaacaataagcagcaggcggtcggcggagactctccctcattgtctgccgcggacctgcccccgtcccgccccttctgccttaaacattgcgtttgcttttatatgttaataattatcaacctggcagctctgactcagaggcagtgtcttttaatcgagtgaactaactgcagcctttccgtactcctactcca

SEQ ID NO: 45500 - DNA, 369 bp, Homo sapiens
  chr8:70746613-70746982
  hyper
gagaaaggcagagaggctgggcggccaagggtggccgctccggcatctccctcggctgtgctgggccaaacccgctcccagattcccggcctgccagccactcacaatcccgggcttccccgccgctgccttacccaggcgccttcccggggaaccccaccagccgctgcgtgaggagccggggaatcccagcaaactctcgccgctcgcggggggcgtccgaaccccctgcttaggcgagcgccctcacagcatcgcagactcggatggacacgcggatcccggcagggagctcttggagcaggcgtggaatcccagggacaccccctgcgcgcacatcacatacacgcacatcctacacacacacac

SEQ ID NO: 45501 - DNA, 30 bp, Homo sapiens; identical to SEQ ID NO: 6362
  chr8:70747237-70747267
  hyper

SEQ ID NO: 45502 - DNA, 30 bp, Homo sapiens; identical to SEQ ID NO: 6363
  chr8:70945442-70945472
  hyper

SEQ ID NO: 45503 - DNA, 38 bp, Homo sapiens
  chr8:70946876-70946914
  hyper
tcaggttcaagaagcggcccggagttgcaggaagggcg

SEQ ID NO: 45504 - DNA, 525 bp, Homo sapiens
  chr8:70947090-70947615
  hyper
ggcgtccatgtgttctgcaccccttctcgcccggtgcctctctcaaggcacgttttccaaagtgtgttgaattcgggaatcgatcgaaaatttcaaggccaattaaatgccctctgatgtagagctccgattaggcccgaaaggcttcaaacagcccctctagaccctcgagggtcttcgccgcggtaaccttaggcgtcccctccccgagaagtctccctgaggctttcacagagggcgggaggggctgcgctggggcctccgttcccagtgcccctgactggtggggagggatggccttagtgtctgagagcagagaccagattgactcccacttgagaccagaaaacgaagaggaagcggaacccgaggtggctgcggctcccccgggacacaaccgggagaggaagtcctggccatctgccggccccgcctgggggcatctgctcgaggatccctgggagccgttatcgtattcctcagaatctgccgtgctgtccctccgcccccaaaaccaacaggaca

SEQ ID NO: 45505 - DNA, 304 bp, Homo sapiens
  chr8:70982262-70982566
  hyper
cgctcccacaattaagacaaaacgaaaaaacagcaatagaagcaaacacaaaaaagccccaaacggaaatctgccgggatcctgccctactctaaattccgggttagtgttgccttccccttccctctccaagcaccccttccctaagcccggccgccttcccacacccgctctccgctttcggcccccaacccggttcctgcaaaacccattgaagttccctttccttccttcttctcagtcctacaaaactcgttggtagggtctgtgggagccgcggggccctgccaacctcggggctggg

SEQ ID NO: 45506 - DNA, 244 bp, Homo sapiens
  chr8:70982850-70983094
  hyper
cgtccgccacattccccgggttcctcggaaactccaatcattctaccaggactattggggcctggggtagcccctcgggagccgcgtggacgagccctggccaggtgggagcgaagagcctcggcgactgccagtcctcccgcccccgcaccgccgggaaaggatggcgttttaatagacaggcagcaagttcaccgaggctgaagaatgaagccccttcagggccggcgggtcttgagatcaa

SEQ ID NO: 45507 - DNA, 30 bp, Homo sapiens
  chr8:70983293-70983323
  hyper
aacgaactgcgccagcgagtgctgccgccc

SEQ ID NO: 45508 - DNA, 317 bp, Homo sapiens
  chr8:70983552-70983869
  hyper
gtagggaattgacccggcccacgcagatccccgcgtcgtcttctccccgcccaccgcagccattggccgactctcgactcgccctctgtcccctggggtcgctcacttaactcatcagttttccaaaccctccctgggaccctagtggcgagcactcgccgctggccttctagggcaggcagtattgccgctccaggcgtgcggagtcggggagaaaaaaaccgaacacgtgtgctacccagggcccccagataagcccctccgcgcgcacacacaccctgaaccggagtccagaaggccggactcgcgtcccgggg

SEQ ID NO: 45509 - DNA, 276 bp, Homo sapiens
  chr8:70984016-70984292
  hyper
cgagtccccggcagtgacacgtgggagcgttgggcccggcacccccgacgcttccgaggtttcgggtggtcgttttgctctctcgggggcttttattccttaagtggctttaaacgaccgaggatgggcctcccgcgccgccgcagctgtcacttccttcgggaaaggctagcgaccttggacgcgcaggctctgaaaaccaaggtccagacccataccgagcgcccaaagaccgcatttgaattctcctcgccggccattgagggagagaaagga

SEQ ID NO: 45510 - DNA, 318 bp, Homo sapiens; identical to SEQ ID NO: 6369
  chr8:70984343-70984661
  hyper

SEQ ID NO: 45511 - DNA, 140 bp, Homo sapiens
  chr8:70984744-70984884
  hyper
cgccctgccgcctgcttgccccctttgctgcaccgggtggccctggtccccgcgcccgcccgcccccgacgccttcgcgtggttccgcgctgcccgcggccagccccgtttcgcttcgcaaggagcgtgttgttttctca

SEQ ID NO: 45512 - DNA, 30 bp, Homo sapiens
  chr8:71119062-71119092
  hyper
gagtgcctctcctcacgcccagccccgact

SEQ ID NO: 45513 - DNA, 30 bp, Homo sapiens; identical to SEQ ID NO: 6371
  chr8:71315998-71316028
  hyper

SEQ ID NO: 45514 - DNA, 30 bp, Homo sapiens; identical to SEQ ID NO: 6372
  chr8:71520835-71520865
  hyper

SEQ ID NO: 45515 - DNA, 348 bp, Homo sapiens
  chr8:72273960-72274308
  hyper
agttttgctcctggatgggtacgcgcgggggctctcaggcgctctggtgcagccgcggcgcttctgggagtggagcgcctctgcaggggaaagctcggcgcagggggcaggcgcctggccgctgccgcaggctcgggctgccgagcgactgagcgaaaacgtgttccccaggaagaaacccgccacagtggacggcaacaggaaggcttaaagtcggaagtggcactggagagtttctacctcgccccaaactcggagccatcagctcccaccgttctgtttggtaacagctttgcgcccagcgctccttccccaccaaacagcagcggcagatagcatctgagaacc

SEQ ID NO: 45516 - DNA, 64 bp, Homo sapiens
  chr8:72460433-72460497
  hyper
cgcccctccgctctgcagccggagcctgggcctggtgcccactgccccgcggggtgtctcggac

SEQ ID NO: 45517 - DNA, 30 bp, Homo sapiens
  chr8:72466307-72466337
  hyper
agggggatataaacgcgtgtagaaaattaa

SEQ ID NO: 45518 - DNA, 310 bp, Homo sapiens
  chr8:72466617-72466927
  hyper
agaagggttttctctcgtcgatttcaccttcactctacggaaatctagcaaggcttatctcgtttctcaagcctaggacgctggtgtattttgaggcagtctcctagaagtcctgggagactctgggagctggtactgtgtgcaggcgcgacctatagctctgcctggtggatctgcaattcgatttcaggcctttttccccctcggcatttttttttccctgactacttgagaggaaaaaaacaaaaactgtataagaaactcgagaagagactgtgggatgcagaaccgcacacgtggtcctgcaaat

SEQ ID NO: 45519 - DNA, 197 bp, Homo sapiens
  chr8:72468805-72469002
  hyper
ctcctcagtggccgcggcccgtcaacactgtcgcgcagtcactggcgcaggttcccagctctcagctgggggtttcggggggagggagcagaaggaatgagacagaaggaacgggaggctttaagcccaccgagggaggttagaggaaggcgctgtggctgtgggattaggaggccacagacgggaaccgcgccgag

SEQ ID NO: 45520 - DNA, 254 bp, Homo sapiens
  chr8:72469313-72469567
  hyper
ccaggaagcactaaccgatgcacacaaggtttcgatggacagggacaggaaaatcggctctgcagcgcgggggagcgcaggctggaggccgggccactgaggtggccccggctgagcgactggcgtcggtttctcctcctagcgctaggcgggagtgggaccccgggccacagcaagagtcgccgggtgaggacgggcccggcccgtggcgcctagctgtaaagggccctaatgctgcgcgtttgtcgcaaagg

SEQ ID NO: 45521 - DNA, 463 bp, Homo sapiens; identical to SEQ ID NO: 6374
  chr8:72470330-72470793
  hyper

SEQ ID NO: 45522 - DNA, 772 bp, Homo sapiens
  chr8:72754490-72755262
  hyper
cgcgaaaggccggggctgtgtggaaccgtcccgcacgtgtgcgatgaatctggctccgctgagaacggatccgtgggctgtctggcgcgggctggggcagcagccgagagttagtctacagagctagggcccgagggtggacctgcgtccgcgtctcgtcacgaaaggaagctctttttggagaggcaaaacgtggtcgcccagatccggcgcagctgtagccgtgggcgctgtgcagtgacagccacacccgccacctgtcacgatcacagttccagggaaaggggaagggtcaaggagaatccagcggaaacttcttcccatctcacgagctctcccttctctccgtggcccccaaacactcgcatttaacgaataatcccatcaagtgagttccagtccgatttaagcggtggttccacatagtctgttggctgcggaaacttctttggtgtcagagtccggtcttcccgagaccacgaatggccatgtctgtaaatcaaaaagaacgtgagatattagagagaaacgattgtctcaaaccgaaacagctctcctacgcgaaccccagatattcctgacttggagtagctaagattttatcagcattctgggaatttgcatgtcctctctctgaactaagattttcattttactggaggttgataatccgagacttgccatatccgttcacgcttcttcctggactttgcccgcaggataatttggtgaaactcatctgactttgaggttctgtcgtttagttcccttc

SEQ ID NO: 45523 - DNA, 261 bp, Homo sapiens
  chr8:72755553-72755814
  hyper
caagggagatttgccgtcagtctgcaacctggtggcagatggagatggaaccaagatttaccctggaagtaggatattagtcaatggctgtcactggggtacaatgttcagaacgatgcaaacagacacggagggttgattcttcttcagggaaatggctggccactcccttgatttgggagaaactaaactggccttctcgttcccagtcccagaacctccacccctttcgaattcttcccaacgggctgaccctgcccg

SEQ ID NO: 45524 - DNA, 364 bp, Homo sapiens; identical to SEQ ID NO: 6378
  chr8:72756655-72757019
  hyper

SEQ ID NO: 45525 - DNA, 303 bp, Homo sapiens; identical to SEQ ID NO: 6379
  chr8:72917125-72917428
  hyper

SEQ ID NO: 45526 - DNA, 290 bp, Homo sapiens; identical to SEQ ID NO: 6380
  chr8:72917515-72917805
  hyper

SEQ ID NO: 45527 - DNA, 584 bp, Homo sapiens; identical to SEQ ID NO: 6381
  chr8:72987459-72988043
  hyper

SEQ ID NO: 45528 - DNA, 88 bp, Homo sapiens
  chr8:73163572-73163660
  hyper
tgcaaccccctggccactccacgctttctccaaaccaagggctgcccgcaaggaaacctcgagccgaaccgcggccggacttcagaac

SEQ ID NO: 45529 - DNA, 331 bp, Homo sapiens
  chr8:73163859-73164190
  hyper
cgagagagcgctgtcagccggccaggcgctggggtccgcgcgagcccgagctctccctcgctgcagctcacaggcagcgaaaatctcgctccgcgagagccctggagaacttctggaaggagttctcaggcccgcgctacttacagtgcaggaagcaagcggggcgtgaagaggaggtagaaacacagacctccctagcaaagagggaggcggcgcagcgtctgccgaggactcgccccttcaggaacaaagtgactcccccgtcccgctgtcctgcagctgcagcagcgcactcccagagtcaagcgtgtcaggtcggtgtggatgcagc

SEQ ID NO: 45530 - DNA, 1271 bp, Homo sapiens
  chr8:73448683-73449954
  hyper
aggttgccacggacccggctttaccctcaaacccaggaaagccgggtcacttggggctagggacggcccccgagcgagcggggctgcaggtgccgcgaggaaagtcagatcttatctgcgctcctagttatctccgcagctctttctccaggaaaataatcctggcaccaccactcaggagccatctgtcttcgccccagttccccggggtcgagcagtcagcccagggtcagggtcctgctgtgggcgggcgggaggacagccctgcagttggaagcagaagggccgagggaatcccgcgaagccgccggagcgcgtcgcggcggggcctcccggggctttcccggccccgggtgcgcggcagccgcgggggctgcgtccctctagtccagtgcagccgggtgggagctgcagagcgaagcaggtgggtgtggagccaggcccggggcagcaggagtggctggcgcgcggaagctgagggaggcaccccgccgaggtgtgggcggtgcctgcccgcgccccagccgcgccctgggcaccagagcgctgtccccggccgagcgcacagctccggcgccgcgaggcagagccccggcgtccccggcggtgcgctgccggctcgcgcagcccagccatcccgccccgccgcccaccttgacagccgggagcgctgaggaggaagagggggagggggaggaggaagagaaggcggcggccgctccagcccgcgggtgcgcggagcgcgggaggaggcggagcgggaggctggggtggccgcagccctgtgtgcgcgccgggccggctagctgcggggcgggggagcggcgccccagagcgccccgcctagcctcccgcgcgcagcctctaccctgctccgccacagacacacacccaccaagcacccaccgccctccgccctccgccctccgcccccgcggccgccgccgccgctgcgcctcgggcagccccagcgagcggcaactcccgggctggcgcggctcgctttctggctccttccgcgcggcgagctcagccccgctcgatttttcctcttctgttccagccctctcttgtctgggtggctgtggcggcggcagggggatggggaccccgtgtggggaaggggttgaagatcgatgaagattattgttcttttaaaggatgccttagcttcctcccgccgcctttcctctgagccttcctactagagaccgtgaaccagagtcagggatgtaaagacagggggaaagcacgccgggagctccagccag

SEQ ID NO: 45531 - DNA, 176 bp, Homo sapiens; identical to SEQ ID NO: 6385
  chr8:73450026-73450202
  hyper

SEQ ID NO: 45532 - DNA, 159 bp, Homo sapiens
  chr8:73450495-73450654
  hyper
gaacacagagacatgcgtgcattttattcttcaagcggtgcgcggtctccgttctgtagcacgattcctgagagggagaacgggtctctaaggaaagagcttcatggctgtttccaacacactctgctaggggacttgggaatacgtttgccctgaata

SEQ ID NO: 45533 - DNA, 30 bp, Homo sapiens
  chr8:73920990-73921020
  hyper
agccaggcttgaaccgctcgcccatgtccc

SEQ ID NO: 45534 - DNA, 138 bp, Homo sapiens
  chr8:74005522-74005660
  hyper
ggcgctgcagttcccgggacgggcccgcaatcgacggtccgggcgccacccactccccgctgccagctcgcgccccagctccagcccggggacctccggggcgcgggagcggaaaagcaggtgctggcggggcggggg

SEQ ID NO: 45535 - DNA, 30 bp, Homo sapiens
  chr8:74791001-74791031
  hyper
gcggctccctggcccgcccagatgcagcaa

SEQ ID NO: 45536 - DNA, 166 bp, Homo sapiens
  chr8:74791234-74791400
  hyper
gcggggcgagggcgcggtaaatggcgctctgagtactttctgtctcagtccggctggccgctcacgcgtcgggcccccatttactctcgttactgaggagacacggctccagttttgacccgactacggttgttttcttcgtgtgtaccgcgaaatgctgatgacg

SEQ ID NO: 45537 - DNA, 30 bp, Homo sapiens
  chr8:74888247-74888277
  hyper
cccagctcagctggcggataacgcgcgcgg

SEQ ID NO: 45538 - DNA, 1185 bp, Homo sapiens
  chr8:75232541-75233726
  hyper
tcccataactaggacgtttccaaatgcacccccaaataaggtacaattccccaacatcctagttacggggttctggcttctatctttaggctactggaggaccagaagcgaaatacgactccacgtgaaaccaatcccgggagcggtcagcacggaccgccaacctcacccgctcagggtgttcgctctaactccacgggagtggcgatttcaaacccggccgggagagggagggatcaggaacgtaatgtgacgggctcaagtgacagcgtcctctctccagcccaaccctcccgggcggcgctccctcccggtggcagcgcagcgctggcgccggccaggtacattcacgcctagctcccctgagtgtggatacacggcccgctccaagaacggggtcagatccagccctcgcgccccagtccggtcccagcgccctctctgggaaaggcgggcgcgggcgcgggggtgggaggcgcccccaggtgttttggcgggtttccggacacgtgcgcccggcgtcctccccgcttccccgcagccggggcagagcccaccgcaccagctcgcggagcagccgagccgcccgttacgccgctcacctccgtccccgtaggtctccacgccgtacccgtcttgcagcccgttactccaggtaccctcgtagcgagcgggggtgcacaggctctgccggaccccgtagcgccccttgaaaccatgtgaccactccccccggtacatccacttgcccttcgtctccacccccagcccgtgccgcttgccctgcgcccagtagccctggtaggtgttgccgctgggccaggtgtagcctccgaccacctcgaagccgtgcgaccaggagcccgagtactcgccctggcccttgggccccgtgcagatgccatgcccgtgcgccttgccctcctcccagccgccgcagtaggtgccgccatcgtcgaagtcgaaccttccgcccgtcattcggggggcagccccggcgcgctccccgcaggggcacggacgcgggcagtgctgggcacggcagggtgtagctcgggggtgggggcccggcgggcgagctcacgacagcgccctgggcagctcgcgctgccgctcggctccagtccgacgccgcccccgtcctccctcctcttttgccgccgccaccgccgccttcctcctcct

SEQ ID NO: 45539 - DNA, 30 bp, Homo sapiens
  chr8:75234133-75234163
  hyper
agctcctgtgagtgcggccacgtgtgtgtt

SEQ ID NO: 45540 - DNA, 30 bp, Homo sapiens
  chr8:75262507-75262537
  hyper
aggggctttccagtcgcagaccccgcgtgt

SEQ ID NO: 45541 - DNA, 30 bp, Homo sapiens; identical to SEQ ID NO: 6389
  chr8:75262744-75262774
  hyper

SEQ ID NO: 45542 - DNA, 958 bp, Homo sapiens
  chr8:75896507-75897465
  hyper
cccaccaggggccagaccttccgggcttgggtctcgggagcccaaagcacgcccacaaaggccgagcgccctggcttcgctgcgttccggagaagcagggcgggctgcttctcccggatctggcgggcctctggccacggctggttggaggtgggggtgggcgaggaggggcgctcaagtcacgtgcccgcgctggggccgcaataaatgctcgcgaacgcgagagagcgacggaagcgctaggcgcctggttctgcgcgtactggctgtacggagcaggagcaagaggtcgccgccagcctccgccgccgagcctcgttcgtgtccccgcccctcgctcctgcagctactgctcagaaacgctggggcgcccaccctggcagactaacgaagcagctcccttcccaccccaactgcaggtctaattttggacgctttgcctgccatttcttccaggttgagggagccgcagaggcggaggctcgcgtattcctgcagtcagcacccacgtcgcccccggacgctcggtgctcaggcccttcgcgagcggggctctccgtctgcggtcccttgtgaaggctctgggcggctgcagaggccggccgtccggtttggctcacctctcccaggaaacttcacactggagaggtaagggcgattctaaaatgcatcgctgagtcgtcaagctgccaccctttcctatctccctttgccttcttaaactgtacttaaaaaaaaaaaaaagccaactgtacagagtggttgggcgcgatgggtgggtgggctacccggaaagcagcgacgatagaaattagcgggagctctagttcttgtaagtgactttgttggtttcacctactttctctgtcgcgcgctttccatttgagttcagagaaagaacagtgtgtgccttcacacttgagaggaaaagctctcaagttgccggggagctgctggc

SEQ ID NO: 45543 - DNA, 30 bp, Homo sapiens
  chr8:76230285-76230315
  hyper
aggatataatacttgggtattcagtaaata

SEQ ID NO: 45544 - DNA, 139 bp, Homo sapiens
  chr8:76316416-76316555
  hyper
gagtcggcagctttagagctccgacaatctgtgccctcgctttgggctgcgccagggagcaaaaaacctctgcttttttgaaagaggccggggcaacaaggtagagagccgcggccagaagcagccccgggccataaac

SEQ ID NO: 45545 - DNA, 574 bp, Homo sapiens
  chr8:76316614-76317188
  hyper
cgagccctcccccctcctagccacagtgaccggaatcccagacttcccttctgatgcataaaacattcagtggcctccagggagtttttgaaattctggcggaggctgctttatccgttgtttcgccccctgggtcaaacactggtccactgggtgagttggaggagcgagtagctcagctatagattaaatttaacctgagccccggtggccgcgtcccgcccgcggtcctttctatacgagtagctttgaaggtgtcaccgagctgtgcccaaatctagaaaagaatgggaggagaactgcatgagcttttaattttcttccctttttccccccttcctgcgtgtaaactggggtaagggtgggcggtaatccccactgattgagcccgcgcggggaggtaaggactccggcgtgggtgccaccgcggttgcgaaaaatcgggttctgaacccggtcagcaggagtggcagcgccccagcagcacctaggcaggaagaggacacttcccgttcgcgtttggtgatggtttcatgtaccaggacatgggtgcggagttgtcctcagaaatagg

SEQ ID NO: 45546 - DNA, 30 bp, Homo sapiens; identical to SEQ ID NO: 6392
  chr8:76319200-76319230
  hyper

SEQ ID NO: 45547 - DNA, 941 bp, Homo sapiens
  chr8:76319436-76320377
  hyper
gccagggttgacatcgcccaagacgaggcgtgacccggggcgggggaggggacttcgcccgcgtcgcgtgaaggatgccctggccttgggctgcaggcgcggacccccgggggctccccagggtgtaggaggcggagactgatccgctctagccccgagcggtccagcgcggggcgactcgcccgcatagtggagattccggcatgaggcggcggcagtcaccgcctggctgccccgcggaggcccgggagagccgctgcggtctcgggaggccgggctttgggacttgctggcccgaccgccagtcgccctggggccttgggaacagggaaatgcgcgcgccgaggcggtggcggcctcgctgctttcagttttcattgagtctgctggttactgtttaacgtccccacccacgtttcagtttgtttagtaaatcgataggactgtgagagtcaggccgctgccctgtcgccattgagcaaagctaatattctcccagcatatggtctaaaatctttgctagagatcgggaaaaagaaacaaacaaacaaacaaacaacaacaaaatccttaagcttcctctcccaagtccccccatccccacccccacttcccacctcctcgctttcagcaaacttcccagcctgggaaaagtgcggcgcgggacagcgcgacggggtgggtgggggacctgctgccgggagatgcggcggcggccgcgcggctgactgcgactcgggagctccgggagcggcccgcgcaggtaagtttctccgccgccgcccggggcccgggctggccgcagcgcaccgccccggcggctgccgggcaggaggagcctcggttcccctcgggcggctgaaggaggggctgagcctcaggacccctaggccaggccgtgttgaaagcagataccccgaggcctcgcccagcctgcgctg

SEQ ID NO: 45548 - DNA, 30 bp, Homo sapiens; identical to SEQ ID NO: 6395
  chr8:76386311-76386341
  hyper

SEQ ID NO: 45549 - DNA, 30 bp, Homo sapiens
  chr8:76417921-76417951
  hyper
caaaaaaaaaaacataatacaagagttgca

SEQ ID NO: 45550 - DNA, 603 bp, Homo sapiens
  chr8:77585200-77585803
  hyper
actggaggtctgggattaaagcgggaagaggcagcggccacagcgaatttcagcggcagctgcagcagctagaaacaagaagcaagagtacgaggtctttaggctgcgtccccctcccgcagtcagggctgccagtgagggaaagagaagaaagggtggacggttgaaatggtgatcactcgaagtcagaagatacaagtgagggctttgagacccgctcaggaataactcatgagcaatcagcacgcgctgagaggaaacgtcttccagaattcgttattattcacattagacattactggagtgggtggtgggactgagagtaaaaaggtgttaaaagggacctaaatggttgatacatttccccccacaccctactgttcatttgggcaacgaaataatttcacagatgcaaaggcgctgtacggtgaactttatatcgtggaaactaacttaactccgagaagagaaagtgcaattagacggcaaccgagtataagaaaatagttgccttggacggaggctggcggggcggggggagcgggggcggggaagtcagagagtgcatgtgcaatgcacaaccccagacggaaattgtaaact

SEQ ID NO: 45551 - DNA, 498 bp, Homo sapiens
  chr8:77586237-77586735
  hyper
aaaagctgtgtgctgctgaggcggggcgtgggaagacaaccacagtcaattggaaggagcccgagtcagggagcaattgctaggacttcggacagagagggcagaagattgtgtagacaggcggtcaaccagagcagcgcggggcaggacccacgagcgcgaagccaggtgccgcgcggtccgcgccccggctccgggcgacgcagggactttgctggcaatgagaaggctgctcgaccagcctgccggagtcacgattccccgcgagtcccaaacacacgcttcactaactactttacagccacttccattgattttctttaacaaataaacataatacccgttacagcaacacttcctcttgccgccacagctagaatgccataagctctaatggctgcatttctccggacagcagttttcacatctccaaataaatcgttttccttcacttcaggtttggagagtctagtcctcgcccctctctataatttggga

SEQ ID NO: 45552 - DNA, 721 bp, Homo sapiens
  chr8:77589893-77590614
  hyper
gaaataaaatacgccgaagaaaaagtctagaagtggaaattaccttttgtctcaatgttaattactccttgcctccaacactcaacacctaaccacctggtagtcctttttggttctcccctaactcggtgctcaatgtcagggtccgagtgctctgcagtggatgtggctgggctggggttgccctgtaaagtgttgaagaggatctagggaaagttctcggagcggcagggaaacctctactcctttcactttgaaataaaaagtggcccaacgttccgtgagggcggcggcgggttcgcgcagagtttagggacagtggaatgggggtggggcagggagtgggagtcagggtcaaaggcgtccgcggagacccgagaggagcagctgggtttcctggcgctgggagcccagaagtagggcgcaagcggccgcggcacagcggagcagccaggtccagccgctcggatcgcgctcgcgccccatagcggcccgcgggctgggctcgggctcgcccgcctccccgctcccctgccagcggcgccgcgctccgcgccccggggcccaccccacgcagtcccgccgccgcttcagcccaacagccctcctcacgctggcgcgctccgaggccaagccctggaggaaactcttgactctgcgctagaacctctctgccccttccctcagcccattaacccccgaccctcacctccagcctctc

SEQ ID NO: 45553 - DNA, 470 bp, Homo sapiens
  chr8:77593168-77593638
  hyper
gtctgtgtttgtgtgtaagagcgcgtgtgtgtctaatgaagtttgggagtcgcgcgcaggggcgcgtagggtgcgagacccggaggtccccatcccctgtcctctccgcggtcgccgcatccggggctccagccgcagcgctgggagctttggaagccgtgaggctccggagctgctctgagtccgggctgcgcgtcatttgcagtctggggaatgttgatcacctcactaattacacctctctctcccccctctccctctccctctccctcgctctcctctctcattcccagagtgcatatcgggaatagacacacaaagacatgcgcactcaacttaatcagccatttttttaaacagggctaaaacgataataattagcagaataaagacatatcggattttcatttcctttcctccttttcccaaccccttcacaaccaaacagcgagaccgcggtcggcacatgc

SEQ ID NO: 45554 - DNA, 674 bp, Homo sapiens
  chr8:77594000-77594674
  hyper
tcgctcgctcctgctcgctgtcgcacacatcccctcatcccgaccatctcttccgctctgccccccttttctatctctttccccttttttttggctcaaggttttgctccgctgagggagggagggggcactgagggacctgattttccactttctttaggggggctgcgtttttccggatttaacttttggattaagtggcggaggatcatctacgtttgcttgggcagttttctctccttttccctgtcttttcgggttttgccttccccgcgagccccgggcattctagtggctgggggaagctgtcagctccgcaacggcgcgggcactgccaggggtctccgctcgccccgcgcccctgcaccccgatcgggatgactggtcctccgcactcatcctctgaaagtttggacgttggtcggtggggctgggagcccctctctccctgctctttccctgctttaccctccaccccccaccccaccttattcagcctcgtttttcttcctccttttaccacccgcccctcttccccttctcaagttccccgaaggtcgcttagtgtgcggggctggcggaggcccgggggttcgtgagctctggggaggggattccaagaggctggggtgaacgctggggctggggctgcaggtagacacccgcccaccgga

SEQ ID NO: 45555 - DNA, 305 bp, Homo sapiens; identical to SEQ ID NO: 6405
  chr8:77594757-77595062
  hyper

SEQ ID NO: 45556 - DNA, 122 bp, Homo sapiens; identical to SEQ ID NO: 6406
  chr8:77595279-77595401
  hyper

SEQ ID NO: 45557 - DNA, 30 bp, Homo sapiens; identical to SEQ ID NO: 6407
  chr8:77912333-77912363
  hyper

SEQ ID NO: 45558 - DNA, 700 bp, Homo sapiens
  chr8:79428283-79428983
  hyper
aaatggaacagtccatgcagccggggtgacgggggagcgctcggaggaaggacgctatgcagagaaagcccccctggctcttctctctcaatccataatccagcgatgctgcagctgtaaaagcattaatagaaaatcaatccacaacctcgcggggcagcgatcgtcgagcgccgtttccaggctgccttccctggggtcgggagcggccccgctccccccgtggctggcgcggaatgtggtgatccgtcccggggcggggatgacttcatgcagccggagctccgcggcgggagcggaggctgctgctggcaggtggggcgcgggccggcgcgagctgaccgagcactcggcgggcgcggcgggactgcggcccgtggcggcgtgcgcggggacctgcgctgactaggtccggggaaggtaagcagcccggcaccggtgcgccctggccgcactgcgtggagctttccgcttggttaataatggggtttgcagcacggagggaagaaggggagaaccccgctgcattctgcaatgagaaaaggagcaacaactaggatggaaatgttgggcggccaagtgcagaggttggaggagcagtgttactgggcaaacaaagaaggcgttcttgcctctatactcttttgaacgtgatctaccatttcagtgccagattcgcgtagacagtgaagaggactca

SEQ ID NO: 45559 - DNA, 557 bp, Homo sapiens
  chr8:79716725-79717282
  hyper
agctgcaagagcccagctactcgccgaacccgggccgcctgcgtgagtaacttggggcggccaggagcacgggaagggcgccagacagagagcctttggctgcttctgagaccggctgtgggctgccaccgctgagcggcgcggaggctgcagcgttccctctcaggacagaaagcaggcgttggggactgttactcgcagcctgccaggggcagcagccgccccaggttcaagtggctatgtgccaggatactcaggcgcggctgttggctgcccatgggagagccagtgctctccgcaggtccaaagtgcaaggccgggctattcccggacttgcctaggagcaggggcccccagcgcgtctgggattgccccggcgcgtcgggcgcgcgaacttgtgcgcaagggagaagagcgcttaccatggaacatggtctgcgggaggcgggcgtagtcatgatgaccgcaactggagcaggagcaagctctcaccgcccatagtcactcccaggaccctggtcttccgcggagttgccgagtctgtgttgggcagggtg

SEQ ID NO: 45560 - DNA, 201 bp, Homo sapiens
  chr8:80523883-80524084
  hyper
aagaaaattgcaaagtcaaagcggtcccatcccgctgtttgaaagatgggtggagacggggggaggggatggagagaactgggcacattttacggtattgtctcgtcgaagaaaccgctagtcctggggtgcggtgcagggaggtaagacggcgggggacagggtgggggtaggacctccgctcctttgttttagggcaag

SEQ ID NO: 45561 - DNA, 30 bp, Homo sapiens
  chr8:80524452-80524482
  hyper
ctgaccactgaccccgccctccccacgctg

SEQ ID NO: 45562 - DNA, 911 bp, Homo sapiens
  chr8:80524868-80525779
  hyper
gcgctcagtggccccggggtgaaaaggcagggtggggcctggggtcctgtggcagctggaagcacgtgtcccccgggacttggttgcaggatgcggagacagggaaagctgccgaaaggactccatctgcgcggctccgccctgccctaccctccccgcggagccggggagacctcaggctccgagactggcggggaagaggaatatgggaggggcagttgagctgtatgcagtcctggaacctcttttttcagccccgcagtccacaacggcccgagcaccccttgatgtgcgcagacccccggcgtggctctcagccccagcaccgagcccctcccagccaagcgggtggctctgcagaaaagctggctcgagccccgcccggccacacaaaggcgcggccccacccagcccgggcgcgagaccgcagaggtgacccccttcccagggattcagggagggctgtctcttctcgcccacccacggtccgcggagctcggggctttttttcccccagcccaagccccccgcccaccctctgttctctatgattttccagaatggagaccccgcgaggggcttctctaagggagaccctcgctcctccagcggggcgcggctcggccccacccctcccagctgaggcccagagccgcctaccgctggccgggtgggggcgcacgtggcgactgggtgtgtggagcgcagccagccctgcagagccccgcgccgcgccctgcgctcccctccccggagttgggcgctcgcccccgcggtgcagccggggagaccggtttctgcgcagtgtcctgagctacccccgctttccacaattcgcagttcactcgcacgtccagaaaggttctgagaatgggtggtgggggcgatctcgcctcgctttctgcacccct

SEQ ID NO: 45563 - DNA, 505 bp, Homo sapiens
  chr8:80677511-80678016
  hyper
gagacagtaagtggaaggagccgaaagagaaggggaaggccgacagggaggccactgaggagagcagaggcggcgacagtttggaggcggaggtgaccacagggagcaccggtccgaggctgccgctagggggcgctcgcaaagcaggcgcctccggatgtgccgagcccagcctgccctggtggtgcggttccgtgggtgaggccgtggtgcccgcgttcccgtggccgttctggggcagcaacagcgggtgcgcgatgtgcgggtgatgtccgaagacggtcccccagggaatgtgtccgaggcccgcgtgggcgccgctcgcggcttcccgctgggaagcgtagttgttgagatgcgaaaccagtcgaactcgaagcgggtcagaggcatctagtccttcaatgatgctcagataacgcgcaacttctgccaggcattcccgaaatcccaaactccgatagtccatagcaagggcgtgcgcgtcaaagtaacctaagcaaaa

SEQ ID NO: 45564 - DNA, 180 bp, Homo sapiens; identical to SEQ ID NO: 6411
  chr8:80695877-80696057
  hyper

SEQ ID NO: 45565 - DNA, 82 bp, Homo sapiens
  chr8:80696101-80696183
  hyper
cggtgggcccgcgggctcctgatctgtccaggcccctaaactatcacaaggaggatatttgatgaccgtctttcttccctcg

SEQ ID NO: 45566 - DNA, 30 bp, Homo sapiens
  chr8:80696441-80696471
  hyper
cgctcctattgttggcgactttgtttccaa

SEQ ID NO: 45567 - DNA, 539 bp, Homo sapiens
  chr8:80803548-80804087
  hyper
gacagaaaaccgagccctatttgttattagtatttttttttttatactctcaaatgccaccggcacattcttttaaaaaaaaatgaaaggaaagaaagaaagaaaaagaaaataagagaggaaaaggtcctgagaaatgacggacgcttgaacctcgggcccgggaagaccagcgccctttggcggctaggcctcgggggcgtgcggagggcgggcccccgcgcggccgccgctttcccaggccgccaggggtgaggaggtgacgctgcgggcttggtggcggctggtttttcacacaggaatcctcctcgccaccgctccctcgaaggccgccccccgctccacccccagcactgggcgcccgcgcctcccaactcagcccgccgccgagcagacggcgcgccgcggtaattgggcacaggggcctttttcagagtcgctcagtcgataaatgaaacgtcagctcccctgtgatcccgcgtgtgtggggcggcggtggctgcgagccggggcgcagggccggccggcagccgctgctc

SEQ ID NO: 45568 - DNA, 30 bp, Homo sapiens; identical to SEQ ID NO: 6414
  chr8:81083416-81083446
  hyper

SEQ ID NO: 45569 - DNA, 30 bp, Homo sapiens
  chr8:81084041-81084071
  hyper
gggaaccgggatggcgtttgccttccacca

SEQ ID NO: 45570 - DNA, 1143 bp, Homo sapiens
  chr8:81397817-81398960
  hyper
acagcaataagacactcggggcggtgcattttctgtgaaatgactactgtccggggcccgaggtgctgcctcgcacaatgcatcaaaggaggttgtgtccgtggtcgtaacctcttcgcgtgaaaggcaccgcctggtccagtctttgtgaaggaacaaaataagttcacttccttgggcaccgccacccaccctcagcaaatgacaaggctggagcgcagctcccaccgcacagttatttgcaaagtcccaggtgaactcgtggcgagagaaggaaaatgcgcgtcccgggcgcgggtaggtgcgtgtgggcagcggggaggcggccagaccctgacactcgccagctgtttgtcctccgcgtagcccggccccggccgcacacgcccgccccctccctgagacccccagcccgccgcccggccttttgtccccaacccctcggccgacttccttccccgcggccgcacccccgcccccaggccggaggcgcagcccagcccctttcccggtcccctggcgcccccaccccaccccagcccagccccaagcccagcccccctcccccagcccggcccccaccctttccccctccagcggttactgctaccccggtgcattgtgggcgcacggtccgttgttcatttgccattcgacctccgccagggcctggtcggacggaaacgctccgccggctttattgtcgcttcgttatgtggcggagccgagcagtttagcgtgcctctcaccctcagcgcctgcgaagccggcggcggcgtcgggactcctcggcgcgcggaggaaggatatctgtgtggaggatcggtgtgtgcgcgcgcggctttaaagagggggcagcggagggtctccccgcactccgctgctcaacttcgaaggcctcgctcgctgcaggctcgctcctcacctctccgccgcccgcccccttctccgcgcgggacgctgcccggagcgcggcggggcgggggtggaggacgagagagcggtcggaggcgtcggcccggcagcggcagcggcagcggacgcgtgcagcagacccgggagcgagcgcgagccgggctgccgggcgagagggcgaggccgagccccgcgagaccggaacgccgggggcgggggcgagacaga

SEQ ID NO: 45571 - DNA, 217 bp, Homo sapiens; identical to SEQ ID NO: 6417
  chr8:81478206-81478423
  hyper

SEQ ID NO: 45572 - DNA, 347 bp, Homo sapiens
  chr8:81490276-81490623
  hyper
gccggcgcctcccctccgggggcctggctcgcagcccgtggggacgagggcctgcacgtccccgggggactgagggctgctctgggtgaggatgggaaggcgggtgccgcttccgagggctcctctcgccaagggagagagccctagacccgttcccggggcgctgctcttcccgggctggggtgggctgcagcggcggcaggacctcgccccctcccggccgcccgcacccccgcgcctcctcctagggcccggtgtcccacgggcctgccgcggtccccgccctctccggctcccgcgactccctcccccaggcagctggggcaggaattcggctggagaatctg

SEQ ID NO: 45573 - DNA, 31 bp, Homo sapiens
  chr8:81490949-81490980
  hyper
tcttcccctcctcccccgctcctcttcccgg

SEQ ID NO: 45574 - DNA, 101 bp, Homo sapiens
  chr8:81785240-81785341
  hyper
ggttctctcacaagcgcctgtgatggaaactcatcgacaattgttcttggttggaagaaggggctgagagattgacaagaaacaccgctttctggtttcaa

SEQ ID NO: 45575 - DNA, 1287 bp, Homo sapiens
  chr8:81785543-81786830
  hyper
tgaggaaagcgggagccgccgcctgggagagacgcaggggcccaaggcgcaggcaaatcaacagttcctcgcgctgccccgcgcggccgcccgcgccgcctgacacacccctcctggccgggtctctccccggcgccgctgaccgtcctcggccaggcgccttgccccggggcccgggcccgtccccctccccgggctggcgggtcccacgcgcgccaccgcgcccaacacgcaccttcaacgcgccccgggccgggcccctggggactgcgtggccgggtccgaggggcacgaaacgctcctcgccgtcctcgtcgtcttcgtcgccgtccaccacctcgacgaccacctcctcgtcctcctcttcctcgtcgtcatcctcctcctccgcgccccctcggggcttctcctccacacgcccgagccccctccgccgcctgctcccgccctcctcgtcctcgtcttcctcccctagaagcagcagcaccggcgacgaggcggcggcggcggccccggtggcccgaggggggccggtcccggcgctgcgcggcggcggcggcagcggcggcctccagctctccggggcgggcgccggggccgggcccgggacagggggcgggagcccgggtagggcggcttccttggcgggcgcgggcgccggcccggcaggctgcagcgcggcgcccccccggcggctgcccaggctggagcgcttggctagacgccgcgcctgcatgcctgagcgcggggttgcgggccgcggcgcggggccggagagtttgtcacctcctcttcctcctctgcctccgccggtggccgcagggccggggactcgcggccgcaaggggctgcaggagccgccggccaggacccgcggctgccactggctgcagaggcgcgggcgccgccttcgctggaccggccggcggggacgccggcggccggcggctacggcggggcggcgcggcggccgcgggcgggggtgggtgtgagcgagcggcgcgctgccgcctccgccgccgccgccgccgcccgggagccgcgggccgcgctgcgctccatgcggccggcggccgagcccgcgcgcgcctctcccggccggctgcgcccgcgcgctccgggcctaccgctgccgtgcctcggcgcgagctgtttgtgttgtatgttttccaccaccgcccccctcttcgcgagccattcctcacaaccctccggtccccccgctcagacaaaacccggactggattttttttttctcttacccacagtctccgaaagtctggcgct

SEQ ID NO: 45576 - DNA, 1226 bp, Homo sapiens
  chr8:82192585-82193811
  hyper
aggcgcccgagaggccgtcgcgtaccctggcaagaggagctggttagcacctcccgaccccgagaaggcccagggggcgcccggcgggcggggcggggaccgggcgaggcccgcctcccattggccgcatagcgccgcccagcgcgggccgccgttataaagcagccgccggcgccgggtgcctcacagcacgctgccacgccgacgcagacccctctctgcacgccagcccgcccgcacccaccatggccacagttcagcagctggaaggaagatggcgcctggtggacagcaaaggctttgatgaatacatgaaggagctaggtgaggcacccggcctggcagcgcctgcaacgtggcgtgttgtgcggtcgtctgtccctaggtccccgtcagcgtgccagattctggggcaggagatgctcggcggcctacccccatcccctcccatcttccccaccacgcggccgttgggtgcagcgcgcgcagcaccacgcgggcaggcggcgaggagcagggagcgtgcgcgcctcttgcccgcccgcgggccgcaagattccggaggtggtccaccccgtggtccacctacctctgcttctttcccttcgcccaaacggcagcccttccgcattgcttcctgtcctttagcgcgcgcacccgtcacctcacgctgcacttctttcgaccccctccaggcgaccctgtatttcccttttttccccctttactcatccttccccttcctgccaccattctgtctctcccatttaccccatcgtggcagcacccactcccctttccctccctgtcgcatcttttgttccctgtggcgcgcaggtcaccctccgttttcttcatggggacgcggtgctggcgcgcagtttcccgcagaaatcctgtggaggggtctgagtggcgctacagcttcagcttgcattcctctgtcagccccgtctcccccaggtcctctgctcgcccttaccagttgagccgaaccctttggattggtaccccatggaacaccagggcccccgagaagcgtggcgctggcggtgccgacctgctgctggcactgccgggccggggcgccgcagtgggcgggtggcctgtgggaggagcgcaatgaggcctgggggtggccgtgtgttgccatcctggcctctgccacttgagggtgaggaggaaggaggcagtgggctttgctggaaaaccgtaacagaaactgc

SEQ ID NO: 45577 - DNA, 173 bp, Homo sapiens
  chr8:82543133-82543306
  hyper
ccccaggggctgaccgcacaccgcagaccgccctcgcccccaccccagcagagagaagcgccgaacccggagagggtggcgaggggggcggggaaaacaggagcctcacctcgagtcggcgagcggggcggggaaaacaggggcctcacctcgagttgtcctgctagctgggt

SEQ ID NO: 45578 - DNA, 30 bp, Homo sapiens
  chr8:82598619-82598649
  hyper
gctgggccccgccccgagctgcgccctgcg

SEQ ID NO: 45579 - DNA, 34 bp, Homo sapiens; identical to SEQ ID NO: 6423
  chr8:82633553-82633587
  hyper

SEQ ID NO: 45580 - DNA, 30 bp, Homo sapiens
  chr8:82653628-82653658
  hyper
atttacacagttacaaggaattatggcaag

SEQ ID NO: 45581 - DNA, 30 bp, Homo sapiens
  chr8:82754298-82754328
  hyper
cccgtacgagaacccgggacagcgaccgcc

SEQ ID NO: 45582 - DNA, 457 bp, Homo sapiens; identical to SEQ ID NO: 6424
  chr8:85094383-85094840
  hyper

SEQ ID NO: 45583 - DNA, 118 bp, Homo sapiens
  chr8:85094922-85095040
  hyper
cgttcagatggcaataaagattgacagtggctttgcccgtgacaacgcccccagcatcgcgctgagccaggttccctgagaaccgggagggggaaacgcagatctagggaggagggaa

SEQ ID NO: 45584 - DNA, 476 bp, Homo sapiens; identical to SEQ ID NO: 6426
  chr8:85095301-85095777
  hyper

SEQ ID NO: 45585 - DNA, 30 bp, Homo sapiens
  chr8:85096021-85096051
  hyper
tctcggagtccgcggcgaccgtgcccgctg

SEQ ID NO: 45586 - DNA, 131 bp, Homo sapiens; identical to SEQ ID NO: 6427
  chr8:85096577-85096708
  hyper

SEQ ID NO: 45587 - DNA, 30 bp, Homo sapiens; identical to SEQ ID NO: 6428
  chr8:86019335-86019365
  hyper

SEQ ID NO: 45588 - DNA, 49 bp, Homo sapiens
  chr8:86089466-86089515
  hyper
cccggcgtgacaagcggcccagactcccgtgggcgccgcacacctgttg

SEQ ID NO: 45589 - DNA, 30 bp, Homo sapiens
  chr8:86089831-86089861
  hyper
taccaagttcgtgtcgctgctgcaggaggc

SEQ ID NO: 45590 - DNA, 30 bp, Homo sapiens
  chr8:86090171-86090201
  hyper
cttctgtctccgggcgcagggacctgaggg

SEQ ID NO: 45591 - DNA, 30 bp, Homo sapiens
  chr8:86132407-86132437
  hyper
tgcctgaggcagagcgcgacggaaccgagc

SEQ ID NO: 45592 - DNA, 57 bp, Homo sapiens; identical to SEQ ID NO: 6430
  chr8:86132758-86132815
  hyper

SEQ ID NO: 45593 - DNA, 67 bp, Homo sapiens
  chr8:86157558-86157625
  hyper
gtggtgattaccatcgtcattattgttttgtatttgtaatcatcactgccacgaccatcaccgacct

SEQ ID NO: 45594 - DNA, 30 bp, Homo sapiens; identical to SEQ ID NO: 6432
  chr8:87354736-87354766
  hyper

SEQ ID NO: 45595 - DNA, 90 bp, Homo sapiens; identical to SEQ ID NO: 6433
  chr8:87527031-87527121
  hyper

SEQ ID NO: 45596 - DNA, 945 bp, Homo sapiens
  chr8:89339036-89339981
  hyper
ccctgggtgaaaagcatggaccggctacaattgtgtctttgagcgcgcagcatcgtgctttgtgctgccggggataacggattctgggtctcacacgcatccgtcacctaaaacacccttaaactgaaccagggtctccacagctggaagggaaacaacgtgctgggacccaggctgctctgagctacaaggatcccaggagtgaaggaaatgtttcagggagcagcccaggcagcggggggaggaagaaagccctcgcactcttacctccacattgaaatactgctccgttccgcagactgtagcacataaaatccaaagcaaggtttgcaagaaaaacacccccgaatgatgcacgaaatccaaccgtcttccagtgctgaatgtgagtaagatcatagtgaactgtgcttcaatggatggacgagctccccttcgttttctccctctctccctctccctccctccctcgtttcctttcaaaaaaaagtcctccgggtgggtaaggagcctgcaggttcacccacagccgggcaaggggaggagacaggggccccgcgctcggcagcccccgagaggcagcggcgaagacagggtcagcagtagttcctgttcaccatcctccggggtcagtcaccgggaacgtggcgcctaagttcaccggcggttccggctcaaagagcctagtcgcagccgcagcagcagcagccgccgccgccgccgccgcctccagcccgtgcgtcctcctcctgcactgcctactcctcctcctcctccgccgccgccgccgcccccagctcctgcgggaagggcctccgccgctcctcactctctcgcctctgcttctccttccctcctctcctcgctcccctccagaatgttcatccgtaatctacataactcctccttcccggggtctgcctggctctcggggcccttggcgcg

SEQ ID NO: 45597 - DNA, 12 bp, Homo sapiens
  chr8:89340040-89340052
  hyper
acacacacacgc

SEQ ID NO: 45598 - DNA, 155 bp, Homo sapiens; identical to SEQ ID NO: 6437
  chr8:89340081-89340236
  hyper

SEQ ID NO: 45599 - DNA, 711 bp, Homo sapiens
  chr8:89340273-89340984
  hyper
cgcatctaaaaacgagtgcgcccctctccagccatgagctgggtggggctcaggctgcggaccctagtggggcctggggagcggcccaaccctggtcctggagagcggtcggcattcctgaggaagcggccctggaagaataggggcgctgggaatcagaggagcgcctggtcactgagcgcccctgggtggctcgggtcggtggccggggctgaccaagtttgggaagactgagatagcaaatcccgaacgtccaaaactttgttggggtcccgagcctgtggcctggtgtcttcctgaatcccctctaccatagctacattccgccttccaggcttgaggagtaggcacagggttttggtggcggactagacaaatacagaagcgggatgaaaacgctcactttccaagtgaacggtggacacacgcgcacagtgggacccgggagagatggtcctgggtgttaacaaaacatccgatgagagggatgggggcgctggaaagaaaccggctgcgggagccaggggaagggttggggaaagaaggagaagaagcagcctgaggaaaggcgagtaaagcagctggcaagggcgggaggaagaggctgctcgcagaccgagcgggggagaggctggcgggagctaggagagctgcaggcaagagggggaggcggctggcaagaagcacgggcgaacgcgggcagggaacttc

SEQ ID NO: 45600 - DNA, 30 bp, Homo sapiens; identical to SEQ ID NO: 6439
  chr8:89928884-89928914
  hyper

SEQ ID NO: 45601 - DNA, 220 bp, Homo sapiens
  chr8:90770541-90770761
  hyper
ccaaatggcagtgaccgcttggggccggcctcacctcgtcacctctagggagcccttcaagcttgggagatagggagcacccacccttcaagctctggcaccgtagggagcacaggcttctctggagatgcagcagttgcattcctccacacatctctccattaccctttctctccttccctcttactcctaggcgttctggctccgtactccaaaaatc

SEQ ID NO: 45602 - DNA, 211 bp, Homo sapiens
  chr8:90914086-90914297
  hyper
ggtgtggtctggggcgggcctgatgagcacctggattttcacccggcgtgctggtaattcctacacttgtgggtgtttgagagacatgaagaggggaggatgacctcttcccggaagcgggacttccataaaagaagcgtggtgggcgggtcccgggcacctgtggtttggtgagtcctccaggtaactgtgatgcgggggtcagcgggag

SEQ ID NO: 45603 - DNA, 30 bp, Homo sapiens
  chr8:90996367-90996397
  hyper
gcccccgtgtggtccgcccatgctaacttc

SEQ ID NO: 45604 - DNA, 30 bp, Homo sapiens
  chr8:90996941-90996971
  hyper
cttgggcgcttgcccgccacctggtggttg

SEQ ID NO: 45605 - DNA, 30 bp, Homo sapiens
  chr8:91012992-91013022
  hyper
atattctcattttacgaatgaggaaagaaa

SEQ ID NO: 45606 - DNA, 243 bp, Homo sapiens
  chr8:91094840-91095083
  hyper
aatcaccgtcagcgtcgaaatggagccagatctcgaaaaactgtgaggctgtgatgagggatgactgcaggtgggattctgccattgtacagcggggtgtgtgtctgggtgtgtgaatatgcgtgtgtctgtgtccgcgcgagggggagtgagcaaaagctcagcgtgtgcgcgagtcagggctgcggagggagacctgggcgcgggcgctgccgggcgctgtcctcggtgctgctcagctca

SEQ ID NO: 45607 - DNA, 71 bp, Homo sapiens
  chr8:91095141-91095212
  hyper
cggccccaagccgggccacgcctcctccagcctcccattcctcactccccgcctcttgctctcaccagcct

SEQ ID NO: 45608 - DNA, 560 bp, Homo sapiens
  chr8:91657127-91657687
  hyper
tttatctaacaaactctctttcgaggctccgcgttaggtatgttttatgtgtaggacagacttcccaggctgcgatggaaagtaatcgtaactcctgccgtcaatgtcacttctctgctggtatttatctgatagagcgccctcctagggccgccacaagaccgctcaaaaacagacttggagagggataggccagcgggaccccacttaccgaaaacactgcattctgaagcccaaaaggtatgggtgtcagtctggccagcgccaccactttcaggccgcttcctccctccactacgcgaataaccgcgctcagcttctcgctgctctggatcctggcggccacccaggcggtgaggagccgcttgcagaccacatgggcgatgaaggtgccgatgaggacgcccaccatcatcagacccatgcccagcacgaagccgtacaggtagccagcggccacgttgagcacgatgtagccccagccgcaggggaaagagaccacgatgaagcccacgacgaagagcaggacccccagcagcgagtcaaggctctccacccac

SEQ ID NO: 45609 - DNA, 604 bp, Homo sapiens
  chr8:91996904-91997508
  hyper
atgtaactgtcctttccgtagctttgactaaaacaccagcaatgaaaaccttgtgccaccgggtggagggggcaaatcgtcttgaaagcctcccaccgcctggcaccaggtgctggggcagagccaaggggagctgtgtacttagctccttttttggcgatggctttggtctcggccacttgcccctccgtcgggctcccctggccccctacactttctttcccctcatccgacgctctcgctcccatcccactcccattcagggtccacagggtactgaaggggccctgagagatttcccgacccacctcagagcttctcttcctcgcctcaactttcccggggtcgggcctgggagacggcgcccacccgcctcctccacaccacggggcccgacttccgtcccccagtgtcgctcatcctccctagccacttaccgactcaaaatccacggggatttcggggcagcagcgtcgccgcgctcagcccacacgcggaggccgagcgccctgctgcccgtcggggaacggctcctgccgctggtccgctggctgaccgcggtggcggcggcggggggcgaggggcggggggcgaggggcggggg

SEQ ID NO: 45610 - DNA, 486 bp, Homo sapiens; identical to SEQ ID NO: 6442
  chr8:91997527-91998013
  hyper

SEQ ID NO: 45611 - DNA, 30 bp, Homo sapiens
  chr8:92053389-92053419
  hyper
tgctctaggaaagacggataaaaagcagcc

SEQ ID NO: 45612 - DNA, 30 bp, Homo sapiens
  chr8:92082402-92082432
  hyper
tcacggcagggtcacggtagcgcgcacgcg

SEQ ID NO: 45613 - DNA, 378 bp, Homo sapiens
  chr8:93113863-93114241
  hyper
gggggagagggggagggaaggcggctatttttagtaacagttgtggctcacatcctacttcccggaatcatagtactcaaacttttccaagggttgaccgcccttacaaaaaataaaaaatagcacgtttcaaaaaatggatctgagcgccttgtgctgacctagccgtatttgctcaaagcaccccagtcagcgccaggtcccccccgggaaagaggtctgggtgcgccaaccaacccggtcctttcaggttcgcaaagagggcggtgagcggcgggccctggagcgcgtctccactggcccgggggcttcaccagaggggtttctggaaaacgaaaggaattatccggacgtggctccaagtctggaccccttcgg

SEQ ID NO: 45614 - DNA, 205 bp, Homo sapiens
  chr8:93114306-93114511
  hyper
cgacgggaacacccaggagggccggggcggctgagtccagagcgcgcagaggtcgggcggggacgactctccccatcggcccctgactgcgaagcccgggaccagcctcgggcgggagccgccgtccgcccgctcacccaggagcttcccagtccagcaccccaaacggccaggagtaacaaggaaagttcgcaggcaggcgcag

SEQ ID NO: 45615 - DNA, 869 bp, Homo sapiens
  chr8:93114733-93115602
  hyper
atcggttgttttgtcgggggagaaacccactcgtcatcttcctgctcgcataccgtgactatggagagggaagaaaaattatttttaaaagacactgtggggaatataatagtaaaaactgcatcctcggctgacccgcgaagttcagtgtcatcgcagaccggagtcacccgcgatgttcctctttgccctggtgcgtagtcctaccctaattgagcgacaagtacagcctggagcctcgcggtcgaataatccaaacgaagatgacggtcatcggaacagtaattaataacagtcaggggcccgaccccgccgcccgcccgccggccaagccctaccgcggacacttacactgcacagggccggagagtcccaccatccgccacaggctccgagctgcaaataaaacttcccgtcgtctcggccggcccgcggggcgacggggcgaggacgcggcgcggcttccctcgcgaggccagagtgtccgcggccactcgcccacgcgcgctcgccacgagaccgcggagtcgcgccgcggagcgactacggccgcccggcgctgcgcagagagagctgccgtgcaaaaagcccggggtcggggacgccagccaaacgcaacctccacgcagagcccaagacttgcggagctctgctcccctcctcccgcctccctccctccctccgcttttctgttgttgctgctgtggcagacaaatgtgatgtggggcgcagggaattgccactgtcacaggcggcgtctgcgtctccctcgcccgccctcgctcactctcgaggaaggcgacgcatttatctgcagggcggccgggcgtccgccggggagcaggagcgccgcgcgctgtgcgccgaga

SEQ ID NO: 45616 - DNA, 30 bp, Homo sapiens; identical to SEQ ID NO: 6446
  chr8:93115883-93115913
  hyper

SEQ ID NO: 45617 - DNA, 812 bp, Homo sapiens
  chr8:93977738-93978550
  hyper
aaagggggccccaaaagggaacggcagaacccagagagctgcactgacaagtaagcgaccgcgagtaatcggtcagcacaaaggagccaatcccgagccgcgtggaagaccttgggaggtgggcgggactaacgtgtccagggcccagcggctggcgccagacacgctggcagggcgggaaccgcgcgttccttagcaaccgcaatggccacgcccaccgaacccagcaccctccatcccccatcccgcagccagcgccctactcaacgggaacgggtccttcagtgatcaccgtacctactgggtttcccggactccgggtttctcttgcagagcctccctccgcccagccccaccaagtgccgctcccagggacggaacgatcgtctcccaaacgctttagggctcgctaaagaggtgcgcccgctttcattcccggaccccgagcttcccgggcagggtctccccaatcccctcgcactcgccggacacacacctcagctctgccaaggcaagggccgacaaacttcgtgtcctgtgggaaatgttgctgtccacggttctgtcactcaggggcaggggcgggacaagccagccgcacacccctactcccaaagggtgaggcggaaaagaggcgaggctctgcccccaggggcgggaccaggcctcagcctgctctcggattggtcggcctttctcccgtctgtacgccggtccaggacgcaaaggcgctggccctgaggcctttccctcattttgatgccactccggagttctaatacctgtctcacgaggtgactgtagaaattaaa

SEQ ID NO: 45618 - DNA, 36 bp, Homo sapiens
  chr8:94712352-94712388
  hyper
attcagcagtgaagcggacgcgtctggtacgagact

SEQ ID NO: 45619 - DNA, 30 bp, Homo sapiens; identical to SEQ ID NO: 6449
  chr8:94712616-94712646
  hyper

SEQ ID NO: 45620 - DNA, 353 bp, Homo sapiens
  chr8:94713054-94713407
  hyper
ggctgcagccaccgccggcggcgaagaggagcccggggcccggccggctgccacccacccacgccaccgggtctcgggtccccacactgccgcgggcagtgcggaagcctaggaggcagccgggcgcccaggccgcgctgcgcggagcagccggagcagccacctccccagttaaggccaggcccacccggcctgggccttttcctgtgcctacacagtccggatagtgaggtcaggaccccatggagagcagtccgcgccgggagacgctgggtcgttgatgggtttacgccttcaaagctgcagaatgcccggggaatgtttgcatgttaaattaacgtgaagccttctca

SEQ ID NO: 45621 - DNA, 210 bp, Homo sapiens; identical to SEQ ID NO: 6451
  chr8:94929136-94929346
  hyper

SEQ ID NO: 45622 - DNA, 10 bp, Homo sapiens
  chr8:94929748-94929758
  hyper
gccgggcagg

SEQ ID NO: 45623 - DNA, 4 bp, Homo sapiens
  chr8:94929775-94929779
  hyper
cggg

SEQ ID NO: 45624 - DNA, 232 bp, Homo sapiens
  chr8:95003742-95003974
  hyper
ttgatttcagcagggactgggcgtctgcacagagctcccggctccccgcggcgggggcaggagtcaacgccgtcagttacatgctcgtcagatgtgcacgggcgccacacacgatcctgctaacgtggtcggagaaatatgacctcagcgcaggtgaagcgtgggcagctgacgccacggtgatgtgtgcagatccggtggggactctgacgcagccccagggcaaaaccaa

SEQ ID NO: 45625 - DNA, 485 bp, Homo sapiens
  chr8:95246498-95246983
  hyper
cacagctcccccatccgccctctggcgcttcagagtctggaggaatcccgagctgcgcctccctctccctgcatccctggcagagaatttcccctcccagcgcgggggagcccatccctgaggactcgggcaggtcagatgagaattggtagaaagtgaagcgccttttcctcgcgctgagggcaaagccagtgtgcagccgcctgtgggtgaggagcttttatgacaatgaatcccgtgttttatgggagggcagtgtggagacagcgcgggccgagtccctgggttccggggcaagactgtgggcgtctcccgcggtgactcagagatgctgccctgcctcacaccatctcgcaccatctctgtggaggccgtgaccttcattcactgccgtctgtcactggggggtgacctcgcagttgtcagagccccctctcctggggctcaggactgggatcacccccgcaacccggcgcttccagctt

SEQ ID NO: 45626 - DNA, 12 bp, Homo sapiens
  chr8:95651256-95651268
  hyper
acgcacggggtt

SEQ ID NO: 45627 - DNA, 711 bp, Homo sapiens; identical to SEQ ID NO: 6455
  chr8:95651324-95652035
  hyper

SEQ ID NO: 45628 - DNA, 820 bp, Homo sapiens; identical to SEQ ID NO: 6456
  chr8:95652419-95653239
  hyper

SEQ ID NO: 45629 - DNA, 50 bp, Homo sapiens; identical to SEQ ID NO: 6457
  chr8:95653290-95653340
  hyper

SEQ ID NO: 45630 - DNA, 901 bp, Homo sapiens
  chr8:95653852-95654753
  hyper
cttggagccatttcagtcctccgcaacttagctcaggtggagaggccggcgctaccgagccgggttctttgcccgtcgggggacgctccgccgagacgaggtggggtctcggaggccccggggtccacttccagggcttttccgacctatcgggtggggggtggggcggggggcaggaacgcaccggaaccgatggcgagtcgagagctttgattctgcgtccggaccccaagagaggcgcgggccgccccagcaggggagcgagggaggagggtgcagaaagaggctccgaaattgggggaaactgacccgtgcttctctaccttcggaggtgggacagttgcacgaagtgctagttagaccggatcagttggaactgacggaggactgcaaagaagaaactaaaatagacgtcgaaagcctgtcctcggcgtcgcagctggaccaagccctccgacaggtgacaaccccgggtcacgccacccaccccagcctgggcccaaccccaccgcaccctacgccctctcagggcggcccacgcgtgttcccggagcagggtggcgagacgcctgcccggccgcgtgggtgggagcccagcctgagggccggggcgcaccgtttgggcgggggtcgctgcttctcttcatctcccagcccccagggtttgggaccgacattcactagttttcgagttgcttcctgagtagttactggagccggagagtcagctccattttgccaattgattgacgtgcggagtttgaatcctagcgcccccatctccaggtccagaccccagacgcgccgctcccctgcggggtttgggcccacagccttcgggcagggggcgctgtggcgtagacgtgcaggtgggcccggcgggtgtgcaagaagtagcact

SEQ ID NO: 45631 - DNA, 30 bp, Homo sapiens
  chr8:95731815-95731845
  hyper
gactcgctaagtcgcggagtcacaaaagtg

SEQ ID NO: 45632 - DNA, 30 bp, Homo sapiens
  chr8:95835298-95835328
  hyper
ttgtctcattttctcgctggagaactgtca

SEQ ID NO: 45633 - DNA, 30 bp, Homo sapiens
  chr8:95835759-95835789
  hyper
tggagaaacatctgcgcaagccctgcccgg

SEQ ID NO: 45634 - DNA, 30 bp, Homo sapiens
  chr8:95907849-95907879
  hyper
accgtccaggggcgcgccctagctgtcccg

SEQ ID NO: 45635 - DNA, 1025 bp, Homo sapiens
  chr8:96145957-96146982
  hyper
cccgcgcgctcgcgcccggagtgtggacgggggcgcgcccgtgcgcgcgcaggggagaggccagcccaggcagccgttgtcgggttcgactggaggggcgggggagtcacctgcgagcggctgcgctggcggccagcccgcccaccgcgtctggatcgcgccggctgcgcggggctgcggacagcacacaccctggaaggccccggcggggaacgggcagagtccgcgccctgcgtccgcgaccaggaggatcggaccttcgccttcgctgtcgccgccgccgccgcccgcggccgtcggggtaggtgaagcccgggtgggtggtccgccggctcctgacgggccgggaggggagacgcgaaactttccgggcgcttcctcccgcggtcccggagccgtcgcagcgccgggaggtgtcgtcgtcgcgggcggtggcggccgacgccatgttggggtctgtgagaaacggggcgctcccggccgctcccctcgcgccggggccggcccgcgggccagttgccgccgccgtcccgccagcccgggagcgagccgcgcccgcccgtaggacgccgccgccgccgcggggggacgggggccgccgggtagggtccggtccacgggtctgcggggcgggggccggcggacgcgggaaggagccccgaggccgggcgagaagttgtggggcctgaggacgggggtcctggacacggccgggggcgtctcagggtcgcgacaaatttctggccgaaaagtttgcagggtctgcgtgtcggggaccttatgacctgaactacatatttgtatgtcacttgggagacgaaaatggccccgcagaacttgctctgatagaagcgatggtttatttatttggagccttttcaagttttatgatcctttgacgaatttatttttctttttaaaaatgtgattgaaggccgagagcgcgctgccggtgttgcttgaatagccttgtgtgctctccgtacattccagcaataacttgagtgtgcggtggaagtgggtat

SEQ ID NO: 45636 - DNA, 30 bp, Homo sapiens
  chr8:97145465-97145495
  hyper
cccgccccgccccgcgccccgtcagctcca

SEQ ID NO: 45637 - DNA, 303 bp, Homo sapiens
  chr8:97156906-97157209
  hyper
tgggcggggtggagccggggtccatggagttcatcagcgtctggatgatggcgtggttggtgggctccaggtgcgagcgcagcgggaagtcgcatacaccctcgcagtgataggcctcgtactccaggggcgcgataatccagtcgtcccagcccagctccttgaagttcacgtgcaggggcttcttgctgcagcgtagcctggacttcttgccgtgccgcttgccatggcgactggcgaaggccgtgcgccgccgccggcggccgggcgagggcagccaaggcctggcatccggggcgcccg

SEQ ID NO: 45638 - DNA, 231 bp, Homo sapiens; identical to SEQ ID NO: 6462
  chr8:97157666-97157897
  hyper

SEQ ID NO: 45639 - DNA, 122 bp, Homo sapiens
  chr8:97158021-97158143
  hyper
ggcctaccgggttttccccccaaaaggcttcgtaaccactaatgtgccctttgtggtctcaagcctgggccgcgtttcccctagacctcctctgggctgggctggctcgttctcgttgacgt

SEQ ID NO: 45640 - DNA, 2 bp, Homo sapiens
  chr8:97165646-97165648
  hyper
ct

SEQ ID NO: 45641 - DNA, 125 bp, Homo sapiens
  chr8:97165702-97165827
  hyper
gcctgcccttcccctggggccgggacctggggggttggctaggggcggccttccctgcactgtcgaccggtaagtcacccgggagcccaggggagcaaccaggtcctccacgaaggctaggggag

SEQ ID NO: 45642 - DNA, 30 bp, Homo sapiens
  chr8:97166032-97166062
  hyper
ctgcgcaggagaaaccgctgtgctgtgctc

SEQ ID NO: 45643 - DNA, 95 bp, Homo sapiens; identical to SEQ ID NO: 6464
  chr8:97166425-97166520
  hyper

SEQ ID NO: 45644 - DNA, 638 bp, Homo sapiens; identical to SEQ ID NO: 6465
  chr8:97166804-97167442
  hyper

SEQ ID NO: 45645 - DNA, 292 bp, Homo sapiens; identical to SEQ ID NO: 6466
  chr8:97167785-97168077
  hyper

SEQ ID NO: 45646 - DNA, 28 bp, Homo sapiens
  chr8:97168213-97168241
  hyper
cgcagccgggctattcccagaatggtcc

SEQ ID NO: 45647 - DNA, 13 bp, Homo sapiens
  chr8:97169606-97169619
  hyper
aactttggggttt

SEQ ID NO: 45648 - DNA, 74 bp, Homo sapiens
  chr8:97169708-97169782
  hyper
cgctcctccccttgggggacccccggctccaccgagccaggccagccccactcgacggcgatttaaacatccct

SEQ ID NO: 45649 - DNA, 2 bp, Homo sapiens
  chr8:97170377-97170379
  hyper
cg

SEQ ID NO: 45650 - DNA, 684 bp, Homo sapiens
  chr8:97170580-97171264
  hyper
gtgatttcgcgtctacgccggattggggcccccaagacttttccccaacccttgtctgaatgccacaggcttccggagacacctccgaacagcccgcagggtcttttggtcctgtgccaaattcacagggcgcagcgaaccagttatggtgcccacttgggggaggggcagagattcttgccacttcattcccgggcaaagaaaatccgcgcccaaccgccggccagcctaggcctctgggacttcttctcttgaggaagggcctcttgagcagtcttctctgagcttccttagcctccttccgcaattgtagtagagaaagtgcacgattaacagaggactttgagggacagaaacaactgtagcaaggcgtgcgtcgtggggagggttggcgagctgcacgggcagcacggaggccagggactcagttgcactactacgaagaagccacatgtctttgcaaaggtgactttagtagccctaaaatcatcataaaatacctggcgttaatttgccctctggacctttcagcagctcatgaacctcgctgacctcgggctgcagcggcgagaccctcgagcaaggaacgcgactatgagtgagaggcggggactggagccggggaagagctcggggctgggggcgggggggccgttagcctgctctaaaaagcttaagagatgt

SEQ ID NO: 45651 - DNA, 15 bp, Homo sapiens
  chr8:97171317-97171332
  hyper
cgctgcaaggtttcc

SEQ ID NO: 45652 - DNA, 340 bp, Homo sapiens; identical to SEQ ID NO: 6470
  chr8:97171618-97171958
  hyper

SEQ ID NO: 45653 - DNA, 721 bp, Homo sapiens
  chr8:97172018-97172739
  hyper
cgcggactagttcctcagactgtgggactccctagtgccggctttgcccagggctttccaaggctgtctcatgccctagatctgccccagcagctcaggccttggactgcgaacccagtatcccgagacaccgattccatcagtccccatcccgacccctctccagccgggttcatccgcctgctgcctcccgtcctccacgtttcccccaccagccaccaacaagcggcaaccacgctgccttctgcaaaagaggaagaaggaaagaagggagagagaaagaaagggggggaaaggaagggaggtttagagactggaatagaatccgcagccacattcagaaacttactcgagcttgagaaaaacaatttaagaaaagtaaaaaggaagtgtccagagcaggaagggaattcacaaatgtagcctccagcgggaacagctccctggctgccgagctccagcgggaggggagtcgagcgttttctttgccacttacctagtcccctgtctacaaagctggtgatcgtattagccgacttggaagactggaaaaagctggcattgatgcccagcttctcagcgatggagtaagtcctgtagattgacagcatgtactcgtggggcaccacgcgcggacccctgcctggcggctcctgcgcccggggctgctgagcccggggttcgtcctgaggccgcggctgtggttcctggccctcccggc

SEQ ID NO: 45654 - DNA, 1042 bp, Homo sapiens
  chr8:97172821-97173863
  hyper
cgacgaggaggatgagatggaagcctgctggaaaccgggcaaatcccacagaaaactgatgaggaagacggccgagagcaggaccctgggagtatccatggcgggcaagtggctgcgtctccccaggaggcggtggcggcggcgcaggacgcgcggggcacggagcggctggacagcggccggggcccggctcctcgggcggactcggagtgcgaggagccgggtcccagccacacaaaccccggccccgccacgccccctcccgcccctcgccgggaggggaggaatggggagggagggcagaggaggggtggggagggtgggaggagagccgggtggtgcgggccggaggtgtgggggagaggggccgcggtgcgccggtgtggcaggaagacgcagcgcccccgcgggacgcgcgcggggttgccgggcggtgcgcgcggcgcgggccgcaagcgctgaccgggggaaggcgggcgctgccggcccgtggccggggagcaaaggctggcccgccgcgccagggtccccctcgaactcccggaggtgtggtccctccgcagcgcggccccggctctcggtcctcgccagccgcctccactttcctgggagcgagcggccccggaggagggaagcggcggcggcgcccccaagagacagcttggagcaggcgcctctgctgcaggctgcgtgctgcctcggggcggtggtaccctccctcctcggccccaaccgccaggcctgccgtttgcgcccctcaggggccagcccggagccagagaagcctcgccctgggccaggcgcagggcccagctcggaacagccccattttctcggttgggtatcgctctccacaaagacaggcgtctattcccgaccctcgaggtcaggcaaaggccacgagtctttagagtttggatcgatgctaaaagctgctgcgctcccctgcaggccccagcctctcctctcgcagtccccaacctcttctgacgcagactttagctgctccacttcttcgtctgctcccgggatcctctccctc

SEQ ID NO: 45655 - DNA, 70 bp, Homo sapiens
  chr8:97174100-97174170
  hyper
tcttcagcccagcctcgccccatcacgagtttcctttatctgtccccagattccccgtgcctgtcttccc

SEQ ID NO: 45656 - DNA, 30 bp, Homo sapiens; identical to SEQ ID NO: 6474
  chr8:97247827-97247857
  hyper

SEQ ID NO: 45657 - DNA, 30 bp, Homo sapiens
  chr8:97274037-97274067
  hyper
agctaggatgacagcgtggggacggccggc

SEQ ID NO: 45658 - DNA, 184 bp, Homo sapiens; identical to SEQ ID NO: 6475
  chr8:97505578-97505762
  hyper

SEQ ID NO: 45659 - DNA, 247 bp, Homo sapiens; identical to SEQ ID NO: 6476
  chr8:97505801-97506048
  hyper

SEQ ID NO: 45660 - DNA, 230 bp, Homo sapiens; identical to SEQ ID NO: 6477
  chr8:97506177-97506407
  hyper

SEQ ID NO: 45661 - DNA, 1382 bp, Homo sapiens; identical to SEQ ID NO: 6478
  chr8:97506447-97507829
  hyper

SEQ ID NO: 45662 - DNA, 138 bp, Homo sapiens
  chr8:97657818-97657956
  hyper
tgtggctgccccttcggtgacagtggagtcaccgagcctagaaatggggaagctgtgacgtgggggtggtggagggtgctgcgggacagcagcgagcacggccctcagccgtccttcccaacacggtttcacttcccc

SEQ ID NO: 45663 - DNA, 88 bp, Homo sapiens
  chr8:98289922-98290010
  hyper
cgcctgggtgtcttccccgagactctggtactgtgaagggtccgggtcgcgcggggcgtcgtccggagcagggcggactcgggctttg

SEQ ID NO: 45664 - DNA, 274 bp, Homo sapiens
  chr8:98290080-98290354
  hyper
cggaggcagcttcaaagacacgctgtgaccctgcggctcctgacgccagctctcggtcgggaccgagcgggtctctccacggcaaccgccgacgtcacgaacgtacaactgtaccgtcgcgagaggacgtgatgcgcccggtgattggcgccgccgctgcggctgcgcaggagacgacccccgcgggcgctcccacccccatctcgcgcggactcgctttaggtctcggcgagtttctctgatatgcgctcgcgggggtgctgccatttcatct

SEQ ID NO: 45665 - DNA, 408 bp, Homo sapiens
  chr8:98657500-98657908
  hyper
tataaagactgcgctcggaagacagatgtctatctcaagtcacattgagacagtaggcagtggaagaagtgcggtgacctagaaattctggggcttacacaggattaaaggtgtccaggtctagacgcgcttccattttagttgggactgttaaagggaaatggttgcccattcttgttctggcaaatgtggccaacagaggccggaacgggagcaaggcaagagggggtcggttacctaatacgctttgaggtgtatggtcctgtgagaaagagctaaggcgagttcaacgaacgagtctgttgcacactctgtggcgtggtagatttgtgaaatagagtaaagggagatgacagggcagaatggtgaaagccgagagaggaattcaggcaccgatttactgggcca

SEQ ID NO: 45666 - DNA, 145 bp, Homo sapiens
  chr8:98787319-98787464
  hyper
attgagctgtgaagcggagacaaattgctctcggtggtggttcaaagtactgcaattgactggaatagcaccgcgcagttttccttcctctcgtgcaagataagagtgataggagctgtatcgattacctgcaagatagaagtag

SEQ ID NO: 45667 - DNA, 225 bp, Homo sapiens; identical to SEQ ID NO: 6481
  chr8:98787763-98787988
  hyper

SEQ ID NO: 45668 - DNA, 574 bp, Homo sapiens; identical to SEQ ID NO: 6482
  chr8:98788320-98788894
  hyper

SEQ ID NO: 45669 - DNA, 948 bp, Homo sapiens
  chr8:98880994-98881942
  hyper
cccgcactcccaacccgacaggcccctaaagctgcctgtgttccgtgcctgcggctccggacccctggagtctgatgcccgcctgggctcaggcacggacggagtggagccaggtggcagcaggcagggcgcgccgccagagtgcccagctcccggggctgcccacagggtggggccgccctcgccgccgctccctctccgcgccttccccatccccaaagaggacacccctccttccgcccggcccgctccccacccccgccgcggcaccgcctccccagccgcccgcccttgcccagcgcctcccaggcagccagcgagcgaagggagcgctctgggatgggacttggagcaagcggcggcggcggagacagaggcagaggcagaagctggggctccgtcctcgcctcccacgagcgatccccgaggagagccgcggccctcggcgaggcgaagaggccgacgaggaagacccgggtggctgcgcccctgcctcgcttcccaggcgccggcggctgcaggtgagcgcggcgcgctttcccccggctctgcgcggccgggcggcctcgaagtgcaggcggaccgacccaccgacagaataccgagcctgggctgcccgacgcgcaggcgccctccccaggcccgcactgcagcccccagcgccccggggccccggcgccttcgacccctccgaggacagggggagagggagggcggcgctgcccgacccctcggccgggagagctgggcgcgctccctgcgcaggacaagccgcgctgcagccgccccggagtgccccgtgggggcgctgtggcacgcagcggggacgcccagaccccggccaccgcgacccagggaaagggagacctgttgagcgggtatgcagggtgattcctattccacggacagccgatggctcccccttccctcttcggaacctggtatttt

SEQ ID NO: 45670 - DNA, 30 bp, Homo sapiens; identical to SEQ ID NO: 6484
  chr8:99058278-99058308
  hyper

SEQ ID NO: 45671 - DNA, 542 bp, Homo sapiens; identical to SEQ ID NO: 6485
  chr8:99076759-99077301
  hyper

SEQ ID NO: 45672 - DNA, 30 bp, Homo sapiens
  chr8:99129207-99129237
  hyper
tccccgaacccgcacgccctgggtccgaca

SEQ ID NO: 45673 - DNA, 120 bp, Homo sapiens
  chr8:99129465-99129585
  hyper
aactgtagtttcggcgacgctccaggccacgtggaggaagcgcccggtctggcgcatgcgctctccagcgcgctctccaggagctttggctcggtgggtactgtcgcggaggcttgtcat

SEQ ID NO: 45674 - DNA, 30 bp, Homo sapiens
  chr8:99129924-99129954
  hyper
cgctgagatctgggcgttggtcctcccgtg

SEQ ID NO: 45675 - DNA, 72 bp, Homo sapiens
  chr8:99182390-99182462
  hyper
ggtgcagttcccaggtgtgaccgcggggtggcgcggtgcgccggcgccggcgcttgcagacttcccgggaga

SEQ ID NO: 45676 - DNA, 30 bp, Homo sapiens
  chr8:99306733-99306763
  hyper
aatcagatcatctccgttgtaaacatttgt

SEQ ID NO: 45677 - DNA, 871 bp, Homo sapiens
  chr8:99438927-99439798
  hyper
cccagcccagctcccgccagacccagcggggaaaggtcaccgtaggcagccccctgcctgcgccctgggggtggtgataataacagctgtcaccgggggatggtcggggggaagggagaggtgtcggccccgcgccgagccgggggcgcaaggtggtcgcggtgacgcgccggggaagcgcagagaagcagcggcggcggcggctgcgccttccgagcccgggcggcggccgaggcacgcggagctgtccgttcagcaccaccgcgccgcgccccgcgcagggcgggcgccccgtcacacccgctctgctcccgccccggctcacggggcgaatgcggcgcgggttcctgcctctctgggtgggtgaggggcgcgcggatccggagagggggctccgggagcggcgggaccacgcagccacctgtgagccttcggcagctgcgggcggcggcggcgtacccggcccgagacgggaggagacgctcggcggcccccgcccgccggcccgccgggcgcacacactcgcacccgcgcacgcaccgccagcaggcagcggccaccgccgcgatgctcgcccgcgggttggggaagtttcccgccggcctcggccgcgggcacccgtgctcccaggtaagcgcttccagaacgcgcagggcgagcccgggcagccccgctgggtgaggcgcagcgcacgcggccccggggcatagcgccaggccggcagggagacctgggccggggacgcgggggctgcaggcgtgggatctggacccaggggaggccgggccgcccccctcattcccgcggcccgggtttccagactccagcgcatcccccccaccccaccaaagctacgcgccccccgtgtcgg

SEQ ID NO: 45678 - DNA, 307 bp, Homo sapiens
  chr8:99951836-99952143
  hyper
cagccaactcactgccgcgtaggaacggaggtcatcggaaatcaagatttccgtttgaattttcccaaagtttaagcgttggcaagtgcgttgaaaaacacacacaatatgaaagcctaataaaaatataggtttgcagaccgtgccctagtcttttccgaggatgttcttttctgtcatccatcgtctacccacgttgagcacgacagccgggccagtcccgccctgggcggttggggccttcccagaggggcccggtgcggagagcccccctctccccggatgtgtctggggcctgtccttcact

SEQ ID NO: 45679 - DNA, 105 bp, Homo sapiens; identical to SEQ ID NO: 6488
  chr8:99952198-99952303
  hyper

SEQ ID NO: 45680 - DNA, 400 bp, Homo sapiens
  chr8:99952532-99952932
  hyper
gccggctctgggctccgccgctgcggcagccgagggcctcagctgggaaatccaaacccgggctggacctgggctcaaggaggtttctgtccccaggctagaccaccacggccacggccacgcaacttgccctgagaccccgtgctcggccttcccactgagctccccttccctgtgactcagtgcctcgcaggctggtggccggaagggtgcctgcggctggctggcccggcccgattccgggtggcggggttcctgcagtgaggaacgaccctcagctcccgcagacgcgggaaggcccccgcgccatccgtgggagtggggcagcctgtctgcacgcggtcccctgggaaacccctctgcatctcccgcccggacaaggtccccggccttggaatct

SEQ ID NO: 45681 - DNA, 242 bp, Homo sapiens
  chr8:99952968-99953210
  hyper
cgctggggtcagaactggtatctttctcctcctctggggaagtcagggcagcccggagtggcgtcgtgggtccgaaaaatccgtctcagaaacccaccaggagaaaaggctctggggtgggggacaccatgtggggctcccacaaaggacccgacggtgggtgtggagaagcttattggccctgagaataggcccaggccctctccacaggacccctaccgcacacgcgactctttctctgc

SEQ ID NO: 45682 - DNA, 721 bp, Homo sapiens; identical to SEQ ID NO: 6490
  chr8:99953841-99954562
  hyper

SEQ ID NO: 45683 - DNA, 249 bp, Homo sapiens; identical to SEQ ID NO: 6491
  chr8:99954686-99954935
  hyper

SEQ ID NO: 45684 - DNA, 30 bp, Homo sapiens; identical to SEQ ID NO: 6492
  chr8:99955188-99955218
  hyper

SEQ ID NO: 45685 - DNA, 30 bp, Homo sapiens; identical to SEQ ID NO: 6493
  chr8:99955538-99955568
  hyper

SEQ ID NO: 45686 - DNA, 182 bp, Homo sapiens
  chr8:99955967-99956149
  hyper
tttaaccaagttggtttactgcgtatgaaatgaacatttgccgattaaagcttaaatattggaagaaatttctcctggggcattccacgcgtctttgcaataattactaaattagtcaattgccacctctgtaaacaaacttcgtttagaaaacagcaggcgaaagcagactacacatgtag

SEQ ID NO: 45687 - DNA, 1314 bp, Homo sapiens
  chr8:99956452-99957766
  hyper
gtcacctacggctgcgtctctataacagggaaacctcgagcaaacctgtgcctttaagactcagttgctatccaaacagaagtaaacagagtggaccattagcagacgccgggcgcggaggcggagccagggcgctgagggccccgcgcggcggcgggacgcccgcccgaaggggaggcggggccgctactaaagcccaagactcccggcctggggcagcctggggagggacgcgggcggggacggagctcggcgtgcttgctgctggagggtgatggccctgcaaggctgtgggctccgacctcaccgggagtcgacagcgagaggttcgccgaagagcgaggttctgggcgagcgctgaacgccggccccaagcaccccgggtctttacacagtccgcgtccacagactctgacgaagacgtggatctgctctcgctttagctgctcgcggtcctccagatcatgtccgcgactcctgcgactccgcgcggaaaaaaaagtttgccaggcgtggactcaatgacctttccaagctgtgcgcctcgctgcctggaccgggtctgagcgcggctgcccaggttgacctttctgcgggaggtgagtgttcgctctgggaaggggctgtagctgccctttggaaggaagggtttgggggtgtaagaggcgttcagattctcggtctggtgtgccccaaattcagatgtgaaaatagatcatggggatgcaatcccagggcactgtatttctcacttccttgggtccctggcacgcgactcccagctaacacccaaccacacacatttctacatactgtttcttaattttgttttgggatatttaatctaagcggtcagcaagacttcttataaaagctggtctacgtacactgagatcaaaccccacaatcccatggtgtttctgctcctgccctagcaagcctgggtcgacttgtcccggggcagccgcggcagcgcagcgtggacgggcccggacacccggtgcctgcccagccagcgacgctgaaggcacatttcaagagggaaatagttcagtcctcggtaatttgtcaacctcgtgctggctttaaaattctcctcccaccttctagtcctgactgagggggcccaaaagcaaactccccgggggcttaaacgctcggattcctgagaaacggcaagtgagaaaggagttgcagttgtacgaagaaggagcgaggaaaaggtgtttgtggagggagccccggatctgtcttcctacctgttagccgagaacaaaagggggctggcgtttcccgaagcgaaagggcgcagac

SEQ ID NO: 45688 - DNA, 276 bp, Homo sapiens
  chr8:99960221-99960497
  hyper
ctctggcctcagggacgttctccgcccccaccccaccccctgggagcctgaaccatctggaagggatcttagtcgggggttgggaggagagcccgtggataggaggagggggcgattctaggccgaatccagcccctgaggtgtcacttttctttcctgcggcccgtcaccgctgatagatggggctgagggcagaggaaggaaaaagaaaacctccgaggtcagtgcggggcgaggtgagcccctcccagggccctctggcccaggaggatgaag

SEQ ID NO: 45689 - DNA, 252 bp, Homo sapiens
  chr8:99960921-99961173
  hyper
gcagtcccctcacggctttcggggggtcttggagtcgggtggggagggagacttaggtgtggtaacctgcgcaggtgccaaagggcagaaggagcagccttggattatagtcacggtctctccctctcttccctgccatttttagggctttctctacgtgctgttgtctcactgggtttttgtcggagccccacgccctccggcctctgattcctggaagaaagggttggtcccctcagcacccccagcatc

SEQ ID NO: 45690 - DNA, 203 bp, Homo sapiens; identical to SEQ ID NO: 6497
  chr8:99963487-99963690
  hyper

SEQ ID NO: 45691 - DNA, 30 bp, Homo sapiens; identical to SEQ ID NO: 6498
  chr8:99963933-99963963
  hyper

SEQ ID NO: 45692 - DNA, 45 bp, Homo sapiens; identical to SEQ ID NO: 6499
  chr8:99985998-99986043
  hyper

SEQ ID NO: 45693 - DNA, 301 bp, Homo sapiens; identical to SEQ ID NO: 6500
  chr8:99986225-99986526
  hyper

SEQ ID NO: 45694 - DNA, 230 bp, Homo sapiens; identical to SEQ ID NO: 6501
  chr8:99986791-99987021
  hyper

SEQ ID NO: 45695 - DNA, 339 bp, Homo sapiens; identical to SEQ ID NO: 6502
  chr8:101118151-101118490
  hyper

SEQ ID NO: 45696 - DNA, 35 bp, Homo sapiens; identical to SEQ ID NO: 6503
  chr8:101170569-101170604
  hyper

SEQ ID NO: 45697 - DNA, 30 bp, Homo sapiens
  chr8:101321913-101321943
  hyper
cggccccgagcccacgctggacactggagg

SEQ ID NO: 45698 - DNA, 30 bp, Homo sapiens
  chr8:101322776-101322806
  hyper
ctagattggcaggccgagggagagaagtgc

SEQ ID NO: 45699 - DNA, 30 bp, Homo sapiens
  chr8:101499210-101499240
  hyper
tggggtggccacaaacgaattctggccagt

SEQ ID NO: 45700 - DNA, 499 bp, Homo sapiens; identical to SEQ ID NO: 6504
  chr8:101661575-101662074
  hyper

SEQ ID NO: 45701 - DNA, 137 bp, Homo sapiens
  chr8:101821967-101822104
  hyper
tcaggctgattggtgcagagacgctgtaaacgcacctttgcggaacacagacgacacaggaaagacgtttggcagtaatactacgacagcgaggggcccgggaagcccgcggaaacgcaggaggcggccaggagagg

SEQ ID NO: 45702 - DNA, 361 bp, Homo sapiens; identical to SEQ ID NO: 6506
  chr8:101920198-101920559
  hyper

SEQ ID NO: 45703 - DNA, 44 bp, Homo sapiens; identical to SEQ ID NO: 6507
  chr8:101920618-101920662
  hyper

SEQ ID NO: 45704 - DNA, 86 bp, Homo sapiens; identical to SEQ ID NO: 6508
  chr8:101962306-101962392
  hyper

SEQ ID NO: 45705 - DNA, 30 bp, Homo sapiens
  chr8:101965388-101965418
  hyper
gacaggcagtcaggcgtgaccgcacggacc

SEQ ID NO: 45706 - DNA, 30 bp, Homo sapiens; identical to SEQ ID NO: 6509
  chr8:101965644-101965674
  hyper

SEQ ID NO: 45707 - DNA, 36 bp, Homo sapiens
  chr8:102092944-102092980
  hyper
ttccctgcccgcctcggcctcgcttacaccgcaggt

SEQ ID NO: 45708 - DNA, 30 bp, Homo sapiens
  chr8:102138579-102138609
  hyper
tttgtccctgccaccgcatcggactcgcca

SEQ ID NO: 45709 - DNA, 31 bp, Homo sapiens; identical to SEQ ID NO: 6510
  chr8:102217068-102217099
  hyper

SEQ ID NO: 45710 - DNA, 31 bp, Homo sapiens; identical to SEQ ID NO: 6511
  chr8:102219053-102219084
  hyper

SEQ ID NO: 45711 - DNA, 618 bp, Homo sapiens; identical to SEQ ID NO: 6512
  chr8:102504306-102504924
  hyper

SEQ ID NO: 45712 - DNA, 429 bp, Homo sapiens
  chr8:102505556-102505985
  hyper
gcccgcgtgtggccccgatgggaggcgaggcgctgggaggccggggggcgcgggggcggccggcgccgtcccccactccctcgacatcccgccttcctcccccctcccccgcctccctcccccgggtccgcccccgcattgtttggccaccttcctcaggtgcccggggggaaaggacggttcgcgaactgggggaactcatgtgaggcctcgagttagggcctcggcggggcgcgaaggggcgcctgccactgagcgattcacccgcgcccccgacggcgtctgcacgcccctcgagctcgcggccctccacgcagttggccgccacctcggacgcggcaggcgggactgcgtggggcgcgccgagccttctcggggtgctctcgccgtcaaggccgagggctcggggcggcgggaacgctgggctcg

SEQ ID NO: 45713 - DNA, 52 bp, Homo sapiens; identical to SEQ ID NO: 6514
  chr8:102506365-102506417
  hyper

SEQ ID NO: 45714 - DNA, 30 bp, Homo sapiens; identical to SEQ ID NO: 6515
  chr8:102636867-102636897
  hyper

SEQ ID NO: 45715 - DNA, 198 bp, Homo sapiens
  chr8:103136759-103136957
  hyper
cgggcgtgtccccacggtgccccatagtcctagctcaccgcccaggcctctagccagcctgcactgctactttccaaggggtgccatctgcttgcctcctcgggtcctgggaggtcagattcagcctagagcacctccttccaagcttcgatttgagggggggtctggggtccctgctctaccgcagtgaagttcaag

SEQ ID NO: 45716 - DNA, 30 bp, Homo sapiens
  chr8:103251114-103251144
  hyper
gccgaagctacgggcgctgagggaactgag

SEQ ID NO: 45717 - DNA, 30 bp, Homo sapiens
  chr8:103667238-103667268
  hyper
ccccgtcttccaagcgtgggttcagacccc

SEQ ID NO: 45718 - DNA, 30 bp, Homo sapiens; identical to SEQ ID NO: 6516
  chr8:103668038-103668068
  hyper

SEQ ID NO: 45719 - DNA, 30 bp, Homo sapiens
  chr8:103818621-103818651
  hyper
gtggctgtgtggggcggcgggtttcctctc

SEQ ID NO: 45720 - DNA, 30 bp, Homo sapiens
  chr8:103819472-103819502
  hyper
ggcctcggtgacaccggaggtcgctggggt

SEQ ID NO: 45721 - DNA, 30 bp, Homo sapiens; identical to SEQ ID NO: 6517
  chr8:103822600-103822630
  hyper

SEQ ID NO: 45722 - DNA, 32 bp, Homo sapiens
  chr8:103876452-103876484
  hyper
gctggccgggcagccgcgcgagcggggcggaa

SEQ ID NO: 45723 - DNA, 30 bp, Homo sapiens
  chr8:104033263-104033293
  hyper
agcagcgcgcgccgcggtcagctgactgct

SEQ ID NO: 45724 - DNA, 30 bp, Homo sapiens
  chr8:104152743-104152773
  hyper
cgggtccgagcgcctcgggagccccagccc

SEQ ID NO: 45725 - DNA, 545 bp, Homo sapiens
  chr8:104153016-104153561
  hyper
cgatgtcgccgccgccgcctccttgcgggccggggctgcgcctccggggctgagccgccgccagagccgacagccgagcagccgctgggcgctcccgcggcgcaggaggatgggctgcggcgggagccgggcggatgccatcgagccccgctactacgagagctggacccgggagacagaatccacctggctcacctacaccgactcggacgcgccgcccagcgccgccgccccggacagcggccccgaagcgggcggcctgcactcgggtaagtggccgggcccctgcagaccctcgcccgcccgctaccccgggcgccttggcccgggcactgagagaggagccggttccctgaggaattgatggcgcggcgggggtggctgggaggaagcagaggcaggacctgcccactgatcagtggacagatgcaagcccagggagtggggtcgaccagagccccttaccgaaggctgcgccgatgccccagcttccagcagcccaatgctctttggccttgtccaaagcttgctcgctggtcgggaga

SEQ ID NO: 45726 - DNA, 203 bp, Homo sapiens
  chr8:104310698-104310901
  hyper
aagcaaattggctccgtttaaggattcttgactcctgaaatccgcaaggaagtgggttcttttagagccagcgccaagagcttcaaaaaatccttctaaggtgaacccctccggacccggatagcgagatggggctcagccttgcgcctcgggggtcgtaacagacggcaaggtggaggtggcttcccggccccgcagccgga

SEQ ID NO: 45727 - DNA, 201 bp, Homo sapiens
  chr8:104311337-104311538
  hyper
tgctggggaggcaacggcgggacggcccgcacctgagtttcctcggaagcgggaaccggctctgaaaggcgatgccggggccccgcggcgccgcgcaggccaggaacgctgctgtctggctctaggcctggggcaggttcccgggtgtggggcgctggcggaccgggcatcagtgtgtgttggggcgcgggtaattcgtaa

SEQ ID NO: 45728 - DNA, 80 bp, Homo sapiens
  chr8:104427305-104427385
  hyper
cgcgtgagcgaagccggagactctagtactgagggggcaagaacggggcacagacactacgtcacgccggcggaaagcgc

SEQ ID NO: 45729 - DNA, 30 bp, Homo sapiens
  chr8:104427702-104427732
  hyper
cggacaattatgtccgcgaaaccaagttgg

SEQ ID NO: 45730 - DNA, 2943 bp, Homo sapiens
  chr8:104510990-104513933
  hyper
cagggcgcctggaagagctggcgagcccgcccagctctgttcacccggccccgccccgccccctccgggagggctctccgggcggcgcccagccccgagcagagcaaaggacggcggcggccacctccgttctccggccgctggtttctcgtctttcctcgtcctttcattgaacccatctccgtgcttcgaaaatctgactctaacccgatctcttcgcgtctccgcctcttctttctagagtgagcgccaaaaagggcctgacagacagaagcctttggccccagcaccggcccagcccgtctctagacgattcttgctcctttcaccctcacagcctccagtggtcgcttcatcttcgcaccctcccggccaaccctaactctcctcgtctctcctcgcgctgtctcgcgtcctcccctcaggatccttccgcacattctcagcgtccagcgcggtttcccacaacttcctcacgccccgctcccctcgccctgtccccgccctcgacaccacctgcgttccccactcgctccaacctccctcccccgctatccccacttgtgggcctccagctctctgcccctttcctggcccccatccctgacaccccagggacccttcctccctcctcacgttctccctccttccaggatcccgccccgacacttcggggccctcccgctacgcgcactctttctcctcaggtcctgacacctgggcgccccctccctgtcacccaccttcagctccagccctgactctcgggcgccttgccacccttacgctccccgccccgccccggtccctcgggcgcccccactcgccgcctctacctccctacctgctacacctggcacccctgcccccacccctgctcatactcttcccccgcccccgacacctcgggcgccccctcacacgctcctattctccacacttccgtccccgaaaactcgggcgccctctcccttcacgctcagtctctcctccctccccgcccggccccggacccagcctggagatcgcgctcgggaggggcggctgccgcccgcggggcgcccgcggtgcccgggcctgggcagcgaggaggtgacgccgcccccgcgggatgagcccgggaggcggaggggcggaggaggtgctggcggcggcactgagcggcggcggcgcagggcgcgcgggccttccgcgccgactccatcgacccaaggggcggcggcggtggcggcggctgagcgaccctgggccgggcgcgtgatgaggaggggccggcgccagaccccgctgcacgtcggagctcgcctggatccgggcgttggcagccgaagggccctggccccgggactctccgccgctagcccccgtcatatcttctccgctttcgcttctccactctagccgggggtggggtgggtggggttggggtctccgcgggggtttccggccccgcggcccgctcccgggtgtgcctggaggagttctccctctgtggcgcgcgggagccctgtgatgcgtcagccggcgggacggatgagttgcttctccgggaaaccgtcctcgcttcctcacgaccctctcggctcccgcctgggtgcccctcgggccggcagtactccgcctccgggcgctcgaagcgagttccccgggggcttgttcgcaggcaccccttcccctccgaggcggcgcgcgcgctcccggccctgaccgcggccggacacactcgcgccccggtccgcctgtcgccctcccgcctgctccctccagtcaccccacccttagctgtccccgccaccttactccaccaccctcccccgcctctccgcgcactccgcgtcccggcctccagttcccctttcccttgaaccgctcacttcacagcccttcgcccccgggaagaagaaacatttcccgaagcgcactcctcagccctccttccccacgcgctcgccctcccctccccctgcttttcttgggggaggggggctgtcgccttggattgaaggccattgatttgtatgtatttgtcccagcgctggaggctgccccagccgccgcgccggtgccgccgctgccagtggagttgcctccccgcttccctagggtggttcggctccaccaaacatgtcggctcctgtcgggccccggggccgcctggctcccatcccggcggcctctcagccgcctctgcagcccgagatgcctgacctcagccacctcacggaggaggagaggaaaatcatcctggccgtcatggataggcagaagaaagaagaggagaaggagcagtccgtgctcaagtaaggacctggctccatattcccgcctctctccctgccctccgccccctcgcccactgccctgcggccgcctgcgcgccccagttcgccgccctccctcccgctggcggcgcccaggccacgagggctgcggccagcgccggccgcccgggctgttttaggggtgtctgagagcaggggtgtgtgtcggggagggagggcgccaaggccggctgaggtgagggtggcgagccttaggcggtgtgattttccttggcgcctttccggatttcctcgctggtcatcttggctccggggccccagcgggactggggctgaacccaggctctgtgcgtaccctctcctttcccgccgcgctgaggcagtgactggggcacagaatccaatatggccgtgcacaggtgctccctggacggacccgggcgaaggcgcgctggcaggggatgcggacgccaccctggtcccacgcctccgcggggcggctctaccagcaacgcgggacagagcagggctgcccacagtggctgcgagcagcgggcggcggcgcgggctaggggcctaagctctgtcgcggtcgggtgggtgtgcgtccgccgccatcttccagcccctccccctcggcgagtgctaacaccctgcactc

SEQ ID NO: 45731 - DNA, 138 bp, Homo sapiens; identical to SEQ ID NO: 6521
  chr8:105235363-105235501
  hyper

SEQ ID NO: 45732 - DNA, 160 bp, Homo sapiens; identical to SEQ ID NO: 6522
  chr8:105235643-105235803
  hyper

SEQ ID NO: 45733 - DNA, 329 bp, Homo sapiens; identical to SEQ ID NO: 6523
  chr8:105235863-105236192
  hyper

SEQ ID NO: 45734 - DNA, 25 bp, Homo sapiens
  chr8:105479247-105479272
  hyper
cgacagcccccgagctctgcctcag

SEQ ID NO: 45735 - DNA, 1670 bp, Homo sapiens
  chr8:105600478-105602148
  hyper
aggaccctgcacgcccggattcggcagagcccttgcccccgaggtggagtggggagaagtcagcgggaagccttttcagggaatcgagtaggacaagggctggcgcggtgggaatctcgccggtgagagaacttcctaaccccgggttgagggggcggggggaaggaccgtcccggcagcggcgggggcgagctcctctgctttctcacagtcaagcatctttgtgtgtggattgtgccaggctacgggtcctggagcaactggccgcgggggccctcgaacccaggtcgggaagtccgcccgccaccccctcgctccgccggggccctcccggccgggccccccagcccctctccaccacccgagggtctggaggtggacgagtggagaaaagcatctccgtgtggggacacccgttccgccacatccaccccctcaccggtctttgtcccgccggtagccagggtctccgcgggagtctccaggggaacccccgtcctggaggcctcggggcccgggtcgcctcagctttgttcggtcagcggggcgcggggacgcggacacttaccgtacaccccagcgaggaaaagcaagagcaacgcagacctccaccgcggagactcttttgtgctccagcgacaggccataaccacagcagatggagagagagaggaggagacggaggaggagggaggagaagctggaggtagacgacgccgacgccgccgccgccgccgccgccgccgccgagccaccggctgctccctgcgctctccgcggctgcgggagggggaagggaggggccgccgccgcccgcgcgcgctccctcctccctcctccctccggctcgcctgctcccaccccgggcggtgcgagagccccacgcggggcggccctcctgggggcaagggcaaggagctcgcgcgccagcgcgagacgagagggtggcggacgccggactccggcctcgcgccgctcgggctagccggcgccgccactcgccagactgagcgcgcgcccatccgtgcgatcggcaatcccctggcccgcctgcctcggttccctccccgcgctccgctggactttccaagtttcgggccgatttccacgcgacgggagcccaaggagcaaggcagcgccaatcgatgacagagcgtgcgaacgccggctgctggatgcccaggggctggagcgcggggtgtgtggaggagcacggtcgctgtccgagggctgggctctggcccagcgggtggggggagggggggtgggataccagctgggaggctgaaggtggttccgtgttgggggaggcgtggatggtctgaagctgacaacttgggagttccttcctctatccggtacccccaagtctccacttgctgtcggcgcggagcttcgagtgggggtgggctcaagttagtgcggccaacctggcagctggtcggtcaaggggcagtgtggactcccacgctcaaggtgcccggaatgagtcgggcaaggcttgtgcagagcccctccagtctggcgtggaagcgccaagaggtcatttgacatctcacgctgggtcgggtgcagctgggccaggatgttcggcagggctggagccgactttcagggtagatatattgaaaggaggattcgcccatcacgctgcagtttccctaaagctc

SEQ ID NO: 45736 - DNA, 58 bp, Homo sapiens; identical to SEQ ID NO: 6525
  chr8:106331015-106331073
  hyper

SEQ ID NO: 45737 - DNA, 173 bp, Homo sapiens; identical to SEQ ID NO: 6526
  chr8:106331083-106331256
  hyper

SEQ ID NO: 45738 - DNA, 530 bp, Homo sapiens; identical to SEQ ID NO: 6527
  chr8:106331443-106331973
  hyper

SEQ ID NO: 45739 - DNA, 215 bp, Homo sapiens
  chr8:106332003-106332218
  hyper
cgcaggggagtgcatggccctgagcccccgggtgcccgggggtcccgatggtgcttagaggacacggcgggtcaagagacaccttccgaaacaggcacgctcgcagagatcaagtcggtcaacttttcttggcttggggagaattcctccaatagcgttttataggcctgcgacatatcttcaacgctttggccgaaaagaagaaaaaaccttat

SEQ ID NO: 45740 - DNA, 30 bp, Homo sapiens; identical to SEQ ID NO: 6529
  chr8:106490682-106490712
  hyper

SEQ ID NO: 45741 - DNA, 2059 bp, Homo sapiens
  chr8:107282016-107284075
  hyper
agtattagagctgcccgacaggcgggaccccgaaatcggggcagctctggcttagtccaggctattcgagtgggcgcctgaactggaggcgccgtctccaccgggatggggatcctagtgcaggcagacgcctggcaggactcggcgagctggggtccccaccgcggtagccagagcagaaacccgaaccccagccagaggggccgcgcgcggggaggggtgcgcgctaagccagcgtggcttccgcaggagctatttttagcggtgcgtgcctccccccgcccccggcgtggtagcctccggctcgcggcgccccacggctcctctcagtctcccccgccgctgccggctcttggtagcttccacgcgggcaggtccggaaactgagcatgtctgcaagcgctcagcggcgccggcagcagcggggctagagctgggctgcgtcaggctgagcccattcacctcgcggccacaggagctcagcgccggcgccgcgccgcccagccccgccgagaggggcgcactcgccgccgcggggcccgccgccgctcaccgcagccccctcctggcgacccgcaagtaagtttgtgaggctgctgggcgttagggcgagggcttggcgcccgggggagtccaggagggatagcgagaggcgcggctggcgcccgggagagccggctggcctctgccccctgtgcctggcgcctctccgagccacttagccaatttgaaagcgggtggccattgggatgctcgagcggggacgacgggcagagcaggagggcagaactagctccagcgggggcccagagggcggacttgggaagaaggaaagaccgcgcggcgagggaggagaccgggcggcgagggaggagaccgggcggggaggctgggtttggggcgcgggagcccggccagggacagccgcagaaggaaagtgggggtgtcgccgggggatagagtgggagcagcgtgagagcagtgttgggggcgcagagtggagggcaagcgtgtcttgaacagaacggcaggaggatgggtggaaagtggggcgcgtggaaagcggatttggacgagagcaaaggacgccggtggaagggacagtgggctccggaggggcgagtggattcggataatttggggaatcagtaaaaggctagggggcacatcatgatggagtcagcctggaatctgtctcccgctagagtacccgaggccacatgttgggaactggctggggaaaggatggatgtagaaagtggcctggagggccgactggaaaatcgctgagggatttgggtgaagagggggggagctgtgcagtatcgggcggaggaactgggctgctggtagggcctgaaaggttcaggagagggttggaggcttccccgtgccgccccttgaatagtgatttagtactgttatctgaggttcactttcacccctggctcctcctccgtctactacccggcttggacgcacctcggctcgctgtaggcgagctttaggagatttaaatagacattaggcagtggggaaggtagtcgtttacggggggagctgctcgggcttccgttcagtggttcccggcacgctcagggtgcagtgtagggtctgaatgtgtgtattgcgggggtagggggagtggtgtcagttctaggccacaggaattcgtggtctggccccagaggtgcggtgtttttggccgggaagtcaggcagaagtctgcagcgtgcaactcgcagcggggcgtgtgtgtgcgtgtgtgcgcgcgcgtgtgcatgtttccggcccggggtcgcgtgtgtggctgcagcctgtctccgtgacaagaagatccagggatctacgggcggcacggggaagggattaaggggaacatacttccctacgtcttttctgcctccttttcccagggtagcattctttgcttatccaatgatgcctctttctaacctctccctctccacttacatcccaaacctgatgcgggtcttctctgattcggcactctaaggaggactcagccgccggctgcgaccaccgtggactccctcta

SEQ ID NO: 45742 - DNA, 1732 bp, Homo sapiens; identical to SEQ ID NO: 6531
  chr8:107669365-107671097
  hyper

SEQ ID NO: 45743 - DNA, 240 bp, Homo sapiens
  chr8:108509537-108509777
  hyper
aagtttctgggaagagaaatccggttccacgtgtggagcatctctctgcagagcgtttgtgttgtactggtctgtcgtactctcacgacagttgccatcgtgttctggaagaatgaaagtgtaggcacattgcccatgttgaatccggttatatcttctcccactgttttctggacttcggcgctgattgctgcaccctatgtgagtcagaatggcagcgaggaaagcaaaggaaaggaa

SEQ ID NO: 45744 - DNA, 1716 bp, Homo sapiens
  chr8:109093720-109095436
  hyper
gtccctgggaaggggctgctgcgcgcccttcctgcgcgggtaattcgatgtgcgtgtggtgagtggtttatgtttaaatccacccagaaaattgaatcgtgtctagccgcccttcttctaaaatgcagttggattagttgcatctccagcggactccgagacagaaatacgcactaaatctgcaggaaagcgagttccccgaaacctttctggaggcttccacccgccttctccgctacgcacaagtgatggagagggagggagcagttaaaaagccgcaagtgaatttcattgagaacagaagcctccaccggtgtggctgcttttgcaaagcaaatggagagagcgaagtggggcctgttttaaaaacaaacctctggaggcgaggactccccagaaaaccagcgcgggaattgctgcttaattcagaaagttcccatctcgtcgcagtttccagaaaaaagagatctatgttggcctttttctggaaagggaggtcctccccctcgacttggtacccctcccaagctccggaatacagacacacgcttgggtacacccacacaccacacacacactatgctaggtcaagtccgaagagatctgaggccgggtttggggcgcacgtggatggggaagataaaacaaatgagctacagggaagatggttaggaggacagagagaagaacaacgacgacaaaaaaaaaatgcatgtcagataagaaatacgtcctaaagagacaagtttagatgaggaggtggggcggcgaacatgagtgcggaccgcacgacttagccctgagcgcccgattggcgcccggctcgccgagctcccagcgcgtctcgctccggctccccgcgcctccagggtacagaaaacagagtgttttgtagagctccagggtcctaaaggtggggactggggacccgcaaaagctggggtggagagcacagccctgaccatctgagcccccggagccagggcgtgagtgagcgcctccacacgccacccctgaagcccaccacgcacctttggcagagagggacccacctcgcttactgcgtctccatcggttgccttggcagtggctgtaatccatgcagttcagaatgatgagggcaaaggagaaaaggcgaaactgcatctgggcggtcgggcgggggagagacgcctctcaaagtctaggaactggagggttcgcccaaagagccggcgccggccgcgctgctggggaggactcagagggagactcgccactcacccccgggccgcaccggtcagttcagcgcgatcagcatctctccgccacgaacctgagagacaagaagcgaaaacagggtgtgtgggggatggagagagccccggggaggcagctgcgccttcgcacgtcccaatttaaagaagagagggaaggaggaagcgaacccactgcctagcacgagccgcggagcggcttaatccagagcgggcagctgcggacgagttggagaggaaggtgattataatcagtgaattagcaacctctgccgagccctaagctccgacccagcggcataatgcgttgtgccggcgctccggggaaaggaaagaactctaaaggcactgagagcgcagggctaaaagaacgctcttaggccatttggagtccacggcggtgtacccaagcgccgcagctgcggctgccttggtgtgggttgcctaccgtgcgcacgtc

SEQ ID NO: 45745 - DNA, 468 bp, Homo sapiens; identical to SEQ ID NO: 6535
  chr8:109095505-109095973
  hyper

SEQ ID NO: 45746 - DNA, 30 bp, Homo sapiens
  chr8:109260512-109260542
  hyper
ctgtgaagctctaacgttctctagcgaaac

SEQ ID NO: 45747 - DNA, 30 bp, Homo sapiens
  chr8:109260967-109260997
  hyper
tttattggtagcgccgacaaacgaacagac

SEQ ID NO: 45748 - DNA, 402 bp, Homo sapiens; identical to SEQ ID NO: 6536
  chr8:109799337-109799739
  hyper

SEQ ID NO: 45749 - DNA, 78 bp, Homo sapiens; identical to SEQ ID NO: 6537
  chr8:109799888-109799966
  hyper

SEQ ID NO: 45750 - DNA, 30 bp, Homo sapiens
  chr8:110345841-110345871
  hyper
aggcactacccgcacgccagccctcagacc

SEQ ID NO: 45751 - DNA, 30 bp, Homo sapiens; identical to SEQ ID NO: 6538
  chr8:110346425-110346455
  hyper

SEQ ID NO: 45752 - DNA, 30 bp, Homo sapiens
  chr8:110552598-110552628
  hyper
ccagcaacttagagcgtttcacgtcacgcc

SEQ ID NO: 45753 - DNA, 272 bp, Homo sapiens
  chr8:110703873-110704145
  hyper
gtggggcgcagcggcgtgagcacgctgagggccgcgcgccgggggcgccaggattctgctccctgggctcgctgcctgaaggaccggttcctgttgccagggccctggcagattatgctgcaggatctgtttcttgaagaagccgctctcagcgtgggtggcgcgctgcagagactctgggctcctgccagatgagggagccccggcggaggccaggagggcttgcgttgcacaatctggagcggatccccgggggcggctgagggcctggg

SEQ ID NO: 45754 - DNA, 171 bp, Homo sapiens; identical to SEQ ID NO: 6540
  chr8:110986092-110986263
  hyper

SEQ ID NO: 45755 - DNA, 830 bp, Homo sapiens
  chr8:110986328-110987158
  hyper
cggggttggcatcgtcgcaaagctccagagggctgggcacggcggccagggccccggggcggcggtaggaagccaccaccacggccagcttgccaaggcgcgtgtgcgggaagcaggacagcgcctgctgcgagagcacgaagcggctgccgcccacgttgaccgtgaagcagtccccgagcgccaagggctccccttcaccctcgctgcagaagacactagagtccagggaggtcagggagccgctgtccagcggcgagtccagcagcgctctgccgctggaaggcatctctaacccagtcgccgcggcctgagggcgccacaaagttggggacacgccggaagctttggtcccgcgagggcggtggcacggcccctggtggcggccgggattccccgggctcccgaaggggttacctctccttggcgcaccctctccacccgctgtgcgccttcctcctcctgccgctagggagccgggagtgcgcggaagcagcgcacaagtggcagaaagaggagacagggagcagaggaagggtcgcgctaagagagaggatcaggtgaggtccaagcccgacacagtccctgtgcacactgccggtcgccctggcccttcccaaacgttgtcaccccgcctcccaacttcgcaattgcgattcccagcccaggaggtgtacagattgaatgactcgctacttggtgggtggaggggttggggaagggaggaaggagggagatgtggggcggaggaggaggaagaggagagaagatgactcttagctgaacgcaagcaagcaagcaagcaagggggatggcgagactcactcctg

SEQ ID NO: 45756 - DNA, 422 bp, Homo sapiens
  chr8:110987602-110988024
  hyper
tgttctgagcacagcggagctctcattttagaaggaaaggcaaaaagacaaggaatagaacaagcgtgggctggggcaggaatttaaatagtaacgacggcctccctcggtaaagggagaagccgaggccagcgcccaggtgagactagaagtgtacccacggggcccctggaagctgcgctccagccaacctgttggactcggggtgaggaggtgggggtgggagggaagagcaagtgactcacctgcagctcccggcacatctggtctgcgcacaaccggcgccgcaggtaacgtactcttcttttgatcctcttagtctacacgtgaggtctgactcgaccggtccaggagggaaactgtgttccagctgagctctacccagcgcctgctgccttgccttgccccgcctccacctccct

SEQ ID NO: 45757 - DNA, 38 bp, Homo sapiens
  chr8:110988233-110988271
  hyper
ctgcatttgattcccgtttccccggatctgtgcttttg

SEQ ID NO: 45758 - DNA, 5 bp, Homo sapiens
  chr8:114444388-114444393
  hyper
tgatt

SEQ ID NO: 45759 - DNA, 757 bp, Homo sapiens
  chr8:114444481-114445238
  hyper
cgttcaagccctgtcagtccggtaaattgggttaacttagcaactcggtggtgcaaagcctccccaaagacaagaccgcattcagggagaagagaaccagcctcatgcctgagccgatctttcttcctttggttgtcctccttcattattattctgcaatgcgcagcaatccctgtgcgtgcccctgtgtcagccccttagctggtcactccagcggggctgggagaagaccactttggctactcagatggcactatgctgtttaatttcttctgctctctccctcagagtctaactaagcccttgcagcacttgagccgggggctgccctcctgctggcctttccgtcgtcgttgaacggatctgggggacggggacgttgcagaggagccacaatccccactcgttgtttccccaatgtgctttccgaactccccgagtgcgtcttagataagttatttgagtgaggacagcgctgcggtccgcctggagaaagggagcttcctccgcacttctacttcatcgtgacagcagtggtcgcagcgccactggccatctggagtcctgggaacattaaagcgctgttacccgccaggcgtttccgcctaggacacactcacacccaccctcggagactcctaaaggtttctccgtgtcaattcatgtgtcctcctcccagcagcacacacgcacacacgcacatcaacagccaagtcagccacccagtttcaacttcgggttgtccatgaaaattcag

SEQ ID NO: 45760 - DNA, 354 bp, Homo sapiens
  chr8:114445564-114445918
  hyper
agtccccgggacacacgcggggctgaaagctccggacatggccacctgggcgggcgtctgtaaaaggtgctaatgagtgcctctggcagctcttccccctcataagacacccgcgcccctctccagtagcaactaactgcgggagaggatgcgatttccacttttccaaaagacctctgtggcaggagtagtatctccttggagtctcagagcacgcagaaacgtggatccttcgcgaagtcgctctggcgagaatccctggaaagacgctctggcgtggggtgcgcgacgccgcacccggtctcccacctgctgcctacccagagatctgtgccttcgcggtaccttcgctgc

SEQ ID NO: 45761 - DNA, 181 bp, Homo sapiens
  chr8:114446353-114446534
  hyper
tcattgctgttgaacgcaaaggtgagatggtggagggatgaaaactgtaggcagatggtgtaattctcgtggctagagctgttcacgtggaaaactgcctgcctcggacttcctggaccctcacgctagtctagattagaacctgcaaaatccttacaacggctccccagtctgaggtttt

SEQ ID NO: 45762 - DNA, 622 bp, Homo sapiens
  chr8:114446925-114447547
  hyper
tcaatatctccaaagctaaaccgattatatcagtccaaagtaaattaacgcgcctttcctttctatcggcgcatctcattcggaaaatacggtaggtgcgggcagccggggctctaattgcaggcggcgcggatcagcgttagtcaggctgtaatgctcgccccgcttcggagacttccctccccctcatctgcccccgaatgtgttttggctcaacaggtatcacatgaaaactcgcacttaaaccctggtcatcttctcacaggagccacccttacatttttctgccagggctgctgctggctattcgcgcctcccccacgcgaagcgcgcgtctagcaggcagccccagggccatccattaaccaccaactcccagtggcaggcgaactaagcataaatgtgtggctcctcacccgtcgagccagcgacaaagaaaccttgtaagcaacctgagccgtgctttgtacatttggcagtgtagttgtgccacttaggacaagcttttcggctcagagctgctctgaggccccagagagaaaagaaaaatcaagcttcaaggagcaggttgggattacaaggcagttgctgccacagagaccggggcgactgacttcctggc

SEQ ID NO: 45763 - DNA, 30 bp, Homo sapiens
  chr8:114448650-114448680
  hyper
ccaactcacgtattcgtttgagcatactgc

SEQ ID NO: 45764 - DNA, 262 bp, Homo sapiens
  chr8:114448996-114449258
  hyper
gcggccacatttagcgcatcttcgcttgccaggctcccagggtttggattcctttgctcggctttcccctttgcggatccctttcatattattcgcgagctcctaattcctgctcctcagcccggcgcagtggagttgttgctgttgttggtgcgcggtcacagctcggagtgaatggtgtttctgggataccacagcaaccttgacgaggactcaaccatctctccaacgggggcacaaagtctccgctactctggattct

SEQ ID NO: 45765 - DNA, 514 bp, Homo sapiens; identical to SEQ ID NO: 6548
  chr8:114449744-114450258
  hyper

SEQ ID NO: 45766 - DNA, 31 bp, Homo sapiens; identical to SEQ ID NO: 6549
  chr8:115172751-115172782
  hyper

SEQ ID NO: 45767 - DNA, 275 bp, Homo sapiens; identical to SEQ ID NO: 6550
  chr8:116660296-116660571
  hyper

SEQ ID NO: 45768 - DNA, 215 bp, Homo sapiens
  chr8:116660615-116660830
  hyper
cgataacacgcccacagcccgggcgccgagcacgcgtggtggcggccgcaggcccggggctcctgcgagagcgaacgccagcgacacacacgcagctcctgttgtgtcgccgctgccgcctaggcagggccgcagacagcagcctccttcccagactgagccaactcactctcaccgtagctgctccagaatccgtgaaaagaaaatggaatgct

SEQ ID NO: 45769 - DNA, 30 bp, Homo sapiens
  chr8:116680621-116680651
  hyper
tccccgctcgcgatcgcccacattttgcgc

SEQ ID NO: 45770 - DNA, 30 bp, Homo sapiens; identical to SEQ ID NO: 6552
  chr8:116681233-116681263
  hyper

SEQ ID NO: 45771 - DNA, 152 bp, Homo sapiens
  chr8:116681607-116681759
  hyper
ggccgccaaaccgacgttccccagacactcagagatgctaacagaaacaatttaaagaactctcaaagtccttttaccttttctgttgttactttcccttctctctcccaattaaacgacgcaggatgtgtgtgtgcgtgtgcgccccctcc

SEQ ID NO: 45772 - DNA, 30 bp, Homo sapiens
  chr8:117209532-117209562
  hyper
tgagaagttgagaggaaaaaaaagtgaaga

SEQ ID NO: 45773 - DNA, 30 bp, Homo sapiens
  chr8:117624077-117624107
  hyper
gcttctcacgggctgttctggtatcaggaa

SEQ ID NO: 45774 - DNA, 30 bp, Homo sapiens
  chr8:117630667-117630697
  hyper
agtttcaagactattagctgttaaaggtta

SEQ ID NO: 45775 - DNA, 30 bp, Homo sapiens
  chr8:117647772-117647802
  hyper
aggcttatggcatacgaggctctctagacc

SEQ ID NO: 45776 - DNA, 30 bp, Homo sapiens
  chr8:117768016-117768046
  hyper
ccttccttgcgggacgccatctttccaagc

SEQ ID NO: 45777 - DNA, 258 bp, Homo sapiens
  chr8:117778543-117778801
  hyper
gtggccccagactgcgcatgtgcgcccccgtgcggaatcgcgcaccccagcggttttccagcgtacgcacaagttccgccctaagggaccgcccctttaagcgcgggcactgcggtggaagcgcgcgctggtctggacatgacgtaaaccaatgggcaggcccggaagacagaggcgtttgcttccgtggccaaaggcgcttcatttccgggtgaaactggcattgagggtactggggcgtgcgtgaggcgtttactg

SEQ ID NO: 45778 - DNA, 1759 bp, Homo sapiens; identical to SEQ ID NO: 6554
  chr8:117858171-117859930
  hyper

SEQ ID NO: 45779 - DNA, 85 bp, Homo sapiens; identical to SEQ ID NO: 6555
  chr8:117861183-117861268
  hyper

SEQ ID NO: 45780 - DNA, 162 bp, Homo sapiens; identical to SEQ ID NO: 6556
  chr8:117862855-117863017
  hyper

SEQ ID NO: 45781 - DNA, 150 bp, Homo sapiens; identical to SEQ ID NO: 6557
  chr8:117864185-117864335
  hyper

SEQ ID NO: 45782 - DNA, 175 bp, Homo sapiens; identical to SEQ ID NO: 6558
  chr8:117864772-117864947
  hyper

SEQ ID NO: 45783 - DNA, 225 bp, Homo sapiens; identical to SEQ ID NO: 6559
  chr8:117866482-117866707
  hyper

SEQ ID NO: 45784 - DNA, 124 bp, Homo sapiens; identical to SEQ ID NO: 6560
  chr8:117868403-117868527
  hyper

SEQ ID NO: 45785 - DNA, 134 bp, Homo sapiens; identical to SEQ ID NO: 6561
  chr8:117868876-117869010
  hyper

SEQ ID NO: 45786 - DNA, 222 bp, Homo sapiens; identical to SEQ ID NO: 6562
  chr8:117869490-117869712
  hyper

SEQ ID NO: 45787 - DNA, 108 bp, Homo sapiens; identical to SEQ ID NO: 6563
  chr8:117870589-117870697
  hyper

SEQ ID NO: 45788 - DNA, 113 bp, Homo sapiens; identical to SEQ ID NO: 6564
  chr8:117874066-117874179
  hyper

SEQ ID NO: 45789 - DNA, 131 bp, Homo sapiens; identical to SEQ ID NO: 6565
  chr8:117875367-117875498
  hyper

SEQ ID NO: 45790 - DNA, 177 bp, Homo sapiens; identical to SEQ ID NO: 6566
  chr8:117878823-117879000
  hyper

SEQ ID NO: 45791 - DNA, 30 bp, Homo sapiens
  chr8:117886522-117886552
  hyper
ggcctcctgggggacgtgagatggacctgc

SEQ ID NO: 45792 - DNA, 114 bp, Homo sapiens; identical to SEQ ID NO: 6567
  chr8:117886848-117886962
  hyper

SEQ ID NO: 45793 - DNA, 39 bp, Homo sapiens; identical to SEQ ID NO: 6568
  chr8:117887066-117887105
  hyper

SEQ ID NO: 45794 - DNA, 541 bp, Homo sapiens
  chr8:117950438-117950979
  hyper
atctttcagcagcagcggtagagcagtgaccaggcgtctccgcgatgggccccggggacttccgccgctgcagagagagaatttcccaggggctccagggactcccaggtagagcggagctttggttcccacctcgtcccgcgtgcgacttcttcggggacggcaggagcacggacatccaggaggaggccctcgccgccagcccgctgctggaggacctcagacgacggctgacgcgcgccttccagtgggcggtgcagcgcgcgatctcgaggcgcgtgcaggaggcggcggcggcggcggcggcgcgggaggagcagagctggacgggcgttgaggccaccctggccaggctgcgggcggagctggtgagagagcgggctaggcggacggctcccagggctccctctcccgggtcctctcctccagctgcagagccgctggccgcgtagcccacccgacgccttggggggcccctcaggtctggacacggcgttgacgcccccgcctccccagcatcgttgggaaggaaaagggccct

SEQ ID NO: 45795 - DNA, 23 bp, Homo sapiens
  chr8:118532845-118532868
  hyper
ctacttaacccgtccgtcctttc

SEQ ID NO: 45796 - DNA, 208 bp, Homo sapiens; identical to SEQ ID NO: 6570
  chr8:119123497-119123705
  hyper

SEQ ID NO: 45797 - DNA, 30 bp, Homo sapiens
  chr8:119124447-119124477
  hyper
cgcgcggccccgggcgccctggagaatctg

SEQ ID NO: 45798 - DNA, 30 bp, Homo sapiens; identical to SEQ ID NO: 6571
  chr8:119634587-119634617
  hyper

SEQ ID NO: 45799 - DNA, 253 bp, Homo sapiens; identical to SEQ ID NO: 6572
  chr8:120220352-120220605
  hyper

SEQ ID NO: 45800 - DNA, 340 bp, Homo sapiens
  chr8:120220895-120221235
  hyper
ggcatccttgtcccccgggctgtcttcctctgcgtccgcccccggcctccttcccttcgacgtggctttgtcctgcgctccctcccggggtcctctcggtgccccgcgccgccgcccgggccctccctcctagcacctgttacgcgggcacctgctcccccgcgggcgacggaaattgcctggggagggcgagtaggcggcccggcagggccgaacattggggacgtggaggaaagaaaggtgttggggctcagaggcgcctttagaaacccagggcatggccaggggccgcgcttggccggagcgagctcctggctctcggcctcgcctgttgctaacc

SEQ ID NO: 45801 - DNA, 215 bp, Homo sapiens
  chr8:120428492-120428707
  hyper
cacacacaggcacacgcaggccccggcgccgcgccctaaggagagcagcacccacagccaattgccatggcaaccccggggttcgttccacttccccacccagccgatctcccccctcctccctgcactgcagccaaccggcttgtgcgcgtcccaggagcgcgctataaaacctgtgctgggcgtgatcggcaagcaccggaccagggggaagg

SEQ ID NO: 45802 - DNA, 30 bp, Homo sapiens; identical to SEQ ID NO: 6574
  chr8:120651383-120651413
  hyper

SEQ ID NO: 45803 - DNA, 176 bp, Homo sapiens
  chr8:120844817-120844993
  hyper
ggagcttggcttcccggcttcctagggggatacggggcattactagtctttggcacctcacactctccactcccctgcggtccccaagtcacgtctcgcagctggccggtgcccaggtgagcgacctgacgggtcgctgcccgcctcaacctcgctccttcgactagctcctagaa

SEQ ID NO: 45804 - DNA, 30 bp, Homo sapiens
  chr8:120845214-120845244
  hyper
tttaatggatgaagcgagaacagcaggaag

SEQ ID NO: 45805 - DNA, 59 bp, Homo sapiens
  chr8:120885838-120885897
  hyper
tcctccatcggccccgccccccgaccatgaggggctctagccacgcccccaagctcaag

SEQ ID NO: 45806 - DNA, 30 bp, Homo sapiens
  chr8:121136147-121136177
  hyper
tgcaaataacacattcgaggagagcagagg

SEQ ID NO: 45807 - DNA, 1151 bp, Homo sapiens
  chr8:121136772-121137923
  hyper
cagaaatgtccatttcgatacctccagctgattcccctgcaccttaaagtttgagcatcgctgctttggcgttttagagcccttggacttgttcacaagaggaagagggagaagaggaggctcgaagggggcctttatagtggatacctgtttcactcggagctcagggtctttgacgcgggaaggcaaagtctgtcttttggaaatggggaagtgggcacacagcacctgagaacaggagggctcgagacctcccaaagagagcagggggcctggtttgggagcttgcagtagcttctgccccagtggaagggaaagagcctggctcgctctcggcgcgccacatccggctgccgcgcgcacctggggggaccgccaggttcggggtaggcgagcgcgtgagcggcacggggctggcttctccacatctccggtagggcggggatgggggagaggaggaggagagaaagtgggggcgttatgggcttaggcctgcctcccacctccccacctcccgcctccgcggccaccctccgctctataattggctgccggcgggccttcctttcctcttatctgatcctgggctcccagctggagaggcggaggcagctccagggggctggaagtggaagcgcagcggcagaaggagagggagagagaaagagagagaggctaattaaaaaaggatactccgagggaagagagcaagggcggtgcgccgccaaggaccaactagcggcggagcttcgatcttgcctaggcgcggagagctcccaacctgggctggaaccttgcccagcacaggtcagttcgtctttctctgctcttctttggctcggcttcgaagtccattcatgagcaaggaaaagtggaggcagcgagccacctgcagacgcaatgcagttccatggactttcttttcacgcgcgcgcccagaatggactggggacctttgggacgggatgggacgggtacacctggatgccttttcgcggggttcacggtgtagggagattagaggcattgggtgatgagagcgcagggatagtggaaataccatgtgctgctccgggaagcttttcccagtgtttgagtgacgtgagcgtgtggcgggaagaagctgcgtttggctgcgggacagtggcggc

SEQ ID NO: 45808 - DNA, 30 bp, Homo sapiens; identical to SEQ ID NO: 6576
  chr8:121706824-121706854
  hyper

SEQ ID NO: 45809 - DNA, 132 bp, Homo sapiens
  chr8:121823345-121823477
  hyper
atgctgccaccccctgcgccacccttcccccccccccaacacacacacacccggccccctggggtgtgtccgcatgtggccgagtgagtgtgagtgtgagcgtgcgggtgggaagccgagcaggtgtgtgcg

SEQ ID NO: 45810 - DNA, 31 bp, Homo sapiens; identical to SEQ ID NO: 6578
  chr8:121824597-121824628
  hyper

SEQ ID NO: 45811 - DNA, 50 bp, Homo sapiens
  chr8:122651540-122651590
  hyper
tcccagcccagacacgtgggttggagcagcgtcgcgtttctgggcaattg

SEQ ID NO: 45812 - DNA, 30 bp, Homo sapiens
  chr8:122651825-122651855
  hyper
tcctccccaggcaccgcccctgtgctccca

SEQ ID NO: 45813 - DNA, 256 bp, Homo sapiens
  chr8:122652147-122652403
  hyper
ggcgctcgagacggcgcccccagatctcccaccgggcagtgtccccagctgcagctgaggagagaagcgccggcgtgcgcggtgccacgtcggaattggctctggggacgccgcagctgccgaagcgcagcgcgcggtccccacgcacgccctgcctccgggcggccggcgggctggcccggcgaggagaggagggatgcgcgccctcctcccgctcctatctgcgggtgccaccgcctgcgtcagggacccctgg

SEQ ID NO: 45814 - DNA, 50 bp, Homo sapiens
  chr8:122653604-122653654
  hyper
taattctttccagacgtcttgacttctccttccccgccgttgttgccctt

SEQ ID NO: 45815 - DNA, 30 bp, Homo sapiens
  chr8:123792665-123792695
  hyper
ccctcgtccccgcccgggagctgcccaaga

SEQ ID NO: 45816 - DNA, 45 bp, Homo sapiens
  chr8:123793462-123793507
  hyper
gcccttcggtcccacggtccgccactccacgtggtcaagatcaac

SEQ ID NO: 45817 - DNA, 30 bp, Homo sapiens
  chr8:123793910-123793940
  hyper
gattccccactgatcgaggcattttttttc

SEQ ID NO: 45818 - DNA, 30 bp, Homo sapiens; identical to SEQ ID NO: 6581
  chr8:124085345-124085375
  hyper

SEQ ID NO: 45819 - DNA, 30 bp, Homo sapiens
  chr8:124169236-124169266
  hyper
gggcgagggcaggtcgagcagtcggggact

SEQ ID NO: 45820 - DNA, 30 bp, Homo sapiens
  chr8:124169804-124169834
  hyper
accgtttgcacactcgtgaacgcatgaaac

SEQ ID NO: 45821 - DNA, 407 bp, Homo sapiens
  chr8:124172875-124173282
  hyper
ctgccccgcaggtttcggctttttccaaattagcctagggacacaccgcgccactagccggtacagggtaccaggcccgatccccacgccaaggtggccccatcacccagacctgcccagggaagggaggtagaacaggagttgggggtgggggcggtgcagatatttcgctccgtaaagtgtctccagcttttaaagatgtatgtccccaattttccaagaccttctgagccttcgagtggaatgaaactcgaacggcttcccagctgcggcgatgaggtcccgctcctgcagaatcccggcaggagcggagactcgggaggggaccgctggctgcaggcgccctgctggagtccggaacgagggtggtcagggtcgcctccccacggggtcgcagatgagggagt

SEQ ID NO: 45822 - DNA, 30 bp, Homo sapiens
  chr8:124287096-124287126
  hyper
cccttgtcatcacacgcccatcccctgggg

SEQ ID NO: 45823 - DNA, 200 bp, Homo sapiens
  chr8:124408728-124408928
  hyper
cagaatccctccgccgtctgtcccgcccacgccaccaccgtagaacagcaggctcgaaactctcctcccatttgtagagcgaaggaggccgggccaacgtggagaggaacacaggccgacagtatagaggacctgagcggagagtcctggggaaaacgctgacttctttttcttcacatagttccggctcgctgagctcg

SEQ ID NO: 45824 - DNA, 30 bp, Homo sapiens
  chr8:124757645-124757675
  hyper
ggcatggactttaccctgggatgtgtggag

SEQ ID NO: 45825 - DNA, 108 bp, Homo sapiens
  chr8:124778490-124778598
  hyper
agcctcagtcagggacgtaaaggaaggacattattgctaaacgaaaaggtgaggtgctgtaatgagtgtcacatgtggagtcagtctagtgagcgactgtttccagct

SEQ ID NO: 45826 - DNA, 30 bp, Homo sapiens
  chr8:124780409-124780439
  hyper
ttttctctgaaaaccgaccccagtgcctcc

SEQ ID NO: 45827 - DNA, 30 bp, Homo sapiens
  chr8:125385115-125385145
  hyper
ccaccctgtgctggcgttaaacctacagat

SEQ ID NO: 45828 - DNA, 228 bp, Homo sapiens
  chr8:125551278-125551506
  hyper
gcgactcatgactgcgcatggaggacctccccagcggaagcggaagtggccgccggcaactccgcccttccggctggccccgctcagtcacccgcagcaggcgtgcagtttcccggctctccgcgcggccggggaaggtcagcgccgtaatggcgttcttggcgtcgggaccctacctgacccatcagcaaaaggtgttgcggctttataagcgggcgctacgccacc

SEQ ID NO: 45829 - DNA, 30 bp, Homo sapiens
  chr8:125602743-125602773
  hyper
ctgcactgccagcctcggggttactgaggg

SEQ ID NO: 45830 - DNA, 76 bp, Homo sapiens; identical to SEQ ID NO: 6584
  chr8:126010221-126010297
  hyper

SEQ ID NO: 45831 - DNA, 310 bp, Homo sapiens
  chr8:126010859-126011169
  hyper
tcgggagccgccgccgccatctgagggaggtaccctggaaaccaccttttatcggtggggaagtgcagtcgcggtgggcggctctgggggccagcgaaacgggaggcctctaaatctttaggttggggctgcattgccctggagccgcactcttgagtccgaggccatcttttgttggagaaggcgtcggcgttggcgttttcccgaggttgggctgtacagtgtctccgtccgcggaaaaagaagcctctgaacccgcgccggcccgcagcccccgtgccttccggccgctgctcgccgtcgccagagg

SEQ ID NO: 45832 - DNA, 30 bp, Homo sapiens
  chr8:126442457-126442487
  hyper
ctcattgcacaacccggcttcccaactgtt

SEQ ID NO: 45833 - DNA, 45 bp, Homo sapiens; identical to SEQ ID NO: 6586
  chr8:127569471-127569516
  hyper

SEQ ID NO: 45834 - DNA, 31 bp, Homo sapiens; identical to SEQ ID NO: 6587
  chr8:127570026-127570057
  hyper

SEQ ID NO: 45835 - DNA, 773 bp, Homo sapiens
  chr8:127570150-127570923
  hyper
aggatctcagagcgcgacctggacaggtgagtcaccctacctggctcacctgcagcgctacctcctcccggctcgcccgcccttcccccgcgcccgccctcaggctcgggttacctgcacaaactcacccgcggagaggtgaaggccgtggggcctggggaagggctccctgccgcgccccgagacttctagggcgagtttgaaggtgtaggctcggcagtccctcctctcccggcgcgggcggcagcgaggctgggcagagggcagcgcagcgggcagactaggggcatgtctttcccccgcggctgcgtagcgccccgatacttgaaggcggggggcaatccctgttcacaccgcgcttcctcccgccagctggggctgctgcccctcctcagccagctctcgggggaggtggggcgcgaggaggagaggacggcagcctcgcagcctggcggcaacagctcccgcttgggccgggcgagcaacaagcaccggagctggagggacgggattgtagatccggctccgggctcccgggcgggagcgcagcccgtggcatttaaagagacaggcgctcactccccgagctcgggtctttttcacattgcgccgagcggccgggagccccgcccccgccccgcccactcgggcctcgggactccgcccggccacgcccccgcgccggagcgggtttaaatccccctgtaaataatccacccgccgcctggggctggtgctgtgagctctgcttgccttccgagacaagttagaag

SEQ ID NO: 45836 - DNA, 30 bp, Homo sapiens
  chr8:127707255-127707285
  hyper
gtaatttacaatatgcgataacctgggcta

SEQ ID NO: 45837 - DNA, 30 bp, Homo sapiens
  chr8:128355602-128355632
  hyper
atctcatcaaaagaaagcagaacgcagata

SEQ ID NO: 45838 - DNA, 30 bp, Homo sapiens
  chr8:128407427-128407457
  hyper
aaatcttcatctccaattaaggcttcctgt

SEQ ID NO: 45839 - DNA, 30 bp, Homo sapiens
  chr8:128413289-128413319
  hyper
ctcagcagatgaaaggcactgagaaaagta

SEQ ID NO: 45840 - DNA, 30 bp, Homo sapiens
  chr8:128424776-128424806
  hyper
ttctggagtgctaccattacatccatgttg

SEQ ID NO: 45841 - DNA, 30 bp, Homo sapiens
  chr8:128718052-128718082
  hyper
gagttaggagaacccgtggttgatggcttt

SEQ ID NO: 45842 - DNA, 30 bp, Homo sapiens
  chr8:128719868-128719898
  hyper
gtggctgagattttaattgttctcaattgg

SEQ ID NO: 45843 - DNA, 386 bp, Homo sapiens
  chr8:128747383-128747769
  hyper
gaaattgggaactccgtgtgggaggcgtgggggtgggacggtggggtacagactggcagagagcaggcaacctccctctcgccctagcccagctctggaacaggcagacacatctcagggctaaacagacgcctcccgcacggggccccacggaagcctgagcaggcggggcaggaggggcggtatctgctgctttggcagcaaattgggggactcagtctgggtggaaggtatccaatccagatagctgtgcatacataatgcataatacatgactccccccaacaaatgcaatgggagtttattcataacgcgctctccaagtatacgtggcaatgcgttgctgggttattttaatcattctaggcatcgttttcctccttatg

SEQ ID NO: 45844 - DNA, 114 bp, Homo sapiens
  chr8:128747993-128748107
  hyper
acaggacaaggatgcggtttgtcaaacagtactgctacggaggagcagcagagaaagggagagggtttgagagggagcaaaagaaaatggtaggcgcgcgtagttaattcatgc

SEQ ID NO: 45845 - DNA, 30 bp, Homo sapiens
  chr8:128749836-128749866
  hyper
ggggtgttaaagcccgcggctgagctcgcc

SEQ ID NO: 45846 - DNA, 30 bp, Homo sapiens
  chr8:128806923-128806953
  hyper
ggaaaggatgttggcggtccctgtgacctg

SEQ ID NO: 45847 - DNA, 30 bp, Homo sapiens
  chr8:129194625-129194655
  hyper
atggaacacagctacctcccaccacccttc

SEQ ID NO: 45848 - DNA, 30 bp, Homo sapiens
  chr8:129541915-129541945
  hyper
atccttagcctcagaggttaactgtgaaaa

SEQ ID NO: 45849 - DNA, 30 bp, Homo sapiens
  chr8:129543933-129543963
  hyper
agaagggaaaagaacgttgactgagtgcct

SEQ ID NO: 45850 - DNA, 30 bp, Homo sapiens; identical to SEQ ID NO: 6589
  chr8:130647087-130647117
  hyper

SEQ ID NO: 45851 - DNA, 30 bp, Homo sapiens
  chr8:130952318-130952348
  hyper
cgcaaatatcgcgccgagatagcttctgag

SEQ ID NO: 45852 - DNA, 31 bp, Homo sapiens; identical to SEQ ID NO: 6590
  chr8:131081757-131081788
  hyper

SEQ ID NO: 45853 - DNA, 30 bp, Homo sapiens
  chr8:131370314-131370344
  hyper
ctggacgtggtgggcgagttgtagtcctcg

SEQ ID NO: 45854 - DNA, 1222 bp, Homo sapiens
  chr8:131455077-131456299
  hyper
gtcgctctcagaaaacgcagcaggtcccaaaatggtacaagcagaaaacacaagccacttcacggtccgcccaggagccaaccccaagctccaagtaggactccccccacccccttccctttcgtttctcttcttttgctttaggcaagtggcctggggcctgccaagcagcgccgggtccgggtaggggccgggggccgcggggaactttcctcggctgcaccagagacaatgccgggagggcgccccatcggcggggtccgggccgccaagcacgtcgtcccgggccctcccccggagggggacgcgaaaccccccagggcgggccccgtccccggccccactgcaggggccccctctcccgagctggaggcgaggagacctcccccccccaccgggcggcctcgcccggccccgcagagcctggccgcgcgtcccgcacacgccccagcccagggccggcgccctccccgcggagaaggacaccccgctgcgagaggagccgggagcccgccccgcgccccgtcccggcgcccttcttcgcgcgagagactgggcagggggcgcccgcgactgtgggcgactccgcccggccccgccgagcgcgcccgagcgccccgcaactcaccgggacctggcgggccgctgggcattattccatcgcgggttcggccgggcgctcgcggctctcgggtgggaaagcgaactgcgaccgggaagcgccggctgggcgggaggcgcgggcccggggctgcccagcgcacagtgctcgcccgcggcagcggccaggccaggcgaggcgcgggagccgagcgcggcgcaggaaggggcgggcgaccatgtgccgagggggaggaggccgcggcgacgcgagcggctcgcacgatcccgctcggcggcggagggcgcgggtttcaggaaatccaaacacttcgacaggaaatcggaatcctgactaagcattcccggccccgagccgctccgcgccgggggctcccgcctcgcttaacccttggcccgccggcagccacgaggggggcgtgggaggggccccagacctcggccggggtcgggcgtccttcgccttccgccccatgccccggccggccggcctcctccccgcctgaggtggaaggggtgggatttatccacagaaaaccctggacgcggaaggtgcctttctaaggccgggacagcggcaaaggacgtgcctgtcttccat

SEQ ID NO: 45855 - DNA, 309 bp, Homo sapiens; identical to SEQ ID NO: 6592
  chr8:132051990-132052299
  hyper

SEQ ID NO: 45856 - DNA, 117 bp, Homo sapiens; identical to SEQ ID NO: 6593
  chr8:132052398-132052515
  hyper

SEQ ID NO: 45857 - DNA, 1994 bp, Homo sapiens; identical to SEQ ID NO: 6594
  chr8:132052589-132054583
  hyper

SEQ ID NO: 45858 - DNA, 212 bp, Homo sapiens; identical to SEQ ID NO: 6595
  chr8:132054593-132054805
  hyper

SEQ ID NO: 45859 - DNA, 30 bp, Homo sapiens
  chr8:132916391-132916421
  hyper
cttggttgcgtgaccgcggggtccgcgtcc

SEQ ID NO: 45860 - DNA, 122 bp, Homo sapiens; identical to SEQ ID NO: 6596
  chr8:132917186-132917308
  hyper

SEQ ID NO: 45861 - DNA, 10 bp, Homo sapiens
  chr8:133492100-133492110
  hyper
aaatgtgcac

SEQ ID NO: 45862 - DNA, 503 bp, Homo sapiens; identical to SEQ ID NO: 6598
  chr8:133492127-133492630
  hyper

SEQ ID NO: 45863 - DNA, 1039 bp, Homo sapiens
  chr8:133492712-133493751
  hyper
cgcctccgccgcccccgtcgccgccgccgccagccgcccccgccgccctgcgcgccttgagccccatctgcctcgcccccgccggccgcttcgccttctccgctgctgctctgggaagaaggggcgctcggggtgcgtgaacgaggcggcggcggcggctgcaagcccgggaactccaatgccatgatccgcgcgcccctccccacccccccccaaaagcaggcaaaggcgggccccctggggggcaggggaggccaggcagggggtcagggggtcacatcccgcgcgggtcagccgcaggaccccgagggtcgcgggccgggggctgcggagaagctgggagggcgcgcgaggctggcgcggaggcgctagggcgcgcggcggcgggagcctggaaccggcgctccggggcggcggcggcggcggcggcacccaggccggcgagcccaagacagcatcgcagtttatttacaagcccggtgccagccgccctcccgcccgccagccacacgcgccgccgccgccgcctcctccctcctccgcgctcccacccgcgcccctccccgcccgttccagcctcagcctgtcagcagcagcagcagcgagcgcgccgcgggccgagagcacgccgcgtccctccctccctccttccccggggtggggccccattgtcccgccccgtcgcggcgggaggcccgggcggcggcgccccgcctcttcccgccgacccccaccgctgattgtctggggacccaggatcgcctgggctaccgccgcccccgttgcaaccaggcagtgcgccaggcggctgcagagcccggctcctggagctcccgtgggcgttggggcttcccctggatggggcgtgacggcgggcagttgggggaagaagaggaagggaggagggactggggggttgtcgcccaccaaacattggctctgtggttgcagctttgtgaatttccctcaccccctacccctgctcctcggcttcagaggtaaaagccaagttgtcgggttggtcaaggccgggcgcacc

SEQ ID NO: 45864 - DNA, 8 bp, Homo sapiens
  chr8:133493782-133493790
  hyper
cgtgactc

SEQ ID NO: 45865 - DNA, 607 bp, Homo sapiens
  chr8:133687387-133687994
  hyper
gccacttggccggaacgtggtgtgtctggcgccaaaacccctgcacgttccccgacccctttcctggagtccagtgcctttctgcctcttcctccccttcccacggccccgcccattttacagattaggaacctgagctggaaaaggccaggctgtccggccagtctgcagaggacctggtgcagccggggctgcggtgcggagggccgggtggggttagggtccgcccaggcgcgggggaaccgacagcgcagggcgggagcgggcggcgaggatcccacgagacccgggactacttccacaaggggaacgatcgaggacggaaggtggaggggggcttactccagcccatggcgcctctccagttcgctgaccccgcaagccggacccggacctcgaatgacgcttttcacccttcacccctgctcctcagcgcgtccccgtcggaattcaggagccatggcaacggggactctacggcggccgcgcgggaccaaaacaagccgcgtttcctgagctccgcggagcaagcagaggagaccgcagtgaaggggctcagcagacaggggttccccaacccaaacccagtcttcgtcctcgtcgcact

SEQ ID NO: 45866 - DNA, 30 bp, Homo sapiens; identical to SEQ ID NO: 6601
  chr8:134232949-134232979
  hyper

SEQ ID NO: 45867 - DNA, 678 bp, Homo sapiens
  chr8:134308717-134309395
  hyper
cctccccccacacacacgcttacactcacacatgcacaccgccctgtgtgtgctacgggactgaagcgccaccagcctctcggatccacacccgttcccgacccagtctgcaagccagacacacccacgcccccctctccagcctccttgccagcgccactcacctctaccaacccctcatctacacactcgcgcgcaatctctccgttcccagacacagacacacacacacacacacacacacacacacacacacactcacctagtcccttctgcacccacgtccagcgcgcacccctgccagcggcgccagctgggattcggagacgacgccaggaaacgctatcctggtattttttcggaccgtctcatcgcccccttcccgacctccagaaccccaatccccagctaggggggagatgaatgggaccctgtctttttttcctccctttccgtaattgaaccccccacttcagcggtgtctgcacccaaagccccctcgcgcccgcgccccggggtgaccgcgcacttgcagctccggggcgcttactcctggagtacgcggggctacaaagggcggtcctggcgctccagcggcaccgcacgggcggcccctttctgctccgcgtcgcgcctgggagaagagggcgcgggcttacctaacgcgagggagaaagg

SEQ ID NO: 45868 - DNA, 145 bp, Homo sapiens
  chr8:134465705-134465850
  hyper
ctggcctggaaaagcgggcggcggggccgactgcagcatagcaccacctcgtggccgctggtccacattgcagctgtgatgtgaggccaaccaggagcgaatttgggggaggctgtgtctcctatagaacggatggctgggtggg

SEQ ID NO: 45869 - DNA, 31 bp, Homo sapiens; identical to SEQ ID NO: 6604
  chr8:134581318-134581349
  hyper

SEQ ID NO: 45870 - DNA, 1226 bp, Homo sapiens
  chr8:134582425-134583651
  hyper
cagagcgggggtgggcgctcgctgtctccctggagaaccagctcgtcgcaaacttgcggggcttggggacccgcgagggggagaagtcgggagaggccaggggtgcccggaaacaatcacgagaaagccgggcgaatgcctgatgcagggacgcggcgagccagtcactgccctcagggtcacggctgactccctctgcgggactcgcccagcccgcgagacgcagtgacctgcccaacccccacccccttgcgcgcttctgggtgcgcacgtgtcccctcgcccaacacaccaccgagccccgcgcatggtacggccgccgaggaccctagcgtaggagggaggagcgagtcagggctccagctgacgagcagagccagacgatccccacacgcttcctgggagacccggctgcaaggccaggctaatgcgcgctccgacgtctctgtgccaagccggggcgcaagctcaacccccatctcaagttcagccgcgcttcctcccgcaaggtcacgcttaaacactcgcgcagagaaaggaggagcggaaagttgcgccaccgtcccgattccaaactaactgtaccctcaccagagcgcctcgccccagggtcaccgctgtccgtccccgtgcgctcccagaaggggtggccctgcccccacgcaggtcacacacacgagagacacaggcaagttgctaacttttgtcagattatttcttgggagctgcgacgcctcacggggttggggcggattcagagtttcgagttgccactaacacgactccggccgtgctctccttggcccacccgcgtcccccactgtccgccacgccgcgttcagctctcttgtcccgggtgtcaacttcacccccagatccggagcagcgcgctctgacggcgtccccggggccgatagccacctcccggatctgcgcctgcttgcagcggattgggggactcgatccggatactgtcccacggccgctcgtccagaacactggcggcctccgcggtgtcccagcctgtgaccccaaatccgctcgagagcgcctgagcccggccacccagcgaggtctcctcccacgggcggccccagcggaggagatcccagcccggcgccgggtgcaatgtcactggggctgctttcgggaaccgctgcccgggacttggcgtaggttccccacagagctccaggcagctcctccagtgtcggccgaagacccct

SEQ ID NO: 45871 - DNA, 30 bp, Homo sapiens
  chr8:134583881-134583911
  hyper
cggacgcagcccccgcgcaccccgagcagg

SEQ ID NO: 45872 - DNA, 30 bp, Homo sapiens
  chr8:134584528-134584558
  hyper
cggggacctgatcggcgccccgagaggagc

SEQ ID NO: 45873 - DNA, 312 bp, Homo sapiens
  chr8:134584858-134585170
  hyper
gccgggcactgcggccggccctggtcccggccccggccctggcccagcccttgccctggctcgcctgccgccgctttttccttccagatgcggaggctgcggctggagcttggggtttgcggattaggcttgcagttattcagccctccctcttttacagggaagcgggggcggtggagacttcttttgctgaaaggcagagtgcagcgctttgatgctaaatgcagtacacaagtcatgtaaatctggttttacggttcttaaccccttactgagactacctctttcgcaacttttcggaggaatgttaga

SEQ ID NO: 45874 - DNA, 30 bp, Homo sapiens; identical to SEQ ID NO: 6605
  chr8:135697752-135697782
  hyper

SEQ ID NO: 45875 - DNA, 31 bp, Homo sapiens; identical to SEQ ID NO: 6606
  chr8:135703767-135703798
  hyper

SEQ ID NO: 45876 - DNA, 30 bp, Homo sapiens
  chr8:135725522-135725552
  hyper
ggcctctgctagcgcgaccctagacccgcg

SEQ ID NO: 45877 - DNA, 30 bp, Homo sapiens; identical to SEQ ID NO: 6607
  chr8:135843827-135843857
  hyper

SEQ ID NO: 45878 - DNA, 30 bp, Homo sapiens
  chr8:136468977-136469007
  hyper
gatgagctcagacgcggctcactcagctgt

SEQ ID NO: 45879 - DNA, 30 bp, Homo sapiens; identical to SEQ ID NO: 6608
  chr8:136469758-136469788
  hyper

SEQ ID NO: 45880 - DNA, 30 bp, Homo sapiens
  chr8:138741514-138741544
  hyper
ggtatgtgcctggatcggctaggctctgaa

SEQ ID NO: 45881 - DNA, 30 bp, Homo sapiens; identical to SEQ ID NO: 6609
  chr8:139301362-139301392
  hyper

SEQ ID NO: 45882 - DNA, 72 bp, Homo sapiens
  chr8:139508874-139508946
  hyper
gagttttgcagctgccgaccccgaagcgctctcacctacctgtctccactgcagggctcccctctctctccc

SEQ ID NO: 45883 - DNA, 530 bp, Homo sapiens; identical to SEQ ID NO: 6610
  chr8:140714564-140715094
  hyper

SEQ ID NO: 45884 - DNA, 368 bp, Homo sapiens; identical to SEQ ID NO: 6611
  chr8:140715219-140715587
  hyper

SEQ ID NO: 45885 - DNA, 322 bp, Homo sapiens; identical to SEQ ID NO: 6612
  chr8:140715699-140716021
  hyper

SEQ ID NO: 45886 - DNA, 423 bp, Homo sapiens
  chr8:140716339-140716762
  hyper
cgaatgtgtgtgtgcgcgtgtgtatgtgcgtgtgtgtgtgtgtgtgtgtgtgcgcttggcagccccgctccggcgggagggcctcggggagcgggggccgggctacgccgaggccgggcctccctccctccctccctcccgcagcctccagggcgcgccacctcccgcctggtccccagccagctggcgaggctgctgtggcagctcccgctgcagacccagcgcggcgcagggcgcacgcggagggagcccgggaggggcggcctgagccgccagggagggggcgggggcggagccgccggcgggttttggcgggggatgggaggataaacgcggcttcttgggtccttctagccccgctccccaagagcgcaagcagccctggcgggtggagagtttgagggactcggggttggaggagga

SEQ ID NO: 45887 - DNA, 94 bp, Homo sapiens; identical to SEQ ID NO: 6614
  chr8:140717082-140717176
  hyper

SEQ ID NO: 45888 - DNA, 152 bp, Homo sapiens; identical to SEQ ID NO: 6615
  chr8:140717235-140717387
  hyper

SEQ ID NO: 45889 - DNA, 38 bp, Homo sapiens
  chr8:141400091-141400129
  hyper
aacagctaaagcaaaacgataaagatgaaggccaggcg

SEQ ID NO: 45890 - DNA, 82 bp, Homo sapiens; identical to SEQ ID NO: 6616
  chr8:141644413-141644495
  hyper

SEQ ID NO: 45891 - DNA, 11 bp, Homo sapiens
  chr8:141646330-141646341
  hyper
cggccccagaa

SEQ ID NO: 45892 - DNA, 679 bp, Homo sapiens
  chr8:142010383-142011062
  hyper
agggctccagggctcccgccaagaagcccacggggctctaccaaacttgagggtttgcgttcggggacacggcgggcttggggctcgggcaccggcaggccgctcggagcccacccttggctgcccgcgaggccgcgcccgggggacggaggtcgggccgtcgcgagcctccctctcgcgtccgggcgaaccctgccgacgtccctgcgatttccctcttcctcctcctgcctctccccttttgtttttcaggcattgggtccgctccggcggaggccggcccgtcctccccgcgcctctgtccgccctgcgcgcccccagagccccggcctcctcgtcttcctcaggcccctcggcctctccgcgcgcccggccttttcgaaagccgccccccccttcctcctcacgtctcccggactccccacgtcccccagcctttctgtcttccccgaaccccttggcctccccgcgcgcccccaaaacccccgacctcctcgagctcccggcctccccacgtccctcagcctcccagtcttccccaagcctcccgaccacccagcgccccgaacccccgcctcccagcgcgccccctgacctccttaagcctctcggcctccgcgagggcccccaacctcctcacggccaccggcctcccctcctcccagaacccgggccgggg

SEQ ID NO: 45893 - DNA, 1210 bp, Homo sapiens
  chr8:142011091-142012301
  hyper
cgccccgggactggttgggcggccccgctctgcccctccgccctcagggccgcggcccagcccacgaccgctgcacagaaggagcccgcccagcccccgacccgcgccccgcgcccggcgccccgcactcactcggaccgcggctcggcgccgtgaagcgaaggcagacgacgacggggcggcgctgggcgacagcagccgcgcttcctcccacgcctcacgccgcgggctcacagtggtccgggaccggcggcggcggcggcggcgcgggctcgcgccctcgaggccgtgctgcgtcggcgcgggcccgcgcgcgtgcgcggcagccggctgaggcgcgcgtcctctctcggcagcgcacgcccgacccggtctcagtccggagttcccgcctctcggggggactgggcatgcgcgccgcccccgcgcatgcccagcgcgccgctaggctctgctcgcgtaatttgtcctgtagtgaccgcgccggggtttcggggtggcccgaggctgcgcgcgggcgtggcggccggacgaggaaagccctggtctcgggggtggccggggtcgccccgccgagcggacatcctggggtcccacctgcctcgctctccgccagcgggattagacggacttcgggaaagtcctccccatctccttccctgcccccaaatcccgaaggggtcccctctggagaacctccctcctgagcggccctgcggccccgcccccagagttggacgcccgctgtcgggcacccgctgcgggccccgggccttgcagtgcactctccaggcaccacaccgaccctaacgagcggttcctgggccctttttgcagacaaggaaactgaggctcagagattcttttcatggcattatagctaagttgggctgggccattatttgattttggaagatgaaaaatcatgaaagggacttagaagtccactggaggtagacaggttacctaaatgaacgccagcagggaacgagccctgcaatccctcccgagggctacagacctgagacgggctccaggaaaaggagggaaggctcgccccgacaccgacccgggcttccgcggtgtgagccagtttcagcgaggagctagttggttatgaccggaacgtgccgtaggtggggtgggggaaatagcaaaaggcgaggttggagggattgaaaaatgcagacggctgcgtggggcttgctta

SEQ ID NO: 45894 - DNA, 1655 bp, Homo sapiens
  chr8:142138199-142139854
  hyper
tcctggaggcggcagcgggcggcgcgtccggcctttgtccccccacgctctccagggtaggtccagggactgccagatcaggggaccctttgcgtcctggagccttgggggctggatgacgtcgccgggcacctgaggaccccgcccattcctccctcggttccccagggagcgggcggccggcggggctgggcggggccgaaggaaggggccgcttgctccgacgccgcgcacgcgccagggcccgcaggcgggttaggaaatgacgaccgcgcgcgggtctccagcagcacccgccctaggaccggccccgcccccaagtcccggtccctagggccgggcacgccactccaggccccgcccagaacctccccgcccagtcaagccccgcccccaaactctgtctccccgcggtatcctctggggctctccaggccccgcctcggctcgggccccgcccctccaggccccgcctccagccccgccccgcagacggcgctcgcagcgcccccggcccccaggcggcgcggctggtccccaggggtctgcgggcgactgcgcggctgaggcgcccgagtgcggtactggcggcgggcggcgggcagccatggcggaggccgcgtcgccgcacttgtcgctgccctcggggctgctggagctctgcgcgctgctgggcgccccccgggacagtctccgaagtctcgagcaggtgaggggcggggaaactgaggcggacgtgggccacgagtcggcagccgggacagcagtcggagagcgggcgcccgggtgccctgtgggttggcgcggactttccgagggctgagtcccggtcccccggcggtgaccccgcgcgcctgtggccggggatcgcgcccgagctcaggcaggtgccctggagcagcgccctgctcccctcccctcttctctcctctccccgcccggggcccttggtgtgagacatgtcttttgagagctgcgaacttggtccgccggccgggaatctgggggtgccgcccctcggagagtctctggggcctctctcttcagtcgctcccatcttgggcaggtgcttctgaaggtggggtgcaccagacaacgggcggaagccgccggagcctcacggtctagcgggcccagccctcgctgctgaaatgatttcattctttatgctgggatgtgttgtcccctgagtagtgggttttgcaccaggcacagaataacgagagagcaatcttagagttagccgccggcctcgcgtattctgcatgaacccctttgcgatgaagcctatagctatttttctcccttgcggtaccacccccacccccaacccttcctccatctctgcaccctcgcagccaaagtgacaacttcatctcccttctgctgggaaagcggcagttttggaaattctcgttttcctttttcttccccagcttttcttaattctgtaacgctggctttccctggaatccatctgtgtctctggtttcctcctggtccgcctgtctgtgacaccgtgactgggtcatgttacctagagatcccggcgtcactggccagccgtctgcacaggtccgttcatctctttgcagacaacagcatagaaaggcagagaggcttctgagtatttaaatgacgctgggctatccagg

SEQ ID NO: 45895 - DNA, 31 bp, Homo sapiens; identical to SEQ ID NO: 6623
  chr8:142202197-142202228
  hyper

SEQ ID NO: 45896 - DNA, 50 bp, Homo sapiens
  chr8:142297707-142297757
  hyper
aaaaggatcttctgtgcggcatcttttcagtctagcgagagaatgcttta

SEQ ID NO: 45897 - DNA, 891 bp, Homo sapiens
  chr8:142317706-142318597
  hyper
cgcgagtggtgtatcgctggttgaattctcataagttagagatagcaggcaggggttagaaggacaagacagggtcaggaccaggagttagaggcgccaggctcctctctgggtagagaaaccgaggaactgggggcggggaggactgatgggtgcgaaagcgggccgggtccaaatgaaggcgcgcgccccggggtgggggccggggtggggggaatgagggaggctgcagggctggggaccagggcaggtgcaatccggaaagaggaggcgggaaggaattggggggccctgaggagccagcgcaagccgggtgggggcacgtcccctcccccggagaaggtgcggggctggggctgcggcgcggacccgacctggaggccgaggctgtgcgggaggtgggggtggggaggctgcaggtgcccggcgcccaggtgcgaggtgcagggggcggcggggcaggcggctgcgggcggcaggccactcacctgtctcctccggccggggccgcgggggcggcggggcggccgggccgggccgggcaggggctacgggggcgcggagccccgggcgcaccggggtcgggaggcggctgcgggtccgggcgggggctgctccctcggccggccggccgggcggtcagtcagcgacgcgggcgcggagagagcgctgcgaggctgcggccggcgcgcggagacaacgccgctttatcgggtcggaaacagccgctccgcgccgcttccgctgacgcagcgccggcccctgcgcctcatgactatgcagcacccgccgccgcgggacggggattcggggggcggggtctgcgccgcgcgcgctcattggcctccgctgccgcccaccccgcccccgaacggccgccccgcccccgcc

SEQ ID NO: 45898 - DNA, 234 bp, Homo sapiens
  chr8:142425566-142425800
  hyper
gggaccagggtgcccgccgcagccctgggaccctgcggccccggtccctattcgaggccccagccggagcgttccgggatccttcgggggagtgcccagccccgcgcccccgcctcccacatgactccgggtgggcccttttgacgtgcgcggagggcggggggcagggggcggggcgggggggcagggggcaggggtggtgaagggtagggggcgtggcggggagaggggatg

SEQ ID NO: 45899 - DNA, 42 bp, Homo sapiens
  chr8:142528360-142528402
  hyper
gggacgcgcagctctgggaggcgcatttccgcggcatcgggc

SEQ ID NO: 45900 - DNA, 152 bp, Homo sapiens
  chr8:142528454-142528606
  hyper
cgagaacttcacgctgcccttcccgttcgcctggccgccggggtccgaccccgcctgcgggccgctcttctacgacccccgcgaccgcgcagacttcgacttcctgctgcgcggccccggagcttcgcccccagcgctgctgcggcccctgc

SEQ ID NO: 45901 - DNA, 111 bp, Homo sapiens
  chr8:142528670-142528781
  hyper
cgcgcggggcccgggcccggcctcgtcctgctgctgcccggccccgccgccgccttcccggagcccgaggccagcgcttccagcgacggcacccccaggctggcccaggcc

SEQ ID NO: 45902 - DNA, 30 bp, Homo sapiens
  chr8:142626802-142626832
  hyper
ggcgtcacgaaccccgggctcttggtttcc

SEQ ID NO: 45903 - DNA, 37 bp, Homo sapiens; identical to SEQ ID NO: 6626
  chr8:143340515-143340552
  hyper

SEQ ID NO: 45904 - DNA, 42 bp, Homo sapiens
  chr8:143429132-143429174
  hyper
caagtccagaaggacacgccatcacctcgccacactgcatcc

SEQ ID NO: 45905 - DNA, 98 bp, Homo sapiens
  chr8:143483644-143483742
  hyper
gcagtgttccctacccgcgctgccccacacagccgccaccagacacgtgtggctactgagtgtcggacatgtgaccactggcacggaggacctgaatc

SEQ ID NO: 45906 - DNA, 150 bp, Homo sapiens
  chr8:143530665-143530815
  hyper
ctcctaggtgtgcgcgcgtgtgtgcattttatccgcccccccttatctcgctcccctccccccacacccccgccccccgctagcgctccccctctaatgtgtgatctggaagctctataaagcctgatgtaatccgtaatgcagtctctg

SEQ ID NO: 45907 - DNA, 169 bp, Homo sapiens
  chr8:143531567-143531736
  hyper
gccgtttggggcttcgcagctccgaggttttgcgctcagagctcaggagtttggacccccaccccctaccccctcagccccctgccttctccagcggtggcgatggaatgtggcaggtccccgcgagcccgcattgggcaggctgaggagggggcgaccctggacgcag

SEQ ID NO: 45908 - DNA, 526 bp, Homo sapiens; identical to SEQ ID NO: 6629
  chr8:143531983-143532509
  hyper

SEQ ID NO: 45909 - DNA, 1099 bp, Homo sapiens; identical to SEQ ID NO: 6630
  chr8:143532541-143533640
  hyper

SEQ ID NO: 45910 - DNA, 1049 bp, Homo sapiens
  chr8:143533708-143534757
  hyper
cgggcgcttgttcctgccggggtcccgcgcaggggcggatagagggcgattcgtcgcctcggcctcaggcagcactcatccggatcccgggctagggagggggcgcagccaagttgtggagccctcggaggcccttccctctcccgcaggctccggcccctctcggacctcggtggccgcgtccgtgaaatggggacgcgggctctgctctcggatcccttccagcccccgaccctccgcacttgtcccgagatccaacgtgcccggtccgcagcgtgctgggtctgcggcgtcagggtggcccgagtcccgagaccatctgcgcttgcggacacagccgcggggcctggcatgaagggccccagggagggcctagcaagcgcccggggtccgagcagcctcctgcggcgtcctccgcccccggtcggcccgaccccgcctccgggagtgggtcgtggggcgcggagcccgtcctccggggacgccgcggggctccaggcccaggcggccggcgcggggccgcagtggcggaaggcggagggccggcgcgctgccgctgactgccgggagagggcgcccgcaccgcgcccgcgcggccctgcccgccccttccgtctcctccgcgcctggcccgcggctccggccccatcttgggcagccccggccgccacctccctcccgcccgcccgcccgcccgctcgctcgctcgctcgccgtccgctcccgccgccgggtcccgtgacgcgcctcgcgtctcggccggagcccccctcgccggcccggcccggtccccgtgtgcggtgcgctggcgtgagcgcgcgtttgcgtgctggtgtccatgtgtggcgcgcatgcacgtgcgtgcccgtccgggaggctgggggcacgtgtgtgcaggcatgcagacttgcacatgtgtgtgcgtgacgggggcgggtctcgcgccggtgtggccccggatggcaggatttagtcaaaccccgttttaccgtcggctctggctctgggctgcccccgggtctgctctgtgtgcacgggatggacccctg

SEQ ID NO: 45911 - DNA, 30 bp, Homo sapiens
  chr8:143556218-143556248
  hyper
gtccagggcaggctccgtcaggctgtgccc

SEQ ID NO: 45912 - DNA, 291 bp, Homo sapiens
  chr8:143556727-143557018
  hyper
cctccccacccgggccggcctcggcgggcttagcacccccatgacttacccgtccaggccacgagcccctgccctgccctgatccccgccctctggtttccccccaggcggctggaagctgtggtccctgtggggcgaatgcacgcgggactgcgggggaggcctccagacgcggacgcgcacctgcctgcccgcgccgggcgtggagggcggcggctgcgagggggtgctggaggagggtcgccagtgcaaccgcgaggcctgcggccgtgagtgcgggcggggcggggc

SEQ ID NO: 45913 - DNA, 31 bp, Homo sapiens
  chr8:143577913-143577944
  hyper
ccctgggtgttttacacgtaagagttgcaaa

SEQ ID NO: 45914 - DNA, 2 bp, Homo sapiens
  chr8:143591804-143591806
  hyper
ga

SEQ ID NO: 45915 - DNA, 30 bp, Homo sapiens; identical to SEQ ID NO: 6633
  chr8:143592360-143592390
  hyper

SEQ ID NO: 45916 - DNA, 30 bp, Homo sapiens
  chr8:143592706-143592736
  hyper
tggccttggaggcccgggatctccgaggga

SEQ ID NO: 45917 - DNA, 30 bp, Homo sapiens
  chr8:143690509-143690539
  hyper
ggcggccctttcaccgtgaagagccctgct

SEQ ID NO: 45918 - DNA, 30 bp, Homo sapiens
  chr8:143695514-143695544
  hyper
ccagcatctcggcccggcacttcccgatct

SEQ ID NO: 45919 - DNA, 98 bp, Homo sapiens
  chr8:143695807-143695905
  hyper
ctgcggagggaggacgccgcgcccgagctctgcgctgagtcctggccgccggctctttatgcagccagcgaggcccgtgggcggccggctcgccgagc

SEQ ID NO: 45920 - DNA, 30 bp, Homo sapiens
  chr8:143761915-143761945
  hyper
gcccaccagtgaccacgaaggctgtgctgc

SEQ ID NO: 45921 - DNA, 30 bp, Homo sapiens
  chr8:143821025-143821055
  hyper
catcgggggcccctcgcaggtgccctccca

SEQ ID NO: 45922 - DNA, 152 bp, Homo sapiens
  chr8:143859128-143859280
  hyper
cacagaggcagccacgcagtgattccctggcgaccctcagactcacgtgttcagcccggacactccgcaggctatcttcaccgcgtcccgcggcagcccagccttccccgcagccgcctccgcccactcgcccgcgccgcgtcgtttgtcgg

SEQ ID NO: 45923 - DNA, 36 bp, Homo sapiens; identical to SEQ ID NO: 6635
  chr8:144099879-144099915
  hyper

SEQ ID NO: 45924 - DNA, 30 bp, Homo sapiens
  chr8:144100520-144100550
  hyper
actggtggtgcttgcggtgaggtccaagga

SEQ ID NO: 45925 - DNA, 30 bp, Homo sapiens
  chr8:144241392-144241422
  hyper
gggagctgcaggtgcgtccggacaggaatg

SEQ ID NO: 45926 - DNA, 269 bp, Homo sapiens
  chr8:144242014-144242283
  hyper
atttctcggaagaacgtttactgcgaaaggaagcaaaatgcacaaagacgcagagagggggaggtacccggcgcggcgccacgcgcaggtccgggttcgcagacccctggggtcagactcccgccctggggccccgccctccccctcctccccgcccctccccaacctcatacccgtttccccgtttccccgtttccagtggctccaggccgttctcctcccctgagcatccatgaagacccccaccagaagccgcagccccaggggct

SEQ ID NO: 45927 - DNA, 31 bp, Homo sapiens
  chr8:144328305-144328336
  hyper
cgcctagctaggggcccgcggcctggagagg

SEQ ID NO: 45928 - DNA, 274 bp, Homo sapiens
  chr8:144373097-144373371
  hyper
gcgtcctgcagggaggcggggggcagcgcctggggcgctccaagctctcggccccaaggaagcccacgctcgggacccgcgtgctgccacagccccgggggcctggagggtcccgtgagccgagcgggacccgggacaagcgcgggacgccgcggggaacggacgggaacgcgcgtggccgccccacagcgggccttcgacacctcctgacacgtcctgcgggtgcccggtcctcagttggctcgagccggatcccggcgcgccaacggctcga

SEQ ID NO: 45929 - DNA, 30 bp, Homo sapiens; identical to SEQ ID NO: 6638
  chr8:144417248-144417278
  hyper

SEQ ID NO: 45930 - DNA, 416 bp, Homo sapiens
  chr8:144503406-144503822
  hyper
ccatacctgagcctcgtgccgcccgggattgcggcgcccgcgccaccacgctggggtaatggtcccagcaccgctgccctgcgtcctgccgcgccccagcccgcgcgtctcacacaccgcgactgcgtgtctacaggtgccgcctcttgacgcctctgctgcaccgccagtgccccgctcggcaaagcacagcccctccccagcactgcagcaaatgggcaggagacccccgcccggccgggggagcaggggcaacggcagggccccagtagagagggtggagctggagccgaggccgggccaggcgcctgcggggcctaacgcttctgagacaggcgagccgtgctccgtgctccgtgctccgggacgaagggggctgtggggtcggcagagggcttcccgtgaggaggagcaca

SEQ ID NO: 45931 - DNA, 838 bp, Homo sapiens; identical to SEQ ID NO: 6639
  chr8:144508721-144509559
  hyper

SEQ ID NO: 45932 - DNA, 622 bp, Homo sapiens
  chr8:144509987-144510609
  hyper
tgactctccccaaaagcccctcggccttctttgccgagggcagacgcagagggcacaggtctgcggggtgcaggccggctaacgctgcctcgctgctcagtttctccctggtcctgccgtcacccagggcccgtccgtcacccagggccagcacaaagcccaatgcagggccctcctcttccttcaattcagggagaaacacggcaaaactgaaagccaccgaccaaccagccaggctgcggtgacttggatctgaacagatttattttgtgtatttttttctttttctcagtttcgtagcaaatgaaaaaagaactcaacgaaaaccaactacacaacaaaactttcaacgagtcggcgcgccttccactccgagtgctcaggggaggggtgtggagcggctggaatcccactgatggcccctgagggcctccgaaaacgggcagatcccccaggcgcctggcccagcctacagggcctggagcacccgcctcctcgccctctctcccggctagtccaaagagcgacgaagcattaaagaaagattccacaaacaaaacgaaacacaatttaaattaaaataaaaacactttctccacccgccccatgccagaaggctctg

SEQ ID NO: 45933 - DNA, 447 bp, Homo sapiens
  chr8:144510952-144511399
  hyper
tcatgctgtgactcgcgactgagggcggaccccggctggggaaagaaggggcttcctccaaggttttcttttctaatcaccaagcataataattataaatacttcgaaaataagaccgattttaaaacggggaggggaagttaaaaaaggcaaggaaagggaggctgagaagagaacgaaggagggcgggggcaggcaggggccacccgggaagggacggcagcgcggtccctctaggctggcagggcgaaggtgggaacggagaaccacgttcaacgtatgtacaagcggacgcttggaaagaagttagacctggctcaagtttccttagaaatcaccgttctccgctcaacctcaggacggcgacccgggccgacgcgcgcgaacggggaccgggagcgaaggggcctccagccccgcgcccgcagacttggcaccggggccagc

SEQ ID NO: 45934 - DNA, 1083 bp, Homo sapiens
  chr8:144511448-144512531
  hyper
cgaggccccgagaggcctgcgcgaacttgtccccggcgacggcggcgcgggctcggggtccggcgcctacaggaagaagtcggccgtgcccttggccccgccgggaccggcctgcggcggcgaaggctcccgcgggaaaccggccccgcccgcgctcccggggccgccccggcccgccagcttctcgtatttctccttgtacaggtcccgctctttggccaggcgccccacctccagcttcagctgctccacctggctctggagttggcacttctcgctctccagaatgtgccgctgctgcacccgcttgaagcggcaggactgcgcgtagccgcggttcttgagcgtgcgccgcttctgcttgagccggatgacctcctccttgctgaagccgcggagctgccggttcagctcgcgcaccgacatggacaccagctggtcgtcggagaagcgctcctccaggcgcacgtggtggcccgcgccaccgccgtgtcccgcgccgccatggtggtggtggtggtggtggtggtggtgggcggcgtggtgatggtgggcggcgtggtgcgcgccgtggtggtggccggcgcccatgtcgtccgctccgccgccgcccgcgaagcccgggccgcggaaagcctcgtaggctgcggcggccgccgggtggtgcgcgccgtggtgcgcgccgtggtggccgctgccgatgagcgcctccaccgcgtcctcgggcgtcaggttgagcgcctcggggttgaggtgatgctggtagccgctcatccagtacagatcctccagcgccggcttccccgaggtgcccccgacggcgccggggcccccgctcggcggcccgggggcgcccccggcctgagacgagccgccgccgccccccgcgccgccgccgccgccggtgcccgggctgggcgcgcagaagctgggcgaggagggcacggaggagcagggcgtgctgagcggcgtcgaggacagcgagcctggcggcaggcggtggcagaagcgctcggcctcgggaggctccttcttcacctcgaacttcatcaggtcgaagtcgttgacgtactcgatggccag

SEQ ID NO: 45935 - DNA, 30 bp, Homo sapiens; identical to SEQ ID NO: 6642
  chr8:144513145-144513175
  hyper

SEQ ID NO: 45936 - DNA, 66 bp, Homo sapiens
  chr8:144594948-144595014
  hyper
cagggacgaggcaacgtctcctcccacagagcagagttcccacgattaatcgcctaattagagctg

SEQ ID NO: 45937 - DNA, 171 bp, Homo sapiens
  chr8:144614410-144614581
  hyper
agggtggacggaggcgataggaggggcaagcatgccctctgctggccactgggccgcacggcaaggctgaagtgcggcgggggagggaggcggcagcagggctgcctggcagctttcagaagcccctgtccctggtgcataagtccacagggcagtcgtccccagctggac

SEQ ID NO: 45938 - DNA, 30 bp, Homo sapiens
  chr8:144635481-144635511
  hyper
gctcagggcagaggcgccccctctgagggg

SEQ ID NO: 45939 - DNA, 282 bp, Homo sapiens
  chr8:144635846-144636128
  hyper
gagcacttcccgttcggggtgatgattgaagaactgagtgtggacagagcacctgtcctcgccagcgcccagctggaagctgaggtaacttcgtcactgcccgttgacctgcgggcacggtgggccacaccttgctcagccgtccgggccctcacctgcccctcctgcccgcagacggcgcctgcttggcctcagaccaagtcccacaggggctgccgtgcctgccgcctccaccccattcccccaacaaggcagcgaggccttcccggaaaataagcctgg

SEQ ID NO: 45940 - DNA, 172 bp, Homo sapiens
  chr8:144636714-144636886
  hyper
cgcacgtgcatacacgcgcgcaaacgcacacaacacgcacgtgcatacacgcgcacaacgcgcacacaacactcaggtgcataaacgcgcgcaaacgcacaacacacacgtgcatacacacgtgcacaaacacgctcaacacgcacgtgcaagcacccgcatacaaacaggc

SEQ ID NO: 45941 - DNA, 202 bp, Homo sapiens
  chr8:144640320-144640522
  hyper
tcagagttttaagaaaaaccacaaagtgctatgaagtttgaggctaccaggatggggcgccaagccaaggttcctccggacgcgcgaggctggtgctccaggcgggctggcgggaagagggggcaggaagggggccggggcgggctctccgggacggttccgggagggcgtcctgggcgggccctgcgtcaggttgcagttt

SEQ ID NO: 45942 - DNA, 30 bp, Homo sapiens; identical to SEQ ID NO: 6647
  chr8:144640740-144640770
  hyper

SEQ ID NO: 45943 - DNA, 121 bp, Homo sapiens; identical to SEQ ID NO: 6648
  chr8:144641058-144641179
  hyper

SEQ ID NO: 45944 - DNA, 31 bp, Homo sapiens; identical to SEQ ID NO: 6649
  chr8:144681190-144681221
  hyper

SEQ ID NO: 45945 - DNA, 54 bp, Homo sapiens; identical to SEQ ID NO: 6650
  chr8:144691795-144691849
  hyper

SEQ ID NO: 45946 - DNA, 30 bp, Homo sapiens
  chr8:144718726-144718756
  hyper
ggactgggtgtgggcgttcccgcggctgtg

SEQ ID NO: 45947 - DNA, 35 bp, Homo sapiens
  chr8:145149553-145149588
  hyper
tgtcacgcgctgcctgcggccgagacccctgcccg

SEQ ID NO: 45948 - DNA, 30 bp, Homo sapiens; identical to SEQ ID NO: 6651
  chr8:145150007-145150037
  hyper

SEQ ID NO: 45949 - DNA, 62 bp, Homo sapiens; identical to SEQ ID NO: 6652
  chr8:145687373-145687435
  hyper

SEQ ID NO: 45950 - DNA, 30 bp, Homo sapiens
  chr8:145690571-145690601
  hyper
cccaagtgggagtgcgggcctggggaagag

SEQ ID NO: 45951 - DNA, 117 bp, Homo sapiens
  chr8:145692489-145692606
  hyper
ccaggtgagcgcggcggagggggctgctggcaggtaccacctgccccggccttcctggctttcacagccctgctcggattcttgtctccttcgcagtctggcgaggtcccctcactg

SEQ ID NO: 45952 - DNA, 238 bp, Homo sapiens
  chr8:145697348-145697586
  hyper
gtgctgtcctgcctccgaggctacagcgtctgcatcttcacctatggccagacaggcaccgggaagacctacagcatggaggtgggacagagctcacgccccagtgggagaggccccaggggccctgcatgacttggatgtgagcccggtgtgcaccccaccccatcctcagggccctcctgaggaccccggcatagttcctagggcgctgcagtcgctgttccgggagatgggggcc

SEQ ID NO: 45953 - DNA, 124 bp, Homo sapiens; identical to SEQ ID NO: 6654
  chr8:145697858-145697982
  hyper

SEQ ID NO: 45954 - DNA, 85 bp, Homo sapiens; identical to SEQ ID NO: 6655
  chr8:145698667-145698752
  hyper

SEQ ID NO: 45955 - DNA, 625 bp, Homo sapiens
  chr8:145700217-145700842
  hyper
gaagccctcactgggtggtggcgggggactgggcggccggtatggccggccgtgcagcacgtaggggcccaggtccttggcgaaggctccacgcgcacctccgttctgccagcgccggcacagggcggtgttctgcagccggagcgcctcagctgggatcaggctcacgtcgaccgcccagaagttgcccttggcctggggctttgcagggtccttgggcacctgggtgtgggggtcagacatgggtggggctgcccaaccttggatgctcaggacttccgcgcgcgctccgcccccgggctccgaccctggcctgccccaccttgcggaagcatcggttggaggaaaggttgtggcgaatggagtctttccagccctcgtagtcttccctgaagaaggggaacacggcctggacctgacggatgatctgaaaccgccaggcggccggccggcgccgtgagcccagacggggagggggtagcgccctacccctcccccactaccgggctcaggggcgcgcggtgccggcccctgctgtccccgaagaaggacatttctgcgcggaagcgcggcagagagggcaaggggctcccggagaagggtcgtgccttgaggccctcagctc

SEQ ID NO: 45956 - DNA, 30 bp, Homo sapiens; identical to SEQ ID NO: 6656
  chr8:145733644-145733674
  hyper

SEQ ID NO: 45957 - DNA, 46 bp, Homo sapiens; identical to SEQ ID NO: 6657
  chr8:145734031-145734077
  hyper

SEQ ID NO: 45958 - DNA, 30 bp, Homo sapiens
  chr8:145743810-145743840
  hyper
gagggggcgtcgcacggaggtgcctgcctc

SEQ ID NO: 45959 - DNA, 211 bp, Homo sapiens
  chr8:145747531-145747742
  hyper
ccccgtcggcactgccggccagtccttgctcttcccacctttcggaggcccaagatcctactgtggccggccagggccagcgagggaccccccccatgcagagctggaggttggggtgatgtcttttcggaagagcttcaagggaggtgttggggcctccccggccaccttccattgctaccccaggattcccgagtgcaacgttcccggc

SEQ ID NO: 45960 - DNA, 34 bp, Homo sapiens; identical to SEQ ID NO: 6658
  chr8:145806237-145806271
  hyper

SEQ ID NO: 45961 - DNA, 5 bp, Homo sapiens
  chr8:145806619-145806624
  hyper
cgctc

SEQ ID NO: 45962 - DNA, 391 bp, Homo sapiens
  chr8:145909601-145909992
  hyper
atggctacagagcctgcgcccagggcggtttatggaatgagtctcctcgatttacagccacacctcctatcaaatcgcctttccctcccccggcgcgagaatcgcaccttgctccttgtggatcgggcgccgccgacggaaccacctgctgtctatagagggcacctaggacgcagcgtccaattcccctcactggcttcaaaagacaaatctccgtattgttgtaccaggaggcacgagaagcctcaccactgtaggtttttcagcagaggtcactggaggtctggttaaacccgtacagcactgagggggagggggcccggctgcgtttccgaagctgcgcagcgcccacagcagctgctggtgggaagcggctcggaacacacccaca

SEQ ID NO: 45963 - DNA, 96 bp, Homo sapiens
  chr8:145910219-145910315
  hyper
ggccgcagagcccacccgcaggcggccatgaccccacctggagacgcccatgtccgctccctgcgccccggggacaaagcccgaggctgcaccgca

SEQ ID NO: 45964 - DNA, 30 bp, Homo sapiens
  chr8:145910739-145910769
  hyper
agtcacacccacttcgggccgggcacacgc

SEQ ID NO: 45965 - DNA, 132 bp, Homo sapiens; identical to SEQ ID NO: 6661
  chr8:145911309-145911441
  hyper

SEQ ID NO: 45966 - DNA, 33 bp, Homo sapiens
  chr8:145981192-145981225
  hyper
gctcccggctcccccgtcggtcaccatacatcg

SEQ ID NO: 45967 - DNA, 185 bp, Homo sapiens
  chr8:146052021-146052206
  hyper
gtccctcctggacccccgccccgttcttcccgtggggaggggcgcgtcaggcggacctggcaccctccggctgctgggcttcgccgggagccacgcggggaggtccaggcagtcgggacgcaggcagcgtcctcgccgaggctgcgagtccgtggccgtccgggggaggcgcgcaggctctgccg

SEQ ID NO: 45968 - DNA, 37 bp, Homo sapiens; identical to SEQ ID NO: 6662
  chr8:146078070-146078107
  hyper

SEQ ID NO: 45969 - DNA, 30 bp, Homo sapiens
  chr8:146125698-146125728
  hyper
tgcgagtacccacccggcggaggacgagtg

SEQ ID NO: 45970 - DNA, 30 bp, Homo sapiens
  chr8:146228325-146228355
  hyper
tgaattccaggtttcgtgggtccgctctag

SEQ ID NO: 45971 - DNA, 70 bp, Homo sapiens
  chr8:146278303-146278373
  hyper
ggaagggtggaatccacgggtgcgaatccacgggcacgtgtgatctggggtccgcggagttaaggcgggg

SEQ ID NO: 45972 - DNA, 31 bp, Homo sapiens
  chr9:73486-73517
  hyper
cccctctccagcaggtcggcgccccgcgccc

SEQ ID NO: 45973 - DNA, 83 bp, Homo sapiens; identical to SEQ ID NO: 6663
  chr9:113549-113632
  hyper

SEQ ID NO: 45974 - DNA, 401 bp, Homo sapiens
  chr9:113897-114298
  hyper
cgtcctggcaccgggggcggcggcgcagaggccgggaggaagaaatccgggccctggcccaggtcgggcttccacccctgcgacccgcgagaggcccaggcgggaaaggcggcgagtggcgtcagcggttccgaaagcaaacctggcccggtgctactgcccgagggtcgccgggcgcgtttcctaattcccccgagtctggaaaacggagacttccgtagcgtcttcttcagtgcgtgctgcgagtgctgaaggaggacccggtgcctggacgacccggagcaggggaagcactcggccgacgctgtcgctgtcatcggcgtcattggcgggcaggacagtggggcgggtaaggggcctccccgcgcctcccggcccttcgcgctcggcgccagctcttt

SEQ ID NO: 45975 - DNA, 23 bp, Homo sapiens
  chr9:174124-174147
  hyper
caacacagcgagactccatctca

SEQ ID NO: 45976 - DNA, 30 bp, Homo sapiens
  chr9:214597-214627
  hyper
gcagatggagcttccggcctgcgcgcagtg

SEQ ID NO: 45977 - DNA, 30 bp, Homo sapiens; identical to SEQ ID NO: 6666
  chr9:215353-215383
  hyper

SEQ ID NO: 45978 - DNA, 30 bp, Homo sapiens; identical to SEQ ID NO: 6667
  chr9:470094-470124
  hyper

SEQ ID NO: 45979 - DNA, 1827 bp, Homo sapiens
  chr9:503915-505742
  hyper
agacctgcaaccttctgaacacgcatcctcccctttccgccgaggactctgtcctgcagccgagccagggcgaatgcacggaggtcacaagggaggtgcccttggaggcgggaggtttctggccgccggggcgaccgtgctgacgaggcacctgcaggaaacagagctctgcacgctccggtccccctcacccggggagggagaggaggtacagaggcgctgggggaggacgtcgagcaggccagcctcgttgccagaacccccgccccagccggagatgggagcaccgcaccgtctcacgggggctggatttcttctccccttgcgggtgtgtgtgcgaggatggacgtggtaaatacgggttggcagaaggagcgaaccgcggtggaggaagttcttctgcttagttctcgccgcggcgaggcccgcgggccaggcgcggcgacgaaggtgcacgaaggtgccccgcgggcctggtggagttgcagcggcgcgcaggcgcactgagggccgcccgcggccggctccgcggtacaaagagcgcccccgcggggagccgggcgtcctctgggcggagggagcagccggggcttcgccggcccgcgccgttcttctcacgcgccgctccggggcgcagccacagctgtcgcccaccgcgggtgagaggcttgctggtccgccccggcttccccgccccggcggcggccgtgcggttcgggctttaattctggcgcttgccagccggggccgactccgccccctgcgccccgcccttccccgagctccgggtccgcggcggagcgagcgagcggccggcaggttgggaggagcggccgaaggtgagtgacgcggcggggccgtgccgcgccccgtgccgcggcgaggttgtcccggagcgcgaggcccctacccctgcctcgggctggccccgcgcggagccgacttggcgcgcgccggggttgcgcggcggccgtggcggtggcggagggcagcccccgcgggctcccgctcgtgcgggtgaacccggcggcctcggggcggtcctgggggggggtccgagaggtggcgtcggccccgcggccgtcggagtttggcgcgctctgcagcggcggcgctcggccggtctggaggagggagaggcgcgccgggcacggagcagcgagaaagttcgggccgggccggccggcgggagggtgcgggcgcctggctaccccggcccggcgctctgtccctcggatgcctctgggcccttccctagcccggggcggaacgggggaccctctctgaagcggctctccgtggagttggatgttgcccttcgcgggagggagtggcggtcaagacccctttatcctcggccccagaggggcaggtggcctcgggtcgccctccgccaactccgaggtggcttcggccggggctggagggcggggaggcgggggaggggcgtgggcgctgcggcctctggggcggcccaacccggcgcgggcagcgtgggtttccgaggtcccgcggttccaggtcgagggaaggtgtaggggccctgaagcgggctggtccccgaatgttgcgttttctgtgccgctttgggcaacacgcagtggcgctcgcggcagccacggctccttgaccgttcatctccttcacccgggtcccgtggaactttcagaggcaactgttcttggtggctcttgcgggtcagcacgagccgtgctgcacgagcgtgacctagtgaaggccttgggcgagttggcgttaacaatttatggcgtccgccagcgctcgctttccgcacgtggcctctgcggagggtcagcccatcttatt

SEQ ID NO: 45980 - DNA, 138 bp, Homo sapiens
  chr9:706972-707110
  hyper
attttcagaagataccggtttcctgttttcattaagaaaacagggaatgcggaacagctgagtgcggcgggggtggtgtcactgcagccggagggagacctcgccggtgaaagctcagcctatggcatccgagcgtgg

SEQ ID NO: 45981 - DNA, 239 bp, Homo sapiens
  chr9:707165-707404
  hyper
cgcccgaggccgggtccggctgagctggagcgagctgtgcggggcagcgcgggctggcggggagcgcggcgggcgccacgtggtaggtgagctgcgagcggcgtggggcggccaccgctggccgaattccggggggcctgggcgaggggggccggccgggaaggtgcgcactgctgggccgcttcactccaccgcaggcctacgggagtccagcttagacccgccggctcccacacaca

SEQ ID NO: 45982 - DNA, 31 bp, Homo sapiens
  chr9:757052-757083
  hyper
aattttgcaggttgttcgtggcaaatctttt

SEQ ID NO: 45983 - DNA, 80 bp, Homo sapiens; identical to SEQ ID NO: 6670
  chr9:841325-841405
  hyper

SEQ ID NO: 45984 - DNA, 582 bp, Homo sapiens; identical to SEQ ID NO: 6671
  chr9:841449-842031
  hyper

SEQ ID NO: 45985 - DNA, 30 bp, Homo sapiens; identical to SEQ ID NO: 6672
  chr9:842207-842237
  hyper

SEQ ID NO: 45986 - DNA, 137 bp, Homo sapiens; identical to SEQ ID NO: 6673
  chr9:842610-842747
  hyper

SEQ ID NO: 45987 - DNA, 766 bp, Homo sapiens
  chr9:842779-843545
  hyper
cgggggttccctctgctcccgggtccctgagatccctgatcccgctctcagggcagggaattccggggttcgcccctctgggcttccccgcgatcccagagcccgcgttccaacagaattgggagggtttattgcgctagaggagtcttcaggatcttcgctcccgccctccgaggtgaggctagaggggagggttcgactccaagggaatcccagggatctctagccccgctcttctagcagagaattaaggaattctctccgctttggggtcccaaaaatctccgaccgcgccttgggagcagagggtttcggggttcgatttcctcgagcgtccccagaatctctgactctccctccttgctgagttgcacttaaattagaaaggatcttggagggcggcagcgctggctgctaggttagcgggaaagggaggctcggccggctgctgcttacgcgggtaacctgtcggaaagccttgtttgtttttctggaaaagtcgctgcaatggacacagcgttgcgcggtttccctgcgcgcctggggcgctttttgtcttcgccctccgtggatggaggctgagcgcctcagccattttgagagctctggaaattttattagcattttaaaatttgcattctcgaccgaagattaaagtgcaaattactttgaagatgttttaaagcacgcttaagaattttaaagaatatgcgcaggtggaaaaaagcgcgccagggtttgagatttggtccgtctgtggttttgt

SEQ ID NO: 45988 - DNA, 116 bp, Homo sapiens
  chr9:968065-968181
  hyper
cagtgcttgaatgtgagcctgcgtcggagcccagcagcttcacagtcactcccgtcatcgaggaggacgagtgagcagtgcctgctgccgatggcggttcacttggagtaacaggc

SEQ ID NO: 45989 - DNA, 14 bp, Homo sapiens
  chr9:969600-969614
  hyper
ggaatggagccgga

SEQ ID NO: 45990 - DNA, 437 bp, Homo sapiens
  chr9:969667-970104
  hyper
cgcgcccaccttgccggcgtgttcgcgggcccctgcccactgccccccctctttctttaggtctggcttttgaggatcccggagtcttgcagctcccgccattccgcagataacctccgcacacttaattgtgacccgcggggtggtcggagaagctccgcacgcgtcctcagtgggaaagtgtcccctctcagcactgcccccttcagtccccctgcatttctggaaagtcaggcaaggcccaggtaggctgccagtgcactctcagccttgactgagcacctttcgggcctctggtgagccccgagagccaggtttggctcggcagagcgggcttgggctgcgcaagcaatgcgcatcgtggccgcctgcaccctgggaactaggcctgtccagtgggcagcatcctcatttttgaaaaggcccttctaaaccca

SEQ ID NO: 45991 - DNA, 68 bp, Homo sapiens
  chr9:970185-970253
  hyper
cggggcccgggacctgcgctggccacgcagggtctcaagctgaccggaagacccggcttttggcctgt

SEQ ID NO: 45992 - DNA, 416 bp, Homo sapiens
  chr9:970495-970911
  hyper
gcccccttccgcgggcgggatccatggtgtgtgcagtgtaagagtgcgcagaacgcgtgtgttcaagtgtgggcgtggcaggcgtcgtgtgctcgccccgcgcactgtgcggatcgcccagacagccttgacaggtttttgcagatgtttgggtgctacggtgtggggaaacccaggcaggagcgccaggcctaattctcctggactcttggtgagcggccgctactccacgaggggctagaagcaaagggggcacgcgcttttccccaggccgcctcttgctgccgcagtggctgagggcgctgatgacccctccccgcttccagcggacttgacccgcgggctgacaacccaccgcgacaagcaggcggctgggttcgcgccgccgccccggggcccttggctcaaatttcacc

SEQ ID NO: 45993 - DNA, 200 bp, Homo sapiens
  chr9:970992-971192
  hyper
cgtcatacccgcagccggggctccctccgctaaccacgcttggagaccccaatcggggacagaggtgggagtcagaccccccctggcctgcactgccgtttccctcgattcttgcggaaacaagactcccgcccacacataaaaatgcagctcccggccaccgggcgccggtggctcacgcctgtaatcccaacaccttg

SEQ ID NO: 45994 - DNA, 339 bp, Homo sapiens
  chr9:971829-972168
  hyper
ctcaccttcaacagtcgcccccttacccctcccccacccgcctgccctcgggagcgggtcgcctccactccaccacctgtttaagttcctccccctcggcgcccctccagtccccaccccggccccggtccaaaaaaccagcaaacggaacttttccacagttgaaagccgcggcccgcgaggccgggctgggaggggaaagcggggcgtgtctggggggcggggccccgagcactccggaagttgccccgcccaggaggctcctgggaaagtgaggagagggcccgggcctactttcgtcctggtgtggcgcccctcagcctcccctcctcccagttc

SEQ ID NO: 45995 - DNA, 448 bp, Homo sapiens
  chr9:972189-972637
  hyper
cggcctggcctccaggcaaagttcgcgccccctgttcctggggtgtcggccgcgcgggccgtttcccttcattactcccgggcccctgaatccgaacgctttcccagaagcgcgcaaatccgcttgctttccccgcggctgggctttgttcagggacagcaaaggaggaggcgggaggctggtgaggttttctggaaaaggggcttgtcccgaggaggaagtgccccagatccctgagagccaacgctctggggagaagaaactttccttctcccttgaatgttgctcagattacctaaaattattttttcagcccttgtgttctaaagtcgcagggtaaaggttatcttaagacttaacatcagcgctgctcatttgtacgttggtggagacgtgccttttttcctttgcacttaaggtggacagggtctgcgacgctcccttccag

SEQ ID NO: 45996 - DNA, 30 bp, Homo sapiens
  chr9:973183-973213
  hyper
cggtatccccgggccggtgaccccggggtt

SEQ ID NO: 45997 - DNA, 143 bp, Homo sapiens
  chr9:974426-974569
  hyper
gagtatttagatctcagcccccgatgtgcaccggagtgaaacgggcccccgggaccaaatgccagactgtttgagtggcaacgagatagggtggctaggtgaccgacgggggaaaaggggtcgccttggtagtgaaagtgccc

SEQ ID NO: 45998 - DNA, 4 bp, Homo sapiens
  chr9:975070-975074
  hyper
ctcc

SEQ ID NO: 45999 - DNA, 548 bp, Homo sapiens
  chr9:976141-976689
  hyper
atcctaaactccacccaggtccggggtgcaaccgcaacactcccgtaggttcgagttctcccggagctgagcttctgcggccaaatgtcgggataaaagcggccttgggctcggaaaaacgcggccagatctggactggagggaggagaagagagagaagcggagcggccacctcactcgcttacaggcacccccaccctcactcccgctggtcctccccttctccgccccgcgagcaccgccgcgttctggagcgccgcagtctccagccgcgggctggggtagcggagagggcttggaggagggggccgcgagcgcccccgcgagagtggcctggctgcaggtggcaaggaaggtgaagtgcaggcacccgaggggcgcaaaggaggaggaaggcgtggggcggggagtgcaaggagacagggaccccaggggcgggggtggcggtgggaaggaggaggggttgggggagggcggcggaggtgttgggtccggccggctcacgagggagctgcagaagagctggctcagaccttaatcagagctgt

SEQ ID NO: 46000 - DNA, 614 bp, Homo sapiens; identical to SEQ ID NO: 6682
  chr9:976911-977525
  hyper

SEQ ID NO: 46001 - DNA, 74 bp, Homo sapiens
  chr9:1042426-1042500
  hyper
gcaagtagggcccttcgtcattcttcggagtagccgcttgagggctggaaggagcagtgatagaaaccccagag

SEQ ID NO: 46002 - DNA, 369 bp, Homo sapiens
  chr9:1042615-1042984
  hyper
cggaagccgggggcgctgggtctcaggcccggatgctgagcgcggaccggcgtgtcctccccacagcgcccccgcgcggcctcctcccgctgcgccccgcacggcgacccgccgcgggtagccctggcgtttggccacgccgtcggctgaggaccgctagagctggggggagatcaaagcattcctatggggcccaaagagcctgggattgcagtgttgttagcctggcctcgccgcgtcaataaattttcggcgaaagttgggagcaggagtggaggcttggggcgggggttggtggggcgcgggggttggccggagggagggtccgggggtttcttgcacctgcgctcctgccgcgttaagtcagtg

SEQ ID NO: 46003 - DNA, 263 bp, Homo sapiens
  chr9:1049909-1050172
  hyper
gaggcatcatttttacgcccagtttggattaatgattgattgagtcgcagaaatgcttgtgatgctgatagaggccaatactggtctttctgatctcttcctcgtcgtttattaccttctcttgtggacaacgcattcctaagaatgtatctctgcttgtttcccagtccgcgagataaatggtgacttctctcttgcaggcaccgtcatacctcgggtttagattctggacaggcgagccggctgcaccgaaggcccggtag

SEQ ID NO: 46004 - DNA, 283 bp, Homo sapiens
  chr9:1050390-1050673
  hyper
gccgggtgagccagcgatctgagccaggcgggggcggcccgacctttcccgcccagcctgggtcagaggaagccgaaagcggcctcagcaaggtgaggcgcccgaggctgcagaagaccgagcagaactttgcagagttcgggatgtgctgggctaggtcgctgaggacttgactggcttcctccctccttccctccacctaccttctccctccccctccaccatccagtgggttcgttccgggcctccagctatcagctcccgatctcgtgtttgagggtag

SEQ ID NO: 46005 - DNA, 81 bp, Homo sapiens
  chr9:1051557-1051638
  hyper
gtgtttccccagagtgagggccgccaggctcaggccccagcgaagccccgagcgccatggccgacccgcaggctggctccg

SEQ ID NO: 46006 - DNA, 421 bp, Homo sapiens
  chr9:1051904-1052325
  hyper
ggcaccggtccccgagagcgctgcactcccgcgggcggcggcgcggagccgcgcaagctgagccgcacgcccaagtgcgcgcgctgccgcaaccacggcgtggtgtcctgcctgaagggccacaagcgcttctgtcgctggcgcgactgccagtgcgccaactgcctgctggtggtggagcggcagcgcgtcatggccgcccaggtggcgctccggaggcagcaggccaccgaggtgcgtacccgcccggcccgggcgtctcaggccacagtggaggtgggggagttggaggggagcggggcggccgtccacaccccccgcgcccagggccttgcggtgcctggcactccctaggaaggatggtaagaacgcttttctgcttgcactggcgagcagggtcgggagggaaaaagcaggcatc

SEQ ID NO: 46007 - DNA, 30 bp, Homo sapiens; identical to SEQ ID NO: 6687
  chr9:1710358-1710388
  hyper

SEQ ID NO: 46008 - DNA, 30 bp, Homo sapiens; identical to SEQ ID NO: 6688
  chr9:1749159-1749189
  hyper

SEQ ID NO: 46009 - DNA, 30 bp, Homo sapiens
  chr9:2015049-2015079
  hyper
cacacacggatccacgcatacagtagagct

SEQ ID NO: 46010 - DNA, 30 bp, Homo sapiens
  chr9:2015620-2015650
  hyper
gtggaatgctctaacgacagctcccaggcg

SEQ ID NO: 46011 - DNA, 30 bp, Homo sapiens
  chr9:2621903-2621933
  hyper
cccctcctctgcagcgcctgcattattttc

SEQ ID NO: 46012 - DNA, 1277 bp, Homo sapiens
  chr9:2622185-2623462
  hyper
caccatgggcacgtccgcgctctgggcgctctggctgctgctcgcgctgtgctgggcgccccgggagagcggcgccaccggaaccggtgagtgaggacgcgcccctccgccggcgggcgggacccagccggggcaccgggagaccccgaggcgtaggtctccgtttgcccacccgcctcctaggaggcgcctctcggttctcctcgccttccctccctcccctccgtggtggcgcctctgagctgtcagcgccgaggctaaagggagccgggcttggggaacagcggggttcggggtgccccgacgcctcgcctgaactagtcttctgcccctcactccgcctcccccagagccgctgcttcgcctcgtttctcgccctcttgacgggcgccgaggtgcgtgggcttctgagcattgaacaatggttctgcctcctctgccaggcgcagtgttgggaaggaggcagagggccaagacgtgtgcggcagcctcgggcgcaccctcgaaccccggggagtgcgggagcggacggggggagaaggtgagcgcctccggggacgcggagcgccaggggccggccgggcttcagagtcttccggcggccgcgagctggcgcacgttcggtgggcggcggccgggaggctccgcggagccgagggcacccggactgcgactcccccggcgcggggccgcctctccggcgtgcggggtaggggagcggcggggctttacgcaggactctgctctgggcgcttctcctctcccttttccccgcctcgggcggcgtttggaaaccgctcgggtctcccgtgtagctgaacgcggagggggagtggaggggagacttaatcaggttagtttgctgaccctccttcccggtgacgtttcctcgagaggaattgagtcctaggctagtgactgtaattagccttcattctacacaatagctcaaaggagcagcgcgagagcgagcgtgtggccctgtcttgttgggaagggcggcggtgactactgtcgggtccccagactctgccgcgggggcctgggggccccgcctggtcgtcagccacgttcccacttggggcctcgtaactttcctggacaggcgacaggaagcctttctgagaggactcagtcggaatcctagcgcgtccccgaagtgatcttcagatgtgacgccgaggggcttgcttgccagctgcagggaattgggactgaaagccgcccaggcccttaacacccgttccagagtccctggctcccgtcgccgggtggct

SEQ ID NO: 46013 - DNA, 30 bp, Homo sapiens
  chr9:2844379-2844409
  hyper
acagacctggctggcgcggttaataagagg

SEQ ID NO: 46014 - DNA, 921 bp, Homo sapiens
  chr9:3181023-3181944
  hyper
acttctacacgcgcgcgccgggcaacatagcgcaccgcgggtacacgcacgccgaccggacacacgcagtctcgtacacgcccaacgagcgcacacacccgcactccatgcacgcgcgatgggcgcacacactcgcatccctacacgtgcacacacccgcgctccaattaccgcgctagcgcgcaaaagagccgcaacttccgagtgggactcggcatgcgggggcagtgcccggtacttcaccatcagtcaccttcgcgtccgcctcctcccctgctggttgcacctccagccgcagagatttccggctggggcaccagaactgtccaggccgaaagagctgctcctccgtcacaaagcgcagttgcacactgtactgcaggcgcgcggggacccgggccggagccggggtcgcagccatggtccaagcgcctctgctcctgagccctagcagtgcctcccccgcgctgctctgggcaccgagaaactgctggggcaagggggagggatttggaagcgcgcaccaccttccccagctcccgttgcaagttcagtcttcgacctccgagacgcccggtgacttctgctggcacctgctgccctcggcatcacctccctcatccccctggagggcacgctggaaagctgcaactccccaccctccgcacaggagcgccccgtagacgcgcagatgggcccagccacccagcggggcggcagccctgagcacacaagtttggagagcgcgcgaggcacctgaaagtggttggggtttggaagcaaaagggtgacacctgctgttcgctgggaccgctctgcgggtgtgggcgtcggtttggaaacgtcctttgcctgagctctgcttggtgagtgggcactcgctcttggtgtgattctggcgcaactggcacccaagtgtga

SEQ ID NO: 46015 - DNA, 30 bp, Homo sapiens
  chr9:3525873-3525903
  hyper
tacggtgactatggcgcttgattcacaagg

SEQ ID NO: 46016 - DNA, 225 bp, Homo sapiens
  chr9:4297416-4297641
  hyper
tttaatagtctctcctcgagattcccggccccatactaaagggacctggtccactggggggagctgcagaacttccctcttctcacaaactccagggccctggggccccaactctcgggagatgctgaagtcttggaggaagttggttctgccggctcggggagagggtgcaagagcaaccctctttgtgaaacggggccgcgactccacgagtcctgtctctac

SEQ ID NO: 46017 - DNA, 31 bp, Homo sapiens
  chr9:4298072-4298103
  hyper
caaaacaaactagtgccggcttcctgttgtg

SEQ ID NO: 46018 - DNA, 1171 bp, Homo sapiens
  chr9:4299024-4300195
  hyper
cgccccatgcccgtgcgtcctgtaacgtgccctgattgtgtacccctctgcccgctctacttgaaatgaaaacacaaaaactgttccgaattagcgcaactttaaagccccgttatctgtcttctacactgggcgctcttaggccactgacagaaacatggtttgaaccctaattgttgctatcagtctcagtcagcgcaggtctctcagtgacctgtgacgccgggagttgaggtgcgcgtatccttaaacccgcgcgaacgccaccggctcagcgtagaaaactatttgtaatccctagtttgcgtctctgagctttaactcccccacactctcaagcgcccggtttctcctcgtctctcgcctgcgagcaaagttcctatggcatccacttaccaggtaaccgggatttccacaacaaagcccggcgtgcgggtcccttcccccggccggccagcgcgagtgacagcgggcggccggcgctggcgaggagtaacttggggctccagcccttcagagcgctccgcgggctgtgcctccttcggaaatgaaaacccccatccaaacggggggacggagcgcggaaacccggcccaagtgccgtgtgtgcgcgcgcgtctgcgagggcagcggcggcagggggaggaggaggcagaggcggggtggctggaccctcggcatcagctcattctcccctgctacacacatacacacacaaataatgtttctaaaaagttcagttgcgactttgtgcctcgcctgtcctgttcatcctcgtcctgggccggggaatgcttctgggggccgaccccgggatgctggctaattgctgccggcgggttccgtcgccggtgtgaccctggacggcgcggacggcgtacagggggtcccgggaggggcagtggccgcggcactcgccgccggtgcccgtgcgcgccgcgctctgggctgcccgggcggcgcagtgtggacgcggctgcagggagaggggaagggggaagagggagggaggaaggcagccgggcgaggagtgtggatgtgtgtgcggccgcgagggccggcctgtagccagctgcttcctgagtgtgagcgccggagggggagggggaagagtgggggcgggctcgcgggtcactaggctggccaattcgaaggccgagcttgtgtctcc

SEQ ID NO: 46019 - DNA, 30 bp, Homo sapiens; identical to SEQ ID NO: 6693
  chr9:4679311-4679341
  hyper

SEQ ID NO: 46020 - DNA, 100 bp, Homo sapiens; identical to SEQ ID NO: 6694
  chr9:5022027-5022127
  hyper

SEQ ID NO: 46021 - DNA, 249 bp, Homo sapiens; identical to SEQ ID NO: 6695
  chr9:5054639-5054888
  hyper

SEQ ID NO: 46022 - DNA, 30 bp, Homo sapiens; identical to SEQ ID NO: 6696
  chr9:5064973-5065003
  hyper

SEQ ID NO: 46023 - DNA, 129 bp, Homo sapiens; identical to SEQ ID NO: 6697
  chr9:5069923-5070052
  hyper

SEQ ID NO: 46024 - DNA, 30 bp, Homo sapiens; identical to SEQ ID NO: 6698
  chr9:5072525-5072555
  hyper

SEQ ID NO: 46025 - DNA, 63 bp, Homo sapiens; identical to SEQ ID NO: 6699
  chr9:5073736-5073799
  hyper

SEQ ID NO: 46026 - DNA, 30 bp, Homo sapiens; identical to SEQ ID NO: 6700
  chr9:5078415-5078445
  hyper

SEQ ID NO: 46027 - DNA, 153 bp, Homo sapiens; identical to SEQ ID NO: 6701
  chr9:5080227-5080380
  hyper

SEQ ID NO: 46028 - DNA, 100 bp, Homo sapiens; identical to SEQ ID NO: 6702
  chr9:5081711-5081811
  hyper

SEQ ID NO: 46029 - DNA, 30 bp, Homo sapiens; identical to SEQ ID NO: 6703
  chr9:5090773-5090803
  hyper

SEQ ID NO: 46030 - DNA, 30 bp, Homo sapiens; identical to SEQ ID NO: 6704
  chr9:5123003-5123033
  hyper

SEQ ID NO: 46031 - DNA, 30 bp, Homo sapiens
  chr9:5437883-5437913
  hyper
agcgtcgggattggcgcccagacacagtag

SEQ ID NO: 46032 - DNA, 30 bp, Homo sapiens
  chr9:5832992-5833022
  hyper
cgcctcacagcagccgactcagaaccccac

SEQ ID NO: 46033 - DNA, 403 bp, Homo sapiens
  chr9:6412570-6412973
  hyper
ataggcctggagctgccgcctccgccaggcgacgggaaaccctcggaagtgggtttccgcgcgaaagtagcattgcggccaggcgggaaacgtgttcgcgaagcaggagggcccccggggcctttcccgggcgacccgacccgccaggccgcgtggcgggagctttcctgttgagcgcggtggagcgcacacatttccttcagttctttctcggaagtttaggccgcacccacccgcgccccctttccaggattatacaagtgcacgccagggtttcttatttttggtgtgtttttgagaccaaagaaccatatccgctaagcctgaggaggcacccgccccctcagctctgaaacgaggcctcaaaacggcaaccgatgtggtagccgcgcaatcttccgaa

SEQ ID NO: 46034 - DNA, 30 bp, Homo sapiens
  chr9:6413529-6413559
  hyper
tgcaccattgaggacgtgtctcgcaaagcc

SEQ ID NO: 46035 - DNA, 249 bp, Homo sapiens
  chr9:6414081-6414330
  hyper
ctcttccgcgtcttcggctctcaaacaggggaaactcgggcattgagctctcaagaataagaaccctaactctgcttcctgactgtggtaggattcgcgcaaactgaagattcgaagggtttccagaacttctggtccctctccctcgccgcctttcctaggtttggaatgtctcgagggaggttagagacctgggcatgaagaaactgtcggtttaaccgggggccgggtttacgaatgccctatata

SEQ ID NO: 46036 - DNA, 30 bp, Homo sapiens; identical to SEQ ID NO: 6707
  chr9:6587038-6587068
  hyper

SEQ ID NO: 46037 - DNA, 30 bp, Homo sapiens; identical to SEQ ID NO: 6708
  chr9:6644588-6644618
  hyper

SEQ ID NO: 46038 - DNA, 574 bp, Homo sapiens; identical to SEQ ID NO: 6709
  chr9:6645577-6646151
  hyper

SEQ ID NO: 46039 - DNA, 30 bp, Homo sapiens
  chr9:6681593-6681623
  hyper
gctggtgcaactatcgcgaccatcaccctg

SEQ ID NO: 46040 - DNA, 30 bp, Homo sapiens
  chr9:6757811-6757841
  hyper
gacaagaagatgcgcgccagcaagcctaag

SEQ ID NO: 46041 - DNA, 30 bp, Homo sapiens; identical to SEQ ID NO: 6710
  chr9:7076080-7076110
  hyper

SEQ ID NO: 46042 - DNA, 352 bp, Homo sapiens; identical to SEQ ID NO: 6711
  chr9:8856994-8857346
  hyper

SEQ ID NO: 46043 - DNA, 79 bp, Homo sapiens; identical to SEQ ID NO: 6712
  chr9:8857406-8857485
  hyper

SEQ ID NO: 46044 - DNA, 754 bp, Homo sapiens
  chr9:8857685-8858439
  hyper
cgccaacactttcctccagcgccttcgcgccccgccacggccgcgccgccgcctccgggcggccaatttaatcccgcggagcagcggccgccgccgccgaagcccccctggtcgccgccgccgcccagccctcgtgcggccagcccagtccagagcgaggaagtggaagagagtcagcgagtgagtccaaaaacccgaaatccagcatccaaggcagcgcgtccccccgccctccctccacccctacccccttttcctcctcctccgcctcctcctcctcttcccgggccgtcctcttggcccttctgagcccgcggcttccgcggcggtttctcctcctcccgctcctcctgctcgccctgcgcccgcttctctcgctgccgccgccgccgctgtttgtctcctccccctcctcctcctcctcctcttcctcctcctcccgctcctcgatgctccgccgctcgcggctggggggtccggggccgcgtctcctctcctccctccgcctctcctctttcctccttcctgctgcctcttcttttaaagcggattctttggccacaaatagcaactcggctgcccccctcggtgcctccctccccttctcttcttccccccaaaagtgaagcgcacgcgaggtaaccagaaactgaggctcgtggggggagaggggtgcgaggcgacgcctgggaaagggcccgagcagagtcgagggccgggaggtggggtggccggtgcagcccagtctttggac

SEQ ID NO: 46045 - DNA, 312 bp, Homo sapiens
  chr9:10612678-10612990
  hyper
gcaaagtacctgcactctccccgccgaggctggctggcggcgccgcgccggaggggaggaggctcgggaggaggaggagaaagagcagcgggaggactcgggctgggaggggagcgcagggttggggaggccgatgagcggctcccggctcctcggagaagcagccgagacggcaaggaggaggcgaggctctgtcggggcgaggcgctgcccccacgcgctccggccgccggctgcgggcgcggctgggcggggagccgaggcggccgctcccgcactcgctcgctcgctcgctggcgctccctcctcgtc

SEQ ID NO: 46046 - DNA, 410 bp, Homo sapiens
  chr9:10613046-10613456
  hyper
cgcactcacctgcatttccttaacgagccacttgatggctgccagcggcgtgggccccgctccggcgggcgggggccggggcggggagaacgcggcgcgggatgctccgagcgcccgctggggagagaagcggcggcggcggcggcgctgcgggcgcgccagatggggcgggaggaggggagacccggcacccaccggcccagagctgcctgacgcggcctgggcggaccccgccgcccgggtgcctaggcacgattccagggatccagggtaaagcggttcgcgcgggaacaggaggatatgtcaggcacaggctattccccatcactatagccacagaggactggtccagatgcggatcccgatctgtgcttcttcaggtgttcgcgtgctttcggttattattatta

SEQ ID NO: 46047 - DNA, 141 bp, Homo sapiens
  chr9:12775685-12775826
  hyper
attactattatcgccgttccggaaaagtcatggaagacagcccgctgccagacctcagagacatcgagctgaagctggggcgcaaagtacccgagagtctagtgcgctctctccgtggggaggagccggttcccagggaaa

SEQ ID NO: 46048 - DNA, 202 bp, Homo sapiens
  chr9:12776031-12776233
  hyper
tgtggtgcgccagccgcgggggctgggacctgggctgggccaaaagatggggcgatctgagaatggggctgggagagaggacggcaggggctgcagagcggagcgctgggcgcgtgggaaatgctgggtggaggaatgagcagggggcgctcatccggaggcagctgctgcgaggcttgtttaccgcggactttgctcggtc

SEQ ID NO: 46049 - DNA, 74 bp, Homo sapiens; identical to SEQ ID NO: 6717
  chr9:12776574-12776648
  hyper

SEQ ID NO: 46050 - DNA, 336 bp, Homo sapiens
  chr9:13034171-13034507
  hyper
ggagagcaaacattccagatgcgttactaattgagatgtcagaaatccttcaacttttcgatgaaaaaacaaccgtagggtaatatgcttctcaaggtttctcaggcccgatgaacgattttggtttatttttccattcctcaaatgcagtggcggggaaaaacgcgtttcttccgctgaagttacagagatgagcacatgatggcgctcgcgctgcaccgtaaacccagaagcagctgagcagtgtggatccctgggctcctccacgtccctccctctcctcttctgcccccattcttctgctgtttcccctccgatcctccctcctacccatcc

SEQ ID NO: 46051 - DNA, 472 bp, Homo sapiens; identical to SEQ ID NO: 6719
  chr9:13279298-13279770
  hyper

SEQ ID NO: 46052 - DNA, 213 bp, Homo sapiens
  chr9:13568855-13569068
  hyper
gcttttgagggaaatgtaaatcgccggcgacactgagtcccgtctgttttctcatcggaaagcagcatttcagagagctgaactggcgacactgcttggcgaagacacgccgagttcaggaatattccctgttcccaggccctggttgtgtcgaagtgggactttctgaagagggggcactctgggagagacgggagcaaaggggcactttca

SEQ ID NO: 46053 - DNA, 30 bp, Homo sapiens; identical to SEQ ID NO: 6720
  chr9:13951234-13951264
  hyper

SEQ ID NO: 46054 - DNA, 1596 bp, Homo sapiens
  chr9:14312997-14314593
  hyper
agcgcagtccagcggcgcccacacagactcgtgctacagtcccctcgcccaagttcactggctgtttttaaaagcttagtcccccgtaaagtcctccaaagcccgagtccacctcaacgcgcgagctgctgagaggggctacgggcaccccgggcggggatgccgcaccacaacgggcacttgaggggccgcacggggcctcgcacttacaggtcccggccctgcccaccccccggcggccttgcccggcccagcgcccgcgctccgtgcccagggcgcggggctgggcgctcgcagtggccgtggcgaggggccgctcccggctcccacgccgccccgcgacgcccgctgcaactccgggccacttctccaagggacggggatgtgcggaggttaactcaagccgctaattgtccgcaacaaaacaaaacaaaggcatttcgggccagagagaaagctcgagaaagcgaccgagacatgtacctgagtgagacagatgggagaatacatcatgacttcgccttaaaacgcactttccgggagatgcccaagaaaatcttcgagaagcaagaatttcatctattcattttacagtcatctgagccccgcgatgcgatcaatcaggacggggctctgcgctggatcaccgcaacttcacaacaaacccagtcctccttaaatagccaaagattcaagttcactcggcgtgctagatttccaggggtgaaatccaatctacacttttaaccctcttgcagtccgagcgcgctggccgtgcttgccgaggccgccgccgccgccggtgttggctgcttttcgcctgggtttggggatttgttttctattttgcagttgttgttgttgttggggtgtagggggtgcgcgaaggttcggtgtgggttggattggggtggtggttggtggtaaaatgctttttcaaaaaaggcggggaggggggcgcgggagggcgcaggagggcgagcgggcgggcgggagggagagcggggagaatgtgtcaccgcgctgggaaagttcaaggttacagccccaagcactgcggcaggatcccggagtggtgatcgcaggcgaaactttgccgcgagccgaccatgtgtgtgcgcgaggggcagcgtgagcgagtgcgcgcgggtggcggggcgcgcgcgggagagggccggggtgggggcggggtgggatgggggagaagggagaggccggggtgagggagggggcgcgagcgctgatctctggggcggaagaggctcgcggcgcgtggtccccggcagcagcagccgccgccgcccgcgccgggtcttcggcgcccggccgcccgcccgcccgcctcgccccgcgtctgacccggccgagcgtggaggctgctgttgccgccgctgcccagagcccaggggtatcaaaacgatctcctgaaaaattccaaacgataaatcccgctctcccgctcggctccaaactcctctcttttctgctctaggctcttttttttccctccctctcttgctttctttcgttgcaaaacttggaagttgaaaaattcaccggttccaccctctggaccccgctcgagctctctccaaa

SEQ ID NO: 46055 - DNA, 1009 bp, Homo sapiens
  chr9:14314801-14315810
  hyper
ttccaaaatagctcttctttccgctgccctccccacaccagcacacacatacacacccccgaaaacccgccctggaagaggtatttcggtgctcgctgcggactcttttaagccgcgggaacatccgagtgggagaagcaccgaaaccgtctgagcccgagaaaggaacgagtggaaaattccctcacacccaggccgcccccaggccggggctggggcgcggacactcgcacccggggcgggctcagtccgcggagcctgcggctgccgggaaaagggggaggccgagcaggcggggacctgagcgaacttgggctcaagtagttggggcgcgccggcgtggaccaggggggtgcggcgcccagcccccgacggccccgcccggagcccgggttcgcggatagggagggggtgcgggttcgtcccgggtctgcccaccaggggcccgcacccgaggcagtcgcggcgcgcggcgcttcgccgcggtttgccgccctccccgggggtgccccgtgcacgtggcctcgctctgagcgggaggaccgggccgagccgccgccgccgcctcttgctccctccacctcctccccgcgcccggcttcgctctcctcctcctcctcctgcagccccgctggctggctcccaatccccaccccccggggcccggggcgccggcggaaagcgtctccctacccgcccgggtgcaggcggggcggggccgcggcgcgcccggggctgcggggcgggccggcgggcgcgcgcgcgccgctgcagccctccagaggctgcgggccctgagccgctcggcgcccgcgccggctccccaccgcggcgctgccccgcccccaccccgtcgcccgtgcaggctccgagtgaatgaacttgattccagggattttgaagaaggcggttcgccttgcaccctttctgcaccccccgcccacatacacacaccgccccccaaatccagttttctgcttggggtggatggggacgagggggaagcaaa

SEQ ID NO: 46056 - DNA, 846 bp, Homo sapiens; identical to SEQ ID NO: 6723
  chr9:14322292-14323138
  hyper

SEQ ID NO: 46057 - DNA, 30 bp, Homo sapiens
  chr9:14347321-14347351
  hyper
ggggctccaccaccgcgcgctcccaccctc

SEQ ID NO: 46058 - DNA, 297 bp, Homo sapiens
  chr9:14347731-14348028
  hyper
acaaggcagggccaggagttccgcggttttttttccgtgcagaaatcactacccggcgacggctcagggcggtagagggcaagtcttatctgccaaggcgggattagattctctcgccgagggtcccagtatcccgccgcccagcaagggccgagcgcgcgcgcgcgccagggagctttggagcgacgcgcgtagtttcgcgtcgcacgcggtgtctggtctccgcgcaccacgtgcgctcgcggtccttggcggggacgttggtgctagcgatccgacagagcacccaggactagg

SEQ ID NO: 46059 - DNA, 776 bp, Homo sapiens
  chr9:14348284-14349060
  hyper
aaatacctatggctctaaagccgagttgggttctgtagtaactaccgggggtgaaaaaaaaaaaagaccccaaattggctgtgagtttacagcctgaagcagcttatttaggctcgctgagcgccgttccaaacggcagggctcacgctatttcgggagaagttggagggtggagagaaaacaaggttatttaaagtgactcccagaacgcagctttcgttcctagactctttaggtgtcagtgcttcggctccagtttagcacggcacaggcggcccagcctttgatatttaagccaggccagcgcccgggtgaaactacctgttgggggattctgccgcctggaacccttcttcttctgcgcaatactggcagcagtgggatggctctgggggtgccacgcgaagagagagggcggaagagccgggagcagcggacagtcagctgcatgtggcagtgcctagcgagctgctcccgcgcctctgctcgctctttgaaaactggaaacagccccctgtgctctgtgctgggcccctggctgcggagatgggcccaaactcggcacgattctctaagttcggaaaccacgaagcttgcgccttcatgcgtgtctaacattaaaaacaaaaaaacctcctggcggcttcctgggctcccgcccccaccttgcgctccaacacccggcacttttccctgtaccgaaattcactttactacttcttgaaattcggaaaactccaccgacgcttggactcgctgcaacccaggggctgcct

SEQ ID NO: 46060 - DNA, 30 bp, Homo sapiens
  chr9:14692916-14692946
  hyper
agccaacatcgtctcgactagagcaggaac

SEQ ID NO: 46061 - DNA, 30 bp, Homo sapiens
  chr9:14693523-14693553
  hyper
ggacccaggcagaccgcactctccagagcg

SEQ ID NO: 46062 - DNA, 31 bp, Homo sapiens; identical to SEQ ID NO: 6725
  chr9:15306090-15306121
  hyper

SEQ ID NO: 46063 - DNA, 30 bp, Homo sapiens
  chr9:15306322-15306352
  hyper
tgctcaggcccgggcgcgccacgactgaag

SEQ ID NO: 46064 - DNA, 297 bp, Homo sapiens
  chr9:15306648-15306945
  hyper
ggtgagattcccaggtcgagggatgattccacgaacacccagagagccagtgccaggacttcagggtcagacttcgtaaagcccaggcgtcgctgggccggcccggaacagctcagagctgcgggtcctatggtcccgcgccctcacgcccatccaagtgctggcaggacgtgggtcctccatccccacgactcgcggggccggcgctccgaacctcggcactgcgtccgctccgcgcgccgcagggaccctcctagctccagcggggacagacctaccaaggccgggcgcccccac

SEQ ID NO: 46065 - DNA, 134 bp, Homo sapiens
  chr9:15306998-15307132
  hyper
cgtcctagccgggctcactcttctctcccggactcctgtccagggcttcaggggccgggcccgcaatccccatcggatcgtacctcgtccgcttccagctccgctcggctgcctaagagcgccatattcctcct

SEQ ID NO: 46066 - DNA, 30 bp, Homo sapiens
  chr9:15307361-15307391
  hyper
cggcccccagcgggcggcagccccgcccaa

SEQ ID NO: 46067 - DNA, 30 bp, Homo sapiens
  chr9:15422754-15422784
  hyper
tctgatgccctgcccgcgccgcctcgccgc

SEQ ID NO: 46068 - DNA, 31 bp, Homo sapiens; identical to SEQ ID NO: 6728
  chr9:15423708-15423739
  hyper

SEQ ID NO: 46069 - DNA, 30 bp, Homo sapiens
  chr9:15553045-15553075
  hyper
tctgggaaggtctgcgagagaagcggagtg

SEQ ID NO: 46070 - DNA, 239 bp, Homo sapiens
  chr9:16133901-16134140
  hyper
gcgcgtgccaagcaccgggatcccagctgacccgagctcagagccctccaagagagcgccatctagtggagaaaacacataacataaataactgtgataagccttgcaggaggaaggaccgcaggcactaagtgagcacggaagagggaggagtaaattccgcacagattacggggcaggttcaccgggctcagtcagcctgaaaaggactttaatactctaaccgctggtgtgctgga

SEQ ID NO: 46071 - DNA, 20 bp, Homo sapiens
  chr9:16154650-16154670
  hyper
tgcagcaaagaaaaagctga

SEQ ID NO: 46072 - DNA, 102 bp, Homo sapiens; identical to SEQ ID NO: 6730
  chr9:16154745-16154847
  hyper

SEQ ID NO: 46073 - DNA, 30 bp, Homo sapiens
  chr9:16726845-16726875
  hyper
ggttgtgtccccttcgcttcctctcaccct

SEQ ID NO: 46074 - DNA, 30 bp, Homo sapiens
  chr9:16870076-16870106
  hyper
ccacgggaagattccgaatgtgaagacaag

SEQ ID NO: 46075 - DNA, 857 bp, Homo sapiens
  chr9:16870343-16871200
  hyper
ttcgcgcggaagccgcgagcggggccgaccttgagaagccccctctcacgtgcaccctcccacctagagctcgcctcagaaacttggggccaagtttaggggaggccactgggagcgcagcggggatcaggtcggaccggggttctggtccccggcccgccctcctcagcgccccttgcccctcacgccgcgggccggagggcggacacggcccccgggcggccccggtggcgctcgggcgcgggggtcatttctgaggaagtctagaataaaagaggaaggagggtggaaacttcttaccatctcggcatgctggttgtcaagtgcagcccccgcctcttggtctcctcttagcggccgcgcctggaccagcccctcggccgccgctggctccctccgtctcggcctttctctccctccccctccgagttcctccgggcctccgctctcgccgcctccgcctccccgcccgcccgcgcgcgccctcgccgcggcccctctgcgctcaggtgactgatttacactcgcgccggggtcgcgctcgcgccccgagtcccagccggcacggttccccggctcctcctcgggacaaaaaaaaaaaaaaagggaacggcttgtcccgggagggggctgccctgctcgcgggaggcgggggaccggcgggcgaggtgacctcggcggccgtgcaagccccacaagtttttcctctctctgcagaattgtcgtgactacaatgttgcttcccttttgcaaaataaaagtcggtcgttgtgttgtttgtcctcagaggtccaggggcttggggaaggaggatgtatgtttctccctccccccaccgccccgtgacttctttgggg

SEQ ID NO: 46076 - DNA, 411 bp, Homo sapiens
  chr9:16871417-16871828
  hyper
gccgaggaaagggcgcgaactttattccgactgcagcaaaccgcggcagctctttccttttcgggcactcgggcgtctctgtcccctttgaccagttcctcctccccagccccgcacgccccctcctcccctgccccttccccagcgtcccagccgcggccgacccggctccccgcgaccctctcagcccagctcctccgcgcgccgctggggagaaggcgagtgaggcggaggaaaacccagcggacagaaacctgggacgcgaacgtgctgggagaaaaggccaaaagttgcgcgcagctgggggaaaaaagtttttctggtggcggagcgttttgtgccggcccagacgccggcttgcggcgagggcttccttccctttcccgtggtctgggccgcgggcctcgggct

SEQ ID NO: 46077 - DNA, 30 bp, Homo sapiens
  chr9:16915005-16915035
  hyper
tacctgctccatatcttctggaccagttct

SEQ ID NO: 46078 - DNA, 30 bp, Homo sapiens
  chr9:17135690-17135720
  hyper
agtcgcatcctctccgcttcccccccaagc

SEQ ID NO: 46079 - DNA, 84 bp, Homo sapiens; identical to SEQ ID NO: 6732
  chr9:17578710-17578794
  hyper

SEQ ID NO: 46080 - DNA, 30 bp, Homo sapiens
  chr9:17579719-17579749
  hyper
cgcactgggggtggcggggcggaggccggc

SEQ ID NO: 46081 - DNA, 423 bp, Homo sapiens
  chr9:17906009-17906432
  hyper
ggtccccgtcactcccgggcgcatgttgcaaaacaaatcaactccatgggaaaagctccatgagcgcccaggggacaagtccccacggacaaacatgtcataacgatttcagttttgtcccattacgtgaggttgtaagtttcttcatcattcccccctcccaacaagcacaaaatcgtccccagcccctggagcatcttgcggggctcccaggtcagcaacagcactcggagctccgagctccagggaaagcgctcagggaatggctcctaggactggttcctgggaaagcgccagcgtccagggagagatttccttctccaagggccggcagggtggcattccaagcgcgagcaaggtgggcagtgagcgatcctccctttaaaaaagaataaataaatagaagccagcgcgcagccccgc

SEQ ID NO: 46082 - DNA, 717 bp, Homo sapiens
  chr9:17906460-17907177
  hyper
cgctgccggggcggctggatgtctgcgctccccgcctccgctgggctgacacgggaggggaggagcaggagctggaggggtgttgggggtggggggagcgcgaaccatctcgagccaagacaagcagcacattcacaaataacgcccccacccccagcgcacgcgctcccattcaaagcagacccgctccgcggccgcactgaagctccaaagccgcgccgcctgccccagcgcagctctgtctcgtggggcgcacgcccgagcccgcctgccggccgccgccgcggagccaccgcaatcagcgcaggaggcggccacctcttcgagggaggggtctcgcctgagactccccttggtccccgccatggggaccatggcacgactggaggcgccccagtgccccgggttcctggcccgcctcctcggtggcacctggtgcctgctctgtatcgccggacaggtagggtagcctgtgcgtcttgcgtccctcccggggactctgcttctaaagcctgtgctacagcgaaaagcgctacagcgtgggaggtgctctcttccgcgaaggtccatcctggggctgcgctgccgcccaggctggggacaagtggcgcggggttggggctaaggcgtaccctggggtcgatcgggtcgatctctgcgtttaggcttgacccagcttcctgggaccctgtcctggcttttcgcccttacctgggt

SEQ ID NO: 46083 - DNA, 30 bp, Homo sapiens
  chr9:19049067-19049097
  hyper
tccacttcaccagtcggctgcccctgcgga

SEQ ID NO: 46084 - DNA, 246 bp, Homo sapiens
  chr9:19127114-19127360
  hyper
ccaagcaggccaagggacattcgatagcaatcgccctaaatctgttggcaggaaagaagcctcaacgcacaaaggcaagggtcgaaagcgcgggttcagcagaccgcccctacccagccaggacctggaagccgcgaggcgagcggggggtctcggaccatcacccccgcgtcccgtccacctttgagccccgcggggagcagagcagcggtcccaaggccccggggagccccccaccccaactgg

SEQ ID NO: 46085 - DNA, 30 bp, Homo sapiens; identical to SEQ ID NO: 6734
  chr9:19380410-19380440
  hyper

SEQ ID NO: 46086 - DNA, 657 bp, Homo sapiens
  chr9:19788242-19788899
  hyper
gctgcgaacgtcaacgcttagcaggaacgattaagcgattcacagcactcaggggattgtgtaaatgcccggcccgggcgaccagcagggacagattcaactccccgggcgcaaagtcatctccagcccgatcctcgctccccctgaaaacccaccgctcgtctccccgggagctgcctccgtaggagaatgttcgcccccagccgcgccccaactttgccttgcgtggtcccaaactttccctggtggattaataggaaaataaatctaaaggacagacgccccacctgtgagcttggagctgggttgcatttggtgaggcgcttggcccgcatccccctgagtcgtttgtaggtggctggggaatggaagcgcccctctgcgcgtctcccccgacggcaggccctgccccacgccccccatcccaagccaaaagcaagggtaggagaggcgggggctccaaatccacgccccggagcacagagagttggctaactcctagcggggcctggggcgcccacatccacggcagagccacctgtgagcctgcagagcagcaacgggatgcgcgcaaccgggatgcggggacgaccgccacagcggctacagcggcaggcggggcgcagccgcccgcacttaccaggataagatgggagg

SEQ ID NO: 46087 - DNA, 265 bp, Homo sapiens
  chr9:19788934-19789199
  hyper
cgctccagtccgccggccctccgcctacccgctctgaggcccgggctctggctcgcactggctgccgctctcgccagccgggctgggttcgggaggagactgagccgctgtgagcccggcgctccgagtctggcgctgcccggcccccgccggcccctccctctgggctgtgcgctgtgcgctgggagcggggccgcagcgcgctcagctcccgagtcctttgctccacgcctcctgggcgcagaggcgacgctggcagccgtct

SEQ ID NO: 46088 - DNA, 963 bp, Homo sapiens
  chr9:20620403-20621366
  hyper
ggcttgggatgaataaacactcgacacctgacggtcctttctctgcggtgactttcaccaagccgaagtggcgcgcgcgcgggcaggcgggagccgggacctggcccgcgcggcgccgcgcacccggatcccgaggctacgccggcgagcgcggcgcggggggcggggagcgggacagcgggaccgcccgggccaagcgattgtttcaaagacattttttatcaagacccttttgtattcgagccctacctctttttggcctaggaaagctttcgtgcaagtggaagacgactttctccacaaagtgctgtatgttactgtgctccggaccgcgtacgaacaccatccagtcgtgggtgaagccctccacggtgggttttttcctcacctgggcgcggtgccccagctccagcttcacctgcacggcacactgcgggcagggggaggagagacagccgtgaataacaggaaggcgaggtttcggcagtgaacgttgcgcctgacatttttttcctccttcttgaaacgcacataaaaggaaacggcggtgccctctgcatccacgtttcacgcgcgtgggcgcgcacactccacacccccaaatatacccgcccgcccggcccggcttggccccaggcgccccgggccccgcatctacatcggacaggattgtaacggaatgttatccccagtcgggaagggggtcggggaaaagagggagaacacactcagccacgacaagcacgacaacaaatgcatcggaaacaaatcagaaggcgatgccggggcggtttcccggcgtgggaggggaggtggctgggacccagggggaccgaagggctcctggcgagccccctccccgaaagtaccgcggcgacaggcacacgccgaggaagtctttgtgtacgtgtgtgtgcgtgcgtgtggagcgctgtgccaggcgaaatggaaactacaggcagc

SEQ ID NO: 46089 - DNA, 746 bp, Homo sapiens
  chr9:20621626-20622372
  hyper
tcagaaaggcagggcggcgggcggacagccgccgagcctcggctcgcgctcagcacctcccggcgctggggcaaagttgcgtgcggccccgccgctgtcagccccgcacacttcggctcacacacgcgcgccgcggagaacgcaccatcgtagcggccgcggcgctttgcggaggtgcggccgccgaggctgctcgccgcgtccccggactgtgcccgcagctcccggcggcggcggctgaaatatggctgagttattattcgcctccttccaccgtgtgtgtgtgtgtgtgtgagtgcgcgcgtgtgagcgagagggagtgtgtgagtgcgcttcttgtgactgcaaagaggcgaggagggagggaggcgcggggggtggaggggcgagtgtgagcgtgtgtgagtgtgtgtgtgtctgtgtgtctgtgtgcgcgccgggggggggtgggggaggaggggagcggaggctgagggagaggcggcagctccctgcaagccgtaccaacctttctctaattggaaccgcggagcgctggcgctgtctgggctgcggcggcgcagggcgaggaaggaaagtgggggagggcttttattattatttttgcgcgtacttaccgagctagccatgcctgggggcccggaggtttgctggggtgttgtgtggtacccccccctcctccgccccccctcagctgtaattcatgaagaggctgctatgaatgagagcgcgcccaggagcggagg

SEQ ID NO: 46090 - DNA, 387 bp, Homo sapiens
  chr9:21031411-21031798
  hyper
aaggggtgcctgggcacggtagcgctgcgccttgctggcgggcggggggtgccgcccgcccgcccgccgcagaggggagctcccgcctccaggccctccacccgcgccccctcccctcgggattcggccgagcgccctacctgggctgcagccaggcgggcagcgccaagggccccatgggccgccgccgccagggcttccagcgcggtccaggaaggagtaccggggaggaggcaggggcggccccgcggctgggcgcggaagggcggggcctctccacactcagcagtttacaaaaagaaaaagcccgaggtcgtgcgttggggaagagatgaaaacgaagttctcgaagtttctgcagcactgctagagcgcgtcagggcgcaa

SEQ ID NO: 46091 - DNA, 30 bp, Homo sapiens; identical to SEQ ID NO: 6740
  chr9:21335536-21335566
  hyper

SEQ ID NO: 46092 - DNA, 477 bp, Homo sapiens; identical to SEQ ID NO: 6741
  chr9:21395907-21396384
  hyper

SEQ ID NO: 46093 - DNA, 978 bp, Homo sapiens
  chr9:21559112-21560090
  hyper
aaatgagctcaactcaaacatcgctgtatgaaagcgctctccgccaacacgctcatggacacacacaactccttcctcgaggtttagggacagagagcgaacctgtgacttcgggccaggatgacgacctgagatttggacaagaggaggcggcggttccgcgaagagccaagggcggccggcgctccgggatgcgccggaccccgcggcgcatcctcgtttgggcgccaacgggcgccggcggtcctcggacccgggtgtcgactgccgtgtgcccactgccgtgtgcccaggccccgaagcctcctcaactccttgaggggcgcctccctagccagctcagcgcgcagcgggaccaaggctctcccagcttacctgcgggtccgagtaggaggacagaagcgccgcccggcctcgcccaagcgcacacgaaggggccgcttcccgccccccgcaccccagaccaggcggctcacggaacaccgcctcccagctctggcccgggaccaggcggtcccccagccggcttcggcgccgcggccggggacgcgcgtcttccttctccaggcgccggacgtggaacctgcgagcccctggcggcgccccaagttatgcacaggtcgcagctgctcaccaagctcctcctgggaggccgccctggtccccgagaggggcgcgcgggagtggacgttcccgcaccttcgccccatccacacctgccgccgccgccggggccgccagcgccgtggctccgccccggctccgcccctcgccgcccccggctcccgctccagccgccgccgcgaccgccgcggaaaggagggggagggaagaggcgcctggacggggctgcgggagcggccgtgctgagcctcctcccttgggcccggacgggacccaggtttctccactgcaacgcagctcccgagtgacggaattttgtgggggaagcggcggccactacgctcgcttttggca

SEQ ID NO: 46094 - DNA, 31 bp, Homo sapiens
  chr9:21802621-21802652
  hyper
gcccgcccctggtctccgcactgctcactcc

SEQ ID NO: 46095 - DNA, 534 bp, Homo sapiens; identical to SEQ ID NO: 6743
  chr9:21964890-21965424
  hyper

SEQ ID NO: 46096 - DNA, 253 bp, Homo sapiens; identical to SEQ ID NO: 6744
  chr9:21965569-21965822
  hyper

SEQ ID NO: 46097 - DNA, 274 bp, Homo sapiens
  chr9:21968159-21968433
  hyper
gccctgtaggaccttcggtgactgatgatctaagtttcccgaggtttctcagagcctctctggttctttcaatcggggatgtctgcagagggcagaaagaaaacaggcgttagaaacctgaggtcaaagatgtgtggcacatcccgccctcctctcttgccgtccctaccggcattgaaatacttatggataaagttctcgcaatggcttcacgtgcatgtacccgccgccaccgctctcccacacctccctggtccagcagctagtccactgc

SEQ ID NO: 46098 - DNA, 254 bp, Homo sapiens
  chr9:21968456-21968710
  hyper
cgaccgctcaagcgctccaggtccacccggcggagggcagagaaagcgcgaccgcgcggcccgcagggttgcaagaagaaaacgagtgttatataatgagtctcagtggttgctcacaatgccaggcgcgaaggcgtgaagatgtggcctttcccttcccgcatccccaggcatcttttgcacctggtgcggagtgagccagccagcttgcgataaccaaagggcgcctcaggctctggcgctcctcggcggaa

SEQ ID NO: 46099 - DNA, 30 bp, Homo sapiens
  chr9:21969791-21969821
  hyper
actggagggaattggcgggggggaggggag

SEQ ID NO: 46100 - DNA, 30 bp, Homo sapiens; identical to SEQ ID NO: 6746
  chr9:21971105-21971135
  hyper

SEQ ID NO: 46101 - DNA, 63 bp, Homo sapiens
  chr9:21974181-21974244
  hyper
cgcccggccgcttctgaataatttcgatcaaaatttatattcgatatttattccaacatacac

SEQ ID NO: 46102 - DNA, 618 bp, Homo sapiens; identical to SEQ ID NO: 6748
  chr9:21974498-21975116
  hyper

SEQ ID NO: 46103 - DNA, 418 bp, Homo sapiens; identical to SEQ ID NO: 6749
  chr9:21975190-21975608
  hyper

SEQ ID NO: 46104 - DNA, 30 bp, Homo sapiens; identical to SEQ ID NO: 6750
  chr9:21994420-21994450
  hyper

SEQ ID NO: 46105 - DNA, 30 bp, Homo sapiens; identical to SEQ ID NO: 6751
  chr9:22008955-22008985
  hyper

SEQ ID NO: 46106 - DNA, 30 bp, Homo sapiens
  chr9:22062118-22062148
  hyper
actgggccagtgtttgcagaggaccatgat

SEQ ID NO: 46107 - DNA, 1031 bp, Homo sapiens
  chr9:22446678-22447709
  hyper
ggacggattccccgccgccctcctcccagaaggtccccactccccgccccgggccctcccccggcttccgcgctgggccgggagcctgggtgggcggggtagcctctctagccttgccttcttggctggaggcacaaaggcattaacttagcgcccggggtctctgccaggctcacgggacagctgcacctctcagcgtctccagctccaggacgcggtcgtcccaactccttccgagtggaaagagtgtaaaacttttgtccgtgcgcgggtggagctcagtaggaccacggcgcgtcctgccccggcttccccagcctcccagcagggttagctgcggtcagcgcactttccacttgggactcccggccagaaatttctcgggaatggagcggtcacagtgtggcagcagagaccgaggcgttagcggccgacctcacttggcccctgggctagtggtggctgcccctccgcccccgtccccggcgttgccggtaccatcggggatgcaggttcccccagcgttcctgcggccgcccagcctctttctgcgagcagcggccgcggccgccgccgccgctgccgccacctcgggaagcggaggctgcccgccggctcccgggctggagagcggggtaggcgcggtgggctgcggctacccgcggacgcccaagtgcgcccgctgtcgtaaccatggtgtggtgtcagcgctcaagggccacaagcgcttctgccgctggcgggactgcgcgtgtgccaagtgcaccctgatcgccgagcgccagcgcgtcatggccgcccaggtggcgctgcgcaggcagcaggcgcaggaggagagcgaagcccgggggctacagaggctcctgtgctcggggctctcctggccccccggtggtcgggcatccgggggcggcggcagagccgagaatccacagtccacgggcggccctgcggcgggggctgcgctgggactgggtgccttgagacaggccagtggttccgcgacccccgctttcgaagttttccagcaa

SEQ ID NO: 46108 - DNA, 612 bp, Homo sapiens
  chr9:23825910-23826522
  hyper
aacctaaactgtgctcggcttaaaagaagcaaataaaaagaaacgctttcgaccccaaagtccaatgctaaaagaaatggcgaaaaaaaatatgaaaggggaggggaaacttaaaaaagagtttaaaaagacggagagactaccctcctattgccgttcaactaaacaaaaaggggcaagaaaaacaaaccaaggaacaaagaaaagagacgaaagaacgttttttcaaaaagacgatgtctttctccttgttgctttttagtaggtcgctacaggagtaagctgctgcatctctaactaagaacagaaataggggggaggacgtcttaaaagggaggtggactggaccacagatttatagcaccgtatcaccaaccccttctctgcctccgcactgccgtgtgtgcagctgctctgccaggctcctatcccgggcagcacgcgcggaagtatacgccgaatcgcgccacaacgtaacttgctcatcgccccaggatcctgattggtccacacgcttccattgaggccgcccaggcggggccgcgtgagacgattggctatgggcttgtgtcactctcgagagctcaatggagtcccgtttcaaggtaagtt

SEQ ID NO: 46109 - DNA, 192 bp, Homo sapiens
  chr9:23831178-23831370
  hyper
atttatgtttccacttgtgtgcgatgcacgtctaatttgaaataataaaaccgggctgagcaaccagtcaatcagagccatccagggcgctccgcacgccgccctgccccccacctccctccggtctctaactctttccctcctcctccccctctcactctcctggccctccccgtcttccttcctccctcc

SEQ ID NO: 46110 - DNA, 113 bp, Homo sapiens
  chr9:23831450-23831563
  hyper
cgggccacggtgacaaaggcggagtttgtatcagaagaagactgaggcccggggagacacagcggctagagaaacagctgtcttatcagcccgctgcagagatggagatggct

SEQ ID NO: 46111 - DNA, 319 bp, Homo sapiens
  chr9:23850940-23851259
  hyper
aatttccaactgaaccgattacggacggcgaatttatccaaacacttaagcaaggagaggatcctaaaatcgaaaaacgaaggcggaaggggcgagaagaacggggtggagttgggtggcggagcgagtgggacgttaactggccaatagtttgcaactgccggtcaacacgcgcagcctactcagcgctgctccggaggcgcgggacgccgcctccacgtgagccgcgctcctcccagtgcccgggacggtgtcgggggcgggctgcacggcgagaagggcaaaataaaaccagcccgagaggccctggctggggttg

SEQ ID NO: 46112 - DNA, 689 bp, Homo sapiens
  chr9:26892267-26892956
  hyper
taggaacatgaacctcaaggacggacgaccttgagattgccgcgctagcagtgagctccagcctgcgccccatccctctggaagcccgacttcttccgaaaaagcagcagctccaggaagcggccagaggggcgcgcacgcacctgctgcaaggagcccgagacgctggaagagtcggtactcctccgcttccggcgctcgctgcgctccacgctgctcccgccccaacagctgccgccgctcccaccgccggtgacacttccactaaaattggcgttcccacagcagctgacgctcccgcagcccccggcgctcccgcagccgctagtgcttccactgctgccgctggccaacgcgggtacgatgtccggggccgcgagcgctgcggccgcctcctgactgctacgtttgcgccgtttctcccgggaggactttttccccgtcatgatccctctgctgcaaccatcggaggaaagtccgctgtctctggtgcgaccgaagcccgactcctgcggccgtgggcggcaggcactggcgtcgcaggttatgcgtcacttccggccgtggcacagaacgtggtgaagcgttatgggccggggtggcaggggggttgccataaccagttgcgcttccccctccggtcgcggaggtcgatttgagtgtgtagcgggtagcctgtctagtcagag

SEQ ID NO: 46113 - DNA, 30 bp, Homo sapiens
  chr9:26956221-26956251
  hyper
tcttccagccgccccgctgttttccacttt

SEQ ID NO: 46114 - DNA, 64 bp, Homo sapiens
  chr9:26956460-26956524
  hyper
agaagttaaggcacccgcgagccgggcaactgccctccttccgcgccggcggaggtgagaatcc

SEQ ID NO: 46115 - DNA, 30 bp, Homo sapiens
  chr9:26956754-26956784
  hyper
agagggaaggaccgcgatgggctgaaggat

SEQ ID NO: 46116 - DNA, 567 bp, Homo sapiens
  chr9:27528536-27529103
  hyper
cggcctcgctggggtcgggctcctccactttcccagctgggatcccctgccggagctggcgtgggggccggggagggggaccagaggggcttccttctctccccaagccccgccagatgttggaaaggcaaacaataggggaaacgcggagaaacaaaaggccattcgccacgatctcagtcggctgcgtagagagatctctgtggggagggttaggggagagggtcaggaaagagcgcgaggggggggatcccgagagatttagagtctctggtacttgccaggcaccaggggtcggcgctttaccctcccagcaggggtctgaaggtgggaaggggcaatcaaagaaaacttgaagggttttcaccttcttccccagttcagggaaagggaggggctgggattccagatgtttgacagttgttggccccaaagttaagcgcgatttgtacggcctttacacgctccccacctccgtgaggcatcgtcagccccgggggcgacctggctgacggtgcggacttcccctacgctgccccaagccgagactcctccctcaggatcagg

SEQ ID NO: 46117 - DNA, 764 bp, Homo sapiens; identical to SEQ ID NO: 6754
  chr9:27529157-27529921
  hyper

SEQ ID NO: 46118 - DNA, 137 bp, Homo sapiens
  chr9:29212033-29212170
  hyper
aatttacagagaaccaagaggcgaaaggagagtggaggagaaagagggcattacctcccggggctgccctcagggtgcgggtcaggatctcatccccgaagtggctccagttcaaggcacagctttccagagctcag

SEQ ID NO: 46119 - DNA, 604 bp, Homo sapiens
  chr9:29212210-29212814
  hyper
cggaagcgcgccgggactgccgctcacgtcccccgcccctgccgcgcgggctccgccaccccgcgagcacgctggctctccgcgctcaccccgccgcctcctggcgcccccacacccacccgctccgcggcgcccgctgggagcctctagcggaggcgaagggaacagcaggcgacctgcggcgcccaggttccgacgccggttgcagggagccggccaagcggcagcgtgggcttcgcgcgcccccgagtccgcaggccgggtgccgccgccgcccccacctgcccacctgcgccaggctcacctgccaccgcgtcctagttgcgttcaccggtgcccacagctctctatggcaattgggggtgggtctgcggtgctaataaaaatttaaaaaaaaaacctctctggtaaaaaaacgaaaacccaaaacccaaatccacgctgtatatcaacctccacagagaacccagtccgaaatcgttttccaataggtttcagaaagtgtgaggacaggacactcctctggcttcctgcctcgcagctgggcagcgccgcaccggctactccctgacttgccaggcgggtcgtgcgatcgcgtagcgac

SEQ ID NO: 46120 - DNA, 1369 bp, Homo sapiens
  chr9:29213120-29214489
  hyper
ccgggaccaccttcccggcacccggaagcctcccagcccctcctgggccaacttggctgcctattcagttttcttccgtaaccccacagacacgtcagtcaattccctggcatcaggcaggatattctcagttgcggccgctcctcttgctttctctcgataatgcccctcccccctttctccccttaatttggaaaaatttctactccctgcccgaattaggtggggatgaggcggaaaggtgtaagaagagccactccaaggcacagcttcggaacaccgtctccctgggctgctgcagcgcgaaggtgtctacgctggggaaactttcaggggaggcagcgccggtgcggggctgggcgggcggcgggcggcggcgccaggtgaggaggctttgaggaggcggctgcaaggcgggacgcaggatagccggctggggcttggcagccgggctcagagctcgggctgcgcacacacacaggcgcgcacacccgcgcgcgcgcagctacacacgcacgcccagccctgcgcccgcggcccccggccagtggcgagcgaaaagtcgggagtcctgaggaggggtaggggttccaaggatgctgatgacagaaagagtcaatcaatcctcactagttagcggattgccggcaggcagttcctcgccgcacgccgttaagtccgttgggccacctctccgttctctgccctgtctggcatttcaactccctagctcttttcttgaagccagttacaccccctcgacacccagcgagaggccaccagactaaagatgagccccgttcccatcgccaccctccaggggccacctccgccccttctgtagtggagaattgaagtggctgcagcagctctcctgggagctgaggggctccccgaggtccttcgaatagaggagcctacacatcgcttcgtgaacataatcccctcgcatcccgtctttacctgcccactcccttcgtaacatttcccccaaggagctcccgaaagtcgcttagatgttttgaaaatgaatttcttagggaattgtagtgcctagcttttggaactgggttaatttaggtgctacgcttatattgtaaactggacggtagcaggtgaacggctcagctggagaaaggggagggattaggagtctggagacccaacccctttagcagccatttccaaggttttgcaccaggagtagctgtccgggtctctggctagctcctgtcccaacttctttttcttccctcgacggtcgggagggatcactgggtgctacaccgctggggcgtcccaggcaggagagacttcgctctcagaagcgcccccgtgtcatccacaactcccacgaaaggagcttccc

SEQ ID NO: 46121 - DNA, 40 bp, Homo sapiens; identical to SEQ ID NO: 6757
  chr9:29780379-29780419
  hyper

SEQ ID NO: 46122 - DNA, 45 bp, Homo sapiens; identical to SEQ ID NO: 6758
  chr9:31254845-31254890
  hyper

SEQ ID NO: 46123 - DNA, 30 bp, Homo sapiens
  chr9:32384229-32384259
  hyper
agtgagaagggaggcgggccaagtgaccac

SEQ ID NO: 46124 - DNA, 30 bp, Homo sapiens
  chr9:32384987-32385017
  hyper
tagccttggctgtgcgtgctgtcctgaaag

SEQ ID NO: 46125 - DNA, 30 bp, Homo sapiens
  chr9:32551004-32551034
  hyper
agcagggcagagagcgagacccacccccca

SEQ ID NO: 46126 - DNA, 125 bp, Homo sapiens; identical to SEQ ID NO: 6759
  chr9:32782810-32782935
  hyper

SEQ ID NO: 46127 - DNA, 137 bp, Homo sapiens; identical to SEQ ID NO: 6760
  chr9:32783083-32783220
  hyper

SEQ ID NO: 46128 - DNA, 160 bp, Homo sapiens; identical to SEQ ID NO: 6761
  chr9:32783259-32783419
  hyper

SEQ ID NO: 46129 - DNA, 48 bp, Homo sapiens
  chr9:32783590-32783638
  hyper
cgccgggctccgcttgcacagcaccgggaccgacgggcactgctggga

SEQ ID NO: 46130 - DNA, 226 bp, Homo sapiens
  chr9:33166526-33166752
  hyper
tccctgtgcggtcccggccccacgcctccaacaggactccccagggacccacctcgcaaaccttctctcccatccagtcccaagcctctgtctgggatttaaaactctgatccagaagagggaggctggctgtcgtagaagagccagcctgagggaatgtctgggggaccctgtcggggaaatccgggggggtcccaatcctccgactggcgccgacccgagtcct

SEQ ID NO: 46131 - DNA, 647 bp, Homo sapiens
  chr9:33524018-33524665
  hyper
tccctggagcggccccgatctctcttcggagaagaggggcgggagtcacggccaggcgggaagggatgcgcgcctgagattccggaacgtcccgcgccagcccaggagaacccgcaagccagcggcgcctgagcccgagctgcagtcaccctctgcgggccacgcgagctcgagggcgccttccggagtccgggctggcgctgagctgtaggcgcgcgcctaaccgctttactgggctcactctatcgagaggtcggaggctgcgagtgtcgctgctgaaggctgtagtggaccgggctggatcgcggattctgagctacatcgcgggtttgggggtgcatcttggatttaggggtggatcgctgggtggggagggggatctcgaatttggagctgggtgggggtggaaaggccacgaggagccgcggcgtctcaggagcgggtggtgggcatctgagaagtcgccaccatgaggaagctcctcagttttgggagacgcctgggccaggcgctcctgagctccatggaccaagagtatgcgggtcgggggtaccacattcgggactgggaactgcggaagatccacagggcggccatcaagggcgacgccgcagaggtggagcactgcctgacgcgcaggttccggg

SEQ ID NO: 46132 - DNA, 268 bp, Homo sapiens
  chr9:33677176-33677444
  hyper
tccaggagggggaggtgccgccgccgccgcgcctcagccggctcccgcccaagcccacggcttccaccttccctttcaggagaagccgaggaagaggctgcacagttagaaaagacgaagaagaagcgagaaacgccgccgctgccggcgccgcccccgcggatgctcacgggttgctgagaggggcttcaggccgggccgggccgggccgccgccgccgccgccgtctctgtctctcatctccctcgcctgagcccggcctcgcctc

SEQ ID NO: 46133 - DNA, 30 bp, Homo sapiens
  chr9:34048760-34048790
  hyper
agcacacgctgcagcgctcagggccctgga

SEQ ID NO: 46134 - DNA, 30 bp, Homo sapiens
  chr9:34049461-34049491
  hyper
gccatgtggcggagcgtggtgcctgctggg

SEQ ID NO: 46135 - DNA, 30 bp, Homo sapiens
  chr9:34377053-34377083
  hyper
caccttcctcccaccgctctgtgctctgcc

SEQ ID NO: 46136 - DNA, 52 bp, Homo sapiens; identical to SEQ ID NO: 6763
  chr9:34377387-34377439
  hyper

SEQ ID NO: 46137 - DNA, 206 bp, Homo sapiens
  chr9:34379699-34379905
  hyper
tccgggccggtgctcgtagggaggtacacatctggagaaggaggaagccgcgagcatggaggggttgggccttttgactctcatcccccgatttagaccaagcccctgggcggcgcttcaggtgtccgtcccaaggctcggaaatcctcctctccttcttcctcacccttcaaaacccccactgcagcaccgattcgggaaccccc

SEQ ID NO: 46138 - DNA, 156 bp, Homo sapiens
  chr9:34458518-34458674
  hyper
tcctactccgctgccgcctcctgtcagcagctcagccactgcggtgactcggcaactccacttccgggtccgggacaccgcccggatcttgcattattcatgaggaggcggtgcctggggaccccagccccacccacatgcgggagttccgaatgc

SEQ ID NO: 46139 - DNA, 883 bp, Homo sapiens
  chr9:34589340-34590223
  hyper
aacccccggagcgcccggacgtggggggccgctcctccagcgcccccgcccccgagtttgcaggcaaagtttctcgtgaactttcctgtcgcccccgtccgtgggcccacgggtgtcccctcactcttcccgcacgcatgagggccgccggtctgctggtcagcccgggctctgagggtccggccgcgcgcactccgccgcagggtactcaccgcgccctcgggccacccgggcttcgcgccgcgccttccgaccgcccccggcagcgagcgaggcagggagcgcggagctagcaccgcccgccggatcccaccgccgagcctcgcgccgcgccggctggagccgccgcctccgctgccgccgccgccgccgcccgctctgcaccggctcttcagcgctcggcggctttaacccccccatcctcctccctccctcgcgcgctccctccctccttctctcgcccatgtgaccgcgggcgcccgctcggccgcgcgcgccctcgctcccctccccctcttgccttgtctccccgcgcctccgcggccgcgcgccacgacccctccccgccacgggccccgcgcgcccccgccttggcacgctctcgctcctggcacacgcggtccgctcgccctgcgcgggcctgtgagcccccactcccactcgcccagcactggcacgcgctctgcccccccgctggcacactcgtccgcactggcacgcgtggccccctcgcgttcaccctttctcgggcgcgccctcaagacggctgtggtccccgtgcttcacgcgcagccccggccgcgggtctcgcaaacgcgcgcgcgcacacacacacacacacacacccactcggcccgctcccctagggcggctgggcgcgcac

SEQ ID NO: 46140 - DNA, 380 bp, Homo sapiens
  chr9:34591282-34591662
  hyper
ggctctctgggccgccggcctcctgcttcccgtgccgcagaccgggattagactgtggacgcggggaaggaagggggcgttgcgacgggatcttgaggggagcaggacttgcccctgcccctgcggcgaagctctaggccctggcaaggttcggtacaccgggggccgctcctccccagggggctgaccggcctcggcgctctaatccggccggggaggggcggacggggtgaaaattggcgagtggtttggggaacggacttgacctccagatgccctggtgtccctggctcagcctctttctgccaggttgggagcagtcgggaattctgtcccggtccaacgtccccctcggcccccggggacgcagaggctgctgt

SEQ ID NO: 46141 - DNA, 42 bp, Homo sapiens; identical to SEQ ID NO: 6765
  chr9:34646960-34647002
  hyper

SEQ ID NO: 46142 - DNA, 83 bp, Homo sapiens
  chr9:34647224-34647307
  hyper
gtgtcctggggccatccgagccaacggagaggtaagcctgtagagccctgcatctgcaggctgggccacggggagtagttccc

SEQ ID NO: 46143 - DNA, 347 bp, Homo sapiens
  chr9:34664958-34665305
  hyper
gtggggaggggcgctcggctcgaatggcgacagcggcggcagagtcaggaggtcagtacggtgggcttcggtttaaatctttaatgcactggctggctgggcagcggcggtggggctgcggcgggggaagccacgacccgagcgctggggagtaggacccaggccgctggacagacagctcatcaggcctcgcagaggctccagcttctgctccccggggtgcgccgagctgtggggcgacccgacactggcatgaggcggggcgggagctaccggattccccccgatgggtcctcagagactgagtcccgtccatgcccggggcgggtccgcggtatcgcagcctc

SEQ ID NO: 46144 - DNA, 31 bp, Homo sapiens; identical to SEQ ID NO: 6767
  chr9:34996682-34996713
  hyper

SEQ ID NO: 46145 - DNA, 34 bp, Homo sapiens; identical to SEQ ID NO: 6768
  chr9:35072283-35072317
  hyper

SEQ ID NO: 46146 - DNA, 30 bp, Homo sapiens
  chr9:35072622-35072652
  hyper
gagccgagaagagccgaatcatcggaaggg

SEQ ID NO: 46147 - DNA, 30 bp, Homo sapiens; identical to SEQ ID NO: 6769
  chr9:35111712-35111742
  hyper

SEQ ID NO: 46148 - DNA, 30 bp, Homo sapiens; identical to SEQ ID NO: 6770
  chr9:35116510-35116540
  hyper

SEQ ID NO: 46149 - DNA, 848 bp, Homo sapiens
  chr9:35161831-35162679
  hyper
agcttccttcaggatcgcaagaaagaaaggaggaaggggaccccgcctcctacgtgctcgcgggggggggcggggtcggtggactgggcgtgagttaattggctggggggcggggcaccacgggttggctccgcccaggcgctcgcgcggatcccgggtggaatgacgggagggagtcccggcagctcctacctcccagcgatggcgtcgctgtgccgcgcccagtccccagcctgccggccggtactcaccgctacccggagttcgctcagacggtgagatttggggcgggtccgaggcagcggcgggacgctacctgcgaccgggaccatgaggagctgccagacccgtggggccggtaacgagagcagtcgcggcacctgctgagaggaaagagggagcggtccggcgcggctggggcgcggcagaggcttgcccgatcctcggccatgtcactgctctgcgtgcgcggtgagtgcgcggactgaggcggggaggcggggtgtcggcgtagaggtccccgcacccttccagtggacgtccggtgaccgtctcacccaaactttacatcccgtccgtgctttgggggtctattattttggcaatcacttaacaatcacttgagttctttccactttcttgttttcccccaagctcctgcaagggacgattagctctccattctggtagccatgtgacaatgttgttggactgcaggctcagatcctattaaacagtgactggggttctctagtgagagtggacgagttagaagaccgcggatggttggtgcctgtgaatggtgggcagcctctcattcttttcctcctcctcgcaccgtaacgcta

SEQ ID NO: 46150 - DNA, 132 bp, Homo sapiens
  chr9:35489688-35489820
  hyper
tctactgggaagccagcgttgagaaccgccgcctcaggcgaagctgggactcacacccaccggccctggaggcccgcggaaggtttccctgggttccagcacccgggagccgcgcgtcgccaggcaccaccc

SEQ ID NO: 46151 - DNA, 47 bp, Homo sapiens
  chr9:35490106-35490153
  hyper
cgagacacgccgccgccgccgccgccgccggcgcggaaggacgaggc

SEQ ID NO: 46152 - DNA, 30 bp, Homo sapiens; identical to SEQ ID NO: 6773
  chr9:35604300-35604330
  hyper

SEQ ID NO: 46153 - DNA, 413 bp, Homo sapiens
  chr9:35616959-35617372
  hyper
ggtaggtgaattgggaccatccgcaggggggcggtgcacgtcggattcaggcgcaccggatgaaggtgaatgtggcacggcagcccgggcgtcggaaggactgcgcccgggtttatcccggaaggagctgcaccccgcggggcccagcgccatccgcagccgggacaggcgcgagcacttggccccgcggctgccccgcacaggcacactcacaggggagaatccgcccgacagctggtgacgtcacggctctccaggacgcagttggctgctccgacttgaccgctgtcgaggggagcatccagtgtgagaccggaagccccgagtgttgccccttctcctcctgcgcacccgcttcgccctcgccactgggaaactccagtctgccctacgttgcctgctagagctgctct

SEQ ID NO: 46154 - DNA, 30 bp, Homo sapiens
  chr9:35657995-35658025
  hyper
acaggccttcagcacgaaccacgtcctcag

SEQ ID NO: 46155 - DNA, 30 bp, Homo sapiens; identical to SEQ ID NO: 6774
  chr9:35658761-35658791
  hyper

SEQ ID NO: 46156 - DNA, 10 bp, Homo sapiens
  chr9:35675637-35675647
  hyper
aacactggtc

SEQ ID NO: 46157 - DNA, 457 bp, Homo sapiens
  chr9:35675837-35676294
  hyper
gccttctgcccggccctgcgccccctggaactcctgggcttccagctcccgccgctcccagaactgcgcctgcgcaacaatggccacagtggtgagggggtctccccgccgagacttggggatggggcggggcgcagggaagggaaccgtcgcggcagtgcctgcccgggggttgggctggccctaccgggcggggccggctcacttgcctctccctacgcagtgcaactgaccctgcctcctgggctagagatggctctgggtcccgggcgggagtaccgggctctgcagctgcatctgcactggggggctgcaggtcgtccgggctcggagcacactgtggaaggccaccgtttccctgccgaggtgagcgcggagctggccgagaaggggcaaaggagcggggcggagcggggccagagacgtggccctctcctaccctcgtgtccttttcaga

SEQ ID NO: 46158 - DNA, 31 bp, Homo sapiens; identical to SEQ ID NO: 6775
  chr9:35700411-35700442
  hyper

SEQ ID NO: 46159 - DNA, 30 bp, Homo sapiens; identical to SEQ ID NO: 6776
  chr9:35731623-35731653
  hyper

SEQ ID NO: 46160 - DNA, 923 bp, Homo sapiens
  chr9:35756560-35757483
  hyper
tggagcaggtggattcgaaggcctgtctagcacgagggcccaaaggtcttgtcagtggccagtagctctgccgcctttcccagagagggggtccaggggacatcctggaaggctgggccctgggccaccttctgctcttgcaagctagagccagcccaatagggggcggatgtgagtggggagctggggcgcatgaaggtgggggtgatgccgaaggggaagggatcgccagtggggattggtgcgtgtgcggaaacggggacagaagtgaaggttcatcgcctataacgaagatgaggtaggcatataggggcttctggaaagctagaggctgggctgagccaggagtcctctcccagaagttggggggcggtgcagaggtgtgggtcgagcccgcatgcgtgcctgctggggagggggtgagtggtgaggaccaggcccgctgggtcctgggggcgcggtggctggcgcgcaggtcccggagggggcggctggcgcgcactacacgcttgggaacaaggaaaacatccgccggaggcccggccgggcggcgctccagcctcggggcaggtgcgcggagaggaagtgagagcattccggcccccccaccccaaccccggccgctggccctctggtgagtcacagccgacccccgccgccggagggagaggggagctgcgggccagagccccggagggtctggaggagccaggagggtttctgggagcagagggtcacttagtgggcttctgtcgtggtgtcgctacgggcgcgaaacggacactgaacacagtctgactgtatggaggcaggtggggagggatcccctgggagaacttggcgggccgagagcagaccccagggcaaggaggggcccccgagggggaaaccgggagtcgggcaggtggcgtaacccagaaagg

SEQ ID NO: 46161 - DNA, 77 bp, Homo sapiens; identical to SEQ ID NO: 6778
  chr9:35814745-35814822
  hyper

SEQ ID NO: 46162 - DNA, 893 bp, Homo sapiens
  chr9:36036747-36037640
  hyper
actcctggcagaagccgacacacagttgggccataacaaagagccctggtacggggcacgttcccgcccccgggaggttttggaaacactgtgaggcagggggcggggcttgagcgggccgcagccagtcaccaaagggccgggcgctgggggcggggcctcgcgcgagcggcggcggtagcggcggcagcggctgcggccaagctgggtccgagcatcccgcggctctggagccgcccggcccggacatggcgaccgtccgggcctctctgcgaggtgcgctgctccttctgctggccgtggcgggggtcgcggaggtggcagggggcctggctccgggcagtgcgggtgagtaacctccagagcaacggttcgaagctgtcgggagcggccgccacagcgctccaagatggcgcggggcagggggcgggggtgcgcgcgacccccagaccctgcccacgtccggcgaccccgggaccccaggtctcagcgctccagaggctggtgccgaggcggggcgagtgaggaactctctccgccccaagatcttctgggcggtgactcgggtttgaggccttggtctgtcacccaccgacacgggccccctcttcggcactgaccccttcgcttgcctctgctgcttgtcagaaaagggtgcgatgcccccgcccaggatcgtcgcgaggtttagatgggatttcggatacgcagccgccctaccgcggccctagttagttattgttacttgttacttgacccgcacttggttcataacgaccttggtggcggtgagcactgacggtccccacagcccgcgtggtgggtcctggactcgggcaggagacattaaaaatcagtaaaccctgtcccccgggggctggcaggcttgagga

SEQ ID NO: 46163 - DNA, 232 bp, Homo sapiens; identical to SEQ ID NO: 6780
  chr9:36136545-36136777
  hyper

SEQ ID NO: 46164 - DNA, 30 bp, Homo sapiens; identical to SEQ ID NO: 6781
  chr9:36137117-36137147
  hyper

SEQ ID NO: 46165 - DNA, 140 bp, Homo sapiens
  chr9:36257375-36257515
  hyper
ggtttggcttcaactgcggcgctcctacagttgggttaacgagttacctatactgcgaaactgtaccccacccctcctaccagagtagtaaaaaatacgttcttgtgttctaacaattttacaagcgtaaaactgggggg

SEQ ID NO: 46166 - DNA, 722 bp, Homo sapiens; identical to SEQ ID NO: 6783
  chr9:36257923-36258645
  hyper

SEQ ID NO: 46167 - DNA, 321 bp, Homo sapiens
  chr9:36258697-36259018
  hyper
cgtcctcctccactggcgacacacgcactgaagcccgagtcttcccgctgggtagttgttttggtcttgcacccaaggagggatttcttgcgcctcttgttccctcagttatttcataaaccaggaccgcaactatactgtcgtgtagcgcggccaccccacagcggtccctgacgttaacccttgccgtgactgctagaagacactggtggagtgtgaattgatgaccaaggcatggcagagcctctctcatctttataatcagttcagcggcggcctccactacagggaactcccagccagtcccgaggcctagggaca

SEQ ID NO: 46168 - DNA, 221 bp, Homo sapiens
  chr9:36572866-36573087
  hyper
attcccttggcgggcggaagcggccacaacccggcgatcgaaaagattcttaggaacgccgtaccagccgcgtctctcaggacagcaggcccctgtccttctgtcgggcgccgctcagccgtgccctccgcccctcaggtcagttctcccgcctgcccgccgcagtcgcagttgatggctggggtctgggctgtgcggggcgcagcggcccaaacccagtt

SEQ ID NO: 46169 - DNA, 126 bp, Homo sapiens
  chr9:36739811-36739937
  hyper
ggagcaggatttattagcagacaggatggggaagttgattagcctccgcggctgaacggacatcctgtcagacaggcctcttaatccaatcacttacctgtggaggggagccggctgcctcctcct

SEQ ID NO: 46170 - DNA, 90 bp, Homo sapiens; identical to SEQ ID NO: 6786
  chr9:36748472-36748562
  hyper

SEQ ID NO: 46171 - DNA, 147 bp, Homo sapiens
  chr9:37002818-37002965
  hyper
cggcggaccggctgtcaccgcacgtgaggctgggggcggctgggagggagcgagcgcagggtgggcagggggcgctgaggaccctcgctctgcggaggcggccacacctgagccacgagcgcaggcctcgggcgggccgtgtgcccc

SEQ ID NO: 46172 - DNA, 1072 bp, Homo sapiens
  chr9:37025279-37026351
  hyper
ttgccaggccactcagcactgcgtggcagacacggacatgctcgccccgggaagctcaccttcactccagccgggtctctgctgcctttgttaaataggggacctgcggctaggaaagctggatcccaggctgttgggatgggggggagcggggtgggaggaccaggcatggggacggctcctagcccgggagcaactccctgacctgaagcccgcagagaccccgagcggcacccgagccgaggctgccgaagcctgtcaccttcctccagcctggctctgcagcaaacagaaaggaaacgcgattcgttccacttggaatttccttgaaatctccgaatctaatccggcgttaactcaccgtgagaggagcgctcatctcacaggaggctgtggtaatgggtgaattggcaggatccctgcgggccaggcagccaggccggccttgccctcgccctaaatgacccttcccgtctcctacacacgctgcgtctttcagaggcgggggtgcctgcgtggtaactaattggcttcctctttctttctttctttttcgtttcttatcctctttttttaaaggggagaagccatgagaaaaggcgtcctgcagagaaggacccaatggggtctttaagggtctctgtatgaactggccggctcctaagcagaagctgaactcagaaaccgctacttccttgatttttcaaagccccctcctcaactccaggacgcctttggagccctagccccggtgtcctcgcttagctctcaacctcttcctccacacatacagacacgggtcagggccccactatccctccaagcgccagtctggatcagccccatggctgaaaaaggcgccatcggagtaggggtgtggggcgctgtctgagactctgactggcctctccctacaacttactgccctccaactggcctggcccggagccctctacgggtccaagccagggttctccgaaagagctgaaatgtcgccgccggagccttgaaaggctgcagctcgctgcccaagctacgcgttgccggaggcgggattcccaggtgcctcagc

SEQ ID NO: 46173 - DNA, 838 bp, Homo sapiens; identical to SEQ ID NO: 6789
  chr9:37026433-37027271
  hyper

SEQ ID NO: 46174 - DNA, 772 bp, Homo sapiens; identical to SEQ ID NO: 6790
  chr9:37027324-37028096
  hyper

SEQ ID NO: 46175 - DNA, 31 bp, Homo sapiens
  chr9:37028479-37028510
  hyper
ctggggcgcaccagggcgcacctgggtggag

SEQ ID NO: 46176 - DNA, 174 bp, Homo sapiens; identical to SEQ ID NO: 6791
  chr9:37029443-37029617
  hyper

SEQ ID NO: 46177 - DNA, 909 bp, Homo sapiens; identical to SEQ ID NO: 6792
  chr9:37029931-37030840
  hyper

SEQ ID NO: 46178 - DNA, 743 bp, Homo sapiens
  chr9:37034114-37034857
  hyper
tttttttttggtgccaggggccgctcacaggtcggaataattcaagccttccgctcccccgccgagctggggtagctgatcactgagctgaaactaaacgttttaggtggaaaaaaagcgtccgaaggcaccgtgaaatgattaaggaactaaagagcttctcgccatgtgagatcatgtcctgttctcgccaacatcacaagatgtccccagacacgccgcgcccccagcgcgccgccccacactgccggcccggagcgaggaaagggtaggcgctgcgcggccgggcctgctcagcgcgccagacgtggcggacccggcccggccggagtagagcgggaagccgggagagcagcagtgctgctgccgcgccgccccagacttttataggggttggggggagggaaggaaggcttcagcctgcgccgggcgctagccagcgcacctacgggaaggggcagaccgaagcggagcccgggagcccgggtcttccagccgcaccttctattaagacatgcgcttgggggtcgcggccctctgcgctgtgcgcggggcctgtgacatctccatgtgcaaaccccgctgcttagacgagcgcaggccgggtttttgtttttgaagaaattaactgctcggccaagcaggtgcttttgaaaggggttgcaaaggctggcagtgttgccaggcaccgaggcgacgttccggtttactccgattcacccctagggcggcgcccgacccca

SEQ ID NO: 46179 - DNA, 434 bp, Homo sapiens; identical to SEQ ID NO: 6794
  chr9:37035489-37035923
  hyper

SEQ ID NO: 46180 - DNA, 736 bp, Homo sapiens; identical to SEQ ID NO: 6795
  chr9:37036401-37037137
  hyper

SEQ ID NO: 46181 - DNA, 807 bp, Homo sapiens
  chr9:37037458-37038265
  hyper
ggcctaggcacgctgcgagctgccctccagctaagacgctgcgggcaagggagggggaggccgacatcgccaggcgaggggccaaggtcgggctctttaactcagccaggaaacatcgttgggggctccagggctcgtggagcccgaactggggctcatttccggcccgatgcccctcttccccagacccctagcccggaatccagcaaaggctgggccatcgccgtccgccactgggcctccctctgtgcgagccctgggagaagcctcagggaacgactctggcactggggctcggccccggagctagcgcagagcgtgggtgggagtcgacatccaggcaggaggcaaagaagaggccccgccctaaagccgagggcccagttcttcgaaagcctgtggccggagctggactcacaggattcggggtccgtacagcgcgcacgtggtaccgcatcttcggcaggcggcgcccctaatgcccagccccgccctgcttcgtttgccgggcctgaactgtgtcagcattgagggtggacgccgagtcgcggcgagttggtcccttgcggtataaacttggggcttccctaggggcggtgccgggatggatgggggcgcctctccacctgcaactcccccagcgcagagcgcaaaaagtgcacatcgcgggccagccgtcgcctcggggtttcaggcggcgcccggggcaaaaaggagctgaggattggtttgggtcaaaacacccatttcagttggcagtggggtcctctgcgcctacagggcttcgagctccgggtgcgggctcac

SEQ ID NO: 46182 - DNA, 30 bp, Homo sapiens
  chr9:37486454-37486484
  hyper
tgtcagcctccttccgcgagacattccctc

SEQ ID NO: 46183 - DNA, 30 bp, Homo sapiens; identical to SEQ ID NO: 6797
  chr9:37651060-37651090
  hyper

SEQ ID NO: 46184 - DNA, 46 bp, Homo sapiens
  chr9:37998719-37998765
  hyper
gattacaggtgtgagctgccctgcctgtcctcgaaatcctattttg

SEQ ID NO: 46185 - DNA, 1325 bp, Homo sapiens
  chr9:38067582-38068907
  hyper
gagtcaaagctcttcgaagtcctagacagctctgactctgactttactccttggcagccagaaggactgactgggtccgtcttcctggggcaaggctgggccgggcgctctcgctcagaggggacgttctggaagcagcggcgaaagaggtggggtcaggaggccgccggtcccaggaaaagggcgcgggaggaggcagaagcgggaagcagcacgccagccccgacccagggtcctaggccgaagctgaagtagagactcaacaccagagcggcgggtgcctcggtttccccgtgcgcaccgtggctctggaacctcgggaagaggccaaggggcaccttaccttgtccttcttgccggccccgctctcctccgcggctgaggcggcgcacttgttgagcagtttcttgcctccgcaggccgtcgggctccaggtgcggccgcccgcgcaggcgccccccagggggtccccggccccaccgcccgcggcgctctccactttgatgaggcggtgcttgggggagatgtagcgcacctcggccggcgtggcgggccgccgctcgctgctgctgcggtagagatgcggagagccggaggacgaggacgaggacgcggcggcccccgcgcccgaggaggcgcagcaacagcccgcggcgcccgacgcggacgaggccgagaaggcgcgctggaccccgcctggctccccgctgccgccgcagtagtccaggcggcacatggcgcgcagtttgcgcagcgacgagccaggcccgttgtaggggtcctcgaagtctcgctccttctgcgcgcggtaggcgcggatgaggtcgctggtgctgccgctgtcgtcgggcagcgagcccgaagaggctgagaagcaggaggcggtggccggaccgcaggacgccgaggcggcggaggaggcctgcggcacggcctgggggggctgcgaaggccgctcgcctcggcgccgctgctcgcggtagtctggccgcggcggctgcggggggctcttggtcttgctgttgcccaagctgaagtacttgtttagccacttggccatggcgagaggccgcctagggccgcggcgcgggagcccggtccgccgccgcggccattcggggggcagcgctgcggcgcaggtccctcggcgccccggccccggcggggggcgtccggggcgcccgctcccgacgccaagttcaagttcttgccgccgccgcctcctgccggcagctctctggctccggcggctgcaacacctccctccgcctagcgccgcccaagctaggaatctcgcgcccctcgtgggcgcgtctcatggggtc

SEQ ID NO: 46186 - DNA, 189 bp, Homo sapiens
  chr9:38069785-38069974
  hyper
ggttcagccccgtgcgccaggtcttcggaggaatctttatgctaatgagtgtattagcagtccagatgacggatgtggtcgggataggcggtgggagccgggcccagcaccaatccgagagcaaggctaggggaggtcggaatgtttgcttaccttttcacctctgaggaagtcgaggctttagccctg

SEQ ID NO: 46187 - DNA, 30 bp, Homo sapiens
  chr9:38392520-38392550
  hyper
ggcttgcggagacccgagggagggagcgct

SEQ ID NO: 46188 - DNA, 228 bp, Homo sapiens
  chr9:38424416-38424644
  hyper
ggcatggcttgctccgggacagcggcggcgcctctgcttcgcgctccgctccgcgcccgccgagcagtcaccgctcccgccccgcggccgctgattggccgggcctgcaccgcggggcgcccgcagaccgctgctccagcccgggacccgcgcggtgcccgcggcccgggtctccgagctggagggtcgccccgagagcagctctccgacctccgattggactcttga

SEQ ID NO: 46189 - DNA, 1165 bp, Homo sapiens
  chr9:38619919-38621084
  hyper
gggaattgccagcgacggaaagcagctgaggctccatttggctccgctgctccgagggtgcccggcgccctccaaggtccccgccccaggggctgccgggctgcagggaagccgggcctgcggccccctcccaccgcgggctgagtccccgagctacctgtcttttctgtcgcgggcgtccaagtcccggaacctgcgcgtcaggcagcgctccacctccgcggcgtcgcccttgatggcagccctgtggatcttccgcagttcccagtcccgaatgtcgtaacccggacccgcatactcttggtccatggagctcaggagcgcctggcccaggcgtctcccgaagctgaagagcttcctcatggtggcgacttctcagacgcccaccacccgctcctgagccgcggcggctcctcgtggcctttccacccccactccgccccaaatccgcgatctcccccgcaacccgcgatcccccccgcaacccgcgatccacccccaaatccaagatccacccccaaacccgcaatgtagctcagaatccgcgatccagcccggtccaccacagccttcagcagcgacactcgcagactccgacctctcagaccgagtgagcccagctaagccgttaggcgcgcgcctgaacctcagcgctccgaactctcagaccgagtgagtccccgcgatgccagttaggcgcgcgcctacaactcagcgccagccgggactccggaagccgctcccaagccctcgtggccggcagggggcacctgcagcacgggcgcacgcgtcgctggcttgcgggttctcctgggctcccgcgggacgtcccggaatcccaggagtgcatcccttcccgcctgagggcctgcctggccctgactcccgacccgctcctcctccgaagagagatcggggccgctgacaggggccctccgcagccaccggggatgggactggggggtcggttcctgtcccggtgcagccgccgccgggtagaccgcctggcttggccgcagccagggcgacatgtagccccggttctgccaggctgggagcgccagccatcttgggagttgccaggcagctgtcgccagcaggtagagggcgcctgcagcttgggcgcccaggtggtggagcacggcctaggcggcctctggatcgc

SEQ ID NO: 46190 - DNA, 935 bp, Homo sapiens
  chr9:38621394-38622329
  hyper
cgcgcccagcctgagggcccccaggccgtgcctcccgcccattcctccaccggagggggatcggggtcgctggcatgggcacttggcagtcactccggatggggttgagcaggggttctcagttttcgcccctgtgcagccgccgccgggcagaatgcctggcttggccgcagccactgctacacctagcgggtcgggcgggccggggggtgaaagcgctgggaggcgggtgccttctcgccctgtggcgcctctgggccccacggcttgtcggcctccggcgcgcagggctccccagcatcctgggcgccggcccgctgcctgcacaaagtcaactcagacaggatgaacttcggttgccttgtctggctgggctgccaggcggggcagctgacctgctgatggggtgactttcttcatcttcttgcccacaggacagcgggctgggaagccaggggccgccgggacctggggctggaaaccacatctgcccacagccgcagcctcctgcacctgtcatcctggcggcgccctgacgtcggagaagcagcaggcgcggagctcctgcagcgggcaccgctgcagcaacccgacccggcgcaggcggcagtggaaggcggcctgctagcacggctcccgcggccccaggaccaggggtgcggccagcaccgccctcactccccgcgtctcgtggatattgccctccctggaggcggctggacctaagcgaggctcgcagcgatcggccccgcgaagactcgcatgcagggctcaggatcccgcattctggcgccgcggcaccgcacctttcagcagccctgctcctcttcttgttggtaaacttttgtcactctgccatgaaaagcatccaggcgtccttgatttcgacattgcgtgcacgctcagccgagctcatcagacgggcggttgtcccc

SEQ ID NO: 46191 - DNA, 31 bp, Homo sapiens
  chr9:66455724-66455755
  hyper
tgaaagttgtagagtgcgcccctcactgtgg

SEQ ID NO: 46192 - DNA, 59 bp, Homo sapiens
  chr9:66494098-66494157
  hyper
agtcggcggagcatggtctgggtggctgctggaatgcttgcgctcgaggcctgagggac

SEQ ID NO: 46193 - DNA, 30 bp, Homo sapiens; identical to SEQ ID NO: 6803
  chr9:68433449-68433479
  hyper

SEQ ID NO: 46194 - DNA, 140 bp, Homo sapiens
  chr9:69197623-69197763
  hyper
agcaggggggaaacagttggccgatactgttactattatcagcgttattagcggccaggacagtgtggggggcgggcgggggtaaggggcctccccgcgcctcccagcccttcgcgctcggctccagctctttggcttcc

SEQ ID NO: 46195 - DNA, 23 bp, Homo sapiens
  chr9:70152212-70152235
  hyper
caaaaagccgtggcagcgagggg

SEQ ID NO: 46196 - DNA, 36 bp, Homo sapiens; identical to SEQ ID NO: 6806
  chr9:71320185-71320221
  hyper

SEQ ID NO: 46197 - DNA, 371 bp, Homo sapiens
  chr9:71320586-71320957
  hyper
tcgctgtggggaagcgacaacgtcccgataacttgcagactgtggcgcaactggtcttggtagcggaggcacccgaatgctgcccgggtgaggtaagtttcctgtgcgtccccggccccttcccactagacccttctgaggggcttgcgcttaggggctctgcatctctgctgaaacccgtcggtctctctacccttccactttgcctgtctgcgttgtgctgggggtgacgtggagagggcgcccgtggccaccgaagcggaccttcgttccgcgggggccacagctgcgcgctcccaacggacacccacccgctcgtcacccggatccccggggccgcagtgacactcggagatcactctgggttcact

SEQ ID NO: 46198 - DNA, 44 bp, Homo sapiens
  chr9:71735685-71735729
  hyper
tctgggtagtgctcccgccctcacctattgtccgggtggaggaa

SEQ ID NO: 46199 - DNA, 468 bp, Homo sapiens
  chr9:71735786-71736254
  hyper
cgggggaggggaacggaagcgggtcgtaaaagttaactttacactaaaatcattaacttttctcacaccccccaataaaagcagtcacctcccccccccaagagccccccacgcacccacagtggcccacaaccatgcttcccgggggctttgaagggtagaggagctgacatcctccttgcccagaccctggaaaggattaggaagcggacctgggcacgaatagagaaagaagcccagcaaattcctcttgcaccagctctgggaggaagctcagctgcagttctacgtagaagaaaagaggcggcaaagtaggcgcgcgggctccagtgacaaaggtctcccaggcagccgcggcccctgccccaccgctgagtggcgtgcgtgcaggcccaccctctccgcctttcccgacaccccaaagtagcgctgcgagcagctgcgtctccctcccggggctcgcgcgcc

SEQ ID NO: 46200 - DNA, 43 bp, Homo sapiens
  chr9:71736562-71736605
  hyper
cagcgccccggagagccgccttcgccctcgcccagcgcccgac

SEQ ID NO: 46201 - DNA, 133 bp, Homo sapiens
  chr9:71737160-71737293
  hyper
gggtgggggcaggagccggtgccttggagtgacgcgggcggagcgcggcgctggttattggaagctggtggggctgcttgagtgcccgctgagcctccgccgcggggcttgaaaactccgcactccagaaagc

SEQ ID NO: 46202 - DNA, 711 bp, Homo sapiens
  chr9:71788549-71789260
  hyper
gagaaatgtggggtacaaggccgtgtatgtgttggttagccgggcaggcctctagacaggacctaaaactttgaggttttcccagttcgactcttcgtaggagaactgaagctgcctgtgtgaggccctgcgaacctcgccaaaaagtcttcctacaggatgcccccgcgacctcaccggggaaacaccgcggacagtcgggccagcagcgcccggagctcactccaggtctccaaacttgcagcacttcccagagcgcgcgcgctcggagcgggacctgcttgctccagtgcacgccgcggagcgaaccatcgggctggcgggggtggaggggtgcaggcgtgggggctgcgggccgctcgggccttgggcttctcctgccgccgccgccgcctcccgcccccggccaggagtcgcgcgtgacgcggttcgccgcaggagcctcgaaggcgcggcgccggcgagcccttccccggcaggcgcgtgggtggtagcggccaatttgacagtttcccgggccgggcggccagcgcggaggcgccacgctcgggtcgggggcgggctgacgccgccgccgccgcgggaggagggacaaaggggtgggtccccgcgggtcggcaccccggcggttgggctgcgggtcagagcactgtccggtggtgcccaggaggagtaggagcaggagcagaagcagaagcggggtccggagct

SEQ ID NO: 46203 - DNA, 364 bp, Homo sapiens
  chr9:71789452-71789816
  hyper
cgccgtaggaagctgggattctcccatccggacgtgggacgcaggggaggggtaggtttcaccgtccgggctgatgactcgtggcctccggggctcctggaacctttactctgaagtcacttgggctggagattaaggcgcgagtaggggacactgtcttgaacccggtgtcctggatttctgctggcttggaggcatctcgtgtctgttgtgtcgcttgcatgtctttgtgttttccttctctatttcaaaccacactcggtattgatgcaaagttacaggcttgtgtacgtgagagaaactgaaaactcatcacagagcagaatcccttttccctttcaatcagctgcgtctgtaatagaag

SEQ ID NO: 46204 - DNA, 31 bp, Homo sapiens
  chr9:71881715-71881746
  hyper
aataactagatgcagccgggtgctgtggctc

SEQ ID NO: 46205 - DNA, 659 bp, Homo sapiens
  chr9:71939556-71940215
  hyper
cctgcgccctgtgagcggtaactgcgctcggcgtcgtccttcccgaagtccttggcttacacctcttcccatcgagtcgccccaaagcccctcctccaggcatccccctccttgggcaaaagtttaagggcgggcccccttctcactaaagcgcgccagggcctctctcgtggctggacagagaaggctcctcgctcttctctagccccagctcggcgggtggggacagacgctgagactctcggtggccggcgctgacgtgtcctggccgtgaggtgcctcccacctcgagggacttacttaaatatttggggcagggcaccctcccaggaccccaggaagccggcgcaggttcggcggggaccctgaggctgtggcgcacttgccccggcacagcgcgagcacggagtgcgcgtgggtgagagtgagggtgcgcccagggccagcgggaggcggacccgccaggcggcaggtgggtgcggccggctggagccagggcagcggcagcggcggcagcaagtggttgggccgtgcgcatttccttccctccccctcggcctcggagcccgtctgcagtgcccagtgtgctgcgccttcggctcggctccgctccgcgtcctctgcccgccgcagccggccgcacccggccgcacccttcc

SEQ ID NO: 46206 - DNA, 315 bp, Homo sapiens
  chr9:71940263-71940578
  hyper
cgtggctgggctttcgggtgggccgcaggccgggggcccgggcgccgctgccgccgccgctcaggagccgccgctgcccccgctgcggccgcgctggccccggggcgcgctgcagcccccgtcgcggcctcgctgcgcggccaccgctgctgccggggtgctggccgcgccgccggcgctctcctcccgccgggcagtcgccgccgctgccgccgcggccccgggctccgcgctgctgcccgcccgcccgctgctgtcacttgggctgcttcagctgatcttgggctgctgcatggtggcgctcagcttcggggc

SEQ ID NO: 46207 - DNA, 30 bp, Homo sapiens
  chr9:72288141-72288171
  hyper
tagcacaggccatccgccctagatatggct

SEQ ID NO: 46208 - DNA, 30 bp, Homo sapiens
  chr9:72374473-72374503
  hyper
cgtctctggagtttcgtgaactcctatgaa

SEQ ID NO: 46209 - DNA, 31 bp, Homo sapiens; identical to SEQ ID NO: 6811
  chr9:72374873-72374904
  hyper

SEQ ID NO: 46210 - DNA, 179 bp, Homo sapiens
  chr9:72874087-72874266
  hyper
aggaagaattcggccccgcagctgccgctgttgcagtcgtccgggcctttcgtggaaggctctatcgtccgcatctcgatggagaacttcctgtaagttgcccggaggccgcgccgcgggtgtggaggtgtgctggccagcaggccccggggctccggcagcgcgcgggcgtgggcgtg

SEQ ID NO: 46211 - DNA, 30 bp, Homo sapiens
  chr9:73027046-73027076
  hyper
cacctccctgcaaaccgcgattcaggggtg

SEQ ID NO: 46212 - DNA, 1696 bp, Homo sapiens
  chr9:73027342-73029038
  hyper
cgccgcgtcccccctcggtttcaaccacttctctgcaacccgacaagagaattaaataaaagatacgccatctgacttccccgctgccagcgtctcccaggtggggtggccccaccgtcgcggggtgcgggagagtcccgggggcggggcgggacaggggaggggcggacaccactccccgcgaagccacgcaccgcactcgctctgcccgccagtttaaggctctccgtggctcccggaggccggggacaattaaggagagagtgagctttccgccaatgcacatttaaattatttaaagagttaaaccgcatcttatccaacatgtttgcaccctttcggccgagtgcagtgtcccgaacgcccaggaacgctgcctggccaaaggttaactaaccccagagctccgggggagagggcgacgccgctaacctgtatgcactctgtaatgggctttgagatgggaggattttccatagactttcccacagccactgtaggggcacttgtgcctcttttcggaggcgtgtttccccttcgcagccactccaggatggaggagggagagcgggctgggcgcgctgccaggatcctgtctctcctccgggctgtgggaaggactcgacccagattcggtggtcacgtcgctgtcggatcccatatcctcatctggactttccagactgtcgctgcacacggagggggtctggatgggtcggtacttgttcaggtccaacaagctcttggcgatggtgaccagtgtgcagtaatccttccaggtgtcccccgggtcaccgtgctccttggtcacctcgcgctcaggtagtcgcagccgctcggcgtccggagcgaccccatgctccggcaccgcagcgcggttcgaaatggaaaccagacactgggcagccacgaagtccatgtaggcggccgcggacatggtgcgggcgacggcagcccaggcggcgcggacaaacttggcggtggctgcggaggttcggctcgccctgccctggcctcggacgacgagcgcggcgcggcgcggcacggcgcggcggccaagggggcgggggcgcggggcgcttccgactcgcaggagcgccgaggcgacctcagcccctcatctttacgtaaccggcagcgcctccgcacgcagcatccacggccccgggctccgccgcgccgccgcctctagccgccgcccctgccccgcgccggccgcgatcccccgacgggcgcgccggcccctctgagccggctcccttggaaagatgccacacgtggcggtcgcaagtttattcgactgaaaacgcccccgaggcgctgggagaggaaactgcaagagaggtgcacgccctcggccgcctcgccgtcgagccaaagccccaggacattcacccgatcaccccgacgcgggtggcgagggtcccgccgagcgccaggtctaagagacactttttcccgagtccactgacggcttctgaacccctgctccggccggtccgcaccgttccggcattctcttgctcagtaacaatttcgcagaatcccatcacgtcacaaaccaaaccccctccaattggccagtggggagggtgattcaactctgtttactttctccccctgccagtcagaacggccttcggtggagaggtgcgtctagaactgaggcgtgcggccaatccgactgttccgtttc

SEQ ID NO: 46213 - DNA, 30 bp, Homo sapiens
  chr9:73035421-73035451
  hyper
ttccgagccgtaggcgtcacccctacgccc

SEQ ID NO: 46214 - DNA, 31 bp, Homo sapiens
  chr9:73035699-73035730
  hyper
ccgagaagtgcgtgcccgctcttccctctct

SEQ ID NO: 46215 - DNA, 266 bp, Homo sapiens; identical to SEQ ID NO: 6813
  chr9:74061492-74061758
  hyper

SEQ ID NO: 46216 - DNA, 330 bp, Homo sapiens; identical to SEQ ID NO: 6814
  chr9:74061787-74062117
  hyper

SEQ ID NO: 46217 - DNA, 36 bp, Homo sapiens
  chr9:74382902-74382938
  hyper
aaagtttaaggctgttcgcaccgactttgaaaggtc

SEQ ID NO: 46218 - DNA, 198 bp, Homo sapiens
  chr9:74639981-74640179
  hyper
tcaggaactctggtgtgagaccgaatgatgaaagccgtccaggggattccgatgctgctcagggttaaaaaccacagcttgatctgaagagctgcaggggacagcgccctctggaggccacgtgatcacagcagccatagaaaagcagctgcatccagagaaaggagcaagagtctaggtttccgagtcctgttgtcc

SEQ ID NO: 46219 - DNA, 694 bp, Homo sapiens
  chr9:74764248-74764942
  hyper
gcggagccaactcgcgggagaaaaatcctattggcattgaggaggtagggagccagcccctgggcgcggcctgcagggtaccggcaaccgcccgggtaagcgggggcaggacaaggccggagcctgtgtccgcccggcagccgcccgcagctgcagagagtcccgctgcgtctccgccgcgtgcgccctcctcgaccagcagacccgcgctgcgctccgccgctgacatgtgtgccgctcagatgccgcccctggcgcacatcttccgagggacgttcgtccactccacctggacctgccccatggaggtgctgcgggatcacctcctcggcgtgagcgacagcggcaaagtaagcaggcgcggggtcgagcgcactccgacgggcgggaggataggtgcaaggaacctggcgcggtgcttcgcgtagcccggggttcgctcggtgcgcagtgagcgccgcggctccggagttgaacttgagtctttggctcttgggcaacgcagagagaaccctggcgctaggttcgtgggctggctggggagttcccagaagtcgggagcagtggcgtgctaacgccacaactggctcgacagcagtccgggctgcggtagagccgggagcaaggatgtcaccccccgctcccccgccccccgttccaatcctaagataccggcaataatcttcaatcttgc

SEQ ID NO: 46220 - DNA, 50 bp, Homo sapiens; identical to SEQ ID NO: 6816
  chr9:74979546-74979596
  hyper

SEQ ID NO: 46221 - DNA, 30 bp, Homo sapiens
  chr9:76736854-76736884
  hyper
ttttctctgtcagaacgtattttgacatat

SEQ ID NO: 46222 - DNA, 741 bp, Homo sapiens
  chr9:77111651-77112392
  hyper
ggagcatctgacggacgtttttaaaggaaggggacagctacttccatgggactgcattttagttgtgctaaaagtgatgaaagtgggtttgcattattctaccaccaacacccaaaccacctgcccacggaaacccccgccggagaccgaagtttacccaaatagcgctcggcaaagcgctgccataaattcaaaactaactctgccgggcccgcgggggttgcgagacagggaccgaacgtgaaacccggggagccccgcgtctcttgcctccgaaggttttccgtgatcagtgtccccttctctgctggagtcggaagtgcctgtcacctgcggatctgcccgactctcccggtcggcccttcttctctgcccagttcggacagtctcgaattccccgtcgcagccccggccacctcggactccctggtccccagcccccgccccaccccccgcctccaccacgtcccctccccgcggtcccagcctctccaggcgctgctgggctctgattggcggctgcgctgacagcaggcggggcctggaagtcgcggccaagcccgccctcgcgtataagcccctctcagcgctctctctccatctctcccctctctttctctctcgctgctcccttcctccctgtaactgaacagtgaaaattcacattgtggatccgctaacaggcacagatgtcatgtgaaaacgcacatgctctgccatccacaccgcctttctttcttt

SEQ ID NO: 46223 - DNA, 649 bp, Homo sapiens
  chr9:77112691-77113340
  hyper
acatcaaaactgttaacatagcggcggcggcggcaaacgtcaccctgcagccacggcgtccgcctaaagggatggttttctcggcagagcagctcttcgccgaccaccttcttcactcgtgctgagcgggatttttgggctctccggggttcgggctgggagcagcttcatgactacgcggagcgggagagcggccacaccatgcgaggtaagcgagtctgcgggcaccgaggctccccgagtccggccaactccagccagacggggagatgggggaggggagggcacccagcagaaagggaaagaggttgcccaggcgcagttccccgaattcgctctcgcaggtggggctgcaaatggcctgggcgtagaaagttgcgggaaggtgttgatgtctttcgggagttctggagggacgcgggagggcgcttttttggagaggggagacaggctagttggttcttaccagtccttgagttgcactgaatcttttttgcttgtcgctctcgggtgcggaagcggacgcgggatggagaaagccgaaagagggatgcctctggacaggagcagtttggaagcgcccggcgcgcagtggtcgccggccgggtttgggcgcgcggggcgcaccggccgggggcagggtggacac

SEQ ID NO: 46224 - DNA, 150 bp, Homo sapiens; identical to SEQ ID NO: 6820
  chr9:77113558-77113708
  hyper

SEQ ID NO: 46225 - DNA, 481 bp, Homo sapiens; identical to SEQ ID NO: 6821
  chr9:77113805-77114286
  hyper

SEQ ID NO: 46226 - DNA, 96 bp, Homo sapiens
  chr9:77114904-77115000
  hyper
ttgcagatgactgtcctggttcgccacggcggtcgctttgaggactccagaagctggaaggattgaaagccaggcgctggtcctcatgctcacctt

SEQ ID NO: 46227 - DNA, 788 bp, Homo sapiens
  chr9:77501916-77502704
  hyper
gtccagacaaaataggcgagaccaagaaattaccaggatctccactactctcccaagcgtctccagtgctctcccaacagccaggagcaccctccctctccaagcccccagaacttcctgttgcgccatatgccagcggtggagaggagccagcggggactcctgaggttgcaagtccgggcggcgccgcgttggggaaggaagcggactgcggcggggcgggtgtttaccgtaaccggcgctgtcatcgctccgggactcctgcacggggaacactgggcgcacggggacgcgcaggggcgcggagggacggccgtctgggcacttctccagccgcctcggaaagccgcgacccccggctagtcagcgtccgggtctgagatctgtgcccgtggcagctcaaaacgcgccttctctcctccggattctcagctcaagccacctccgaactcctctccctccggcccggagcggaatcagagctgcctcctctcccggggtgtttcccaccgccccgagctgaacccccgacccccgctaggtttccgctctgacaccacctccgctatggccgcatcccagctcttgaaacgggggctgcgggacctgccctgtagtagcgtacactaccttagataggataatcatctttgggtggagaccagagaacttgaaagccggtatttcataaatcctagctattctagatcctcgttagatgtagtgtccctggccccacccacttctatctaaggccgggggcgcagatctagcgaatcgcctaaggt

SEQ ID NO: 46228 - DNA, 30 bp, Homo sapiens; identical to SEQ ID NO: 6823
  chr9:77566826-77566856
  hyper

SEQ ID NO: 46229 - DNA, 78 bp, Homo sapiens
  chr9:77567959-77568037
  hyper
ggcccgcagaggggcgtgaccttgtttcctcaggagtgtggcggtggtcttactactatgttcgttatagcgcggtac

SEQ ID NO: 46230 - DNA, 30 bp, Homo sapiens
  chr9:77702591-77702621
  hyper
ggtcatcaccccaacgctagaggaatgaga

SEQ ID NO: 46231 - DNA, 30 bp, Homo sapiens
  chr9:77703064-77703094
  hyper
atgccaggtaggggcggtcaccagaggccc

SEQ ID NO: 46232 - DNA, 1397 bp, Homo sapiens
  chr9:78504979-78506376
  hyper
gaattgtactctcccgtggcgttgcctagtatcgcagatttcgaaagtgagcaggcaacagacttggctttcgagccaattctaggagtcgatgcgacttactgtcctgtgtggtagcttctcccgggagcagaaagtgtaaaataaacagctgctgaaaagcatgaagaattaacgaagtgaaaatctcgagttatttgttcggcaattgacacgtaagtgacctccttaaatgcctagttatttaaggacgtttagaacgaggatgaatgaatcttcagggcggttaattcgcaccggcgtgtaaatttctttagtctttcgggaagtggcggtaaattcatacaaatccagcagggagggaagagaagggagtaaaaccacgatctcggagcgctcttctcagtcctttggaaagacttgcctttactgcccggaaccctggaggttacagctgggcgaacccggaggcgctaggacctcgtcagcgcctggctgcggccgctttcaagagggcggaggagggagaggaggagggcgatgtgggaaaggaggggtgttaaggggggcgggggaagtcatttatgcagagcaggagctgctgccattgccactcagaatcctcgcgcgctgctcggagccggagggagcgctgggagcgagcaagcgagcgtttggagcccgggccagcagagggggcgcccggtcgctgcctgtaccgctcccgctggtcatctccgccgcgctcgggggccccgggaggagcgagaccgagtcggagagtccgggagccaagccgggcgaaacccaactgcggaggacgcccgccccactcagcctcctcctgcgtccgagccggggagcatcgccgagcgccccacgggccggagagctgggagcacaggtcccggcagccccagggatggtctaggagccggcgtaaggctcgctgctctgctccctgccggggctagccgcctcctgccgatcgcccggggctgcgagctgcggcggcccggggctgctcgccgggcggcgcaggccggagaagttagttgtgcgcgcccttagtgcgcggaaccagccagcgagcgagggagcagcgaggcgccgggaccatgggctgggggagccgctgctgctgcccgggacgtttggacctgctgtgcgtgctggcgctgctcgggggctgcctgctccccgtgtgtcggacgcgcgtctacaccaaccactgggcagtcaaaatcgccgggggcttcccggaggccaaccgtatcgccagcaagtacggattcatcaacataggacaggtaacgaactacaggctagcccagccctcggccctgaagccactgggggcttcttgtcccctctgcgtggaaccccctccccctctt

SEQ ID NO: 46233 - DNA, 30 bp, Homo sapiens
  chr9:78506859-78506889
  hyper
gagggggccggccccggtgtgagtgcagat

SEQ ID NO: 46234 - DNA, 211 bp, Homo sapiens; identical to SEQ ID NO: 6826
  chr9:78507337-78507548
  hyper

SEQ ID NO: 46235 - DNA, 30 bp, Homo sapiens
  chr9:79074195-79074225
  hyper
actccggggtcagacgcccactccaggtaa

SEQ ID NO: 46236 - DNA, 30 bp, Homo sapiens
  chr9:79074792-79074822
  hyper
ctaggaaactcgcgcgcagggtctattacg

SEQ ID NO: 46237 - DNA, 728 bp, Homo sapiens
  chr9:79520836-79521564
  hyper
aacttaccagtttagatttggcgcgttgcaaaaattcttccatgtcgtggctaggggtttggaacccgggtactcggaggggcgcagtggaaaatctcggcccaaggaagacgagcggggtcccgggaaagtggcccgccggggcgcagcgaccgactgctccctcctgccgctctgaggcggctgcggcggaggctgtgcttgcgccctcgaccgtctcgcccagggctccccgccccacccctcgcccggccgccggctctgggcacccgactctgccctaataaggaaagtgggtgtgccgcccaggagccccggggcgcgccgggcacgctctctggcacgcgcctcgggcgccgtggcgcgtgggcggaggtgcaggggtatggcgaggggctcctccgccaatcgcagggccgtgctgcggcctcctgacgtggcgcgccgaaagctgctgcaaccatggacagcgcccagaagtgcgagccaagtgcaaggggctgctgcagagggaggctctgccgcaggcaccgccgcggtcagcgggggaaggtgggaagagggagacgggtcccaggagagcccccgcctcgcccagcgcctcactggctggctggcgcgttacggagcactccggcggtcacttaatgatctggtcggctggcctggccgggggaggcactcagctagattggcgtgggagggacgaggagagaaagaggggagtt

SEQ ID NO: 46238 - DNA, 554 bp, Homo sapiens; identical to SEQ ID NO: 6828
  chr9:79626870-79627424
  hyper

SEQ ID NO: 46239 - DNA, 136 bp, Homo sapiens; identical to SEQ ID NO: 6829
  chr9:79628804-79628940
  hyper

SEQ ID NO: 46240 - DNA, 184 bp, Homo sapiens; identical to SEQ ID NO: 6830
  chr9:79629207-79629391
  hyper

SEQ ID NO: 46241 - DNA, 800 bp, Homo sapiens
  chr9:79629690-79630490
  hyper
ctggagctcgagtatcgtctcctaaattcaaggccagtgctttttttctccaagaaataaatgcccctgacctcaggcttttcccttctgccctccaccctcgggcattccgaaaagtcaaatcgagcttatgcactcaaatccaagtagggcggagccaaacctgtgtcctgggcgcctgccgggcaaggcgcggggactggacgggtcggaaacggggcagggatgcacttcgcagagatgtcaggtcgggttggtgacgctggaggcgacggattcctaaaacgttataaggggttgacgggtggcgctgctgccctgcagcgtccccagctgcgcagctcctgagctccccgctccgagcgcccagacccccagcgccactccaccgtcgagatcacagcttcaaacctcaactccttggagccttcgaaggcgcagttctgactactgagtatttcctggaaagaaaaagaagcccaaagcggtgaaatgatgcctccagggtcatccaggcctggactcgagctggaagccacgtttccgagtcctggggctggctttctcctaccctcttcaaatccactttaggagtttcgtctgggaaaagtatgcgccgagaagtcagccgaaggtcaggcaagtgccaggctagcgtgaccaggaaggctcctgggaggaccccaaacgtaactaacccaggcaaccttccgcacgtcagctaagtcagtgcgtaaagggagaacccatggaaattgagatgtgcgcctaaacctttgccttttttctagcgctgtacg

SEQ ID NO: 46242 - DNA, 1868 bp, Homo sapiens
  chr9:79630544-79632412
  hyper
cgcagaagccgtgggaaggcctggcctagatccagcccaaggagcgcgtgagaccctccaggggctgggggcatggaggagaaagaatgaataaataaccgctcctaaagttccacatctttttttactcccctccatagagccaattaaacgcaataaaagcttgcatggaacccctcttcctagcatagcgtcgccaacaattgcctaaggggtaaaccaaatacgcctgagataattacactaagcccggggcaatgatttgcctgccagcgtcctgagcgccagccaatatttggatagtgcagtagttgtttaaaaacaacaaaaaaaaattactcgcggaaacttgaaaccgactggttggtgccagggtggttacacgatctgtttttcttgagagggggtctgcaggcagctggagcgcgcgcgttccggcccccgccggtgccactgagcgcctgcaaaacttgtcggaattaacctccggggaagtaggggaagaggagagcgcgcccccctccccaccgcggccccagctctgcaccccggcccagtgccgcgcttggaatcccccaggatcctccgcggcggccgcagcccgccactctccaaaacagacacgcgacccgagctccctgtctgcgctctaggcagcaattgcggcctgggccgccgcgtccggctgtggcctaggtggtgggaagtactttctaccctcgccaagcacaacctgaatgcggaagcgtgaggctcggggcgcttcgctcagcctccgagactgttttgtcccaggttgcgtggaacctggctcgccgaggccgaagacactggccaagcccctggcgtcccctggcgctgaacctgaggttgtggcggcgggtctgcgggctgtagcgagctcacccagtgagggcctggctcattttttgtgctcagggttcgcgttatgcgcccaagatttgtcccgggagtccctgaagggcccctcccctcgatcggttcccaggagccgcaagtgcccaacgggcacggtcccagagctgctccccaaaaggagactctgctgttccagcaacccgcggaagggatgctatccgaggtatcaacaaaagatccctttgctcgagctgcgtgtggggtcgaagtccggagagcccttaagtgtgcggcacgcagagctcctcagcagcggcctgacagcggtgcaggagaccccagcttcctgggctgggacagggctgttgtctcacggtcttgttccaaggaaaaggagccacctggctccagcaggctcttgtcaaactgtgagcgtccttggaattctgtggcttcccgaggccaagaggctgtccgctgctcggctctctcaagtgtctcagcggacaaaaatcgcgcagaaactcctatggcaggaggaaagcttccgacatacagtgaaagagaaaacatcttactttgaaaagggcttaggaccaagaagctgctcttttccccgggccttcttgcaagcttcagtcgtaacatctattctcagacgtcttctggcctaggacaaactggccacatagagctagccagaaatctagctcctgactaaagatggaaattacgggcctgacccgctcacggcactcctgcgacctggctaagccaccccacggacagacgtgctcccaccgtccagctcaccaaaagccagaagctgaaaacacccgatctggtgtcaccaaggttgctagttagggggcagccccccaagcagctgggccgatggctttcttccaggttaggcgtgggaaaaccgagggagccatagtgtccaaatgctcctttctcctcaaatcgcctaacgggaaaggacccgt

SEQ ID NO: 46243 - DNA, 2511 bp, Homo sapiens
  chr9:79632937-79635448
  hyper
ttcttggttactgttcgtctcaccctctataccgcgatggtggagctcggatactgtctcctgtctccctgcacctggtgcctcacatgcagttggcgcgcaataaaactgagatgaatttggcatttggtgaaaacaccccatgctttcttccccatgagtttttccctccagccctctaatcatcggggtttcttgcagagaagaggccttgaggacacgatactctgaacttgacccagagtgtctagcccaggaaaaagggtttgtaaggagagagaagctcacagcgagtagatgaaaacagggaagggtaaaaggaagggggcggaagagggagatgccagagagaagagaagcaagaaggcagtgtcctgttccccctccaccgtgcttggtggcccgggtggggcgcagctgcgggaaatgcacccggagctgtgccccctcccggcgaacagcctgcgccacccgccgcaccgggaggtggctgggggctgccgagcgagtggtgaacgcgatgggtggagagcgcccgaaacgaggtggaaaagggggcgggggcgaggcacggcgccttcttgccccttcttcagctacagacgcggcggcggcggctgagtccctcagcctcggtcatgtgatagtctcgaagcgctagctgcgggggtctcggcgtctcggggaccattacaaaacgcagccaggagagcgcgtcgctgccactgccgtcgcctctcctcctcaagacaagcccgggagaaaggcggcagctgcggcgcggacggctgagcctccccggccagcactcacccagcattcgcagacgccctctccagcccgccgctcgctcccagagtcctgcgccccacactcctcagcagaacctgcgggcgctgccgcttcagaaaccaccaaagttttttctcctcagcgacagcctagggctgcgcgtctcttctaaccccggcgacgctgcgagcctcggagaaaagagaggcgccctagaagccaatcttctctctccttaccctgatttttcactccaggaaaaggagaactccagcgcggtctggctaagtgcctggccaggggcctgcgtccagggcactggaagtcctgctgtcactggcctccaggacagcaggcgcaaactcagatttaaagggccagagtctctactgcccagaccttcctcccagccatcttggtctgggtttccctcggacctagaaaaagcaaagaggccgggaggaaacacggccccttgccactctcctctgcagccagctccagcactcagtctttggccacccgggggaagacgcagagaaggcggcggtaaacctggtgcactccgcccgcgactgtgcgcgccagtcggcaaccgtcggggccagaagttgccagcttccgagagctgagtaggcccgaaaggccaaggtcggagacaccaggcaattcggagaaggcaggagagagaagcagagagggcctggagggcgagagggcaaagtggcgggactggaggggccgagtgggaattagtgggggcagccaggccccaggaacggagtgcggagagattctgtggtccagtgcgggccggagggcggtggaggagccgggggcgatgccgcggccggggaagagctcgtacagcgaccaaaaaccgccctactcttacatctcgctgaccgccatggcaatccagcactcggccgagaagatgctgccgctgagcgacatctacaagttcatcatggagcgcttcccctactaccgcgagcacacacagcgctggcagaacagcctgcgccacaacctctccttcaacgactgcttcatcaagattccgcggaggcccgaccagcctggcaagggtagcttctgggcgctgcaccccgactgcggggacatgttcgagaacggcagcttcctgcggcgtcgcaagcgcttcaaggtgctgcgcgccgaccatactcacttgcacgcgggaagcaccaagagcgcgccgggcgccggtccgggagggcaccttcacccccatcaccaccaccacccccaccaccaccatcatcaccacgctgccgcacaccaccaccatcaccaccacccaccccagccgccgccgccgccgcccccgccgccgccgcacatggtacactatttccatcagcaaccgcctactgctccgcagccgcctccgcacctcccgtcacagcccccgcagcaaccgccccagcagtcgcagcctcagcagccgtctcaccccggcaagatgcaggaggcggcggccgtggcggcggcggcggcggcggccgcggcagccgcggtgggcagcgtgggacgcctgtctcagttcccaccctacgggctgggctcggccgccgccgctgccgccgcggccgcggcgtccacgtcaggcttcaagcacccctttgccattgagaacattattggccgggactacaagggcgtgctgcaggctggagggctgcccttggcgtc

SEQ ID NO: 46244 - DNA, 305 bp, Homo sapiens; identical to SEQ ID NO: 6835
  chr9:79635745-79636050
  hyper

SEQ ID NO: 46245 - DNA, 200 bp, Homo sapiens; identical to SEQ ID NO: 6836
  chr9:79636290-79636490
  hyper

SEQ ID NO: 46246 - DNA, 402 bp, Homo sapiens
  chr9:79636830-79637232
  hyper
tgtttccctaacttacgaatgcaggaaaaactcggcacatcactcgacaatattgctcttaacgcttgcagaaacgttccatggctgttcccttccagtctcctcggacggaagcaaggggaccacccagtcacctttgcacgctgcggctgtttttgtattccgtgtgctgtttgagcgcttatgtctttcaggcgaattaattcttcagtttcaattcgtgaatgggaaagaaacttgccttgtcgctcttgcccttcccccctcttgagccccagggaatagcactttactcgcgacacaattttgggaatggaggggggcagagtggggagaaatccgctttgccctttggctctaagtcacctccgcctcttgtccgcgccgcgttcgggttgtgac

SEQ ID NO: 46247 - DNA, 220 bp, Homo sapiens; identical to SEQ ID NO: 6838
  chr9:79637668-79637888
  hyper

SEQ ID NO: 46248 - DNA, 53 bp, Homo sapiens; identical to SEQ ID NO: 6839
  chr9:79638136-79638189
  hyper

SEQ ID NO: 46249 - DNA, 552 bp, Homo sapiens
  chr9:80263197-80263749
  hyper
tctgaaaacctcagcagtgaccgcagactaagactgagtggaaaggttcccgctagcgtttgtggctctaagtggcaggaggaggcggagcatcttgaacctgcagccctggcgtctgctggacttgcccttctgggcaccccaagccgaaggcgcctggaagtgaaaggggacgagcagggggcgcggagctgggggtgggagctggcacctctaggagcagctcccacacttgcctccctggctggggcgtcccggccaaggtttgctgtaatctgcgcgtctggccgccaggcaccgggttccgacaggtgagtgagtttcgccaactcactcgctcggagaaggcggcagcaggctggaagaggagcggcgccaagcgtctgttgcgggacacaaagccccggacctgaagtggaagcttgcccaccagcttcaccaccacgcacacccggatttcctagactggctccttccgcttcccggacgccccggcccagctcgggcttggccaaagcccttggtcagctcggcaatttgcctgtaaagtgt

SEQ ID NO: 46250 - DNA, 2103 bp, Homo sapiens
  chr9:80645541-80647644
  hyper
cccccaacgtgccccggctccgctcgccacccgctgggccacacacacggctccccacgccaccaccccatggggtgccgcggccacgacactggaagttcaacccctctgcccacctttccacccccgcgcctctggtcggagtgatctgccatttagcagatgcacagcagataaggtacagccctcagggacacgaaaaggaacaagccaaggcaccgggcagggcagccccgacccctgtgctgcgtgtgtgtgtcgctgtgtgtgtgtgtgtgtgtgtgtgtgtgtgtgtctgtgtgtaacgcgcccgcgcgcccgcgcgggtgaaggcagtggccgggggcgcgcccgggagggtaggggcgaaccgcgggcgccggggggcgggggcgccgaaggcagctgccccgcagggccaaggatggtgggctgggggcgcagaggcccggcggggccccggacggtactcaccgagcagcagcagcttgagctcccggcgggcgtcccgcttgtccctgcggagctgccgctcgatctcgtcgttgatccgccgggcttccttggcctcctcgctcaggcagcacgccatgatggactccagagtcattcttccaaagtgcctccgctgcagccccgccggcaccccctgctcacagcgcgcacacacaccctcccgccctcgctcccccgaggcagcggtggccgccgagcccccgccgcccgggcgcgcgtccgggacgagctccgggaaccgccgcgggggcggcggccagggccggggccaccaggtgggccgggggcgcggtgggagcggatagtctgggccgacgggagaagagaggcgggcgcgggaggcgggcgctggctcggggggcgcgtgagagaaggccgccgcgcccggcctcgctcagacgcccgcgcctccttccccgggaacaggcggcccgcctcgccccccgagccgccgccgccgccgccgcctgcgaggctcccctacgccgtgcgcctggcggcgagagctcattcaccggggtgtccccgcagcgagcggccgccgacggctccccgcgcccggcgcgcccgctcctcgccgccgcctgacacggctcccgggcgccctcggccctgtccgcgcccaccgcccggctcgcgcgcagacccggttcccgtcccgcccggcaaccgcgcgctcctccgcctccgcctccgcccccgcccccgccagacgcccaccccctgccccgattgccaggcgcggagcggctgctcagtgcgagccctccccctcgccacacacacacattttcttctttctctgaactggagcacagatccgggagggaggaggcggcggcgaaaggaggaggaggaagaggcggaggggatgggcgcgggaggagggagccgggaggcggtgccgcccggcccctcctggaaggctttcctgggctcgcggccgccgcggcgcgcctcccagtgcggctctcgcctcgcccgcgcggctcccgggctgggccggcccccgcgggctctgcggacgcctactgctcccgcaccctcggcagagtccgcgggcgcagcagtcacggccgcccccggccgaagtcggggccagacccggccgccgacgcgcagcccgagccggcggccgccgttgcgtgccagggccgcagccgacctgcggctgccgtccggccgggcgtggtgagacaggaatatggcggcctctgcctgcctcagcccaccggcccgggagcgcggccgcggcccctgctgaagtcgcgggaggcggccccgcggagccccgcacgcgctccctgcggcgccggcgctggcgtccgccgctcccgggctgtgcctgtctgctccacggggtcgctcctcagccgtttctgtgtttcccgttcctatttctaaaacgccattcggttagaaactctcacgtcacctctgacaccggtgcagtcttagaaaataagctcctctatactgtgtggggctactggggaagggaagggaaggaattggcaccggtgcccagaggtgtagggggagattcacaggcgaagctgttcgcaaagtaacgtgagatagaaatct

SEQ ID NO: 46251 - DNA, 30 bp, Homo sapiens
  chr9:80851418-80851448
  hyper
cggggtggactgggcgcctctgctgagcac

SEQ ID NO: 46252 - DNA, 1061 bp, Homo sapiens; identical to SEQ ID NO: 6842
  chr9:80911703-80912764
  hyper

SEQ ID NO: 46253 - DNA, 1121 bp, Homo sapiens
  chr9:82185178-82186299
  hyper
acgcatagaaataaacgtctaaaacccagcctgttacattagccaacactcttcttgactttttccgaattttttccctgtccccaagattagccgctcgctagaaaagactgcgagcctcagcagcctccccttgaactggggcgctgcctccagctggacacggactaaggatggaaaggcgcactgacggaggccgcccccatttcccaggcccctccctaggggtgcccctcctcagccatggctgcccctttctctcctcctccagcatctgcccctggggccacccccacctttccgccatctctcgggcccgcgtggcaccctgctctgtttttaacggggataaacttgacttgcttctccaaagagcgggaaaaagaggcgcagtcttggtactgatctgggggagggaacgtcccagggcgcgcaggggcgttttctacccgtgccccgtcggcctgctctgttcagtaccgaccgtgttcggggttcacgtggcccagtcggcaaagtttctttggaggtccagcgtctctgattcccggatcttcagccccacccggagcccccacggttactgccccccgcgacccccgatggagcgtcgggatgcgctttctctccgagtgcctccgggggtggagggagggaggcctgtttcggaactaaatggcaatcacagcccccgcggggcttggagggacgagctccccgcccaccccgcggccccggccccagccagcatctcgcgactccatttctggctctaaacaagaacggggaccgagtcgcgttcacacggaaaattatgccggctccagcggcgcgtaaaattgatgtgaaccgaacgaagtaagatcagcgtgatcctccccctcttgtctcaacaggggtttcggcgcgttacacaaggccgagcttgtctctttaaggagacattggaccctaattagtccgcattcctggcgcggctgcggagcgaggggccgaaggtgtctgggttgggagacgggtgggcgggaggacgagactcggaagaagatcttttgaccagcccccaggctcaccgctccctccaccctctttattttgccgccaccaccaccaccaccacc

SEQ ID NO: 46254 - DNA, 30 bp, Homo sapiens
  chr9:82188544-82188574
  hyper
ccgtctccctgcttcgcctgtgatgtgggc

SEQ ID NO: 46255 - DNA, 30 bp, Homo sapiens; identical to SEQ ID NO: 6844
  chr9:82839233-82839263
  hyper

SEQ ID NO: 46256 - DNA, 944 bp, Homo sapiens
  chr9:84302221-84303165
  hyper
actcgcatggcgcggccggacacgcacctgtgatactgcgcctgcaggaactggaattcctctttaatccggtccagggactccgggatagtgaacttgaagggctggcctgcagcctggtgcggcgtctgggggcgaccagcgagggggaccgagggacgggaatgcgggcggatgaataaagcagtaagtcagagaaggcaagaacgggtgggacataaacataaagttagaagtggctgaaaacgaggccccaaactcgagtttgcccttcactatggggagggggaaagcggaccctccccgggccccggcttctaaagaggctcggaagctcttcccagtctccagggcggattgcgctaagtgcgcccgggtcaccaggccaaagggaagggggctccccggcggccagggaagaccaggccagattgtcggtgtcgccgccccttcccccacggcggcgataatgaccccggggaccagaggagaaaaacaactcctttacgctccccattcccagagtcgccggggccacctccagacgcaccggaaccggggccgcattgacatgtaaataggcgagaggagaaacaaaggggggggcgccctgcccccactcggggaaggtagaggggatatggctgcaggagagaaaccccagccttccccagcgcccctgtccgctcggtatagacgtcaagtaggaaggagcccaaagggagggagaaaattaagagtttcggcccactccccaccccaggaagagagggccccagacctccccagccttacaccgctgagggcgagaaggtccgccgggcctcagaagccaccagtctccctaccgcccgggagaagcgcctccccaacgatcctggccccccaccaccacccagccgcgcctcaccgggtgccggctctgcgggaacatcgctctggcg

SEQ ID NO: 46257 - DNA, 672 bp, Homo sapiens
  chr9:84303267-84303939
  hyper
cgcgctggccacgcacgcgcgctccgccgggcgcaccggccactcggcgcccgcagctgctccggctcccgctcccgtcggtgcgggctccggccctcagggccacattagtgggcgccccaggcccagctgcttcaagaacctgcgcggagacgtcgggcgctcggggactgtgcgcgggggcagcgctccaacccccggcctcagctgcccgggcggggaggcgggggcgcggtgactccgaccgcactcccctcggcgatccgcgtgcgcggcgccagtcctgggcaaacaaatccagacggactgcttttctttgctcttctcctggtccgcctcctcttcgggctttccccgaggcggcggcgggcgaggtgcaggtggcgcggcggcccccgctaaccccacacaaacccgacgctttcggggcgactcccgcaagattcggctgcgccttcggccgggtgctcgcaggctcccgggacgcaaaggggagcgaggttgaagacgcagcggaggctcctggccggggagcgacggatgacgaggcggggaaagtgcggagggcgcgccgggaggcggctcggcacgccccgtgcgaccagcactcggtgttctccgcggttgcacaaaccctccgggcccgacggggctactccaccgagagcagtc

SEQ ID NO: 46258 - DNA, 197 bp, Homo sapiens
  chr9:84304432-84304629
  hyper
gccgcccgcgcctctcgcgccgcttacattaacacgcggtttcacactccggagctaaccagcgccggccccgcccagccccgttcgggcggggggcgcgagcgcggagccggcgggggacgtgagcccgggaggttggggggtggggggggggcagaaggcccgcatcagccaatcgcgtgcgctgcaaccaacgt

SEQ ID NO: 46259 - DNA, 30 bp, Homo sapiens
  chr9:85677315-85677345
  hyper
ccagaataacctcccgcccccagctcacac

SEQ ID NO: 46260 - DNA, 31 bp, Homo sapiens; identical to SEQ ID NO: 6848
  chr9:85834937-85834968
  hyper

SEQ ID NO: 46261 - DNA, 68 bp, Homo sapiens
  chr9:86152303-86152371
  hyper
cacaatcccttttcctttctccgaaacactcagacttcacacattcctttcgaggtagctccagtccg

SEQ ID NO: 46262 - DNA, 1390 bp, Homo sapiens
  chr9:86152381-86153771
  hyper
cgctccatccctcaaggctggcgcccagggcagcccggcctctctcactctggggaaacttcgccaccgccccacgcggagaactaaagaccaccggcggagggtgagggggaccgacacggagcggaaagcaggttccgggactgagggcgtctccggagcctgggcgcgggagacagaaatgagtgaacccagctgatgcatgccttctccacgtggaagaagggaggaaataccagtgggcgacatgcaggtgcccctctcagccctcggagctcccatctcctggcggagtagggcccagaggggccagagtccctccggaggcagctgccccgcgcccctagcccgggcgcagtgagacgcgcgcgcagggtgcacgcgaggggaaggagactgggcgcggataacgcgtgcctggcgcttgcagggcaccatgcccctccatgccaggataaggccccccaccctcagaggcctgaggaatcgaaatctggctttctagcagtcccccaatcccctccgggagtgggttccttgttctcgcatgcccaccgcaaaggccccccgccctgctcccggcgtgtgccccgcgccctcgcccggttccacgcgcacctggatgtggcaggagatctccgagtcgtccagcagccggatggtgcatctcatctcctggctgagcgatttgacgctggagctccgaaagtggatcattttcatggtcctcctgcctctcggcacacagtggcaggaggcgaacatgcaccgcggccgtggggagcgagcgggaggctcagggccggcgcggtgctcgcctgcgcggacacacacgctcgcacgcactgtccgggacacctgggcgcggctcagccccgggacatcggcagcgtcgggcgcctgcggacacacatgcccagcggccggggcgcggcgggcgggtccctccctctgttcgctcgcctccgcctcgccccctcctttccccgcctccttctgtcgcgcgcgctcgtgcgcctccctctgcccgggctcgctcgccgaggacgcccagagcctgagacccccggcgggctcgcgacgcactcactcccacgcgcgccgagcagctgaaggaggaggcggagggatggctggcgcggctggcccgggtgccctggtggtggcctgctcagtcgcagccgccgctgcgtcaagctgggcccgactgccttcctcagcctcaccgcctcctccctcccctggccgctgtcgctcgggctcccggttgtgctcgtcccggccccggctccccaacgcgctcgacagcgccctgctctgctcagctccagggacctggcgcgggtaggggacggagagcgatcctgacccacaccgccagggggattcc

SEQ ID NO: 46263 - DNA, 340 bp, Homo sapiens
  chr9:86238305-86238645
  hyper
cagcctgctcgcggggcgcccatcctgggaccgcatccgagctccgggttcccgctctaagacggggaggctgcggcgaccgcaggctcagggaggaagccgctcctgaacaggcggctgcggggccgcgcaggtggaggcctagcgagcggcgcggggctaggtttcggggcgccttgtcggggccaggcgggagggcgcacggcctctagcgagaggacgcaaaccacggcccaggctctcacagacctttggccatctggacacacagcggcctcctcctatgaggccctggacttctccgattcaattttggaaagtgaatcgttttccccttcct

SEQ ID NO: 46264 - DNA, 25 bp, Homo sapiens
  chr9:86536018-86536043
  hyper
cggaaggggcgctctgcctctagtc

SEQ ID NO: 46265 - DNA, 30 bp, Homo sapiens
  chr9:86594874-86594904
  hyper
ctctaggaccacaacgcggactgcggatac

SEQ ID NO: 46266 - DNA, 30 bp, Homo sapiens
  chr9:86595136-86595166
  hyper
aggctcccctcccccgccttctcgcgtcct

SEQ ID NO: 46267 - DNA, 594 bp, Homo sapiens
  chr9:86755526-86756120
  hyper
cacctggctccccaggcaaagcggccccgccaggacgggcacggcttcgcgtcctcgctcaagtccccgatgatggccgcgtcccggcaggcacggtgcgaattgactggggtttgggggaaacgaaagccccgaaggggccttctctgccaaatgtcttcttccgtcggctcgatggcagcccccaagcctttcattttcaatgtatgaaaacactggggtggatttagcttttcctttgggaaacaaacaaacaaaaaagaacacaaagagcgtgtgtgcgggtcttctttcaaaatagtggggcatttgaaacccgcgctgcagctgcgggcgctgcttcaatcgcaagcgttttgttttctgaaagcgctttaaaagatgctgaagaggaagagagcgagcgccctgcgcattttcggaaacggaagattttgaaaacctgtatttatccgcccttcgcaaaaaatcagcttctctagggcgagcctttccaaccttttccgtcagggcacacagaaaatgacctgatttcaagagcatttggggtaaaactggaggggatttcagagcgtctctgtgaggtttatttaa

SEQ ID NO: 46268 - DNA, 49 bp, Homo sapiens
  chr9:86886564-86886613
  hyper
atgttccgcacgtctcgctggttcgaggacgcctcgtctgttgctatgg

SEQ ID NO: 46269 - DNA, 1381 bp, Homo sapiens
  chr9:87282689-87284070
  hyper
agtgttcctcaggggcttctccgcttaaggttcactgacaagacaggcggagttttacgtgcgtctgagaccaggtcatttttgcccttggcgtctcttccttggcgcgtcctcacctagtagagaatagaggcgcagctcaggagtaaacttcagcctggccgttcaccactcgatgtgtgttacagccgagtgacagtggtgagatagacctgctggccttgctttcgggacctgcagcaagatttttgggtgctgtccaagaattcccgcggttacactcagcgcccaggatctgtacaaaaaagccccaatagatgttttacgttcccttcgtaatatttaacgcttggcctagatccgagcattcactctaacgttcggtttcttgatccttcccatccccaaactctgcgggtagatcagtgactattactatattttgaacgagactccaacccattgctctctcgagagagaaggattgcccgcctttttcccccgggcaggagctcggcgaggccaggagagccgcgcaccggccgggcagggacgcgcaggcgtcgggcgccgctggttgcgcatctggcgccagagcgcgcccccagcgctgtgcccgccgcgacccgggccatgggctggtgctccggagcgtgccgggcgctctctccccgcgcgggggcaccagagccctcggaagtgtcaggcactgcggtgtattttccccgttctcttttaaatgactgcggaaaaacagattccgagccgcaaaagggaagacggattctcagacaaggcttgcaaatgccccgcagccatcatttaactgcacccgcagaatagttacggtttgtcacccgaccctcccggatcgcctaatttgtccctagtgagaccccgaggctctgcccgcgcctggcttcttcgtagctggatgcatatcgtgctccgggcagcgcgggcgcagggcacgcgttcgcgcacaccctagcacacatgaacacgcgcaaggtacggcaggggagcaagggcttgggatgccctacgtgggggtgggcatcgcggggagtgaatccacgatctgggaatggctacatcccgtcaggttaaaggatgagagaaaatgacgcggcgccacacatcggacaggccagggtggccaccgagcatttagaatacgcatcaggcgcgctcccttcccctcacatgtctctatttcccgggcgtgtgatggcagaaaacggcaggaaaaagacccacttagagagctagaattgtgtttggagactcccttccctctgcaaaagcaccaacaggaagcccctccaaaaccaccgatccccaaataggtggcccggaatgggggcggtgatccttggtt

SEQ ID NO: 46270 - DNA, 902 bp, Homo sapiens
  chr9:87284293-87285195
  hyper
ttagggaccgggaggcgtcgaacggaggaacggttcatcttagaggtacctggatgtaaatgcacacacacacacagacacacacacgcacgcgcgtgcatgtctacacggccaggatgtgtgcgtgtgtgcgcgcgtgtgtgaactcccacatgctgctgctgtctgcttctggccagtggcaccgatgcctccctcctccctgctcgcccccagattcccctcccctccctggtgcttttgtctggagggtgttatgggtttgtgtgtgtatgagcgtgtgtgtgtttttggatttcagactaattttctggagtttctgcccctgctctgcgtcagccctcacgtcacttcgccagcagtagcagaggcggcggcggcggctcccggaattgggttggagcaggagcctcgctggctgcttcgctcgcgctctacgcgctcagtccccggcggtagcaggagcctggacccaggcgccgccggcgggcgtgaggcgccggagcccgggtgagcagcgcagatagtgccctcggtcgcctcggccctcactgtctccccctggggcggcctcggctactccccaggtgggacgtgccgcgccacctgcccgcgccaccggcacccagcggccgtggcggattctgcagcatcattcgggggccccgtcgcggagccaaagccgccggcagtctccgcattcccctttaaagggtccttcgcccggcctgtaccatggaatcctgtcttggggaccctttccctacctcccctcccttggcctcaggctcgaagagagagtgggcacactggtggctccagcggcgtcagtgccatcgcggggcaagttgattcctgggccggagctgggcactcatccatccacagtctccgggctgggg

SEQ ID NO: 46271 - DNA, 260 bp, Homo sapiens; identical to SEQ ID NO: 6857
  chr9:87285272-87285532
  hyper

SEQ ID NO: 46272 - DNA, 170 bp, Homo sapiens; identical to SEQ ID NO: 6858
  chr9:87285554-87285724
  hyper

SEQ ID NO: 46273 - DNA, 201 bp, Homo sapiens
  chr9:88137524-88137725
  hyper
agtgggagtgcctgccggcgttctcgtctgtccctacttcatccttcctctctcactgtcttacagcaaaggactacagcaaaggcgcgttcagcgcctgcgcggccaggcccggggtgctgggttgcggcttcccgcgggtaaaccctgtcggtacccgatccccgtccgcggaaggccaggagaacgcggttccccttc

SEQ ID NO: 46274 - DNA, 112 bp, Homo sapiens; identical to SEQ ID NO: 6860
  chr9:88137874-88137986
  hyper

SEQ ID NO: 46275 - DNA, 168 bp, Homo sapiens
  chr9:88355779-88355947
  hyper
taagctatgttaaaacgggaaatgggctttaaattatcaacattcacatcgattacactatgatgcatgaaaactccattctacaatgagtaaacgcccaagaaaggaacccaaccaactccaattgccctggtgctcgtaagaggtttataccgcacaaggggtaaa

SEQ ID NO: 46276 - DNA, 30 bp, Homo sapiens
  chr9:88556670-88556700
  hyper
acttcggtagctgccgcatggggtcctggg

SEQ ID NO: 46277 - DNA, 225 bp, Homo sapiens
  chr9:88713661-88713886
  hyper
ttgtgtggatcctccacgttggcaaaggtggaaacacaggtatgcgagaaaaccccgagcatccacgagaacgggatgcagccgcgctctggacgcgcggcgggaggacccggagcccaagctccggggtcaccagccacgaggcccagcggcaacgtggaccccagggcggccggagcgcgcctggggctggaggggaggaagaggcggcgggagccgagagac

SEQ ID NO: 46278 - DNA, 88 bp, Homo sapiens
  chr9:88714888-88714976
  hyper
cccagagaaggaagcgaacgaaaaacaggtttttagggggcttatactcacaaaattgtcttttttctcccacgaggcattccctgtt

SEQ ID NO: 46279 - DNA, 98 bp, Homo sapiens
  chr9:89517556-89517654
  hyper
gcaggaacgtgaatgcggcccttccccaccacacacaggctctctcccaccccctgccagctatccctgctctgacctccccgggcctccctaagggg

SEQ ID NO: 46280 - DNA, 226 bp, Homo sapiens
  chr9:89517860-89518086
  hyper
cgcggcaccaagacccccatttctatgcaccctggaaagggtgattaatttaaagtgagtggagtctgtttctttaagacaagctcataaatcgtgaaagatcaccacttcttttcaaaagcctctccacggtctgagtctcccttctgggtcagtaaagtcattgaagctttaacggcatgccatggcagattacacgatacagctgtcccggcaccgtgaaaat

SEQ ID NO: 46281 - DNA, 145 bp, Homo sapiens; identical to SEQ ID NO: 6861
  chr9:89560563-89560708
  hyper

SEQ ID NO: 46282 - DNA, 1767 bp, Homo sapiens
  chr9:89560739-89562506
  hyper
cgctgctcctgcgcccaggcccatagggcaggtccccgcggccgcccgatgcagcagcgccgctgcccgggcgcggtgggtgcgggacgccgtcgtcgtcgtccagcggctgctcaccacccgcgcccccggtgcgctgctcgtcatcgtagtcctcatcgtagtagtcgtccaggcccccgtccgagccgctgctgccggggccgttgcccagctcggcgccgaagcacaggcgggccatgttctccttgaccgactcgcagatgggccgctcgaggccgtcgcacacgcagtcgttgagcagcgccgccttgggcatagccagcatgtcctcaatgacggtgcggcattcgtccgtgcagcgcagcccgttgaagactttgccgcagtaggtcaggtagcggctcagcgccaggttgcagcggctgtcgcggtcgcagcgccgccgggcctcggtgcagcccatgaccccgcccgcgccggggccgcccgcgccgccgccgctcgtccggggcaggcacggctcaatggcgcgcttggtggacttgcagttctcgtcctgcgcgcagtcacagtcctccagggcgggcccgcggcgcgtgtggttgagctgaatgagggccgagatgcagtgactcgggcagcgccagcgcgacgagaaagaggcggccgaggccgggaaagcggcggcggcggccccgggcgcgtcgcccccgccgtgctgcgccagcaccggcgcgcacgcctcggcgtactggttgtaggcgtagctgcactccggctccccctggcactgcagcagcgcctgccagcagatgaggcggcggccgtgcgccagccccgatccccgcggcgccgagcccagcagctgcagcagcgccatcaggcacagccaggcgcccggcactgtccccccgcgggcctcgccgccgccgcccagcagcgcggccaccatcgcgggcagcggcggccgccgggagaggaggggaaaggagacgaggcgcggggagcggcggacgcggagccggtggaaaagtttgtccaagtcctgcccacttcttgcatgagtgtcttcataaatccatgcgcgccgctggctgatgccccgctggtggcagaaggtcccctttcgctctggctgcggtggcttcctggaaatgaacagctgtcgagatctggtcccgctctcccacccgagagccctccgctcggcccccggtggtggcgggagaggctcactgtcgccccgggggggtgcgggccgcggggccgtggcggggctgcaggaccgcgcggcgcggcgggtgcattttgctccgcgcctgcagatccgttgtgcggccggctgtccccgtgccggctgctcgcgctgcggccgcggcggctccttcctcctgggctcagtgcctcgccgccgccaccgccgccgcggtctctcgcatcgcgccgcttcctggcccggcgtccgcgcgctgcccgccttcccgcggcccggccgccccgcgtcccctccccctccgcccgcggcaaccccggcctccgcagagctccggggagctctttccgggaagcgcggggagaacaagaaagtcggcgctgccggagagcggctccctggcttcactcggcggcagcttctcgggtgaccaagagcccggggagcggatccgctgagcccggctgcagactcgttagcagcgaggctttaaatacaaaagtgggccgggagcccccgcgtggtgccgcggtgccccctcattatgcatg

SEQ ID NO: 46283 - DNA, 92 bp, Homo sapiens
  chr9:89763355-89763447
  hyper
ctgtttcccggccccgcggccattgcagagtcatgaagtcatcgcagctgcgcctgcagccaggcgggaacgggaacgggaactggctggcc

SEQ ID NO: 46284 - DNA, 1254 bp, Homo sapiens; identical to SEQ ID NO: 6863
  chr9:90112493-90113747
  hyper

SEQ ID NO: 46285 - DNA, 30 bp, Homo sapiens; identical to SEQ ID NO: 6864
  chr9:90202143-90202173
  hyper

SEQ ID NO: 46286 - DNA, 30 bp, Homo sapiens; identical to SEQ ID NO: 6865
  chr9:90282276-90282306
  hyper

SEQ ID NO: 46287 - DNA, 723 bp, Homo sapiens; identical to SEQ ID NO: 6866
  chr9:90340839-90341562
  hyper

SEQ ID NO: 46288 - DNA, 550 bp, Homo sapiens
  chr9:90589226-90589776
  hyper
ttagccggagggtggcgggggcacacccccgccaggctgccggccgcggtccagcctcacctccacgtgcttggccttgaagacgatgccgtgggcgccctccccgatgcggcccaggatgcagtactggtccatcccgctgcagtcgtgggcctgtgcccctgtgcccctgaacttccaaactccacttctcctccaccccacgctgatctgagctcgcacgctgttgcctagcaacagcgcggcagctgaccactggggcggttcctgtaggcgacgtcaccaggagaacggaagctgcgtcgagtcaggggtgacagctccgggccccactgcgccttttcctagccctccgctgtcacgcagcagcaagcttaatcccgcataaaaaacgcatgcgccgagagcgtgcccgcagcagggcccacggaacgatgacagcaggcacctcctatctgcccccgcccccggcgtcacgtgactagctgcgctggtgcacgcagccgggaggggcgggctccttcccctggcaagccggaagctccgcacc

SEQ ID NO: 46289 - DNA, 397 bp, Homo sapiens
  chr9:90691120-90691517
  hyper
tctgctcggtgtggccgtatttttgtgagcggagctgcttttgtgagcgctgcgtccctgcagcatctctgcactgacgcgtggagtcgccgagaagctgcctggcggctccagcagcctccacgcctagagggctgcgcgtccgggatcgcagcgccttagcgtctccttcccgcctccctccgccctcccgccagcgagcgcgtggcgccccggaggtgcagggttgaccagggtgcacccctctactcctaagccaacctaggcagggcccttccagtttctgccgcagcatttccagcccctcgagcccctgcagctcctgagggtagctcagcagccagcccagcgcaccctcttccggggctagcgcgcactccctcggctctgcttgcgg

SEQ ID NO: 46290 - DNA, 221 bp, Homo sapiens
  chr9:90691716-90691937
  hyper
cttccagggccctgccgcgggcccctgcatctcccgccaggccgtctctctctgcctccgtctcctgcagcccagctccgcctcattctccattcctcgcccagaaacctgtacattctgtccgcggtcgccgcctgcggttcctccacgtcacgcaggcagacgccaggctccgccagctcacagaactgctcttgccgaaccccgaaggcctccacctg

SEQ ID NO: 46291 - DNA, 309 bp, Homo sapiens
  chr9:91002683-91002992
  hyper
cttgtaggtgaggctccggggctccagctaacctgagctacctgggctgggctttgtgcggggaggcagcaagcggggtgagccggcgacgacgccggcctctacgcagtgcggtggtgaagacgtctcttccagggagtcacaggaagcaaatccatccttttaaagggctcgcgtcccgcggccctgaaccggcgcgctggagcagtaatgcgacgttctccgaggttcaaggctcacggcccagccctgtgatccagtttcctcagtcttcgcggtgtgcaccactcaggacgacttgcggcttac

SEQ ID NO: 46292 - DNA, 30 bp, Homo sapiens; identical to SEQ ID NO: 6870
  chr9:91149031-91149061
  hyper

SEQ ID NO: 46293 - DNA, 134 bp, Homo sapiens
  chr9:91149286-91149420
  hyper
gggagagcccaggggcgcgagggcgcgggagtgtgggcggggcgcagtggggatgggggcgggggcgcgggatgtggtagggggcgtagtggggagagagtgcaggagtgtgggcagggcgcagtgtggggagg

SEQ ID NO: 46294 - DNA, 984 bp, Homo sapiens
  chr9:91149655-91150639
  hyper
agttggagaagagtgcggggatgtgggcggggcgcagtgaggggaaactgtggaatgtgggcgaggcgcagttggaggagagtgcggggatgtgggcggggtgcggtgggggagggtgcggagatgtgggcggggcgcagtgggtggagagtgtagggatgtgggcccagcgcagtgggggacagtgtggggatgcgggcgaggcgcagtgggggcgggggcggggatgtgggcggggcgcagtgggtggagagtgcgggatgtgggcggggcgcagtgggtggagagtgcggaatgtgggcggggcgcagttggggagcttgcggggaatgtgggcggggcgcagtggtgggagggcgcaggagtgtgggcggggcgcagttgggggagggtgcagagacctgagggcttgaggttgcctggctggccccgctcccagaggcgggtgccgcgctgtcgcccaggtatctggggtctctggtgtctgagtgtctcattgtcggcgcgaacacaattgctccagccacaggcgaggcctggccaaggtgtgggcgcatctggggcaggtcttgagaggtccagcgcccggtggtgcggacagaggcggggcaccgcggcgctcgccgccgcctccccgcaggtgatcatcctcctgcaggtgtcctcgggtctcaggtggctgcgtgtctgcgccatggttgacattctgggcgagcggcacctggtgacctgtaagggcgcgacggtggaggccgaggcggcgctgcagaacaaggtggtggcactgtacttcgcggcggcccggtgcgcgccgagccgcgacttcacgccgctgctctgcgacttctatacggcgctggtggccgaggcgcggcggcccgcgcccttcgaagtggtcttcgtgtcagccgacggcagctcccaggagatgctggacttcatgcgcgagctgcatggcgcctggctggcgctgcccttccacga

SEQ ID NO: 46295 - DNA, 733 bp, Homo sapiens
  chr9:91792412-91793145
  hyper
aggagctgggaattcttgctgcggggggcaacaagatacccaccctcccgccggggaagacacagcaggagtagggccgccactccgtgcatctctcctcccgggggctgcccagctctccccagcgcgtttcctagatactaggcaggccggacccccgctgcccagggttgggcgcccatgacactggtcagacatctggtaagccaggtggcaaaggcgtgccaaaaaagtggagcctagggaaaaccgggacggagcgggccacccgagtggtaaaccttttcccaatggatgcgggaaaagcgcatttgtagttccctcctcaccgctgtcaagcgagctgattgctaaggagtgcgcatttgcttgcctctaacgtgacagtcgcgggagcgccccgcaccccgggcttcagggaatgaaggagtctgccccgaactggccccagaacccccagcccccagggcggcccgcgcccgcacccaccttgaccacgtaggtgactccgggccccagcacctggtcgctggcgtgcggcgccccccgagggggcctgggcagcggctcgtcgccgggccggcccttcctggcggcgctcatggccggggcgcggggcgccgagggcgcactgccgtccggggcggccaggctgggcgcgctgcagctgcccgagagccgcgcgcccgcccgctcccgggcggccgacgacaggccgcggaggcccgagctg

SEQ ID NO: 46296 - DNA, 30 bp, Homo sapiens
  chr9:91793350-91793380
  hyper
ggttatacttggtgcgtggaagcatgcccc

SEQ ID NO: 46297 - DNA, 103 bp, Homo sapiens
  chr9:91793633-91793736
  hyper
tgcctctgatggagcgcccagctgcttggggctgctcacagcaaaagcatgactcactctgagaggagacccttctcaacaaaggctcggtgagcactgcaaa

SEQ ID NO: 46298 - DNA, 30 bp, Homo sapiens; identical to SEQ ID NO: 6873
  chr9:91926234-91926264
  hyper

SEQ ID NO: 46299 - DNA, 31 bp, Homo sapiens; identical to SEQ ID NO: 6874
  chr9:92112685-92112716
  hyper

SEQ ID NO: 46300 - DNA, 30 bp, Homo sapiens
  chr9:92220756-92220786
  hyper
gcgggtgcgccgggcgacctgcactgcatc

SEQ ID NO: 46301 - DNA, 31 bp, Homo sapiens; identical to SEQ ID NO: 6875
  chr9:92762428-92762459
  hyper

SEQ ID NO: 46302 - DNA, 31 bp, Homo sapiens; identical to SEQ ID NO: 6876
  chr9:92859700-92859731
  hyper

SEQ ID NO: 46303 - DNA, 30 bp, Homo sapiens
  chr9:93405119-93405149
  hyper
ctcccggaggcaggcgcagcgcactccctc

SEQ ID NO: 46304 - DNA, 32 bp, Homo sapiens
  chr9:93563761-93563793
  hyper
gtcacagaagccaccgcgctggcggggaggag

SEQ ID NO: 46305 - DNA, 147 bp, Homo sapiens
  chr9:93564324-93564471
  hyper
ggttccgccagcttcgctcctgaacctacccgcgctcgggatccagaagctgcgccgggagagaggggctcaggcctgggcggaggggacggaggtcagaccgtgcggaaagtgacccgggcaccccagggcgcccaggcccccagg

SEQ ID NO: 46306 - DNA, 1194 bp, Homo sapiens
  chr9:93955382-93956576
  hyper
ctgcgtgaaacacaacgtgagaatgggaatctgacatatgagtaacccggccgagaggcacctcttggaaatgacactgggccttggctagaattacgcacaggccctgggagggctgcggctcgtaggcccgtagggggcagggtgagggcggaggtcctggcgcccccaggcctgacccgcccgcaccgctgggctatttttagcgtccactaaacttagccgactccaccctcttgaataacccacatcttaaaatgctatttttctccaacaggtcaaaagaattctgcgagttagagcgcagattaagttgctagcgacgggcattgaaggttttagaaccgagaaaatgagccggtggcggggagcgcgtcctcagcggccaggcccggcacggggctcgggcactcggggacacacggtggtcgtcgctgtgtctcagcaggaccctgtgcgctggagagcttggggccgcgagtcgcgcagcaaggaggcttctggcttctctatttttagcctctgaacgttttccaaaataattaccaaaaggaaatacacacgcacacatggacctaacacacaaaacgtccttctgcgggaagccagcactaggaaagaaaaaaaaaaaaatccgaagtgaaattatgacacagggttttgtaacccgcggtggcgcgcttctgaaacccgagcccggcagcggcttcttatctgcaccgcgttccaggaagcagccggcgtttcggccgcgcaagggcagccgccgcacgtaggcagcgtcccccagcccgggacccgcaggaatgcgaggggcaagacagatcgccggaggagcaggggtcagaagtcagtgtttaaccactcactggctttcggtgaagccagaatgttagcagcgagtcgcggtcgggggccttggggttgcacacgcttgctccaagcaccgaggctcagctgagcacatgcacaaccctctcgatgcagcggaaagtcgtgtggcttagggccgcaccccgaatttcgccgcacccgccgctgtgccatttacaaccccccaccccgccactgctgtcacgtagcaatcaagagtaaaggttatcacaaagtctgttcttcgaaggaaagagttggaatcaaggacttcggacgggaggaagttggtaagttaccgcttcctccctcctgttttcc

SEQ ID NO: 46307 - DNA, 516 bp, Homo sapiens
  chr9:94183473-94183989
  hyper
gcgctccgggtcgcccgcgctgcccctgtctgccccgtgcgggagccggggtccctggctccctggctccctggctcccgcggcccgggcgaacccagagcgcacccgtacgccggccccggccggtccctagcgcccgggctccacgggccgcgcccccacgcggcgcctcccagagaccctcctccctccgggtgggcggcgcagcggggcctcggcgccgcgaggaccccccgcgccagaacaaaggaatgtggggagggggcagggaggagctcaggccactgagcagccccagtataactgccgttcggaggcgcttctcggtcccgacccgaggtccccgcccgccactaccagacccgcccccagccccggattctcgcagaccccaccggcccgcaggagggagcggcgcactgggggccgcacggactcgccattggagatcgcgatcggaaggtggcgccacgcggcccctacaggcctgggactcccacccgagctcgcaaagta

SEQ ID NO: 46308 - DNA, 30 bp, Homo sapiens
  chr9:94186541-94186571
  hyper
cttgctcgcagaggcgctttttgtcttcct

SEQ ID NO: 46309 - DNA, 39 bp, Homo sapiens; identical to SEQ ID NO: 6880
  chr9:94662836-94662875
  hyper

SEQ ID NO: 46310 - DNA, 880 bp, Homo sapiens
  chr9:94711199-94712079
  hyper
gccagagctaacgccgcctcctccaggcaacctaggcaggtcccaagctgcacttccgaacctccccgccgttcctctgcgccccggatccaagcagccgaaaccgcgcagggactcgggggaagtggggccccgggaggaaacccacctaggagccgggccccgcccctcccgccgccagcctcctacaggtcccgggggtccccccggcgcggccagaaggcggccgcgccccagccgctcagggacccgcgatcccagtcacaaaccatttcaatccagatcacacaccacttcggccaccccagagcggtgggggagaggaggtttcagggaccaacaaaagggatgccaaagagcccgtttccatcaagcggcccgcgggctgggaaagtcaggacccgggagccgccggcgcccccacccccgccgcaagagccgcttctccggggccacgtccaccccaggattctgccaggcatcaggccgccctgggggtggggggacgctccgagacagacgggggacactcggggccgtgtgcccttgaaggaggaagacctcggggaggaagcccgggtcctgggaccctcggggcacatctgcggactcgggtcccgggcccagggcgggtactcacattcacactcgcactcccactcgcgaccctcgggaagcgccaccgagaggctcccagccgccgccgcccgcccccagactctggaaacacttaggcgtccccagagcgcggcttattgtaaccagcccgagggggtccggggtgcgggccgggagcggcgtcgggcgagatgcgaatggccctgcctggcgcccctcgttcaggagcatgggcgccggcgcagcggccgggagcatagtg

SEQ ID NO: 46311 - DNA, 300 bp, Homo sapiens
  chr9:94712294-94712594
  hyper
cggggtcgggcgccaccacccctttctacgatgcgtccgctcctccttctccctggcgcttcgcaaacgggtccacttcgaggacctcgtcgtcgtcctcttctccggcccggatgcgccgctcggctccggccacggcaagggctggctggggaggttccttggcgcgggctggggcgtcccgccggccgccaggacgagcgcggggggcggaccgcgggcgagcgcgcaggaggcagggtccccgctcgcccgccccgatgggcagagcgaggcttgcgccggcgccccctgccgggg

SEQ ID NO: 46312 - DNA, 30 bp, Homo sapiens
  chr9:94902738-94902768
  hyper
cggcctccaggtggcgccaatctgcttact

SEQ ID NO: 46313 - DNA, 30 bp, Homo sapiens
  chr9:95088008-95088038
  hyper
agtagcaaagaacgcgctctccagagaaag

SEQ ID NO: 46314 - DNA, 30 bp, Homo sapiens
  chr9:95432445-95432475
  hyper
ggcgcctgccatgacggagtcgggcaattc

SEQ ID NO: 46315 - DNA, 30 bp, Homo sapiens
  chr9:95569800-95569830
  hyper
atgagctcggctgagcgtgcacgcagtgcc

SEQ ID NO: 46316 - DNA, 677 bp, Homo sapiens
  chr9:95570104-95570781
  hyper
aatgtagacgaggtgcggggcgtgagggcggtgctggccgcacccctggtcctgaggccacgggagccgcgcgaggaggccgccttccactgacgcctgcaccgggaccggttgctgcagcggtgccagctgcaggagctccgcgtctgctgcttctccgacgccagggcgccgccaggatgacaggtgcaggagactgtggctgtgggcagatgtggtttccagccccaggtccccgcggcccctggcttcccagcgcgctgtcctgtgagcaagaagatgaaaaaagccacccgatcaacaggtcagctgccccgcctggcagcccagccagacaaggcaaccgaagttcatcctctctgagttgacttcgtgcgggcagcgggccggcgcccaggatgctggggagccctgcgcgccggaggccgacaagccgtggggctcagaggcgcctcagggcgagaaggcacccgtctcccagcgctttcaccccctggcctgcccggcccgcgtggtgtcccagtggctgcggccacgccaggcattctgccccgcggcggctgcacagggacgagaactgagaacccctgctcaaccccatccggggtgactgccaaatgcctatgccagcggccccgatctccctccggtggaggagtggggggagacacggcctg

SEQ ID NO: 46317 - DNA, 788 bp, Homo sapiens; identical to SEQ ID NO: 6884
  chr9:95570893-95571681
  hyper

SEQ ID NO: 46318 - DNA, 339 bp, Homo sapiens
  chr9:95571740-95572079
  hyper
gatcgcggattctgagctacatcgcgggtttggtggtggatcttggatttgggggtggatcgcgggtttgggggtggatcttggatttgggggtggatcgcgggttgtgggggggatggcggatttggggctgggtgggggtggaaaggccacgaggagccgcggcggctcaggagcgggtggtgggcgtctgaaaagtcgccaccatgaggaagctcttcagcttcgggagacgcctgggccaggcgctcctggactccatggaccaagagtacgctggtcgggggtaccacatccgggactgggaactgcggaagatccacagggctgccatcaagg

SEQ ID NO: 46319 - DNA, 236 bp, Homo sapiens
  chr9:95572086-95572322
  hyper
cgcggaggtggagcactgcctgacgcgcaggttccgggacttggacgcccgcgacagaaaagacaggtatcgggggctcagcctgcggtgggagggggccccaggcccggcttccctgcagcccctggggcgggggccttggagggccccgggcaccctcggagccgcggagccaaatggagcctcagactgctttccatcgctggcaattccccgtctgtagcacttggtggata

SEQ ID NO: 46320 - DNA, 238 bp, Homo sapiens
  chr9:95820723-95820961
  hyper
ggtgttgggcagaggtagccacgcgtgcaacgccccggagtagcaacactttccgctcagccggctgccttggcccgctgggtatttggtctccccaagggcccccgcccacagcccccggccggacctcggccccagtccaacgtgtgggcgtggtctgtaagttgcatggaaccgcccctgggcgggcgtggagggcggggcctccccgcccctcacccaggcccaggcccaggcc

SEQ ID NO: 46321 - DNA, 319 bp, Homo sapiens
  chr9:95821006-95821325
  hyper
cgcctcggagcgcgcaggatgcgctgggcggccgccaccctccgtggcaaggcgaggccccgggggcgggccggggtcaccacgcctgccccagggaaccgcacaggtgagggctggggccgagtggccgcgtgcggggctctgcgcccatttcacagacgggaaagccgaggggagggggtcgcggggccgcacagccgtgggtgggggccacagcaacgatctgccccgaggacgaacctcctcgaccctccgccggcccagcaggcgccctagcggagccgaagcctggcagcgagcagttcgaaaccaggcggct

SEQ ID NO: 46322 - DNA, 30 bp, Homo sapiens; identical to SEQ ID NO: 6887
  chr9:95857689-95857719
  hyper

SEQ ID NO: 46323 - DNA, 30 bp, Homo sapiens; identical to SEQ ID NO: 6888
  chr9:95897000-95897030
  hyper

SEQ ID NO: 46324 - DNA, 1431 bp, Homo sapiens
  chr9:95946018-95947449
  hyper
agggcaggaaaggacacgctgagccccaccaggcttagccccaggctgggctcccgagggcggcggtacccctggtccttttcttcctagcctgcccattctgtcctggcacagggccttgaggtctagcgcgccgggctgcggcgtgctgaggcgttgagcctgctgcctcctctcaggaagaaacggggtcctccgcagctgacagccctgcggggcgttccaaagaacttcagaggacaggagcgctacctcgagcaaagaaccgcgggtgggagcccaggtagccggcccgcaggtggccgcgcgcgcctgccagtcagccagcccgtccgcagccaggtgggcgtgccaggcccagccccctgcgccggtccggggcggggcgaacggagccccgccctccccgcgcgccgggtcggagccggtgcgggagcggagccgcgcgaagccggcaggagcacgcgggagcgcggccccgcagtggcccggcccgagagagcagcgcgcaggagctggagcggcgccacggcccccaccccagcgcggacctcgcccggaactcggaccccgtcctcgaagcgtgatctctcccgcctcgcacgccctggccgccgggccgcgggcatggacggcgtccgctcgccctgtgagtgccgagcctcccctcaacgccgctcgccgcctttgtgtgcgcgccgcggcgctgcagccccctccccgcgcgcccctcccgcgccccgggcccgcgtcctttgtggagccgccgccgggccactgccttcctcccacccccgggcttccctatcccctttacagctgcctccgggacagcctagcagaaccctcctgggccagggctgggcagggcgcgagatccctctgccggcctccggggccctcagggacaccctagcaggtcctctctcccagggttccagggacaccacaggcccgtccctctccgcagcctggggctgagcagggcacggacccctcctccccaacccaagcctctggtcccgtctgcagcccccctttcccagggcccccagagacggcccccgcaggctctctccgcggccggggctgggcaggttgcgggcttagggcggcgttgtctcatccggcggcctgggcaggtgcggcagggccggcgctcacgcgggcctgtgtgtccttggcccacagagatggacggcgatggcggccgccgagacgtccccggcacgctgatggagcccgggcgcggcgcggggcccgcgggcatggcggagcctcgggcgaaggcggcgcggccggggccccagcgctttctgcggcgcagcgtggtagagtcggaccaggaggagccgccgggcttggaggcagccgaggcgccgggcccgcagcccccgcagcccctgcagcgccgggtgcttctgctctgca

SEQ ID NO: 46325 - DNA, 30 bp, Homo sapiens; identical to SEQ ID NO: 6890
  chr9:96214528-96214558
  hyper

SEQ ID NO: 46326 - DNA, 30 bp, Homo sapiens
  chr9:96215822-96215852
  hyper
ttgcccccactgcccgcgaggagatggtgg

SEQ ID NO: 46327 - DNA, 1 bp, Homo sapiens
  chr9:96588738-96588739
  hyper
g

SEQ ID NO: 46328 - DNA, 45 bp, Homo sapiens; identical to SEQ ID NO: 6892
  chr9:96588857-96588902
  hyper

SEQ ID NO: 46329 - DNA, 30 bp, Homo sapiens
  chr9:96708209-96708239
  hyper
tgccatgcgcagcacgagcctcgctaatgc

SEQ ID NO: 46330 - DNA, 158 bp, Homo sapiens; identical to SEQ ID NO: 6893
  chr9:96710135-96710293
  hyper

SEQ ID NO: 46331 - DNA, 640 bp, Homo sapiens
  chr9:96710806-96711446
  hyper
tggggcgcccccgctcgcgactacgcctgcgactgtcctcgcgctgcgggggctgtgcgtggagcccgcggtaagctggaatatccaagccagctgcaagtggccttccgttccccacacgcctcctgcgtgctgggcccagctgggcgccgcccaaatcttctctctcccgagactctccagctccccttctactgaccaggagaacgtcttgctccggccaggatcacaccagtggagaagcgaccccctcccccatcccgggccggggcccttctgacaagcctccccaaggactccctcattccccaggccaccttgaacaaagcacactgagcgcaaacttcgcgcctctgggggaacgctgcggccaggctaatcccagccctctctcctcccccagcccttcgcgtccccagggtccaggcggtcgcaggcgctccccactcccgcagggccacagctctcgcgagactcctgagccctctccctcccctggctgcggcccccgggctccgggaagctcagccacctgggcccacgccatatctgggtttttttcccaggactttggggatgagaagagacttgtgcatagagcggaagaggaatgggatccaagggacctttccttcaagtc

SEQ ID NO: 46332 - DNA, 151 bp, Homo sapiens
  chr9:96711534-96711685
  hyper
cgggcgccaggtagctccggtcgggcacgcgcagtccgacagactgtgtcaccttggaagacaggatgcggccctttacctagagtggcagctttgtgggctaggtcagcacggggtctccgggccggcgggcaatcgtctgcctctgcgc

SEQ ID NO: 46333 - DNA, 61 bp, Homo sapiens
  chr9:96711944-96712005
  hyper
aggtgacccccggaccggagttcccgcatcaagttcccctctgtgccgggaggtggctgtt

SEQ ID NO: 46334 - DNA, 86 bp, Homo sapiens; identical to SEQ ID NO: 6897
  chr9:96712701-96712787
  hyper

SEQ ID NO: 46335 - DNA, 728 bp, Homo sapiens
  chr9:96713305-96714033
  hyper
ggtggaactcagcagcccaggcgccgccgccctgagtatcctgcggaaaatgtgagaactctggggagccattgctgctgcaaggacccgcgggcgggctaccgcgctggtgggggggctctgtccaaaccttgcgtcctcgacttcccatccgcctcataaagggttggtgaagaccatctcaaggaccgcacgaactggtccttcaagtcccaggaaaccgaaacaacaaccgaggcggctctctgtccgggccacttccggagcgagctctgcggcggacctctggctcccgctcctttgggcacccgcggtgcggccagaccgctcctgccagcgactctctggctggcaagggagaggaggtggagttcagactggcccctcacgcccagagtggaagcgattcctaggatcctgcagccaccgagccgcccgccgtgcctagcccgggcttgatggtgaagagcacagctgccttcgacagagccggaggaaaggaagtttaagaagcaactgcccgcgttccgcttatcttgccgagcccacccccacccccaccctcaccccctgcggattcagaagctgctccaccgagcccgattgtgtcataaaatattttattggaaaaaaagtcaccgtcttcgcaagagggggtaggggccccagcgacatcggggacccggcctccaggccgagccgacgggttgccccggggcaatctcagg

SEQ ID NO: 46336 - DNA, 893 bp, Homo sapiens
  chr9:96714479-96715372
  hyper
ggcacctccgccggtttctctgcatccttggcgcgctcctgctcagtaagctgctcgctcgttggaattgagttcttcttgggccgccccttgggcttggtgggagactccaggccgccgccctgcagcacctgcacgggggaccgccagcacctgggtgagccagcacgtggactggggacccccgaggagacttgaacccaggtaggactaaggagtgcagggtccatatgaggaaatggtggggaaatgtcccgggaaatggcggccatttgtccaaatgccgcctggggagcggcccggcctggggagcataagactgccaggaggcctgaaggtgccgcgggaaaggacgaaatgttggcttacccaaggggcagaaaaaactgagaggattccggtgcgtaccaggcaccgagggaatcggggggttgggcagagtctcagtggggagaaagaggagagcagctctgcatgcaccggggcatggcccaggaagctgaggggtgggaagccaccaggcacactcactattttcttccacttcatcctccgattctggtaccacgtcttcacctgcaactggctcaggcccagggactcagcaagatctattctggaaagagcagggcgcaccctcagcaaggcaagtgaccacactcccacagcccgctggccccagccttgtaccgccctacctgtccggcgtggaaaggtacttctgcttctcgaagcgtttctccaggcccatcagctgcagctcggtgaacacagtgcggctccgacgccccttcttggctttggtgcctggctccccagggcctgccgcctccagcttcccgcggagctgcaactcgagcggcaggtgtggcgcacccgcggcgccgggcagc

SEQ ID NO: 46337 - DNA, 21 bp, Homo sapiens
  chr9:96715687-96715708
  hyper
gtgttctgtcctggagttccc

SEQ ID NO: 46338 - DNA, 523 bp, Homo sapiens; identical to SEQ ID NO: 6902
  chr9:96716904-96717427
  hyper

SEQ ID NO: 46339 - DNA, 357 bp, Homo sapiens
  chr9:96717449-96717806
  hyper
cgcggtttggcggcggcggcggcgacggcttggctccggcgcggggcccgcgcggggctctaggccggcccgcagctcggggcggcgcgcgggcgccggctcatgccccctcccccgccggccggccgggcggaggcgcagggcgcgggcggggcgcgcggggctcggccggtcgaacccgggactgcgccccctccccacgccgccgcgcctcttgcccggccagccccgcgtcaccgccccgccccgccccgccccgcgccgccgcccccaacccctaggctgagccggagggagggacccagaagggagggaggcggaagggaggccaaaaaggagggggccacgtgaaagagg

SEQ ID NO: 46340 - DNA, 69 bp, Homo sapiens; identical to SEQ ID NO: 6905
  chr9:96717840-96717909
  hyper

SEQ ID NO: 46341 - DNA, 212 bp, Homo sapiens; identical to SEQ ID NO: 6906
  chr9:96720673-96720885
  hyper

SEQ ID NO: 46342 - DNA, 365 bp, Homo sapiens; identical to SEQ ID NO: 6907
  chr9:96721102-96721467
  hyper

SEQ ID NO: 46343 - DNA, 209 bp, Homo sapiens; identical to SEQ ID NO: 6908
  chr9:96721688-96721897
  hyper

SEQ ID NO: 46344 - DNA, 44 bp, Homo sapiens; identical to SEQ ID NO: 6909
  chr9:96722503-96722547
  hyper

SEQ ID NO: 46345 - DNA, 297 bp, Homo sapiens; identical to SEQ ID NO: 6910
  chr9:96722862-96723159
  hyper

SEQ ID NO: 46346 - DNA, 39 bp, Homo sapiens; identical to SEQ ID NO: 6911
  chr9:96723170-96723209
  hyper

SEQ ID NO: 46347 - DNA, 30 bp, Homo sapiens; identical to SEQ ID NO: 6912
  chr9:96929091-96929121
  hyper

SEQ ID NO: 46348 - DNA, 29 bp, Homo sapiens
  chr9:97287278-97287307
  hyper
caggcgtgagccaccgtgccctgccaatc

SEQ ID NO: 46349 - DNA, 211 bp, Homo sapiens
  chr9:97401983-97402194
  hyper
cccctagtcttcctgggctgtcgccccccacacacacccctccgtgccctccacccgcactgtggagcgggactcgggccatcggactctgccagagagaaagctatgactgtttcctccaaaatcataaaacggaagttcagaaaggttaagtaacttgctcaatgccaccagctaggcagcgaaacccgcagccagtccacatggcctg

SEQ ID NO: 46350 - DNA, 355 bp, Homo sapiens; identical to SEQ ID NO: 6914
  chr9:97767418-97767773
  hyper

SEQ ID NO: 46351 - DNA, 31 bp, Homo sapiens; identical to SEQ ID NO: 6915
  chr9:97811372-97811403
  hyper

SEQ ID NO: 46352 - DNA, 119 bp, Homo sapiens
  chr9:98111441-98111560
  hyper
accagcgcacgaagacgggacgcgcgctcacagccccagggctcggccctgcaccacgagctaacgcgcggtccccagggaggtggcgcagaaggcatggcgcctctgcccacggcgtc

SEQ ID NO: 46353 - DNA, 257 bp, Homo sapiens
  chr9:98111894-98112151
  hyper
cgctgggcgcagtggctcccggtcagggcgcagtcggcctgggcgctagagcccctctcagctcccggcctagggcggggaagcgccagctcccgcagcccctgtgaaaggtcccctgtgcctcctgcctaggtgcgcgctgtggcatctctggccagaagcacctttggcggcctgttgggcccctcgcagcctctggctgagactctgccgccggcgctaacgggctgcgcccgcgctcccgctctgtccccgcc

SEQ ID NO: 46354 - DNA, 59 bp, Homo sapiens
  chr9:98189306-98189365
  hyper
ggcacgaggcagccgcggggagaaggaatagagcgagcgagaggcgccggcccaagggg

SEQ ID NO: 46355 - DNA, 47 bp, Homo sapiens; identical to SEQ ID NO: 6916
  chr9:98268139-98268186
  hyper

SEQ ID NO: 46356 - DNA, 30 bp, Homo sapiens
  chr9:98268773-98268803
  hyper
aaccaagaacttgccgcagtttttttgaat

SEQ ID NO: 46357 - DNA, 1082 bp, Homo sapiens
  chr9:98272637-98273719
  hyper
actgtgcgcggatcgcgaggattcgtcccgacaccgcgtccagtgtcaccaaggcatcccggggattcgcttcccgcggagggggaaaacacgcgaccctttgaggtggattctggagccagacacgtctacacaactaggctttttatttaaaaaaatttttgttttcggaaagtggaatgtgtttttcttacgtttccaagttattacgttcctccctgcggtaggaacccgacccgcaaacccttgatttgcttcactttatttttttttttaaacggggttgaactgcagagggactggcagtagcgagaagtctagtgaagtcgtgaaatggggcggtgtggctttaagatgcgcacggtgtatgttcattgaaaaaaaaagaagaaagaaaggaaaggaaagaaagaaacccagatggagggaaagggggaggagcagggagaaggcggagctccggtggccacgtgaccccgcgccaggaggcccggtgcgcgcgcgcgcccggctcccggactccccgcgcccgcgcggccggggcagagtaggtagggaggcggatgcgccgggccggctccgggcctccagcgcggtctcccgagagcccaggcgaggcgcgcgcccagccggcgcggacggacgtgccggacgcgccgtagtacattcctgaaggcggaccggcccccttacgctgcccaatgcccgcgccgcctccccgcgaccggccaatggtcgcgctcacgagtccctgcccattcagcggccccgcgctggctgcccgggcgcgctgggggctgcggcggggcgcgccggccaccggggcggtccacgcggctcccgcagggggcccgtccgccggctctccccgcccccttccttcctccccggcggtttcccctccccgcttccttccttcggcctgcgccttctccttcctccctcgccccgctccctccctcaatctcccctcccccaccagcctggccaccttccctccagcctctcctcctccccggcttcagggggaggcccttcccccgaccccctaacccgcaaaccgtatgcggtgccggggtcag

SEQ ID NO: 46358 - DNA, 30 bp, Homo sapiens
  chr9:98278368-98278398
  hyper
ggaagccaaggtggcgaccctttcaggcgt

SEQ ID NO: 46359 - DNA, 413 bp, Homo sapiens
  chr9:98278669-98279082
  hyper
tccccgtgtccccgcgccgcccgaggagcacggcgcgcgaggcgaggtggcgtcggcggccgccgcgctggctgcactcaccatagccggccgtcaacccctgctcggagcgcgggtgccgatggcgcggacgctgggcttggatttcacatcaattccttttttttccctggcccccctttcctcgtcctccgctcctccgtcttctcccagtcttccctcgtctcccccttgccttgtcgctgcgggtctctttgtctcccctgtcgtctttttcttctcctccgttttcttcttcttcttctcctcctcctccgtctttacaaaaggaacggaaagtgtaaaaaccccggcgcgctgggccgccggaggctttcggcggagtgcagcgcggactcacaattacaagcctg

SEQ ID NO: 46360 - DNA, 30 bp, Homo sapiens; identical to SEQ ID NO: 6918
  chr9:98637869-98637899
  hyper

SEQ ID NO: 46361 - DNA, 135 bp, Homo sapiens
  chr9:98784321-98784456
  hyper
ctccctcccgcctccgaagccggcgcccccggccaagtggccgctctcaacctgttaccaagtcctagagagaatttctccaaaatatttcctggatccccctgccaagggccctgtcccgcccttccagctccc

SEQ ID NO: 46362 - DNA, 362 bp, Homo sapiens
  chr9:98789645-98790007
  hyper
tggcagggagagcccaggccccgcgggctgcgggaaaggagagggcagcgactgggcgagggaggaaagaccctggccggggcagcccggcgcgggagaggctgcgtgtgcccggctcagtcacccgccctgggagaaggcggcccggttggaaagttgaggcggaaccgaaggcccccgcgtggaggctgcagcccctgcgccggccgggcgggtccggaaggagcccaggccgcacctccaggccggcgccgccgccgcccagcgcccacccgtccccccggcgccactccacatgcaccttctcccggggcgccgacggcctcggctgcccccgcagcgtttccctagcttccctccaa

SEQ ID NO: 46363 - DNA, 31 bp, Homo sapiens
  chr9:99145683-99145714
  hyper
gcgccgctgaagcgcacggaggacaggggca

SEQ ID NO: 46364 - DNA, 30 bp, Homo sapiens; identical to SEQ ID NO: 6920
  chr9:99179786-99179816
  hyper

SEQ ID NO: 46365 - DNA, 30 bp, Homo sapiens
  chr9:99180883-99180913
  hyper
aaactccagtggagcgcgcggcgtctccac

SEQ ID NO: 46366 - DNA, 30 bp, Homo sapiens
  chr9:99181707-99181737
  hyper
cccggcttcctacccgctagatgtggcctg

SEQ ID NO: 46367 - DNA, 30 bp, Homo sapiens
  chr9:99328796-99328826
  hyper
gagcccaaggatctcgctcccgcgggcggg

SEQ ID NO: 46368 - DNA, 1444 bp, Homo sapiens
  chr9:99380865-99382309
  hyper
ttctcgaggccccggcggggagcggaccccgggaggcggaggcgttcggggggcgcgctagggggcagggcgcgggaggcccaggagaggggctcgggcttacgcgccggacgggcaacgcggcgcccagggtcccaaggctacggagcagcgggggtttggccaacgccaaaaaggggcagctcccgtgccaggcgcgttcagcgcgctcggggaatcctcaggggctgattcagaggttgtgactcgcgcgagggccaaccgggctcgcaatccctgaaggcggaatccacaggaactcagaagcagcccgcggggaggagctgcaggttcgaggcgccgggctgacgcccgcaacttagaaaggtgaccctcggtccatcttgctggtggaggagggtgcacaagctaaagttaaagctcgcagcccacgcagctagaaactcggggcggggggcgctcctcaggagccaggctcctaaagggggtgtggcggccggggcgtttaagggggtgggggcgaaggcatttcggcccggccccggaggccccgggcagcccggtgggaggtgggccagggccccgcgccgggtgcggccgtccggggccctccgcgcgcccactggccggctcaccggtgatgtccaggtacacgtcgtcctgggggtcccggcggcgcgggtcttgctgcgtggagctgcggatcttcttcacacccggcgaggtcgacgagcagcgccgcgagcaggggggcgcggcggcccagctcgaccgccgctcgcttttccgcttcatggaggcggccgcggcccgtcagggggccacgaccatggccccgcgcgcccgcgcgcccgccgaggctcccgccagccccgcgcgggcgctcggggcggcgggcgcagagcggcgctgcggggacggcgggcgccggcagagcccggcgggaggcggtcgcgcaggagccggaggaggagcccggcccacagcgcctgccccgctgcctcccgcggccgccgcaggaccggcgccgcagccctcgctacagcgcctcctgccgcggccggcgcccccagcccgcccccaggtgcccgcagccggctggcgcggccgaggcgacggggctgcagctggcggccggagctgcccggggtaaccgtgcgtgcccaccgcggccgcggccgctgctgcgtaggcgccggggcacagcaggacgcggctcgtggggaccccaggagggctgttccgtggcgcttcattcacaaaaaagggcccacaaccctcctcggggcccgcagactgaggcctttcattggccaatgcggcgtgacgtcacggagacggggcctttctacaggcaggtactcggtgacgccataaagaaaactctgagggcttccgccaatcagagataaagtgtgctagcgaccttcgccagccccccaac

SEQ ID NO: 46369 - DNA, 241 bp, Homo sapiens
  chr9:99416949-99417190
  hyper
gaagcgggcactgggccgcccacgctgggaaactcacttgtaagaaactcctggggattttggccagatcctctacgtattccttgcagatgtaacacaggaaatgctgaaagccaaaacggcagaaagggcaagttagtaaagcagcaccctcgggccccgaaggatccctgtacttcgccgtgcgtgacgcgagcaaaggcgacgcccgcggggccgggaccggcggctcgggcgcccg

SEQ ID NO: 46370 - DNA, 410 bp, Homo sapiens
  chr9:99417396-99417806
  hyper
cgctcccggaacagcgcgccgaacggtacccgctgcccgcgggcgtccagcaccggcagctcggccacggcggccgccaggggctgcccgctgtcggggccgctcggggccgggaccagggcggcggcgccgctaacctgccgcgtgaccggggccggcgcggccatgacgcggggcggccgagggcctgggtccgctctgtcagcgcggaccggggcggggcgcgcagaggttgggcgcggggggcggggcggggcgtgcagaggtggggcctggcaagtcacggtttccgcggcgcggcgcgggcctgggagctgtcggagtgaaccccacgggcggttctgactcagctctcagggtaggggacagagagagaaagtaaggtccgtccacggcgagcaagcattatt

SEQ ID NO: 46371 - DNA, 879 bp, Homo sapiens
  chr9:99539773-99540652
  hyper
caaagtgtcttccaaatataacgggaatcaacatttacatgctgcttagtaactagcgcttagctaaatgctttacaggggatggcttacctctgaacgacacaaagcagtttttactaatatcctcattttcaaacgctcaagtgacagagccaaaattcacgaggtccttctagctcctaggctcggcctctcaccgcagacccacgggctgtacgcgctttgtggcaggttcatggtcaatacaataaacgcgcattcccctcctgaagccagcaccgcgttttccgacgcctggctgcattctggcgcccatacctcggcccgcaccgagcatcttccaactaggactcagccccacctaacgcccccggagcccgcccccaccggcccttctcaggctgaggtcccgggccggccgaggcacagggagcgacggcctgctttgggggagttcccgggacgtcgcgttcccgccccctggacactagcacatccctccctgcaggtccgcaatccgcgtggaggcccggcgctctcacctgagctgcgaaccctctgcaccagcaaacactaacagggagaagccggaaagtggggttgactgcacatgcgcagacgaaaacgcgcatatccgttcccagcatgctgcgcggtaacccataacatgcaagactacgtttcacatgcagtacggcgccagctgtcagtgtttttttgtttgtttttcccccaagatttatggcgtaataacatggaccgtcctgataactggagcccgggttctgtcagagccccagaggttgtgggttagacttgatgacataacagcaaatgcagcgtgtggttacagaaagcaagagccgcggaagacgtttg

SEQ ID NO: 46372 - DNA, 30 bp, Homo sapiens
  chr9:99637856-99637886
  hyper
gggctctcctctgccgccgcgggcatgcgc

SEQ ID NO: 46373 - DNA, 232 bp, Homo sapiens
  chr9:99639719-99639951
  hyper
ccgcccccggacccgcgtggctccagcctcctgggggtacctggcagagggggctgcagcgagcgccctgccgcgccgcttcctccgcgcgtctcccgcctggctccgccaagactgggggcttccccataggcccgcgtccgagcgcgtcctcaggcttcgctccgcgagatctgggggccccgtgggctggggttcgggcggggtccgttccttgcggtccgcggtcttg

SEQ ID NO: 46374 - DNA, 451 bp, Homo sapiens
  chr9:99801106-99801557
  hyper
cgcccggtccggtccggcttcagcccacaggatgactgacctgccccgcccgggccctcccagtggtgccggcgcctccctggggtctccaaccgccctcccccgttccccacctcgaggctggcagagctccgggcagaagctctcactcccagaagcgcccgcctcctctcagtgtccctaaaggggggttccctcctccagtcccccttcgccctgtccctcggtctggtcgggggcgctcaccagcagccgtcgcagctgcgcaggcaccctcagcaaacaagcctctgagattacagacgtccgcggtctggtgcaggttcgcccgcctcgggatttaagtttccaggcggccttccccgcccccaccgccttcccgcgctgcgattggctgtgccggccactgggcggggccccgggcgcttagagcccgcgcgtgacgcagccc

SEQ ID NO: 46375 - DNA, 337 bp, Homo sapiens
  chr9:99983395-99983732
  hyper
accctgtggatcttccgcagttcccagtccccgatgtggtacccccgacccgcgtactcttggtccatggagctcaggagcgcctggcccaggcgtctcccgaaactgaagagtttcctcatggtggcgacttctcagacgccaaccacccgctactgagccgccgcggctcctcgtggcctttccaccccgaccaagttccaaatccgcgatccccctccccaccccgctatccacccctaaatccaagatccaccaccaaaccagcaatccacccccaaacccaagatccacccccaaccccgcgatgtagctcagaatccgcgatccagcccgg

SEQ ID NO: 46376 - DNA, 221 bp, Homo sapiens; identical to SEQ ID NO: 6928
  chr9:99983767-99983988
  hyper

SEQ ID NO: 46377 - DNA, 16 bp, Homo sapiens
  chr9:99984041-99984057
  hyper
cgcctggccgtgactc

SEQ ID NO: 46378 - DNA, 45 bp, Homo sapiens; identical to SEQ ID NO: 6930
  chr9:99984107-99984152
  hyper

SEQ ID NO: 46379 - DNA, 114 bp, Homo sapiens; identical to SEQ ID NO: 6931
  chr9:100263428-100263542
  hyper

SEQ ID NO: 46380 - DNA, 30 bp, Homo sapiens
  chr9:100396762-100396792
  hyper
gaactggccgtaagcgcatttcccttgtgt

SEQ ID NO: 46381 - DNA, 30 bp, Homo sapiens
  chr9:100459082-100459112
  hyper
tggctgacacctcccggccggggcggctgc

SEQ ID NO: 46382 - DNA, 230 bp, Homo sapiens
  chr9:100459619-100459849
  hyper
actgcacgccgaggcgagccagccgccctgcaccgcctctgcgctccccgcacccagcggcctttctgagtgagagcgcctgcgcagttaaggggctcggggtggcctgcccgggcgctgggcggagtctgggtatgcgcggacacggagtacccgcctaactacctgctctcttgtcatccgggagaagggtccgtgctgagatcatatctcacgacctggtcaccttt

SEQ ID NO: 46383 - DNA, 670 bp, Homo sapiens; identical to SEQ ID NO: 6932
  chr9:100503319-100503989
  hyper

SEQ ID NO: 46384 - DNA, 304 bp, Homo sapiens; identical to SEQ ID NO: 6933
  chr9:100565761-100566065
  hyper

SEQ ID NO: 46385 - DNA, 101 bp, Homo sapiens
  chr9:100610033-100610134
  hyper
tcctccaggacaaaggaggctcgtatgggcaactggaacccggctggagtgtgcagctggccccctcacttccagcccgcaggctgccgcgggggtgactc

SEQ ID NO: 46386 - DNA, 616 bp, Homo sapiens
  chr9:100610200-100610816
  hyper
cggcgaaacctagagagacttgcactccaggcccggggggtgggggggcgggggagaagccttagggagagtggggaggaggccagaggagagctggctgctctctcgtgttgaggttcaagtgtcttccagctccccgcgccccctcctcaccgtgccaccgcccacctcatgctttgggcgccaagcagccaagcaaccgggttgcgttgtagggggaggcaatcagccctgttacccctcctcaggcggccggactgagctgcgggatgggatccctacagagactggcctgggtaaggggaaaaaatcactgcctcttcctgtgcctctagtggttgaactagaatcctggctagctcatctcgcttttgaagggggaaggggagtaatcatcggctcttttgagattgtcttgcaaaccatggactctctccccagaaatgaacacccacaatctagtgtgtaaatttcaggtttccaagtgttccaaagccgcgcacaaatttcggaaccagaccaagaatcctggactctagacgttgcctgggggccgatcctgcgcccagggtcccagaatctaactgaaatgcgcctgcgggccgccaccttcgcc

SEQ ID NO: 46387 - DNA, 466 bp, Homo sapiens; identical to SEQ ID NO: 6937
  chr9:100611124-100611590
  hyper

SEQ ID NO: 46388 - DNA, 105 bp, Homo sapiens; identical to SEQ ID NO: 6938
  chr9:100613894-100613999
  hyper

SEQ ID NO: 46389 - DNA, 229 bp, Homo sapiens; identical to SEQ ID NO: 6939
  chr9:100614192-100614421
  hyper

SEQ ID NO: 46390 - DNA, 1594 bp, Homo sapiens
  chr9:100614441-100616035
  hyper
cgcgaggatctcaggttaggaccaagttccggctcagggacagcaggaaaggaactcagaaattggacacccatgaagcaaacgtgtcccgactgcccgccccttcccccggagacgcgcccacccggccaccgctctcttcccactcccccattacccgcagccctcactccccgctgcgggaaggggctgcttggctgcctctgggggtcttcagagctaccctggtcccgggggattggaggaggaggttacctatcctgcgtcgtctttaatccgtgcaccactatccatcaaatagagacagatcctgggcctctcaaagacggatgattgggggtggtgattggcctatccctaaatatctaccacgcaaggactcttgagagatccagaccccggtacagtcgagggacctggggcccaaaaagggaaagcggctacctctaccacacagttgggaagcgcagtcctaaaggagacgcaggttggagactccgctaagcggagaagccgcagtggggccatggcaagtcaccttccctttcgggcctaggaatactcattcgaaagatggggggactggagtgccgagtggctgtggcagccacgattggggtttggaaaccatcctgaaaggcccggggagccagtctcctggaacttctccctccccattcccacaaaaaccaagcgccctctcggccaattctcaccctctcaggacaaaaaagtgagatgagcccgtcctttcacctgcgagtccaagcccttggcagaggcctgaaaagtccgaaaactccgagttcgggcgctgaggtctcccgagccggttcctgaactctccgggcctcagtcgatcggggtgcggagggggccgacccgggggatctccaagcgccctccccgccctgacgctgtggggctcctaccgcgccgccacagctgctcctacctggggaggtgcgcccgggccccggggggcgggcagtcggggggcgggcagggaaccggtgccgccccacgcttcgtggcccctttaaggaggggaagccggcggagggaggagccggtccggtgtgtgcaggggagcgcctcgccagcggtccgcagggctggagacccacgccgtggagaggaccagcctcaggtcgccccgcctgggcccgcgccccgacctcgctgcccccgcctcgcctctctgcccgtggcgcttacggccaccttggcctcgggggcagggcatgggcggcccccgccagatcgcccagcgccagtactaactgccctcgctctggccttcgagcccgaagcctcttctgcgcgcacaacctaggcagtaatcctaaactagcgggcaccacagaccagctgcagccaccccaacccagggatcacttccggacccctcgaccgcccggcaccagcgcgcaagggacccttcagccggagaccagagtccagtcccggtcacgaggccaccgccgctgcccgcctcgagaagcaccacgcgggctgagccgtcggctagcgggtcactcccgagcctctgtctgcaccgcgccagccccagaccacggacgctgagcctcca

SEQ ID NO: 46391 - DNA, 198 bp, Homo sapiens; identical to SEQ ID NO: 6942
  chr9:100616270-100616468
  hyper

SEQ ID NO: 46392 - DNA, 360 bp, Homo sapiens; identical to SEQ ID NO: 6943
  chr9:100617285-100617645
  hyper

SEQ ID NO: 46393 - DNA, 30 bp, Homo sapiens; identical to SEQ ID NO: 6944
  chr9:100618025-100618055
  hyper

SEQ ID NO: 46394 - DNA, 906 bp, Homo sapiens
  chr9:100619832-100620738
  hyper
cagggtgggaaagagcggacattttcgtcccccattctacttgtcaacttgcgggacaggtaagattgtgccaaaggcgagggtcagcatcaggagagagaggacgctgcggggagggacctggttgtgtgcttcaggtgccccaagggacacggagacgcgcgagggttgggatcaaggcgttgaagacagagcgacagcccttctcggcctcccaccggccgacgacaccaagagctcgcgcaccggccgggccaggtgggaatgggcgccgcgcaggggagcgagtacctcggagacagtgcgcgccgcccggggcctcatccacagcggggtcgcgggcggcccccttagcccgcgtgactgtgggatcctgagaacattccgctgtatgtcttggaaccttctaaccctaggaatttgcaaacccctcccagtccctcatctgggggctcagagactggaggtgccttttttatttttttcttcttcactttatgaacacagaaaaatcgtttgtccctctccgggccctgcacccgccagcgtcgtgtgcaggcgtccccgggctgtggataattagacacgttcttccctcattgcccaaggctcgttagaattcgccctagagctgtatcatgtattttctttcaaattaactttgcttgcaattaagcttagggaaccagcaacaaaagcaaacttggcccgaggtcgttcaccgcgaaaatggattagagaaacttcttccccgatttaaggggaaagattcctgcggccagcgctttggggaaagtgccccgaccgcagaggcgacgacaggggagcaggaagctgctcacggtagtcggcgttggcggcagcggtggccttcctcatctgggcgatgtgggctcctagaagagt

SEQ ID NO: 46395 - DNA, 30 bp, Homo sapiens; identical to SEQ ID NO: 6946
  chr9:100746554-100746584
  hyper

SEQ ID NO: 46396 - DNA, 30 bp, Homo sapiens
  chr9:100818669-100818699
  hyper
attacaccatagggcgcgctctccccatgc

SEQ ID NO: 46397 - DNA, 30 bp, Homo sapiens
  chr9:101017406-101017436
  hyper
aggggacctcacgccgctggaaaggagaaa

SEQ ID NO: 46398 - DNA, 30 bp, Homo sapiens
  chr9:101019027-101019057
  hyper
ctccattagggttgcggagcccaattgcgt

SEQ ID NO: 46399 - DNA, 1097 bp, Homo sapiens
  chr9:101469270-101470367
  hyper
tctggggcagaggacgcctctccgcctgcagcagcctgcgcgtaccgctgccaactgccaccggttccttcaccttttatttacagcgcagagcaagctggttcaccggtgaagcgggggaggcagggaataagatacaatctagattctgctctttctctggggacataaagagggtccgaccaaggaggaggggaagcccagattgcaccaccagagcagtagcgcgaccctcctcccaaaagggttctgcacctggactccagcagaagcgcccggagagtcccaggaagccaggatcaagcccagcgcctcggccccgttccgcgcgatggaagaggcgccaaccgagcgtactgcacaggaaatcactgcccccttcaggccgcgtctcagacgctgcggtcggagcacaggggctcgctcggtccggaaaaactcgcaaacccgaccttgcgcggccagcgatcgctcctccagacccgctccgcgcgctccagccccggcctggcggtgaaggtccgctctggggcttcaggcagaacccaaaccgagggcgtggggaggggtcttgggatggaaagcccttggctctctggctccgctccggactgctctccaagtctgtgctccggctgctaggtcggatgcttcaagcctgagccgtgagaaactgcctgcagccgcccggccaacagcagcggcgcggccggacaccactgcacgtccgggacgagaactgccagggcactttctgagcaactaacccgaggcaggggtctcctgaaatcgctctggccacaggcagcgccgggcacgtccaggcagaagcgctgcagagccggtggccccacacttgcccgcgcggagcgggctcagagctgctggcgcgcaccaggcgcccagccacgctgcacgctcaagccccttgggttccggagccttccggacctcaaagcgcggctcggcttccctgggggcctgtgagcaggcccgcggcccctccggccctgggtggcccagtttgcagtcaatgcgcctgttcctcccactcggtacctcgcagccccatgagcgggacctggacagggacaatc

SEQ ID NO: 46400 - DNA, 1052 bp, Homo sapiens
  chr9:101470656-101471708
  hyper
tgccccccgaagccccgacggcaggggcagccggacactcacctccgtgtcatagagccgcaggtcgaggaagtaggggcgcaggagtgactcgttgcggatctgctcgatggccagttccacggcggggagcacaccgcgcccgatgctgcccttggccacctccttggtgagcggcatgaggcccatgatggagagcggcgggctgctgggcggcggccggggggcgccccgcgcccagccccaggccccgggcgccagaggcagcagcagcggcagcagcagtagcagtagcaggcgcgcgggcggcggtggcggcggcggcggcggcccgggctgcccggagctccgcggggaagccatgccgcgccgcgggctgcgggcgccggctcactcggcccgcatggcctggcccggcccgccgccccgcgccaaggtcttcccgcggcgcccgcgcaatggcgccggcccgggccccggctccgtctcgggctagggttccggctcggctcagaacggccgcggcggcggcggcggcagcggcggcgcccgtgacggatcaatcacgccgggaaggggtgggagcgagcggagtgcgggaggcggggagcaagcgagcaaacgcggagaggggggccggcgtctccgcgcgcgcctctctccagcgcggccgccccgcaccgggccgcctccgcccgcccccgtgcgcgctctgaaccgctctcccgccgggagctgctaggcggcagcccctggagctcggccgggggagggcggacggcaggaaacgcgggaggcgaaggcgaggctgctcaggggcggctcgggccgcctccagggacggggacgagccgtgcgcgccgggggagggggaggcgctggcgctgcggcggccgcggggagggccaccttcccagcacacgcacacacgcgcccccggccctccgctgcgccagctgccgctgcccgccgaccgctgacctccaggcaccagagcgcccggggacagcgatctgggaaccgggaccgcgcgctggcacacgcagtggccg

SEQ ID NO: 46401 - DNA, 236 bp, Homo sapiens
  chr9:101471724-101471960
  hyper
cgctgcctgtagcacctgcacggtggtttggaaccgcttctcggaggtctggccgggaaggtctgggcaggagaatgttccacgaaggcgtcccagaggcatctgcagcctacgctctcccgttcttttctggcgcccacgagcccctgaccgagtcccgggggtcgctgaagacgcccacgggtgctcgaacgcccgttggtgccaggctgcccggcctttagggccttggctga

SEQ ID NO: 46402 - DNA, 31 bp, Homo sapiens; identical to SEQ ID NO: 6950
  chr9:101558159-101558190
  hyper

SEQ ID NO: 46403 - DNA, 53 bp, Homo sapiens; identical to SEQ ID NO: 6951
  chr9:101558600-101558653
  hyper

SEQ ID NO: 46404 - DNA, 65 bp, Homo sapiens; identical to SEQ ID NO: 6952
  chr9:101558885-101558950
  hyper

SEQ ID NO: 46405 - DNA, 509 bp, Homo sapiens
  chr9:101569828-101570337
  hyper
tgcgcttgggctggcgcggggctggacggaaagggggcggcgcgcaggtggggcgggccgggggcggggcggcacggcggttccgggatccgggtcctggcctccaccgccgccttggggcgcgcagatcgctggctgcagttggcgggcgcatgtgggggcgcacggcgcggcggcgctgcccgcgggaactgcggcgcggccgggaggcgctgttggtgctcctggcgctactggcgttggccgggctgggctcggtgctgcgggcgcagcgtggggccggggccggggctgccgagccgggacccccgcgcaccccgcgccccgggcggcgcgagccggtcatgccgcggccgccggtgccggcgaacgcgctgggcgcgcggggcgaggcggtgcggctgcagctgcagggcgaggagctgcggctgcaggaggagagcgtgcggctgcaccagattaacatctacctcagcgaccgcatctcactgcaccgccgcctgcccgag

SEQ ID NO: 46406 - DNA, 249 bp, Homo sapiens; identical to SEQ ID NO: 6954
  chr9:101705946-101706195
  hyper

SEQ ID NO: 46407 - DNA, 637 bp, Homo sapiens
  chr9:101706314-101706951
  hyper
cgccttccggggctccgcagacccgcgagatggcaccaaggtaagacccgcttctctgcttcctcgcgtcccgggcccctccaatactcttgcccgcctcaccttttctccctcgggcacatcttgcaggaggaacaacgggcagtgctggtgtctgctgatgctgctctcggtctccacgcccctccctgctgtcacccagacccgcggtgcgacaggtaagcaacccggtcggagggtggcaccggctgcctccgcgcccgtgggggaagtcggttttggcggcggacgcggctgcgatgcgtgcctcattcctggacataaaagggagtcttgccactcagtgcgcactggcggtcccgcgggcggctacctcctggcagtgcaggggttatagctgtgaatgggatccctgggcagctggggcggttggagcgttgtctgggcacccgagatgtctgagctgggtgcggagcctccaatcttaggcagagagggacttcagaaacagcgccagcgccagcgccaacagcctcagcgcacccagcgccagcagcttaggttgtgcgtgctggctggcttctggtaagggcaggtctggtgcctctccgcacacaggtgcgaagcatgaacaccg

SEQ ID NO: 46408 - DNA, 97 bp, Homo sapiens; identical to SEQ ID NO: 6956
  chr9:101866821-101866918
  hyper

SEQ ID NO: 46409 - DNA, 411 bp, Homo sapiens; identical to SEQ ID NO: 6957
  chr9:102586806-102587217
  hyper

SEQ ID NO: 46410 - DNA, 30 bp, Homo sapiens; identical to SEQ ID NO: 6958
  chr9:103190004-103190034
  hyper

SEQ ID NO: 46411 - DNA, 30 bp, Homo sapiens
  chr9:103236015-103236045
  hyper
tgctcaggtaggaccggtcggagccggccc

SEQ ID NO: 46412 - DNA, 543 bp, Homo sapiens; identical to SEQ ID NO: 6959
  chr9:103791056-103791599
  hyper

SEQ ID NO: 46413 - DNA, 304 bp, Homo sapiens
  chr9:104248345-104248649
  hyper
ggatgcgggtcacaacgaccctgcaggagctcacgccccaagacaccgcgagcgcagtgcgacactagcgacgccggagccaagggccagaaagagggcgagacacacccaggtggatctaattaaccctccctcttggaaaaagaatgggggacgatgtccagggccctggatctagtgtctgtcgctgaccttgggcagtccctgccacgcttgagcctcagtttcccacccgtaggccgagctgaccgtctccatcgctgcgctccttcccttctgctggtttttcctggtcctgggaggg

SEQ ID NO: 46414 - DNA, 872 bp, Homo sapiens; identical to SEQ ID NO: 6961
  chr9:104248697-104249569
  hyper

SEQ ID NO: 46415 - DNA, 123 bp, Homo sapiens
  chr9:104500058-104500181
  hyper
gcgcggctggccgcgcggggggcggtggtccagggctgcaagtgcaccgcgcccaccctcaccgcgtgcccgatgcgcttgaggatctggcagggctgcgggtgcgaggaggagctgggcacc

SEQ ID NO: 46416 - DNA, 971 bp, Homo sapiens
  chr9:104500207-104501178
  hyper
cggcaacagcagacagaccctgctcagcagccaccacaaactcagtctcctcattactgagacccgcagggagaaagcgcgccccctcctgcgcccggctcgcccctctgcagccgctgcctgaggtctccgcctccaggtcccgcgcgcagcttcactccactcggtgaagcggtcccaggagctggagcggtctctaggccatgcaagttggagcgtagcgcgcctccggcagtctcagatcccgctcccaggtccctccgcctggcatcctctgcccgcccggtcactgcgctgagcaggcaggcgggcgggccggcgcctgtcacccgcagctggagcgcccgttccctgcccgccccatctgcagggcgcctcgggcactgcgtccggccccgcgaggcggccgggatgagaagcagccggagttcctcgggggcagcagtgacagaggagcgacgcgctctcgcctggattcttttccttttctgcccaggcgagacccacttatttcctggggtcgcgttggagagggctttcacgcccggggtgcggaaaagaagccaaatccaccttcctccactgttggccaccctcctgcaggctcccccagcgccgacttcattttctctcttctctcgctacttcctctctgcctttctttcgttatttttccaccgagtcgccaccgccgcttgcttcctcggaggagcaacgcgactggccagcaaagggtggctctgctccgagcgccaaagttctccccgcctcagccggcgcctccctgttgctgagccctggcgcctgcctgtcgcttggctgcgctaaacgcccactgttggtgagattcccgagtggcacatcccgcgcccctggaaagtcctctcccctcaaaggctgggcgtcatagtttgcaaaattccctaaaacctaagaaggaaaataggactatgagccggtgagaattctga

SEQ ID NO: 46417 - DNA, 30 bp, Homo sapiens; identical to SEQ ID NO: 6963
  chr9:105037092-105037122
  hyper

SEQ ID NO: 46418 - DNA, 30 bp, Homo sapiens
  chr9:107526187-107526217
  hyper
aatctacacaactgcgcatcggagcgaatg

SEQ ID NO: 46419 - DNA, 30 bp, Homo sapiens
  chr9:107690470-107690500
  hyper
tcggctgcaccgagcgcagaggttactatc

SEQ ID NO: 46420 - DNA, 30 bp, Homo sapiens
  chr9:107730724-107730754
  hyper
gcatggggcacagccgggggtaaaagggga

SEQ ID NO: 46421 - DNA, 30 bp, Homo sapiens
  chr9:107753539-107753569
  hyper
aaccccgaggcgtgcggcagccccagctgt

SEQ ID NO: 46422 - DNA, 30 bp, Homo sapiens
  chr9:108007109-108007139
  hyper
tgcgcgcccggcgccgcctccgggctcctt

SEQ ID NO: 46423 - DNA, 572 bp, Homo sapiens
  chr9:108418382-108418954
  hyper
gcacaagagagagttggtctccggaagccagggcgcggagagtggggaggaaacggtgggagtccccgtcgggaaggggcccccgggccccgcgagacaaagggcggtgtcctataaaggcggcggcggcggcggcgcggtgtccaggcgagggcgcacacggccggcgagggcgacggctacggcgacgacgcgggctctttgcgaggaggtgcgtggactccggggggacatgggcgcaaccagggccgggctcgtgggcctgcgggtctctcgctgagccatactcacccgggagagcaggaatgcggcggagacttggtagcggccaccgagccaattcggtgggaagaccgggggactttccgcggggcaggggcggtggctcagctccgggggtgctaggccgactctctagcgtgttggcgggcccgcgtcgcttttatgcgtgatgccggggacccccttgtaccgctctcggcggcgcatctcccagagcccttcaaggagctcgcgcgtccccgagcgactcccggacacctggcagattcgaaacttcagccactagatgc

SEQ ID NO: 46424 - DNA, 331 bp, Homo sapiens
  chr9:108455718-108456049
  hyper
cctagcagctaatcacgtttctccaatttcctggtgccagcataatctgttcacacatcaaataagtgtgccaagctagttttttttcttacccaaacctattccttcttgtttcctatttatcagaatgcaaccacaatcctcctactcacccgttcctcattttatttgacaaatgcttcctttcccgcctgtacagactgacactcactgacgatattctgcttctacccatgtttcccacaattggtctcaatttctgctgccacagcctccactaccttttgcttggaccagtgaataccctctgattttccgttgtcagtcgctt

SEQ ID NO: 46425 - DNA, 813 bp, Homo sapiens; identical to SEQ ID NO: 6964
  chr9:109622403-109623216
  hyper

SEQ ID NO: 46426 - DNA, 172 bp, Homo sapiens; identical to SEQ ID NO: 6965
  chr9:109623574-109623746
  hyper

SEQ ID NO: 46427 - DNA, 30 bp, Homo sapiens; identical to SEQ ID NO: 6966
  chr9:109624535-109624565
  hyper

SEQ ID NO: 46428 - DNA, 30 bp, Homo sapiens; identical to SEQ ID NO: 6967
  chr9:109625164-109625194
  hyper

SEQ ID NO: 46429 - DNA, 30 bp, Homo sapiens
  chr9:110045348-110045378
  hyper
ccaggagcccttgccgcccacggaacgcgc

SEQ ID NO: 46430 - DNA, 30 bp, Homo sapiens
  chr9:110187641-110187671
  hyper
gaagaggcccgctccggcctcatcagagct

SEQ ID NO: 46431 - DNA, 722 bp, Homo sapiens
  chr9:110227803-110228525
  hyper
tacatgaccttgtcccgtctattttcacgttagccaaagggaagcctagaagtccacagtccccgggagctggaagccaggcagtgacagcgccagcgtattctccttgacttgattgtaaatttcacaactttggtagcttcaacagggaggaagaggaggggcgccggctccctccagcaaaggcggcgcggagcgggtagccaggtccggagccgtcctgtgccgggccgtccggtggggggcactgcagaccgcgcgggcgctgcgcccgcctctagctccgggcgcagaggggtggccacgctctcctgagtccctcgcgcccctagccgcgcctgggagagcggactggcctcccagagaggatgcgggggaagccgcacaggggcccactgggactgggtaagggcgcgggatgggatcggctctggatatgggtgccccccgagccgcgccccaccccgcgagcgctcccatttgcacctccacttgagcacggagcttcaagaacgagctattctggggtgcgggttccgacactaggccccacacggatctggggactggtttggctacgacctggcggaaggggggaaacctggcctgagaacggaaactgcgggacgatccggcggcgcacttaaatctggctccgctgcttcctcgccccgcccccgctgtcaccttcctctgcttctgcgcagcgattccacacccca

SEQ ID NO: 46432 - DNA, 121 bp, Homo sapiens; identical to SEQ ID NO: 6969
  chr9:110250497-110250618
  hyper

SEQ ID NO: 46433 - DNA, 2155 bp, Homo sapiens
  chr9:110250630-110252785
  hyper
cgactgcaccgcccagacatggggactggtcaggcaggaagcacccgggaacccagggcgccagcgctgcaatctcggcccactcccgggtcgaagaagaggtgatgcgtctgtattgcgggtgttatgtcctgtctgcccaattgcgtgtgagcgagcgccgcggctggtccctccccctccaggtcccgtggacgtccccggaattggcacaccgaggctctctcggtgcgctctcgccacggggccgcctacgcgctaaactcactctggcccagccagtgtctggggacgcggccacctcccgcccggtggcccgagagcgcccgccctaccgacagcgcgcccggggactggtgaagacccggcttgcgccccaggcggctccgcagtgctcgcaccacgggcatacacagctgagccaaggacacggaagctatcccgggaaggttgcggagtccgcgcggtggccgctccttaccctcgttcagtggctcttggtgaccccaaggctccgcccgcccccaccacacccacgaaaacccaccgggcgttcccggcggcccggagcgatactcacgttattcggggcacctgcttgacgcagtgtcttctcccttcccgccgggccagacgcgaacgtggagaaagatgggagcagcgcgtcgctgacagccatgtcagactcgccaggtggctgcctgcgagcaaggcagggagcggagacaggagagtcaggggcggctttcggccgtcgttccggcgcgtcccaccggtcctcacccctccctgctcccagcgccgcgcgcctcacctacctcattaatgtgggggcccagaaggtcctcggcagcccgaagcagctggggcacctgaaccccaaagtcaacgaagagaagaaacgaagccaaaacccaaaaccccaaattggccgagatccttcttctttggattaaatataacttggaagcgtcttttttaaaaagttcctttgtatacaaaagttcttagaaaagttgtaaacgcaaaaatagacaatcagcaaggcgagtaagtaggtccggtggccgggctgcgctctcttccactcagcagcgtcccccaccactgtcgcggtcgcctcgagtgctgccgtgggcgcaggggctgtggccggggcggtgggcgggcggtgccgccaggtgagactggctgccgtggcgcggagctgcgaactggtcggcggcgcaaggcgcggactccggtgagttgtgtggagcgcgcgcggccatgggcgcgggccacgggcgggtgggagggtggggggccagaggggcgggggagggtcactcggcggctcccggtgccgccgccgcccgccaccgcctctgctccccgcgcgcccgcagacacgttcgttctctctggtcgggaaactgccggccgccggcgcgcgttccttacttataacttccttcgctacagccttttcctccgccttctcccatgccccgcccctccctttcttctctccgccccccccgaggctcccttccatcgttgctatggcagctaaatcaacaaactcggcgcacgtgggggcgggggaggggaaggaggggcgcgggcggggctgggccgggccgtgacgccagccaggcagctggcgggctggagccgagctgacgccggcggcagtggtgtcggcggcggcggcggcgtccgccccagcgcggggcgcgaggaaccgggcgcaggttcggtcgctgcgcgaccagggccgtactcaccgccattgtcggctccctgggttcgaagcccgcgaagactggtggggtcagcgggcggcacggtcacgcgtccgcacccctgctagcatacgcgcttgccgcgctgtctgcgcgctggagaagagcgcgattatccgcgtgactcatccagccctccatctccccctccctctctgcgctcgcaggagtccgctctcgtcgctcagcgccagtgccggtggcggtgccggcgctcggcctgacctcgcacggttcctcgcgggcccttctgctgaggggtggggggcgctaggggtgtggagaggaggcagtgcccagcactgtgcagcgtgaactgggagcctcaagagaaggccagaggagtgttccgccgggaacaggcggaa

SEQ ID NO: 46434 - DNA, 30 bp, Homo sapiens
  chr9:110306099-110306129
  hyper
gtgtgacagtgtatacgtacgaagaaaata

SEQ ID NO: 46435 - DNA, 30 bp, Homo sapiens
  chr9:110400332-110400362
  hyper
cgcaaacataaacacgagactgttgcagta

SEQ ID NO: 46436 - DNA, 30 bp, Homo sapiens
  chr9:110888462-110888492
  hyper
accaaggtttccaacgcaggctcttgttga

SEQ ID NO: 46437 - DNA, 30 bp, Homo sapiens
  chr9:111882374-111882404
  hyper
gcctccttggtgtccgcaaggtcctgctaa

SEQ ID NO: 46438 - DNA, 80 bp, Homo sapiens; identical to SEQ ID NO: 6971
  chr9:112081253-112081333
  hyper

SEQ ID NO: 46439 - DNA, 532 bp, Homo sapiens; identical to SEQ ID NO: 6972
  chr9:112081563-112082095
  hyper

SEQ ID NO: 46440 - DNA, 1133 bp, Homo sapiens
  chr9:112082369-112083502
  hyper
tgcctccaggggcgcgaggtgccagtgccccagactggccccgtcactcaccggcaggtccacgctcacttcggtcccgtcgagcaggaagacgcggcagtagagggtggccttggcggcgccggcggcggagatgtgcacggccgcgccgccggtgagcaggggcccgccgcccgccgggaacacgctgcccccgggcgcggcgggcagcgccgaggaggaggcggcggcggccgggcccccccgtggccccccatcgcgctcgtcccccagcccggcggccccgcgccccgccgcgccccgcgcgtagcgctgcatggagcggcggccaaaggtccggcgcaggaaccgcagcatcctggctgggggcgccccctgcctccgccccctgcgctgccgctgccgctgccgctgccgctgcgccgccgcccgggagcgtcccgcgacgccgtcagtgccctcggccgcccgcgccgcctctcgcgggctacggcccggggcaagcccgcgccgaggccgaggccgcgctctagccgcctgcggggcgcgccggcccggccagcgccggctgcgagtggccgcaggcgggagggcgcgctcggggccgtcccgccgccgccgccgccgcgcgctctcccgggccggcggcctgcgcgggctgccgaggggctgctccggacgggcggctgcgggctgccagggggctgccgggggcgcgggaggcgggctgcgggctgctcccgcgccgcgcgccggccgagggccagccggagcagggcgcctgcgtggtcctggcgcgctcgctcccactcgccgcgccgcgcccggggcccgaggaggccccgccgagcgcccgctcccaaggcgccttttcctgcgcccgcagcccccgcctcccacctgggaggctgcacctccagccgccgccgccgccgccgccgccgctgccgccgggactgcagcacgccctcctccctcggggctgcgccgggtaattgcaagccgggtctgtgctgccccctgccggcccgagcgccccctgctgctgtaggtgtgctcacgtgtgtacacgtaggtgagcacacacgtgtttccggcgcccagagccctggaggcgccgagtgcccctttgc

SEQ ID NO: 46441 - DNA, 31 bp, Homo sapiens
  chr9:112259824-112259855
  hyper
gaatttttaaggcaaccgcaacttctcagta

SEQ ID NO: 46442 - DNA, 605 bp, Homo sapiens; identical to SEQ ID NO: 6974
  chr9:112260063-112260668
  hyper

SEQ ID NO: 46443 - DNA, 926 bp, Homo sapiens
  chr9:112402425-112403351
  hyper
tgtcttcctggcaggcgggaacacgcagaatttggagtgaaacggaaaggggcatggggtcgccaaggtggtgaaacgccgcattaaggcgcttcaagatagctggagttttgcttgggaaactcagagggatctcgcccggccggcacaatggcgtttctgaacccatgcccagcccactgggggcagtccttgctgcttgcagaggccagacgcttcttgcaacttctaagcggcgagagctgccaccttgccaatgactcaaccgtttgcctatgccctctgggctgtgccaccagccgcagccgccctgctcccccacccacccttctccccaggctccgcgccgcgccgccagtcccaggggagccgccggcgcacctggcgcctagggcgcacggcactgcgcgctggtgggcacctcacccgacgccagctgccagcgcgctccctccccgaaaccctgaagtggggtgtcttgtctagcgcccagcgaacaacattatccaattgcttcccgttttattcgcaggctgggagctgagagagcctgagcattcactttcaaccctccaggggaggagggggtgcgggtggggaggggagacggctcccagctccacctcgcgcgcggcgcggccagtgcactcggctccgggagaggcgagcagcgccggtgagccccgcagcagcgcacccggccgcggagccccgcgatggagtgagtatccccgagccgcgccgccagctgctctcctctcggcatgttgccatggtgaccgcggcggcaggcagatcccgctcgggtccgcgtccaggatgggtgtttaatttcagccccgtgtgtacgcctggtgtttctatagcagccgccgcggcggcaggaggcaaggggtgggagccccgggtggcgtggtttttgcggc

SEQ ID NO: 46444 - DNA, 30 bp, Homo sapiens; identical to SEQ ID NO: 6977
  chr9:112542133-112542163
  hyper

SEQ ID NO: 46445 - DNA, 30 bp, Homo sapiens
  chr9:113017906-113017936
  hyper
actgctgccggaaacgcgccctgcgccaca

SEQ ID NO: 46446 - DNA, 30 bp, Homo sapiens
  chr9:113018381-113018411
  hyper
acgctccccgcgtgcgtgcaatcccccgag

SEQ ID NO: 46447 - DNA, 30 bp, Homo sapiens
  chr9:113018779-113018809
  hyper
agagcttcaagactcgctgcttgctctctc

SEQ ID NO: 46448 - DNA, 30 bp, Homo sapiens
  chr9:113019239-113019269
  hyper
accgggaagtatctcggtgtgtacgtcctt

SEQ ID NO: 46449 - DNA, 492 bp, Homo sapiens; identical to SEQ ID NO: 6978
  chr9:113341129-113341621
  hyper

SEQ ID NO: 46450 - DNA, 168 bp, Homo sapiens; identical to SEQ ID NO: 6979
  chr9:113341679-113341847
  hyper

SEQ ID NO: 46451 - DNA, 112 bp, Homo sapiens
  chr9:113341926-113342038
  hyper
cggggcagcggccaagagcctcagcgccctttcatctgacactggggacagacacaatccagactcctcagcagctcgggaactccggagggaacggcgcgcgctctctacc

SEQ ID NO: 46452 - DNA, 30 bp, Homo sapiens
  chr9:113342311-113342341
  hyper
aagcgcaccagcgccgaagccctgattgat

SEQ ID NO: 46453 - DNA, 567 bp, Homo sapiens
  chr9:113799864-113800431
  hyper
gcacgtttgttaggcggctggacagaaacttagttaaaagtcctcagcccggtggtgggggacaaccgagtcgtcagtgggaagcgagaggtgcggagccccaggggcgcagggacccctcggaggtgcaagtccagcgggacgaggttttgggagaatttcgagggcccctcgcaagccctcccgcgcacccaccccgacccaggtaaccggaggccacctacgtgtcactgggcgggccccggggcgcactgacctggcgcgggacaggagggccggcggcccgggcggctgcggcaacttccctccaggggctcggtccgccgctgggtgcgggaggccaggggagcctcgcctcctgcaggccggctcgcaagaacgcacggccacccacccgcgccgcggcccacagcgcgcacccacactctcactggcactcgcacgcgcgcccccaaccacaaagcccgtccgcggcgggacagtgtgagcccagcgcgccgtgtggcgggccgagcagtcgccgcggcctctggcttcgcgcccagggggcgccgtccccacacgccg

SEQ ID NO: 46454 - DNA, 795 bp, Homo sapiens
  chr9:113800666-113801461
  hyper
gccccagatccggcccgcgctccgcagcggggctggagacggagtcgccactcagggagcgtcagccgccagtcggcccctactgcccggctttggcgcgctggcaggaggagggggcgcagagggagggccagaggagcagcgccgacgccagcctcctctcttcctccgccttccttcttttctgcttgttccacgtagcacaagtcagcaacacccgaacccccagagtccgccctccccgctcccaagctggaccccttacctggtgtggcgcccccagcgcccctgacctctgcgccccctcctccattcattggctcgacagcccacggtggtggcagggccggggctggggggtggccttagcctcccattcattatctcagcagcctcccccgccccgcccccgagtcgacacacccgcagcgggagacccgtggccgccagctcgggtcccacccccgcccctcctgcgcttaccccagcgccggacagctggcaggactccggtggacgccccggcacggggcattttcacgttgtcgctctcctcttcccactcgaaaagctctggaaaacatcgcggggcccgcaaaaccccggaaatgtggcctctctttcgtggctcactttctaaactttccagaaggcgcaaagtttctcccagcgccgccctgcactggaggctgcgaagaacgcagaagcggctttgctgctaggaaggtgcatacgtttctagttctgatttttcacttcactggatctgtaaacgaaagcaagtgtgtctgctcc

SEQ ID NO: 46455 - DNA, 30 bp, Homo sapiens
  chr9:114245038-114245068
  hyper
ccccagcgtgggtccgcggcgccccggaac

SEQ ID NO: 46456 - DNA, 270 bp, Homo sapiens; identical to SEQ ID NO: 6983
  chr9:114360504-114360774
  hyper

SEQ ID NO: 46457 - DNA, 31 bp, Homo sapiens
  chr9:114361169-114361200
  hyper
cagaacctactcctctcgtctctgaacttcg

SEQ ID NO: 46458 - DNA, 143 bp, Homo sapiens; identical to SEQ ID NO: 6984
  chr9:114361585-114361728
  hyper

SEQ ID NO: 46459 - DNA, 31 bp, Homo sapiens; identical to SEQ ID NO: 6985
  chr9:114937351-114937382
  hyper

SEQ ID NO: 46460 - DNA, 30 bp, Homo sapiens; identical to SEQ ID NO: 6986
  chr9:115142770-115142800
  hyper

SEQ ID NO: 46461 - DNA, 30 bp, Homo sapiens
  chr9:115480610-115480640
  hyper
ctgccaggcaggggcgggacggagaacacc

SEQ ID NO: 46462 - DNA, 30 bp, Homo sapiens
  chr9:115513510-115513540
  hyper
cgtgggcctggggccgcgcccaccctgccg

SEQ ID NO: 46463 - DNA, 69 bp, Homo sapiens
  chr9:115607126-115607195
  hyper
ccccacagggccacaaggtggcgccaatgagtcaaactccgggaacgcgaacagttggtgctttaggtt

SEQ ID NO: 46464 - DNA, 449 bp, Homo sapiens
  chr9:115653004-115653453
  hyper
acaaggatatgctcccaaattcggctgctacggctgctcaggtttcagtcccggagcgcgagtgtgctccgtgcgccgggagcgcgagtgtgctccgtgcgccgggagcgcgccggccagtggcgagcagagccagggcacgcagcgcctgtgacagcagcccgcccagcagccgagtgacctcccgagtgactcctcctcaggccagaaaaggccgcgctccaccctgccctcgccacctcaggcagagtaggactggcgacagtccagggaagccaggcgcgggggagcgcaccgcgagtgctggctcctggcgccagcacccccggggccgacgggtcacgctgctcctgtgagcgcggccgcctgacggggccgaatttccccacagccaggcgtgcgtgcccggacctcccgcggatctctgcggaccccccaccaccggggca

SEQ ID NO: 46465 - DNA, 259 bp, Homo sapiens
  chr9:115774376-115774635
  hyper
cctctctccccacctcccacacgagtgcaagggtcgggaaagaaaaagctcacctgctccaccgaaaaataaagagcacggtcgggcgatgtggttcccaagccaggaagtacgcctgcgcacgcggccgccaggaactacatttcccagcatcttctgcaaagcgccctcttgagctgcgtctttcaccggtgtctttctaatgctttgcgggttgcgaacgtgcgtcgtttccatcgttgtttacatgaaaagaaga

SEQ ID NO: 46466 - DNA, 30 bp, Homo sapiens
  chr9:116102510-116102540
  hyper
gctggagctggggccggcgggaacgcggag

SEQ ID NO: 46467 - DNA, 402 bp, Homo sapiens
  chr9:116111660-116112062
  hyper
atacgcatacaatcgcgatttcattcaacaaggaatttaaagagacctgctgccccgggcgggatgggagcgcgggttgggtgggaggaggcgcagctgcggggcgcgctggcgcaccgggagggccgggggcggggtcagccaggccccgcccgccgccacctgcgacaggtggagcgcacggggcgggcgcacggccatgtccgccgagggcgcggagccggggccggggtccgggtccgggcccgggccggggccactctgccccgaacacggccaggctctgagctggttctgcggctccgagcgacggcccgtgtgcgccgcctgcgcggggttgggcggtcgctgccgggggcaccgcatccgccgggcggaggagcgcgccgaggagctgcgggt

SEQ ID NO: 46468 - DNA, 30 bp, Homo sapiens
  chr9:116163724-116163754
  hyper
ctggagggcccgcccgtccccgctccgggc

SEQ ID NO: 46469 - DNA, 36 bp, Homo sapiens
  chr9:116450195-116450231
  hyper
cttttccaggctgcgcggtgcctcgcgctccggggt

SEQ ID NO: 46470 - DNA, 98 bp, Homo sapiens
  chr9:116450327-116450425
  hyper
cgatctcaccctgcagcccgcacactcaggcctacactccccggtttggagcccagataaccccttcccgtcctcccctcacccgcgggaaccctgga

SEQ ID NO: 46471 - DNA, 30 bp, Homo sapiens; identical to SEQ ID NO: 6990
  chr9:116638745-116638775
  hyper

SEQ ID NO: 46472 - DNA, 55 bp, Homo sapiens; identical to SEQ ID NO: 6991
  chr9:116639070-116639125
  hyper

SEQ ID NO: 46473 - DNA, 103 bp, Homo sapiens
  chr9:116756509-116756612
  hyper
attcagacacagccacgtgggtttcagcctgtgacagacccaggcagcgtaggtgccaggtcctgcttcatcgtgccagctgatagttcgtttcctgtttcaa

SEQ ID NO: 46474 - DNA, 95 bp, Homo sapiens; identical to SEQ ID NO: 6992
  chr9:116860420-116860515
  hyper

SEQ ID NO: 46475 - DNA, 30 bp, Homo sapiens
  chr9:116870350-116870380
  hyper
agccggctgggccccgcagggcgcataccc

SEQ ID NO: 46476 - DNA, 31 bp, Homo sapiens
  chr9:116916213-116916244
  hyper
cctacctcccctctctcggcttgggactttt

SEQ ID NO: 46477 - DNA, 294 bp, Homo sapiens
  chr9:116918619-116918913
  hyper
ttgggggaggaggggggtctccgtttggggccgtctcggtgtgttccggtgtctcagtgtctgcaggtcccaagcctgtacgtctccgtttctatctgttcttgtgaaattgtccgcaagtttctaggtcaccaggtctcgggttctgctcctgtctccgtgtctgtgtggctctgcacgtccccgcgtttctggaaatctccgcgtgtttgtgttagtcggcctgggtctgtgtgtctgtgtttcctgcttctcggttcctgtccctttcacgtgtgtaagagagaaaaagtg

SEQ ID NO: 46478 - DNA, 31 bp, Homo sapiens; identical to SEQ ID NO: 6994
  chr9:117160507-117160538
  hyper

SEQ ID NO: 46479 - DNA, 30 bp, Homo sapiens
  chr9:117160993-117161023
  hyper
gcaatcagccccaccgcagacccggagatc

SEQ ID NO: 46480 - DNA, 98 bp, Homo sapiens
  chr9:117267377-117267475
  hyper
ctgctgctggagtccggggggcgcggggtcagcagctacattctggagggcacggagacgacgggtggctggagtttgggggcgccgcaaagctgacc

SEQ ID NO: 46481 - DNA, 158 bp, Homo sapiens
  chr9:117268029-117268187
  hyper
gccgacaccaggatcgctttggagtaattagccggctagctaattcacaattcggggggaaatcgtcaagttttttgtttgtttgatttttgcttccaaaatactgggcacttcagtctcggttttcttccttacaatgtggcgctcccctcctgcac

SEQ ID NO: 46482 - DNA, 30 bp, Homo sapiens
  chr9:117880315-117880345
  hyper
tgcggcggttcccacgtgcgcgttcccccg

SEQ ID NO: 46483 - DNA, 30 bp, Homo sapiens
  chr9:118916478-118916508
  hyper
ctggggctgctgagcgccgcgctgggctgc

SEQ ID NO: 46484 - DNA, 353 bp, Homo sapiens; identical to SEQ ID NO: 6996
  chr9:118916733-118917086
  hyper

SEQ ID NO: 46485 - DNA, 30 bp, Homo sapiens
  chr9:118917635-118917665
  hyper
gcctatagtgaaatcggacactttgcgagg

SEQ ID NO: 46486 - DNA, 30 bp, Homo sapiens; identical to SEQ ID NO: 6997
  chr9:118918145-118918175
  hyper

SEQ ID NO: 46487 - DNA, 490 bp, Homo sapiens; identical to SEQ ID NO: 6998
  chr9:120175490-120175980
  hyper

SEQ ID NO: 46488 - DNA, 1244 bp, Homo sapiens
  chr9:120176241-120177485
  hyper
cccatgcggaagccacgcttttgcgggttgagcgattccacacggaactactccattcctactctcatgaaaatccatctggaagggcagaacccgcaactccgaggcgagagcgagggggcggtgacggcgggtggccagtgacggtacccggagaagtgggaggctcgacctgaaactggcttaggatctgggatgctccggcccctagccagagcaccttcagtgaatggggtctccggcttccgggatggatcaagcagagctccaggtcgggactgagaggcagaggggcaggttcccactgcgggagggttggcacgcccccaggctcccgccgcgcgctctccaggacctcctcccacatgctcgtttccaaccacctgtgcgacctctgggcccctcctctaccctctgccaaccccactcggggcagccccgggcagggatccccagggcgcccccacccgtccggcatgacgcaggggctcggggttccttgggatctagcgcgtgccggcgcccagccttacccagggtgaagaagggcagctcggtgttgtccaggtcgtcctgcaccgcgatgcgccccggcagctcgttacgcacaaagagcaggaggcgcgactcggcggcggtgccggcagagccaggagagcccggggacgcggcggcggcggcggctccggccccggtcccagccccggccccggcgcgggcgccgctccagccgatgtcgctctcccgcagggcgggcagtgtggacaccgtgacggtcttcagccggcacgggctgtcgggctcccgcgaggcagcggcggtggcgccggccagcagcggcggcggcggcagcaggagcaggaacagcagcagcagcggcagcagtggcggcggccccgggtggaagcagagcctcggccgcccccggagccccgagccggggccggggctgagccgggcgccggcggcggccatggcgggaggggctgcggtgctgcgggcggcggcggcggtggcggcggtggcgaaggaggaagaggaggcagctgcggagacggcggacgccgaagcgaaccaggacgcccgagctaaggagcggagagagccgctcgccagcagcccccagctccgggctccgcctcccgatcggccctggaccgcccccccgcgccgcctcccggggcccagccgcccgtccccgatctccggctccccccgcagaccccgagcgtttcggaggctcc

SEQ ID NO: 46489 - DNA, 53 bp, Homo sapiens
  chr9:120177963-120178016
  hyper
taatggacagaggggcgtcgaactccaccgtctaacgccgaccccacaactga

SEQ ID NO: 46490 - DNA, 373 bp, Homo sapiens
  chr9:122131065-122131438
  hyper
aagttcccaccatggtgcacacgtcgggagcgcgcggggacacacacgccactcactcaaacccgcaattagccctttgagccccaggcacaggaaccccctccctagaactggagaagacttggaggcggcggggcggccaggtgaagagcggacaagggtgccggtagggggaggggcagaggagcgcggggacgccccgaatgcggcccggggccgggtccaagggcagcggggctgcggggcgctgcacccggcgccgccttacctggagtcaatgtccgtctttggcggagagctgcgggaggacgctttttattcggctcggtgggaacttgggagagccctgcgtgcagctcgcattccgggcacg

SEQ ID NO: 46491 - DNA, 234 bp, Homo sapiens
  chr9:122131496-122131730
  hyper
cgtaaagtccccttcgctggtcccgaggacaggcatgaatcccggctccggaaggcggtcactactccctctgcctcccggctctctcgctctcgctctcgctgttgctcgctcgctctctccctctctcgcgggttcgctcgcctgcgctctcctcctccccgcgcgccagatcagtttgcagccgtggggtccgggagcgaggcggctggcgaatggagagggaagtccaag

SEQ ID NO: 46492 - DNA, 30 bp, Homo sapiens
  chr9:122318746-122318776
  hyper
accctggggcttcccgcgagcttctcttcc

SEQ ID NO: 46493 - DNA, 30 bp, Homo sapiens; identical to SEQ ID NO: 7000
  chr9:123639920-123639950
  hyper

SEQ ID NO: 46494 - DNA, 30 bp, Homo sapiens
  chr9:123698950-123698980
  hyper
taggaggttacactcggagcgccctctgcc

SEQ ID NO: 46495 - DNA, 30 bp, Homo sapiens
  chr9:123836688-123836718
  hyper
ctccctgaacctcacgcgacagctggagcc

SEQ ID NO: 46496 - DNA, 335 bp, Homo sapiens
  chr9:123883881-123884216
  hyper
tggaagcaaaaggtaactgttcgctagagggaacgagctgtagtgatctgttgcaaagtttgggcgtgattggcccctgggagcttcctgtgttatgatttaactcgcggagggtggggcctgcccgcagaggctgctggtgattggatgggcggggccgccgctcactcttggccaagaatgtggtttgaggctctgcgaagttacagaggctcggaggcgcttgcaaaaatgtggctgtcagagagggaagtgcacatgaatttgaagacagcattagaaagcgttccgcccacagtttctctgttctcaacggctcagttttaacaggataa

SEQ ID NO: 46497 - DNA, 30 bp, Homo sapiens
  chr9:124030729-124030759
  hyper
ccaggcctccaccccgtgattccactgtgc

SEQ ID NO: 46498 - DNA, 31 bp, Homo sapiens; identical to SEQ ID NO: 7001
  chr9:124041370-124041401
  hyper

SEQ ID NO: 46499 - DNA, 1011 bp, Homo sapiens
  chr9:124131809-124132820
  hyper
gagagttctccaaaacgcagaggaaagcggagggggaaaaatggggcagaaagtggagctagaaagagaggtaagaagaaagccagagagacttcttccttctgcaaatcggtctaagtttcgggaggtgggattgggggaggagggggttcaccctggggccaggccagggctgggtggaggaggcggccttcgagagagtgagtcgggaaagaaggggagtgggcaaagggtgagatgtggggtcccggtccccgcctcgctggctgccagttccctctgcgtttcctagtccgcgtgcgtgacacgagatagtgcagccctggcatggggcttggcatctggcggccgcgagataaccagggcccgtgcgatgggaaacgtgccgttggcagcccgccacccctccatcgtgacctcagtctgccaaacagggttcgtgatgctcagtttactagggaggagccgcggctttgagatctcgcccagcccgaagcagcggagactggccaggagcccggctgtcagacctcggagcgcacgctgcgggcgggggctcggtccacgggggagggtcaggggacgcgggactcacccttgaaggagtcggggagccgctgggcttcggagtcccgtgtgtgccgcttctcggccatgctgcccgagacgcagtcgcactcccccgtcctcgttgccaaacccggagccgccgggaatgccctgaggagccagaggcacaagacccagattgccgccccgcccccaatcgaggtcccgccctcgtgagagttggccaatcaacgcccaggatcgaggaggacccacctcccaatccccgccctcctgtccctccacggcgcgactgcttcgcagtcacttcccgctagttctgtgggctgaggggcgtggcctgaggggcgtggcctgaggggcgagagcccccaaggctgtgggtatgaggccggggccctgcaccggaagggagggcggaagccacgggacgtggagcag

SEQ ID NO: 46500 - DNA, 30 bp, Homo sapiens; identical to SEQ ID NO: 7003
  chr9:124261231-124261261
  hyper

SEQ ID NO: 46501 - DNA, 92 bp, Homo sapiens
  chr9:124262329-124262421
  hyper
gcaggaaccccgggcgttggaggatggggtggggtctgtgctgtgctgctgggaggggctgcgctgcgctggcgcacggccaaactctggga

SEQ ID NO: 46502 - DNA, 869 bp, Homo sapiens; identical to SEQ ID NO: 7005
  chr9:124361490-124362359
  hyper

SEQ ID NO: 46503 - DNA, 139 bp, Homo sapiens
  chr9:124461195-124461334
  hyper
agggaggtgagcggggcggccggccctggcggtccccgggggtctccgcccctccgcagccccgccccctcgtcccggtactccccctcgccccggcgcccggggggctcgggcagcctcggccgcggtcggcgcggct

SEQ ID NO: 46504 - DNA, 182 bp, Homo sapiens
  chr9:124622035-124622217
  hyper
acctgtgtccaggccacggccaggcaatagccctgccagagtgtctgtcccagccctgttcaccagctgatcccgtacacccttctcctgaagtcttccttggccctccctggatgaggagctcctccgctgagttcccggatagcttctctgagcttctctccctccgagccaggcatcct

SEQ ID NO: 46505 - DNA, 30 bp, Homo sapiens
  chr9:124855794-124855824
  hyper
gcagattgagcgcgcgtggggctcgtgagc

SEQ ID NO: 46506 - DNA, 297 bp, Homo sapiens
  chr9:124857514-124857811
  hyper
aggggaactttgcctcgctcgacactacagggtgaaagaaacacagaagttgtcaaggaacgtggcccctcttcctctctcatctctccaggtgtcttgtttctttgctttagtccaggggtttcacttgctgaataaactgccttgaaatgtccaagtcataaacttaagagatccaaacctcctttttagcagcagagggcgctcgcatctgttcccttcatgactttgtttcagagtttctgtaagcatggtcgtctggccacttgcatgggaacaacccggggtgtttattta

SEQ ID NO: 46507 - DNA, 368 bp, Homo sapiens
  chr9:124990417-124990785
  hyper
attgaagcagctatattgacacggattcaggcgcctttcgagggccagtcggagggaaacccggagcaaaaagagagcgagatcggggcgaaacgggaccaaaaagagaaaagagaggcgctcaaggggaggaaaaagcaccctccagcccctcggcgcgccgggtaccggccccgcgtcgggattctcagcgctgcgccggcacaacccccggcgcatcggcgctatcagcgcctattcagacggacaataccggcctcgcctcctcttgattcgcctgtgtctttactaaatcgctttttgagaaattcctccaacatttgcataatgtgttcccgctttccgcgaccccccccccccgctcgcgc

SEQ ID NO: 46508 - DNA, 255 bp, Homo sapiens; identical to SEQ ID NO: 7007
  chr9:124990828-124991083
  hyper

SEQ ID NO: 46509 - DNA, 30 bp, Homo sapiens
  chr9:125026964-125026994
  hyper
gtgcagggacatgtcgcggccgaactcacc

SEQ ID NO: 46510 - DNA, 31 bp, Homo sapiens; identical to SEQ ID NO: 7008
  chr9:125587779-125587810
  hyper

SEQ ID NO: 46511 - DNA, 30 bp, Homo sapiens
  chr9:125693662-125693692
  hyper
attttgagacaccccgcaccccagcccgcc

SEQ ID NO: 46512 - DNA, 247 bp, Homo sapiens; identical to SEQ ID NO: 7009
  chr9:126759126-126759373
  hyper

SEQ ID NO: 46513 - DNA, 80 bp, Homo sapiens
  chr9:126760350-126760430
  hyper
gacactgcctgcccacgcctggccccgcccacctctgcagcctcatcccgctccccaccccacaccggccactccggctt

SEQ ID NO: 46514 - DNA, 175 bp, Homo sapiens
  chr9:126761376-126761551
  hyper
aggggaccacaggcacggggcacctcctgcgtcccccatcgccaccccacctagagctgctcatcaactccttttagagacaggaaactgcagccctggcggggagtgacttgtccgaggtctcagagcagggaaatggcttcagttgcattttgggggccgctgttccaaggag

SEQ ID NO: 46515 - DNA, 252 bp, Homo sapiens
  chr9:126769111-126769363
  hyper
aacctgctcagctgacgcccagggaggcggtttcagaattgttcagatcgctgcagggagaagaggaggaggaattgggcttctctctgcctgcaacaggccaagccacttatctattctaatgtcacagacacggggttcctcttcggaaacaactaaggctccactaatttttattgtcgatagcggtgataagcagattttctgtgtagtgtgaccaaggcaatgagctgatttcgtaaagaaagagat

SEQ ID NO: 46516 - DNA, 1672 bp, Homo sapiens
  chr9:126770432-126772104
  hyper
atcaagtaaatctgttggtgccgtatttgagaaataaaccatcacagcgtcacagcaaacacacacttctgaacgtcttcattttgatttaatggtatatcagcgtcaactatcgcttcctctgctggtacacacggcctgatgccgcgggaggagggtgcccatgtttatcaccgagtgagatgactaattacaccttgtcaatcaccggctatgaagacataaaaccagcgcgcacaatgaagtagttgcctgcagcgtcaattagttggcgattctgaggttattgcgtggccctgctttggccgcctctaataacgggacagagcgccgggcaccgcgcactgatcaatcaccctccttccgcggccgcccggctccctcccctctcccccgccgggtctggcctcactttctccgggcggcttgcgcttcctccctccgcggccccggctccgtggcgccggcagccccgggagccccgggaagtttgcgcgcggcagctccgcagccggcagccgggagccccgcagccttcggggagcgccggggctggtggcccctttgttggaggaggcgtggagggagcgcttttgttctgagttagtcacggtggccggctggaggctgctacctcattatgcgccgggtctgcttgtctgcgaggaagcagatggtggggaggtaggcagcggcgagagtggccagacctgaattccgttcacctgtcacctcccacaaaaggcaggttcgggggacttaggcattcgttgccactttctgggggagggggaggtcgaggggccgccgtttccggcgcctgcgaaggttccgtacctgtcggtgcccgctccccccaccccttgcctttcccttggctgcagcttctcgcaccgcgtaaatgtcactcacgtgtcaggatgtgtgtttacagcctgttcctctgcttgtttagtctcggcggacagggctcagcggttgcgcgacgttccccgccgctgggggagattagcaaagttacccgcctctggaccccggggcctgggcccctagatcccgccccgcggcgggagatgcgtttgagccttttacagacggagcgcgtcccagcctgacgcagagggatgaatagacaagcgcaccgggcgggaatcccgactgcctgtgtatctggggtcggcccagcgttggacgtgggctgctggtccgagaggtggcgacggaatcgcgtgcctatatgtatgggggagtggaaagtcgcagggtgtgtttccacgtttcttgagcagcccgcggcaagagttgctgagtaccccaccccccgcccccagatcctaaggcagcccctcgagctttccaaacgtattgtatccagccctcccgagagtggagttgcaccaaggacaaacactctagcgtcattacaaattttttctgccccttgggcgacctccagatgaaccctggtgactctcagattggattttcattccttactttctttgaaagaaagtgccccagatgcgtcaataaaacatgcctatgtattcgtgtaggcgtccgcatgcctgcgcgccggccgtgtgcaggcgccgaagcacacgtctgtgtgaacacacgggcacgcgcgtctttgggtttagtggtccttccctcgcgttggggcatctgt

SEQ ID NO: 46517 - DNA, 620 bp, Homo sapiens
  chr9:126773159-126773779
  hyper
gtaaatggcagagctaggattcgaaccctggcctttctgagttcctaaagccatgctcgcccccactcttccaggctggggagagaccgggaagagcgagaagctacacgctgggctgcagattgggccctagcgggcttggagcgtggatatgctggctggcccccctccccgggagtcacagctctcgccggtctcgccactcaggctctgccgggtacccaggaggcttgcacggccgcctgcagcccgctgtgcagagcccgggccgaaggcggagctcgatgggaaacggccggccgaaggctcttgcaactctgccacaggcctgccttcccgggcctcccaggcgggtgcctgaggccgcggctccaggccgaggggagaccgcagtgagacgagcatccccttgctgcgccttcttaggatagagggtttaattttcctttctgaagatatcgcaggaagctgttcgtatcttaaaaactccaaaccccgcgctctccctcctccctgcctcccccccacccccgccctccagcctcgcccaccagctcccaccatctcgactctcctctgctcctcttgcctctcccctccctcttgggtctcccgccttc

SEQ ID NO: 46518 - DNA, 338 bp, Homo sapiens
  chr9:126773939-126774277
  hyper
ggctgggcccgcggccggcggctcctcctcccactctgctcctcctcttttttctcctcctccacctcctcctccgcctcctcctcctcctcttcctcctcctcttcaattctcccggtggctcgactcggctcgcaggcttcggagaaacccctactccagtcgccgactcagcgcccaagagggtcgccttgggctgggggcgcaccccagggaggggaggggtccaggcagctgggccgccgcggacacctagcggcttcagggtgaaccccgaccgcagccgtcgccgcctcgggcagagtttgcgcccttgctttgcgccccgggcgctgaag

SEQ ID NO: 46519 - DNA, 160 bp, Homo sapiens
  chr9:126774459-126774619
  hyper
cgcccggggcccggagcccggcctgggggctcagccgagctcgggcggggccggggccgcggtggcgatgcaccgggcccgttagcgccaggagcgccaggcagctgaggcggggggcaagccctccctcggaggagccgcgcccccggccccgccggtc

SEQ ID NO: 46520 - DNA, 182 bp, Homo sapiens
  chr9:126775916-126776098
  hyper
ccctaaacacagcccgagcattttgggggaaaggacagggaggactggaaggaagagaggtaagcaccagagccatttaggccaggagcccggcctgggcccgtggctggcgagggctgcgcaggcaggcctgggttctgaaccgcccagaaatggaaatgggccttttggggtggggggaa

SEQ ID NO: 46521 - DNA, 161 bp, Homo sapiens
  chr9:126776270-126776431
  hyper
cgctgtgcgccggctgcgggggcaagatctcggaccgctactacctgctggcggtggacaagcagtggcacatgcgctgcctcaagtgctgcgagtgcaagctcaacctggagtcggagctcacctgtttcagcaaggacggtagcatctactgcaaggaa

SEQ ID NO: 46522 - DNA, 434 bp, Homo sapiens
  chr9:126777312-126777746
  hyper
cccccgcagcagcagcggcacctggaggaggaaaaggggggtacccaaccgtgtgttcccacagcccctccctccatggtccctacaggcgcttctctgtgcagcgctgcgcccgctgccacctgggcatctcggcctcggagatggtgatgcgcgctcgggacttggtttatcacctcaactgcttcacgtgcaccacgtgtaacaagatgctgaccacgggcgaccacttcggcatgaaggacagcctggtctactgccgcttgcacttcgaggcgctgctgcagggcgagtaccccgcacacttcaaccatgccgacgtggcagcggcggccgctgcagccgcggcggccaagagcgcggggctgggcgcagcaggggccaaccctctgggtcttccctactacaatggcgtgggcactgtgcagaagggg

SEQ ID NO: 46523 - DNA, 133 bp, Homo sapiens
  chr9:126778105-126778238
  hyper
gcagggatggagaaagcaaggcggcgctgacgccaaacaggttttgggttggcgcggctgagggccgggaactggggcagcgaaggaacgaggcagggcggcgagggtcccaagagaaagggctggctgtggc

SEQ ID NO: 46524 - DNA, 411 bp, Homo sapiens
  chr9:126778358-126778769
  hyper
cggcccgatcctcctttaaagacaggtctcagttttcccggactttttcctccgagtttcctggcgcctgctggggtgagggccgtgaccctcggaagcgagccccccgggcggggacgagaccggagcaggcctggcctcgcgccggggtggggtggggtggggtgaggtggggggcttggttcggatttccggcatctttgaaccccaggccattcccggagaagctctgccccctcccgcgcccctccctgctcaggacagctgcagaggttctgagttccggcaaatgagccgtcaacatctgcccgaagtctgcaaggcccggaaaggtttatgactctccgggcttccgaactagagtttatgtgcaattattttctttctttcgtttgcaacagaattagattt

SEQ ID NO: 46525 - DNA, 498 bp, Homo sapiens
  chr9:126779545-126780043
  hyper
ccgtgccctcctctccgaccttggccggggctcctagtcctgagagaaacggcgttcggtgcgccggcggtggctatgcggctggctctttcggggctcccgggactaggttggggaaagagggcatctccccggcctctcggggcccagcccagtcttcctagatctggcgtccgcccttccctcccctcccgcactggcaggagagaaatggccgcagtgtgggccgcggggcagctaggactggaaagcggggaccctggagggtgcgatcgcggacggggtgtgcgggcgcgggtcgtgtgcgtgtgcgtgcagggttccgaccacggggacacgagcttgtttgtggcagtgtcccacatcctgtggcccagccacgacgaccccttgcaaagcctcttgctctggggacagtccctccgaggcgcggcggcaccttactgaagggcggcgagctgggggccgagtggggagggggcgccgtcggggcgccgg

SEQ ID NO: 46526 - DNA, 682 bp, Homo sapiens
  chr9:126780284-126780966
  hyper
ggaccggccggacgcccggcctcccccagccccagctttttgtgtgtgtgtgcctggcggcgtaattactgatttgattccaatccattatttagacaattgaacctacaatctcgtctttagtaaaatgaggcgaagtcagatttgattacaggttcagtcccagcgacaagagctcgaaacccgatgggttaataacagatcacgagtaaattattcatgattttacgagctctttagctccattgaatcggcctaattgagaggaaaaaaaaaaaaaaggagagagaaagcccgggtcctccccctcccctcggcccctcgctcctccccggatccgatcctggggaatctcgacccgcccccgggcactgggggcgggagtgagggggttcggggcgccggccaaacctgggccccacggctgcctcccccgccgccgccccctgcccttgcctctggccggcctcggcctcgctacttagggccggctcctttccctttttctccactccccttctttccccttttctctactcccccgccaataacggcttcggaaaaggcctcccccgcagggaccgggtctcccggagccccgggattcagctcggccaccggaccctcgccacaagctgcgcctgtttccgggactcgctttcccctccgctctccctatttc

SEQ ID NO: 46527 - DNA, 30 bp, Homo sapiens
  chr9:126781414-126781444
  hyper
aaattgccggacccgcgctcttcactctgg

SEQ ID NO: 46528 - DNA, 159 bp, Homo sapiens
  chr9:126782534-126782693
  hyper
actacatgtttatttctgcctcggacttccttccccgtccactctgccgctctctgtggactgccgcagatctctgaacttccccgagcctaatttgctccacttgttcacggagaaacaatcatcttacagggtagcgatgaggattaaactgcaaaa

SEQ ID NO: 46529 - DNA, 304 bp, Homo sapiens; identical to SEQ ID NO: 7014
  chr9:126783289-126783593
  hyper

SEQ ID NO: 46530 - DNA, 245 bp, Homo sapiens; identical to SEQ ID NO: 7015
  chr9:126785000-126785245
  hyper

SEQ ID NO: 46531 - DNA, 86 bp, Homo sapiens; identical to SEQ ID NO: 7016
  chr9:126872693-126872779
  hyper

SEQ ID NO: 46532 - DNA, 172 bp, Homo sapiens; identical to SEQ ID NO: 7017
  chr9:127005137-127005309
  hyper

SEQ ID NO: 46533 - DNA, 31 bp, Homo sapiens; identical to SEQ ID NO: 7018
  chr9:127061459-127061490
  hyper

SEQ ID NO: 46534 - DNA, 30 bp, Homo sapiens
  chr9:127177802-127177832
  hyper
acgccgcactagaacgattgatcttagaga

SEQ ID NO: 46535 - DNA, 279 bp, Homo sapiens
  chr9:127212754-127213033
  hyper
gtgaacggccacaggcgccaggccagccatagcgggtgaggaactggagctgggaacaggggagggaccagcggatgaaggggaggcccctgactcaggcccattggcgcctcgcggaggagggacgcgcagtggtgggcaaacttcgcatctccctctcgggcctcaacgagtgtttggagagcaagaaaagtgggcgccagggggcttgagggcgcgaatccaggcagacgtgaacgagggagtgcttttcagaatccaaaacgcgggagcctccca

SEQ ID NO: 46536 - DNA, 109 bp, Homo sapiens
  chr9:127265974-127266083
  hyper
cttcgattgggattcgtttgtctgagaacaaaaccccgattctgagaaaaagagatgggctcagccgcggggaagacgccaggggacccaggagcgctggggcgcccgg

SEQ ID NO: 46537 - DNA, 148 bp, Homo sapiens
  chr9:127266439-127266587
  hyper
agacacaacgatagacgacagacagagacgccgagacgagaggagccccggagagacgaggccggggagctacagaaacacggagagaaaacctggaggcggaagcgcccagcccgagggtcggggacaggggacgcgcggaaacctg

SEQ ID NO: 46538 - DNA, 218 bp, Homo sapiens
  chr9:127266628-127266846
  hyper
cggacccagacgggggcccgggccgcaggaggcggaaaacgacggcgccgggaccgagagcccgaaaacgcagagccgccgggaccccctccccgggggagacaaagccgcagcagcgacggcaacgggaggcgcagcccgagccgccgctgccaccgggacgtcgggcggggagacctcgggcgggggtcggcgggctccgggaagccgagcccgag

SEQ ID NO: 46539 - DNA, 175 bp, Homo sapiens
  chr9:127266865-127267040
  hyper
cggagaggcgaagtccggaggagggaagcgcgaagagccagggcccgggacgcgagagggggcgcgacggcggctgcggtcggcccggcgcccacctggtcgctcctgcgagcagcgccccgcgtcccgcccgcgcggagcccgcacctctcggccgcgccgccgccgccggcga

SEQ ID NO: 46540 - DNA, 117 bp, Homo sapiens
  chr9:127267258-127267375
  hyper
gccaacccgccgcgccggggccgggggccggcccctctatatcggcgcgtgcggtatccgggggcggaggcccggtcgtgtcctccccccaagcccggcccgcgccggcaccctctc

SEQ ID NO: 46541 - DNA, 428 bp, Homo sapiens
  chr9:127531977-127532405
  hyper
gagcctccctttattcggaaatgaggagatgtgaaaggtggaaaacagggcaaataaataaatcgggtttgccgccggagcgtttgccggccggtgcgagcaccctttgtaatgcaggcctcccggggcgatcgcctgcgctaattgctccagggcgctttccaagttcaaaagttcaccttttacgacctcacaaaagctcctaacacgttaccaataaaaacattccgcggcaaacaccgaggaggaaaatatcaaacagatacaaataaaacaccccgcagggggagggagcgaaggggaggagggcgaggaagccccgaggaacctgaggacccggcccgggcgagggggcgagggacgagcggtaggaagggccgggccaggtgagggattctcagctcccaaggtcccggatcgggacaaga

SEQ ID NO: 46542 - DNA, 30 bp, Homo sapiens
  chr9:127532689-127532719
  hyper
tcaaggaagaacgctcgaggctgcagaaga

SEQ ID NO: 46543 - DNA, 30 bp, Homo sapiens
  chr9:127533846-127533876
  hyper
tccctaagagtcctcgtaaccccccacccc

SEQ ID NO: 46544 - DNA, 94 bp, Homo sapiens; identical to SEQ ID NO: 7021
  chr9:127534415-127534509
  hyper

SEQ ID NO: 46545 - DNA, 30 bp, Homo sapiens
  chr9:127624470-127624500
  hyper
aggcccaacgtgggcggcagctaccagaga

SEQ ID NO: 46546 - DNA, 30 bp, Homo sapiens
  chr9:127630674-127630704
  hyper
tgacttccctaaaccgctttcccccatctc

SEQ ID NO: 46547 - DNA, 30 bp, Homo sapiens
  chr9:127631260-127631290
  hyper
agatgccgggcgcccgatcctcagtgacaa

SEQ ID NO: 46548 - DNA, 30 bp, Homo sapiens
  chr9:127905969-127905999
  hyper
gagactgcaggtggcggcggaggtgcctta

SEQ ID NO: 46549 - DNA, 30 bp, Homo sapiens; identical to SEQ ID NO: 7022
  chr9:127963166-127963196
  hyper

SEQ ID NO: 46550 - DNA, 31 bp, Homo sapiens; identical to SEQ ID NO: 7023
  chr9:128024544-128024575
  hyper

SEQ ID NO: 46551 - DNA, 31 bp, Homo sapiens; identical to SEQ ID NO: 7024
  chr9:128096836-128096867
  hyper

SEQ ID NO: 46552 - DNA, 31 bp, Homo sapiens; identical to SEQ ID NO: 7025
  chr9:128138375-128138406
  hyper

SEQ ID NO: 46553 - DNA, 30 bp, Homo sapiens
  chr9:128509855-128509885
  hyper
aggaagcaggacatcggcgacatcctccac

SEQ ID NO: 46554 - DNA, 468 bp, Homo sapiens
  chr9:128651895-128652363
  hyper
ttaatattcctgtgtaagtgtcgcacaaaagtaaacccaaagagcccgcacatgacacggaggctgctccatttacattaattatgcagtcagggcggtgagaattcgctgtcagccagcagggcgggggcgcgccgcggcggggagcggggccgggccgcggggcctcccggcgcgaacgcgggagggggagccggatcgccgtccgccgctccgcggctccgcgctgcgagaacaatgggcgcgcccgacgcccgcccgcgctcgcgctgcccggcgcgccccgaaagccgcggggcagagcgccctgagcggtcccccgcgccggcggccccggctgcgccccgctgtagcagctgaccttagccggctgcggccgagagaacgcgcgttgcccgccgaccttgtgccctggggtcagcacccactgcaagtcagaacctctccgtggtcccaaagttagtgctt

SEQ ID NO: 46555 - DNA, 31 bp, Homo sapiens; identical to SEQ ID NO: 7027
  chr9:129296527-129296558
  hyper

SEQ ID NO: 46556 - DNA, 636 bp, Homo sapiens
  chr9:129372401-129373037
  hyper
ctctggtccccccaatctggccgcctgtcaaggatctgaggcttggcagggctgatggcgccgggacagcgtgggacggcccaggctctctgcagccctggttctccgggcagagtggaatagagacactcgcagctcctggtccttgccttcccactcctccgaacccggccaggactgcaccctgcgctgccccagatccgtgcctccagctggaatggtaaactgggagggggcagtgtggctctggctctggtcagaagcacaaaacaatccagacagcccggagcgggatggacagggctgggtggggtgggggagggcagctcatagagccgtgctcgagggaggcgggtagcgcagaggagagggtgcaaggccctaagaagaggagcggggggactagggcggggctcaatggagctggggcgtccgcagactggaaggagccgggacccccgctccagagcctccctttccattctcgcttcttccagtgattccgagcccccgactcagtctttcccccaggtagagagaatccgaggctgtttctgccgctgaaatctgagcgggagagcatcccgaagccgcctgcgtggagcgagcagcccccgcgtcatgggccagaggcgc

SEQ ID NO: 46557 - DNA, 75 bp, Homo sapiens; identical to SEQ ID NO: 7029
  chr9:129373250-129373325
  hyper

SEQ ID NO: 46558 - DNA, 323 bp, Homo sapiens
  chr9:129373384-129373707
  hyper
tgtgtgtgtgtgtgtagggggaatgaatggacagcggggaaggcatgcagaggggcccaaggggtgtggactcagcagccccaccccagaccagagaaggcagccaggctctggcgtccaccgagccagcgcccctatctgggcgcgggccgcatggcggcagaccaccctatatccgccttggtggcgtgggatatgactggcaggagcgcggaagaggcgctgagaatgcatgcgcacccggacagaccagacgcggcacggagggggtacttcccacaagtcctcctgccttgagaccaggccttcgagtggtccgggga

SEQ ID NO: 46559 - DNA, 142 bp, Homo sapiens
  chr9:129375184-129375326
  hyper
cactgtccttgatccgcgcgtcccagcgacccctggccgggcacccgacccgccaaaggaccccgatcttggcagccaacctaatttcttcagagccgctaccctggggccaccactccctcctagcgcccctcactgcaaa

SEQ ID NO: 46560 - DNA, 488 bp, Homo sapiens
  chr9:129375797-129376285
  hyper
ctccctgccgtccgcgcagtctggcctcgctcggggccactcctcgtagcgctggagctttacaaaatattaataataaagaaggcagaggagaaaaaagaaagccttcgctccccaactcccaaatcaatttttcaagggggtggagcagagggatttgtttcgaagacgatcaaaacttctgcgaggggcccgcggggcggccgggccggggagccggggcctgagctcggggccaggcgcggcgcggggcgcgggccaggggcgcggagccccggggcgcgcgggggggcgggacggcactatttgacgtggagccggcggcgcatcccggcgcagggataccggccgcggggttcaaatgtcaggaagtttcgggaggtgaggcggcccgtatccctccgccgccagccccagctctaaacccggcggctcagcgggcgcaccatggcactggagtagcgcggggagcgcgcccggagccccgc

SEQ ID NO: 46561 - DNA, 437 bp, Homo sapiens
  chr9:129376493-129376930
  hyper
tggctgcaagtgtccgggagagcgcggcgcgggctgcagccgccccggcccgcccgcacgacgccggggcccggggccagcgcgtcgccgctccacgatcgccgggggccggcgcaacccctgccctgcgggggccgcgcctccccggttccagggccgcggcggcggagagcgggtggacgggccggcgggcgagcagcccggccggcggggtccgcagcgcgccccgcgtcccatggatatagcaacaggtcccgagtcgctggagaggtgcttccctcgcgggcagacggactgcgccaagatgttggacggcatcaagatggaggagcacgccctgcgccccgggcccgccactctgggggtgctgctgggtgagtgcggggtcggaacgcccgagtggtctcgggcgtgggatggggcgtcgtccggctgtg

SEQ ID NO: 46562 - DNA, 143 bp, Homo sapiens
  chr9:129377208-129377351
  hyper
ggggagattctaagagaaaaacgtctccctggtcactcaaaccacagattttggggagatcggggatagaagaccacgaacgccaccgtggggcgtgtcagccagcgagcgccccagcctcacctcgcctgtcttggtcccag

SEQ ID NO: 46563 - DNA, 43 bp, Homo sapiens
  chr9:129377592-129377635
  hyper
ggtgcgaccgggacgccggggctgggccgggcggcgctgacgg

SEQ ID NO: 46564 - DNA, 187 bp, Homo sapiens
  chr9:129377772-129377959
  hyper
cggcgtgtcagcaagccctcaccaccagctgctacttccgggatcggaaactgtactgcaaacaagactaccaacagtaagcgcttctcgtcctccttccccgccaccgcccggcactcgagcccggtcagccccctgccgggcccggcccgcgcccgctctgccgccggctctgtgcgcggctggg

SEQ ID NO: 46565 - DNA, 167 bp, Homo sapiens
  chr9:129384572-129384739
  hyper
caaagatgtttgcttcctggccgggccagtgctgtgagagaggcttccccgggaactgtggggaggtggctagctggggaaggttgtgacggccacccagagcaacagcgatgcccactggggctggcaggaatgaggaggccaccgagctgctgggtagctgaaga

SEQ ID NO: 46566 - DNA, 387 bp, Homo sapiens
  chr9:129385809-129386196
  hyper
aactctgtagcagatttttcccggcccagagttaccctgtagcagatttcccccccaggcgggtccaactcccaaagccggatgggttctctaagtcctcctataccgaccttccggaaggtgcgggctctacattgttgctaatctcccccagaacgcccagcctgggaggggtggggagggggagtcgctacccgagggctgggagcagggtgtcactgacctcctctgcgcggattgccccctgtagggccagccctggccagcggaagaaaaaggttagaataattgccttcccctgggcgggagagcttccttcgacgtccggacacgcggatggggcggctttcagcggcctccacccgcgcacccctccaggcccacctc

SEQ ID NO: 46567 - DNA, 1319 bp, Homo sapiens
  chr9:129386429-129387748
  hyper
cgcgctaggctgaagcccggagtccagggccctgcagcagctttcgggcttctcagcgtttcggggacccttggtggctcgggggctctcttgggctggggtcggggtgccccgccaggtggggccttacgcggtccagaaagagccagtgattctccttggagccactgcaggctcccgctggagggagtaagactggcggggagagctggcattttcattccttgttgagcacagccctcgcccctccccaagccctcctgccgaccccctcgggctggccaaaagcagcaagttcgggaggtttgtttattgagagaacagaaaattaggggttgcgggggagaatctaagacccttttcccgcctgagaaacgtgcgaagtccctcagctcctggaggcaaccaggcggcccgaaagccgagttcccggcgcggatgctagggccgaccccagccccctccctcctgcgccccagcccgagggcggcgagtggcaggtttttttttatcttgtttttttttttttggatttggtttgcaggggggaaatgtggttgtatcaatccacaaatatttactcttaacagacttgtatctgtggagatttcgaacaaagacagtttagggggattacaaaaaccctaaaccccgtttttctcccggacttggtgctttaaatgccaattataggcgagccatatccaacagcaacggggaaaggcgagcaggctccggggagggaggtggggggagagtccggccattaaatgtaacttttcattatgaaaaggatttcgccggttttatcttctaataagattatgtcacgaacacaagtacctaggatggtgctgagtgacagggctctgtcgtttaatcagaggctgtgccgctcaaaccgcggggccctttgtcccacggagtgaacgacggaaacttgccatcctaatccccttattcatgtcaagcacagaaaagaagccgagcaccttacaaccgtgtcccctccaccccttccgaggacggcgggaagagggggctccggccctgtagccccctgacgcttttcgtttccgagcgcgcttgggcctcaggagccggagcgttgccgtgggggcgggggaaggggtggttttgcgggtgccttaattggcagcgtctggaaaatggggacagtgaccccacgactagaggatgaatggggggagggttagtgggatgtgtttgcctcctctgaccgagagcacgggtcctgctctgtcccctcttcccaggaaaggtggcactccgggtgcacacccaccacccccattaaa

SEQ ID NO: 46568 - DNA, 906 bp, Homo sapiens; identical to SEQ ID NO: 7035
  chr9:129387847-129388753
  hyper

SEQ ID NO: 46569 - DNA, 397 bp, Homo sapiens
  chr9:129388816-129389213
  hyper
cgtcctctcctggagccccctctgcaatcccggctcagtcggcaaccggcccttccttccaggtcaggggtgggggagagactttctccctcgaaacacttgataccaactttgtttttttggcaagaaaaataagccttgtttggaaaggggtgggtggggggcgtcgagcgagcgagggaaggagcaaggaggcggcggcggagcaaactctgcggattaggtttcagcgcctccgccccacccccagccccgcggcggtgatttgtgtgcgggggtctgtgaccctgcaagcatcaaacggcccgcgggaaccggccgagttcagagggacagtgggccgaagggcggcctaagacaacgcagatggttcctatcagcccggccgggcccgcag

SEQ ID NO: 46570 - DNA, 574 bp, Homo sapiens
  chr9:129400692-129401266
  hyper
gctgccactggctgccctgcccgcagccctgccaccctggggagctgaccccgaccccacccggccccccacgtcccagctcgggggctcacaaagggagaggagggaagagcaaaatcgcagagatttgtcttgtctggggctgacagcggagcgagtgattgccaggcccgcttggcagtttttaatcattttatctctgttctcggctctcgggggagacagccagtgcttagcagtctgctcagaaagacctcggggcgcgtggcgcagcggcggctcggagctcccattattagctgtgctcttcggagcgcgctccgatctctcccgggggagccggtgaaaaattaacacgggccggcggcgcgggcgcccgatgtaactgtaattactccattgatattcctcacacaatagcgctgtcatcagtcatttacataaactttctctccccaggacgggcggaggtgcctaatcctattgggcgcttccactgcatgcattatacatggcagctcctaggtgcggactgagggaggggcggatagccgggctctaggtgaggagggag

SEQ ID NO: 46571 - DNA, 31 bp, Homo sapiens; identical to SEQ ID NO: 7038
  chr9:129413244-129413275
  hyper

SEQ ID NO: 46572 - DNA, 207 bp, Homo sapiens
  chr9:129439253-129439460
  hyper
aaggccattactatgctaatgcggccgggcgggcggtgattaagcggctcaggcaggcagcgggcggctggggcggggcatggggcgatcagttacccactaaatgggcgggctgcgtgccctgcctgtcccgaaggccgagccctgacctgcctcgcctgccctttgcccgtccccagccagagcgcaggagacccagggatgtgg

SEQ ID NO: 46573 - DNA, 528 bp, Homo sapiens
  chr9:129445249-129445777
  hyper
ggctggcctgggatggctccccgggctcccggctgtgcccgtccctccctgtccctggcccgtgacctccagccccggctgggggctcccgacagcgcccctggcgcggatcaaagggccgaggggccggcggccccgcacagctgcgggccgcaggaagcgcaggggcagccctcgctgcaggcccggccccgacgcggcgaggaggccgggggaggccgggaggctgggagaggccccgcgaggcccgcagagcgcgcccgtctcgccgcgcattccagccgcgtgattgacgcgcgtaccggggcccccgcccgcggctcccgccgccgcccgcccggcccgcggccgccgcatcaaagcagatgtttgcagctggtttgagttggatccccatcaacaggcccttttttgtctcaaaataaaaaacagctacgcccggaatgataaggacgcggcaggcacgtgggggagatgtcagcgagtccggcagggaggaggccgggcggctccctctctaagtgacag

SEQ ID NO: 46574 - DNA, 279 bp, Homo sapiens
  chr9:129485492-129485771
  hyper
aaacttgtccctctcctttctcggtgtccatggtgggtctggttcccaccgctccctccctccccgcacagtctgagacccccttccccgggccgccccgtcgatcccaggtgatggatggagccttcagggagcccgcgcgggcgggctaggctcgggcggaaatgaagaggataagatctgcgagcagagccgcctgacaccgtgatatccgcctggctcgctgcgctccgggtgatggatggggcggagctccccaccccccagccccggaacctg

SEQ ID NO: 46575 - DNA, 30 bp, Homo sapiens; identical to SEQ ID NO: 7040
  chr9:129567403-129567433
  hyper

SEQ ID NO: 46576 - DNA, 30 bp, Homo sapiens
  chr9:129567787-129567817
  hyper
gaggcctgacgagccgagctgggagaaaga

SEQ ID NO: 46577 - DNA, 30 bp, Homo sapiens
  chr9:129676699-129676729
  hyper
ctaaggcgatgtctcgctcacaaaaccatt

SEQ ID NO: 46578 - DNA, 30 bp, Homo sapiens
  chr9:129986558-129986588
  hyper
gggtggcgggatcccggagccaacgcagac

SEQ ID NO: 46579 - DNA, 219 bp, Homo sapiens; identical to SEQ ID NO: 7041
  chr9:130159224-130159443
  hyper

SEQ ID NO: 46580 - DNA, 31 bp, Homo sapiens; identical to SEQ ID NO: 7042
  chr9:130320411-130320442
  hyper

SEQ ID NO: 46581 - DNA, 474 bp, Homo sapiens
  chr9:130330785-130331259
  hyper
gacccctgccccagctcggccaggggtcgtgggctgggggtccgccaagcccgggctccgaaggggttccgggagagaaggagttccgagtccccttgagccgggaaaggtggcgctcagaagagcgcgggaaggggcgcccaggctcagagggaacgagctcggacgcggggcacgctccctggcagctcccaccggcccggcctgactcccccgagcccccggccccggcgccaactgctggccggggcgggggcgtggtccgggggttccggcaggcccctgggcgcgcgtggcgcggcgcgaccctcacctgcgatgtgctggcgccgggcgtcgtccaggtgcgtggacagcacgtcccccatggccaggaggtgtcgcggcccgatccggccgacgccgccgctgttgcccgcgctgctcaggcggacgccgctggcgccatggagcccggcccgccctgcttccccc

SEQ ID NO: 46582 - DNA, 30 bp, Homo sapiens; identical to SEQ ID NO: 7044
  chr9:130331661-130331691
  hyper

SEQ ID NO: 46583 - DNA, 159 bp, Homo sapiens
  chr9:130374195-130374354
  hyper
gaggaaagacaggacccgagcggggtttcaggcagatggagcgcgtcggtagcctgtggccagggatcccagcaccgacgggaaagaggaggcctgggtaccctgcgccccgggcgcgcgcggcgcgtgaggtgagggggagggcgcggctccgcacca

SEQ ID NO: 46584 - DNA, 37 bp, Homo sapiens
  chr9:130374656-130374693
  hyper
cggagccgggagactcgcgcagcgccatggcccccat

SEQ ID NO: 46585 - DNA, 30 bp, Homo sapiens; identical to SEQ ID NO: 7045
  chr9:130375598-130375628
  hyper

SEQ ID NO: 46586 - DNA, 252 bp, Homo sapiens; identical to SEQ ID NO: 7046
  chr9:130461686-130461938
  hyper

SEQ ID NO: 46587 - DNA, 30 bp, Homo sapiens
  chr9:130548634-130548664
  hyper
gctggtctctaggccgcgccgcaccccgcc

SEQ ID NO: 46588 - DNA, 8 bp, Homo sapiens
  chr9:130564941-130564949
  hyper
gggacgcc

SEQ ID NO: 46589 - DNA, 164 bp, Homo sapiens; identical to SEQ ID NO: 7048
  chr9:130639866-130640030
  hyper

SEQ ID NO: 46590 - DNA, 140 bp, Homo sapiens
  chr9:130661050-130661190
  hyper
cctggaggatccctctcggctggaacgggtcagaggccatggagtgtgtgcccaggacgtggctcggcacaggcaccagggcgggggtctaggggtgccggcctgttggggagcggcttgctcacgctggggaggcggca

SEQ ID NO: 46591 - DNA, 498 bp, Homo sapiens
  chr9:130674525-130675023
  hyper
gcaggcaggccccaggctcaccggttcttgcccgtctcgtcctggaagatctggtcgcagtaggccatcatgcgctccgtgaaggtgtacacctgcaggccggggtacatcctggtgagctgcagcagcgtgcggtaggtgcggccgccgagcacccggtccatgtgcctgccctggccccacaccatgtagagcgtgtctcgggccttctggaagtagtgtgaatagttgcgcagcagcagcggcacgcttgtgtgtgagacgacacgcagggtgctgcgctggcccacatccgcctcaaagcccacggtgggcgcctggttcatgcggaacacgcactcggcactgtcgatctcagcacccaggcctgagcccagcatttggccggagctggacaccacggcacagctgcggcagggctcgcggaccagcggctgcagggcaggcagggagaaagagacagagaggcatgaacacgcagcttacaccccctgcagc

SEQ ID NO: 46592 - DNA, 30 bp, Homo sapiens
  chr9:130679123-130679153
  hyper
atggagaggccgggcgagggcaggacgtag

SEQ ID NO: 46593 - DNA, 377 bp, Homo sapiens; identical to SEQ ID NO: 7051
  chr9:130679367-130679744
  hyper

SEQ ID NO: 46594 - DNA, 79 bp, Homo sapiens
  chr9:130689370-130689449
  hyper
gggtgcttcgggccgcgagtttcggctgggatgggggcccaaacctgcttaggccactcacctctcggagatgcggccg

SEQ ID NO: 46595 - DNA, 37 bp, Homo sapiens
  chr9:130689630-130689667
  hyper
ggatgaggatccccaaactccacaacccggggtgcat

SEQ ID NO: 46596 - DNA, 425 bp, Homo sapiens
  chr9:130689741-130690166
  hyper
cggatcccgacccgatcccacccctaaacacagccccagtggtgccccgcccccacgtatggccccacccccatgccctacaaccccaaatccgcccatttgggccccgcccacataccccgccctccccaggtatatgatgacctaggacccgcccccaccgagccccgcccccagccaagtacccagcaaccgcgccagcagcgagtgcgggtgccgctgcaggtgctgcacgtagcggggcaggtgggcgagcagagcctgcacctctcggcgcccctgggtcttcaggaagaagcgctggtcgtggctggggggcaagagaaagaggtcactgcccaggcctggctggagcggctcccacccggcccccttccccgacctgtgcacgtggatctcgctcccaggtctcggcaccgcctctc

SEQ ID NO: 46597 - DNA, 16 bp, Homo sapiens
  chr9:130690197-130690213
  hyper
cgatctgtccaccatc

SEQ ID NO: 46598 - DNA, 30 bp, Homo sapiens
  chr9:130692623-130692653
  hyper
tcgcctatgctgagcgcctccaggccagca

SEQ ID NO: 46599 - DNA, 30 bp, Homo sapiens
  chr9:130699870-130699900
  hyper
tcgcggcccgatcacggtctaagcttccca

SEQ ID NO: 46600 - DNA, 31 bp, Homo sapiens; identical to SEQ ID NO: 7052
  chr9:130865695-130865726
  hyper

SEQ ID NO: 46601 - DNA, 30 bp, Homo sapiens
  chr9:130889793-130889823
  hyper
ccccccagggccagcgccgcagctcccagc

SEQ ID NO: 46602 - DNA, 30 bp, Homo sapiens
  chr9:130890187-130890217
  hyper
ggcccgctcgggaacgtttgcagaccgttc

SEQ ID NO: 46603 - DNA, 30 bp, Homo sapiens; identical to SEQ ID NO: 7053
  chr9:131038312-131038342
  hyper

SEQ ID NO: 46604 - DNA, 30 bp, Homo sapiens
  chr9:131084782-131084812
  hyper
agccggaagaggttcgcattttatagtctt

SEQ ID NO: 46605 - DNA, 30 bp, Homo sapiens
  chr9:131124557-131124587
  hyper
gcaggtatagctgccgtgcctgagtgtgat

SEQ ID NO: 46606 - DNA, 199 bp, Homo sapiens; identical to SEQ ID NO: 7054
  chr9:131127288-131127487
  hyper

SEQ ID NO: 46607 - DNA, 84 bp, Homo sapiens
  chr9:131132509-131132593
  hyper
gcctgccctgagccgccgcgcccggcctgccctgagcttttgcaacaggctccagtggtctccgtgtctctttccttattcccc

SEQ ID NO: 46608 - DNA, 40 bp, Homo sapiens; identical to SEQ ID NO: 7055
  chr9:131183033-131183073
  hyper

SEQ ID NO: 46609 - DNA, 90 bp, Homo sapiens
  chr9:131219287-131219377
  hyper
gagcggttctcacccgccctctccgcacgtccgccggcgcctcaggtttcccccggtagccaccggcagtcctccgcgtgggacccgggc

SEQ ID NO: 46610 - DNA, 30 bp, Homo sapiens
  chr9:131267042-131267072
  hyper
ggtcagaaggggggcgtcagagaagctgcc

SEQ ID NO: 46611 - DNA, 30 bp, Homo sapiens
  chr9:131452619-131452649
  hyper
gcctaggaggctctcggcaggggggctgcc

SEQ ID NO: 46612 - DNA, 30 bp, Homo sapiens
  chr9:131580576-131580606
  hyper
gtgcttgacccttccgcggagcgtattaag

SEQ ID NO: 46613 - DNA, 225 bp, Homo sapiens
  chr9:131709400-131709625
  hyper
tcccacttgtattggacgtagaaggcctgcactgcgagggccacggcgcaccacgagtatcggtcccatacggttgcgtggatgctcagcaccactgcaaacactactgccgcctctgccagcaccgatccactcagcggagccccaggccccggggccggagatgggcactctcgggtcatatctctagacctggggcttcacggaggccggggcgactacgga

SEQ ID NO: 46614 - DNA, 30 bp, Homo sapiens
  chr9:131710179-131710209
  hyper
gtccaaacggtccccgcgcgcggggatctg

SEQ ID NO: 46615 - DNA, 30 bp, Homo sapiens
  chr9:131710499-131710529
  hyper
aggattttgtttcgcgttgagcggagccac

SEQ ID NO: 46616 - DNA, 628 bp, Homo sapiens
  chr9:131842859-131843487
  hyper
ctggtctcagtttactcgtaactgaaagtgggtcggttcaaaccccctggagctgaggttgcctctcctcttcgagcacgcgctatcggacgcgcaggtccccaagaccgcggatcggcagggggtaccagggaagccttcattcagggcgcaggtcccagccgaaccaaagctcccaccaaagttcaacacgcccccaaagccagcgcctgattggcccgccctgcccacaagctgaggcagcctcaccttctgattggctgttatgctccctgttcggtgctggaaccctccccttctctgattggccagatgcctacctgcgctcgccccagattgggcgccagctggggcggctcgttggctcccaggggccccgctctctgattcgccgctcgggccagcccccacggcctgcacgctgaatggctgcgccgctacctatattggcctccgattgggtgcacggcgcctccccggcgtgataggtcaggaccaccgcccccctggctccccattggctgctcgaagaagcccggtctccgggtaagatggcagcggacggacagtgctcgctccccgcttcatggcggccggtgaccctcacccacgtcgaatatcctgcagg

SEQ ID NO: 46617 - DNA, 324 bp, Homo sapiens; identical to SEQ ID NO: 7059
  chr9:131872520-131872844
  hyper

SEQ ID NO: 46618 - DNA, 79 bp, Homo sapiens
  chr9:131872856-131872935
  hyper
cgccgcggctggggtcggtgggtccttgctagagccttcgggccaaggtcgctgagttacagccgccagccggtagagg

SEQ ID NO: 46619 - DNA, 30 bp, Homo sapiens
  chr9:131873499-131873529
  hyper
caacccaaacttgacgccccgcacaatcgt

SEQ ID NO: 46620 - DNA, 30 bp, Homo sapiens; identical to SEQ ID NO: 7061
  chr9:131938203-131938233
  hyper

SEQ ID NO: 46621 - DNA, 30 bp, Homo sapiens
  chr9:131938800-131938830
  hyper
gcagccctccctcacgtggtaggctcctcg

SEQ ID NO: 46622 - DNA, 277 bp, Homo sapiens
  chr9:131940268-131940545
  hyper
ggagctgtggatcttgcgcagggagatgctgatcaggctctgggcgtccagggcgcactccatgctcccgcggagacggcggcggagcagccgccgccgctgctgctgttaacgcttctgctgtttctgcctccagccggccgccggggcgcgccgggcaggggtaacggagtccgggtcagaggttcggctgcgctccgaaaggagccgccaccatgcgccgcgcgccacccgcgggctcgcgctccccagacggcgccaaagcaatgagtctcgg

SEQ ID NO: 46623 - DNA, 390 bp, Homo sapiens
  chr9:131940585-131940975
  hyper
cgccccacatgagaagagccaataggagctctgagagtctcctgagtgacaggcgcagcccgccccggggctactcggctggccaatcagaccaaggcggttcctttgtgctattcaaataccgaacggaccccgggcctccaacgccgctgctgcctcgaatgttctcctggggctgccgcgccgcgcgggactcggagccgccggggccgcagtctgcagcataggtcgcctggcagcggccacgttgaagcccgcggctgccctcgccttaggtcccgggagccgggggtcggctcacctgagtgctgcggcgacggctcctcccctttccgcacggctgggcctcacctgcggcaggtgcgcgccgctcatcgctcccccagcggc

SEQ ID NO: 46624 - DNA, 35 bp, Homo sapiens
  chr9:131965488-131965523
  hyper
ctctcaaacatcaccccgggcgctttaaaacgctt

SEQ ID NO: 46625 - DNA, 31 bp, Homo sapiens; identical to SEQ ID NO: 7062
  chr9:131997502-131997533
  hyper

SEQ ID NO: 46626 - DNA, 30 bp, Homo sapiens
  chr9:132020934-132020964
  hyper
cggcagcgcgggagcgagacaaaggaccgg

SEQ ID NO: 46627 - DNA, 293 bp, Homo sapiens
  chr9:132145468-132145761
  hyper
catcagccgactggccgttggcctctcaggactgtcacttggaagttccttctccaagagatggctattgccaaagtcatctgtgcagtgaccactgcagggcctgggcgctcccgggagccgcagcgcagggacagtccgtgcagacgggtggcgggggaggcgggggagggcaaaggcctccactctgcaggtagcccgggcctggtgggcgaaaggactcaaacgccagagctctctgaccctcggccgccagggttcaaggctgggcccagccgcgctttgccggggtc

SEQ ID NO: 46628 - DNA, 181 bp, Homo sapiens; identical to SEQ ID NO: 7064
  chr9:132176627-132176808
  hyper

SEQ ID NO: 46629 - DNA, 81 bp, Homo sapiens
  chr9:132200924-132201005
  hyper
ttcacgccattcaggtgatgatgttttttatttatgtgcccacctgccccactccgtagggcccctcgaggccaggactgc

SEQ ID NO: 46630 - DNA, 35 bp, Homo sapiens
  chr9:132222863-132222898
  hyper
ggcgcgggcctctgtgcgccgcgagagggaggccg

SEQ ID NO: 46631 - DNA, 415 bp, Homo sapiens
  chr9:132244498-132244913
  hyper
tcctcaggttcccccgcgctcctcccggaccccaccccgaggcagctttctcacaacgggatcctccccgggcggcgtggggacgcctcccgaccccgaggcccggcaggagagccgccaccgcggccgggtggtctccgcgtcgcatggcccctgccggcccccccgcccatggcagctacataattaattcgcccataaataactgattggggtcgcgcacgcgcccggtgtccctaggactgggatccccgttagggttaggggcgtggggggtcgggggccgcggggctgtgcgtgccggggcgcacggttttgctccgcgggcctctctcgctccctcgcgccggctttttccctttttctctttcctttttttctttcctggagcggagcccggcgccaggagtctgga

SEQ ID NO: 46632 - DNA, 357 bp, Homo sapiens
  chr9:132245128-132245485
  hyper
ggccgggcttcagagccgcagtaaatgaggcccggggcgggcgggggtggacacggcctcggggccacggcctcccccgccgagcaaggcattcctttccgctgaactgggcgcccgggcccgcgccgcgccctgcacgcctcgcgcccggcgatcgggcccagggcgggggagcagggaggcggccccagccggtcgccggcgcccccaggcgctgcttcccaggagctcggctccccgggatggaagggactgatacccagttaatgggcgtggagcctgagcccctgagggtcgtcgctaacgggggtcgctcagcagggccggcctccgctgcctgcccggggtgtctaatca

SEQ ID NO: 46633 - DNA, 57 bp, Homo sapiens
  chr9:132250697-132250754
  hyper
ggtgaagcccgctcctcgccggcgaaaagcggggccgggctccggggcctgggtccg

SEQ ID NO: 46634 - DNA, 645 bp, Homo sapiens
  chr9:132258285-132258930
  hyper
gggcggaaagggttaacgggctccgccgcattgggctgtccttcaaggggggagccagccaatgagcgcgcgccgcgatgaggtaatgccgggaccacgcggagtgggcggggctgacggggaccccgcagagctcagcgcttcttctctccccacctacccctcacctttgaccttgatgtacaccctcccctcccccaaccttacccctgcagaggcgcccgaactgaaagtcggctgcagggccgcgggcctcccttagtctgggacaggaactgagagacgtcccggcctcagtcacaccctctgggcctcagtttccctttctgcaagaagcagagtgggtgatcgctaaagaccctaccagctgtggacgtccttggatcccaggacagttttcagcccttccctgcccttggcccgaactttaacggtcccagccccggcttcccctcaggcggtgcccagtgccaggacctaggagtccctcgggccacggggagagagcctcaccggcccagccacgccctccatgtgaccccgacccatcccttgggtgtcgcacctggcgcgcccaccgaggccactaagctctgctagctgcaccagcagcaggacctgccggcgtggcggtcagaagtcaac

SEQ ID NO: 46635 - DNA, 31 bp, Homo sapiens; identical to SEQ ID NO: 7069
  chr9:132318706-132318737
  hyper

SEQ ID NO: 46636 - DNA, 78 bp, Homo sapiens; identical to SEQ ID NO: 7070
  chr9:132331031-132331109
  hyper

SEQ ID NO: 46637 - DNA, 44 bp, Homo sapiens
  chr9:132331472-132331516
  hyper
aagggccgggggctacgcggggccggggccggggccggggccgg

SEQ ID NO: 46638 - DNA, 175 bp, Homo sapiens; identical to SEQ ID NO: 7071
  chr9:132373578-132373753
  hyper

SEQ ID NO: 46639 - DNA, 100 bp, Homo sapiens; identical to SEQ ID NO: 7072
  chr9:132382254-132382354
  hyper

SEQ ID NO: 46640 - DNA, 227 bp, Homo sapiens
  chr9:132382811-132383038
  hyper
cgccaggtcctgggcccctgggcgaagtcgacgccagaacatgcttggccccgcactcagctcaccgcaccctcagcgcgcgtgggtggggggcgccggctgaggtggggagggcatagtccagccccaggccatagtgccccgggcggggcagcgcggtgcggggtgaacgccaccggcccggcggacagcgagtggcttcaggcgagagctcccagagcctctgt

SEQ ID NO: 46641 - DNA, 35 bp, Homo sapiens
  chr9:132459654-132459689
  hyper
agcagctgggcggcggcggcgcgggcagcgcgggg

SEQ ID NO: 46642 - DNA, 476 bp, Homo sapiens
  chr9:132499947-132500423
  hyper
agtaggtgctcaatactggatcgcgcccttcccgtttctctcccgagagccgccgcggcccaaaaacagaggcgtccccttaccaccagggggcagtgtttcccctctcagctccgaacgggacccggggcctcacggcgctttctggcggggcctggggtccctgcgctgctggagaacccccggcacggcaggtcccatccgttagaggggctccggcctcggggtgctgggagggggcgttcagggaaagtgaggccgtgcagcacaggggctccgcccagggactttggcagccccgactttcagacctggccccgcacttccgggcgctggcctcctggagtctccgtgtcctggttgacggagctgataatggcagcccgcgggcggggcagccccgcagggaggggtgacctggccggggcaggatttgggtgctcctggctcacctcgccagatgccaccttacccgc

SEQ ID NO: 46643 - DNA, 642 bp, Homo sapiens
  chr9:132647802-132648444
  hyper
ccgggtctcagagggcgctggcaacacagatccctgcctcccctatcgggaaagcgttttaggaccagggaaaaggaggcctcccccaggcgagtgcgcagagccagggaacccgtctggatggtggctctttcccaccatccttctctggcagcagcagttcaaagtggagcttccaggctgtcccatacatttcacgatttctgagtctttcgcttcaatttaaaaaaagctgggggcacgaccgaatcctgcctctgtccaccgccatctcgttcctcatcgcagggggcccttcttgctccctccactgctgcgctctgccgtctgctcccgccaggggtccccaccacctctgcggacggaggagccgcctcccaggcccgggcgtgcccagggcgggtggagggcgtggggcgggccggtatttcctgacccgctggaggagccggccccacaggcttgtggcctccccggagccggtgagtcaggaacttcctacttcaagaggcttccccagtgcagcagaaaacaaactagtcgcccccaatgctcccgacctctgtgatgtccacacccgcggaaatgggggccccaaaccagcaggctctgttctaggcttctcagcgctggtgcggctct

SEQ ID NO: 46644 - DNA, 378 bp, Homo sapiens; identical to SEQ ID NO: 7074
  chr9:132804283-132804661
  hyper

SEQ ID NO: 46645 - DNA, 285 bp, Homo sapiens; identical to SEQ ID NO: 7075
  chr9:132804693-132804978
  hyper

SEQ ID NO: 46646 - DNA, 920 bp, Homo sapiens
  chr9:132805028-132805948
  hyper
cgaaggacaagccggcccgcacctcctgctcgggccaaggcggacgaggggcattggaaccccgcctcctccccaggccgcgaggaccccgaccagcgcgccctcgcctccgcccagcagcgcggcccgcgccccctccccaggccgcggggaaacgcagcgcgcgccccgcatctgcccgcgggcccagcccctcactcacccagagctcggtgccccagctcatggtgcaggggacgcgaaggggcgctccgcgcggcgggcgcggctctctggtccccctccccggcgatccctttgccccccgagatccccgcgacggcggaaagcccggagtccgcgcggcctcctccggctcgcagctcctcgcccggggtctcctcggcggctcctcctccccgccgctccacagcaaaatggcccgaggaagcagcagccgcggccgccgcagcgcccgcccgccctacacccggagagcgggggaggggcgggaggggaggggcggggccggtctgacagctcgcgcacgcgcgcccgccccaccccggcccggccccctcccccgggctcccccggccgggtccgcgtcgccctggggtccggaaggacgcggagggaggtgtgagggacggcgggacccggatccctaggactccccctgccaatctggtaatgacttcttagtgaccactgtctgctcgcagtactagcgcttgccttggaacgcggcaggccctgggatcaccgatgctccgccgcggtctgagatcgctcccctgcgcgtatcgccgctctggatttaaggacaatactttcccctggcagccatgcgcgccgagcagagtcagcccgggaggctcttttcccaccgcccgagggaagcccgagagtcccgcaggctggcgcggtgggagtggggc

SEQ ID NO: 46647 - DNA, 31 bp, Homo sapiens; identical to SEQ ID NO: 7077
  chr9:132809114-132809145
  hyper

SEQ ID NO: 46648 - DNA, 136 bp, Homo sapiens
  chr9:133308610-133308746
  hyper
gagaaggacgggcagcgcgtgggcggaactgcaggggctggcagggaggtctgagttacgcggatgggccacgctccgaccgcacccccgagtccgcctgtccgtgtgtctgtgccgcccgcaggacgtgcttccg

SEQ ID NO: 46649 - DNA, 432 bp, Homo sapiens
  chr9:133308769-133309201
  hyper
cgggcggcccctctacgctgcagtaccggctgctgccgctgcccctgggcgtgcgcgcccaccacgacgtggcccgcctcaccgccttctccgaggtcggcgtccccgccaaccgcaccgagctcagcatgctggagcccgacccccgcagccccttcgcgctgcgtccgctgcgcgcgggccttggcgcggtctacacccgtcgcgcgctcacccgcgccggcctctaccggctcaccgtgcgtgctgcggcaccgcgccaccaaagcgtcttcgtcttgctcatcgccgtgtccccctacccctactaaacgggagagggcattggcggccgccctggcgtgacccccgaggaaggggtcgaggagaagcttggtccacgccacctgctgtggcaagcggagcgtcatcgtctcccgccccgtgcgtcag

SEQ ID NO: 46650 - DNA, 31 bp, Homo sapiens
  chr9:133319784-133319815
  hyper
ttttctcatccttactcggctaccagaggct

SEQ ID NO: 46651 - DNA, 83 bp, Homo sapiens
  chr9:133320713-133320796
  hyper
ggcttcctctgtgtcgtgaagcccccacatggagacctggggagtccggagcgtgtgggggggctcccgattctctctccctc

SEQ ID NO: 46652 - DNA, 227 bp, Homo sapiens; identical to SEQ ID NO: 7079
  chr9:133535706-133535933
  hyper

SEQ ID NO: 46653 - DNA, 148 bp, Homo sapiens; identical to SEQ ID NO: 7080
  chr9:133535971-133536119
  hyper

SEQ ID NO: 46654 - DNA, 341 bp, Homo sapiens; identical to SEQ ID NO: 7081
  chr9:133536149-133536490
  hyper

SEQ ID NO: 46655 - DNA, 100 bp, Homo sapiens; identical to SEQ ID NO: 7082
  chr9:133536515-133536615
  hyper

SEQ ID NO: 46656 - DNA, 203 bp, Homo sapiens
  chr9:133536699-133536902
  hyper
cggagcgggaagcggggccattcactcctggcccggcccctcgggaagccgcgccgaagaaagggggccgaggcctattcaagtcctacgagccgcccacaatggaccgatatactgagggcctctctattaacgcccatgaatattaaagagatcgccaagtggcggccagcgggcgaggggggcgacggagcctgagagct

SEQ ID NO: 46657 - DNA, 469 bp, Homo sapiens; identical to SEQ ID NO: 7084
  chr9:133537658-133538127
  hyper

SEQ ID NO: 46658 - DNA, 30 bp, Homo sapiens; identical to SEQ ID NO: 7085
  chr9:133538377-133538407
  hyper

SEQ ID NO: 46659 - DNA, 30 bp, Homo sapiens
  chr9:133538878-133538908
  hyper
ggccccgcaagggccgggagcctggccttc

SEQ ID NO: 46660 - DNA, 30 bp, Homo sapiens
  chr9:133539568-133539598
  hyper
agtctgtcctccgacgtcagggggtcatta

SEQ ID NO: 46661 - DNA, 327 bp, Homo sapiens
  chr9:133541053-133541380
  hyper
tttagaattagcaatttctttcgaatggagccgaatgaatgcgatcactttaacagcgtgacaaattgcccgccgcgccgcaatggacaccgtttaacccccccctttcagccggcccgctcgccgggtattttcccaggtagcttagaggggaaccttgtaagacatggaggccgcccttgtgcgcctcgccgcttccagccctgccgcagatgcccgacaggggaaccctcggggagctgggggccgccgcggctcctccccgcccagagagatgacatcggggtttgtctgagcccgggcgccgccctccctggcaccccaggg

SEQ ID NO: 46662 - DNA, 808 bp, Homo sapiens
  chr9:133541621-133542429
  hyper
cagtttccctgtgcataaaaccgctcgctgccgttggctcattaattcttaaacttatccggggcagaggatggaagaagttgcgaatgctttgagaattcgcggagagactaaaaacccacttctaaaaatgatccccaacgcaccactcgctttccagggcacggagggtctccaggttgcaaacagaggagaggtcgttgagcctccgcacatccgacttcctccacacccgggtggcttctctggatttggggccgacttgggtttggctggtctgggcaggaccgaagccggggtcccggcggggaaggaagggccgggcctcggctgcctcgggctctgaccggttttcctggccccgccgccgcagaagtgcagaagctgtccagcctggtgctgcctgcggaggtgatcatcgctcagagctccatccctggcgagggcctcggcatcttctccaagacgtggatcaaggcgggaaccgagatgggccccttcaccggccgcgtgatcgccccggagcacgtggacatctgcaagaacaacaacctcatgtgggaggtacgcgcgggctggggcagaggggcgcaagggccggcgaggggcgctggtcgcgggtaggactcgggcgtccggccgtcgccgcttccacccgggctgagagcggcggacactcctggcctggacgccccctgagccgggactctaagccgcccgagcctggagctcaccccgcctctaggctcctcccaacccgtgccgaaaatccgaccctccttcccccggacaccctggcagagcaaga

SEQ ID NO: 46663 - DNA, 30 bp, Homo sapiens
  chr9:133556826-133556856
  hyper
tgcacacgggcgagcgcccctacaagtgcc

SEQ ID NO: 46664 - DNA, 57 bp, Homo sapiens
  chr9:133569194-133569251
  hyper
ggcttccagtggctcgcaagcctcttagcgagagactgggccgcgacactaagaaac

SEQ ID NO: 46665 - DNA, 30 bp, Homo sapiens
  chr9:133588786-133588816
  hyper
agcttgggacaccccgttttctgaggcgtg

SEQ ID NO: 46666 - DNA, 30 bp, Homo sapiens; identical to SEQ ID NO: 7088
  chr9:133660745-133660775
  hyper

SEQ ID NO: 46667 - DNA, 1363 bp, Homo sapiens
  chr9:133710034-133711397
  hyper
ctctcactctgaactcacacccgtctgttcgcagcctgacctcatatcctggtctggatgtgcggcctcaccggggtgtcgtgcgcacgtgtggttgtcctgtgggtgccagctctgacttcctccccagacacccactgcctcagccttaatcacaggacgcgcgttgagtagaaatgagaccagttagtattggtaactgcagaggaatatgcattttcaccagcgttctcgggtcagagggtttgcctggcaccgcgtactgggaaactcgccaaaagcggtgcaggttggagacgccccaggccgcggtggagttgcgcgcggcttctaaagtggagtggagcaggcctgcaccctccccgccggggctgggacggcgcttccaggcggagaaagacctccgcgggccgcgcgcggccttccccctgcgaggatcgccattggcccgggttggctttggaaagcggcggtggctttgggccgggctcggcctcgggaacgccaggggcccctgggtgcggacgggcgcggccaggagggggttaaggcgcaggcggcggcggggcgggggcgggcctggcgggcgccctctccgggccctttgttaacaggcgcgtcccggccaggcggagacgcggccgcggccatgggcgggcgcgggcgcgcggggcggcggtgagggcggctggcggggccgggggcgccgggggggcgcgcgggccgagccgggcctgagccgggcccgcggaccgagctgggagaggggttccggcccccgacgtgctggcgcgggaaaatgttggagatctgcctgaagctggtgggctgcaaatccaagaaggggctgtcctcgtcctccagctgttatctggaaggtaagcccgggccgcacgggttgggctgagtagccgcgcgccctcccgctgctgctgggcccttcctaggcctcgccgcccgcgcgctcccgcctgcgccctccccgggtcttgtcttttttttctttcttccctcttctcttctcttctcttcagttctcttatattctgtctctctttctttctctctgtgtctgtctcttttctcttctcttgtctctctctttttctctctctctgtctctttctctttctcgcgatggcccctaggcgccgccggcggagcgtggcccccagccccggcaccagccccggtagagccacgccggatggtgacggcggcgtccggggccccacagtgcgggctcccccgaaaaagtttgagaaagccaactcgccaggccttaacatccctgggatcccacgttgtggaatttccaccgttaattgggactgtgtgttaaaaagatcgacccgtgtttgtg

SEQ ID NO: 46668 - DNA, 30 bp, Homo sapiens
  chr9:133813796-133813826
  hyper
ggcctccggagcctcgaaggggtgcgcccc

SEQ ID NO: 46669 - DNA, 30 bp, Homo sapiens
  chr9:133884369-133884399
  hyper
ctggggcagactcccgagccgcgcactgcc

SEQ ID NO: 46670 - DNA, 31 bp, Homo sapiens
  chr9:133971401-133971432
  hyper
tgaaatgactggtgtacggtgcaaagtgcct

SEQ ID NO: 46671 - DNA, 6 bp, Homo sapiens
  chr9:133972628-133972634
  hyper
tcattt

SEQ ID NO: 46672 - DNA, 623 bp, Homo sapiens
  chr9:134151923-134152546
  hyper
aaataaggaaggctctgtccccgcgcggccgcgccaccctcgcggcagaagcctgacttcctgccctccggccttccgcacgcgctccctccgggccccgcacccgcacccgcccggcgcggtcgaatcaattgcagagcagtttgtgttcacccggccgaggtcccggcgccctcggggcgagcgccgacccgcggcttccaggaggcgagctcagggctccggccgctcgccggtgacgggggagcgcggcgcgggtccccgtcggcgcccactcgcgggcgcgggccggacgtccccacgcaggggcgccgcgtcccttcgccgctgtcgctgccggccgccgtgcagggtcccggggctgcgctccggccgccgccgcctgcttcgccgcggccgccgaggacctggtgggaggtggaagggacagcgcgtcaaggccagcctcaaagttaagccgaactttgctgcggggggcgcgcgggggcggcgacgcgtgtgcgctgggcgcgggctgcggagctgacggcgcagctctgggcggtctccccggaggcggtggcccccgccccccgcgcccgccccgtcagtggcggccgcacgaccgcgcgcaccagcgaata

SEQ ID NO: 46673 - DNA, 173 bp, Homo sapiens; identical to SEQ ID NO: 7092
  chr9:134158022-134158195
  hyper

SEQ ID NO: 46674 - DNA, 47 bp, Homo sapiens; identical to SEQ ID NO: 7093
  chr9:134158229-134158276
  hyper

SEQ ID NO: 46675 - DNA, 56 bp, Homo sapiens
  chr9:134307437-134307493
  hyper
cccaaagtgctgcaattacacgtgtgagccaccacgcctggtgtgttatcagcctt

SEQ ID NO: 46676 - DNA, 30 bp, Homo sapiens
  chr9:134378113-134378143
  hyper
gtgggagcccactgcgctttttaaaatctg

SEQ ID NO: 46677 - DNA, 30 bp, Homo sapiens
  chr9:134378705-134378735
  hyper
gacggagctggggccgacgcagcctcggga

SEQ ID NO: 46678 - DNA, 30 bp, Homo sapiens; identical to SEQ ID NO: 7094
  chr9:134422093-134422123
  hyper

SEQ ID NO: 46679 - DNA, 81 bp, Homo sapiens
  chr9:134989615-134989696
  hyper
agcatccgagctccacgagggccgacttaacccagcccgccacagtgccctcagcaccatggacagcgcccagcagagcgc

SEQ ID NO: 46680 - DNA, 595 bp, Homo sapiens; identical to SEQ ID NO: 7095
  chr9:135036692-135037287
  hyper

SEQ ID NO: 46681 - DNA, 199 bp, Homo sapiens
  chr9:135037333-135037532
  hyper
cgctcagcccgggcgggcgatgcgggcggcgcgggcggccccctcccccggcccgcgtctccgggacggctgcgggcggcccccccggcggccggagggctccctggccccgatctgacggcggcggcggcggcggccacagcggcgggagcggcgcggggaaggagcagcggctcgcagccctcggcccgcgccccca

SEQ ID NO: 46682 - DNA, 31 bp, Homo sapiens; identical to SEQ ID NO: 7097
  chr9:135077790-135077821
  hyper

SEQ ID NO: 46683 - DNA, 30 bp, Homo sapiens
  chr9:135116373-135116403
  hyper
gcgggccccaagtgcgacgactgcctcccc

SEQ ID NO: 46684 - DNA, 56 bp, Homo sapiens
  chr9:135117913-135117969
  hyper
gcggcggcggaccccgacctccagttgcctacaattccagtcgctgacttggtcct

SEQ ID NO: 46685 - DNA, 13 bp, Homo sapiens
  chr9:135285851-135285864
  hyper
aggtgagcacccc

SEQ ID NO: 46686 - DNA, 1 bp, Homo sapiens
  chr9:135285880-135285881
  hyper
c

SEQ ID NO: 46687 - DNA, 770 bp, Homo sapiens; identical to SEQ ID NO: 7099
  chr9:135286198-135286968
  hyper

SEQ ID NO: 46688 - DNA, 162 bp, Homo sapiens
  chr9:135395348-135395510
  hyper
ggactaacgaacgagtgaacgtagagttgagatctcattcatgaggtgcactgcccttctgctgtccccttcctccccctgaaatgtccttgggccctcaaatcctgtaccattccccctcccccaggttaatccactctgctacaccgcaacagtgtctgg

SEQ ID NO: 46689 - DNA, 30 bp, Homo sapiens
  chr9:135421704-135421734
  hyper
cacgtgtgaagccccgggagggcctttgtc

SEQ ID NO: 46690 - DNA, 30 bp, Homo sapiens; identical to SEQ ID NO: 7100
  chr9:135456387-135456417
  hyper

SEQ ID NO: 46691 - DNA, 30 bp, Homo sapiens
  chr9:135457324-135457354
  hyper
gcggcttgcggagccgtgacatcaccccca

SEQ ID NO: 46692 - DNA, 30 bp, Homo sapiens
  chr9:135460713-135460743
  hyper
accctgagccagtccgtggagcatttaagc

SEQ ID NO: 46693 - DNA, 163 bp, Homo sapiens
  chr9:135461505-135461668
  hyper
gatgccaggccctccttgcagcgaagcgctgccttttcagttgaaaagtctcgatccctaacggctcaattaaccggattattgtttcctacagagagaaatcaccttgcattcagctgaaccccgtcactgcaaacgccacgcacaatgaaactccaccata

SEQ ID NO: 46694 - DNA, 238 bp, Homo sapiens; identical to SEQ ID NO: 7101
  chr9:135462647-135462885
  hyper

SEQ ID NO: 46695 - DNA, 79 bp, Homo sapiens
  chr9:135465371-135465450
  hyper
agcacctgggccagcggctgagctgtacataccgtgtgcaaagtgtatatgaagttatttattcgtgacccatgagccc

SEQ ID NO: 46696 - DNA, 739 bp, Homo sapiens; identical to SEQ ID NO: 7103
  chr9:135644984-135645723
  hyper

SEQ ID NO: 46697 - DNA, 51 bp, Homo sapiens; identical to SEQ ID NO: 7104
  chr9:135906505-135906556
  hyper

SEQ ID NO: 46698 - DNA, 30 bp, Homo sapiens
  chr9:136024326-136024356
  hyper
ggctggggacggcgcgcactcacctggcaa

SEQ ID NO: 46699 - DNA, 30 bp, Homo sapiens
  chr9:136137090-136137120
  hyper
agggagtgtttccaggccgtgtccagagat

SEQ ID NO: 46700 - DNA, 30 bp, Homo sapiens
  chr9:136149213-136149243
  hyper
tccagctgtaccttttatgtgcggtttatt

SEQ ID NO: 46701 - DNA, 30 bp, Homo sapiens
  chr9:136374549-136374579
  hyper
ttcccggcgtccagcgtgcttgccctaact

SEQ ID NO: 46702 - DNA, 627 bp, Homo sapiens
  chr9:136399586-136400213
  hyper
tgtggcccccagttctggacccgggaagaaggcctccctgctcgccgctcctgggccgccgccgccggcagcagccaacaggcagctgggccggcctggccgggctccagaggcgcagagcgggttaaagtgtgcgccaggccggccggcgcgggcgggggagcggcctggtgggaagtgtgagtgttcctccccgtctgcctgacagctataaaggcggccgccggcgcagagccgccactgggctgcgcccctcccgggaaccccctctcttggatgctctttgaagtgggagagggaggcggcgcgggggaggaggggaaggggagagggaggccgggccgcagcctctgcactcacgccgcccccgcacgcacagcgcacctggcgccgtctgccctccgcagcgctcgcccctttctctgggaggacaacctgctgacccgaagccaggtaggccacctcgtccccgtccccctcacgttgcagcgtccaccaggccagcccactgctcagagtggggctgggggtaggagcaccccgcgccctctggagccgttacataacgtggggaggcttgtggggaggggtcgggccgcagagcacggggcagggtggcctcccagc

SEQ ID NO: 46703 - DNA, 56 bp, Homo sapiens
  chr9:136474535-136474591
  hyper
ctggcggggagcgcgcgtcaccggcccgcgcgcgcagtcgtcgggggatgccggga

SEQ ID NO: 46704 - DNA, 44 bp, Homo sapiens
  chr9:136474724-136474768
  hyper
cggggcgttccggcttccacaacgttgggatctggagtcaggcc

SEQ ID NO: 46705 - DNA, 30 bp, Homo sapiens
  chr9:136658239-136658269
  hyper
ggccacccccactccggcgcctgcctgccg

SEQ ID NO: 46706 - DNA, 116 bp, Homo sapiens
  chr9:136856334-136856450
  hyper
tcccggtaaggattccgcgacccccggagaacaggacggaagcctcgattctctcaagtcttagccaagttccctcttaagaggccaagaaaagcagcttcgttcggctgggcagg

SEQ ID NO: 46707 - DNA, 31 bp, Homo sapiens
  chr9:136856910-136856941
  hyper
tcccccatcccaggccgcgcagaccgcggaa

SEQ ID NO: 46708 - DNA, 30 bp, Homo sapiens; identical to SEQ ID NO: 7108
  chr9:136857229-136857259
  hyper

SEQ ID NO: 46709 - DNA, 30 bp, Homo sapiens
  chr9:136858665-136858695
  hyper
ctggcaacgtgtgacggtaggaggggcttc

SEQ ID NO: 46710 - DNA, 30 bp, Homo sapiens
  chr9:136891063-136891093
  hyper
gccctttcaagcgccgctggctcctgtttc

SEQ ID NO: 46711 - DNA, 166 bp, Homo sapiens; identical to SEQ ID NO: 7109
  chr9:137255488-137255654
  hyper

SEQ ID NO: 46712 - DNA, 31 bp, Homo sapiens
  chr9:137295660-137295691
  hyper
gtccccttgacattggcgaggtccccggggt

SEQ ID NO: 46713 - DNA, 520 bp, Homo sapiens
  chr9:137298989-137299509
  hyper
actcattccaggcaccgaggtccatgtgaaaggaggctttgcggtggtttctgctttgcttgcattgagcctcaaactcttcctgtcccgtgagaaggggggatgggatttggaggcctgaggaaggaaggaggggagcttcctgcgcacaagcggcggcaggggtttgcagaagtggaggctgggggctgcctggccaagcgcttaccgccctgcgcagccaggctggctggcaggctgcagcgggaagcgcctgtgggtcctcggcgctgactgcagagctgggtggaggcagcggaaccaaaactgctgtgtcactgcacgctgcagctgttgccagggtgaccgggtgagtttcccacgcttgcccgggcggcagcgtgcgggccggcgggtggggcggaggggtgtgcagagaggccagtggtgtcgtgccacccgatgcccgggggtgtccactcccctctcctgggtcacgtgaccagggcccctgccctgcggtgttgtggggtgtatgtgt

SEQ ID NO: 46714 - DNA, 31 bp, Homo sapiens
  chr9:137442506-137442537
  hyper
gccacctcccaccccacgtcttgttgacttc

SEQ ID NO: 46715 - DNA, 87 bp, Homo sapiens
  chr9:137533294-137533381
  hyper
agcatggccaggtgcgggcacctggggtgggaacagtggggggaccagggtgggcccctgggctccgaggccgccccaggcccgccc

SEQ ID NO: 46716 - DNA, 354 bp, Homo sapiens
  chr9:137533612-137533966
  hyper
aaaagggggaaaaaagtgctccgcgccgaaggcgaggtccgcactctccgtccccgcggctggcgcaggacctcactcgagcggagcgcccacggggagcgggtcgcggggcggcggcggcgaggaggaggcgagaaggagttggaggaggaggaggaggaggcgagggcgagctagcccagcggggtcccggccgccccgcgggccaaagtcgagccctcccgcccgtgggcgagcgcgccagccgccccttccagaacagccgccgccacaaagaagaacggggggtgccgaggtccccatgacctcctaaagtggtgcggtccctgctgagtgcgctgcccgggccgtgac

SEQ ID NO: 46717 - DNA, 388 bp, Homo sapiens
  chr9:137534065-137534453
  hyper
cgcgctccgcccgggcgccccgctgctgcccccgctgctgctgctgctgctgtgggcgccgcctccgagccgcgcaggtaagggcgccccggggcgcggggctgcgggatggggcgcgcgcagcccgggcgccgctgtcatccccgggcgccttcgcccgcagaacttttcttccttggcctgtggaatgcacgggccaagaccacgaatgccatttgctgggggcccccccgagatgacgacacgcagacacaatgcccgcgggcgcgccgccgccccctccccagacgggcgggtcgggtggggctgtcgcgcgagccgaggaaggaccgagggctggatcagcaggaggggttgtccacgaggcgggcaaacttttgtcccaaaa

SEQ ID NO: 46718 - DNA, 31 bp, Homo sapiens; identical to SEQ ID NO: 7113
  chr9:137580399-137580430
  hyper

SEQ ID NO: 46719 - DNA, 30 bp, Homo sapiens; identical to SEQ ID NO: 7114
  chr9:137835238-137835268
  hyper

SEQ ID NO: 46720 - DNA, 131 bp, Homo sapiens
  chr9:137967232-137967363
  hyper
tccgcagggcgcgcctctctccgccaatgccaggcgcgcgggggagccattaggaggcgaggagagaggagggcgcagctcccgcccagcccagccctgcccagccctgcccggaggcagacgcgccggaa

SEQ ID NO: 46721 - DNA, 178 bp, Homo sapiens
  chr9:137967472-137967650
  hyper
ggagccagcggagccggggccagagccggagcgcgtccgcgtccacgcagccgccggccggccagcacccagggccctgcatgccaggtcgttggaggtggcagcgagacatgcacccggcccggaagctcctcagcctcctcttcctcatcctgatgggcactgaactcactcaagt

SEQ ID NO: 46722 - DNA, 418 bp, Homo sapiens
  chr9:137980454-137980872
  hyper
cagactggccggaccgggctgggagtggggccccagccggtgggctccggagctcctgcccgcgcctgcattcccaaagtcccaaggcgccctttcctccccagtccataggagggtttgttccttctcctccgaggacggtgccgaggggcttgggtggggcccctgggagcctgcccttgggcgctcaccccctcgcctttgccttcgtcttctgcgcgcacccctccctcctggcctctgaaattgaaatcgcgtctccctctcgagcctagcgggaggggaaccgtggccggggctgcttctgggcagagctgacttagatggctgagcgaggctgagctgaaaccgccacccggagggccgcgcggggaaggggccgctgccgggaaggcgcgccccagaccactggcccttt

SEQ ID NO: 46723 - DNA, 42 bp, Homo sapiens; identical to SEQ ID NO: 7117
  chr9:138024135-138024177
  hyper

SEQ ID NO: 46724 - DNA, 31 bp, Homo sapiens; identical to SEQ ID NO: 7118
  chr9:138120293-138120324
  hyper

SEQ ID NO: 46725 - DNA, 31 bp, Homo sapiens; identical to SEQ ID NO: 7119
  chr9:138169316-138169347
  hyper

SEQ ID NO: 46726 - DNA, 94 bp, Homo sapiens
  chr9:138372194-138372288
  hyper
gccggcctggagactgcggttcacgccctgcgccaggcggagcttccgggagggtggccgctctcccgggccccaagctcgctagtcctcggat

SEQ ID NO: 46727 - DNA, 30 bp, Homo sapiens
  chr9:138392733-138392763
  hyper
acgcggaggggacccgttagggacgcggag

SEQ ID NO: 46728 - DNA, 88 bp, Homo sapiens
  chr9:138606160-138606248
  hyper
gccaggccccggggccgctttggagggagccccgccccctgcccctgcgcagcccccgccctagccccagcccggcgcagccggtccc

SEQ ID NO: 46729 - DNA, 250 bp, Homo sapiens
  chr9:138606523-138606773
  hyper
gggacctgctgctgggcgacccgtccttccagaacgacgacaggtagggaccgggcgcggggtgggggctggggtcgccgtcccggcgccgccgcacgcccggagctgtccgcggtgctgacggccggtcccgcgcgcccccgcagccgccggcgcccttcaacttttcccggcttctggggacgcagaagtttcggagggggtgcgggcagggggaagcatcttctcgggagggggtctccggaggagg

SEQ ID NO: 46730 - DNA, 23 bp, Homo sapiens
  chr9:138606820-138606843
  hyper
cgcggaggcggagggcggcctgg

SEQ ID NO: 46731 - DNA, 31 bp, Homo sapiens; identical to SEQ ID NO: 7120
  chr9:138613913-138613944
  hyper

SEQ ID NO: 46732 - DNA, 93 bp, Homo sapiens; identical to SEQ ID NO: 7121
  chr9:138800245-138800338
  hyper

SEQ ID NO: 46733 - DNA, 13 bp, Homo sapiens
  chr9:138852869-138852882
  hyper
cgtgcttgaggca

SEQ ID NO: 46734 - DNA, 986 bp, Homo sapiens; identical to SEQ ID NO: 7122
  chr9:138986170-138987156
  hyper

SEQ ID NO: 46735 - DNA, 560 bp, Homo sapiens
  chr9:138987167-138987727
  hyper
cgggggcggggcggcggcgggggaggtgcccgcgggccgttaaagggacagcgcgccggccgcgcgcgcgcgcgcactggcagccaggtgggctcccggggtcggggctggggtccgggggccgggagggtccccagtgggggccggcggggcgtggggaaccccgagcgctggggaggggaggcggcagctcctcgcccctcgcgcgtcctccttccggagctgccggcggtcgaccctgcgcgggacacccggcgggagccggacgccgcggcgcagaggacggagctcggcggccgggtcgggaaaggacctggagcgccgccctccgccctccccgggccccggcctcggccggactcgctaagcccgggagagcccccgggcccccctaccccgcccccggcgcgcgccctgcccgcggcagtcgcgtccgcacggtgcagcctccgggatccgggcgggggaagtgcgcgcatccgcagccgccctggacgctcaggcgggccgtgaaagacgaggatacgggagcgcccttgggcgaacgtctgcggggctcc

SEQ ID NO: 46736 - DNA, 41 bp, Homo sapiens; identical to SEQ ID NO: 7123
  chr9:139001728-139001769
  hyper

SEQ ID NO: 46737 - DNA, 91 bp, Homo sapiens; identical to SEQ ID NO: 7124
  chr9:139024429-139024520
  hyper

SEQ ID NO: 46738 - DNA, 138 bp, Homo sapiens
  chr9:139024749-139024887
  hyper
gctgcagagcgcggagcccgggagctcgcaccgcctgttcgtggggtccctggggtgcaggggtggaggacataggagtgtgggggtcgtgggcagacccaggcgggacgctgtgccagtgccgccccgaaggcccag

SEQ ID NO: 46739 - DNA, 30 bp, Homo sapiens
  chr9:139025696-139025726
  hyper
acagcgcggggtcccggttccaccaggatg

SEQ ID NO: 46740 - DNA, 31 bp, Homo sapiens
  chr9:139029042-139029073
  hyper
ccagggctgtttactgcggggcctggccctc

SEQ ID NO: 46741 - DNA, 645 bp, Homo sapiens
  chr9:139084705-139085350
  hyper
cggctccctgcaccccgggctgcgcagagccctcgccctccgggttccctctgccagcgacgccagcagagccgggcaggtcccatctcggggtctccccgcgcccggacgacccctctcccactgcggccccggccctgcctcacccgccgccccaccagggtccgagaccgggagaccccagccgcggggggggggggacatcagccttcgacctgcccccgcacctcccgctccgcggggagactgggcgccaggaaccccgaattcggggctgacaacccgcaggcgcgcggctaaagcttccaccgtccgcgagaaggcgtctccaccctggaaggaagggggctcggacccagggaggatgaggggtccgccttctccttcccctcacctcgctgcagcccagagcccgcagacagccccgcggcccaaggtctctctccgcccgaggtctgcagctctggctgggcgtcccccggcctggcgggggtccgggtgggggccgcggcccgaagtctgattctgggttcgccctcgcgggtacggagcaggagccggaggaggtcggagcccgcgtttctgtccctggggcgcggggaggtcacagggctccccccaggcccgcgcggggcggaaccgggt

SEQ ID NO: 46742 - DNA, 455 bp, Homo sapiens
  chr9:139085372-139085827
  hyper
cgctccgatcgggaaccggaggccggcgaggtcacgcagacgcgctctccagggcaccgcgggtctcccatcgccgaggccgcctccgcaggccccgctcccctccccgcggcggccagggcggtgtcgggggcggccacgggctccgggattatcgacgcgccgccagctggagcgggcgcgggcggggtccccgcgggaacagtcggcactttattaacctgtcagcgcctaaaaggtcccgggcggcctgggggaggggccggaggccggggcggggtgggggcgcggctgggggatttgcgccccctcctcggggctgccccccgccagcccgcgctgcaccccggcggccgcgccccctccctaaattccgccttcgacctgggcccggagccgctttccccgcgggctgcccgttgcccccggagagttcggggtcgtccctccagcgc

SEQ ID NO: 46743 - DNA, 175 bp, Homo sapiens
  chr9:139085985-139086160
  hyper
cgctcggctccagtgttgccgccattcccagtggccgtcggggcccttctcccctcccgggaccgccctggtgatccgcgcgtctctgcgcttcccaggggtgctcggtgcctccttagacacagcgtggctgccagagcctgggggtcgaaggccatgcgccacagggagggag

SEQ ID NO: 46744 - DNA, 152 bp, Homo sapiens; identical to SEQ ID NO: 7127
  chr9:139090399-139090551
  hyper

SEQ ID NO: 46745 - DNA, 155 bp, Homo sapiens; identical to SEQ ID NO: 7128
  chr9:139090586-139090741
  hyper

SEQ ID NO: 46746 - DNA, 453 bp, Homo sapiens
  chr9:139091071-139091524
  hyper
cgggcagcacccgggctggggtggagggggcgccggcggagggcgggttctgccgcgggggcgggggcggcgccttccctaaaatcgcacctccacggcgcccccgccttcagccttggctcccttctccaagcaccctgatttccccgcgggctcccctttattctaagggtgtgggtatggcccagccttcgcggccaagaatttagggcgataattccgaccaggggcgaaaagccgcacacttcggaccgaacgaagcggttcgggacgcgggtctgtccgtgactccgccgttcccggcctcggcttcctgctgcctacaccgccctagcccaggcccccttagtgagcgcttggggagagaatttccccggacgcccccctgggcgtggcctcagccccatttttttcagaccaggaaaggtgggagcgtcgtcccctcggctgacc

SEQ ID NO: 46747 - DNA, 95 bp, Homo sapiens
  chr9:139093772-139093867
  hyper
ggacagcgcctcggccgcagctcgccgccggcgcccgcgtcgggcaaaagccgccccagcccaccccgcgccgcgcccgcgaccccagccttacg

SEQ ID NO: 46748 - DNA, 178 bp, Homo sapiens
  chr9:139096723-139096901
  hyper
cctcgcgcctctgccgcccttgccgtttctgtcctcagtgtcctgctggggcttaccccgagtcccgcccaaggtgcagacggcggcggccccgggcctcgctcggtcgcgctcgagccccgtttccagcagcatcgcggccaccaggccgagtggcgcgagacgcgctcctcctagg

SEQ ID NO: 46749 - DNA, 31 bp, Homo sapiens; identical to SEQ ID NO: 7131
  chr9:139294770-139294801
  hyper

SEQ ID NO: 46750 - DNA, 59 bp, Homo sapiens; identical to SEQ ID NO: 7132
  chr9:139334258-139334317
  hyper

SEQ ID NO: 46751 - DNA, 30 bp, Homo sapiens; identical to SEQ ID NO: 7133
  chr9:139377096-139377126
  hyper

SEQ ID NO: 46752 - DNA, 30 bp, Homo sapiens
  chr9:139377435-139377465
  hyper
cccgacgctggcgacgagcacagacacctc

SEQ ID NO: 46753 - DNA, 216 bp, Homo sapiens
  chr9:139440689-139440905
  hyper
gggtcgggagcgggcgcctgggactacttctcgtttgaaagttttcagaggccaaaagtttgagccggggctgcggaaggatccggctctggcggttgccgcgctcggcgacaactggcgactgaaatttgcatgtgaataagcggaggagcccggggcggaatggggagggcgaggccgcggacagccgtgtgcaccgtgcgctgggccgggcgg

SEQ ID NO: 46754 - DNA, 105 bp, Homo sapiens; identical to SEQ ID NO: 7135
  chr9:139519835-139519940
  hyper

SEQ ID NO: 46755 - DNA, 31 bp, Homo sapiens; identical to SEQ ID NO: 7136
  chr9:139580673-139580704
  hyper

SEQ ID NO: 46756 - DNA, 196 bp, Homo sapiens; identical to SEQ ID NO: 7137
  chr9:139581074-139581270
  hyper

SEQ ID NO: 46757 - DNA, 97 bp, Homo sapiens
  chr9:139581778-139581875
  hyper
gcgccgcggccagacacggccacagctccatggcccggcccggcgcccgacggcgccgccagctcgctcccgctcccgctcccgcttctcccccgcg

SEQ ID NO: 46758 - DNA, 30 bp, Homo sapiens
  chr9:139607587-139607617
  hyper
tcagccagccgtagcgcggggaccctgccc

SEQ ID NO: 46759 - DNA, 30 bp, Homo sapiens
  chr9:139685236-139685266
  hyper
gtgggaatgaggcccggccggggggaggag

SEQ ID NO: 46760 - DNA, 29 bp, Homo sapiens
  chr9:139740986-139741015
  hyper
ggcgcgctgcgtgtacggccgcgtgggca

SEQ ID NO: 46761 - DNA, 241 bp, Homo sapiens
  chr9:139741046-139741287
  hyper
cgacagcggcccggtgcaccgcgctttctcgcgcatcgcgcgtgtcggcttcctgtcgcgcggccgcggcgtgctcttcctgggcttcccaagtccaggctcggccgacaacttcctgcgctttggcctggaggggctgctgctatcccccacctacctatcgctgcgtgagctggccacacacgcggcgcccctgggcagctacgcgcgcgagctggcggccgctgggcgcctctacgaa

SEQ ID NO: 46762 - DNA, 101 bp, Homo sapiens
  chr9:139741690-139741791
  hyper
cggaccggcgcaccggccgccccttcatgtgcatgatcatggccgcctccgagccgcgcgcgctcgactgggtggccagcgccaacctgctggacgacatc

SEQ ID NO: 46763 - DNA, 30 bp, Homo sapiens
  chr9:139742564-139742594
  hyper
ggaggtcttcaggccgatatgcaagtctcc

SEQ ID NO: 46764 - DNA, 31 bp, Homo sapiens; identical to SEQ ID NO: 7138
  chr9:139838240-139838271
  hyper

SEQ ID NO: 46765 - DNA, 41 bp, Homo sapiens
  chr9:139872822-139872863
  hyper
ctgtcctcgggaggggcgtggccagacgggggtgctgggtg

SEQ ID NO: 46766 - DNA, 30 bp, Homo sapiens
  chr9:139887202-139887232
  hyper
gatcgtctatggggcgacagacatctggga

SEQ ID NO: 46767 - DNA, 195 bp, Homo sapiens; identical to SEQ ID NO: 7139
  chr9:139923387-139923582
  hyper

SEQ ID NO: 46768 - DNA, 60 bp, Homo sapiens
  chr9:139940158-139940218
  hyper
ggcctgtttattccatcgtgggcgaggcggggcccccgccaccagcggaccaggcctgca

SEQ ID NO: 46769 - DNA, 532 bp, Homo sapiens
  chr9:139948372-139948904
  hyper
cacagcagtaggaggccggcgaggcccgcggcggccagcagcagcggcggcagcagtgaccgcaccttcccggccatgggcgggcgggcgcgcgggaggacgatgcgtggacccggagagtgcggggagccggaggcggaggcgggcggggccgcgggaccgcggggtaggggccccggggcgggacgaggggcgggaggccgggcgggcccgcccatcaccggccacgcccacgggcggacaggtttcgcctccgctcccaagcttccgccgtccggcccgcgcaggtgagagacgcgggcgcggctgagtcaccagcaccgccccccggctcccgggtctgagcccgggcgccccgcggctatggcccaccttccccttcccgcccactcagcaaggggatcccccggccgtggaggcaggagacctggcgtgggggtgggcgggcgaggctggctcggagggtcctgtgctggagagccgcgcttttcccgggcccgggaaaggaggccagactcgcttgcaggaatga

SEQ ID NO: 46770 - DNA, 31 bp, Homo sapiens; identical to SEQ ID NO: 7141
  chr9:139964409-139964440
  hyper

SEQ ID NO: 46771 - DNA, 16 bp, Homo sapiens
  chr9:139964698-139964714
  hyper
agccctccagcacccc

SEQ ID NO: 46772 - DNA, 360 bp, Homo sapiens
  chr9:139964731-139965091
  hyper
cgtcggtgccctgccagcgggactcgatctcgcgcaggtgcacgcagccgcgccgccggtcgtccaggatgtcgaacagggtgcgcaggctctgcaggaaggcgcgcggcagcccctccgtgctgggcgcgggtgcggggggaggcacgcggccccgctcggccatggcggccccggccatgggcgcccgggatcggtcccctcgtccacccgcgtgcgtcccagcgcggccccacggaggggccggcccggcgagctcagcccacggcgacaatagcgactacttttgaatggggccctcctcgcggcgtcagccctcattaacatgcgccgcggccattggccgagcccgtcccatct

SEQ ID NO: 46773 - DNA, 15 bp, Homo sapiens
  chr9:140023901-140023916
  hyper
cgcaggctgggaggg

SEQ ID NO: 46774 - DNA, 159 bp, Homo sapiens
  chr9:140024611-140024770
  hyper
agcccagggcctcacccgggcgcggcgtcgcgggggccgagggaaggaccggaccctcccgaggtcgcggacccggccggctggggcgaggctggggtggcccctaccccgagctaagctggccgcgccgcatctcaccgtcgccggggcccgagcgct

SEQ ID NO: 46775 - DNA, 132 bp, Homo sapiens
  chr9:140024786-140024918
  hyper
cgagcgagggggccaagcggccggctggacccacagtccccgcgccataggcgggtcggggctttcagactcggctccagccctcaaacctggtagccttggaggtcagcttgagatgactgcgcttcctgc

SEQ ID NO: 46776 - DNA, 74 bp, Homo sapiens
  chr9:140024956-140025030
  hyper
cggcgtccgtggccgccggaggcctgtgttctcccctgccgaacctcacgcgcggcccctccctcattttcttc

SEQ ID NO: 46777 - DNA, 58 bp, Homo sapiens
  chr9:140033432-140033490
  hyper
gcgctcacacgcacacgcgcgctccccggctcacgcgcgctccgacacacacgctcac

SEQ ID NO: 46778 - DNA, 8 bp, Homo sapiens
  chr9:140033618-140033626
  hyper
cgtccgga

SEQ ID NO: 46779 - DNA, 296 bp, Homo sapiens
  chr9:140033762-140034058
  hyper
cgcacgcttcagcgccccttccctcggccgacgtcccgggaccgccgctccgggggagacgtggcgtccgcagcccgcggggccgggcgagcgcaggacggcccggaagccccgcgggggatgcgccgagggccccgcgttcgcgccgcgcagagccaggcccgcggcccgagcccatgagcaccatgcgcctgctgacgctcgccctgctgttctcctgctccgtcgcccgtgccgcgtgcgaccccaagatcgtcaacattggcgcggtgctgagcacgcggaagcacgagcag

SEQ ID NO: 46780 - DNA, 41 bp, Homo sapiens
  chr9:140051055-140051096
  hyper
gggcctgcggagcgccgcggtgggagtgctggagtcctggc

SEQ ID NO: 46781 - DNA, 230 bp, Homo sapiens
  chr9:140051219-140051449
  hyper
cgccctgcgctacgccccagacggtgagtgctgggccttggcggggtccccgaacggggaggaccccacgggctctgagtcgcatgctcgcctaggcatcctcgggctgcagctcatcaacggcaagaacgagtcggcccacatcagcgacgccgtgggcgtggtggcccaggccgtgcacgagctcctcgagaaggagaacatcaccgacccgccgcggggctgcgtgg

SEQ ID NO: 46782 - DNA, 30 bp, Homo sapiens; identical to SEQ ID NO: 7145
  chr9:140063190-140063220
  hyper

SEQ ID NO: 46783 - DNA, 30 bp, Homo sapiens
  chr9:140095336-140095366
  hyper
tcaagtgaccctaccgattggacaacactc

SEQ ID NO: 46784 - DNA, 30 bp, Homo sapiens
  chr9:140118450-140118480
  hyper
gtggcccccacgcccgccagccagagggta

SEQ ID NO: 46785 - DNA, 99 bp, Homo sapiens; identical to SEQ ID NO: 7146
  chr9:140195120-140195219
  hyper

SEQ ID NO: 46786 - DNA, 838 bp, Homo sapiens
  chr9:140195551-140196389
  hyper
cctcggggctgctcctcggctgcagccggcatcggcgcgtcccgggcctgcgggcgggtcctgaaggcggcggcggagcgctccgagtccgccttcggctcccgccgcccgcctttcaccttcgggagaaaacattttgcgcagaggatccggtatctcgggattccgaacttgctggttgcgagactcaaatttcaaaaggggctggagcccgcgccccgcccccacccgcgaggcggcgggcaggcgagcgggtgggggccgtgggaagctgctccggcccggccgggcccggctaggccgcagggaggcgctcggccggcggggctgccggaccctggggccgggacgcacgcgccgtattcgccgtggccacgggccttctggcggggcctgcgagccgggcgcgcaccgaggtagttggcgggaaggtacagcagagacgacgcgggcgcagggccggggtccggggtcccggcgggcatcaccggccgctggccgcgtacttcgccttggtgatgagatagagcacgatgtcctggtggccaccgaacgcggcgatgtgcagcgcgctccagccgtcgcggttggccaggcggatgtcggcgccgaacttgaccagcagcttcacgagctccaggttgccgtcgatgaccgactggtgcagcgccgtctggccctcgggcccgaacgagttcacgttgaactcgcagttggtcatgttctgcagcagcgactgcagctcctgcgtgttgcccttgcgcacagcctcctggaagatgcgctgcgtctgcggcgcggagcaggtggacagctcggcctggctcatgctgccgcc

SEQ ID NO: 46787 - DNA, 427 bp, Homo sapiens
  chr9:140196990-140197417
  hyper
cccccgggcgctccgcgtctctttgcggtcgtcccgccccttctccctccggccacccggggaattccaagctccctcagcagccagacccaggccttgcccggtacccgagcgcgaccgccaggtggccccgagggcggcctctcccgggcagggggttcgcgggcatctcaggcccgtggcgaaggagagacccctctgagcggagaggcgcgcggcgaccccggccagcccgcgcctccgggctcaccgtccacgcgggtggcaactccaggccctgacgtggggccttcagccacgcgggtccttcccgcgcgcgggcagcctcatggccgccggctcagcctatgtgtgccccaaccgtactgatgcgaggggcctccggccggccaccgcggcttctatcgcctggcggtgaagggggttc

SEQ ID NO: 46788 - DNA, 9 bp, Homo sapiens
  chr9:140210899-140210908
  hyper
ccgcgcgcc

SEQ ID NO: 46789 - DNA, 30 bp, Homo sapiens; identical to SEQ ID NO: 7150
  chr9:140238902-140238932
  hyper

SEQ ID NO: 46790 - DNA, 674 bp, Homo sapiens
  chr9:140445801-140446475
  hyper
gggagcacagacagcccgggccctcccggctgcaggtcccgggctttccccgcgcggttgccggctccgcccagaggagccgcgcccggcggaggggtaagaaaggcagggtcgcggcgtcaacgcggcggccgtctcgagtccagggcccgcgtcctccccgacctcccgacgccacctcacggcctcagggggactgggctcccgggaaaccgccggccacctggcggacgaacacaggcagtggcgggcagtggagacgccagggaccaccgcgctgagagcgatcactcatccgccagccccgccccgcgagccccgccccgcgagccccgccccgcgagccccgccccgcgagccccgccccgcgagccccgccccgcgagccccgcaccgccggccccgcaccgccagccccgcgagccccgccccgccccgcgcgctcctcgcattggccgagtccccgcggccacaccccctaccagattggggccgctattggacgcggcggccgcggccaatcggagccgctcttgctgcgacgcagcggtcggaagcggagcaaggtcgaggccgggttggcgccggagccggggccgcttggagctcgtgtggggtctccggtccaggtgagtctgtcggattggggcgggcgccgcgcgcggccaggggcg

SEQ ID NO: 46791 - DNA, 123 bp, Homo sapiens
  chr9:140473436-140473559
  hyper
ggaagccaggctcccacgccccctgtcggccggctgaccgcggcgggcttcaggcgtcagacgcgctgctccctgcggggccgtagagaccgaaggcttcgggaaatccgctcctccacaaag

SEQ ID NO: 46792 - DNA, 30 bp, Homo sapiens
  chr9:140500665-140500695
  hyper
gcgtgcggtcccggcggggtgcagacacct

SEQ ID NO: 46793 - DNA, 622 bp, Homo sapiens
  chr9:140703837-140704459
  hyper
gagccagtccctgggatgtggcggcggccctgcgccctcggagggaggcggggcagagctcaaatggaagcagagcctgcggggtggagaccgcacccctgcaggggtctgccttgggccccgagcctcctcagccgccgcagcaaagcggtcagtcaggcggggcttggtttatggcatctgggaagatcgctgaccattcccgaggggaaggaggctgcagccggcgctcccagacaccagcagagcagaacacacttcaggaacgtgaaacgctcacgtgcttttaatccagcaatcctgcctctgaggatgcatccttgagaaataatgtagaaaatgaaaagcactaaaatatttgctggcattgtattccagaaatataccaacagacataaaccaagtgttcagtaaaggaaaggtccggaagctgagtgactgtgggggaagggtccggaggcggttccgatgccgccctgtgtggaccgtcggtgatgggtccggaggcggttccgatgccgccctgtgtggaccgtcggtgatgggtccggaggtggttccgatgccgccctgtgtggaccgtcggtgatgggtccggaggcggttccgatgctgcccctcg

SEQ ID NO: 46794 - DNA, 30 bp, Homo sapiens
  chr9:140704853-140704883
  hyper
gcgtgttcctcattccgtttatcgctgttt

SEQ ID NO: 46795 - DNA, 544 bp, Homo sapiens
  chr9:140772859-140773403
  hyper
cggggcggagcccctctgctccggactcgtccctccgcacgccgggtcctggggatcctggtcggtgcacagtgcgcggctagcctggagggcaccgagggcgaagccgcgtccgtgcaggtgcgagcgctgtggggacgcggccgtgcgcgcgcctggctgcaggtgcctgcgtgtgcgggctgagctggagcctggcgctgcgcgtgcgtgcgctcgcgatgcgggctacatgcatgttcacgtgcctgtgtaggtacatgtggctgcgtgtctggagggagcagcgtgcgcctgcgcggggtctccctccagcctcgcctgggggcgctcggccccctcccctcggggccctggagtcgggcggagccgggccggaggcgctgtccgcggtgctgacggccgcccgggtgtgccgaggggctggcggcccagactgcggaggccccgcctcgcggccgcccctagggatgggggcagggagtgagggagaccaggccgcttccgccaggagaggggctccggacccagttgtctcagcccc

SEQ ID NO: 46796 - DNA, 30 bp, Homo sapiens; identical to SEQ ID NO: 7156
  chr9:140876711-140876741
  hyper

SEQ ID NO: 46797 - DNA, 80 bp, Homo sapiens
  chr10:735607-735687
  hyper
ggaggaggcggcggcgcgggcgcgggaggcgggcggcgggcgcgcagggacctccctcccctcggcgcctcctcagcgcg

SEQ ID NO: 46798 - DNA, 30 bp, Homo sapiens
  chr10:736068-736098
  hyper
cacccggctccctgcgaaaatcacgtcctg

SEQ ID NO: 46799 - DNA, 90 bp, Homo sapiens
  chr10:830689-830779
  hyper
gcacacccctggccggctccccgctggcccctctgcgcgtgggagcttccagcctcccgggtctaggggactgggggatgcgtcttcctc

SEQ ID NO: 46800 - DNA, 263 bp, Homo sapiens
  chr10:830815-831078
  hyper
cgtccccggcgtccccgcatcgggcttctctggtcctttgtgaatcgggcctgagtcatccccggctcacggctgcgccacgtacccactgggcgctttcctccgagcgctgacgacagcgactccaccggcagctgcttcccagcgtctcacggcgggcccttggctcccctctctgctgtttaatccgctgaggagccctggtgagcacgagaggggctcgtggctgatcaatgcgggccgaggctgctggcacctttctc

SEQ ID NO: 46801 - DNA, 30 bp, Homo sapiens
  chr10:1094291-1094321
  hyper
attcccaggagaagcgccttgagtgtgttg

SEQ ID NO: 46802 - DNA, 30 bp, Homo sapiens
  chr10:1095066-1095096
  hyper
accgcgggctctggcgcctttaagggggtc

SEQ ID NO: 46803 - DNA, 90 bp, Homo sapiens
  chr10:1102298-1102388
  hyper
caaaagcttcaggacgctggtgagtcactgcggaggagccgaacactgaccgcgccgtccccgccaggctcccgcgcggccggcaccgcg

SEQ ID NO: 46804 - DNA, 31 bp, Homo sapiens; identical to SEQ ID NO: 7157
  chr10:1627517-1627548
  hyper

SEQ ID NO: 46805 - DNA, 244 bp, Homo sapiens
  chr10:1651053-1651297
  hyper
ggtagggacagcatttccctccgcattgccggccctctgtcttgagcccctgcagggtgccggatggccatgccctattgtgcgtccctcttgcagcaacaccacattaaaccgtggcatcctcttgaggctgcccctgcggattgcacggctaatgcagaaggctagaaagaaggacccgaaacgcccaccaaactataaattaaggcgaagatctcaggagcaatgtgcctggtgcccggcg

SEQ ID NO: 46806 - DNA, 356 bp, Homo sapiens
  chr10:1778726-1779082
  hyper
atgtttacaaatcgacgggcaccacattgagtaaaaactgccagccaatttggagaggcgatcgcagggcttcgcctatcccttcctccgggacagtttggatgggagtagctggcgcgagggctcgttcccccgtttttgggtaattcctttggcactgggagacgagatggcctccggagggtggaaggcagtgccagcccggccggccactggggactgcggggcccggagacgcgcggggtccccggggagctcctcgccgccctcgccccacttcgtccgggtccctcaaacatgtcgcagcgtggctgctcactgtcccctctgggcaagaggaggccccagacatttcc

SEQ ID NO: 46807 - DNA, 1055 bp, Homo sapiens; identical to SEQ ID NO: 7159
  chr10:1779111-1780166
  hyper

SEQ ID NO: 46808 - DNA, 42 bp, Homo sapiens
  chr10:3109026-3109068
  hyper
aggaagccgagccccgaggctcccagcgccgccccaggagga

SEQ ID NO: 46809 - DNA, 2014 bp, Homo sapiens
  chr10:3109346-3111360
  hyper
ggtctcccctcctccggacgctgcccctgccccacctgtggcgctcccgtcatctctagagcccccaaccagagtcctccagcccacccgcgaggctcgcgcacctgcgatgcggccccactagcagggacccgcccacctgtggcgctacccctgcctctgccgcctcccgcaccgctagcgcggcccccacctacgacgacccccgcgtagatgctcctgcccacacccgccccagccccggcccctgcccctagccgcgcccgcgccccctcccccgcagcccctcccatacgctcgggccccgcccgtcaccgcccattggcgctggggccgggcgggggcgcgggcggggcggcggttccgagtcaggcgcgcgcgggcagggtccccattgcctgctgcgcacccggacgtgcggctcccctcggcctcctcgccatggacgcggacgactcccgggcccccaagggctccttgcggaagttcctggagcacctctccggggccggcaaggccatcggcgtgctgaccagcggcggggatgctcaaggtgcgcgcccccctcccggcggcgagggagggacggacggacggagctggggagaaccgggcgaaggcgatggggtgaccggagagaagaggggggaagcgatgggggggacccggggaaaggtggcgaagcgatggggagaaccggggagaagagcggggaagcgatggggagaaccgggaagaagcccgcgcccggaagcggcaggggtacctgcggggcggcatgagccggcgaggcagccccggggtccttgcccggtggggcgggggaggaagggacatggcggtaggaacctccatccggaagatcagtgagttttccaccttcggttttgttttaaatggaacctggcagagggagtcgcctgaagcgccctcgggggtcgttctgcctctgagctgtaggacggggccgggcgtcccctccgaagcgtgggtacagcgcgatcacttcctaagtgcccccccgccccccaactccgccgcacgccaccccctagaatgtcgaggaagaaacggctgggtccccgcgcgcctcctgtcgcctcgtgccctgcgcggcgtgggcggggtcctggctgctgcaatgcgggacgcggcgggggtgcgcggggttcccgcctggcgtctccagggcggtccggcagcccctcgcgtttccgctgggagatttttaaaaagggtttcctgcgctcgcatgtgctgtcgccttccggctcgtgacaaaaacgaaaaccaaaatgggtcccaggccctccccgccagcctccgcagacgggaaggatcaggaagcggggactccgggatgtcagcggcgccgcggcgcgggctccgggcttccctgccctgcaatgtggaagctgctctctaggaggggcccgaggctgggcccacggacgcgggcgcgccgggaggatatttaacattgaagagcggaaggtggcggagactcggcgcgccccaggccccgggtgcacgtgggggcgccggtgcccggatgatggagtgtcccgatccgtgcaatccctggcgggtagatcggcgcttcccaggcgaacgcaacctgggagccttagcgatcgcgcaggctggagacgcggcgcgccccgagctgggttttgatttttgttttcccggttcctcctgccgcagatgcgtggaaaggcccggatggcggatttcctcccgtttcggggccgcgcactgcacagggttggagcggggatgcaccccctgcccactgcgcgggtgaccttcccttcgcccttgagcgcgcggggcgggcgcgggtgccgcaggttgaggcgctgtgggcgccgccccgcccgccacgagcgcctacgtgatgcccggcccgtcgtctccacgagccccggccccgacacccgtgcgccgcgcgctccccaggcccgcagcgcagcctccccaggcccagcgccccccgcgggagacccgggtg

SEQ ID NO: 46810 - DNA, 115 bp, Homo sapiens; identical to SEQ ID NO: 7163
  chr10:3214966-3215081
  hyper

SEQ ID NO: 46811 - DNA, 173 bp, Homo sapiens; identical to SEQ ID NO: 7164
  chr10:3239421-3239594
  hyper

SEQ ID NO: 46812 - DNA, 30 bp, Homo sapiens
  chr10:3827306-3827336
  hyper
gcaaactccaggctcgcagagacgcccggc

SEQ ID NO: 46813 - DNA, 79 bp, Homo sapiens
  chr10:3827580-3827659
  hyper
ccaatcgcaggcggcgacacacagcggccccgcctggcgtgaccgagactctccatcacggcccgcaccattggctcaa

SEQ ID NO: 46814 - DNA, 31 bp, Homo sapiens; identical to SEQ ID NO: 7166
  chr10:3862627-3862658
  hyper

SEQ ID NO: 46815 - DNA, 30 bp, Homo sapiens; identical to SEQ ID NO: 7167
  chr10:5454463-5454493
  hyper

SEQ ID NO: 46816 - DNA, 30 bp, Homo sapiens; identical to SEQ ID NO: 7168
  chr10:5615942-5615972
  hyper

SEQ ID NO: 46817 - DNA, 761 bp, Homo sapiens
  chr10:5707984-5708745
  hyper
gtcggggtcacgcggacgcctctgcaggatgctcggacactgcgccacggcctcacccgcgccagtggaggggggtttagctcttaccgtgggctcgcgcctggcttccccgagagggagcaccgtgggcgtttcccaggctctcccccgccactgggcaacggccccgcacgcgtcccgcaccttccccagggcgcgcggcgctcggtgggtttgcggttgcgaaaccccacacctggcgagccgcacggactgcaaccccgcagtgcgctggcctgggacaaggcaccagacatgagagcccgtctgggatgcgcggcaccactgggaccctgctttcaccgcggcccaccccgccaaacgcccccgcccacggagccagcgcggggcgcgccaccacctccccggcgcaggccatcggatacgcggccggcctcaggagccggcgccgctgcctcgctctgacctccgcggcgcccgcacgtacccacgtcgcccaggaagcagccgtccgccgcccggggctccatgcggctcaccggcggccgcgcggcgactctgggcgccgggacctgggccgggccgcgcggggccgctgggcggggccagtctgcgctgggccgcgcgtcgtcccgaggcgaccgagccgggagttgtagttcccgccgccttggcgaggttcccggaggcgctgtccctgggtccggactccgctgtcgctgcccaccccgcttcgcccgtcgcgccgaggagtgtgtgtg

SEQ ID NO: 46818 - DNA, 31 bp, Homo sapiens; identical to SEQ ID NO: 7170
  chr10:6018342-6018373
  hyper

SEQ ID NO: 46819 - DNA, 86 bp, Homo sapiens
  chr10:6018595-6018681
  hyper
cttcctctggctgccgggacaaaacccctaggaatcgctcattccgtcctccctgccgagatcagagctccgcgacccgctttctt

SEQ ID NO: 46820 - DNA, 31 bp, Homo sapiens; identical to SEQ ID NO: 7172
  chr10:6019532-6019563
  hyper

SEQ ID NO: 46821 - DNA, 33 bp, Homo sapiens
  chr10:6130846-6130879
  hyper
tgatggtaagaagacgccggcggaggggagcgt

SEQ ID NO: 46822 - DNA, 30 bp, Homo sapiens
  chr10:6186632-6186662
  hyper
aggccggcaagttccgcgtctggggggctg

SEQ ID NO: 46823 - DNA, 30 bp, Homo sapiens
  chr10:6244499-6244529
  hyper
cttcccaagggattcggctgcggggtccac

SEQ ID NO: 46824 - DNA, 93 bp, Homo sapiens; identical to SEQ ID NO: 7173
  chr10:6245446-6245539
  hyper

SEQ ID NO: 46825 - DNA, 30 bp, Homo sapiens
  chr10:6621950-6621980
  hyper
tcccgcatcccgtgcgacctgcgtcccaga

SEQ ID NO: 46826 - DNA, 30 bp, Homo sapiens
  chr10:6622418-6622448
  hyper
cgcccccggtcccgcgcccaggctcccgcc

SEQ ID NO: 46827 - DNA, 30 bp, Homo sapiens
  chr10:6622762-6622792
  hyper
tgtcctggggtcatcgttcctaggtggctt

SEQ ID NO: 46828 - DNA, 301 bp, Homo sapiens; identical to SEQ ID NO: 7174
  chr10:7449888-7450189
  hyper

SEQ ID NO: 46829 - DNA, 3166 bp, Homo sapiens; identical to SEQ ID NO: 7175
  chr10:7450490-7453656
  hyper

SEQ ID NO: 46830 - DNA, 288 bp, Homo sapiens
  chr10:7708264-7708552
  hyper
aaatgctaaaccaccggtaggtagtcgctaaatgggaaagtcgtgttctcccggttttcaggtgggaaaagctgaggctcccaggagtctagaactcctctcatattgcctttctccctggatcaactgggaatgatgataacagcagactgccccccacgcgtgataaggaaaaaaccttgtaattataataacttttggagctacctcagaaattaacaacgacgaacagaaatctgcgcaatcaacaggagccaagaagaaaaactcggctccgcaggacaagtc

SEQ ID NO: 46831 - DNA, 260 bp, Homo sapiens; identical to SEQ ID NO: 7177
  chr10:7708596-7708856
  hyper

SEQ ID NO: 46832 - DNA, 30 bp, Homo sapiens
  chr10:7709833-7709863
  hyper
agagcctcctactccgtttcttgccaacac

SEQ ID NO: 46833 - DNA, 72 bp, Homo sapiens; identical to SEQ ID NO: 7178
  chr10:7729412-7729484
  hyper

SEQ ID NO: 46834 - DNA, 30 bp, Homo sapiens
  chr10:7829884-7829914
  hyper
cgacttccccatggcgaccacggcagcgat

SEQ ID NO: 46835 - DNA, 30 bp, Homo sapiens; identical to SEQ ID NO: 7179
  chr10:7830833-7830863
  hyper

SEQ ID NO: 46836 - DNA, 30 bp, Homo sapiens
  chr10:7859997-7860027
  hyper
ttcctgccctattgcgaagggctttgaagg

SEQ ID NO: 46837 - DNA, 30 bp, Homo sapiens
  chr10:7860731-7860761
  hyper
gctgggctgggactcggtgcagctcagcgc

SEQ ID NO: 46838 - DNA, 146 bp, Homo sapiens
  chr10:8075798-8075944
  hyper
tcccagggcaaggctcgccggcttcctttccctcccaactcccctgctctaggccactgcctctggggtggggcgccgagaaggaggccctggggacctacccccggctcttctgagccaagtgagttcccagctggcagccaact

SEQ ID NO: 46839 - DNA, 123 bp, Homo sapiens
  chr10:8076053-8076176
  hyper
cgacggacagtcccgggcttagggagggaggctgatcccgggagctctcaggagtccttccacctgccacctaggagcccagttcgcatctctacagcgccacacatctaggccagcccagct

SEQ ID NO: 46840 - DNA, 75 bp, Homo sapiens
  chr10:8076340-8076415
  hyper
cggtccctgggggcggggctctggcacgagggggaccctcccgggtcaagttcacagaggcggaggggcctgggc

SEQ ID NO: 46841 - DNA, 119 bp, Homo sapiens
  chr10:8078023-8078142
  hyper
ggacagtgaggggccggtcctgggcccggaggactcagcagccgccttggcagcaaatcctgtaggctgtcccctgccttggttgtctcgatgttccgctcagcgctggggaaataaat

SEQ ID NO: 46842 - DNA, 80 bp, Homo sapiens
  chr10:8079309-8079389
  hyper
ttgaaaggggggagacggggagaacctgatagctggaaactcgttttctccaaaggctttcgggacattttagcccggct

SEQ ID NO: 46843 - DNA, 92 bp, Homo sapiens
  chr10:8079660-8079752
  hyper
caatccggccggggccggggccgcggggaaggggcaatggggggaacctcttctggttttgctccactcctggaggcgacaccattcatctg

SEQ ID NO: 46844 - DNA, 63 bp, Homo sapiens
  chr10:8079997-8080060
  hyper
gcaaaggacagagacgtctcactcagagcgtggcagttatgctgctccggaaagggaggctgg

SEQ ID NO: 46845 - DNA, 594 bp, Homo sapiens
  chr10:8085599-8086193
  hyper
ttctccctgggtcctcaaaacgcgccaagaacgtggctctgccacttggtggcggaaggcgggaggcacagggcaggaaggtggaggaggggctgcattcgtgacgacgggggagcagagagggaaggacttagggactccccagagggcagacagacctggccagcttggcaaatcataaatccctctccctggaccctcggcctaaacctacccccagggtgtgcagcggaggcgcacaggggttggctgacgggctggggtgcgcctgggtggaggctggtttggggttctggcgtctggaggcaggccatggaaccagaggagagggcaggagggcccaccgcgcagagctgcggcccggctcctagagtggcgcccccagcctgggcatcgcgctcaactgctctctgaaccccatgtccacgagggttcgccctcaaaccacctccacctctgtccacaccccagttctcccgactccagggaccaagtgcctcggcctccccgccacgaaatggccacccccaagccctttgccccatgaaaatagcaacttcttcctacccaaccggttggagcacaagaaacttc

SEQ ID NO: 46846 - DNA, 143 bp, Homo sapiens
  chr10:8086679-8086822
  hyper
caaatattcttatgcctactccgaggagggtcagagggtagcagcccgtcacccagcatcctgcacctcctaacttttacggggcaactacggctcaggagagatgaaagtagaatgggggcgttttggaggcatcagcatag

SEQ ID NO: 46847 - DNA, 30 bp, Homo sapiens
  chr10:8087411-8087441
  hyper
ttcagatctccgggcgagtcaggaaaaaaa

SEQ ID NO: 46848 - DNA, 30 bp, Homo sapiens
  chr10:8090831-8090861
  hyper
ggggttttctcaaccggggaaaaggtggta

SEQ ID NO: 46849 - DNA, 2034 bp, Homo sapiens
  chr10:8091124-8093158
  hyper
aatcacataccatccccaaaacgatagctcatttcacggggaaggtagactcctggcccggggcgcgtgggcgtgggagccgcgaggagagttgccccttggacgcacccgcctccatcatcttcccattgccagtgagttttagggtccctctttctctgctttcccccaagttccctgctctctgggttttgtttgaagagagccagccttgctgggccgggatcctcaaccagtattgcccactgcccgactgccttttcttcccgtttaggtcttgctccccgctctccgcatttcagctcgcaagggaaagaaaacgggggcccgagtggcagagacagagataatatgtatttaacctgcgcggtccggggcgccctgccgcagcgggctccccgcggtgtggcccgcgcagccggggccagcggcggcgcctggagccgtgtccccggcataaccctcccgcccggcagccggcgagctgtttatacagctttacctgtgctatagtcctatccagtagaaacccttgcgcggccagggtaacctaatccaggggccgaggcggaggagggggcggtgaggctggctgggttggagacggaggtgtgcgcgctccaatacccgggatctctcctttgcccctcctcccaccatagggaaggaaatatggacatggttcgggtgacagaaatggggacccggggctaaggaggaaggaggccagttttcacggcccggtcctccggcttctctcctttgaacaggcgctggggacctccgcggcggccacagctggacgcgcgccgcgaaaggcgcggcggtcccgcgggcgcccggcgtgggctagagaggccggccctggcctggctcaggtcgccctcgccccgctttcatcttgccccagtcgccctttacaattcccacaccgaaggcaaagcaagcaaggaaagaagccggcgcctccccaagcggaccctcccttccgcgcagcctcggccactcttccagagcgccccggtgcgtactgcggcgggcgcagggaatcgaattaaacgtctctgggcggttattgtctttctctaattgctccaacaatggcctctattaaaatggagacacccaattaaaggccccgccgggccgctctcggctgccggcaaagctctggcccccggcctgcgacgtgcagaccgcggggccgcggacccggctggtgcggggtactggcgccggcctcgacacctttggcctccacttcctccccagactcacagcgacagcggccgcttcacaccgtttttattgaccgatcgcagcccagcaagattgatcgagctggaatgggaagggacttctcctcccccaggcccagctcgccagggcctcgggccgtgctgcagtttctggcctttggtgtcgctccccgccccccagccccgcagattcccggcttcttttctgtctgcgcggccgggaccgcccaggcaggcgccggggctccggggctccggggggagggactcggcggctcggctcggctccgcttctttcttctgcctgcaaatatttgctgcctcgctggaaatccgacgatttcgcgcgcgctctgcttgcaaagtctttaagtaaacacgctcaaatgaccgccccgggcggcccgaggcacgctctctccccctccgcgggattagtaactttaggacttcgaccccggggctccgctttgcctgttacccaggtcgggcagcgcgcgggcgcccggggccgcttctcccggcacctcggccccgcggagctcgcctggaagcgccggttgcctggctctggtgggtggcccggccgcgagcatctccgcgccctgggtctgtagccctagggctgagccccagaaagccgcgcctccgctctgcgccatggcctctgctttctgtacccgactgggtttccccacttccactgggacagggtctcttcgcccctgggagggcgggtgggagggacttgcacgtgggcatgtgtttgggggtg

SEQ ID NO: 46850 - DNA, 247 bp, Homo sapiens
  chr10:8093577-8093824
  hyper
cccaggtacctgggagggggtcgcgtcaggtctgcgggaaggcgctcaggcttctccgcaggaggccaggatcagctttgtggcggtggcacagggagaatcaggaccacctttcccccttacccccggccaggatccccctttccctcccccgcccgccaagggaggaggaagcccggcctgctcttgccggcgaggcgggtcaggccggcgcctggcctggcccggacccccgcagcccggctct

SEQ ID NO: 46851 - DNA, 104 bp, Homo sapiens; identical to SEQ ID NO: 7185
  chr10:8093859-8093963
  hyper

SEQ ID NO: 46852 - DNA, 116 bp, Homo sapiens
  chr10:8094141-8094257
  hyper
cgggacatccagccccaggccccccacccctctctgccagcctcaaaccacccagaccaagaagggccttcgagatcttttatttttctaaaggtgggggttgcccttctccatcc

SEQ ID NO: 46853 - DNA, 345 bp, Homo sapiens
  chr10:8094327-8094672
  hyper
cggataggcgcccttgcaccggaaggcctcctcaccagtcttttctttttgtctttgaaataattcttagcctcagaagtcagcattttcaagacctggcatccgcagcgtttctgacgcggggacttctctcttcggctctgaggtctccgcgcgcagaacccatggcagcttttggtcttacgcgtggctgtgagctgggctcacgctgcgtggcgcatccacccctcgattgacgcgcggagaagcatttttcattttttctttcagcttgtatccttaaatcttaatcccgggcttcttagcaaaaatgcgtgtgcattcgtttctccttgtttatggaga

SEQ ID NO: 46854 - DNA, 352 bp, Homo sapiens; identical to SEQ ID NO: 7187
  chr10:8095106-8095458
  hyper

SEQ ID NO: 46855 - DNA, 2095 bp, Homo sapiens
  chr10:8095492-8097587
  hyper
cgcggctcggccacagcctcgcccgctgattggtccctccaggccccgcccccgctcgccccgcccctctcgctggggcgcctcggagccgcgtgccctccgccccggggtgcccattgcgcagagcgtggcctggagacccgcgagccggggaaggtcgccgtggagtcccgaccagaggccggggttggggtcggtgcagaccgagggctggtttccttgactgtgggagaaacgccgggagccggagtaagtagggctccgggcggggcgaaaggaaaagttgggtccctagagtgaagaccgagttctttctgtccgtctacactgagcgtactcggggaatgagttagagccagtctcttcctcccctccccccttctcatccctcactgttgccactcaagtcaaaagcacacattgattacaaatattaggtctggaaagggcagctgcaacagctgaagcgtgttcactctgggggcttgagagcgcagaaggctcgggaaagaggtgacaatgacaacaaaattgacgcggacgctccagtcaaaggcatctcccctttatccgatgactcaccctcttaggaagtcggcccgagaggcaaatctcaaaataccttgacatgaaacattttgtttttctgatcaatttaacgcgcacgtttccccacatcgatgcgctctcccaaacaccctgcattagatcctaataatgatccatgcgtgcctattttttaaaagtctgaaaaagaaaattctgcccatcgaaatgaacttcatgaatggggcaggctggctgcaccgggacggaatcgtccacccgacccgaatgaattggcaggagccgcggccacatttaaagggccagagcgcgcgttccctcccgtccgcccccaagccccgcgggcctcgcccaccctgcccgccgcccctccgccggcggccgccctctgcggcgcccctttccggtcagtggaggggcgggaggaggggcgggggtgcgcggggcggggggagaagtcctggagcgggtttgggttgcagtttccttgtgccggggatcctgtcccctactcgccagcgccaggctcctcccccccggcgcggatgacactagaacctccttaagttgcgtcgcgccacagctgtctgcgaacactgagctgcctggcgccgtcttgatactttcagaaagaatgcattccctgtaaaaaaaaaaaaaaaatactgagagagggagagagagagagaagaagagagagagacggagggagagcgagacagagcgagcaacgcaatctgaccgagcaggtcgtacgccgccgcctcctcctcctctctgctcttcgctacccaggttggtactggtgactttttttttttttaagtttgattttttgcccccaaccacttgggaggacctaaatcaattttaaaaactcaactctcctcttttggaggttttctaggggctgagaggacggtcccgggaccggtgtccccgagggagggacttgccctccaagtcgtaacagtcagccctgggacttgccctccaagttgctcagccagccccggctcccgcgagccgggctgcagggacgtccccgagagccctgcgggctccgcggccgtgtccccgcgctcccgtgcgggtctcgggtgcgctgggcgggcgggcggcgcgaggggaggttgtgccactccagcaactcaggggctcatccaggtctcccattctctcccttgcaggtgacccgaggagggactccgcctccgagcggctgaggaccccggtgcagaggagcctggctcgcagaattgcagagtcgtcgcccctttttacaacctggtcccgttttattctgccgtacccagtttttggatttttgtcttccccttcttctctttgctaaacgacccctccaagataatttttaaaaaaccttctcctttgctcacctttgcttcccagccttcccatccccccaccgaaagcaaatcattcaacgacccccgaccctccgacggcaggagccccccgacctcccaggcggaccgccctccctccccgcgcgcgggttccgggc

SEQ ID NO: 46856 - DNA, 30 bp, Homo sapiens
  chr10:8701203-8701233
  hyper
aaagttagattcttagattccatgatttta

SEQ ID NO: 46857 - DNA, 30 bp, Homo sapiens
  chr10:8739564-8739594
  hyper
aagactaacttcatgtttcatcctttaaac

SEQ ID NO: 46858 - DNA, 30 bp, Homo sapiens; identical to SEQ ID NO: 7190
  chr10:9423701-9423731
  hyper

SEQ ID NO: 46859 - DNA, 30 bp, Homo sapiens; identical to SEQ ID NO: 7191
  chr10:10043570-10043600
  hyper

SEQ ID NO: 46860 - DNA, 242 bp, Homo sapiens
  chr10:11059421-11059663
  hyper
cctaaacctcctatatcctttcggtgatcgcccttagttcctgcccgggcaagcacaccacaccgaggagcatcgaagcgaaccctcgggctgctcgcctcccgcggctgggctctgggagcgcggctcgggtatggaagtggagcgggctttggcgcctgggtggccctaaacctactccgagcggccacggcggcctcttgccagggacccccgggcgggggagcagagccaggcgggga

SEQ ID NO: 46861 - DNA, 225 bp, Homo sapiens; identical to SEQ ID NO: 7193
  chr10:11059932-11060157
  hyper

SEQ ID NO: 46862 - DNA, 120 bp, Homo sapiens; identical to SEQ ID NO: 7194
  chr10:11060314-11060434
  hyper

SEQ ID NO: 46863 - DNA, 116 bp, Homo sapiens; identical to SEQ ID NO: 7195
  chr10:11060512-11060628
  hyper

SEQ ID NO: 46864 - DNA, 68 bp, Homo sapiens
  chr10:11060741-11060809
  hyper
ggagctctggtggccggggggaaagagctcttcttaccaaattacccgctcatctgatttaatatttg

SEQ ID NO: 46865 - DNA, 407 bp, Homo sapiens; identical to SEQ ID NO: 7197
  chr10:11207022-11207429
  hyper

SEQ ID NO: 46866 - DNA, 169 bp, Homo sapiens
  chr10:11207709-11207878
  hyper
cgagcccccagcctgcaggaggaagggcgggtaggcaggagggctggaagcagccggtgctggcggcccctgtgctccaggggctgctcccgactcctccccgcacccccgcccgcctgcccgccgggacaggttggaggcgggagagagggaccgaggcagggcggga

SEQ ID NO: 46867 - DNA, 31 bp, Homo sapiens; identical to SEQ ID NO: 7198
  chr10:11282875-11282906
  hyper

SEQ ID NO: 46868 - DNA, 106 bp, Homo sapiens
  chr10:11652859-11652965
  hyper
aacacctgcgaggaaccgttttcacgcattacaaatgccgcaccagcctagggttgtgagcgccaaactattttgcaaactttgcaaaggcgcacggatttccaag

SEQ ID NO: 46869 - DNA, 30 bp, Homo sapiens
  chr10:11865967-11865997
  hyper
cccagcccagcgcggcgggagggactaaaa

SEQ ID NO: 46870 - DNA, 19 bp, Homo sapiens
  chr10:11909253-11909272
  hyper
actccgtctcaaaaaaaaa

SEQ ID NO: 46871 - DNA, 30 bp, Homo sapiens
  chr10:12084741-12084771
  hyper
cccgggactcacctcgagcctgttgtcaac

SEQ ID NO: 46872 - DNA, 30 bp, Homo sapiens
  chr10:12085037-12085067
  hyper
tgactctggggtggcgggtccggggcaaag

SEQ ID NO: 46873 - DNA, 30 bp, Homo sapiens; identical to SEQ ID NO: 7201
  chr10:12111249-12111279
  hyper

SEQ ID NO: 46874 - DNA, 30 bp, Homo sapiens
  chr10:12171790-12171820
  hyper
gcagtgagtagcggcggctggagcggggac

SEQ ID NO: 46875 - DNA, 30 bp, Homo sapiens
  chr10:12238350-12238380
  hyper
gcaaaagggaactgcgacttctgagcgaat

SEQ ID NO: 46876 - DNA, 1900 bp, Homo sapiens
  chr10:12390765-12392665
  hyper
gccagaaggggccaagcgtgagccagggcaaccaggccggccaggcccgccggccgctccagcccagcaccagggcgcccgcgcggctgccaaacacccccgggagttttgctcgcaaagggaccacgaggcagctgctggcgcgtcctgcgcgtacccgcccagaggctccccggcttgctcctcgcgggtctgtcccgaaactgacgtgaaaccgatttggtgcaatgcgaatgagctcccgcccgcctccgcctccatcccagccgccgccgccgcccgtcgccataacaaccggcccccaccccccccaccccacgccttgcccctcgggtcccccgggccacaggccacagcgcgggaaggcgccccgccctcggcgccccgcatccggccgccgcgcacccccgcccgcccggcgcttccgagccacgcagaggcgccccctcccgccggagacgggaaagccccggcgcccccagactgggctccgtttccagctcccggaggggctggggctctcccgcgtgcgccccgcacctgccgggggcccgtacccgccctcgccggggctccagggggcacgacggccgtggcccggcgctcttgggaggggagcgggacatccccgaaggcggcgcgctggaggcggggagcggccggggcgcacggagagggcggggagcccgcgggagggggaggagggggaggagggggaggaggcgcgaggtgggggggagcgcggcgggcggcagggagggagcgggagggaggcaagaaagtagcagaaagtgaggctggcaggcggcggcaaaggagccggcgcgcggcggcggcaggaagtctgtgcccgagaacagcagaaataagagccagggagggaccgcggccgcggcggcggcggcgagagcgaaagaggaaactgcagaggaggaagctgcgccgcagcccgagccgcccggcatccccgccgcctctgcgcccgcgccgcgcccccggcgccccctccccagcgcgcccccggccgctcctccgcgccgcgctcgtcggccatggcccgggagaacggcgagagcagctcctcctggaaaaagcaagctgaagacatcaagaagatcttcgagttcaaagagaccctcggaacgtaagtggggaccggggaggcgagggtggaggtggccgcggcaggggctgcacgggcagctccagctgccgccgccgccactaccgcggcagaaacccagcctgtcaccgcgtcctcattgtcccgttctcggcgctgcggagcccccccgagcgcgcccgacgcgtgggcctgcgacccccgggtgggcgccgttcccgggagggggagggggcagcgccgggctgtcagggagcagcccacgcgggcgcgcgacttcccacttctcctgccaccgccgccctctccgctgccttctccccacgcgtgactgtgggctgagcatggtggggatggctgtttaccggctgtgtgcgtttactcgccgtgtgcatgggcgcaccgcgttggcgagacgtggtcacgagaagatcagcctccagtcgttcccatttctgtccttacatcatgtatttctatggaattggcatctgcacgtacgaggtgtaggcaagactttgggtggccacgcgaggatggaagggaagggcttcgcagtgctcagggtcacacgtgggcagagcctcaccggagggtctgtgcatttcacgcgggctcggccgcacgcgccggggagcgcgtctccaagggagggtctgtgcgcgtcgctgcgcgggcggtgctctctccgggctgcatcgagtcccatgctgatggctgtgtctcaagaaagcagaaataatccgaagtcgatggcaggaacgctccaagcatgtg

SEQ ID NO: 46877 - DNA, 328 bp, Homo sapiens
  chr10:13043209-13043537
  hyper
aataggagtagtcctggaccacggtgtgggagtggcacgagaagtagcccaggccggtgaggttgagcctggagccggcgggcacctccagcatgctgccccacgcctggtcgcacagcatctcgacctcggccgagtagaagaggcccccctggccggcgtggtactgccagggcaggtggttgtagaggccgggcgcctcggggtgcagcgccagcaccctggcgtacacgatggtctcggccagctcggcgcggcagccctcgctcaggggcctccactcggagggcagctggcaggcgcgcgcgggcgctgggggacccgccag

SEQ ID NO: 46878 - DNA, 23 bp, Homo sapiens
  chr10:13142117-13142140
  hyper
gcgctgggcggggtcgccaggcc

SEQ ID NO: 46879 - DNA, 31 bp, Homo sapiens; identical to SEQ ID NO: 7204
  chr10:13142553-13142584
  hyper

SEQ ID NO: 46880 - DNA, 30 bp, Homo sapiens
  chr10:13203422-13203452
  hyper
cccaacaaagagggcgtccaatgacgtaaa

SEQ ID NO: 46881 - DNA, 177 bp, Homo sapiens
  chr10:13341451-13341628
  hyper
aactcagtggcaatgccgtagtccagcagggaggccgccctgggcagcgcctgcctggccagctcctgcccgggagggcaccgtcctctcccctccggagaggtcccggtcactgcctgcctgggccggttccaggcagccctgcgcgcctgtgcaccgtgcgcctgtgattggaca

SEQ ID NO: 46882 - DNA, 30 bp, Homo sapiens
  chr10:13342192-13342222
  hyper
cgctagagtccgcgcgccgggcaaccgccc

SEQ ID NO: 46883 - DNA, 55 bp, Homo sapiens; identical to SEQ ID NO: 7206
  chr10:13515865-13515920
  hyper

SEQ ID NO: 46884 - DNA, 146 bp, Homo sapiens
  chr10:13570122-13570268
  hyper
caggtccgagggtccacgctcggcctgatggccaggcaggtccgcggccgccccagccctgccccggaggcgccccgaggagggctcgggccccccggtgtcattgtttgctaatttcctgagctgccctccgacttgtttacgtt

SEQ ID NO: 46885 - DNA, 34 bp, Homo sapiens
  chr10:13629000-13629034
  hyper
actcagtgggttcgcggccgccggcccagtgagg

SEQ ID NO: 46886 - DNA, 14 bp, Homo sapiens
  chr10:13933119-13933133
  hyper
ccccttccgagcgt

SEQ ID NO: 46887 - DNA, 292 bp, Homo sapiens
  chr10:13933246-13933538
  hyper
cgccctgtcctgcacccaaaggaaagggctcccctggcactctcagaaaatggttttaaaaaaagcctacacagctctgcctaaagccatgtcctttcctatctccccgggtagattcagacagcgtgggactgaggtgcccaaggaaagtaggtgtgtgtgtgccgaggggagggttgcagaagaaagcacagtatgtgccccacgtgggatttgcatttaaaaactgtaacatacgcgaaataaacgactccaggcccccagtaaagaagcagcggcgcgtcccttttcc

SEQ ID NO: 46888 - DNA, 338 bp, Homo sapiens; identical to SEQ ID NO: 7209
  chr10:13933596-13933934
  hyper

SEQ ID NO: 46889 - DNA, 143 bp, Homo sapiens; identical to SEQ ID NO: 7210
  chr10:13933982-13934125
  hyper

SEQ ID NO: 46890 - DNA, 145 bp, Homo sapiens
  chr10:13934168-13934313
  hyper
cggaggtccccaagcgggggacccctggctcccccacaaaacccacccaaagccaccgctcgaggccctctcctaccctgagagcccggagacagcagctcccttggctgaaggcacagctcttacccctcgatctagtccaatt

SEQ ID NO: 46891 - DNA, 72 bp, Homo sapiens
  chr10:14646261-14646333
  hyper
cggctccctcccagctcgctcccggcgcccgcggcggcgcccagcggcccgactgctcggcggcggcccgag

SEQ ID NO: 46892 - DNA, 101 bp, Homo sapiens
  chr10:14646653-14646754
  hyper
cgggaaagtgggaaggcggccgcgtgggtcacagccacaaagctccggggcgctcactctccttttttctcactccctcgttccctcgctctctccctcta

SEQ ID NO: 46893 - DNA, 30 bp, Homo sapiens; identical to SEQ ID NO: 7212
  chr10:14880317-14880347
  hyper

SEQ ID NO: 46894 - DNA, 700 bp, Homo sapiens; identical to SEQ ID NO: 7213
  chr10:14995744-14996444
  hyper

SEQ ID NO: 46895 - DNA, 30 bp, Homo sapiens
  chr10:15001824-15001854
  hyper
gtctccgagggctccgatttgggccctaga

SEQ ID NO: 46896 - DNA, 30 bp, Homo sapiens; identical to SEQ ID NO: 7214
  chr10:15139132-15139162
  hyper

SEQ ID NO: 46897 - DNA, 30 bp, Homo sapiens
  chr10:15139770-15139800
  hyper
cgatccaggggcggcgtgcagtggggaggt

SEQ ID NO: 46898 - DNA, 31 bp, Homo sapiens; identical to SEQ ID NO: 7215
  chr10:15481460-15481491
  hyper

SEQ ID NO: 46899 - DNA, 1241 bp, Homo sapiens
  chr10:15760996-15762237
  hyper
cgtggagggcatgaacgtatttatgatgaggaccgactgtcaaacttgatttcctcttggaaacgggggtccgcaacctggtttgcaagaatgcaaacggtcctgcttctctaggtggagctctgtgggtacagtgagatgagagaagggggtggggtaggaggaagccaaggacagagcccagctgctggtagccgacagctcttgcgcccagacgcaatggttacagactctgcataaacagacctcgctgtggtggcggttttaactggcttgggtcttctgggtcctgttctctcctttgtaggatgcgtgcgtcttggtacctggaacacccaggacttgcgtgttctatgcaagtggcatgtctctagctcaaaattcacaaggcacatctagcatggcaggggagagaaggggctggtggcggggagagggacgggaccccgggcaggcggcaggacggggatcccaggctgcggggggactccgcggcagagccgctgggacctgacccgggagcgccttcgtccccgcgcgcacctccccgggtcgggcgacttacgtgcgggcgtcgggtatgtggaagtccacggcgtagccgaagtagctgcccttggggccgctgtacactgtgagcttttccacgtccaggttgaacgcctgacaggcgggggaccacagcaacatccccagcgcggccgcggcgcagcagaggggcgcgatcagcggcgcctggcttccccggggaccgcggctggccccgggcgacatctccctccgccccggtgggtggctgctacccaggagcgcgagccgaggacccctgcggggcaaggggggctggtggaatctggcggtccccagctgcccgtgtcccgggtcggtgcgctcggcgcacccgtggtgacagtgcccggcgtctgctcccacccgcccgcccgcccagccggctcggggggctggcccaggggctctagccctcctccggccgcgggcagggaccagctctctcgcggcgcctcctcgcggctggtctagagccagggactcccgggcggcccagctggtggctggagcgctgggtgcctcttcgggctgcccggatttctattgcagtcccatctcaaggacaatcagtttcgtctctgtcacctcaagctatttattgctttagaagcaatgccccaggtggagcgagagcttgctccagttgtgtcaaaggcgcagcttggatggag

SEQ ID NO: 46900 - DNA, 30 bp, Homo sapiens
  chr10:15902578-15902608
  hyper
agtgaaattggaggcggaaacaggcacgga

SEQ ID NO: 46901 - DNA, 310 bp, Homo sapiens
  chr10:16478539-16478849
  hyper
aaaccaaagttctccgtatgcagcatgaggatccagaacccactgtgacatcaaattgccagagcaccacctccgatttattcttggggaaaaccaaaagagctacggaatgctcccttgttccagactgttctatggagaactgggatctggggaaaatgcaacagtttctttccgtttggggatctagccccgaatttttttcattcagccaaactaccgacagtcagacagcgcctgcaggagggtgtggccaggcaaaaacgcggggaacggccccggaccagggtggggcgtggcaagggtttga

SEQ ID NO: 46902 - DNA, 31 bp, Homo sapiens; identical to SEQ ID NO: 7217
  chr10:16536238-16536269
  hyper

SEQ ID NO: 46903 - DNA, 304 bp, Homo sapiens; identical to SEQ ID NO: 7218
  chr10:16562368-16562672
  hyper

SEQ ID NO: 46904 - DNA, 955 bp, Homo sapiens; identical to SEQ ID NO: 7219
  chr10:16562709-16563664
  hyper

SEQ ID NO: 46905 - DNA, 212 bp, Homo sapiens
  chr10:16563690-16563902
  hyper
cgcgtgggcccgggcgtcccccgggtgcgcccagcggcggcggcggcgggcacggtcggcacggcgaggctcagagctggggcggaggagcgagcgagcagcggcgagcgcctcacggccgggagcggagcgagagagagactgaaggcagaattctgcctgggtaccacctgccaggagaagaggaggctgacaaacgcgcgccggagcaa

SEQ ID NO: 46906 - DNA, 179 bp, Homo sapiens; identical to SEQ ID NO: 7221
  chr10:16870062-16870241
  hyper

SEQ ID NO: 46907 - DNA, 30 bp, Homo sapiens; identical to SEQ ID NO: 7222
  chr10:17243251-17243281
  hyper

SEQ ID NO: 46908 - DNA, 30 bp, Homo sapiens; identical to SEQ ID NO: 7223
  chr10:17243865-17243895
  hyper

SEQ ID NO: 46909 - DNA, 1182 bp, Homo sapiens; identical to SEQ ID NO: 7224
  chr10:17270072-17271254
  hyper

SEQ ID NO: 46910 - DNA, 797 bp, Homo sapiens; identical to SEQ ID NO: 7225
  chr10:17271443-17272240
  hyper

SEQ ID NO: 46911 - DNA, 30 bp, Homo sapiens
  chr10:17272459-17272489
  hyper
cctctgcgcggtgcccgaagtcccgctgaa

SEQ ID NO: 46912 - DNA, 326 bp, Homo sapiens
  chr10:17495119-17495445
  hyper
aatcattcctagcacgcaaaacaaacctgaatcttaacaccggtgccctttaaagcatagaaaagaaaaagcaaaccaaccaaatccctccataaagacaggctgagctgcttctctccaaaggtggcggggtcgggggcgggggtgctttcaacacaccattgtcgagaggaaaactcagcacccgtttttcaaatgcagctgctggaggatcccccttgattcaaagaccattcacatccaggcttagagggttgagggagtgtgaagggtgcccccccccaaccccgcgccctcttcaaacacacgcacactcttacactcac

SEQ ID NO: 46913 - DNA, 621 bp, Homo sapiens; identical to SEQ ID NO: 7228
  chr10:17495474-17496095
  hyper

SEQ ID NO: 46914 - DNA, 307 bp, Homo sapiens; identical to SEQ ID NO: 7229
  chr10:17496544-17496851
  hyper

SEQ ID NO: 46915 - DNA, 126 bp, Homo sapiens
  chr10:18429022-18429148
  hyper
aacccagcctccgtcgtccttcccctccaaagttaagagatctgctctaagggttcctgaggggtggtctggggccatgggaacaggatcaaggccccctgagcgccgggcctggcttctgtggct

SEQ ID NO: 46916 - DNA, 633 bp, Homo sapiens; identical to SEQ ID NO: 7231
  chr10:18429517-18430150
  hyper

SEQ ID NO: 46917 - DNA, 127 bp, Homo sapiens
  chr10:18430183-18430310
  hyper
cgctttctacgatgccgactctcctggccacgctccgagccggggtgggcgtgggtgtgaggatgatggggtgcaggtgggcaggaggggagcgaatatgggggtgccctgccggatccccccagag

SEQ ID NO: 46918 - DNA, 396 bp, Homo sapiens
  chr10:20104308-20104704
  hyper
taagatatcaactaacgagagggccggcaagggttaacgcggaaacagatccccgagctgaaaaaacaaaaacaaactggggagccagagcccctgaaagctccggtaggaaattcaatgggcctcctgttcctttaaactctcgctttcgcccccgctgacactttgcaaagccgcggcggcagcggcggggaccacgctgcggtgcaccaccttccgccaccctcccgcgctgggctggggtcgagggggcttcgcagagtcggtaaccgaaccggctctggtttgctttctccactccctagccactaccagaaccagcctccgcgaaggggcgagctgtggttaaccctttcgtgcccagggagaccccgccagggtcggggcggggcgcga

SEQ ID NO: 46919 - DNA, 2187 bp, Homo sapiens
  chr10:20104724-20106911
  hyper
cgaaggcggcccgggagccaggtgggtgtggggcgcagttggcggagctgcccagggcgtgcgagcaggctgcgaggatggcgccccggcggcgcggaggtaccgccccgcgctcccccgatagctccccggcctgtcccctctccccgcgctctggggcagccggctgcctggggcgcacggggctggagtggccctctccctccccttcgctaggctcccccggcttaatctgttggccgcgactcctcagccagccccgaggaaagtgcagccattggacaggtctgtgcgggctgccggtttcagggaggaaggtgggagaagcctggaggagcgaaggggagggcggagggaggagggaggagggtgcggcggcagatctggcaaattgcgagctgccttccctcctcaaagtgtggagaaggagcgcgggggagcgtggcgacggcagcgcctcctccgccaccaaactcctggggctccgcgggggcttggggccacctcctcctgagcccggaggaaccctctcccgataggttccagcgtgactccctcccactccacccttttcctttcttcttcctcttttttttttttttttttaaacacatttttttcctggcttcggacctcagactgctgcagccctaaccttcccagggctcagctctttggagctgcccattcctccggctgcgagaaaggacgcgcgccctgcgtcgggcgaagaaaagaagcaaaacttgtcgggagggtttcgtcatcaacctccttcccgcaaacctaaacctcctgccggggccatccctagacagaggaaagttcctgcagagccgaccagccctagtggatctggggcaggcagcggcgctggctgtggaattagatctgttttgaacccagtggagcgcatcgctggggctcggaagtcaccgtccgcgggcaccgggttggcgctgcccgagtggaaccgacagtttgcgagcctcggctgcaagtggcctctcctccccgcggttgttgttcagtgtcgggtgagggctgcgagtgtggcaagttgcaaagagagcctcagaggtccgaagagcgctgcgctcctactcgcgttcgcttcttcctcttctcggttccctactgtgaaatcgcagcgacatttacaaaggcctccgggtcctaccgagaccgatccgcagcgtttggcccggtcgtgcctattgcatcgggagcccccgagcaccggcgaaggactggcgggtggggtagggaggtggcggcggcggcatggcgaggttcccgaaggccgacctggccgctgcaggagttatgttactttgccacttcttcacggaccagtttcagttcgccgatgggaaacccggagaccaaatccttggtaagtaagatgcactttagcttgctgattttgtgcgcagctgaagacctctctggcactctcgtgctccctaccctctccccccaacatcacctatctgcccttgggaaacttattgcagttgcttttcggctaaacttaggcttcccaaatggggaaagagggttatcaagagaaggacgccggggactaggggttttcttgaggctttcgggcttacttcacctgggcggcagggggtggtactgtctccccaaagtagcccagggagggcttcagtgtgagagcaaagcttcttccgtggatacatctcctaggacctggcatctccaggctgtgtgctctccggctcctcctccttcctcgctgctggttaaactaagcgtgtgtggtatggggtgggtgggggacgttgtgaaagccagggattgcaggtctcccctctgcacgagaaaattccctgtggcagcaccttccttcccctggcgatccccactagctccgtctagtgacctgggccaagcgggcgctggaaggggggcggggtaaatgcggccggcgcagaggtggggagcaggtgggaaaggtggaggcgggctcgcctctggagacctacccctgctcccattgtcctccgcctgccagcttcacagacaggcctgaacgcgcagagagttccttggagtgccctgattttgtccccgagagggcccccaacctccgcatcctcttagtggctgtcctggcaggtgcgcgtcctgcggggagttgcgccccgggggctatcgccg

SEQ ID NO: 46920 - DNA, 1618 bp, Homo sapiens
  chr10:21461963-21463581
  hyper
caaatttccccagaacgcccctggctggtttcaactgtcagtcactccggatcgctcctgggtgtctctctcccgggctgttcatctccgtccctgcccgggaagggcagggggcagggctggaggggcccggctacagaactacttcccctggaattccccacccggtggattagacacccgtgggtccggcttgccgcgctgagccggagctctccagcagggattattcttagcaatgcggcagcggccgccccatgacatattaattactatttgcctctccccctcgccgcggtcacaggaggcgctgcgggtgggcggtgaggtgggatcgcgggcggatctgtggggcggggggcgggggtattgtggaacacgagtggaggtggagggggcgcggctcgccgaagtgcccccctgggtgcccagcctggtccctccggggtccggggctgcgcaccgccgtgcgccctccgcagaggctctgccgatgtcgcaccgccccgcaccgcgacaaaagcccttcccggttccaacatcacaatcgccaagcgtggtctctgacactcccgctggcgtcttcgttcgcgcgccctccccccgtgccaaggcacacgcacacgcaccgacccactcattgctttccatcccaggtgccaaaacttctcgaagcaggtgcagcccctcgcccggcaggtccaggctggcccggcgccccctcgctcaccttatccaggcagttgactttctcggtgggatacacgacttttccgcaacgggcgcactgggggttcatgatcgcggttcccgggggcggcggcggcggcggctgctggctcccaggagccgctgtgacatcccccggcgagccccgcaccgcctcctggcaggcgggagggctgcgggcggcgggcgccgggtagggagtcggcgccgggccacgggtgagtgcacggggagggcgacggggcctggcgcctggggccggccgcgctctcgggctcgcaggcgctgggtctcggctccggctccggctccgcgccgctggctctgcgtcgctcgcactccaggtacgggtgactcacacagtcactcgcgcccgcccctcgcgctcactcgctcccccgcctcgccgccgccgccgcgcaggccaaacccaccggcgcgcccggaccgaagtggcagggaacgtgcacgtcgggcaccctgggagggagggcgcagcgggggagggggcgggcagagacccggaaagctccgcagaccgccgtgggtgcgactgtgcggcctggggagtgagcctcgcgccaccgccgctgcaggccggggagcccaggtgggcggcggctggggagggagggatccaggcgggggaggtgacaaacaccggtggggagagtgctcaaacccgcgtactcccttccctccctcttctcttccccagccgggggcaccctcatcccaggctgactgacgtccctggcacccaaatgtcgcggggagtgcggggccagggtgcgccctccctcctcctccagccagtgaaacccgggacagcggcacccagccccagggcggaggccgtctctgctgcgcgcagcgacgcacccaggcc

SEQ ID NO: 46921 - DNA, 21 bp, Homo sapiens
  chr10:21783695-21783716
  hyper
gcgcgcggactcggcttcccc

SEQ ID NO: 46922 - DNA, 30 bp, Homo sapiens
  chr10:21784380-21784410
  hyper
atgtgccagtcctccgcgaccctttcctgc

SEQ ID NO: 46923 - DNA, 30 bp, Homo sapiens; identical to SEQ ID NO: 7238
  chr10:21785720-21785750
  hyper

SEQ ID NO: 46924 - DNA, 30 bp, Homo sapiens
  chr10:21805387-21805417
  hyper
ccggagctggagtccgactcggtggacgag

SEQ ID NO: 46925 - DNA, 154 bp, Homo sapiens
  chr10:21805906-21806060
  hyper
aggcagtccttggcgccgccgcgcttgcgcttgcagcggtagctcaggctccccgggcctccggcgcccgccgctgccttgggctggggcccggccgccgatacctggtaataggcggcggcggcggcggcggcggcggcggcagcagcggcgg

SEQ ID NO: 46926 - DNA, 30 bp, Homo sapiens
  chr10:21814523-21814553
  hyper
gtagtgtcaagaaccgcagcaagaggaagg

SEQ ID NO: 46927 - DNA, 167 bp, Homo sapiens
  chr10:21815984-21816151
  hyper
aaaaatacattcagaaaagggcgcgaaggcggcggctgaggggaagaagctggagtcttgggaggaagcgcagtgggttggaatcgggggaaggagggcccgctaggtccgggcggggaagaaggcgtgcgggcggcggggcgtgcgccgggccgggcagctggagg

SEQ ID NO: 46928 - DNA, 30 bp, Homo sapiens
  chr10:21822288-21822318
  hyper
ccatcaaaactggacgccactgtctgatgg

SEQ ID NO: 46929 - DNA, 30 bp, Homo sapiens
  chr10:21823422-21823452
  hyper
cgtgagtgactgagcggcaaagcccgagtg

SEQ ID NO: 46930 - DNA, 143 bp, Homo sapiens
  chr10:21824263-21824406
  hyper
gagggatgcggggcccgttgcaccccgagccagaaggctcgggccctgccgccgccgcccggtagctgtctgcggaggagatggcggagtccgttgctgaccatgcgggagtggcggggctgctgcagcgcctgtggggtggc

SEQ ID NO: 46931 - DNA, 31 bp, Homo sapiens
  chr10:21878818-21878849
  hyper
ttcctttccctttcccttccccttccccttc

SEQ ID NO: 46932 - DNA, 30 bp, Homo sapiens
  chr10:21915603-21915633
  hyper
tagactactttcttctgtggccctcaaagg

SEQ ID NO: 46933 - DNA, 30 bp, Homo sapiens
  chr10:22032926-22032956
  hyper
aggcatatccatgaaagagaagcccaatct

SEQ ID NO: 46934 - DNA, 30 bp, Homo sapiens
  chr10:22291997-22292027
  hyper
ggaccccggtgacccgagctgagggcagcc

SEQ ID NO: 46935 - DNA, 30 bp, Homo sapiens
  chr10:22292752-22292782
  hyper
gcctggacgcctggcgccccagatctgggc

SEQ ID NO: 46936 - DNA, 30 bp, Homo sapiens
  chr10:22315827-22315857
  hyper
ttttcagttattatgattttcagctttaga

SEQ ID NO: 46937 - DNA, 608 bp, Homo sapiens; identical to SEQ ID NO: 7239
  chr10:22517900-22518508
  hyper

SEQ ID NO: 46938 - DNA, 30 bp, Homo sapiens; identical to SEQ ID NO: 7240
  chr10:22518858-22518888
  hyper

SEQ ID NO: 46939 - DNA, 30 bp, Homo sapiens; identical to SEQ ID NO: 7241
  chr10:22519104-22519134
  hyper

SEQ ID NO: 46940 - DNA, 226 bp, Homo sapiens
  chr10:22519354-22519580
  hyper
ggtacacttctaagttccaaacgctctttttctcccttcttctctcctcaaataattgcgagtttccacttgagaacgtgaacgtgtttaaatttttaacagtcactaaaccgctctgtacagaatccctccaaaaacaatcgctatcatgatttatagacgttgtaagcgacgcgtcttggtccaatcagcattttgagttcccgttgcatggtaagacaactta

SEQ ID NO: 46941 - DNA, 20 bp, Homo sapiens
  chr10:22540686-22540706
  hyper
aaaacaaaaagagaaagtat

SEQ ID NO: 46942 - DNA, 1110 bp, Homo sapiens; identical to SEQ ID NO: 7243
  chr10:22540740-22541850
  hyper

SEQ ID NO: 46943 - DNA, 225 bp, Homo sapiens; identical to SEQ ID NO: 7244
  chr10:22542024-22542249
  hyper

SEQ ID NO: 46944 - DNA, 31 bp, Homo sapiens
  chr10:22605455-22605486
  hyper
tggacgcccaggcggacgaggccgtgttagg

SEQ ID NO: 46945 - DNA, 30 bp, Homo sapiens
  chr10:22609888-22609918
  hyper
ggagggggcggccacgggcctgactacacc

SEQ ID NO: 46946 - DNA, 30 bp, Homo sapiens; identical to SEQ ID NO: 7245
  chr10:22610492-22610522
  hyper

SEQ ID NO: 46947 - DNA, 772 bp, Homo sapiens
  chr10:22614078-22614850
  hyper
agcctttccaaaactttgtatcgctcatttaatctacaggagagcgtcacattagagaaggaagttttaaagaggttcggttcaataaacatctctgcaatttgagccctgacggtttcgggctaagtgcacagttggcaattctcaaaaaatcccttcgtgaaatttctgaccgagtgattgcagacaggacagaccgagagagtcgagatctgaaaccagctctgcgcaccaagtcgacgtgaaaagaggcccccggagtgtccgaaatggccgggagtgcggtttgcattttcctttcgcgggcgctgccgcaggctccggggtccccgccgcccaggactgggtccctggtccccgatccccgctccccgctccccagcgctgtggcctcgtggggctgccccgcccccccggcgtcgccgcacccaccccgcccccgcgccggccccgcccccgcggcgcgccgcccctcccccgcccgcccgcccgcccgccgccccgcacgcccgccgaggctcggggctcgggccgggctccgcgcggagttgcagcggtggccggatgccaagtgtaagtgtaagttgctatggaaaccccgaccgaggcgagttccgaatccggagcgagacggagccccgggcgccgccggatccgcccctcgcatcccggcccccgggcgtccgccgcgctcaggccccggcccaggccgactggaggtgctcctcctgcggccccagcacccggctccggaaatgccagggatgcaggg

SEQ ID NO: 46948 - DNA, 256 bp, Homo sapiens; identical to SEQ ID NO: 7247
  chr10:22624049-22624305
  hyper

SEQ ID NO: 46949 - DNA, 559 bp, Homo sapiens; identical to SEQ ID NO: 7248
  chr10:22624561-22625120
  hyper

SEQ ID NO: 46950 - DNA, 400 bp, Homo sapiens; identical to SEQ ID NO: 7249
  chr10:22625382-22625782
  hyper

SEQ ID NO: 46951 - DNA, 167 bp, Homo sapiens; identical to SEQ ID NO: 7250
  chr10:22625811-22625978
  hyper

SEQ ID NO: 46952 - DNA, 83 bp, Homo sapiens; identical to SEQ ID NO: 7251
  chr10:22634091-22634174
  hyper

SEQ ID NO: 46953 - DNA, 330 bp, Homo sapiens
  chr10:22634324-22634654
  hyper
gcccaggcaccgcggccgtgacgtcacgcccgggactggccgttgcagcaagacggccgcgttccggttccggtaggttgcccgggagacgcgggtacacagagaagcggctcccgtcggaggccgagtcgtcgccacgatcgcccccttggtggactcgcaggccgagcggcttccccgcagagctcgaggagggcagacggcggcgggggcgccatgagtcagaggcaggtgctgcaaggtagggccgaggcgggcaggtgccctaactagctggcgccgaggagacccgggtgcggtgggctccaccgactctctctcccgcagtgt

SEQ ID NO: 46954 - DNA, 57 bp, Homo sapiens
  chr10:22726843-22726900
  hyper
agagcccatggaagcgcctggtcagagaagcgggaggaaaccgaacctaagaaaggg

SEQ ID NO: 46955 - DNA, 902 bp, Homo sapiens
  chr10:22764687-22765589
  hyper
ggagtcctcctcatttatgggcgtcggcgctaagcagctctggaaacgggcagacccagctgtgcagcgatgtccagtgtcgccgcatctgccccgcggggtgcagcatgagtcttcctttgtggcgtgcggctccatcggaacgcgcgttgcgacgacaaattccttttttcccccccgcagttaacagttctggggcagaggctggtggagaggtccagagcccactcagaccgagatgaagatgaggaaaagcatgagcaggaagaggctggcggctgcggcggccacagggaagagctcggtgcgcggcgcagcctcccgcgaccgcgactcctgggctgcgtcgaggagccgcgttgccataggaaccgtagcggcgccccagtgaaaccctgcgttcggacaggagaagctaaccgcggccgcccactcccacccgcgcttcctccccgcccccaccggccgtgcgcgaaaagcagagatccgagaaccgcgtgcggtacaaacggcaaaagcttcgcgcgcattttccgggagttgagcgcgcggccgcaggccgggaacctaccgctctcaggctcccagcccgggcgctacgaccctgtgggcgccgcctgtgcagcccctccttccagcccgctcgggcgcatcccccaggccgggccagcgacgcgggcaccgggagcccctcccgccggtccgggctttggcccacacccggggaccgcggagtgggaaaggaaccaaagcgcggcgcctggccgaccgcggacgaaattcgaggccggagggcgttttcttttttgcaaaattgccccaaagccagggccgcatgtacctactgtctcctttgccccacatgctccaagaaaataagacacattctaccccgagtccta

SEQ ID NO: 46956 - DNA, 42 bp, Homo sapiens
  chr10:23001786-23001828
  hyper
agaaaaatacaaaaacgatgcttttaggcattttaaacaact

SEQ ID NO: 46957 - DNA, 642 bp, Homo sapiens
  chr10:23001887-23002529
  hyper
gaaaaaccagcatggttttctgtcatttccattacgctgaaaaggacatacagacatccatcgaaatcaaaagcagggaaagcgaacttacacttttccccagatgctaagtgactgcagtggctaaggtcatggtcaaaattcacagctcgtttaaactttcctggctgagccaacagctccgatcatgtttcctgatcctatcgaagtggattaaaactgcaggagtttctcgctgtcagatcagcaggaggctatttcagaccctcgaaccgcagtccgcatagcccgcagcggcgcatcctccaatccccgactgtgcgtgacgctaacctttccacgcgttctccagcctttcccacaccccccacagcgggtgcggccaactcgggaccccctccgcccgcgcccgccgggacccccgcctgctgtccccgccccggccgcccttccgcagtcggtgacttctgcctgactccccaaagtggggggaggcgacgaagggaggaagactccccgccaagggctctccagcccgcacagcggcagggcgatgcgggagaagcgcagggatgccgcccgacgccagagccatatttacatcggctgctgctttgccaaaaagccgacttgtgcccagta

SEQ ID NO: 46958 - DNA, 30 bp, Homo sapiens
  chr10:23003235-23003265
  hyper
aggttgccgggggtcgccatggccgcctcc

SEQ ID NO: 46959 - DNA, 305 bp, Homo sapiens
  chr10:23216819-23217124
  hyper
aaagcactggattcaggtaatcgcggacgcacttggctcctcccgcactggccgctgccctcggcgggacaatgggcgccctagcagccccgagcgttcccagggcgcaggcgcggcgcggcgtggcgtcgcctagcaacgaggcacaacaagggactgggggttcgtctgctgggtttgcggagcagctagctactcggcgggatctcccggcaggtaaaggtaaccccgtggggtggggaggcccaaggcagaggcctgaggaaaacctgggaaaggagaaggtgccacgtgggcgcagactg

SEQ ID NO: 46960 - DNA, 283 bp, Homo sapiens
  chr10:23460284-23460567
  hyper
aaacaagcacacacccgggacgggaggtattaaaaaggtgtgatccccttgcttttagatttgagcagatggcccatggtttgaggcggttgcctccgcaggctcggcctttaccttcagcaccaaggccagcgcacctggctccacgaggctcccagaaccttcgccattccgggactctcatgcccagaactgcaataaaaaatgttatttctcaatgaaattcaccttcctaactcatgaattgcgcttcattcattgctcttcacgaagtggtcattgg

SEQ ID NO: 46961 - DNA, 117 bp, Homo sapiens
  chr10:23461478-23461595
  hyper
atcactgccggagccgccctgggcgcactgcacccagcgctgcttctctcgctggttctgtgccgctgctcctcccgatgcttgggggaccgcagggaggccgaatgacaaccgggg

SEQ ID NO: 46962 - DNA, 559 bp, Homo sapiens; identical to SEQ ID NO: 7257
  chr10:23461903-23462462
  hyper

SEQ ID NO: 46963 - DNA, 129 bp, Homo sapiens; identical to SEQ ID NO: 7258
  chr10:23462485-23462614
  hyper

SEQ ID NO: 46964 - DNA, 439 bp, Homo sapiens
  chr10:23462634-23463073
  hyper
cgacaaagcccggctccccaggtaacccgggttccctgcggacccgggagggggcgcgcggggccggagcaccggccttgggctgcgcgctccctccggcgacactgccgtccccctggcctccggcccggtcccccgcaggccaaaggctcatctgccgggcttgggtggcccgggccagcgccgcctgcggtccccgagtgcggctggctctaaggccggcgccctctccccggctttcagtgctcagagccaggccagcgggaaagaaggcagcatggtccgcaaaagacaggtggcagtggcagtcttgcatgatacttgtccttcttccctgttccccattttggggaaacactggaaacacttttctctttatgcgcattcgcgtctcagcaccgagtgctccaagccctgcgcgcagcgccgggcttggaag

SEQ ID NO: 46965 - DNA, 200 bp, Homo sapiens
  chr10:23463266-23463466
  hyper
cgagccgggcctttggctgcgccagggcccaggccgagtcatcccgccgctcgcgtcgccgcgaggcgggacaccgtgtgatacctttgccgtgggctgggcgtcggccgcggggcggagagcgggtgtcccacctcgcctcatcatttgatttccgccagcgtctgaggacggcgcacccaattcgttccactcgctgc

SEQ ID NO: 46966 - DNA, 30 bp, Homo sapiens; identical to SEQ ID NO: 7260
  chr10:23463731-23463761
  hyper

SEQ ID NO: 46967 - DNA, 39 bp, Homo sapiens
  chr10:23479978-23480017
  hyper
agagagaatacgcacgatggctgcgcttctgaactctcc

SEQ ID NO: 46968 - DNA, 40 bp, Homo sapiens
  chr10:23481009-23481049
  hyper
ggcagaggagagggaagagagcggtgcgaggagccccggg

SEQ ID NO: 46969 - DNA, 858 bp, Homo sapiens
  chr10:23481303-23482161
  hyper
gggcactccagggaggcccgggggcgggcagcccggcggccgcctagctgcccccagccagggccccgggagggaggggctcggacgggccttagaaactcaccaagaactaacacgcgcagcccggcagtcccgctgcccactgcggcggcgagcatggacgcggtgttgctggagcacttccccgggggcctagacgcctttccttcttcgtacttcgacgaggacgacttcttcaccgaccagtcttcacgggaccccctggaggacggcgatgagctgctggcggacgagcaggccgaggtggagttccttagccaccagctccacgagtactgctaccgcgacggggcgtgcctgctgctgcagcccgcgcccccggccgccccgctagcgctcgccccgccgtcctcggggggcctcggtgagccagacgacggcggcggcggcggctactgctgcgagacgggggcgcccccaggcggcttcccctactcgcccggctcgccgccctcgtgcctggcctacccgtgcgccggggcggcagtactgtctcccggggcgcggctgcgcggcctgagcggagcggcggctgcggcggcgcggcgccggcggcgggtgcgctccgaggcggagctgcagcagctgcggcaggcggccaacgtgcgcgagcggcggcgcatgcagtccatcaacgacgccttcgaggggctgcgctcgcacatccccacgctgccctacgagaagcgcctctccaaggtggacacgctgcgcctggccatcggctacatcaacttcctcagcgagctcgtgcaggccgacctgcccttgcgcggcggtggcgcgggcggctgcggg

SEQ ID NO: 46970 - DNA, 30 bp, Homo sapiens
  chr10:23483951-23483981
  hyper
gggcgcggccgaggtcgcttagccagaaag

SEQ ID NO: 46971 - DNA, 383 bp, Homo sapiens
  chr10:23484188-23484571
  hyper
ggcggggtgtggttccgtgggccgcagcggcctggtgggcgaaggtacaattgcggatagcctctaatactcacggccctgccgcaggacaatatgttggcagcatgctaattgctttaacctagtttcagacccaccgaggggttccccgcgcgccgcgggtgccatggacctcgtccaagagcaattaaagcgaggccgcgagcccgaccccgcagcgcggcctggccagacacgcggagattctgggtcgcaaggctcccgggagccccttggccgtggaccctctcaccccttttaagccttcgcgccctctccctccactcctcctaaaagaagatttcacactggagacagaatttcagaacgagagaaaataattc

SEQ ID NO: 46972 - DNA, 252 bp, Homo sapiens; identical to SEQ ID NO: 7263
  chr10:23488006-23488258
  hyper

SEQ ID NO: 46973 - DNA, 1024 bp, Homo sapiens; identical to SEQ ID NO: 7264
  chr10:23488342-23489366
  hyper

SEQ ID NO: 46974 - DNA, 30 bp, Homo sapiens
  chr10:23489687-23489717
  hyper
aagagttcttcttgcgtgcagcgctttcat

SEQ ID NO: 46975 - DNA, 205 bp, Homo sapiens
  chr10:23982397-23982602
  hyper
accgttgccactcgacggtggcaaaattgctggctgcactggagatcactgcagagcgctcctgatgcctcgatgctgacggcggatctggcgcgggctggggcgcattgcacattctgctccagccgggaggcggcgggcgggcaactccgggttggtcactcggcagccggcagaggtgcgcagaaggcgcacagaaccaggc

SEQ ID NO: 46976 - DNA, 404 bp, Homo sapiens
  chr10:23982937-23983341
  hyper
ggccttgacccctttcgcttgttcggagtgctttcgcccagcttctggcggaggttcacgcagggaggggactcaggtggaaaaggctggcccctttgatctctttgcaggaacttagtagacaggggccccgggctggagatttgcttcgagtaggctagaggcgcccttggcgcaccgaagctggctgccttgctggaacctgccgcgggggtggaggttgaaaggactctgagctcttcttccccaagccgaactccctcctacaggagcgtggaaaccaactctcccacaccgtctatcccactcttcccccctaaacctctagcgcagctttttaaaggcatcctgtgcagcctccaactttggggaaagagaatgcccaactcccgctctccaactac

SEQ ID NO: 46977 - DNA, 758 bp, Homo sapiens; identical to SEQ ID NO: 7266
  chr10:23983617-23984375
  hyper

SEQ ID NO: 46978 - DNA, 30 bp, Homo sapiens
  chr10:23984962-23984992
  hyper
gcttcgagggcgggcgagaccctgtctgtt

SEQ ID NO: 46979 - DNA, 30 bp, Homo sapiens
  chr10:25012004-25012034
  hyper
gctcccgaggagagcggccccaatatggac

SEQ ID NO: 46980 - DNA, 165 bp, Homo sapiens; identical to SEQ ID NO: 7267
  chr10:25012545-25012710
  hyper

SEQ ID NO: 46981 - DNA, 13 bp, Homo sapiens
  chr10:25012949-25012962
  hyper
tgtcttgaataac

SEQ ID NO: 46982 - DNA, 65 bp, Homo sapiens; identical to SEQ ID NO: 7268
  chr10:25241412-25241477
  hyper

SEQ ID NO: 46983 - DNA, 32 bp, Homo sapiens
  chr10:25241868-25241900
  hyper
tggagcaggaagcccgcggcaggaagagaacg

SEQ ID NO: 46984 - DNA, 50 bp, Homo sapiens
  chr10:25305302-25305352
  hyper
aaaatcctagtagagacggcaaagcgcagctggtgcgcaggcgtcaccca

SEQ ID NO: 46985 - DNA, 30 bp, Homo sapiens
  chr10:25463457-25463487
  hyper
gagtcatccggaacgcgagtgggtgcgagg

SEQ ID NO: 46986 - DNA, 530 bp, Homo sapiens
  chr10:25463806-25464336
  hyper
gctcctcgggagtcgcggctgcgctcgcggtgcgggtctgggcgcgcgccccgcgcctccgggcgaagcggtcgaggaggagccagtgccgggaggcgggaacgacctgcggcgggtgagactatggagcagcgtcttcggcggccgcggcggcagcagcagcagcagcttctgaacgcgcctcaatgagagcggcggtggcggcagccgggccgagagacggactcgggctgactccagccgctgggagcgcgaggccatgtaacccgctcggctccaggctgcgaggtgcgtaatccccagccggcccctcgcgcagcgggcacggccagcgctgccacaggtgacttgatttctgcgacggtagcttagccacccggggccaatctcgaaacattcttattttcaagtcctttggactgggtgccatctggagaagggggaagactcctcgaaaaagtctgactgttgagaaactgacgatccaaatttaaaaagtgattcccccccctcccgttccctcctcttct

SEQ ID NO: 46987 - DNA, 799 bp, Homo sapiens
  chr10:25464555-25465354
  hyper
cttggcgcagaaactcgccgaggaggtgcccatggacgtggcctcttacctctacaccggggactcccaccagctgaagcgagccaactgctccggccgctacgagttggcgggcctgccggggaagtggccagccctggccagcgcgcacccctccttgcaccgggcgctggacacactgacacacgccaccaacttcctcaacgtgatgctgcagagcaataagtcgcgggagcagaacttgcaggacgacctggattggtaccaggcgctggtgtggagccttctggagggcgagcccagcatctcccgggcggccatcaccttcagcaccgattcgctgtccgcaccggccccacaggtcttcctccaggccacgcgcgaggagagccgcatcctgctccaagacctgtcctcctccgcaccccacctggccaacgccactctggagaccgagtggttccacggcctccggcgcaagtggaggccccacttacaccgccgcggccccaatcaggggccccggggcctgggccacagctggcggcgcaaggacgggctcggcggggacaagagccacttcaagtggtctccgccttatctggagtgcgagaacgggagttacaagcccgggtggctggttactctttcctctgccatctacgggttgcagcctaacctggtcccggaattcaggtagggagggccggggggcaggggggaaggcaaaagcgaagctttccttccggtcttgtgggtgggtgcacgtgtgaggaaggaacccttggctgtgacgcga

SEQ ID NO: 46988 - DNA, 277 bp, Homo sapiens
  chr10:25465408-25465685
  hyper
cgggtgcttgggggcaagaagcgccccacgcccgtcagcttccggcgctcggcgaaagccattcattctctcggaccagtttccccgcactgggcgagggacaggcagcccttggcaggacggagacacccccgctgctctgtgcttccctccaattgtccggagagcagggaggggcgttccccaccggggggcgatgcgacaacttggcgagcgccgggtgtgtccgcggagtggcaagcctcagatgagaggcgaaaagggagcaggaggaaca

SEQ ID NO: 46989 - DNA, 254 bp, Homo sapiens
  chr10:26055805-26056059
  hyper
ccccaggatgccattatcagccgccaacagatggagcctatctgcgcgctgtcaatcatcccccacctgtggatcgcgcagcccagccaaaaaattaattgcttagaaatataaaatcggtggactcagatcggaaaggattaggagaaaaaaggttaagcgaggggaagaagccgtgctgtgccagagaaccttatcaacgtcggcctatctaagagtctgacgtactcagcgtttgatttggttttcaaata

SEQ ID NO: 46990 - DNA, 256 bp, Homo sapiens
  chr10:26222949-26223205
  hyper
ccggagtcccgggaagcccctcggcagccagccaagggccctgcgaggatgtggatggcgcggatggcgcggcctccacctgcgggcagtggagagagcggcgagaggaagaatattccccgcgagccgggataaggggccccttcggctcggttgacccaggtcagatcctcccgccgaccttcggcccgccctctacaggcggcccagttcttcccctgctcggctgcccctgcccgcccctcgagggagcgcc

SEQ ID NO: 46991 - DNA, 679 bp, Homo sapiens
  chr10:26223425-26224104
  hyper
ggaggacctgtgtgtttgtcggggcctggggtgagagaggggactcgaggggagaagtagagcgggaaaccaagagggggaatgtgaggcttgaacgagctggatgggagagctcgaggggaggagagggatgaacttgagggggaaacgggggcgggggtgaactcgagggggagccaggaggagggaacgggaagggtgaacctgaggggtggacttgagggaagatcttgtgggtgaacccgaggagggaacgcgaggggatagtgaggggggatctcgaggagggaacgtgaggaatgaacttgaggagggaacgggaggggtgaacgtgaagtggaaacaggaggagggaacgggaagggtggcgtaaggggtgaaggaagatctttaggggtgaacttgggaaggaaacgtaaggggaggacctcgaagagtaacgaggggcgagaactgagggggccctgcagggagactggagggaggaggcgccgagtctggcgggtgtcgcctcggagacctgtggcgcgcgcgggctttgcggcgccgcccacaggtggcgctgggtcggcccgtccctgagggaactgcgttccgggtgatttctcagaacaagcaggtcggtggagctgggctccctgcaaccccaaatgcatccgtaaaggagttttaattttaa

SEQ ID NO: 46992 - DNA, 165 bp, Homo sapiens; identical to SEQ ID NO: 7273
  chr10:26500705-26500870
  hyper

SEQ ID NO: 46993 - DNA, 143 bp, Homo sapiens
  chr10:26501026-26501169
  hyper
cgctcggccctcaagtgcccgggccggccttcgtgctccgaaacaagagacctgggagccctcgggaaacctcccccgacgctctctctcggaactcccgcaccctcctttctcaccagcccgccagttgtggcaaccctgtc

SEQ ID NO: 46994 - DNA, 528 bp, Homo sapiens
  chr10:26503615-26504143
  hyper
aagtctttaggtttccggagttgttattgtggtgacctagagtgtcagagccaggagagcaagaaagaggagccaaactgagccctgagttttcgaccacccgggctcccacagcctggaacagacttcacctagcacgctcagtgccagccttcggcaggacgctatcaacgcccgactggtttcctgctctcatcctggcgcctgggcccagttgccatagtgtggatcccatgactcctcagggaacccctggactcaggcacgcgagaagaagacagcgctttgtggagagaattgaccagggacagttatgctcgagcacacaggacttgggcctgtatgcgtccagcatgggccccaggatgtcccttctaagcgagggtcgaggggtgctcgcccagacgggatccccgggtctctgctttgttagcagctttggtggctggttcaggaggtcagagaaataaaacgacttgtgaacacaatggaaatgacaggcgctctggccaggcgcggggaaggcag

SEQ ID NO: 46995 - DNA, 693 bp, Homo sapiens; identical to SEQ ID NO: 7277
  chr10:26504190-26504883
  hyper

SEQ ID NO: 46996 - DNA, 227 bp, Homo sapiens
  chr10:26505008-26505235
  hyper
cgcccggggcgcgagctctcgaggtcgcagtgacctcagcacctgcttggaggaaaacggcgcgggaaccccgcttccttcccctcagctggagccagacctcaaacaaaaccccaatcgatgcacacagaaaactcctctgggccacgcttcccgcctcgccgaggtctccccagtctgcccctcgctgacgctggcgcgcagcggctgtggcagcacccgggaca

SEQ ID NO: 46997 - DNA, 176 bp, Homo sapiens
  chr10:26505441-26505617
  hyper
cgctttcctgagtccgggctccgaggacccttaggtagtcccggtctcttttaaagctccccggcttccaaagggttgccacgtccctaaaccctgtctccagctcgcatacacacacgcacagacacgcacgttttctgttcctgcgtgacacccgccctcgccgctcggccccg

SEQ ID NO: 46998 - DNA, 905 bp, Homo sapiens
  chr10:26505713-26506618
  hyper
cgacctgctccagtctccaaagccgatggcatctccgggctctggcttttggtctttcgggtcggaagatggctctggggattccgagaatcccggcacaggtaggaaggagaacgggggcctgcggcgggcgagttttgcggtggtctggggtttgcggaactacggagaagacgaaggaggtttttccacctgcaacaggaaacttcttcgggcgcttctccctgcttttgggctaagtccttgacggcccaagagctcaagacctctacagcctcttgtaccctgggaagacgcccaaatagtctcaggcccgttccacagaaggttggaagagccccccaaagaccgcggtgtctcggggacatggaattccgtggtcctggggcgctgctaagatccgggtgtctggaccctggggtgggacggagtgaccgtgaagatagaaaaaaaaaatgggaaaggtgagagatttctttatctagaaagacagtctgcgaaaaaatggatagcttcagtgtttaggaaaactcgtccaaggtaggcagggagaggaatttgcctgagccgattggcacctggaagggcagcggtgtgggcttctcctcgggaaacagataaaggaaatgagggctggcccgggccgccagcctcccgcttgccttctgcacctgccggcctcaccgagtcctgagcggcccccaggaggaaggcggcccctcctaggaccccggactgattgattttcacatagaacgaaatttcacacgtccgtctgttgttctctttctgcctcgctgtctgcctgcctattcttccttgcagcgcgagcctggtgccaagtggctcagaagttcacgggcggcatcggaaacaaactgtgcggtgagtgcccagggaccggg

SEQ ID NO: 46999 - DNA, 395 bp, Homo sapiens
  chr10:26506902-26507297
  hyper
cgtttctccatgcaacaggtaaagactcagcggggagccccggggcgcccctgcccctctctctgccccgcccaccgcggccggtgcgggtccggcgctgagagccggacaggggcgtcgaggtggcagcggaggcgggacctgccagaatcttcagataaaagcgagaaatgcgggacctgcccgctgggtccaagcccccgaacctggcctcggagctccaagagggctctgaggccgtggcgctcttcccccagcgcggcccttgggatggcgggtggccgacgatccaggcgctcgtgcgctcactgaatcgatgacggctggcttccctaggccgctggggcctcgggtgggactcagtttccaaataccgtgcccgagaattcagaatt

SEQ ID NO: 47000 - DNA, 833 bp, Homo sapiens
  chr10:26726983-26727816
  hyper
ggccggccaactgagcgtggttaaacgtggggagggaggagggtgaggttaccaacctgatggttgagaaagggcctccgcccagcgcgcccttcctccacccccacccgagagacagctgaactccggccgggacgcgcgtgttgccagtccagccctgcaccgcgtcccctgagggcgggctgcaggcggccgggaagccttgcacaaccggcccaaaagaggaagcccagaaagtgctgaagtaaacactttgggagaccgttgcaacataaagcggcctctcagtctttggtggaaccatcactaggccccaatcccttagtccctcttgcgtcgaggctgcaaaatggttccattcgccaggagacgctcctgagagaagggcgcgcgcggcacaggtagggggaggcgcaacgtttcccagaattaaaataaaataaaataaaataaaataaaaatcccttcaaggtggttgtgtagtaggggtgggatgggggagagaaaatcaggcgcagactcgatgagttggagaaagcagcccctaactcggagtcctttacgcatatgtttgtctgtcccactgtctctaaccaggggccttccttgcacctcggagcaaagcagctcggatagcgccacacgtctgcgcgctgcgtgggaagggcagggctgacagcacttcctccccggggcagcgacctggagcccgggtgcggcagtctgcaccgcgcgtcgctttcccggccggagtctcgccgccttcccgcgccccgcagcgccccgcagagcagtcgaggtaagtggcgctcccagtcccgggagccctggga

SEQ ID NO: 47001 - DNA, 303 bp, Homo sapiens
  chr10:26727867-26728170
  hyper
cgggtccgacgccgggggcagctccaggatctggcctcgtgaacgcgtgcccccaggcgtggccctcgagcgcagcgggtccccagggtcccctccgctgatctccactctggacccggctcgcgagggtgggggtgtgagggtttggggttcgggtttgctttttcccgagctattgcaacagatttgacagatttcctgcccaggaaattgctgcaaggtcaaacggggaactgctatgaacccttgcacgtccagcaggtcagcaggtcagcaggtcagcaggtccgggagccccagtct

SEQ ID NO: 47002 - DNA, 30 bp, Homo sapiens; identical to SEQ ID NO: 7283
  chr10:26986575-26986605
  hyper

SEQ ID NO: 47003 - DNA, 242 bp, Homo sapiens
  chr10:27444472-27444714
  hyper
cccattagccggggcgccttcgggaaagtgtatctggggcagaaaggcggcaaattgtatgcagtaaaggtaggaagtcaacgagtagcaaggaaggggttaggcccttcggccctccttcctgccccaccggcttgggcaggccccggggttgctggagcgaggagtctgggtggcctggcttgctgaagcctccagagccctgcgagctgacttctttttggggcgacatcagcggtcgg

SEQ ID NO: 47004 - DNA, 30 bp, Homo sapiens
  chr10:27792993-27793023
  hyper
ggttgaggctggggcggagctagacctcaa

SEQ ID NO: 47005 - DNA, 30 bp, Homo sapiens; identical to SEQ ID NO: 7284
  chr10:27928208-27928238
  hyper

SEQ ID NO: 47006 - DNA, 2822 bp, Homo sapiens
  chr10:28030824-28033646
  hyper
atgcggctggctctcgaaacttccctcggggatctcttgtctgctcccagaggctttccgtcgcttgtggtcaggggaaaggtcgccgactggacatagggaataaagcaaaggagcattgccgccccggctctctttaagctatttcctttgatcttttaggaaaagggggaaactttctaaaggagttggtggtttgtggaggaaagctgcagaacccaaaaacaccgtcgggccgtttcccgactaagggagggttaaaagtacggcaagctctgtcccatcatgtaaggtaaaaagacctcaggaaaagcacattcaaagggggaggaggcagaggcagccaggagcctggagcgtggcctggggcgctgcgctccctcacgggtccgggaggtgtcgcgcgcggccgccagcgagcccagccgctccccgaggcttgcgcgcctgcgccggagcctcctgggtttctgcctctttaaacactttgaaatgcaattccacccgaaacgactggtagtaacattttgacgaaaccgaatctctgttttactaagcagcgacgccgcagaacaagcagctgatgcaatcgttcaggtggaggcggctaggacggccgcccctccccggcggggcgcccggggagccgccggatcgggccaggcagagcctgccctccactcaccggcagtctgagcagctggcccacccgcaagctaccgccccccccagcatacccctcaccccgctaaactcaaacccggccccgcaggcccggggcctccccctccgggttcgccgcgggcccagccgagccgcgctcacgcccgggactccctggcgggaggcgaccttcccgactccttgggccaggcgagccgcggggctctggcgaggggctcgagtgaccgaagagaagtccgcggagcctgagcctggactccccgactgctcggcttcgcctgtttctctgcaccgagctcagtcctttttcctcgccctcagccgcgcaccggcacccacagtccggagaggggcaaataacccccaactccgaggtccaggcagcggagggccgaggggcagctcctggcgcccttagtctccaccaagctctttggagctgccccgacgaattgatccctcatgttttaagataggagccccttaacatgagaatgcgcgagccctggaggggcagacctgcactcccagggaactccgggccctttcccgtccacccgcccgcgttgccacgggaccccgtcacagctcaccacccccacccctccgggccgcaggcgggcagggcccccaggggagtgcgcatacccggtcctccggtgtctcaggccgaggttgtccttgaggggcgggccgtcgggaatgcccacctcggggcgggcgtgaggactgtccaggacaccgctgtagggccggccaccccgctcccgctccgaggcgcctccgtcctcaaacagcaccgcaccgctgagcttgttgaagacgatggtgttcatggtgtcggttggtagggacgcgcggcgcggccgcagagcctcggggctgggccgccgggagctccgcagcggggctcggcttctaggagaggaaggtgcatctcgttacttactggctgagagtgctcagacccctgcaggttcagggccttgaacttggccgggtcgccgggctgcggagccgaggggaggagcggcgccgccgcaactggcagggaccctgcggctctccccagttggctacacgcccccgcccctgcaggttccccggacaggtacctgccctcttccttgcctgggcgatcgatccccccaatcccttcactccccagaactacaaccgggaatcattcacccgcagaggcaaaggaaacgaattcccaaacgagcctctgggtttcagtttgaatctgggagaggcatactccggactgcggagcgcgaccggcgtgaggccgcgcgtggttcttcaatcacagcagaagactaaagcctctaggaaccccaactcggggcgtcaggaggggttggatggaagggaagatttggggtaatgtgccaaccgtatccacaagaccccccagctcatgagtcccaggccataccgggatttgggggattttcgtgttttctagatcgtggatggtttggttgaaacccccgcatcttctgtccgccaaggtcccccggggtgaggttgggttcaaggacaggaaaaagttaagtggcgtcaggacgaaagcaccacttctcccccttctctcccagaatcttcctatcatcccccaacgcgccccgggaagtgcatggtcctaaggtccaaggcgccaggacccaggtccccagagccctcaatcagtgccattctcttccgcagcgcgggtgtcagccgcgagctcgtagcccctcgacacccgcctctctctggggtctccggggaccctttcagaggctgtaaaggtgtcagaagcccaaggcaggaggcagcttggtcggcgcacctcccgggccactgctgccactgtcggggagagccagcagctcacctctggggtcgcggaggccctgagcctctgcctgccgcgcaccggcgtcaggagcaagtccgcgcggccgcggagccgcagagttacagccccaaggcgcgcggcggacttcgcccgccccatctcctcgcctcgcgcctcgggacagctcccgtttcctccgagcggcctcagcttcgctgccagcgccccctttgcccgtccagccgcggcatgggctgctactccactaacacacgcgcgcgcgcatacacac

SEQ ID NO: 47007 - DNA, 498 bp, Homo sapiens; identical to SEQ ID NO: 7287
  chr10:28033688-28034186
  hyper

SEQ ID NO: 47008 - DNA, 229 bp, Homo sapiens; identical to SEQ ID NO: 7288
  chr10:28034326-28034555
  hyper

SEQ ID NO: 47009 - DNA, 434 bp, Homo sapiens; identical to SEQ ID NO: 7289
  chr10:28034873-28035307
  hyper

SEQ ID NO: 47010 - DNA, 30 bp, Homo sapiens; identical to SEQ ID NO: 7290
  chr10:28035639-28035669
  hyper

SEQ ID NO: 47011 - DNA, 202 bp, Homo sapiens
  chr10:28287692-28287894
  hyper
cctgcgggggtgagcgtggagacccccagccgcactcacctgcagcaccctgccccccgcagtcggcgcccgcctgttgctaggacgcgggtcaacactgcgcgccctgcggccgcgcacgccggcgcccttgtgggaggcctacagggcccgtgccctcccccgggcgccgccgccgccgccttccgctcccagcctcacc

SEQ ID NO: 47012 - DNA, 30 bp, Homo sapiens
  chr10:28288125-28288155
  hyper
cctaactcactccacgcggtgggaaaggtt

SEQ ID NO: 47013 - DNA, 30 bp, Homo sapiens
  chr10:28592077-28592107
  hyper
ataggctgcgaaggcgataggcgtctcaga

SEQ ID NO: 47014 - DNA, 30 bp, Homo sapiens
  chr10:28822467-28822497
  hyper
ctctcccccctccccgacacacactcacag

SEQ ID NO: 47015 - DNA, 607 bp, Homo sapiens
  chr10:28957387-28957994
  hyper
taaaaccttttcctatcctgtcggccacattcacgaactcccgggctcccacgcggtttatttttaagacgctggtttaaatttctcgagttacggggggaaggggttgcggtgggagcgagactgagaaccacagcgcgaacaggggcgcattggtaccaggatcggtacagggatgtctccagttcctatagactctagcctcggggggagtctgtccagactacaagtgtctgtgcccctgttttattttgagacaagtcggggtcgctcaatgagtcagcacagaggaggcagtgggggagacagacagcggctgggacgcgcgggactggggcgcgccttgcgcgctgggcaccggagctgcgcacgggcggcccggggcgggggccccagagagcccgggagggcgtggactcggccggggaggggcgggctcgggcgcgtctgggttggagctggatgatgtaaaacagcgcggagctccttggcgcctcggcaccattaccttcaattatcataattggtgcctctctccagcgtttgcatttcccccgagggatctctcactagttcccgttccttctcctcgccctctctcgctcac

SEQ ID NO: 47016 - DNA, 46 bp, Homo sapiens
  chr10:28958043-28958089
  hyper
cgatctttttggatgttctccctgcctaaaacggatgctaatatct

SEQ ID NO: 47017 - DNA, 30 bp, Homo sapiens
  chr10:28965569-28965599
  hyper
gaagggcagccccgcgatccctaataaatg

SEQ ID NO: 47018 - DNA, 66 bp, Homo sapiens; identical to SEQ ID NO: 7292
  chr10:28966235-28966301
  hyper

SEQ ID NO: 47019 - DNA, 240 bp, Homo sapiens
  chr10:28966597-28966837
  hyper
caagggagccagtggccgccgacgggggaccgggaaacttttctgggctcctgggcgcgccctgtagccgcgctccatgctccggcagcggcccgaaacccagccccgccgctgacggcgcccgccgctccgggcagggcccatgccctgcgcgctccgggggtcgtaggctgccgccgagccggggctccggaagccggcgggggcgccgcggccgtgcggggcgtcaatggatcgcca

SEQ ID NO: 47020 - DNA, 309 bp, Homo sapiens; identical to SEQ ID NO: 7294
  chr10:28968984-28969293
  hyper

SEQ ID NO: 47021 - DNA, 30 bp, Homo sapiens
  chr10:29010986-29011016
  hyper
gggctgtctgtttgcgtggggctgtctccc

SEQ ID NO: 47022 - DNA, 30 bp, Homo sapiens
  chr10:29011505-29011535
  hyper
ccagctaacatcagcgctcagtctccccgc

SEQ ID NO: 47023 - DNA, 31 bp, Homo sapiens; identical to SEQ ID NO: 7295
  chr10:29737771-29737802
  hyper

SEQ ID NO: 47024 - DNA, 79 bp, Homo sapiens; identical to SEQ ID NO: 7296
  chr10:29738054-29738133
  hyper

SEQ ID NO: 47025 - DNA, 759 bp, Homo sapiens; identical to SEQ ID NO: 7297
  chr10:30024793-30025552
  hyper

SEQ ID NO: 47026 - DNA, 81 bp, Homo sapiens
  chr10:30026076-30026157
  hyper
gcttaccctggagccctgagaggcccctttgagtctccagaccttccagggataaataaaatctggcgacctgtgccaacg

SEQ ID NO: 47027 - DNA, 537 bp, Homo sapiens
  chr10:30348116-30348653
  hyper
gccccgggacccccgcgctccgagcggggcacctgaggggaggggacgcccctcccgggctggcaggcgccctccaccccgaggctgccgggctaggcaccgcgcggggggcccaggcggggctgcgactgggggtgcagacatcccccaccgccagggtggctggaaccggagcgacgtcccagctggagaagttggggggagtgcgggaggctgcgggtgaggcccgcgaagcgccgtgggagcggccctaatggacggtgggagccaggagggttagacgccgggacttaccgagcggctccctcatgccgcctcgcgccgccaccgccgccgctccggccggccggggaccagcgcgacccgccccgcctgcagccgccgaggccgagcatgcccggagaaccgccgtccgccccgcccaccgcccgggcccgccccgcccaccgcccggggctgcctcctctgcgctgagggcggtatccaggccacgagcttcctaggcttttggggtccgcctgcgtgggtcgcgcagaa

SEQ ID NO: 47028 - DNA, 30 bp, Homo sapiens
  chr10:30722680-30722710
  hyper
ccttccctggggaccgggaagggcacaacc

SEQ ID NO: 47029 - DNA, 250 bp, Homo sapiens
  chr10:31073232-31073482
  hyper
tgggggacggcgctacgactctaaggttttaagcagtgatcccagcaggttaactggggcagtaagtgctgtctttctcggggagggagggagttcagctccaaaggcggcctggttcgcaggctcctttccctaagatcctttagaaatcgttcccatcccagaaaggaagctggggcgcagctgtgagcgcccccctctccccccgcctgcccccaccccctctgagctccccgctttgctctgaaaa

SEQ ID NO: 47030 - DNA, 352 bp, Homo sapiens
  chr10:31073814-31074166
  hyper
tttcagaataaatccccacttcggatcccgccgcggcgaagctgcgctgggccgcccgcacacacctgcgggtccccgagctcgcccgggcgcccccgccaccgtccccagagcgcgcagggagcggggcgcgcgatcacaccctccgcgctgcgcccgaccactcgggctttcaattaggagccaagctgagaaaagtaggcttttctttatgcacgcctcgccgaggtcaggttacgacctctcaaccgtcttcaatcggcggtggcatccatattcatgaaggctaattaactctgaaaggctcggcggggctggccctccccgggccgcccagcgccgccccccgcgg

SEQ ID NO: 47031 - DNA, 31 bp, Homo sapiens; identical to SEQ ID NO: 7299
  chr10:31388316-31388347
  hyper

SEQ ID NO: 47032 - DNA, 518 bp, Homo sapiens
  chr10:31422658-31423176
  hyper
gcctcgtgggccagcgcagcttgctcctctgcagacccagaagcatttgtgcgtcccgggcgtggcaggcccggcgcccactccgccctcccgcccctcccccgcgccacgtcacccgggtcacgtgagtgaccaggctcctcaccccaacccccctccctactcccgccagactcagctgctctccccgggagctggggagccgggggcgggcagccgcgtctgtcctgcccctcctcgccccctcccccgcagcctgaggagggcgttaagcaaggggcttcggagaaattagaaccagcgttctaaattaaggggagcagatgtccttgttttgctcgcgaggcctgggtggcctgctgttcagacagaaatcgttgaggcgctgaccttccgggactgctgtcaatctccgcgtgcagatggccagcccggagcctcgccgctcccctgcattggaaatgcggcagccgggggtgccggcagcttgagagaaaagtctgcgtggagggggggtg

SEQ ID NO: 47033 - DNA, 186 bp, Homo sapiens; identical to SEQ ID NO: 7302
  chr10:31607135-31607321
  hyper

SEQ ID NO: 47034 - DNA, 2174 bp, Homo sapiens
  chr10:31607940-31610114
  hyper
ttcagcagtgcccacggttgccgcaaaccgcccggtccctagcaacaaggttccggccgtagagcgagagcctctaggtgtaaggaaggtgatgtcgtaaagccgggagtgtcgtaaaccaggtgcggtggggaggggggaggggtggaggcggaggggtgggggggaagggggagggagggggaggaggtgactcgagcatttagacacaagcgagaggatcatggcggatggccccaggtgtaagcgcagaaagcaggcgaacccgcggcgcaataacggtgagtggcggaggggaccggggagcggcggagtcagggggagctgggcagccggggcgcccccgggggtgaggggggcgagccgggctgggggcagccggggcagggacggcaaagtggagtgggaaagtagaaagtagtgctctctgcccccctccgctgccgccgctgccggagccgcgccgcggccgctcgctctccctgaaccgttatgtctcttacctggtctctctccgcctagcggctcccgccgcccctgccgcctccctggaccgttagccggcgccgacgccgccgcatccccggcgcagggcgggcggccgggacgcactggccacttttctggtcccgggtggagcggctgttgcttctttccgcacttttccccactcttgtgcccttcggcgcctccctctccccctcctcctggccccctcagcgcgattctccctcagcgcccaggcccccgggagccgcggaacaaacttgtgcccggcgctgaccgtgcaaagtggcttccgcgcgccgcggccccggccggcgccgtcgctgtcgctcgggccccgcgactcgggccgggctgtgggcgcgcggcaggcgggctgcggcggcggcgggacggggcggccgcgggttgcgtggggtttgtgcgcgcgtgtgcgcgggcgccggctgtgcgcgccgcgggcggacagggttcggccggcggcggtaaagttgggacccgcgggccgggcgcgctcgcgtaacggggattagaggcgcgggggcgcgggtccctaagcgcccctcctccctggcgcctcccgctgcccggcccagagccccggcctggggactccgcggcgagccccgcgagtggggtccacgtttggcggggcgcggcggggcggcgcggggaacaaggcaggaaaggtacccacttaacgccgccgggagccgcgcggatgggggcgagctgggcggcgggtgtgtttgcggagttgttacctgggcttagagaccgggaagcaccacagacagatccccctcccggggcagacgaggtctctgcgccgggatgggccggtgtgcgtgcgcctcgcgcttttctctttcggtttttggggaagttgttacctgggccggacgcacggagcgctgaagccggataatggggcttggatggcgctctgggtctcgggtggaaggagggtgggggagggggcggacggaccgacggacgcgcggggctgctacttgcaccgcagctgcagtgtttattgatttgtgctgctgtgccaagggaaacacacacccctctgcctggcgtgagagttaaaaaaaaagagagacagcccgagggatcgagacctgaacatgtggtggtggttgcacagtcgccttttccagtttggagagacgttgtaagttgattgtatttctggttatctcggggcgatgctatgctttctctccctctcgtgcagcagcgaaatgtctgctgattgttattgtctggacagttcctgtggcgagaggggcgagacttgtccgcccgggggcggcgggagcgcagggagagcagcccccgcctgcgccgccccggtacctgtttgtataataatgggcggcaacggccctgccgccggccgcagcccaggctatataaggaattacacgtacatttcggaccgaggggctcgctttggttcctgcgttatttttaaaacgacttttaagagaggggcaataaatgcgtctataatgggaccgctgcagcgtcgagaaaacgaggaaatacgtgtttaggagaaaactctctcgtgctcccccagccccaccccccgcgcctgggctccctttctccctcccctctgggatgcgaaacgcgaggttttgtaacctttcctg

SEQ ID NO: 47035 - DNA, 30 bp, Homo sapiens; identical to SEQ ID NO: 7304
  chr10:31892175-31892205
  hyper

SEQ ID NO: 47036 - DNA, 30 bp, Homo sapiens; identical to SEQ ID NO: 7305
  chr10:32217898-32217928
  hyper

SEQ ID NO: 47037 - DNA, 101 bp, Homo sapiens
  chr10:32345467-32345568
  hyper
tcctggcccggggtcgcagattcaaattttactgcactgcccctgtcgcagaagttcctggggaggcagggcggcagctcccacccgccatcccaagccgc

SEQ ID NO: 47038 - DNA, 30 bp, Homo sapiens
  chr10:32667690-32667720
  hyper
ggttaacaactttgcgatggcaagcaggcg

SEQ ID NO: 47039 - DNA, 30 bp, Homo sapiens; identical to SEQ ID NO: 7306
  chr10:33247469-33247499
  hyper

SEQ ID NO: 47040 - DNA, 3038 bp, Homo sapiens
  chr10:33623013-33626051
  hyper
acagcccaaggatcaacgtcaggagggagcccaaagacctgaaatcctcctgctctaaaccgcctgatctcatttcttcttctctcctcccagataaaagtttccttcgcccgggagtcggttgttcccggctgatcccgggaagccccgcctgagccccggtccggggcgggcagctgggagccggggcgccgctgtcacccgcgcctctgcctgtcacttaccgttgcgaaaagcgccggccggggcgaggacgagggcgagcacggcgcagaggagcggcagccccctctccattctcccttctccgggtccgcaggcagacgcgggagaacgaggacgtggggggaaatgcagcaaagaggagaatctaagcgatccgaagagccccaactccgcctagagctgtacaatcctcagcccgtcttggagaaaagaaagcagcgaggcaatgcctggatccgagaggaacgcttctctttttgtgtctcaagtcgcctgcatcctgtcatttagctccggcttcctctcccttttcccacacttgttcctcttccaggagccactgcccgggccatgtctcaaaaaaaaaaaaaaaaaaaaaaaaggccgggggggggctgtgggtgggagggggaggagggaggtagggcaacacacaccaaagccaatttccaggaagaaaaaaaaaaaatccggcttgtttctggacccgttggagccgcggagctggcgcccaggggaggtccgggtgtctgcgggaaggaggggaacgagcaatgaaaagatgagcgggagacagaggagtttcaccaactgcacccccgcctcccctcctgcggcctccccccactccggagcccttccctcgcttcctcccgcccctctccccgcttgggctcgcctgtaattgcctgacaggagactgggaggaacaactttccctccgagtgctctccccgtccgtctgtctgtctttcccagagaccctgcagggatctccgcgggaaggaaggcgctgggagtctgcgccccggtcgcgtgggtgcgggcgtcggaggaaggggcgcggaggtcagtgccagccgcagggtctggccagcccacctcgcgtgctcgctctgcacccctagagggagagctgggcagctcctgcaggcgcagatcccgccgccgcgcagtgcggagcgcccgggaggtggcggctgcttctcgcaacttcaaatcccggggcccgcgccctcggcggcgaggaacgcagggtcaccccctgccactcctcatcgcgccatcctgagacctgtggcggggagcagcggggcacccctggacgcccctgcccagagctggagggcgaggaggggaaagccgggctggagtgggagccgcaccgcgaagccgggcgaggggcagcagtgtcgctgtggtgtgaagcgaagacagaccgcctgggcgggcgaggccgggctgcagccccacgcggcctccctggcccgcatcagggcgcgcggctgggtgccctctgcgcgccgcggaggcttcattgtttcccgagatttggtgcccgttcctctggggcagagggaacaccggagggtgggaggtgctgcgccttccaagcaggggggcaatcgccgcccgaccccgcccaaccttgtctgggagcccaggtgctagggaggggtgtggaaatcaggggtcgggcggcccccgtttctctgtgcatcccgagggagggaaagagtggcgggggaggggtgctcttcgctgcgccctctcagtgtccgctcccggccacagacaacgtgcacgccggccctggagctcctgccacccccacttcccacagcggctcgtgcccccagcccgctggatgccccccaggcccgtccccgagggttttccgagaagtgctgcaggaagcgtttgtagatgcgaaaagcaaggacatttctgggaagaaacaggttgcggtcaccgatcaggccccggagaagggtcagtgcccacggggcacctcccagggagtttgtgggtaaggtgaaaaggtcacacgcctcctggggattggcgtctacacacacagccaaagtacagcctgattcctacctggcacaaatagctggccaaagggaggtaggaatgctggcaaggagactctggtcaaaggttttggcggaagaaaaaggggcgggcagggagaaagcccaaggcgcgcgggccccaggccaggactgcgcgctcgcgactcgggctgggagcagtgacgtgcgcccctcggggtgcaggccgttcccgggccagtgggaggtgcacccacggagcccgcactcgccactctcttgccccgggtcaagcctgtcttctcctccccacgcgcctcgggattcccagtcgccaagttggaaactcggcccccccgagcgcctctttcctctgccagtttcctccttcttctcagctgtcggacccctgggaggcgcggggtgggaagtgggcaccgaagggctgggagttaaatgcctaagttgagcggaaggagcactgtcgaagccatgggcagccctgcgcccgggcaggcgggcaggcgggaggcgaggcgggggcgccgaccgcgcccagcgcagaccccgggggagtgagcgccgcagaggcagcctgggctctcggctactacccgcgcgcggtcgccgcctccccaggtgcagccccgccagtcccagcccccggctgcgccgggcgagcggcatcatcagatttagggtgacccggagcgacctcggtccaggctcggagggagaggcgcctctcaggacctggcaggttgacagggaaggggaaccgggagggagcggcggccggggcggcctggagtctcggaggcccgcctgcgtcctggggggacccgacctccgcgctcgctccggagcgcccgtttggatagctctgagcctcggcggggtgagcgagggggcacacgagggagacttgagctgtgttgtttttagaaaactgccgccaatctctcttcccctttc

SEQ ID NO: 47041 - DNA, 2584 bp, Homo sapiens
  chr10:35102969-35105553
  hyper
actcccaagtcaggcccggccccgcagcccagccacatggaaccagcccgggataggtaggagctgaggtcctcgcaggaaaacttttcattccgcgactcttccaaggttgtgctttccagagcccagcaagtgggatcagctcagtaaatgctcgcaagcgagtgccaagtgccagcggtggccctcccgggaacgcctccccgaccccaagccggcgactccccaaaccctgcagcccccggacgcgacgggccgcccctgccggcccctaccagcaggggacatggaggaaaagccccccgccgctgttccgcccccgcccgagtaagggagaggaggcagaaggctcgcaacccgcctctgtcggaagggcagtcacgaaactctcctcacaccaaaagttcccagtccccggcctgtgcccccggggcctgggagccgggaaaggcctggggctggatttcccggcctgcgccccccgcgcgctggctcggggcttggctgggtctgcagactccggggaggcgcccagggccggcctatgcgccgctgcccggctcgccccgcgctaccgaggccggagctcccgggcggagggtgagggcgggggccgcgggacccggctgggtgtcccagaggctgcgccccggcccgcgcagagaactttggcgcccgcagtccggggcggggggcgcccgcgaggcccgaccggccgcactttccctttccccgcctccctgcgcctctcctcccccttccaggaagcgccatattgatcccggcgccgtccccgccgccgccccctccccgcccgcgcccccggcccctcaccttggcgatggccttccggtagcgggtcaccgcctgctggatgaggctgaaaactttcatgtggccgtccccgcacggcacgaccacccgggtccgtccgaagcacacggtcactttcatgccgccgccgccgcgggcgggcccgcgcccctcgccgagcgcagccggagcagccgaggccgggaccgaggacgctgggcgcggaggagccgctggggactcgggcgcgcgggcggctaggggcgcgggcaggcggcggcgacgccggggggccgctcagctcgcatgcccggcccggccgccctcgcctcgcctcgcttcgcccggggcttgcctcgcctctccccgccgcggcgcccgcagcctccggccacctgttcggcgtcgcggcgcgctcgccggcggctgcccggggctgtgtggcgctggcgctcgctcggggccgctgggggaggggacggcgggaggggaggggaggggaggggaggggagggggaggagcagggcagggcacacaacaccgcgcacatgcggcagggggaggcgcggccggctacccgcgcggggcggagcgcaggaccgcagctcgcgcccccgccaccgccctcgggggccgacctccttccctccttccctccctccctccctccctccgggggcgcgggacccctcgccccagtgccagcacgggcaggcggccgtctgcccccaccagccctggcccaggcgccccccagcccccttcaccccgcccgcccagcaccctgcagggctgcgtcgcccctcctcggggacgccccttccacgcctccagaagtctccacggagccccccttcccctttctttgtcacttttaatcccattcctcgaactggagggttttgggtgcaggcgctcccggggaaagcagtttgtgctcagtgcggtgagtcccctcctcaccgccccggaggctccagcccgagcctctccgcccgcggggactcgagcctgcagcttgctcggctgggtttctgccctgcccgctccctagctctgctgcagggccggcagcggcagttctgcctgaaacgcaagaattaatagtctgctctggggagacagtggggaagccgtgagcgaccgggccttttccagaggccactatttaccttgaagtttcctgttgaccctctgctgacccacccgcttaaatagattagaacttaaacatcgcaattctgatacatttatttctttgaagttctgcagcataaggaatcctaacgcgaatccgtgaacagtctattccgacggcgcagagaaatctcacgcggggatccccacgatgtgccggcgcttaacgcagacgcccgaacccaggggaaggctgcgactccgcgatgagtgacatgcgggcttgagacgttctaaaggaacgtggaccgagttagggaacgtaactgaagctcattttgtcttagttatggactatgagtccttaataaatgtatgtcattatgtttaaagaatgacaaatgtctgcaaagagtggtccctgtcccaagccctttccagactatgtgaaattcttttttgccagttgtttccaagacacgtgaaagcaatcaagctcccctgggttggcgcagaacttgagcacttaagagctggaagagctggcgatcgaccatccatcccactccacctccaatcttaaaacaaggaaacaagacacgaggttcgtccgcttgccacactccctgcgct

SEQ ID NO: 47042 - DNA, 30 bp, Homo sapiens
  chr10:35378911-35378941
  hyper
ggcttacgggtcagcgctctggggagccga

SEQ ID NO: 47043 - DNA, 335 bp, Homo sapiens
  chr10:35415500-35415835
  hyper
cttggggttggcggcgttaggaagaaaccgacctcgagaccctgaagacctgacaacagccgttactctggctgacaagtcattggatttctggcgcacgcgcggcgcggcacgggcagcttccggtttccagccttgcccccgcccctaccttccgccccacctccaggctagttcctcctcttggccccgccccctgaccttccttctccctatccctaggccccgccccctgacccgcaccttcccgccgcccctccccggttccatttcattgttggattgtggcgcttcactcctgctggcggccggcagggggcggagttcgagcctgg

SEQ ID NO: 47044 - DNA, 31 bp, Homo sapiens
  chr10:35626505-35626536
  hyper
agccaagttgtgcacgcgtttgtcctataaa

SEQ ID NO: 47045 - DNA, 849 bp, Homo sapiens
  chr10:35929333-35930182
  hyper
cgctgcacgccaccttctcgtggcccgccaccaggcgcactaggtagcccaccgacacgaagaggtagcaggccgagaggaagataatgggccgctccgggtacttgaagcgctccatgtcgataaggaaggtggagacggtggcgaaggtggacacgaagcagagcaccgaccacaggccgatccagaagacggtgaaggcgcgctcgtcctggctgaaaaaggggttgtggcagggcagcgcgcagttagcgatctggcctgtcttgacgcggttgtagagcgggtggcgctcgctggacacgctcaccataggcgcgcggcactggcacccgggctcgcagggagccgcgccgccgccagggggccgcgccttcccgccaccgccgccgccgcgagctgggggcgccgccgcgtccccgccgccaccgcccctgccgccgccgcggtgcgggggcctggcccccggcgggcggccgtggccgctgcccgaaggcggctgctcgccgggcggcggcggcggcaggcggcgcggcgggctgggcgcggcggtggttaggtcggtgcggttgtagtccatgcacagcgtgtcagggttgccttgctcgggcagccggtcgcagcgcatgcggtcgggccaggcgaagccgtactggcgcatgagcggcgcgcagccggccttggcgcgctcgcacaccgagcggcagggcggcagcggcttcttgtagtcctctaggcagatgggcgtgtacatgctgcacaggaagaacttgagatcgggcgagcactggatctccaccagcggccagaactggtgcacctccaggcccgcctcgtcttgcgtgtcgt

SEQ ID NO: 47046 - DNA, 117 bp, Homo sapiens
  chr10:35930421-35930538
  hyper
gcccacgagagagccgcagacgggtacagcgggtgatctggggtctcccttatgcttcgcccgggaggggggtctgccgataatctaaccccttctaggggcgcgtccgcagcggcg

SEQ ID NO: 47047 - DNA, 131 bp, Homo sapiens
  chr10:35932103-35932234
  hyper
ccctgtcttcccttcgttctttcaggacgtctattcatccatcccaagttcacaggcttttgccagagcctccttttctctggtgggaggcggcgctgcgctctggcgtggactccgcgacacgtatctgc

SEQ ID NO: 47048 - DNA, 30 bp, Homo sapiens
  chr10:38146149-38146179
  hyper
cacacagactccgacggcttcaggatactg

SEQ ID NO: 47049 - DNA, 77 bp, Homo sapiens
  chr10:38146515-38146592
  hyper
cagtcgctctcccccgcagccccgcctcctccccgcgggctcagggcacaaaaagcgcacacgcacacatcaaacgc

SEQ ID NO: 47050 - DNA, 30 bp, Homo sapiens; identical to SEQ ID NO: 7316
  chr10:38146944-38146974
  hyper

SEQ ID NO: 47051 - DNA, 30 bp, Homo sapiens
  chr10:38265524-38265554
  hyper
tccccaccctagggcgtaagaccaaaaaaa

SEQ ID NO: 47052 - DNA, 30 bp, Homo sapiens
  chr10:38265922-38265952
  hyper
ttgtgcaaacggtacgcgaaacgtaataaa

SEQ ID NO: 47053 - DNA, 30 bp, Homo sapiens; identical to SEQ ID NO: 7317
  chr10:38654417-38654447
  hyper

SEQ ID NO: 47054 - DNA, 30 bp, Homo sapiens
  chr10:43047769-43047799
  hyper
tggtgtggagtccgcgcccgcagggtccct

SEQ ID NO: 47055 - DNA, 308 bp, Homo sapiens
  chr10:43133482-43133790
  hyper
ggacatgactggagggcagttcgaaacctaaagaggatgaacgcagaacgggcaacagagtccgtatgtcgggcgggcgactgcacccgccctttcctacccaggtagggccgcgccctagcacatgggcgtaaacacgctcaaccagagaactgcccctcccgcaaggctcagcgctcggaccgcgcaagcgcacatgccctcctccgcggcccctacaaacagggcaacgcacagggcgtagcccgctccctacagaggctgcgccttagaggaactggcgtagcgtcctggtagacatgctgcag

SEQ ID NO: 47056 - DNA, 164 bp, Homo sapiens
  chr10:43134085-43134249
  hyper
cctggcgctgttggcgcccaacctggaaactacctttcccgtgaggacgcgagagcagcccttcgggattggcagagaggtgccccgctaggcagtggacagatgcggtctgagttggtgtgggaactgcccgcagccctggctctcccggggcgacccaaagg

SEQ ID NO: 47057 - DNA, 1440 bp, Homo sapiens
  chr10:43248678-43250118
  hyper
gcccagcctctgacacgccgctcccagcgcggccacgccacagctccgggctgcgctcccccaggcaaaggcgccgccggcgcgtccagcgcggcctcctcctccaggcggcgcttgtgagtcaatggaaaagtccttggcgaactgagcagccgcctagtatatctctgaagcctcctgcggagacttcacggcttgtcccaggagcttctacaacagcctggcattgagagtagagttgtaatattttccgccagtttttcccagcccggccccgaagcgtctgatcttaaagtccacgtatcagactccggggggcgtccctgcaagagcgccaggtccccgacacccaccagggaatgaatctgcgcccaggtccccgacacccgccagggaatgaatctccgtcccaggagaagggcgtggcgaggggagaagcaacaaccacaggacccgtgacagtggccaagccttagaggccccgcatgcctgccaggcgcccgagcccacgcagtccaggtttccccatccgggcgggaaccagctgtttcccctgcacgggcgagggcgctggggtcacctccgccgacgccaggcgtgagctccagaacccgctcccaaccgcccggtcccgtgagcgcggggagcctggctctcgcctgacaataaagaaatcatcacggacagaaggaaagaggagcgaggctgggaagggagcggctttaatccggggtccgcccccttcaattctccagcgcagcggccccgaaagtggggtggggacggggattgaggctgagctcgcttcttccttgttttccgggtctcgcgcctctgaagcgaactgggcctggaggggtgctggggatcgagggagcggcgttggtgggtgaccgagggaaaggtggggccagcccctgggcaccggtcggaggaggattacgaggcggagccgctgcctgcccgcgcctcacccgcttggtccacccaatagctccgctgtagactcgcggcggcaggagcggcgggccagatggtgattacaacccggggcgctatccctttggaacctgacccccaactccgctcagtaaccggatttccggaagccgcgacctcgaagcccccagcgtttctccaccgacggcggggccggggctcctggaagcctcggagccgcagctccagcctgcagcgcacgccttggcccccagggagcagagaggcagagtacccccctgcatccggagcatagcaagcatgccccaggctgaggacctgcgacttggtgggacttcggtgcccgcccctccgccactacagggagcagaggcggctctggaagtcggtttagtgcggagaccgcgaccggaggagcgcagaacgctcctcccagcgtcctgggctccgcaggcacaatttttaaaccagaggcgaaat

SEQ ID NO: 47058 - DNA, 643 bp, Homo sapiens
  chr10:43250136-43250779
  hyper
cggggagggagcgtggccgcctagccgagccccttctctggctccgcccgcttttgcgccgcgaggccgcctggtgagttccagggccctgtggtcccccagccgccggcgctctcgggtgtcttttggccgcggcaggaacggagctgggcgctcagacggcgccggggtcgtttctgtgcccccgcccggtggccggagccgcagccttgccccttccccactggggcagcgcctgcctttctcgcggccggaccgcgccggagtcccaggccccaggcagcccgggccgcagctgtcatggagaagcccggcgcgtacttggggtgcccggcaggagccccggccgcctcgcgcccttcttctcacccacgactgtggccggcggcggcctctgcttcccggacaaagctggagatgctgctgcggagtcggccctgggacctgcttcttctcttggctccggggcccgcagccgtcggggcccggaagggctccccggggcgttccctcaggagcggtggccagggctgatggggcgtgtacgacgcgggaccccgagcccggcagcagccaagtatggcaaggaccagcgcgagcatctccccactgcggccggggacggcgtggggtgggagccgac

SEQ ID NO: 47059 - DNA, 78 bp, Homo sapiens
  chr10:43250854-43250932
  hyper
cgcccaggccgccggctcggtgagcgcagagaggggcccccggtttatgccaaacgcgtgtcttctccaacctcctcc

SEQ ID NO: 47060 - DNA, 30 bp, Homo sapiens
  chr10:43361300-43361330
  hyper
agagctcagcgtgggcgagggcgtcaccct

SEQ ID NO: 47061 - DNA, 261 bp, Homo sapiens
  chr10:43361589-43361850
  hyper
ggtgtatgcccgccccgaggctccaccgcgcctgtgtgccgggaagcctggctccacaggaccctcaggcactgggcgcgccgtcgctgcagctgccaggagctcctgaggaagtggctcgaggccccggggcgggtcaggcgtagggtgggcccgctgccctcacacccgccccggccgcacacaggaggcgcgatcagcagagtcgttggacaggtttggacaccggctgtctctttcgggcctcggttttcgcgtctg

SEQ ID NO: 47062 - DNA, 213 bp, Homo sapiens
  chr10:43428363-43428576
  hyper
gagggccctgctgaggaaagccggtgcctcctgctccccagccctgtgctcccgcgcccccagtctcagcgggttccggcttagtccggcaccctgggggaatgctgcgctctggctggcagcacgccctgcctgcgctcgccccgtctttgctcctggtcaccatgcgtcctgcacagttaccatccgtgcccacatgctgccccggggtcg

SEQ ID NO: 47063 - DNA, 340 bp, Homo sapiens
  chr10:43428636-43428976
  hyper
cgtttgcatatgggcctttccattaagaatcacgcgctccgggcagggccagcgcgctgcgggcagctccctaagaccccgacgggcgtaagcctctctgcctctctgtccagtctggcctgggacagacacctgtggacacctgaggcaaagggaagtcggggcccagggacatctcaggggaatagggtctcgggaaaaagggagaggctgggctacgaaggggagctggggtaggcaggggagcacagccctgcaggagggcaggatgcccgcccggggcggaagagccgagggcaggccctggggcggggcgctgggctatggagaccacgctcct

SEQ ID NO: 47064 - DNA, 130 bp, Homo sapiens; identical to SEQ ID NO: 7322
  chr10:43429066-43429196
  hyper

SEQ ID NO: 47065 - DNA, 259 bp, Homo sapiens; identical to SEQ ID NO: 7323
  chr10:43429215-43429474
  hyper

SEQ ID NO: 47066 - DNA, 378 bp, Homo sapiens
  chr10:43571918-43572296
  hyper
ttcccctgctcagctcttccccgcctcctgcctccggccccagcagaggccgcgctcccactgcgcctctcgcctctgagaaatggcgcagcaagcgctccgcggagagcctggaggcggggcgcccttctctgagtccgcggggtcgcaccccgagccagtcggccagacctgcatcccgcgtagcatccctgccctctctgtgcagcggaaagggcaaaaggcagggactgcaagcgggcgcgcaccgggtaggaagagcggctctgcgtaggtgcgcggacccgggctcctgggttccatccccgccgcgcacctcggggtccgcacccggctcctgccgggcccttttcggccgcaccccgctcccgcaccccg

SEQ ID NO: 47067 - DNA, 652 bp, Homo sapiens
  chr10:43572558-43573210
  hyper
ccggaacgtgcgtcgcgcccccagtgtccgtcgcgtccgccgcgccccgggcggggatggggcggccagactgagcgccgcacccgccatccagacccgccggccctagccgcagtccctccagccgtggccccagcgcgcacgggcgatggcgaaggcgacgtccggtgccgcggggctgcgtctgctgttgctgctgctgctgccgctgctaggcaaaggtgagttctgccggccgccggctcccgcaggggccagggcgaagttggcgccgagcagcggagcgggcgcgttcagaagcgcctttctgtttgccgtgggcagcgggctgtgcggtcgccggccacccggcctcggctgggagcgcagtggctgcggcgggcggcgggcgaagggcaggacgcctcgggccgggcgcctcgggccggggctgggcgggtctcgggcgggagcggagcgcgggccgggccgcgggggtcggtgctcagaaccctagccatagccgcaggtctcaatctggccgcgccctgcgccaaagccgcgtcctggagcaaacgggacagccgtttcggggccgacctggcggacgggtcagggagccccgaaagcccgcgattcgtgcggagagttctgtttcggcaggagacggctc

SEQ ID NO: 47068 - DNA, 30 bp, Homo sapiens
  chr10:43593497-43593527
  hyper
ttttaaaaattcatacgattttttattgtg

SEQ ID NO: 47069 - DNA, 171 bp, Homo sapiens
  chr10:43600550-43600721
  hyper
ggtgaccgtgtacgacgaggacgactcggcgcccaccttccccgcgggcgtcgacaccgccagcgccgtggtggagttcaagcggaaggaggtgcttgtccgcgcgtgctgtggtctacccagtgtctgtctccggccacagttcgtttctcggtcggtttagtgtccgtg

SEQ ID NO: 47070 - DNA, 30 bp, Homo sapiens
  chr10:43633243-43633273
  hyper
ggagagcttcccagcgtcccctcccccgcc

SEQ ID NO: 47071 - DNA, 30 bp, Homo sapiens
  chr10:43634197-43634227
  hyper
agcgcggccagagacgattggttcgcttgt

SEQ ID NO: 47072 - DNA, 350 bp, Homo sapiens
  chr10:43697736-43698086
  hyper
gttagaggagagctcccgtctgccccctgtggttgaaagggcgacagcgctgaaaggggtgtgaccccgaggggaggcgacgcgctcccgcgccctagtccacaggcatgcacgaccccacccagcacagggcctagggcatggggactggccctcttggctgaaacgactccgaccctctcggaagatgcccgcgcggcctctgcccccggggagaggggactgtgcccgatgctcaggcgccgcgcccccatcctccaatcccccagaacgcaccacaggccaagcccctcctgcgccagccaagactccgcgccagcccacaccagccccactcagaccgctggacc

SEQ ID NO: 47073 - DNA, 179 bp, Homo sapiens; identical to SEQ ID NO: 7326
  chr10:43698114-43698293
  hyper

SEQ ID NO: 47074 - DNA, 30 bp, Homo sapiens
  chr10:43725396-43725426
  hyper
ggagctgcctgggccgggcgcgcgcctggc

SEQ ID NO: 47075 - DNA, 31 bp, Homo sapiens
  chr10:43761945-43761976
  hyper
ctgcccgcagtgcccacgcccgcccgccgcg

SEQ ID NO: 47076 - DNA, 30 bp, Homo sapiens
  chr10:43762655-43762685
  hyper
gacagggcgggcgccgggagagggcggcca

SEQ ID NO: 47077 - DNA, 201 bp, Homo sapiens
  chr10:43818334-43818535
  hyper
accatggcaacagcgcgtcctgggctggggcggggccagactgccagtgcctttgtggcgcattaggagctaagccagtgattggccatctgggcgcggggcgggctgagtcagttggagggggcggggctgaggctccggtgaacgccgtaggcccgggctgggccgagggagatgatggatgccgcttcttgccactcc

SEQ ID NO: 47078 - DNA, 302 bp, Homo sapiens
  chr10:43857617-43857919
  hyper
agaccgccaccatcacgacatagcgcagcacatatgggtaaacaaatggactgagactcaagcaaagaagtaacccgagacgcgcgttacacggaaaacgactgcgcaagcgcggtagagcaggggcttgcaggtgagtgggagcagccaatccacgcgaagggggtcgggaccacttccgcggaggaaagccccgcccacacctcctgggccctcgcctcactggcggtttctcccgcgagccagcctcatagacattccttggtgctgattggctggcggccagcgcagtcctccttcct

SEQ ID NO: 47079 - DNA, 1109 bp, Homo sapiens
  chr10:43892053-43893162
  hyper
aagtggtggtggggtcccttccgcaaggtgggaggcccgggcgcgcggtaaacgtgttttggcgggaagcagcgccgaggccccgagacaaggtgacggcgacgttcccgcggcctgctcacggcactccagcagcctcggaccgcccggcccggcaggaaggtcggccccagggcctgcgcgggctcgggcgggagcttccgggcggggggcggagcgagcggcgcagcggggagagtgggggcagggacgggagggttcccggagggaagggcgcctcgcgggagggggaggggaggggaggggaggggagggggcccctggcgggcttccggggccctgagggcgagagcgagggcgacggcaaggtggggtgggggctgctccccggcccgccaagctagcgctgcctaggcgggagctcggggacccgcgggccgagcgcggctgaagggagggaagggaagaggcgctcgtaggtctgcgtccgtctccgagcgaccggggcggcggaaagggacctggggggggcggccgggactggagtggcggggccggggcgcccgcgcggcggctcaccacgccagggactggcccgtcggccccgaggaggcgcggggtccggagtccgggaagcggaggcctcgtgatccaagaccggcagccggacgtgggtcacggggtgcagaggaggaagtgccattgccgggcccgccaagatgtcaccaatgggaaacgcgtgcctgcaggtgcggccccgtggcccgcgcgctgggcccaggcaggaagtgggggaaggagagagtcagggcggcgggaagacatttctccgagttctcccgaagggagccaggcgcgagcgcgacctggggaaagtccagagtgccagccacggggaagggcgggcagtgcagagtggaagagaagccagcaagttagacacagcccctctctgggaggccgcctctaaaatggaactagcggacgtaccttggtttgtacatttgaccatggacacacgtaaagattttgaaaaaaaatctttgaaaaaaaatttttttaacgcaattcctaaacttttaactaacgcaattttgtggacctctgaa

SEQ ID NO: 47080 - DNA, 30 bp, Homo sapiens; identical to SEQ ID NO: 7329
  chr10:43915820-43915850
  hyper

SEQ ID NO: 47081 - DNA, 30 bp, Homo sapiens
  chr10:43932225-43932255
  hyper
ggcctgccctccagcgcccggggtcctcgg

SEQ ID NO: 47082 - DNA, 31 bp, Homo sapiens; identical to SEQ ID NO: 7330
  chr10:43932786-43932817
  hyper

SEQ ID NO: 47083 - DNA, 55 bp, Homo sapiens; identical to SEQ ID NO: 7331
  chr10:44069623-44069678
  hyper

SEQ ID NO: 47084 - DNA, 31 bp, Homo sapiens
  chr10:44069989-44070020
  hyper
cccacgtggaaccccacgcctgcaggggcca

SEQ ID NO: 47085 - DNA, 30 bp, Homo sapiens
  chr10:44144412-44144442
  hyper
gtagttctctggcgcgccctgcgctcgggc

SEQ ID NO: 47086 - DNA, 956 bp, Homo sapiens
  chr10:44185103-44186059
  hyper
gtcttggtgaccactgtgagccggcgaggtccactgggccagaccctggcccgaggtggccccggagctgtgagcgggaggaagagggaagggcggagtctggagccctcacgccttccgccttgtgcgcggtgcaggctgccgagagcccggccgggcaagcctttccgccgtggtcagtgactcgtttgcacaaggactttttagggaagagagaagccaggccttcgctgtgggcctagcccctcaaaccgcaagctctcccccttggggtcctcgtcgtgaacgcccttctcgtctcccgccgggctcactctttcgcattttgctgcgaaagtttactggaaataggtccattcactggtcgattcagagggacactagaaacgcgatgcccatatctaacacatcctggccttttgaagagggataaaaaataatacccactagagccccgtgcctccggagagtggggcttcgcatttgcgcgtccgaggcccggcagggagagcttctgggtcctgggggcgcgcacatccggcgcgcgctgtgtcggggagcggcgctctgggctgggccggcagagggcgctgcggggcggccgtggaacaagcaggggagagcgtcaggggacccagcacagcctgcctgctgcgccctgctgccggccgcgccctcctccgtgctgcgttctcctgctcgacgctgcgtcctcatccaacactggcaccgcgcgctccttccagggtcggaggcccacagacccctcacgttcgcttctgtcaggagtagcggcagaatttcgataatttatgtctttgatggagactgggaaggtagcctggccgctgcgcaggagagctgcgcggggtccaggaggggagcgcggagtgggagcagtcgactcgggctgcgcagtgcgtgtcggctgtcacgggacaccggtgaggaccctg

SEQ ID NO: 47087 - DNA, 31 bp, Homo sapiens; identical to SEQ ID NO: 7333
  chr10:44420042-44420073
  hyper

SEQ ID NO: 47088 - DNA, 387 bp, Homo sapiens; identical to SEQ ID NO: 7334
  chr10:44806415-44806802
  hyper

SEQ ID NO: 47089 - DNA, 30 bp, Homo sapiens; identical to SEQ ID NO: 7335
  chr10:44848905-44848935
  hyper

SEQ ID NO: 47090 - DNA, 1177 bp, Homo sapiens
  chr10:44879277-44880454
  hyper
gccaagggctcgaggcgcgctgggcctgcacagcccgcggctgcaagagcactcagagtgtccttcaactctttgcaggaaacttcacagccaaggaagctcagcggcctgagccacagggttttgttttgtgtgttcagaggcaacagtttattttggtttgcatcggtgtcctgtgacagcgcagcgagtttctcttcagcgaaagaaaagaaaaaagccctctcccagtgaaacgggacaccacggttcccagtggcccagggccttggagattgaactttgctgcagctctcattctggggcaaagcgcttggccagctggtgacaaaagagcctgtctgcaggtgtgtttggggagctggggagggggcgtgtgaggctcggagggtccctgggcctctctcaggtgaacccgagaagagacaggaagacagcggctggacgcgcgcccaggtccgcgtcgctgcggaccgcggagctgtgcagaagcgcggcctggcgggtggcacaagcccgacagctgcgccgcgcagcccgcccgcgcctggccaagagccccgcgagggtgtggggagaggatcggcttcgcagggagcggaggctgcgcggctgcatcggacctcacagcctcaagtcgcggcatgaggcgaactttgcaaagcgcgctctcgccatgcaccgcccgacctccagcactgtgcgcagcaggacctcggagcccattcgcctgtggaaaccgagcccgcagcgggaaggcagtgggtggagggtgggcaggcaggggtctggggtccgcggctccccaccctcgcgccttcccgcgccagtcccgaacgctctcttggggcgttcctgcccagttgtcccggctgacctcgctctgcagccagcttgaggtcaggcggtcgctctctgcaggtcacaaaccctcggcgcaaaagtagggctttgaacgcgacaccgcaccagagcgcccagctaagcgagctgcctccacccccactgtgtcgggcggcgcaaactgcgggcgcaggcagaggagccgcggctctgcgccgggcgggagccgaagcccagagcctcgccagggcctccccgccgagcgcacttaccgtcgctgaggcagagcgcggtcagcacgaggaccagcacgaccacgaccttggcgttcatg

SEQ ID NO: 47091 - DNA, 125 bp, Homo sapiens; identical to SEQ ID NO: 7337
  chr10:44880519-44880644
  hyper

SEQ ID NO: 47092 - DNA, 161 bp, Homo sapiens; identical to SEQ ID NO: 7338
  chr10:44880673-44880834
  hyper

SEQ ID NO: 47093 - DNA, 256 bp, Homo sapiens
  chr10:44882113-44882369
  hyper
caggcctttgctgggctgggccggggagcctggccgctcaccggccgcagcgctggggctccggcgccctctggtggcggcgcctccctccccgctcccagagctctggccagctccattcctgcgcagctgatgaaacccgggagggcgaaggggtccgcgggaaatctacacccgggtggaggggcgccctggagctcggagatccgaccctgcgggagccgcgcgcagcctcgcttgcccttaaatctggcca

SEQ ID NO: 47094 - DNA, 30 bp, Homo sapiens
  chr10:45496437-45496467
  hyper
tggggcacttggggcgctcggggcctgcgt

SEQ ID NO: 47095 - DNA, 51 bp, Homo sapiens; identical to SEQ ID NO: 7340
  chr10:49514478-49514529
  hyper

SEQ ID NO: 47096 - DNA, 30 bp, Homo sapiens; identical to SEQ ID NO: 7341
  chr10:49515359-49515389
  hyper

SEQ ID NO: 47097 - DNA, 424 bp, Homo sapiens
  chr10:49731663-49732087
  hyper
ttaagccgcaggggcggcgcagggcgcgcgccgggctcgcggtgcagagacctgcgagcgggtctgggcgccgggggttcctccgtcccggccgtggacttggcggacctgcagccggcgccgcggccagccccgggccctggagggcggaccctcccctccgctctacccactcccgcccaggggccggaccccacccccactcccacatggggaccgaggagccccaggatgcgcccccgcgccccgagtgaaggggagcctccccttccaaagttaggagactcagaggagcagcagccgcacctgagccctttccaaagctgaggcaggtgcgggcggccctggacaccccgtggcgagtccccgaggcggggctggcagcctctggcggcggccgcagggagcggggcgcacgtgcgcg

SEQ ID NO: 47098 - DNA, 382 bp, Homo sapiens
  chr10:49732155-49732537
  hyper
cgcccgcggccccgccgctcggctcctctccccgcctgccgcctgcgccccggggcggcgcggccgaggtccggcccacgggcagtgcccagctgggcgcagggtgcgcgggaccgccggcccgcggctcccgggccctcacactccaccgcggccccgcgcagcgggcatgccggcctccgggcagaccctgctaatcaataggagaacgcgcagatcgcgaccgccgcgccactgcccgcttttatctccgcgcgccggggcggccccgcgctgctccctgccctcgccggcgccctccccacggcccgttactctcccggggtgccgggccgcgcgctctcccaggagccgccagggggcgccacggagccggggctgc

SEQ ID NO: 47099 - DNA, 30 bp, Homo sapiens; identical to SEQ ID NO: 7343
  chr10:49813140-49813170
  hyper

SEQ ID NO: 47100 - DNA, 31 bp, Homo sapiens; identical to SEQ ID NO: 7344
  chr10:49892636-49892667
  hyper

SEQ ID NO: 47101 - DNA, 30 bp, Homo sapiens; identical to SEQ ID NO: 7345
  chr10:50323229-50323259
  hyper

SEQ ID NO: 47102 - DNA, 32 bp, Homo sapiens
  chr10:50323654-50323686
  hyper
ggggccggggctgctgggtcccgaggcccgca

SEQ ID NO: 47103 - DNA, 124 bp, Homo sapiens
  chr10:50603050-50603174
  hyper
atctgggccaggacgcggcgggtccactcgcctttgctttctgggatgtttgcagaagcaccgtgaaagattgatgcggccccctgggttgcggagccccaattagaggcgtgacaccagcatc

SEQ ID NO: 47104 - DNA, 521 bp, Homo sapiens
  chr10:50603486-50604007
  hyper
cgccggctgtcagatcggctggacggccgagacctgggagggtggcagcagaacggacccgcgcgcgttgctcctgcctggctgcaaagcaaacagcgatagagcttcaagtctccctctgccagcgctcccgcccagccctagggcgcacccggcgctcccctcctggaaagtccctcccaacgccctcatctcactgcgggggacaggagggaaggcggcagccccgtcgcaagcagcaaccccacagggcagtccttcgggtgtgtccacctcccggacggccgtgccctcaccctggccccagcaccaaaccccgcagcgtagtttctggctctctggggtcccagccagaagccctgcacccgggccaccgcagccaggtccggctagcgcgcaaggccatctgcgagctgcagctcaggccaggaaggcagccgagccccaaggcccggcgctcggggcccggcgagtgggtcaggagccgagcatacctcggcgggcggcggtcgaggaggtcg

SEQ ID NO: 47105 - DNA, 30 bp, Homo sapiens
  chr10:50604554-50604584
  hyper
cctttccaaacgatcgtacaaaaggaaagt

SEQ ID NO: 47106 - DNA, 1664 bp, Homo sapiens
  chr10:50605213-50606877
  hyper
ccttgatcttaaagacgcagcgctttggaaacaaaaggcctggcaggcccgccgctggacaccagcgctgggcaaggagcatcgagctgcaggacagagcgctgggtcccggccgccgttgacgcccctccgaaaacagccgggaggaagaccagtcccgctccggtcgaggcaagtcaggatctattccagtgaagcggcccttcctgggctcagtcgctccagagcagagtctgctctgcctcggggaaagaatcacaggaaacttccgctcgtttcagagcggagagagctcggggcgccatttccgccagggccaccgactccgagagtccaggcagccggcccgggaggagcggctagcaggtcccgaaggcgggtgaggtggcaggcaggggccggcagggcagccgagggcctttcctacgtcatgccaagagggctgggagcccctagagctgatcctcccttagcccaggtcaagagactggctcgcgcgcgctgtctctctccctgtctccctcagagggcccctgctctctggagctcttgacaagagcccgaggctcctcttgccgcctaggtctgccgaaagtcccctcgggttccctcctgccctaggcagcagttccctgcctgtgcgctttgggaacccggtggccgtgaagtgaggtgcggacagcttctgggccgcctcggccaagatgctcaggcgcacctgggggtgtgtgcgggaaccctcagcggcagcagcccagcccggggtgcagtgttggccccagaaaccaatgaggtccaaacgccagtctcagttccccatccctgacatcgaccgaggcaagttcctattaaggcccagagatgaccccgggacgagacaggctcatccggcgcggatgagacaggctcagacctgcgcggtctgaggacggcgcgctcgccgagcaacccggcaggtcagaaccctggacagcggcgccggtttccgcacccccacccacccccggctgctgcggagaaagaagccgtaccgggggcccagccggggcccctcgctgctcaggggtgggatccgcccggccggaccccaggcgtccggggaccgaccccaatcctctcccagtccaaacctgcgaaagttactccggacatgcgctcagcgctggcaacagagacaaaactcccttctccgcagtaccacgcgccgctcctacccggccgctgcagccggaaaccatctcgcggcccccgaggagagtccggccgcctcactgactagataaccagccgagctccctcaacacacccacctcgcgggggctctaagccggcttgggaccctcggcctcgcctcgcccggcgctcctctcccggagccgctaggctgggctccttcccgttggcaaaacagcgagtaaacaaacaaccaaacaaccttagaaacgaaaggctgcaccaaactttgatgacgccagccccctttttttccgaatgtctcgacacccgggagaaggtgactaataggtgttcgctacggtccccctccccctaaaaaagggcgttagtaacgaaaaggttatttttccttaatttttgtgcggtaaaatgtattttccaattaaccaaattcgccgatctgtctcgcttggacactctgataattt

SEQ ID NO: 47107 - DNA, 30 bp, Homo sapiens
  chr10:50747313-50747343
  hyper
cgcttcgcccctagcgaaaaataccctgct

SEQ ID NO: 47108 - DNA, 118 bp, Homo sapiens; identical to SEQ ID NO: 7347
  chr10:50814998-50815116
  hyper

SEQ ID NO: 47109 - DNA, 123 bp, Homo sapiens
  chr10:50817198-50817321
  hyper
cagctgagcacgggcgcctcaaggggtgcggccctctcagaaggaaggtgagtctccctggagcccctgacgacagcgaagcggctgggcgctctccggggagtgggcgcggcacccaagaag

SEQ ID NO: 47110 - DNA, 119 bp, Homo sapiens; identical to SEQ ID NO: 7349
  chr10:50817753-50817872
  hyper

SEQ ID NO: 47111 - DNA, 479 bp, Homo sapiens
  chr10:50818152-50818631
  hyper
cgagagcccttcctgggcctccagccctggagcatctggagagcggacccctgcccggccacgccccgcccccggcccccgccccgccgacgtcgcattagcatgagcgacgtaagtggcccgggcaccactcgggggctgggactcgccgcgtcacagccccgagtggaagggaaaaaaaaagaggaggcggcggaggaggcaagagccgacgcgaggggaggggagcgcagcggcggggctaacgggcgggcaagcgggcgggcggcaacagcatgtccctcggccagcgcgggcggcctcttagcgcggcgggggctgctctgggcgcgccccgggcgaagtgcgcccagtctccggccccggcccctcggcgcgcccgacttcccggccgcccctgagcccagcagccgcgggtcccgggatcggctaagagtagctgcaacgcctcgccggacggagtcctttcctttcccggg

SEQ ID NO: 47112 - DNA, 421 bp, Homo sapiens
  chr10:50818986-50819407
  hyper
cggcgagggccccacccggactcccgaggtgtgggagcccaccctgccgctgcccactccggccaatgccagcgcctacacggccaacacctcggcgtccccgacagctgcgtggccagcgggctcagcccttcggccccgctaccctacggagagcgaagacgtgaagatcggggtgctgtttgcttccaaggctatcctgcagctgctagtgaaccccttgagcgggcccttcatcgaccgcatgagctacgacgtgccgctgctgatcggcctgggcgtcatgttcgcctctacagtcctgttcgccttcgccgaggactacgccacgctgttcgcggcgcgcagcctgcagggcctgggctcagccttcgccgacacgtctggcatagccatgatcgccgataagtacccggaggag

SEQ ID NO: 47113 - DNA, 92 bp, Homo sapiens
  chr10:50821016-50821108
  hyper
gagcccggggatgccgcccgggggagcctgaggacccgctccagctaggcacgccaggccccgccctttgaggacacgccccacaccagcct

SEQ ID NO: 47114 - DNA, 242 bp, Homo sapiens
  chr10:50821466-50821708
  hyper
gccctgagagcctcaagccagcgttcgcgcaacactccatgtcccgaagaccgtagtctgatgatcgaggcagagtcttcccatcatagcgtgaagaggcggctggtcagggtcgcctgtgtgttagctgcgcctgtgagggtctgctctgctgttgtgcgcatgtctgtcctcgatctgcgagtcgggctgtgtgtgcctgggcggagtctgcctttgtcggtctgtctgtgctatttctg

SEQ ID NO: 47115 - DNA, 580 bp, Homo sapiens
  chr10:50822143-50822723
  hyper
ctaaatttgttgcccgagttcctccgggaagcgctccgggtagattctgggggccgggagctgagatccctgggcggggagctggggaagggatggggctgaggacagcgaagaagagggggcttgggggaggggggaaatggaagagagaggagggaggaggtacaagaggaaggagagaagtgcggccagcttgctttctccagtcgggtggccgcggggacccgggcgacgtcggaggccctgccgggaacccaggctgcagcccccacccccgcgctgcgacacgccccccaccccttccggctcacacccccgcccacactcctgagtggtgcggtgcagcgtcggccgaggcagcagagccgaggagagcaggtgagaagaagggctgggctgggctggcggagcgcggtgccgggagcaagggcggcggtcgggggctctatccagggacagcaccggggccgagaggccccaggactcgtggagtcctctgagtcctgcgcagcagcggccgtcgggggtcagctaggaagctgcaggattgcgttgcttcggtgcctgggcttggggaggc

SEQ ID NO: 47116 - DNA, 777 bp, Homo sapiens
  chr10:50969829-50970606
  hyper
tgtaatcggagaccgcggttaaaaccgtctattaggctccttggtagtccgaagctgcctatgggtcccgccaggtgcacagcgctgaccctccccatcccccgcacagccctcgcagctccgggccctcccctggccacggaaggcgcggggcagtctgaagtcctcgggctggagaaacccaccgcgagcacccgctcctctgcgcaggaccctggactagccgggtggtacgcgcgcgatgggctgggggtcccgggggaggccacggccagccaaggtcagagccaaggtcacagtctgttcctcctccccctccccccggcggggccagactcagggctgcgggcagcggcgccccaggacccaggagagaggagctgtggggccggtccccaggacggcaggagaagcagcggcgcagggaccgggagggggcgggccgccgcgctcaccgggcgggcgggccgggtccgcgctgcagcgaggtccggaggctgcaggtcagggggctgcgcggaaggggtgcgcgcgcgccgtgccaattacctgggtcacgtgacgcagccgcccacgggcgcgcgcccctgagactccgcgcgtcgtgacgtctccatggatgccccgccccgctcctggcgctgtccacggtgctggcggcccaggcccgaggtcgcccacggccgaaggggggactcctctctgagaccgcagaacggggctgaggccctgaaccccgtgtgctcgtcctaaaactaggacgaatgtaccagacga

SEQ ID NO: 47117 - DNA, 119 bp, Homo sapiens; identical to SEQ ID NO: 7357
  chr10:52177703-52177822
  hyper

SEQ ID NO: 47118 - DNA, 313 bp, Homo sapiens
  chr10:52178170-52178483
  hyper
gggtgtggcccggcagcagagggtttttggaatgcagggtgtggccctctaccacggcaaaaaagaaatgagtcagcccgttcagtcctaaccaataagcatgttcagtgtcggttaaggcggaactttcctttcttgatttataccaagcttagaagcctttcacagccttttctttacgcctttgacaacttcgacacaacttctagaaaagggtaggttgcctttgaaaacgcttgggaaacaaggattaatcttacgaaagatacttcagtggatgtacattagtttcgattagtaaaagtttttgagt

SEQ ID NO: 47119 - DNA, 30 bp, Homo sapiens; identical to SEQ ID NO: 7359
  chr10:52382203-52382233
  hyper

SEQ ID NO: 47120 - DNA, 30 bp, Homo sapiens
  chr10:52382502-52382532
  hyper
cgatttctacttcgcggcaccaaagaggaa

SEQ ID NO: 47121 - DNA, 30 bp, Homo sapiens
  chr10:52383423-52383453
  hyper
cgcaaccgtgaggccggctgtctgtccctg

SEQ ID NO: 47122 - DNA, 30 bp, Homo sapiens
  chr10:52383862-52383892
  hyper
aaccaagggacagtcgcagtttgggcccct

SEQ ID NO: 47123 - DNA, 1152 bp, Homo sapiens
  chr10:52750721-52751873
  hyper
ctctgctagcaactcggctgtcggtggggtggcgcgcgcgtattctcacggagtgactaggagagggggacgagggagggggtctcaggggaggaagggcagctctaattggtttctcaatgaaagataatcacctactccccagagaggctggagattagcactctgcctctcctctccatcgcttttagacttctcatcctcccctcggtgcttttagtccattcagcagaagcggatcgaagcaggaggctccccgcgccgcattaggggcgcactccgccgcgctcgagtacttagcgcccattcactcgctcacccgcgctctccgctgccggctgccgtcccagccgccgccgccgccgccgccgccgccgccgcccgagaaaaagtttcgcggaggggctcagtgaaaaaatgagcgagctagaggaagactttgccaagattctcatgctcaaggaggagaggatcaaagagctggagaagcggctgtcagagaaggaggaagaaattcaggagctgaagaggaaactccacaaatgccagtcggtgctcccagtgccctcgacccacatcggcccccggaccacccgggcgcagggcatctcggccgagccgcagacgtacaggtccttccacgacctccgacaggcattccggaagttcaccaagtccgaaaggtaggcgcggaggccgtgggcccgggcgctcgtcccggcccgcggcgcagaggctgggggctctggccgcggcggcgggggcgggtcggcccagggcgccccctgctcgctgcggcgcgcggagtgggggtggccccgcggcccgggaatgggaagtgtttatttttatttctgcccatcacgtgctgtgcttgtctccgccgggctgggaaaggcgagctgcacggggagacgcgcccctgtggcgtgggggtggggaggaggaccgcggaaagtttactcgcgcgggctaacttgtgccctccacacatggctgcagtcgcgcggctgtccttcgtgcgccccgctgggagcgtccacgcagggacccaaccctgcccatccaggggcctggagagcttcccagcggcgaccccccggactcaggccactggacatgctcagtggggctgtccgagcctcctaggga

SEQ ID NO: 47124 - DNA, 1436 bp, Homo sapiens
  chr10:52833429-52834865
  hyper
ctatctggagcaggcgaagagtagcaacgcctcgggtgctaaaatcggaaaccccaccccctaccccacaaccctttcccaaaggtagtaggctgaaagggggaattcctcgcgggcgccgactcgctcgcatctcctgagaggcaagtttcttcgcaagcgttagccacctgtgtgaggcgctctgggtgggaaaggtggcgtgggagaagcgacagctcggccacaccgctcgggagctttccttagtgaggccggccgtcaaaatacctccagaactcagagctttgatgatgcagagtcccctatgcctcgtacgtcgctaggatcgtagctcaacattctccaggctggtctgctctggagtcagctgaggcctcccgagtttgcccggggtcctccctgtcccctccctcccacctccccacccccgaagtagcgctcccgcctcgctccacccgcacacccccggcgcgcctcggaggcttatcaggctccccgcacgccccgcaagcttccttgggcgcccggcgcgagggactctgagagcccagccgctgcctcggagcccccattcacgtcccctcctcccgctcccccgccaccgcgcctccgactcttctcccccgcgccgcggcgcccaccgcgtctcaggtttaatcccgggttggacctgctggtttgctctccccgctctgagcctcacagccagcccagagaagtggaatctgcactgaaactctgggtggctggagccggcggactgggcatgctcagaagccagggctggctttggtctcaagtaggaagctttggcactcgggaggcagcggcgactttggggaaagttgatcggagaggggaggaagcctcaagacgcggagcagcggcaggaaggagcccccggcagcccggaggagcatgggcaccttgcgggatttacagtacgcgctccaggagaagatcgaggagctgaggcagcgggatgctctcatcgacgagctggagctggagttggatcagaaggacgaactgatccagaagctgcagaacgagctggacaagtaccgctcggtgatccgaccagccacccagcaggcgcagaagcagagcgcgagcaccttgcagggcgagccgcgcaccaagcggcaggcgatctccgccgagcccaccgccttcgacatccaggatctcagccatgtgaccctgcccttctaccccaagagcccacagtaagcaggggtgacgcgccgggtccatgtggcgccctggcgatggggagctgcgggtctctgtattgtctgtcggcccccgcccctcccgcttgccatgtctgtcctcatcctcagaaatgtttcattttaacgggcacttcttgcggggctgtgcacgtttctcagagccagactcactgcacatacgttgccttcgtgtct

SEQ ID NO: 47125 - DNA, 30 bp, Homo sapiens; identical to SEQ ID NO: 7365
  chr10:53459322-53459352
  hyper

SEQ ID NO: 47126 - DNA, 252 bp, Homo sapiens; identical to SEQ ID NO: 7366
  chr10:54068357-54068609
  hyper

SEQ ID NO: 47127 - DNA, 479 bp, Homo sapiens
  chr10:54072981-54073460
  hyper
cctagaaagggtattgcgtggtcccgtgcaaggtaagacttgggagcaaaccctgcattcggaagcgttgcgatgtgatatactaatgaggaagtcaggcgctaagccctaagggtttcttatttctccacattagcccaccactgagaagggagaaccggggaaaggcgactgacctggcacgttggaccctgtccgctttggtcccggccactttgatctcacgcgtctgcctaatcaagttcatctaccgccgcgattgccctgattcaaagaacaacattaaatggtttgattatcggatggtcatttccctcttccctccacccctgatctaatttctaaacgccagtctctcgcctccctctctaaacttcccatcaaaagagaattagctcttcttccttcttaccctcgtttgatgtgcaaatttccttctctttgcacatttttctcgcagtggcggggggaggtggggg

SEQ ID NO: 47128 - DNA, 499 bp, Homo sapiens
  chr10:54073766-54074265
  hyper
cagagttcctgctgccgcctgcatttattaaagtcgtctgctataacgctcgctggtagccttcaccccgaaggtgagccgggccagccgagcgactaagcaagggaggggcggggtgaagagtgtcaaaggccccccttcatgtacacaaacacaccccctcccagcccctcccagcgctttgaaatcccatcccggctttgttgtctccctcccaaggggccggaatgctccgggcccgcggtataaaggcagccgcggtggcggtggcggcgcagagctctgtgctccctgcagtcaggactctgggaccgcagggggctcccggaccctgactctgcagccgaaccggcacggtttcgtggggacccaggcttgcaaagtgacggtcattttctctttctttctccctcttgagtccttctgagatgatggctctgggcgcagcgggagctacccgggtctttgtcgcgatggtagcggcggctctcggcggcca

SEQ ID NO: 47129 - DNA, 252 bp, Homo sapiens
  chr10:57387464-57387716
  hyper
acggagcttaggtcccgcagagagctcctgccaagcgcttctctctcgactagttaccaattgagaaaaaaaagggtcagagacacacaaggatggtgatcaaaatccagtgtcaggcaccagggtcccagaaggttccggctcctcttctgcgccttacccagctcttttcgtctggcaaagggtcacccagcgagcccccagcagcagatccttcccttttgctcctcctgatagcgccaatcttcgccg

SEQ ID NO: 47130 - DNA, 514 bp, Homo sapiens
  chr10:57387996-57388510
  hyper
gcaatctctgatcttcgaacccactgaaaaagcacagggcatggggagtcctgttggttcatgcccagggtacgaataccaaaagcgcctcccgctggagaggctgcggggaactcgaggcaaagacagaggcaaacgcaacgctgggaagagtgaggggagtccgagctgccgcctgcaaaagcagagacgcgtcgcccttcgggcaaagtgactgctacaaagtccgttccctcctgcgcagggacagagacatttaaaggcctgaatggacgtcagcaccagtcgagctcgctgggtgagcgccaggtctccccgccccacggattgtagcgcgcacagggcgatctgctgctcgcgaggtagagtggcttacttggggagaaaacagagctggtggcgctgcggagtgtcaaaccctggagcccatcgtcaagacgttatactggtggcagttctgctgtgagtgcacttgccgaattaaaaagagccagagctgcgtggagaggggtct

SEQ ID NO: 47131 - DNA, 1508 bp, Homo sapiens
  chr10:57389859-57391367
  hyper
aggactgtcaaaaggcgttagaaacttcggaaactggcaacagttacggcatttttgctctgcgaagaatacgcccagaaggttcagaaagaagtcgggagtggggatggggagaaaaacattgaagggctatggaaaagcgtcaataacataaactgactttaatttttcttcatagaaatgtttccggtgaaattttctaagaaatcaggggacagttaatttgcttggttgacgctcacactccttgctctcactaagtctcaggtcttccaagcctagcactctgtcaaaatgctttcgggttgagggggagggctttcctggattccgcgaccacaacccaccaccccaaaccccacttcccatgtccttgatttttgaggctttttgggagggcatgatttcagggaacattactcttggccagctcaggggagcatagtcggaaatcttcggttgtattcctgactcagcctgggtgcggagcgagcgcggacaggaaccgagatgcaaaggcggacgcaaccagcgcacccgcagacggcgcgcggcaagaaccaccttctagccctgagcctgcggtgccgggcgggctcaggaggctagtggggtattgtgatcactgggacatcaggatgaaggggtcactccaatcccttggagatcagattctcggggactccatggccagacccgaacggcgcccttcacatggtgggtggagagggtactccttggccgaattgacccctccctgtcccgcagggtcagccccgcgcccacccacacatccagtctccgggaacaaaactctgtctggatctacactgacccgttgacgcgctttcccaaaggaggaacgacaccaacaaaagcagaatcgctcgtgggagattttctaccaagaactgttacctccctccccgtgtaatcggtttccactcaaaaggatgcggaaaggacctcatcctctgctgtccctttcgattggcccgggactgggcgaagccgggagctgcagggaggggagccccggcaccccagcctctgcccaacctcccccagcacggcggccctcggccctcgtcaccaattcctaggcagaaaagcgcgcggccggagcgcgcaagtcttggcgtccggaaacaagtgttttccgctcagtcatggcggcttcgccagtcgaacagagcgaaagggctctgggcgaccctgcgacttccaccagaccgcgagcccggagcaccggcggagggtggccaaacgcgggcctagggctcccccagcgcttccgggcgcgccgggaactgcagctggtgcgccactgccttccccgcgcggtgcccaagagcgccagtagaaggaggaggtcggcacacctgctgttcctgcttccttcccaggaggccgattctctccatcccaactcgctccgtggctcctgcttgctcctgttccccctcccgactccccgggtaacagtcgaccttagggtcacagcaggg

SEQ ID NO: 47132 - DNA, 30 bp, Homo sapiens
  chr10:58121138-58121168
  hyper
ggcgcggattcgctcgttggcgggcctcgc

SEQ ID NO: 47133 - DNA, 3 bp, Homo sapiens
  chr10:60026303-60026306
  hyper
cgg

SEQ ID NO: 47134 - DNA, 313 bp, Homo sapiens
  chr10:60028786-60029099
  hyper
ctcctcccacctcccgtagctgtcaaaatccggagtccagacttccttatggccaggacagctccacgcatgctcagcacctaccagggtcgagctcacacacgtgcctacgacccgccgcggcgcctgcgcggtagcatcgcggagtcggtgctttagtacgccgctggcacctttactctcgccggccgcgcgaacccgtttgagctcggtatcctagtgcacacgccttgcaagcgacggcgccatgagtctgacttccagttccagcgtacgaggtgaagtggggcctgggagcgggtgaggctggtga

SEQ ID NO: 47135 - DNA, 30 bp, Homo sapiens
  chr10:60029346-60029376
  hyper
gttcacccctaagacgctttcatgtcctta

SEQ ID NO: 47136 - DNA, 30 bp, Homo sapiens
  chr10:60094843-60094873
  hyper
ggggacccaccgcgcggagccagcctagct

SEQ ID NO: 47137 - DNA, 30 bp, Homo sapiens; identical to SEQ ID NO: 7371
  chr10:60262026-60262056
  hyper

SEQ ID NO: 47138 - DNA, 83 bp, Homo sapiens; identical to SEQ ID NO: 7372
  chr10:60272064-60272147
  hyper

SEQ ID NO: 47139 - DNA, 362 bp, Homo sapiens; identical to SEQ ID NO: 7373
  chr10:60272471-60272833
  hyper

SEQ ID NO: 47140 - DNA, 383 bp, Homo sapiens; identical to SEQ ID NO: 7374
  chr10:60272895-60273278
  hyper

SEQ ID NO: 47141 - DNA, 277 bp, Homo sapiens; identical to SEQ ID NO: 7375
  chr10:60273346-60273623
  hyper

SEQ ID NO: 47142 - DNA, 30 bp, Homo sapiens
  chr10:60401090-60401120
  hyper
cattgtggttttgccgtcgtgcccttgctt

SEQ ID NO: 47143 - DNA, 75 bp, Homo sapiens; identical to SEQ ID NO: 7376
  chr10:60936010-60936085
  hyper

SEQ ID NO: 47144 - DNA, 30 bp, Homo sapiens; identical to SEQ ID NO: 7377
  chr10:60936611-60936641
  hyper

SEQ ID NO: 47145 - DNA, 22 bp, Homo sapiens
  chr10:60937041-60937063
  hyper
gcagtccggatttcctgggtct

SEQ ID NO: 47146 - DNA, 502 bp, Homo sapiens
  chr10:61121993-61122495
  hyper
tctgggccccaccagtcagcacgtctcacggtcttcacagccccagattccgggagacaatgcatctaaaacgaacagcggctgggaacggtggaggataccttcacgatagttgcttccagagaaaggcatgcaagtctaattttaatggtaagaatcacttactctgttacagtggtgctgctgaaggaattatcctgaaggctgaaacagaaacaagaaaacatcagccaagtctggccggggagccgtctccctgattgctctccgggagtgagcacatacacaaacatggcattgcaaggcaagtctccgggctcgcccggcacgctcgctctaccttgggctgctgtctgcacatgctcgtaacgacacccccagcaggggcccagcggcacgggcgaaccacaaagcccggcagcccgcgaggctgcggggacagagctgggcggggcgcggcggcggggctgggaccccgggatccagcgaggagcacctggag

SEQ ID NO: 47147 - DNA, 30 bp, Homo sapiens; identical to SEQ ID NO: 7380
  chr10:61164087-61164117
  hyper

SEQ ID NO: 47148 - DNA, 30 bp, Homo sapiens
  chr10:61468533-61468563
  hyper
caggttacctagggcgaaccaaagatgggg

SEQ ID NO: 47149 - DNA, 180 bp, Homo sapiens
  chr10:62492664-62492844
  hyper
gaccgaggtgagggcgtcctgagcccggggcccgcttttctttttccagacgaatgtttccaagcagaagccccaagtcctcgggcccccctctctcctggggatgctccagcactgggaccgagttcgagctctcgcctctgtcccgggccgcaacttccaggcgcaactggactccca

SEQ ID NO: 47150 - DNA, 30 bp, Homo sapiens
  chr10:62493050-62493080
  hyper
gggagaggaggaggcggaggaggccatgtt

SEQ ID NO: 47151 - DNA, 86 bp, Homo sapiens
  chr10:62538164-62538250
  hyper
gctttgaaagtctacgggctacccgattggtgaatccggggccctttagcgcggtgagtttgaaactgctcgcacttggcttcaaa

SEQ ID NO: 47152 - DNA, 30 bp, Homo sapiens; identical to SEQ ID NO: 7382
  chr10:62703726-62703756
  hyper

SEQ ID NO: 47153 - DNA, 128 bp, Homo sapiens
  chr10:62704176-62704304
  hyper
tggcaaaggttcctcggctctacgcagacccgacgggcccgggcacggaggcggatcgcccgggacaaaccgacacagagcatgggagaccccggccctttccccgcgctgccgggaggggagagtct

SEQ ID NO: 47154 - DNA, 30 bp, Homo sapiens
  chr10:62761012-62761042
  hyper
atgctccaagctctcgcgtccccatgagcc

SEQ ID NO: 47155 - DNA, 1343 bp, Homo sapiens
  chr10:63211994-63213337
  hyper
tggtcccttcaccagcgttacaacccgttccttgcaagataggcaggccgttagccaagccccaaagccagcaaacccagacacctgaagctggcgctgtgctagagaacgcgcgacgcgcgcggctggagggaagggaagcggatgaaaccacagacgtgcagcgagggtcttctcgtcttaggagggtggccagtgtgctcagctcttgcgaaggtcgctgatgcccagcgaaggacattcccacatgtgcacgcacgcagagtaacccgcgcacactcacacaccccagtttcagaaggcacactacatggcaacctccttgtcccaagactcccctatttgcgggcacattcagcaaaatagaccagcgcttcctctctttactcatcttccaagtttccaaacctgagactgggtgactcttgcctaggctcacagatcgagccttcccagtgttgcactgggaccctagggtggccctggggtgcccaagagatgcgcaagcatctcgcgccttccaagcgatcagcgaggaaaaacggggtccaaattcgagtagaatctgcgggttgcgggaagatggcctgcgagtgcggtgggggacaataccctagggccccgtgcgccctcgctttcccggggcactctcaccatttgtagcctctgccgcgcttgaacttgagggtgagcgcagtctccaggaagagcaagaggttgagcagcgcaagcagccagtaccgcggctccttcttcacctcggtcactcgccagaccccgaccagcgagtgcagcaggaacagcaaccgagtggccagggcgttaaggaagaccagtccctccatgctggccggagcactctgcctacgtccccttgcctgcgcccccaggaccctgccgggcgtgcccggagcccaccggtgagcaggaatatgacaagcactgagacctgctgctgcttgtggtcccttctcaccctcagcgcccgatgccggtagaactggtgcgcggctcgcccctcccccaaacttcctgagaactcttcaaagaggggtgagtccaaacccagcttttccagactgctgggttttccagggagtctggggctgcgctgccctgtctccagggcgttattctccagcgctgcccatccccctcccaatctcggggccagtctccatccctgtccggtatccccgcccccgggcctctgtgaggttcccaagaacttccccatcacgagggggcggaaagaggagggaggaggactgaaggtcaaggtgcagcacagccagaaaggcggaggaggagagcatctctggcagctccgccttacttttcca

SEQ ID NO: 47156 - DNA, 239 bp, Homo sapiens
  chr10:63656686-63656925
  hyper
ggggatcacttgctccgagttccctgtgtctctcttggctccggctccaagttcatgagaaatctgtccccatacccatccttctgaagcttccagcctttaccacctggacctgggctggagtcccacccccaccacagctcttgagacaggcgacgaatagacccaaatttgagatgtagctcaacctttgaccactagaggtctcctggaaagcaatgacccgtataacccggttg

SEQ ID NO: 47157 - DNA, 95 bp, Homo sapiens
  chr10:64028002-64028097
  hyper
cctgcaaaaagacaggcgtccaaagcctggggagggcagcggacaggtgcgcccgcaaacgcgcgcctggaccccggcaccgccttcccaatccg

SEQ ID NO: 47158 - DNA, 625 bp, Homo sapiens
  chr10:64133780-64134405
  hyper
tgcagaaagcgccgcgactgcgaggctgacacgcgtctttccttccctcccccggggaatgatcccagcatctctcgcagtgatgtcagtgtaatcctgagtcggatcgggctcccggctgggtggcgggggggcagatgatgctcccgccagctgggcagagcaagggtgttccccgcggaggtggcagccctgggccgcggcgttccggaacccccgcacccacggcgcggtgccccacggtgcccgcgagcgccgcccccgctggctagccgcgcctcgctccgccctggacgccgccggtcccggcgcggaggtgcggcggggagtgggagccggcccggctcagtctgatttacggctctgctgaaaaccgcttcgctcccgcagcatcagcaccggaggcggcggctgcagcagcagcagcaacaagtcgggtaagaggcggccgccggccatctgcgcccgcggctcggcggaggggacctgccggggtggccggggctggggagggggtccccgagcccgcagcatggcggggagttgggagagccggcttcccggcccccaccagcaggaactcatgtgcacacgaatccactctggcacccgtgggctggcacgc

SEQ ID NO: 47159 - DNA, 30 bp, Homo sapiens
  chr10:64278666-64278696
  hyper
ccaagtgcatattgagttttagtgtgaaat

SEQ ID NO: 47160 - DNA, 27 bp, Homo sapiens
  chr10:64565472-64565499
  hyper
ggactgccactattaccgggtgctgga

SEQ ID NO: 47161 - DNA, 376 bp, Homo sapiens; identical to SEQ ID NO: 7386
  chr10:64574691-64575067
  hyper

SEQ ID NO: 47162 - DNA, 667 bp, Homo sapiens
  chr10:64575127-64575794
  hyper
cgcaagaagggagcgctccgagattttcccggggtcggctctgcccaggagggagctaccgacgctttcccctggcgcttctccgccgctcggctctccaggcgcgcagctctccccgagagccccgaactttaccgtcactttgcccctgccccgggagaggggaggtcgaagtgctgccggccagagggcctacgcaagcctcgaaacccggggggacgcctcttccacccccatccctgcgctcgcccggggctgggcgcgccggggcgcacgcacgccggtttgctggcgacctggcgcatctgcccgcgcgccctggtctcagctgtcgcaggttcctcctgcacccacttccagtcttcaaagccagtgcagtcagcaccgtccacctggagccccaatcctctcctgcgattcccgcacacccactgcaccccatccaccacctccgggccgcgcaggtccgggcctgcgaagacacgcggcttacctccggccactccgttcatctggtcaaaggggcctcccagttcggcattgggaaagatggtcaccgacgtggcggcgaggtcctccaccgggtagatgttgtcagacagctggtgcacaaaaccactgagagttactgggattttgtctacggccttggcggtcatcatttgct

SEQ ID NO: 47163 - DNA, 358 bp, Homo sapiens; identical to SEQ ID NO: 7388
  chr10:64578270-64578628
  hyper

SEQ ID NO: 47164 - DNA, 115 bp, Homo sapiens
  chr10:64578651-64578766
  hyper
cgagggggagctcctggacgcccgagtgcccggccagcagggcgcggagggcaggaccggggctgggggcggggcggggtgcctgagcgagggaaaaccgcgaggtcttcggctg

SEQ ID NO: 47165 - DNA, 83 bp, Homo sapiens
  chr10:65029100-65029183
  hyper
tactcatttggctgcggccatagagactggctcataattttaacaacagacaaagacagactagtggcgagactgaaagctca

SEQ ID NO: 47166 - DNA, 30 bp, Homo sapiens
  chr10:65225529-65225559
  hyper
cggacccgaaagagcgcagactcgggacga

SEQ ID NO: 47167 - DNA, 71 bp, Homo sapiens
  chr10:68685827-68685898
  hyper
agaagtgagctgagcgtgtgcgcggtacggggctctcctgccttctgggctccaacgcagctctgtggctg

SEQ ID NO: 47168 - DNA, 397 bp, Homo sapiens
  chr10:68687785-68688182
  hyper
tggccagggctctcccaaagccgacgtttaagcccaagctccccaggccgaagcatgagagcaaaccccctttgcccccgacggtgggagccacagagcccggcccagagaccgatgctgacgccgagcacatctctttccataaaatcatcgcgggcagcgtggcgcttttcctgtccgtgctcgtcatcctgctggttatctacgtgtcatggaagcggtaccctgcgagcatgaagcagctgcagcagcgctccctcatgcgaaggcacaggaaaaagaaaagacagtccctaaagcaaatgactcccagcacccaggaattttatgtagattataaacccaccaacacggagaccagcgagatgctgctgaatgggacgggaccctgcaccta

SEQ ID NO: 47169 - DNA, 30 bp, Homo sapiens; identical to SEQ ID NO: 7389
  chr10:69523829-69523859
  hyper

SEQ ID NO: 47170 - DNA, 30 bp, Homo sapiens; identical to SEQ ID NO: 7390
  chr10:69834338-69834368
  hyper

SEQ ID NO: 47171 - DNA, 30 bp, Homo sapiens; identical to SEQ ID NO: 7391
  chr10:69834886-69834916
  hyper

SEQ ID NO: 47172 - DNA, 19 bp, Homo sapiens
  chr10:70091403-70091422
  hyper
tggggccctttccgcgccg

SEQ ID NO: 47173 - DNA, 437 bp, Homo sapiens
  chr10:70092801-70093238
  hyper
ggaggaataaaggacgcttagccggcccttatattccagatttggaacttcgaaaagagtacgtactgattttccaaagggttttttttttttcatgtttaaacgttaataaggacttcggggatgattttgtgagcagaaaagtgggtgatttatcaaataggaatgtgaaatgggcatgtttcaagtaggtcgtctgggcccagtgaactataattgttgctttttgaactttcggggtgggggtgggtgatgtagcaattgttttgcgtagtttggcgtatatatgttagaatttgtttttaagttttacttttgggaaacagttaaaacaacccagtgatggtagatgtgtgtgtattgaaattgagctttcgatgttaaatcttccaagagttgtattttgtgcagtttttttttccgatggcattaaggct

SEQ ID NO: 47174 - DNA, 30 bp, Homo sapiens
  chr10:70166192-70166222
  hyper
atcataattcctaacgtgcgatgcgacaac

SEQ ID NO: 47175 - DNA, 30 bp, Homo sapiens
  chr10:70167003-70167033
  hyper
ttccaggcgctcggcggccaccaccgcatc

SEQ ID NO: 47176 - DNA, 66 bp, Homo sapiens
  chr10:70320022-70320088
  hyper
gggtaaatccagctcgcgttttgtctctcgctcaactgtgcagggtccagcgaaggcagagcccca

SEQ ID NO: 47177 - DNA, 30 bp, Homo sapiens
  chr10:70320719-70320749
  hyper
ccggccggaggtatcggccacccgctccgg

SEQ ID NO: 47178 - DNA, 30 bp, Homo sapiens
  chr10:70481041-70481071
  hyper
gaaggtctggtccccgtagttggagcagtg

SEQ ID NO: 47179 - DNA, 30 bp, Homo sapiens; identical to SEQ ID NO: 7394
  chr10:70660993-70661023
  hyper

SEQ ID NO: 47180 - DNA, 30 bp, Homo sapiens
  chr10:70716847-70716877
  hyper
cttaacttcatctgcgcacgtgggccgcgt

SEQ ID NO: 47181 - DNA, 353 bp, Homo sapiens
  chr10:70748246-70748599
  hyper
attccgatatgcttcgttaaagtaagccgatattaaacatttatataaatccatcctcacagggtcaatctggagataaactcaccgctgcagggggcggggaaggaggtgggaacacgctcattgacaacttcatttccatgagaatggttgctgtggtgattgctgcgtcttcccattggtcattgccgagcgtattgcggttctccgggagggttatattggttcccattccacagcggccgcaacgtgtcgagagccgtaagtaaagtgtcgcaaagcagaaggaaggcgggagtcccgactgcaaacattgaggaaagccaggcagtagaggccgctatggcgaacgt

SEQ ID NO: 47182 - DNA, 150 bp, Homo sapiens
  chr10:70749020-70749170
  hyper
gcgagcccggccaggccggcccctgttggcaaatggcgagggatggggaggagcccctgccaaggccaagggcagacgttgtaaggcgcaattcgtccccacgtttttgtagctctggactgagtcccaaagagcgtctgtggtcttcaa

SEQ ID NO: 47183 - DNA, 58 bp, Homo sapiens
  chr10:70883515-70883573
  hyper
cacatctcttcttgcgaggcctaaggaagtagggctcccactcgcctcggcaacccaa

SEQ ID NO: 47184 - DNA, 30 bp, Homo sapiens; identical to SEQ ID NO: 7397
  chr10:70884405-70884435
  hyper

SEQ ID NO: 47185 - DNA, 30 bp, Homo sapiens
  chr10:70940078-70940108
  hyper
ggctcccggcggggcgccaggctggccacc

SEQ ID NO: 47186 - DNA, 1258 bp, Homo sapiens
  chr10:71078139-71079397
  hyper
gcgagccctcatttccgaggaatgggaccgccttcgtgcccccggggctgccagtccctagactagccctaggggcttctcgtcccggcggagccgggcggtgcctcctgcctgcgcctcgcacctccccgcctggcacggcccacccgggcacggcgccgccacgcgtgaaggcccgcatcggctccctacgtgggggacgtgcaggatgatgcggggtcgggggggatttcgctgcgtcgcccgccccctttccggcgcaggagggagcggccgccgcgtccccgctccccggccgggacgccaccgccgggcgttgcagaggcgcgccgcaaccaatgggcgtggaggaggtgggtcggctggcggctgtcaccctccaggggacgggagcgcggagaccgggagcgcgcgagctgtcgccgcgccccgggccgagggggaggagccgggggaggaggaggaggaggagccgccgagcagccgccggaggaccacggctcgccagggctgcggaggaccgaccgtccccacgcctgccgccccgcgaccccgaccgccagcatgatcgccgcgcagctcctggcctattacttcacggagctgaaggatgaccaggtcaaaaaggtgagcccccgcccgcgccgccgctggtcctggccgcagccttgcgttccggcatccgctcgccgcctccgctgcctccatcctccggcgcccggccttctccgggccagcatcgagttggactgcagggcgcaaggaaagccttcgccttcgattctaccggcattgtcagtgtctctgtgtgtgtgcgtttttgggaggggggcaatcgggcggaagacccccgagaccgggctgcctgctgcagtgtccttgaaacgggccctggatgtcagataggcccccgggctgtgcggggaggtggccggtgggcccttccgcagggcctgttcgggagggtccgagcgccgtgggaggaggtgtgatcatggagatgctggggaggtgatcgagcagcaggcgggggtgctggctggaggccaggcctcccatatttggggttcctggcggagggtgtcgggtgccccggagaagctgtcgccgggctctcccagttgtttgagctgctcgttaatctgaggacgaggtgacccgcccggcttcccggaacggggaggggcggcgaggccaccggaaactttgctcataggcctcgtgtctggagcggcacgtctgaatggaattttttatt

SEQ ID NO: 47187 - DNA, 30 bp, Homo sapiens; identical to SEQ ID NO: 7399
  chr10:71122697-71122727
  hyper

SEQ ID NO: 47188 - DNA, 30 bp, Homo sapiens
  chr10:71168722-71168752
  hyper
atgtccgggcactgcgcgcctccagagcgt

SEQ ID NO: 47189 - DNA, 113 bp, Homo sapiens
  chr10:71211453-71211566
  hyper
accccagtagggcccggggatgggggtggggacccacaatccggccgccccctcactggcccggggttgggtccacacttagccgctccagggagtgcgcgggtgagcgcgcg

SEQ ID NO: 47190 - DNA, 187 bp, Homo sapiens; identical to SEQ ID NO: 7401
  chr10:71267677-71267864
  hyper

SEQ ID NO: 47191 - DNA, 30 bp, Homo sapiens
  chr10:71327778-71327808
  hyper
ccatggtcaggggcgcgcagctgcatttcg

SEQ ID NO: 47192 - DNA, 49 bp, Homo sapiens
  chr10:71328952-71329001
  hyper
gaagaaggggggagagccattcgacgagagggtctttcctgcccgggtt

SEQ ID NO: 47193 - DNA, 103 bp, Homo sapiens
  chr10:71329076-71329179
  hyper
cgggctccgggcagagaccgctagcagcgcggtttaaaaagccccaggactcaaaacgccgcaagaagtggaaggcggggacggtggtgcagagctagttgga

SEQ ID NO: 47194 - DNA, 30 bp, Homo sapiens
  chr10:71329385-71329415
  hyper
ccgggggtctaatccgccccaacccaaggt

SEQ ID NO: 47195 - DNA, 30 bp, Homo sapiens
  chr10:71331513-71331543
  hyper
agatgctccctggccgggctagcgctttcc

SEQ ID NO: 47196 - DNA, 1103 bp, Homo sapiens
  chr10:71331949-71333052
  hyper
cgtgcgttggcgcggctcggagggccggggaatgaacccagcctgccgcccccgtggaggcctgggccggccaggggtcagccagggagaagcagaaggaacaagtgcttttgagggccgccgccgtcggccaccctctacggctcccggctccctccctctcccttacccttagcacccacagcccagcgacagacaggtcctttcacagaaaatctgagaaagccagactgcctgggctcaagcaggcggaaaaggtggcccccagcagcccgggtcgctcctccagcgacgcggcgggactcaggctgccagcctgggagactggggagtagagggacccccagtccccgggggaaccgcctgggctgcccagctccccgcagtgcggcgccggcggctccagcgcgtacaagctgtggtccgctatgcgcagcgtttgagtcagcgcccagatgtagttgtgggcgaagcgcagcgtctcgatcttggtgagcttcgcgtcgtctgggaaggtgggcaggacaccgcgcagggcgtccagtgccgagttgaggttgtgcattcgattgcgctcgcggtcgttggccttctttcgccgactccgtcgctgcttgctcagtgccaactcgctcttaggccggctgcgtcccccgcgccgtgcccggagcttcctcggggcccctcggcagcctccctcttccgcctctgcgcagttcccccgtgtgcgagtggggctgggcggggcggacgtggggcaggtcacttcgtcttccgaggctctggggaaggaccgctccgtctcacgggtcacttggacagtgggcgcacccgagggttgaggcgtcatcctacggcggggtcagagggaagggtaagtttgagtccgtcactgggcgcagtccgcgattccgaggctaggtgggaaaaaacaaaaacagccatcctcccagcccccgctgggtcagaggatccctctttcccctgcccgtccctcggaggcctccaaatattacctttctaccggcgcaaaagaatagagagcgatgagcagcgagggccgtggggagctcagcgggcttctggtcgccaagttcagctga

SEQ ID NO: 47197 - DNA, 19 bp, Homo sapiens
  chr10:71334338-71334357
  hyper
aaggcgctgggaagcagag

SEQ ID NO: 47198 - DNA, 390 bp, Homo sapiens
  chr10:71334652-71335042
  hyper
ccgcctgggacatcccgtggtcttctgcttccggtcactcagagtgaggggttgcagcttccgcttctctctcttgacccggtcgtgcctggaggaagacgccgaggcgggaggtttaagtatcccggtttaagtctccttaggcgaggaaggcttctctttctagcaggtccagatatcctgagtctcccggaaactgcaggaggggacaggacccgacttcgagactgtagggtggggtgaggggatgaggtaggtctgtgagtctgccctagtgatagcctcttaccgcctaggctgcttgggggcaaattttcctccaaggaagagggtggtatgctcaggaaccagcgagaggggggctctaggactgggcgggggtgtggcgcg

SEQ ID NO: 47199 - DNA, 437 bp, Homo sapiens
  chr10:71336547-71336984
  hyper
acgcctggagaccgcgggcacattggaaaagaaggaaggcagcggcccgccttcctgccttcttgtcggcgggggtagttttagcattgcctgggggctctttgagaattgtgcagggagggaggggggccatgggaagctgaatagctaatggcttgccagaggagggggattctttctctcgccttcagctcagcagtgaaagaggggaagacaaaaatctggcgagcgagctgcccgggccgagactggccacttcaaacagcccttcaaacaaaaggagacgacgaaaagaaagccccacctgtctccagtgtttgctaaaataataataaatagatttcgtttaataaataattacaagagattgtaaagtggagtgctttggaaaacatctaccgcgggagtccgtgcagccagccgtcacctgctcctaa

SEQ ID NO: 47200 - DNA, 291 bp, Homo sapiens
  chr10:71337421-71337712
  hyper
gcagggtagggagagataagacgggctcctcacccactttcggagagaagccgttccctcagagactccccctccccaggctcagggacctcgtgcgctcttgaaagggtggccggttctttttcttgggtaggtgacagggcgccatatgccaccccccagggcgcacacgggagctccggcccagggagtcttcgaacaaagggaagagagggcccgggcgctcaggagagccggaggtctttatttccagatcccccctccctgctcagggccgcctcccctaggcgt

SEQ ID NO: 47201 - DNA, 335 bp, Homo sapiens
  chr10:71337726-71338061
  hyper
cggcgcctggaaacaaagtgtccacattatcctcgccggcggctgagaccgtcaatgcgtgaaaaggtgcattgcgcaccaagacacctgttgaagcggctcctcttctcagcgcccctctctgctctgcgctcggtcaggagccgcgcagggagcggggggtgggaggagggagagacactgtgatttgtggcgacatatgttgagcagatcgttgtgtactcttcacagggacacatgcaccctcgctcccatacacaccccgcgagaaggagcagctgctctcctcaccttctcccaacataatacctgggccaggcgctttggcctcgcct

SEQ ID NO: 47202 - DNA, 30 bp, Homo sapiens
  chr10:71338408-71338438
  hyper
cttgccctttggcgcgttgcgccacctcac

SEQ ID NO: 47203 - DNA, 30 bp, Homo sapiens
  chr10:71338659-71338689
  hyper
gcgggcgggtacaccgggaggattctgctt

SEQ ID NO: 47204 - DNA, 401 bp, Homo sapiens; identical to SEQ ID NO: 7404
  chr10:71389861-71390262
  hyper

SEQ ID NO: 47205 - DNA, 30 bp, Homo sapiens
  chr10:71561196-71561226
  hyper
agtcctgatcaggacgtggagatccaccca

SEQ ID NO: 47206 - DNA, 1283 bp, Homo sapiens
  chr10:71561444-71562727
  hyper
cacttcaaagaggacggggagcgcggcagaggggctcccgggccggcgggctggggccgccggacctgctcaccacgccccccaccctgggcgagtttgcataaataaacaaatccaagccgtcggccccgcgggaggtggaggaggagtgacgaggaggaggaggaggagggaggggggagggagagattagtttgggaagtagcacggattgctcatccgatccgtgccgccgcagggagtgtgtcaagttacagaggcgccggaatcggcccctgcgctcctcgccagccgccacgacccacctctgcccatggggccctccgtgtgcgccccttcgcccggggactgaaactgactggcccgggagacacgaggcgcccagaaggactgacagcgcggcaccaactgctctgcagacacttgaagggaaagactgggcggagagaaggagagccggtcagattcccctaactttcctggacttggaacgttcttcgaaataacttttttctcacctaggtgtaccccaattaccgctggttgtgctttttcggcacttcctctcctactgctaatttttccgtcctctttgccgggagcagcggaaagggacgttttccagcgatacaagccctttccccctgccccgcagtttggatagagccttttggcagcggctgtcgcctttatttattctatttatttatttattggttctcaagacgcgagaggatggtagcggagcgcacccacaaagcggcagccaccggtgcccgcggccctggggagttgggcgcgcccgggacggtggctctggtggcggcgcgggcggagcgcggcgcacggctgccgagtccagggtcgtgcgggctgctgacgctggccctctgctcgctggcactcagcctgctcgcccactttcggacggccgagctgcaggcccgggtgctgcgcctggaagcggagcgcggggagcagcaaatggagacggctattttgggacgagtcaatcaactgctggacgaggtctgtgctctttgttgctggcttttatccctccccgcggcgccccctcgcgcagcctccagactgttcagccggtgtccgcgggcgctcgctctctgcgagccccaggttcgcgcgagttgcctgcgggaggggtcggggacacggacagacgctgccctaccagggattcggaggacctggtgggcaagagcatgacccagcgactcccgcctcgggcaagcgcccccggcttccagcgctgggagcgccct

SEQ ID NO: 47207 - DNA, 1447 bp, Homo sapiens
  chr10:71812305-71813752
  hyper
caggagactggatcgcgaccatagcgcgtttgtgcccagttctggggaaagcctcatgttagcgagtggccctcggctcgtctcgcagatcggccaagtacgcggaggccgcgcggtttcaccattaatactcctgaaggacaatagctcatcaagccccaccgaaagccccggacccgtcgcggagcctgggctggcgggggatgaggctgagcaactcctcctagaggtggttatgtggagaaggagcaatcccttctccctcctcctcctccccccgctactatccgcggcccagagaactgccgcttgccgccattgacacgcacagatagaacccaaagaaaggcaaagagtcctgcccggcaccggcgccgcgtgggccaaacctgcgcccgtggaggggcgcgcagagggcaccgggcgccgggagcaggcggcgcagcaccaggtgagcccgccatggcgatggcattattgtttagggtgctccggggtctggaaacaaaacgcgccgccggggcagtgcaggggccggagagaaccacctctgcctctcccccgagcccctgcgggcgcaccctcgatagccgacccaccctctgcaaaaacaaattcttaaatccagctgcccaacttgcttccttgggcgataaagggggggctgctaaagaagtggtcaaattcctgcggccagcgaggggccgggggcgtcgagggtactgagaggggaaggaggagggatgcgaggttcagcagcgggccccaggcgaggctggacccggaggaagcggaggtctcctgggaatgcggagtttcgggcgcaggagcgggaggacggaggcgcccggccgccgatgggcacggggcgatgggtggggggctgcgcagggcccgagggagcccggggagggccgctcgggggcctctgaaggtgcccgggcagggcgccggcggctccaggctgacaatggagggggcgcggagcagccgggcggaggttagggacccgagtccgggggcgggccgcgccggggaaggtcaggtcggggacgccgggtggcggggcgagggctgggggttgctgcgcggacacccgggcgccgcgggcgggcgtgcgccccggggccggcgcggaagagggcgcgaggccgggcactccccttcggttccctttccggggcgcccggtgccgacgcgcgctgcgctttcaccgggaaatggcggcccggccgtggctcgcctgggcagtctggctcccgctttgcgcgggaaaaaataataataataaaaatatcgaaaaagggaataaaagtaaactggctgcggcgcaggaaagggctctgccgggcgccggacgccgtgcgtatcgctcgcggggcgcggcggttggggaccagccctgcctcccccggctcccagcctccagccccggcgcacctcagcc

SEQ ID NO: 47208 - DNA, 30 bp, Homo sapiens
  chr10:71892278-71892308
  hyper
acatctccctgttgcgttttttgggggaga

SEQ ID NO: 47209 - DNA, 30 bp, Homo sapiens; identical to SEQ ID NO: 7409
  chr10:71993589-71993619
  hyper

SEQ ID NO: 47210 - DNA, 41 bp, Homo sapiens
  chr10:72043778-72043819
  hyper
cgccccgggcccgcctcccgcatggcgctctctccacagag

SEQ ID NO: 47211 - DNA, 30 bp, Homo sapiens
  chr10:72163703-72163733
  hyper
acaaacacttagctcgcgctccctctggct

SEQ ID NO: 47212 - DNA, 30 bp, Homo sapiens
  chr10:72200597-72200627
  hyper
cctgatctccgggccgtgagcccgaatccc

SEQ ID NO: 47213 - DNA, 319 bp, Homo sapiens
  chr10:72200993-72201312
  hyper
ctagaatcccttcccgactcggccgtggatacgcccccagccaccaacgctgcaccccgagcctgctgacgcggagacacccgcagagctaggccctgggctcgggacgcccgggcggctgcaaacccggctcggagccgcagcccccaacccacagcacttcccgagtccgctggctggacgcggcggaggcgccccgggggtgcccagcagggcgcggcacgcggcactgcctaccttctgcctgtaggctgcggatgatgtctgccctcggcagcgggtcgcggtagaggctcagcatgtacgccagaggggatgg

SEQ ID NO: 47214 - DNA, 30 bp, Homo sapiens; identical to SEQ ID NO: 7410
  chr10:72237986-72238016
  hyper

SEQ ID NO: 47215 - DNA, 517 bp, Homo sapiens
  chr10:72238391-72238908
  hyper
ccgcccgggggctgcggctgggctgagtgtgtctttaaatctgagccccccgcccctcgcggtggggccgggactcgcggtccgggcgggggcgggcgcggtgattggcggccgggtcgggtccgcccctcggcgttgggtagcggggcgctggggagcagcgcggcgcgcacgggccggggcgcgcaggtcccgtcgccggtgagcacgggctccctctcgcgtggcctcgccgggtccgcctggcctgcccacctccggagccacctctgcccccgcatgggctggcgaagttgggaggagcgagctggagccagagcgcgcgccgggcgcgccccgtcgctgcctgactcggcgcccgcagttcgggcgcagcacgccggccgcaggagcacggatgccccccggagccgcgggctggcaggtaccgaagtgtcctgccctggggctggcgaggggagggcaaatctggaatcccccgggcaccccccagcccgaggctgctccagacaccaac

SEQ ID NO: 47216 - DNA, 121 bp, Homo sapiens
  chr10:72432467-72432588
  hyper
ccgacagcccggggcgcaccctagcctcgccgccctcagcctgggacttggggatcgggcgcttgcccagcccgcgtcccagcgcggccacatggctccactccgcgcgctgctgtcctac

SEQ ID NO: 47217 - DNA, 30 bp, Homo sapiens
  chr10:72738258-72738288
  hyper
gcttggggtccggcacgttgtccaggctcc

SEQ ID NO: 47218 - DNA, 318 bp, Homo sapiens
  chr10:72972598-72972916
  hyper
gcccccacggaaggcacgggctggcgctgccgggcgccggggaggacggcgaggaggaggcggcggcggcggagacggcggcggcgagactggggccagggagacagccctgggggagaggcgcccgaaccaggccgcgggagcatgggggcccggagcggagctcggggcgcgctgctgctggcactgctgctctgctgggacccgaggctgagccaagcaggtaggaagcgatcgggtctgggggcgcggggctaggggacccttgcgcctcactctgtcctgaagttgaggtggtctttcgtcgcatcgatgcgc

SEQ ID NO: 47219 - DNA, 49 bp, Homo sapiens; identical to SEQ ID NO: 7412
  chr10:72973131-72973180
  hyper

SEQ ID NO: 47220 - DNA, 30 bp, Homo sapiens
  chr10:73074250-73074280
  hyper
agccttatgcctggcgctctccgctccgcc

SEQ ID NO: 47221 - DNA, 38 bp, Homo sapiens; identical to SEQ ID NO: 7413
  chr10:73113222-73113260
  hyper

SEQ ID NO: 47222 - DNA, 113 bp, Homo sapiens
  chr10:73156362-73156475
  hyper
ccctttgggggattcgtagagttgccacagcagccggtgccatgacatcggcagagggcagcttcgccagcactgaaatattcatgccctgagcgcccggcggggctcggcgc

SEQ ID NO: 47223 - DNA, 170 bp, Homo sapiens
  chr10:73156697-73156867
  hyper
cggcggctcgggagagagggacgcgggctgcaggcgcgatgcttggctagaggacgcgtccgacggcggccggacgctgaggtggtcggggctagtcagcccggcctgggcatggagcgcggggtggcagagcctctggacgtttggggcgcgcccagtccgagcccccg

SEQ ID NO: 47224 - DNA, 565 bp, Homo sapiens
  chr10:73156912-73157477
  hyper
cgcggagacccaggagctgccggcacgccgcggatgagccttcgcgccggcgggaagacgcggcggtggccagggccagagcaggcggcccgcgggggccgatccggcggagagcagagcccgaggcgaggcgaggcgcggcgccgctgcacacacgcacacggtacccggagccacgcaccgcctcttccctcctcgcttccctctccttcccctcgccgttcgcccgccgcgcggcggggaagttggtggtgaccgcggctgccgaaccacttgttcccagcgcggccatcgcccgtggcgggcgctcgcggcatccttcggtcccaggcccctggccctagcctcgcgccccgctccgagctccccgacgcgcggcaactttgattcctgggaactcgaattccattcgcgttggccttgggaggacaggcatcccatcccccatccccggtcctgggaccgcgaacatttgggggctttgctctcggcgctacggagagggtccaggtctggggtggagagattttcgagagtggagcgcgttgggatccaatcccctccc

SEQ ID NO: 47225 - DNA, 31 bp, Homo sapiens; identical to SEQ ID NO: 7415
  chr10:73437159-73437190
  hyper

SEQ ID NO: 47226 - DNA, 30 bp, Homo sapiens
  chr10:73533020-73533050
  hyper
gagggcccccaggacgcccccatcccacag

SEQ ID NO: 47227 - DNA, 30 bp, Homo sapiens
  chr10:73533434-73533464
  hyper
agcgtgcgtcccagcgagtcagctccactt

SEQ ID NO: 47228 - DNA, 30 bp, Homo sapiens
  chr10:73610555-73610585
  hyper
acctcgatcacgtgcgcccagcacaggcac

SEQ ID NO: 47229 - DNA, 30 bp, Homo sapiens
  chr10:73610993-73611023
  hyper
cgcagtctgcaatgcggagcgtcagctgat

SEQ ID NO: 47230 - DNA, 30 bp, Homo sapiens; identical to SEQ ID NO: 7416
  chr10:73648623-73648653
  hyper

SEQ ID NO: 47231 - DNA, 30 bp, Homo sapiens; identical to SEQ ID NO: 7417
  chr10:73723738-73723768
  hyper

SEQ ID NO: 47232 - DNA, 79 bp, Homo sapiens; identical to SEQ ID NO: 7418
  chr10:73724682-73724761
  hyper

SEQ ID NO: 47233 - DNA, 364 bp, Homo sapiens; identical to SEQ ID NO: 7419
  chr10:73847427-73847791
  hyper

SEQ ID NO: 47234 - DNA, 161 bp, Homo sapiens
  chr10:73848208-73848369
  hyper
ggtgactggcggagagtgggtcgcggctgaaatgtgacctggttaggagatgcacttgtctgaaaaagcccagcactggacgcggagagggagagagaatcagagaggctgcgccagcaggggctgtaactgtagcatcagcatcacgtttgacatcatca

SEQ ID NO: 47235 - DNA, 59 bp, Homo sapiens; identical to SEQ ID NO: 7420
  chr10:74020678-74020737
  hyper

SEQ ID NO: 47236 - DNA, 205 bp, Homo sapiens; identical to SEQ ID NO: 7421
  chr10:74032649-74032854
  hyper

SEQ ID NO: 47237 - DNA, 30 bp, Homo sapiens
  chr10:74033870-74033900
  hyper
ggtccccagactgacgcctggtcggtcccc

SEQ ID NO: 47238 - DNA, 260 bp, Homo sapiens; identical to SEQ ID NO: 7422
  chr10:74057401-74057661
  hyper

SEQ ID NO: 47239 - DNA, 296 bp, Homo sapiens; identical to SEQ ID NO: 7423
  chr10:74057707-74058003
  hyper

SEQ ID NO: 47240 - DNA, 31 bp, Homo sapiens
  chr10:74070291-74070322
  hyper
tgctctgccccttgctcgccctcccccgtct

SEQ ID NO: 47241 - DNA, 85 bp, Homo sapiens; identical to SEQ ID NO: 7424
  chr10:74079288-74079373
  hyper

SEQ ID NO: 47242 - DNA, 102 bp, Homo sapiens; identical to SEQ ID NO: 7425
  chr10:74079590-74079692
  hyper

SEQ ID NO: 47243 - DNA, 193 bp, Homo sapiens; identical to SEQ ID NO: 7426
  chr10:74079752-74079945
  hyper

SEQ ID NO: 47244 - DNA, 30 bp, Homo sapiens
  chr10:74114148-74114178
  hyper
aatatttcccaggccggcgactggcctggg

SEQ ID NO: 47245 - DNA, 99 bp, Homo sapiens; identical to SEQ ID NO: 7427
  chr10:74114946-74115045
  hyper

SEQ ID NO: 47246 - DNA, 30 bp, Homo sapiens
  chr10:74386145-74386175
  hyper
acctcctcggtacccgttttcgtgttggct

SEQ ID NO: 47247 - DNA, 117 bp, Homo sapiens
  chr10:74451756-74451873
  hyper
gttctcccgcctgtcgattggaccttgcaggaagccccgcctcatcaactcagtcaagggctttagttggcccggcgtcggtgagtggcgggtcttagctccgccctggccgtccgc

SEQ ID NO: 47248 - DNA, 148 bp, Homo sapiens
  chr10:74927730-74927878
  hyper
aggctctgtcccgacgcctgaccggaacctgaagccagcggaaatcctgagagaaagtctgaaacccactcagtccccgaaaccttgtgtgtcgtcactgctgtgcgtcggcgggagcattttgcgagtgtccgggggccttcgtcac

SEQ ID NO: 47249 - DNA, 30 bp, Homo sapiens
  chr10:75006447-75006477
  hyper
ttttaaagagtagccgccaatacgcctccc

SEQ ID NO: 47250 - DNA, 34 bp, Homo sapiens
  chr10:75007236-75007270
  hyper
ctctggaaatctggcgtccgtcttaccttttagt

SEQ ID NO: 47251 - DNA, 30 bp, Homo sapiens
  chr10:75012283-75012313
  hyper
acgcaccagctctacggccttggcagggca

SEQ ID NO: 47252 - DNA, 30 bp, Homo sapiens
  chr10:75012629-75012659
  hyper
cgttggtgccgaggcgcaacgctgagaacg

SEQ ID NO: 47253 - DNA, 30 bp, Homo sapiens
  chr10:75173359-75173389
  hyper
agtttccctaaattcgctgtgtcaccggaa

SEQ ID NO: 47254 - DNA, 219 bp, Homo sapiens
  chr10:75173745-75173964
  hyper
agggaggggggcgccgctcctcacctgaccccagcagcagcgtcacagcccaacccggtctcccgcaagatggagccgggggcgggcccagggtgggcggggcgtctcgcgagcccgttaggatcgcggctgcagccgggaacacccccggagccggagagggcgctgcggggagcgggctgtccctcagtcccgcccctaggcgccacctgagggaaa

SEQ ID NO: 47255 - DNA, 30 bp, Homo sapiens
  chr10:75255847-75255877
  hyper
ggagagaaacaggacgaggccaagggatca

SEQ ID NO: 47256 - DNA, 180 bp, Homo sapiens; identical to SEQ ID NO: 7429
  chr10:75385747-75385927
  hyper

SEQ ID NO: 47257 - DNA, 55 bp, Homo sapiens
  chr10:75407357-75407412
  hyper
gcaggcttcagccccgaggctcagagcatcttcttcaggaccagattctgcaccc

SEQ ID NO: 47258 - DNA, 36 bp, Homo sapiens
  chr10:75408168-75408204
  hyper
agcatggctgctggttcgacccgtgccagttcctgg

SEQ ID NO: 47259 - DNA, 30 bp, Homo sapiens
  chr10:75490319-75490349
  hyper
gaccggcgcctggacgactttcaggggaga

SEQ ID NO: 47260 - DNA, 30 bp, Homo sapiens
  chr10:75503716-75503746
  hyper
accaccacacgttccgcaaatctcataacc

SEQ ID NO: 47261 - DNA, 228 bp, Homo sapiens
  chr10:75531956-75532184
  hyper
cttttagtcctggccgtcggctgagcgagctgcgcatgcgccacgtgcccccgtggcgtagggcctcgtccggtcacgactatccgctgggcggggtcggtgctggccgagggggcgccggctgccggagtggacatggcggccggccccattagggtggtgttggtccttctaggggtgctcagtgtctgtgcagccagcggccatgggtccgtagcggagagggag

SEQ ID NO: 47262 - DNA, 96 bp, Homo sapiens
  chr10:75542069-75542165
  hyper
tgcccctccagaggcgacttgcatcacggagatgtcggtgatgatggcttgctggaagcagaatgaattccgcgacgatgcgtgcagaaaagagat

SEQ ID NO: 47263 - DNA, 30 bp, Homo sapiens
  chr10:75545346-75545376
  hyper
gggggaggcggctccgcagccgcctagagg

SEQ ID NO: 47264 - DNA, 30 bp, Homo sapiens
  chr10:75571310-75571340
  hyper
cacgggccgcgtcgcggctgctccgccatc

SEQ ID NO: 47265 - DNA, 30 bp, Homo sapiens
  chr10:75634210-75634240
  hyper
ggtggccatgctggcgggcgggcggacgcg

SEQ ID NO: 47266 - DNA, 40 bp, Homo sapiens; identical to SEQ ID NO: 7431
  chr10:75639672-75639712
  hyper

SEQ ID NO: 47267 - DNA, 170 bp, Homo sapiens
  chr10:75670638-75670808
  hyper
ctggggcaggcccccggccaggtgcatgggaggaagcacggagaatttacaagcctctcgattcctcagtccagacgctgttgggtcccctccgctggagatcgcgcttcccccaaatctttgtgagcgttgcggaagcacgcggggtccgggtcgctgagcgctgcaag

SEQ ID NO: 47268 - DNA, 30 bp, Homo sapiens; identical to SEQ ID NO: 7433
  chr10:75671363-75671393
  hyper

SEQ ID NO: 47269 - DNA, 30 bp, Homo sapiens
  chr10:75700453-75700483
  hyper
gtcaagaaccgagggcggcccgtgggagtc

SEQ ID NO: 47270 - DNA, 30 bp, Homo sapiens
  chr10:75700833-75700863
  hyper
ttctcttctccttcccggctccacgtggtg

SEQ ID NO: 47271 - DNA, 30 bp, Homo sapiens
  chr10:75910773-75910803
  hyper
catctagattcaggcggtcatctgctgcct

SEQ ID NO: 47272 - DNA, 30 bp, Homo sapiens
  chr10:75911607-75911637
  hyper
gacccagacccctccgatgctttgcagggg

SEQ ID NO: 47273 - DNA, 30 bp, Homo sapiens
  chr10:75936203-75936233
  hyper
gtagacagtggccacgtgactgctaaaccg

SEQ ID NO: 47274 - DNA, 30 bp, Homo sapiens; identical to SEQ ID NO: 7434
  chr10:76585836-76585866
  hyper

SEQ ID NO: 47275 - DNA, 91 bp, Homo sapiens
  chr10:76586306-76586397
  hyper
gcggggcgggaccgcgactcgggtttaatgagactccattgggctgtaatcagtgtcatgtcggattcatgtcaacgacaacaacaggggg

SEQ ID NO: 47276 - DNA, 30 bp, Homo sapiens
  chr10:76803545-76803575
  hyper
gtctcttactgtggtcgtcgcttagcgctc

SEQ ID NO: 47277 - DNA, 47 bp, Homo sapiens
  chr10:76970481-76970528
  hyper
ttggcagcgggctgcgctgcagggacaggcgcggcggacagccccgg

SEQ ID NO: 47278 - DNA, 390 bp, Homo sapiens
  chr10:77054512-77054902
  hyper
ggagagaaagaagggagaccccggagaggaagagggggaggcccgggagggcgcgcggagggggtgtcagcgaggggccgcctgtcagggttctatctgcgcgatgattgatgcgggcccgggtttttctgtcagcctgtcacggcgcaggaatgtttaatgttctcattattggttacgctgttgtgtatatttctctgtcagcaccgcggacccagctgaactggcagagcacttcaaaggcctacgggtcattcatcatccccatgacgctccggcaaatgctcagcttcagccccgcgccagggatttgttatgacttgcgagccgcctgacagacagggctgcggcggccgggaggggacgcgcgggaggcgggctccgggccct

SEQ ID NO: 47279 - DNA, 4329 bp, Homo sapiens
  chr10:77159486-77163815
  hyper
agccggagctggagcccgatgaaccgccgcagtccgagcccagagccttgcctcccgggcccccatccggatgctggttcacatccacattaatcccgccgccgcagctaatccggccgtgtgccagccccgtgggtcccccttcggccgaggcgcccccggtgcccttgccaccgccgcccacgtcggtgtctttcttgtcgtccttgccctccggggcacccccggccgaggacagcatacctcccggcgagcaggccgaggcgctggagctcgggctgcctgtcctgggcgtgaatggctggcaggtggcgctcggtacccggaatcccgacttctccgacgaaacacccccgccgccgcccccgccaccgccaccgcctccaccgccgcctcccggctccttcttatccgagccgggtttggagtacggcttgaaactcgacttgtcctccacgccgatgtcgctcagcttcagggggcccgatttggtgtccttgtcgcccgcagcaccgccgccggcaccgcccgcgccgcccccgttggaggcaaccgaggagagtttggaggagggcgaggggtcgggcttcccgatctgcgaacatgtttgcgccaacagcgccagcgggctcttcttggcatcgagctgcggggtcagacgatggggggggagcgtcacacagagaaagaagtggaaaccctttagaatcctggcttctggggttcaaatgcctctccgcaacagcccacgaagatcctcccagccccaaggcgcaattctaggcggcaccccctcttcaacacccactcacaaacattctcgccgttgggaaaggcagcagattgctccccccgcccaaccaccacccccagcagcatctttcctgccctctctgagcgctaactagatttttaaagagcaaaatgttttggttttcggttcctagacccagaactgtaccccctccccacaaacactccttaattcttcagagtaagggctcgggcggctggcgcctcagaggctgtgtgcacacactggcttctgcggatacgaaggacggcgactttggaaccgtatttcagacctccgcctgccttcggtgccgagtgaaggggcctgggtcggggtaggggctttcatatcgaaaggagaaacaagtattggcagccttgctccctagcatgcacgccccattccacttcctcccccttttccgccctagttttgaggtacggaagcagtagcctcttcccccattcgggagctgaatcactccgacccccccacctccgcccagatcccgagaaaaagaaagccctagggtggcagccagggtagtggtcccagtgcgatccagagagagggtccttacctcgatggggctgaccggcgtggaaggcaggggctgcaggtactcggggtgcaaaatgtggccagttcgtgccgtcagcatcttcagcaccttgattggcaggcggttggcctggcgcagggggtcagaggggggcacggcgtgcacaaaaggcttggtgctgccggccggggacgagcctgggccggggccggagctatttccagagagcgcgctggtccaggcagggtctgcaccgccgcctccgcctccgccgccgccgccgccgctgtgcttactgcttcttagggcagaaagcgagggcgctgtgctcatgacccacccgcgcgcatgggagcagcgggggggagggctccgggaggcgcggggcgggctcggggctgcgcgctcgccccgggagcaggagcagcgggaggaggaggagctggcgcggcggccacgggcgcccagcgcgccttctcggcgcctggagccagacgcgagtaatcctgggtggcccgcagcggagccgtggccgggctagaggagccggctggactgcgggagtgccgggcggctcgcggtgtccgcctcgggctgctcccctgcgctgcgttctcgcggccccgcgccggcgctgcgctctgcgatgcgagccgctgcgtgtccagccggggctctggcgaggaaactcacttcaaaagcagctgcaccaagggggagattaaagcctttgccgccttccaatcaaatgggagcccgaggtgattggagggtcaaggggatgtgacgcgtcccgcgccgccgccgccgccgctgccaggactctcagtgccggttttaatgggcagctccctcttcgccgcccccctgtgtgtcccctccctcgatttcgctgggaggacgagatggacatttattctacgtttgccatccgccgcctccctcttttttcctcctcgtcgttcttcctttccccagctcgaaaataaactgaaaccttcttttgaaggggggtgcgcgtgaggaacagactgcggggggtgtccagaaggagcaccggtgggagtgtggacaccggccggactgtcaactccaggggcgaagggaacctgcacacccagtgttttttccttcgcagtaatcgagatcccgcgcggcgcagcgcagccaccagggtaagaaggcaaggtggggagccggagctggaagaagcccgcccgcccgctctaatttcctcagattccgcggcggagaaaccagaagctagatgggcagtcgcagcggcggcggctcaacaccgcgaggagcgctgggctctccgcccttcccggccacgtgacgcccggggacgcgtagattggggcagcagcgggggtcacatgtttcctctgtttcaccctcagtctgtcccccaaccccccattcttactctcccaccctgttttcctccctcccccccttctttgggcatctccacccctccatcaattgtcaatgttcctcgaccgcaatcaatcagttatttgtcagctcttgtcaatcctcccgtgatttatgtcagcttttgttgctgattacaaggcgggtgcgacttgaagggaaaaagagagagggagagagagacggagaggaaggaggagattgagagggaactggaggaggggaaaagaggagcggcctcctgggatgggggtggggtgggggctctaagaaaaagaatgaaagaggcgcacggtgtcaggaaaatgaatagcgagagtaaagtgcgcaggtgcgcccagggcgccgagaggggcgcgcaggcctggagtgtgcgcctgccctctcggtgtcggagagacgcccttccacctctgggagcctcggtctgttggggtcgcggagttcgggcgcggctccgggtacccgagaccagcggcggcaacttctaacacgggagatttcccgccaccccaccccgccgccgcgagtcctcgcggggcgtgttgcgtgcggaggtcaggctgccaccctctgtagttccctaaccccaaactcggagacttctaagagccacaccaccaaggaacttctagtcctggaggtcaatggtggggcaaacctcgcctcaattctttgaccccctcgggtcgtaagcagggctaagaggctgcgaagaagaggcctggccatgggtgtatgggggaagaaacatctcaggctcactcatgccccctccccgaccttctcccacctgccgccatccccgcaggctggggagccagggtaactcggggctgctctctcgaatttattggaacgccgagtcggaatgagctgcgctaggagagccgagggaaggagcgagagagggagggggcggctgcctgtgggaacgcgggttcttccagggaagcggagcgggactgccgcgttcccctcgatttgcaccgtcactcgggttgtttgggaagaaaaggggaggcgctgtgcgtgccaccgggtacctggacctggatgcccagtgtgtatgcatgcctgtggcgctgcgtgagttatcggggctctgatagcgtccggagcgggttcgagggtctcctccaggaactcgcagaaattagagggggtggggaggaggacacacccccttcctcggaacgacttagaagactttgaatctcccctcctccgcttttccgccccggctcttcttttgttgtcaagtccttttgataaatggtggggctgggagctctgggagtcgggagccagtctgtgcccgcgtggggggcgggggccgagcctggagacccggtttcgaccggcgcgcacctggggctgagccgggtgcgcgcgggggtcgggtctggaactgcccttggtatgctcgccctctcctcttggcccatctcactcccctcccccacctgactcccctccccggcttctttctctgtctcccactccgcacgggtaccgagaactttccggg

SEQ ID NO: 47280 - DNA, 30 bp, Homo sapiens
  chr10:77168537-77168567
  hyper
acagccgccctgggacgtttttcgaggctt

SEQ ID NO: 47281 - DNA, 809 bp, Homo sapiens
  chr10:77168770-77169579
  hyper
aaacctgggaatgtgcgcgctcgggaggggaggctgtcaaaacccagtcatcgcggggactggatgggggacaattctccgacgccgcggcctggacccgcccccacccaaccggcgcaccacctcccaggcaccacggagcctgcgcaagctgcggggccgtaaaggaaccggcccccaatctccggggcttcagtcccgcccctctctccccccagtgccctgcagcgctcccagggtccgtgtctgccctccccaagcccccactgtcaatacaatccctgttaaaaaaaaaaaatctttttagagccaggcacgtgccgtcggcctctcccctgcccgcctggcccaggaggcgcccacacctgcgccctcacttgccgagacttttacctgtgcagtccccggcggcgcctgcagccgcgcaggtaaccgagaaatggaagggagggctggggagtgagaaggacagagagcaccgcccgacacaaccagacgcgcggacccggggcctcctctctggaccggtgctggggccctggtagaaccagctccgggagccgaaattgagccatgaagagtgggccgagggaggggcgaggggaacgggcctcaggagggaggggcgggcccggcggcacttccgttgggggtggggctgcgggctgccgcgccggtcccgcccctccgccgcgcgggcccgcccgctccaggccaggctccgcccccaccgactcggagctggatctcaggccacggcgcccccccagtcgcgcccccaaccccggaggcctcgggctgaaccgggt

SEQ ID NO: 47282 - DNA, 737 bp, Homo sapiens
  chr10:77190964-77191701
  hyper
cccagctttgatgaggaggggcgttcagccaagaggcccctcctcgctgcagttgaggtccattatgtaacccagcttgcgaaatgcaggaaaggcccggctggctacagcccggctaacggctcagaaagggcgcccctgataggaatacccccacctcaggcgtggcccagacaaacgcgataaagctgtgggcatggagttttgggcattgggacatccgggggagggaggggcgcgggcagtcggggtcaggccgccgtcggggcgcggggcgctgcgggccacctgttgcagcgggcggccagggctcacctgcgcggagaccgggccgaggggcggcggcggcgagcggcggagctgaggtccccgaggctagcccgcgcctccggcttccgccgggtcagctgactgcccagtgcggaactgtgcgcccgccgcgctcccctgccgcgctccccgctgctgccgccgcgcccccgcgctccgtcccgcgcgcccgcagcgtcctggccgccatggccgggctcgtggtgcgtggaactcaagtaagtcccggccagccccgcctccgcccggggcgcagtccgcgtggggagggacagcggggcacagaggctccccagggcctagacacccctgtccccgcctcagggggctgcgtctgcagggggtgagcttcaggtgctcaggctcgccctagtggggctaggacagacctcgtttcgggcctggca

SEQ ID NO: 47283 - DNA, 1904 bp, Homo sapiens; identical to SEQ ID NO: 7442
  chr10:79396526-79398430
  hyper

SEQ ID NO: 47284 - DNA, 209 bp, Homo sapiens
  chr10:79470924-79471133
  hyper
ttaagaaggcagagctcgagggggccttgaagtcacatcgccggctgctgagtctacgaacagggaagcagccgcagtccccgaaaggacccgtcccagcgagccagggcctggttttccttccgcagaaggcggagggaccggagcgggcgcgggcacccctgggctctgaggggcgcgctctgaagggcggcggacttcagggccat

SEQ ID NO: 47285 - DNA, 74 bp, Homo sapiens; identical to SEQ ID NO: 7444
  chr10:79606675-79606749
  hyper

SEQ ID NO: 47286 - DNA, 221 bp, Homo sapiens
  chr10:79685703-79685924
  hyper
tggacctggtggcccccggggaccctgtcgtcgaggcacctgagagtgaaggccttcagcggggggcattgttcacagcgaacggcgggactgggggaggcggcgggacttcgggatccgcgcaccgccgcctccccaactgggccagaggagcgagtccaccgaggccatcgccaggtggagcggcggccccggcgaggtaccctcggccagcaggaggg

SEQ ID NO: 47287 - DNA, 46 bp, Homo sapiens
  chr10:79686267-79686313
  hyper
tggggctccatggtggcgggccgcgccgccccgccccgccggacgc

SEQ ID NO: 47288 - DNA, 470 bp, Homo sapiens
  chr10:79686574-79687044
  hyper
gggcgcgccccgaggccgggctccagccgggcatgctccccctccccctcagcctccgcgcgcgccgcccgccccgcgagaaaactcgccccgaaagccgggccgcgcgccgcccccagagcaagactacaactcccgggagaaagtcgcctgggccgtgtttcccaggctcccgacagctccggcccggctcggaggccgcctcggcccccgtgcaccccggcccggctcaccggggccccgcggccgccacccgctcccccgtggccacagccccgccgccgccggcccgtccctcctctctcccctccccaggccgtccctccgggaggcggcagcaggggaggaggggacgggcggaggggaggggtccccggcccgcccgctaggcggggacgcggcgccggctggttcccggtcccccgaggcccaggcgcagccgggggtgggggacacggagtcaggcctgg

SEQ ID NO: 47289 - DNA, 30 bp, Homo sapiens
  chr10:79793996-79794026
  hyper
ttgggctaggtaggcggcttgcaggtgatg

SEQ ID NO: 47290 - DNA, 30 bp, Homo sapiens
  chr10:80062650-80062680
  hyper
aagcaaggtccctgcggatctcatacagcc

SEQ ID NO: 47291 - DNA, 30 bp, Homo sapiens; identical to SEQ ID NO: 7447
  chr10:80159487-80159517
  hyper

SEQ ID NO: 47292 - DNA, 30 bp, Homo sapiens
  chr10:80181336-80181366
  hyper
ctcttgctggcaggccgggacacagttcca

SEQ ID NO: 47293 - DNA, 38 bp, Homo sapiens; identical to SEQ ID NO: 7448
  chr10:80733745-80733783
  hyper

SEQ ID NO: 47294 - DNA, 30 bp, Homo sapiens
  chr10:80819116-80819146
  hyper
tctttcaacaggcccacgttgcctctcagt

SEQ ID NO: 47295 - DNA, 34 bp, Homo sapiens; identical to SEQ ID NO: 7449
  chr10:80827232-80827266
  hyper

SEQ ID NO: 47296 - DNA, 30 bp, Homo sapiens
  chr10:80827808-80827838
  hyper
gtaccttagctctccgctatctctggcagt

SEQ ID NO: 47297 - DNA, 408 bp, Homo sapiens
  chr10:80828531-80828939
  hyper
gaaaggggaaagagagcgcagagcgcgagccaagccgagcgccggcagcggcggcggcgcggcgcggcgctccactccggcctgactccgcaccggcttttgcgggcggccggcggcgcggggccctttggaaatagaatagccaatgtaatctgacacttcaacttgctcggctccgggcgagttgattcacttactcaccccctaacgccgagttccttttcactgtctgtggacattaaaaaagcgagcggcggcggcgggcgccggggagagcgggcggccgggcggcaggcgggcgagcagcgatcgggcggccgagcgagcgagcaacgccggcgcagcgcggtgaccccagccccagccggcgcggagcaggagccggagccgagcggatctcggcgccct

SEQ ID NO: 47298 - DNA, 30 bp, Homo sapiens
  chr10:80829901-80829931
  hyper
tcgggggggggaggcgggttctggaagctt

SEQ ID NO: 47299 - DNA, 30 bp, Homo sapiens
  chr10:80830745-80830775
  hyper
tggcggctgggctggcggggtgagggcacg

SEQ ID NO: 47300 - DNA, 30 bp, Homo sapiens
  chr10:80841132-80841162
  hyper
tgacctgaaaatagcttagcccaggttgta

SEQ ID NO: 47301 - DNA, 30 bp, Homo sapiens; identical to SEQ ID NO: 7451
  chr10:80909886-80909916
  hyper

SEQ ID NO: 47302 - DNA, 106 bp, Homo sapiens
  chr10:81074798-81074904
  hyper
ccacggctttccagtgcggagagtcgagatgctccctgcagcccaggccccgggcacctcctgcaaccatctctgggctcagcacctgaggcgggtttcctgggtc

SEQ ID NO: 47303 - DNA, 53 bp, Homo sapiens
  chr10:81107045-81107098
  hyper
tctgggcctggaggcgggagtgtttcaaagcacttcacgctccgcggccccac

SEQ ID NO: 47304 - DNA, 30 bp, Homo sapiens
  chr10:81107653-81107683
  hyper
agaatgatttcttccggcctccctcggagc

SEQ ID NO: 47305 - DNA, 30 bp, Homo sapiens
  chr10:81204554-81204584
  hyper
aggataaggttgggcgtgagaaggacactt

SEQ ID NO: 47306 - DNA, 30 bp, Homo sapiens
  chr10:81206361-81206391
  hyper
ggagctcgggaaagcggctgtcacccatct

SEQ ID NO: 47307 - DNA, 605 bp, Homo sapiens
  chr10:81664461-81665066
  hyper
taatccgcgccaggccgcacagctgctctggccttcggggaggactcctggagcgcggtgtacactgctccggagtccctccgcaggagttgaggcagcgagttccgagggcggggtggggcggaatccggaggcacgcggacccggtggaacgcactgcgcagacggcgccggcgcctgcactcagctgttgacgagtctttcttccagctctaccctgaaagtcctccaggcaccggtcttttttttctgccttttgtttccctcccggcgagtcggcgcgacagtgaatttccgtttcccgcggtgtccaagcggacctgaggagttgcagctgtgagcaggttcggtggtgccgcgggctggggtaggcggcggtggggtccctggctctggggcactgggaagatcgcgagtcgtgcgcgtgggaaggtcctccggctcatctttgctccccaggagcagcatatttcgcatctgccagaggtgtgcccgggggtcgttgggagagggacggggtgaatccctgcagagagccgggacggggagggaaggtgtcggggagacgtggtttcctggcgacgtggtcccggcaggcgacttag

SEQ ID NO: 47308 - DNA, 741 bp, Homo sapiens
  chr10:81741539-81742280
  hyper
gaggcggtgcccgacgcccggggcgcccagcgcgcccagaccggcagtggccttcatggcgcaccagaacctaaaccagaggcagccacacggacacctgagccgcctcttcctgctagagccagcgaggtgtgcccgcagccgagaccccttcctctccacgtctcctcgtctccttgtctcccgtgcccgcgtcaggccgccagcctcgcccacctccccaggaagagcgcgccgggcgccgacttcccctggggcggcggccctggacgtgcggggggtctctctgggccggctgctgcgccttggccctgccctctagctcccgcgctcgctcccgccctcctggctctccgggcgcgcctggcggggcagggcggacatgggcaccaagcagaggagccgcacgcgcacgtactggggctcggatctaccttccagtagcaacggaggagccaatgggaccgcgggcggcggcgggggcgctcgggccaccgcggggcggttcccggctcaggtgcccagtgggcaccagcccagcgcctcgggcggcgctgctgcgaaggccctggcagccccgcgcagccgctcccgcggcggggccgtggggagcgtggctttgggggcccgcgcagcgcagtcctccttcagcatgccgaacagtagcagcggcctatagggcttacaggactcggtgcacagcagcgctgaggaaggtggcgcggccggtccaggccggtg

SEQ ID NO: 47309 - DNA, 30 bp, Homo sapiens
  chr10:81838458-81838488
  hyper
gctacggcagccggcgcgacctactttcag

SEQ ID NO: 47310 - DNA, 30 bp, Homo sapiens
  chr10:81838725-81838755
  hyper
gggtcttgggcgggcgcccagggccctgag

SEQ ID NO: 47311 - DNA, 30 bp, Homo sapiens; identical to SEQ ID NO: 7453
  chr10:81839018-81839048
  hyper

SEQ ID NO: 47312 - DNA, 223 bp, Homo sapiens
  chr10:81892431-81892654
  hyper
agtgcatttcctctcgggccggccgggtgcgatccgggaagggcggctgcgggcagacgcggcgctgcgctcggccaggccggcaccatgcggcccctgctctgcgcgctgaccggactggccctgctccgcgccgcgggctctttggccggtgagtggggcgcagggcgcggcaggggacctggagccggggagacccgcagatggcgaggaaggaatgagc

SEQ ID NO: 47313 - DNA, 1 bp, Homo sapiens
  chr10:81964767-81964768
  hyper
t

SEQ ID NO: 47314 - DNA, 97 bp, Homo sapiens
  chr10:81965475-81965572
  hyper
ggcgcccagtgccgcgcagagccgcattcgccctcctgcaggggtgggcatttcctaagtcctctccagccccgtgtgcgtcggttagtgactctct

SEQ ID NO: 47315 - DNA, 234 bp, Homo sapiens
  chr10:82116866-82117100
  hyper
gggcctgcggcagagatgaggcggtgtgcaggagggagagcgcgcacgagggggcaacgggcagagaggagagggaatgaaagaaggggagcgtggcagagagaagcgggcgcgctccagggggcggggtccagggaggagggggagcgtaggatcggggcgggaggcagagaggagcgggcacgcgggacgggcgtgtgctcgtgaggggtcgaggaaaggcgtatgtggagg

SEQ ID NO: 47316 - DNA, 198 bp, Homo sapiens
  chr10:82213545-82213743
  hyper
tcctaatccttcgcccgctctccacggtcatcccgtgtatccctcgagacgccgcctcccacagctcgtgcttctcccaggttcggctccgacaaggccagagcggcgtctgcgcagcgcaacggctcagagcgctcccggcggctacaagtgcccggccccgggccaggcccggcctgcgccgcgcacccactggga

SEQ ID NO: 47317 - DNA, 30 bp, Homo sapiens
  chr10:82215060-82215090
  hyper
agcggtggtgagtgcggcggtgtcacacac

SEQ ID NO: 47318 - DNA, 562 bp, Homo sapiens
  chr10:83633799-83634361
  hyper
aaaggtggccttccatccagccgcaccgccatccggcaggggagggcacaggcaccctcccacccgcatccgcccccgccccctcgcccagcagcgtcagtctctgaccccactggatccgtacaggagacgactcacaatcggtcggaagctgcttttgcccccccaccccaccgcaaacgggggtttgcttggatcatttatctatcttgtgtgcattaagaaaccagcattagctgctagtgggaggcgctactctgcccgaatcccagcccgccgcggcgattctgcacacacacacgcaccagcctggcagccagagcccgtctggagacgccctcagcccggggtctgcgttccccgggacccccgacgcagtctcccgcttccgtcccccacgctcaaccgggcagggcgccggggcgtgatttccgatcctctgcctgcttgttgggtccctcggaggcgggtcagaccgcacccgccgcgggcgcccggtgcgcccccagcccctggctcgcggcggcgacagcggcgctgttcgctggagtttgactctccg

SEQ ID NO: 47319 - DNA, 269 bp, Homo sapiens
  chr10:83634466-83634735
  hyper
cgagggttggctgcgggccggctgaagaacaggtgcacctcaccgcccgggctcgcggagcagccgccgaagatcgcggcggccaggcaggccctctgtgtcggaatgcgggtggcgggcacccggcaccccgcgaccggccgccggggccactgaaggcggcgcgaggcccaggcgcggcgcgagcgggcgccccagggagcgggctgggcgcggtgccccgaggatgtcggcgctcctggagcgcacgcaggcggcgggcagcagca

SEQ ID NO: 47320 - DNA, 286 bp, Homo sapiens
  chr10:83634998-83635284
  hyper
cgccgccggagcccgcgcccgcgcccgcgcccggcccgcgcggccccatgcctctgccgcggccctcgggggggcgaaggtgaagaccggctcctaggatgagtgaaggggcggccgctgcctcgccacctggtgccgcttcggcagccgccgcctcggccgaggagggcaccgcggcggctgcggcggcggcagcggcgggcgggggcccggacggcggcggcgaaggggcggccgagcccccccgggagttacgctgtagcgactgcatcgtgtggaaccggca

SEQ ID NO: 47321 - DNA, 102 bp, Homo sapiens
  chr10:83635530-83635632
  hyper
cgcctcctccaggacgcccaaccggattagcactcgcctgaccaccatcacgcgggcgcccactcgcttccccgggcaccgggtgcccatccgggccagccc

SEQ ID NO: 47322 - DNA, 282 bp, Homo sapiens
  chr10:83636191-83636473
  hyper
caactcccttcaaagggttaacgcgagtgcgatccctcctcactgcagacctgctggcgagctgccggatcccgctccagtagagggccagggagggagagagggccttcccgaaggcactgagccccttctccgcccgccggtaggaaggaaagaaagcaaagcacatgcaaattgaccgacgataaaccacaaaaggaagttatgtccttgtgtggggtgacgagttgatggagataatggtagaatgttgctgaggacgcttccagcagccctgacctg

SEQ ID NO: 47323 - DNA, 30 bp, Homo sapiens; identical to SEQ ID NO: 7459
  chr10:84158654-84158684
  hyper

SEQ ID NO: 47324 - DNA, 30 bp, Homo sapiens; identical to SEQ ID NO: 7460
  chr10:85233864-85233894
  hyper

SEQ ID NO: 47325 - DNA, 30 bp, Homo sapiens; identical to SEQ ID NO: 7461
  chr10:85247485-85247515
  hyper

SEQ ID NO: 47326 - DNA, 30 bp, Homo sapiens; identical to SEQ ID NO: 7462
  chr10:85416512-85416542
  hyper

SEQ ID NO: 47327 - DNA, 31 bp, Homo sapiens; identical to SEQ ID NO: 7463
  chr10:85899255-85899286
  hyper

SEQ ID NO: 47328 - DNA, 131 bp, Homo sapiens; identical to SEQ ID NO: 7464
  chr10:85899675-85899806
  hyper

SEQ ID NO: 47329 - DNA, 889 bp, Homo sapiens
  chr10:85954178-85955067
  hyper
ctcctgtccaggactgggggccgccggcaaagggggcgtggcgggcggggagtcctcttgtcacgccctcctgcccccgcccgcggctgggagcctgtcgctccgctctgcgccgctaattggtctcgtcaggcggccggcaggagcagatccgagccgtgtcatcctcttagcgccctcacgccacccgccgctcccgccccgtgccccctcccgccgcggctgcagtcgccgctacccccattgtggtctctgccctccccgcgggcccagggcatgctccgtgcccctgcgcccggtctcggcggcggcaggcgacactccgcgccggcggagacatgaggcgctgccggtgggccgccctggccctggggctgctgcgcctctgcttgggtgagtggccgctgggccgcgctggccgcgtggatggcgagggagatgggcgctggcgtcacccaggtggccagagggacatggtcctggaccacttccagagtgggactcgggctggtggacgggagcggagaagtccttccatcttcctggcccattcggtagtggggagtggggtagcggagtagtggggagctccggggcgcttctccagagctggcatcctagggccccagggtttggcgcccggacccccgctgctctccgcttgctgggaaccagagctgtaggcttggtggcagctccgatgctgcgtggggcaggagatagtgccctgactcgcggcttgaccttggctgggctggggcactgcccctctccgagcgcgggtgcaatctgcccattgatgaaggaggggttggattgctacctgggttctaagcgcccacatgctacgtgtccctgacaagcccgagcccaccgggggcggagtggg

SEQ ID NO: 47330 - DNA, 43 bp, Homo sapiens; identical to SEQ ID NO: 7466
  chr10:86088146-86088189
  hyper

SEQ ID NO: 47331 - DNA, 30 bp, Homo sapiens
  chr10:86475849-86475879
  hyper
cctctctgcttcccccgccttgtccctgtc

SEQ ID NO: 47332 - DNA, 30 bp, Homo sapiens
  chr10:86514862-86514892
  hyper
cacatttctattctccgttttgtatgatgt

SEQ ID NO: 47333 - DNA, 30 bp, Homo sapiens
  chr10:86904510-86904540
  hyper
tcctgcttgaaattacgatacagaattaat

SEQ ID NO: 47334 - DNA, 30 bp, Homo sapiens
  chr10:87074845-87074875
  hyper
tcttcttacaaccaacgttctatttttata

SEQ ID NO: 47335 - DNA, 30 bp, Homo sapiens
  chr10:87081956-87081986
  hyper
tttctactttccaagcgtgtactatgtttc

SEQ ID NO: 47336 - DNA, 30 bp, Homo sapiens
  chr10:87270873-87270903
  hyper
gcaatataagtttgccgatgaactcgtgcc

SEQ ID NO: 47337 - DNA, 30 bp, Homo sapiens
  chr10:87397127-87397157
  hyper
tttgagtggatctgccgttgggtggactgc

SEQ ID NO: 47338 - DNA, 30 bp, Homo sapiens
  chr10:87405011-87405041
  hyper
agccaggaaagggaacgcgaaggccatttg

SEQ ID NO: 47339 - DNA, 30 bp, Homo sapiens
  chr10:87424457-87424487
  hyper
tgaaatccaggagggcgcaataggtcccct

SEQ ID NO: 47340 - DNA, 30 bp, Homo sapiens
  chr10:87453632-87453662
  hyper
atttatgtctaagaccgcaaatgcgtaagc

SEQ ID NO: 47341 - DNA, 57 bp, Homo sapiens
  chr10:87493569-87493626
  hyper
aagcagtggtaaaaacgggagaagacacgttaaaatgtgatacgtggatatatgtgt

SEQ ID NO: 47342 - DNA, 30 bp, Homo sapiens
  chr10:87515091-87515121
  hyper
tgggttcagctgagccggctgagatgactt

SEQ ID NO: 47343 - DNA, 30 bp, Homo sapiens
  chr10:87536102-87536132
  hyper
ttccacaacaaagaacgtagagcagacaat

SEQ ID NO: 47344 - DNA, 30 bp, Homo sapiens
  chr10:87602797-87602827
  hyper
caacaatgtgtaaaacgttttggtaatcaa

SEQ ID NO: 47345 - DNA, 30 bp, Homo sapiens
  chr10:87622976-87623006
  hyper
tgtgtctggtgaggacgtgctttttggctc

SEQ ID NO: 47346 - DNA, 30 bp, Homo sapiens
  chr10:87672380-87672410
  hyper
ccccagagacacctgcggtggtcggggagg

SEQ ID NO: 47347 - DNA, 30 bp, Homo sapiens
  chr10:87832587-87832617
  hyper
gcagtctaggaaaggcgcaggtgcctgtat

SEQ ID NO: 47348 - DNA, 30 bp, Homo sapiens
  chr10:87836471-87836501
  hyper
ccacccacatcatggcgagcaatctgttgg

SEQ ID NO: 47349 - DNA, 30 bp, Homo sapiens
  chr10:87838181-87838211
  hyper
agacagtgggtggaacgggtgctccgcggc

SEQ ID NO: 47350 - DNA, 30 bp, Homo sapiens
  chr10:87863910-87863940
  hyper
aggcttggagacatacggaccagggttcaa

SEQ ID NO: 47351 - DNA, 30 bp, Homo sapiens
  chr10:87866056-87866086
  hyper
aatcactaaaaatgacgattagaaaggctt

SEQ ID NO: 47352 - DNA, 30 bp, Homo sapiens
  chr10:87886909-87886939
  hyper
ctccaactgagtagtcgctgttcttcctga

SEQ ID NO: 47353 - DNA, 30 bp, Homo sapiens
  chr10:87941840-87941870
  hyper
ttccacatcagtctccgtgggtgcagacag

SEQ ID NO: 47354 - DNA, 30 bp, Homo sapiens
  chr10:87992037-87992067
  hyper
ctggaatgccgctcccgctccctcaggaac

SEQ ID NO: 47355 - DNA, 30 bp, Homo sapiens
  chr10:88023113-88023143
  hyper
agctgggaaatgagacggcagcggggagga

SEQ ID NO: 47356 - DNA, 30 bp, Homo sapiens
  chr10:88096446-88096476
  hyper
tgccagaaggcaacacgcagagtcataacc

SEQ ID NO: 47357 - DNA, 30 bp, Homo sapiens
  chr10:88118882-88118912
  hyper
ggtaaaatttgtttccgcaccacaagaaaa

SEQ ID NO: 47358 - DNA, 30 bp, Homo sapiens
  chr10:88123778-88123808
  hyper
cgttgaggctcaggtcggataccgccaact

SEQ ID NO: 47359 - DNA, 59 bp, Homo sapiens; identical to SEQ ID NO: 7467
  chr10:88124921-88124980
  hyper

SEQ ID NO: 47360 - DNA, 30 bp, Homo sapiens
  chr10:88125456-88125486
  hyper
tacacagacacacaccggagaagcaggcag

SEQ ID NO: 47361 - DNA, 266 bp, Homo sapiens
  chr10:88126172-88126438
  hyper
cacccgggcccggggcgaggccgagggcagcgcgaagcggggaggcgctggtcccggtgcagtcccgggccgctccccgggagagccgagcccgcccgtgcgtcttcccccgcgcgcccgcccctgcgccctgcgcccgccccagcccagcccagcccagcccagcgcggtcgggctcccgctccggctccggtggcggctgcggcggtgctggcagcttgagcccaggccggcgcggcgggggcggcccgcggctgtggcagcgg

SEQ ID NO: 47362 - DNA, 388 bp, Homo sapiens
  chr10:88126744-88127132
  hyper
agaccggcacagcggcggggaccggcctgggctgcggcgcgccgagctctgacggttcgggcctccttctccggttcgccaggggcgggagaatggaggagggccggccgctaactgccctcgaggggctcccgaagcgccctggcgacctcagcagccgcgcgtctcgggtcatgtccccggccgaaacagaccgttcctcgtggagtgggacctggggagcaagaagagagaccggggcggggcgccgggccaggccccaggacagctggggagccagagggggccggccgccgcaagcatctcagagtagagcccgggccgtgggctcgaaccctggctggccgcgcggacctcggcgggcgcccatcccccgctccatgggcag

SEQ ID NO: 47363 - DNA, 30 bp, Homo sapiens; identical to SEQ ID NO: 7469
  chr10:88137193-88137223
  hyper

SEQ ID NO: 47364 - DNA, 31 bp, Homo sapiens; identical to SEQ ID NO: 7470
  chr10:88148418-88148449
  hyper

SEQ ID NO: 47365 - DNA, 363 bp, Homo sapiens
  chr10:88149245-88149608
  hyper
ggaatgagggtgacttgcacacgccgcatagtaaagcggcagagaacttgcatcaggcgtctctgaccaccgagcctgcgaagacctagctgattacgaccaggaaacaggaggggacatggcccaaggtgggcggggccagtgctgggaagccccgccccgcccccgatcctgtgctcccaggtctgggcgttaggattctctcagtcccggagccacgccggctgaccgcagggctcggggagcgcggctgggccccttttcccgggtccgggaagcgccgggccacgccgggtccgctggagagactgagggccagggtcgccgctgccgccgggaggcgacagagccagctgggcgcac

SEQ ID NO: 47366 - DNA, 30 bp, Homo sapiens
  chr10:88193994-88194024
  hyper
tacaaaatagtgaaacgataaaagctacca

SEQ ID NO: 47367 - DNA, 30 bp, Homo sapiens
  chr10:88224627-88224657
  hyper
catgtagcatacagacgatgtgatgacatg

SEQ ID NO: 47368 - DNA, 30 bp, Homo sapiens
  chr10:88271572-88271602
  hyper
aactactggggaggccgaggagggaagatg

SEQ ID NO: 47369 - DNA, 213 bp, Homo sapiens
  chr10:88294491-88294704
  hyper
cccattcctctgatgcgcccctagcctggcccatagtttgggttgtttgggcagccctgcagattccctgagctgaggggcctctctctggagagtgggaaagaattctggcctttgtgtaactggctttattatgtatgaatgttggctcccttggttgaaaaatgatcactctattgggttctcccagcttgaggcgaaaccttttggaag

SEQ ID NO: 47370 - DNA, 30 bp, Homo sapiens
  chr10:88318471-88318501
  hyper
aaaaaagttttcagccgggcatagtggctg

SEQ ID NO: 47371 - DNA, 30 bp, Homo sapiens
  chr10:88332878-88332908
  hyper
acagttgtaagccaccgcgctcagacagca

SEQ ID NO: 47372 - DNA, 30 bp, Homo sapiens; identical to SEQ ID NO: 7472
  chr10:88392073-88392103
  hyper

SEQ ID NO: 47373 - DNA, 30 bp, Homo sapiens
  chr10:88413886-88413916
  hyper
acacacacacacacacgcacacattcatga

SEQ ID NO: 47374 - DNA, 30 bp, Homo sapiens
  chr10:88453438-88453468
  hyper
catctagagagtccgcgatgaagtgatgtt

SEQ ID NO: 47375 - DNA, 30 bp, Homo sapiens
  chr10:88480957-88480987
  hyper
aggttccaatttctccgcagccttgcaaac

SEQ ID NO: 47376 - DNA, 30 bp, Homo sapiens
  chr10:88487419-88487449
  hyper
gccatagtctctctccgagctactagcggt

SEQ ID NO: 47377 - DNA, 30 bp, Homo sapiens
  chr10:88499801-88499831
  hyper
catttgggtcgggctcggtggctcatgcct

SEQ ID NO: 47378 - DNA, 384 bp, Homo sapiens
  chr10:88515315-88515699
  hyper
cctctttcctcacatacgggtcatcgaatacttttaaaagcattttccaccatgaatgaggggaaatggaagaaaagaggtggtgacaattatttgcattttccaaatggacggaatgagcctccggagggtacacgaggtcaccagcgtgagcccgcggtggagctggaggcgtatttatagctggctgacctcagtcctgttgggccctcgccgctccttatcttatgccgctggaattcgcgggctcgcaggtcacaggagcccgggcgcgccgggcctggcgctcccgaatcgatgagggaagccgctctccccggcagatcctcccggccggggagcctccatcaccctgcctgcgcctcggcacgctggcaaggagcc

SEQ ID NO: 47379 - DNA, 30 bp, Homo sapiens
  chr10:88550295-88550325
  hyper
acccaaatgtccaaccgataaatagataaa

SEQ ID NO: 47380 - DNA, 30 bp, Homo sapiens
  chr10:88560576-88560606
  hyper
tatgtggagaagatacgtaatgaaaaacta

SEQ ID NO: 47381 - DNA, 30 bp, Homo sapiens
  chr10:88581192-88581222
  hyper
tgttgtaagaccatacgtgtcactaaatct

SEQ ID NO: 47382 - DNA, 30 bp, Homo sapiens
  chr10:88592397-88592427
  hyper
tcctaaacatttatgcgttggaaacataca

SEQ ID NO: 47383 - DNA, 30 bp, Homo sapiens
  chr10:88628328-88628358
  hyper
cctggagctgcctggcggggagggacccct

SEQ ID NO: 47384 - DNA, 30 bp, Homo sapiens
  chr10:88629689-88629719
  hyper
tgtggtgaaggaaaccgagacctggatagc

SEQ ID NO: 47385 - DNA, 30 bp, Homo sapiens
  chr10:88853743-88853773
  hyper
ctagaagtgcatttcggcaggacccgccgt

SEQ ID NO: 47386 - DNA, 31 bp, Homo sapiens
  chr10:89419678-89419709
  hyper
ccgtccctgcgtccttcggtctctgctcccg

SEQ ID NO: 47387 - DNA, 407 bp, Homo sapiens
  chr10:89577721-89578128
  hyper
ggcgaggcccgggacgcccttggaggttaatcctctagatactaagggctgcggggcgcttgggggcggcactgaggtagggcgtgggagaagaccggggtgacctttcctccgggggttcccaggtccgagacggtccttaaaggacctcagaaggatacgacaaccatcccatgaggccccacgggaaccagctactcacccaggggcagaaacagcaagagcaagtgccctcagccggcctcacacaggaaggaaacgcaacctgggagagaacgcttccggcgggaggcgcggcgcactccctcccacggagcatgcgcgacccgcggtcgccggcgcggagggggcgtgctcccaggcttagaaacagtgagggagagcaaattcgcgcacctgatgtctgc

SEQ ID NO: 47388 - DNA, 1525 bp, Homo sapiens
  chr10:89621327-89622852
  hyper
aactctcagcatttccgaatcagctctctcacggtgacaggtcagcccaatcggggctgtaaacagacttgacaggtttgttctgggctgacggccattgactaggttctcagaccagataagtcacttggctgagtccacagtaggtggggcgcgctcaccagctcaggggtagtgactggacgtttgttgcaacatcggagaatgcacgctctgggctgcagcaggagataccctcaagcacagaaccaaaagggttcaccctaagcggcagggcatcagcgatggagaggcccgagagccctagcgcccagctccttttcccacgtttgggaaggcgcagaataggtcgatgtagagcaaggagtgagtctcaggtctcagtcctttggcttgctcttagggtagcaggcgaggagtggcaccagtttggggactctctccccgcgttctgtaagaatcggcggcagccagcaggcggggaggcgggggcacgtgtttggatgtgggtgcttgtgtaaccagttccccaagcgccagccccgacagcgctccttcgggaggctggtccgagcccctgtttccgccgcggcgcaggaagggttggggttccgctgcctgcaccaggcaagagcaccccgagcaaaggaagaagacgacttgcctccggagctatcactggggagtgggaatttggaaagttccccaactagggacacacgtgacctccttcggaaagtagttccgactgtggcccgtgtatccttccacctccttttgaaccctcctaggtctcctcgccccgcccactcgctgggctgcagcttcctaccgttccgtactttccactcaacccggtaaccccaaacgtgcacggtccggccggggcgcgcggagcctggccccgggcgatccatcctgccgggttttcacggcggccaagggggggcggggctaggtggtctctgagaaccgagcttgactccgacgccgcgaaccgacctggagcccgaggggaaagatgctcgactctcttgggggcaccggagcgggcgcaggagaggcctgcggggtgcgtcccactcacagggatcctctttcagttcatttagataggtgccctttgggcccttgaaattcaacggctatgtgttcacgttcagcacgctcggctgagagctttcatttttagggcaaacgagccgagttaccggggaagcgagaggtggggcgctgcaagggagccggatgaggtgatacacgctggcgacacaatagcaggttgctctttgtgctaagactgacaccatgaggacacagatttgggggaagggggaatctctaggcaaaggctgttacagtcaaatctctgcgaacgattgtgatccgacagcggtgcaaaaggaaagagcgaatgcagtccacgccgcggaaatctaggggtagaggcaaggggggagggtattccccttgcagggaccgtccctgcatttccctctacactgagcagcgtggtcacctggtc

SEQ ID NO: 47389 - DNA, 30 bp, Homo sapiens
  chr10:89623345-89623375
  hyper
ggatacgcgctcggcgctgggacgcgactg

SEQ ID NO: 47390 - DNA, 30 bp, Homo sapiens; identical to SEQ ID NO: 7476
  chr10:89692890-89692920
  hyper

SEQ ID NO: 47391 - DNA, 30 bp, Homo sapiens; identical to SEQ ID NO: 7477
  chr10:89717657-89717687
  hyper

SEQ ID NO: 47392 - DNA, 292 bp, Homo sapiens
  chr10:90342578-90342870
  hyper
gcggggtactcctgccgggcccccaccctcgcccccaccctcgccccttcttgggccttttcccgggcggcggaagtccccgatcacgtgacgaggcgcgccactcggcgcatgggccgcgctacacggccgctcagggagctgagggtatagcgttttcgccttagactttcttgggtgcaggcccacaccacctcagcagcctgcccggcagtcctcttttcccaggttttggcgtttagacaacccacctgagtcctcagccttgtcccacacagcaaggtacaaggga

SEQ ID NO: 47393 - DNA, 103 bp, Homo sapiens; identical to SEQ ID NO: 7479
  chr10:90343138-90343241
  hyper

SEQ ID NO: 47394 - DNA, 30 bp, Homo sapiens
  chr10:90639814-90639844
  hyper
tcagatgcgaaagtcgcacccaaccgcttc

SEQ ID NO: 47395 - DNA, 79 bp, Homo sapiens
  chr10:90750154-90750233
  hyper
aaagggcaggaggccggctctcgaggtcctcacctgaagtgagcatgccagccactgcaggaacgccccgggacaggaa

SEQ ID NO: 47396 - DNA, 56 bp, Homo sapiens
  chr10:90750729-90750785
  hyper
gggcgcgggacgcgtgcgggattgcggcggcagcggcgcacgcgggcacctgggag

SEQ ID NO: 47397 - DNA, 30 bp, Homo sapiens
  chr10:90751519-90751549
  hyper
cgcacagaacccggcgcctattattggcca

SEQ ID NO: 47398 - DNA, 1434 bp, Homo sapiens
  chr10:90966613-90968047
  hyper
gcagcaggtgccacacgaagaactccatgtcgaagagtagcaggcagaacaggatgtggtgcagcagcaggagcagctcgggagcttcgtggggcaggagggccgggctgcgggcccaatgcagcagcgtcacggggaacacaaacatcacatgctggtagagggtctgccccaggcaaggtagcagctgctgcgcggatggcgagaagtcagggtggatcttgtagcgccgcagggcgggcacccaggagcacaggatatccaggaccacgaagggcaggcaaaagcccacgtatgtggtgatggagaagatgaccgggaagaagggcgactgtaggagggcctcccagctcctcaggtggtcccagaggggctgcaggaacagctgcccggagctgcaaaggacctgggggtcggagcagttgtggcagctcattgcgaggctgtgcaaggcagctgaggctgctgctcgagtcccatcgacttttcacaggactcacggccccgccccgagtgatgtcagctgcctttccatccctttcccggcgatgcgaagcttgaataagctagcaacccggcagagtggcccttcattgctgtaaatgtgctcatctatagccgcatcttaccggcttttagatatgcgtgtatgcagtggcacttcgtacttttcatgtaagttctgatttttcagttgacgtacaattaacacgggacacaatgtacagatctaccgtgtggagtttctatgagtttggcaactcagttcacgtgtgtcatcacgggtctcaaactagaccgtttacattgccaccagaaagcgctcctttgcaatcaatgcagaattgtttgtgttttttaatgcatacgtataactgcatccatgtgctttcataaagacgcaagcataatcgcattttaaaaactgtttaaagctacatgcggtctgtagctcgggtgttttctgagaacccggttgcggtctatccagcggcgatcgagaaacgagccctttgcacagggaaccgctggtccccgaacgccggcggtgaccgtcagctcaggaaatcagacgggaagggtggccggatgggaacctccgccagctccagcttgtccccagagttttcctggccggcgggcagcaagctagagagaccacgcacgcaggctctccgggagaggccgcagcccggccgcgtagctaccctcggcggcgcgtcccggggcgccgggcccgcgatcggagccggaggcaccgcacagcggaaagagggctccgcggcggccaggctcagctttgccgggaaaatgctggatttaactcccagtctgcgccaatctggctaaaaagcccgttgtatctcaatttggggcgggaacacttaattcagcaaaccacctgcgttgttcgtcaagggaaagagatgtgag

SEQ ID NO: 47399 - DNA, 30 bp, Homo sapiens
  chr10:91011603-91011633
  hyper
atgcccaccaccctcggactatttgttcag

SEQ ID NO: 47400 - DNA, 30 bp, Homo sapiens
  chr10:91174294-91174324
  hyper
cttacgtttagtttcgatttcttaagtttc

SEQ ID NO: 47401 - DNA, 461 bp, Homo sapiens
  chr10:91295030-91295491
  hyper
cccaacccaagctgcgcgccgacgcacccaagttagggtcccaggctcccggcgcgggatgggcgctagggcagcggagaatggagggtccccgtcctcctccagctccaacgacagcgccagcgccccgccgtcccgccgcccttccttgaaggatgcccgtgtcacctgagccaccgcgccctctgcacaaccgtgtcagggagagggaagagggggagccgaggaagcttcttggccagggcgctggggatccgggagcgggggccgccggcgagactgagcccgggacagcccagagctccagcgctccagcgctctgcagcccgcccagagcgcgcagaccacccccatgccccgcccgccctcctgccacacccgcccccagcccggccccgccgcctcctcacctcgccgggaccactgcagccctggcggtagcgcgcggacatgcccccggg

SEQ ID NO: 47402 - DNA, 81 bp, Homo sapiens
  chr10:91295584-91295665
  hyper
cggaggcgccggcgaggctggggccgggggcctagctggcaacgccgggagagggaagcgtagcgcggaaaatcccagtgc

SEQ ID NO: 47403 - DNA, 31 bp, Homo sapiens; identical to SEQ ID NO: 7483
  chr10:91295738-91295769
  hyper

SEQ ID NO: 47404 - DNA, 45 bp, Homo sapiens; identical to SEQ ID NO: 7484
  chr10:91403836-91403881
  hyper

SEQ ID NO: 47405 - DNA, 30 bp, Homo sapiens; identical to SEQ ID NO: 7485
  chr10:91461336-91461366
  hyper

SEQ ID NO: 47406 - DNA, 624 bp, Homo sapiens
  chr10:92617016-92617640
  hyper
cgaagggcatgaccgccacagccaccgagaggtcggccagcgccagggacacgatcaggtagttggagggctggcggagcttcttgacgaagcacacggagatcaccaccaggcagttgcccgcgatcgtcagcagcgtgatgagcgtcaggatggagccgatcacaactttctcgactctgccgtagttgatctgttccccacagccggaggcattgtccgggggcgcgtcccaggtgggcgccgggctggctgtcacctcgctcagcaggtgcggcgcccaggagcccgcgaccgggtcggcgccaccgtcggggctcaagtcgggcagcccgcgccccacttctggcagaaggaaagagcggaggtgcccgtagaggtccgggcggccgctgctgttaacgtccatcatcgcgccgccgtgtgccgctgcccatggagccggcgccccggccacgcgcctccggctgccggccccggggcttcacctcaccggttccgctccgcccggcccagccatggggcccgcgccgaccgctggggggcgcctggctctgtctcggagccccgcactccccggacccccggccgctgcgggtaacgcggcagcgcggcctcacgggg

SEQ ID NO: 47407 - DNA, 256 bp, Homo sapiens
  chr10:92617900-92618156
  hyper
tcgcgctcctgggacgggatacccgggctgggcaggcaccgccgcctctcccgcgcctccctactgtgagggggcggcgctgcacgcgcctcccgggatcccgggtcccctcgcccgggaagctgtccttgccgcatgatagatacttagaacccctccagccgaccccagcctccgcacactagtcagccacagttcagtgggggcatttttcttttgttaagaggcctaatgagccagcggatgtttgggctca

SEQ ID NO: 47408 - DNA, 30 bp, Homo sapiens
  chr10:92631511-92631541
  hyper
gaaccaaacattgtcgttcagaagaagaca

SEQ ID NO: 47409 - DNA, 178 bp, Homo sapiens
  chr10:92979924-92980102
  hyper
cttatagttgtcaacgaccatgatctctggacccacactacagtaacaagtttgtcagtcattttcagataaggtgcaaatcaagggatggctttgtccccacttcggcgcaggtgggacagacttggggaagacgcagctgaagagacaaattctcagggtgcgtcagtctcatcac

SEQ ID NO: 47410 - DNA, 144 bp, Homo sapiens; identical to SEQ ID NO: 7487
  chr10:92981133-92981277
  hyper

SEQ ID NO: 47411 - DNA, 50 bp, Homo sapiens
  chr10:93393013-93393063
  hyper
aggttctgggactccgcggccagctggaaccagccgcgtaacgggaaccc

SEQ ID NO: 47412 - DNA, 30 bp, Homo sapiens; identical to SEQ ID NO: 7489
  chr10:93557960-93557990
  hyper

SEQ ID NO: 47413 - DNA, 30 bp, Homo sapiens
  chr10:93558646-93558676
  hyper
gtaaccggggccagcgtcccctcgcctcgc

SEQ ID NO: 47414 - DNA, 709 bp, Homo sapiens; identical to SEQ ID NO: 7490
  chr10:93647031-93647740
  hyper

SEQ ID NO: 47415 - DNA, 30 bp, Homo sapiens
  chr10:93669269-93669299
  hyper
ggcctacccttcttcgcccctccccgattt

SEQ ID NO: 47416 - DNA, 189 bp, Homo sapiens
  chr10:94000528-94000717
  hyper
aataaatactgctgcgtccttcagcaaggttaaaaagacaccgcacacacgaccctttcttctcccttccccagctcgaacactttttaaaaaaacaaaacaaaaaaaccagtattagccctcttgattagcaaactgccttcttgcgttggtaattgtttcatttagctgcagcgaaccacgagggag

SEQ ID NO: 47417 - DNA, 30 bp, Homo sapiens
  chr10:94051815-94051845
  hyper
aaggtcagagtatccgcaagggagatttaa

SEQ ID NO: 47418 - DNA, 63 bp, Homo sapiens
  chr10:94333999-94334062
  hyper
gggtttggccggggcgctttaggagccagcacccagactttcccaggcggggagggtcccagc

SEQ ID NO: 47419 - DNA, 30 bp, Homo sapiens
  chr10:94334451-94334481
  hyper
gatgggacgggcgccgcagcaaaacaaggc

SEQ ID NO: 47420 - DNA, 30 bp, Homo sapiens; identical to SEQ ID NO: 7493
  chr10:94353316-94353346
  hyper

SEQ ID NO: 47421 - DNA, 364 bp, Homo sapiens
  chr10:94449797-94450161
  hyper
gcgcccacgccgctgctgcaacccgcacacccgacgcccttttacatcgaggacatcctgggccgcgggcccgccgcgcccacgcccgcccccacgctgccgtcccccaactcctccttcaccagcctcgtgtccccctaccggaccccggtgtacgagcccacgccgatccatccagccttctcgcaccactccgccgccgcgctggccgctgcctacggacccggcggcttcgggggccctctgtaccccttcccgcggacggtgaacgactacacgcacgccctgctccgccacgaccccctgggtaaggcggccgggcgagggtgggggcgaggaagcgccacccggcaggtggcagcgc

SEQ ID NO: 47422 - DNA, 477 bp, Homo sapiens
  chr10:94450377-94450854
  hyper
ggggtggggctcccttagcgggagggacggggaaaggggcgtcgaggcgcccctggccggcccccgtggggcagggatcgcagccgggcccgggtggctacggggctggacctggttcaacaggcttgtgcagtgaaagagcctgaccctttccgttcatacaggaaatcttgagttctcgataggagtaaatctggtttcagaagctgttaagtgttttcctggctgcatgaagcagacccttcccccggagtagtgcacgctgctgattattttatcgacatcctcaatacagacaaattcaggaaacactcgacttctgatagccgggatccgtttttctgatattgttcatttcctctgtgtgggatgtgactttatggcagctaaaataaccagttgcttcctattttttttcgaggctgttttgcaccagtctgaagcctgacgcaagcaaaatctcgaaaaaacaatgct

SEQ ID NO: 47423 - DNA, 30 bp, Homo sapiens
  chr10:94451055-94451085
  hyper
gacccttggcgccttcgaggtctggagccc

SEQ ID NO: 47424 - DNA, 267 bp, Homo sapiens
  chr10:94451335-94451602
  hyper
tttgatgatgcggcccgagcctggctgtggtcgcctgtcggggctggagcgggaccctcagccgggccgggcctgggggctaacgttttcacagtgcgccctgagtttccttgggttactgctgggaccgcgcaggaggaagcaaagagtttttcgagctagaccaacaggaaacacattgacggaaatgttgccatagcccatggggtggctttaactggccgcccccgcgggctgggtgtgaaatcagaggaggccgcggctccc

SEQ ID NO: 47425 - DNA, 355 bp, Homo sapiens
  chr10:94607698-94608053
  hyper
gtggacttcttgcaggcggggacatgaatccacctggagcggtcttcatggtcaactgggatctttattcgttcctaaaataaatcttactatcacatgcaattttgcttttcgtgagtgcatgttttcctttctctgactccccacgacccagagtacatcaggcccttgttaaatgtccccgtggctcttattacagattcagggtgatgatctgagtgtccaccttgctgattactacggtacccccgcgtgtggcacagggtgtggcacacacagaagacaaggagatatgttaaagcccaaaggccaggcacaagacgcccaggagggactagtcgcgagagagggcagg

SEQ ID NO: 47426 - DNA, 30 bp, Homo sapiens; identical to SEQ ID NO: 7497
  chr10:94609021-94609051
  hyper

SEQ ID NO: 47427 - DNA, 502 bp, Homo sapiens
  chr10:94831427-94831929
  hyper
atttattgaccccccaccccccgccctgcccccctacaagatgttctttaatgatcgttcactctcacatttaatcctttcctgccggacgcccccgccggcctcgatgtacagatagattaaaacgtttttttccctgcggcaatttccagcgtgcaggccccgctcatcttgtgacccggcttgagctgaacttggcgaggtggccccgcagagttcactcggatgtcacggtccggcctgcaggggtcacaggcgggtcaggcccgaggattgggaatgggccccaggtcacgtccccattcgtcggctttgcacaccggccggaggcgctgtccagaaaggggcggacccgggatttctgagaattacctccagcgcgattggcctggcttcctgcagtggccagaggttggttcgccgtgtttacagccaccaaatcgtttgccggagactgaaaccctgcccagagcctctgaaacactgggcaggttatggggaa

SEQ ID NO: 47428 - DNA, 352 bp, Homo sapiens
  chr10:94831980-94832332
  hyper
cgctaggattgtgcgggtccctccgacctctgcagatatttcctgatacctccgggtttggggactaccgcgagaagggcaacgcatttaaactctcaggagcagagttttccacctccaagggacgccttccaaggcgtgcggcgtgcttctgccagagacagtgttcagttttaaacaaatgcaggtcattctgtttcattttcggcgccgcaggtgcgttcagcgcccaaacccaggtagcgtgtgaccctgactggtcccgagccgggaagctccggcaggtggagagcagagagagcaggtgcgcgtcccgcagcgtctgagctccgggcattggcagctcagtagc

SEQ ID NO: 47429 - DNA, 1396 bp, Homo sapiens
  chr10:94833574-94834970
  hyper
ctaattgtctgaccaaggtaacgtgggcagcaacctgggccgcctataaagcggcagcgccgtggggtttgaagcgctggcggcggcggcaggtggcgcgggaggtcgcggcgcgccatggggctcccggcgctgctggccagtgcgctctgcaccttcgtgctgccgctgctgctcttcctggctgcgatcaagctctgggacctgtactgcgtgagcggccgcgaccgcagttgtgccctcccattgccccccgggactatgggcttccccttctttggggaaaccttgcagatggtactgcaggtaagggagggtggggcgggacaggctgcttccccggagcccggcgcggctctgggcttctgctgaagtcggggtaggcgcccccgggaggcatgctattgcggctaggagcagggctggcgggagcgcggcgctccccggcgccccctcatgcccacttctctcctccgccttcctcccacagcggaggaagttcctgcagatgaagcgcaggaaatacggcttcatctacaagacgcatctgttcgggcggcccaccgtacgggtgatgggcgcggacaatgtgcggcgcatcttgctcggagagcaccggctggtgtcggtccactggccagcgtcggtgcgcaccattctgggatctggctgcctctctaacctgcacgactcctcgcacaagcagcgcaagaaggtgggggcaggaggcgacggctggacagggagggggaccccatttatgagcggaattccggctgatggatgctaggcgcgggctagcagcttgaggtgggctaggaccctctgccagctccaggttagctttcccagctcggagagtgccatgtgtctggcaggactgggggtgtctggaaggggacggcggtagacgagaggggcggatggaggcttttaacgctgtcccctcctcgggactcaggtgattatgcgggccttcagccgcgaggcactcgaatgctacgtgccggtgatcaccgaggaagtgggcagcagcctggagcagtggctgagctgcggcgagcgcggcctcctggtctaccccgaggtgaagcgcctcatgttccgaatcgccatgcgcatcctactgggctgcgaaccccaactggcgggcgacggggactccgagcagcagcttgtggaggccttcgaggaaatgacccgcaatctcttctcgctgcccatcgacgtgcccttcagcgggctgtaccgggtaagggcggcaaacgggctgcggactaggggcgcgggacctgggcgtctgctcaccgccgcgcgctctctgcgctcagggcatgaaggcgcggaacctcattcacgcgcgcatcgagcagaacattcgcgccaagatctgcgg

SEQ ID NO: 47430 - DNA, 30 bp, Homo sapiens
  chr10:95242141-95242171
  hyper
taccgaactccccgcgtctacgcagtgccg

SEQ ID NO: 47431 - DNA, 40 bp, Homo sapiens
  chr10:95326152-95326192
  hyper
aggccctgcgggggctcgaggaattcgctaagtgagtttt

SEQ ID NO: 47432 - DNA, 30 bp, Homo sapiens; identical to SEQ ID NO: 7500
  chr10:95326394-95326424
  hyper

SEQ ID NO: 47433 - DNA, 203 bp, Homo sapiens
  chr10:95326786-95326989
  hyper
tggctgctgggccccgttgcctgccacctgctcttctacgtgatgaccctgagcggcagcgtcaccatcctcacgctggccgcggtcagcctggagcgcatggtgtgcatcgtgcacctgcagcgcggcgtgcggggtcctgggcggcgggcgcgggcagtgctgctggcgctcatctggggctattcggcggtcgccgctct

SEQ ID NO: 47434 - DNA, 690 bp, Homo sapiens
  chr10:95360711-95361401
  hyper
ctcactcggcagtcgcgctccgcgcggccgctgcccagcgccgccaacagcaagagcgcccacacccacttcatcttgcccaggaatccgccctgcgggagacgcgcctccgtcagtgcccggcagccgacccccgccgccgtatcccacctcaccccaccccaccccaccccggcccatcccgccgccggccccgaggccccggccgcgactcaccaccgggaggggaaccgcgcgcaagcctggccgccgagtccgggcgcgcgtggagcgagggaggcgagcgcgccgcggccgccccgctgctttatagcgccggggggagggggtcgcgctttcgtaaccgcgcggggtgaaagaccgaaggggaggcgccgggggcacttgcataacgcgccctgactcaccggagcccgggcacgggcagggtccctgtgggccggcctcacctccaggacagcctcgggcacagtggagcggccgcgcggggtggcctcggccaggccaaatgcgccagcggccctggctcagttaccctgcactcgtgccagcggccgccagctgcggtctagggtggcctccggggccagtggctctggcaggaggctcgagtcaacctggcgggaagaccgtggcctcacagagcgagagcggacccgcgaggctccctggtgcgtgagtgcccaggcc

SEQ ID NO: 47435 - DNA, 770 bp, Homo sapiens
  chr10:95753501-95754271
  hyper
gccgggtcctcgctccgcgcccgccttccccgcgcggcaggagccgggggcgggcccggcacaggccgctcccccgcccggccgcccgcggtggcgctagcggcctctcacccggggcgggcgagttctgggaaagcccggcccagggcgggggccccgctgccgcccgcgcagccgccgctgtccgggcagcgcgcacatctcggcgggagcggactgtgaacggcgcgggtccacacggtaacgctgggcaacgtgggcaacgcggcgggcggcgggctcgcgcggcgggaggggcagcggcggcgcgcccgggctctacctcccgggctctgcctcccgggctctgcctctcgggcacttgcctggctcctgcgcgttcctgggcatcggctctgcagctgacacacagtagcggggacacccgacgccgctagcgacaggcgcgcggacggctggtcccagagggacgctgcgcttggggacgccggcgagactcgccaggagccaagaggtgaggaagcgactctgtagctcggttcctgaggactggagaaagggaaggatgggctggttctctcccaaggcagtcgacccgcctaagggagcagcccgactccgcgtacctggcggaaaagtgtcctcgcgctcccgggggacccgaggcgggcggtcctccagggcatgcaggccgccctcgcaggggctaaaggacaccctgccagtgccttcactccagacgcctgcctcaggtcgccccttcgtgttgt

SEQ ID NO: 47436 - DNA, 30 bp, Homo sapiens
  chr10:96066325-96066355
  hyper
agcagtttctgttccacgttcacttcgaag

SEQ ID NO: 47437 - DNA, 61 bp, Homo sapiens; identical to SEQ ID NO: 7504
  chr10:96122755-96122816
  hyper

SEQ ID NO: 47438 - DNA, 1601 bp, Homo sapiens
  chr10:96161936-96163537
  hyper
tggaaggacttacccacgctaacacctcccaaatatgggagtattttactaccataaatgaaatacatcaagtgaatttttgctaagcgagcaatacccgcgcttcggtaagaactgtcacgcttagagcgggccaaccagcttccaccatccagatggcggatcctagattggcagcctgcgtctctctagctaccgtctctatggttcggggaatctccaggtcggggcttgaccggtccgacttttgcgcgtgcgcgagtcctggcgcgtgcccgccctcaagcaactgtccgacccagcgggtgggaggggtgggtctgggaacgttgcggcggctgtcgccgcggccccagcacccagagctgttctctggccaagcctgcgcctgtagtccttctttgcctcctggggcggccgccacccacccccagatggtgggtccggaggatgccggagcctgctcgggaagaaaccccaagttgctcccggtgcctgcgccggaccccgtgggccaggacaggaaggtaatccgggccacgggcggctttggcggaggcgtcggcgctgtggagccgccggaggaggctgacgaggaggaggaggctgacgaggaggaggagacgccgcctcggcagctccttcagcgttacctcgcggcggccggggagcagctggagccggggctctgctactgtccgctccccgctggccaggccggcgccccgccgccctcggcagccccacgatcggacgcctgcctgctgggctcgggctccaaacaccgcggcgcggaggtggctgatggccgcgcgccgcggcacgaaggcatgaccaacggcgactcgggttttctgccgggccgggactgtcgcgatctggaagaggctcgcgggctggcgcgcgccggcggccgggagtcgcgccgccgccgcccctacggccgccttcgcctggaggggcctggcgacgaggacgcggacggcgcgggaagcccgtccgattgggcctctccgcttgaggacccgctgcggagctgctgcctggtggccgcggacgcccaggagcccgagggcgcgggcagcgactcgggggacagccccgccagcagctgcagcagtagcgaggactcagagcagcggggagtcggcgccgggggtcccgaggagggcgcgccccctgccacctcggccgagaggactaatgggggtgcggagccgcgcctgggcttttctgacattcacttcaactctcgcaacacgttccaggtgagccgcggtcagagcgcccgcgatcacctgcccccggcggggccgccggtgcccttgcccgccgcggagcagggtcctgcgggggcttcggcccgggctcgacggagtggcggcttcgcggacttcttcaccaggtacagcgcaggctgcatgggactcggggcgggtccggggccggggccggagccggggtcttggtgggagtcggagccggagccggagccggagcggagagcttggtcggccgcttccgtgccagccccacacgcgtcaggacttagctttgatttgtcactggaggaagaggaactgggtcggctttgtgtttct

SEQ ID NO: 47439 - DNA, 30 bp, Homo sapiens
  chr10:97050342-97050372
  hyper
tggcggacacggagcgcgcccgcggcgggc

SEQ ID NO: 47440 - DNA, 268 bp, Homo sapiens; identical to SEQ ID NO: 7508
  chr10:97055028-97055296
  hyper

SEQ ID NO: 47441 - DNA, 30 bp, Homo sapiens; identical to SEQ ID NO: 7509
  chr10:97208010-97208040
  hyper

SEQ ID NO: 47442 - DNA, 59 bp, Homo sapiens; identical to SEQ ID NO: 7510
  chr10:97321333-97321392
  hyper

SEQ ID NO: 47443 - DNA, 41 bp, Homo sapiens
  chr10:97416811-97416852
  hyper
aaccatttatatcccgggcacacctcggaaataggttggat

SEQ ID NO: 47444 - DNA, 30 bp, Homo sapiens; identical to SEQ ID NO: 7511
  chr10:97659562-97659592
  hyper

SEQ ID NO: 47445 - DNA, 30 bp, Homo sapiens; identical to SEQ ID NO: 7512
  chr10:97667063-97667093
  hyper

SEQ ID NO: 47446 - DNA, 1179 bp, Homo sapiens
  chr10:97802912-97804091
  hyper
gtgaagacttttaaacgccaaactgaggcgtcggaactttgctccgcgggcatcgaggagccatcgaaggttctcagcaggtgagtggcctaactggattggtcactgcagtgatccaccttacaatttctccggcgctctctgccgacctcagccggcgatcaggccggcttcgcagtaggtggcggctgagcgccccggcaaccgaagcgccaggccagcccaggccacgccgcgccgtgcgggatgctgaccgtacccaggcgggagccgccgcgccgccgcctggcgctgcacctgggcccggcccggccgccaattggacggctcggggcgaccccgctgtatcgcgagacgagattggcagcggcggggcctcaagtgcccccgcgctggctttgtatgcggagccgcctgccggtcctttaacaatgggcggcgcgagcgtccaggcgctgggctctagctgaggccggcgcttagcggcccactgtccgcagcatgagcggggccggcgtccgccgcacgacggcggggctggggctgtgagggccgcggttccgggtaagggagccagcgtggggccgggcggcccggcaggcctggggtaggcgtggggcagcggaccctcccggggtgaggcgcagagcctggctggcccggccttttgttcccctttctgaggccgcgcggaacgtgcgtttctcggggctcccggggaggagcaggctcccgacgtccatgcggagacccgcggccaggcagacgctcacccccgggctttgccatgggagcgtttcccctcagcggggctatgagcgtgtcacctctccccgctcctcagggagggcgggagaactccagccccggacgcagggagccccagccgggcctcccccagctcttcccgagctcgcacctggctccgcgctttggcaactcagggcccgagtggatccccttttgcccgacacatagtcgagcagtgagtctcagagtccttcggctcttcctgcgggggcagacccggcttcgcgtgtggcgttgggggaaacgactcgggtcgggctgggttgaggaagagtcaagtgaagatgagcagccacaccgggtggcctgaggtcacaccccccggggagggggcgcagagggtcgcgggggagccggcagtgaccgcgc

SEQ ID NO: 47447 - DNA, 395 bp, Homo sapiens; identical to SEQ ID NO: 7513
  chr10:98272407-98272802
  hyper

SEQ ID NO: 47448 - DNA, 30 bp, Homo sapiens; identical to SEQ ID NO: 7514
  chr10:98273888-98273918
  hyper

SEQ ID NO: 47449 - DNA, 30 bp, Homo sapiens
  chr10:98347035-98347065
  hyper
ccgcctccgggccgcgtcccggtgtttcgg

SEQ ID NO: 47450 - DNA, 163 bp, Homo sapiens; identical to SEQ ID NO: 7515
  chr10:98479976-98480139
  hyper

SEQ ID NO: 47451 - DNA, 30 bp, Homo sapiens
  chr10:98592089-98592119
  hyper
tccgttgagagacgcggctttcggcaagaa

SEQ ID NO: 47452 - DNA, 217 bp, Homo sapiens
  chr10:98593381-98593598
  hyper
gtccgctgtcccccacgcccagtcctcggggaggcccagaattccagccccttctcccccaggggaatattcttgggaaccaggtctttcccggcagaatctaggagagtctatccgttcgcttgggcccctcattccctccttcccgacagggtttcgttggaaggaattatgcaaatcctgctttctggtgtccattcagcggcaatttcatgcg

SEQ ID NO: 47453 - DNA, 48 bp, Homo sapiens
  chr10:98841572-98841620
  hyper
gtctggggagctgtccgtggtcctgaatccatccggcggctcttcctc

SEQ ID NO: 47454 - DNA, 807 bp, Homo sapiens; identical to SEQ ID NO: 7516
  chr10:98945041-98945848
  hyper

SEQ ID NO: 47455 - DNA, 30 bp, Homo sapiens
  chr10:98946096-98946126
  hyper
caccccggcacccgcggccccagctgctag

SEQ ID NO: 47456 - DNA, 23 bp, Homo sapiens
  chr10:99042885-99042908
  hyper
cacccgcccggctgttactatgt

SEQ ID NO: 47457 - DNA, 30 bp, Homo sapiens
  chr10:99051960-99051990
  hyper
gagaagatgtgaagcgctgtgtgcaacagt

SEQ ID NO: 47458 - DNA, 211 bp, Homo sapiens
  chr10:99052457-99052668
  hyper
tcacctcttccgtgcgattggatgactcgaccgcccctcctcaacctgaaccgtttaatatattattggtctattcaaatgactaaccgtcattggtcgttcccagccctggcggaaaaagagggaggggcggggaagaagacccagccccgaggcctgccgggagttgtagtttctcattttgatgaacccttccgattccacagacctt

SEQ ID NO: 47459 - DNA, 253 bp, Homo sapiens
  chr10:99080186-99080439
  hyper
aaatcgcgagtgtttcgcgggtaactggggttgagggccaaaatatttggaatgaaggactttggccctatttaaggcagattttacagagcgcacctcaaacgtacaagtcagtaggactccttatttggcgtgacccgacctggccgcggagcctgcatttcctcgcagcctctcagtgccctccagccccgcgaccatgtggccacaatccacgcttctccggatcgcggtgcgccggaaccacggagga

SEQ ID NO: 47460 - DNA, 249 bp, Homo sapiens; identical to SEQ ID NO: 7519
  chr10:99080681-99080930
  hyper

SEQ ID NO: 47461 - DNA, 66 bp, Homo sapiens
  chr10:99080989-99081055
  hyper
cggtaggcgaccaccgcccctggccgcgctccgggctttcacggaaactcccgagaccgggccctg

SEQ ID NO: 47462 - DNA, 35 bp, Homo sapiens
  chr10:99093444-99093479
  hyper
ttttctccgacggcctcgccgcggctggtaacttc

SEQ ID NO: 47463 - DNA, 30 bp, Homo sapiens
  chr10:99185971-99186001
  hyper
gagcggtgcgagcgcgcaggcgcggccgac

SEQ ID NO: 47464 - DNA, 30 bp, Homo sapiens
  chr10:99258003-99258033
  hyper
aaggcgcgcggcgccgtctgccgtacctgc

SEQ ID NO: 47465 - DNA, 167 bp, Homo sapiens
  chr10:99258490-99258657
  hyper
gggggcggtgctgtcggtcacatgcgcacctggggcgggtggtggcggcggcgcgggcaccgcgagccggcggaagggagaggggccggcctggggcggggttaggcaggtgagtgacaggctccagggggccggcccctgcctggtgccccgagcgagccgggagt

SEQ ID NO: 47466 - DNA, 30 bp, Homo sapiens
  chr10:99258970-99259000
  hyper
gcgtggggagacagcgccgggagaggccgg

SEQ ID NO: 47467 - DNA, 337 bp, Homo sapiens
  chr10:99259372-99259709
  hyper
cggacgccggcccgtcggggcacggcgcgggcagccaggcgtccccagaactcggagcgagcgaggcgagaacagtcgctccttccaaagactgtgtcattatcgagctgcagatcgtgtctgcgggaatccgacttgcaaagcagcgcaggactctgggaaagaaatctttatttttcccgcaggggtttttagagcctctcggccgtctgggagtctataaaagatggggtgcggggtgagagtcacccttgggattgttgggatccttcccagctttgggagtgagatcgctcgctggtgatcctccaggcccgcgcaacgctttctcactttc

SEQ ID NO: 47468 - DNA, 30 bp, Homo sapiens
  chr10:99392748-99392778
  hyper
aggcaacaccttctcgcaccccattttcac

SEQ ID NO: 47469 - DNA, 97 bp, Homo sapiens
  chr10:99447291-99447388
  hyper
ttcctgccccagggtgcggcgaaagctggccctgccgggtacacgtgacggatgccccttctcctgggcccgaggccagcgcgcgcggcactgactg

SEQ ID NO: 47470 - DNA, 232 bp, Homo sapiens
  chr10:99473542-99473774
  hyper
gcgggcacctgggccgtgctgcccccgcgagcaaggcgccgccattccgctgctcggggcgccgccgccgccgccaccgcgcccaggggccatgctcccgccgcccccgcgccagccgccgccccaggcgcgtgcggcccgcggcgcggtgcgcctgcagcggcccttcctgcgcagcccgctgggcgtgttgcggctgctgcagctgctggccggcgctgccttctggatc

SEQ ID NO: 47471 - DNA, 261 bp, Homo sapiens
  chr10:99474282-99474543
  hyper
ttccactgtcgcccgcgcccgggaaccctgacgctcagctcccgcccgacggcagcgccgccgccgcccagaatcccagcccagaatcccgaccgccgcgccggacgcgccgtctcccgggacaagcgcaggctgcgatccgaggggctgacacacactcgcagacgagccgccccgaggcgaaacctcgcggttcctcttcccttccctgctgagactaagacgtggacaggggccgcgcagatccgggggaggctccca

SEQ ID NO: 47472 - DNA, 67 bp, Homo sapiens
  chr10:99496837-99496904
  hyper
agctaaacccggagcgggatgacgtcatgaggacgcagccgcagagcgattcgcgtcccggaagcgg

SEQ ID NO: 47473 - DNA, 867 bp, Homo sapiens
  chr10:99531037-99531904
  hyper
cggggacggcggcggcggcgctacctggaggcgcggtggcgggcaggtgcccgaactgcacggcgatgcagaggtcgttgtccagggggaacttgtggcagtgcagcatctcaggccaggggaagccgtaggcctccatgagcggcgcgcagccggcgcgcacggcctcgcacagcgagcggcacgggtagatgggccggtcgagacagacgggcgcaaagagcgagcacaggaagacctgcgtatccgagtggcagcgcttggccagcagcggcagccagctgctcgcctgctgcttcacttcggccaggctctcgtgctccagcaggttgggcagccgcatgcgcttgtagcccaccgtgtggcagagcggcaggtcggcagggatgtcaaggcactgcggcggcttggagtaggagcggccgtgcagcggctcggcctgccagccatagtagtcgtactcctcgcagcgcgccggcgcccagtgcagcgcccccagcagcagcgccagcgcggccgtccgcacgcccccccccgccgccgccgcccgcatggctgcgccctctccaggtgcgcgccgcgcagccccccgacgctcggtgcccggcggcccaggtgttccggcgtgcgcccccggccctgactctacccagccgccgccgccgccgccgcggaggtcgcccaggtgggtggcagcctgcgctgcgggcgccccgactgatcctggcgcctcccacctcggggctccagcccgggcctcgccgtgcgccccagccaatctccggccgcctggccccagctccaaggcggggaggcagtgggggcggccctcagcccctcccgcaccctgcccgagcgtcccgccca

SEQ ID NO: 47474 - DNA, 30 bp, Homo sapiens
  chr10:99610069-99610099
  hyper
gaggtaggggcgagcgccccacccgcaggc

SEQ ID NO: 47475 - DNA, 30 bp, Homo sapiens; identical to SEQ ID NO: 7523
  chr10:99629442-99629472
  hyper

SEQ ID NO: 47476 - DNA, 30 bp, Homo sapiens
  chr10:99789261-99789291
  hyper
cggcggcggcggcggcggcggcggcagcag

SEQ ID NO: 47477 - DNA, 407 bp, Homo sapiens
  chr10:99789562-99789969
  hyper
ggaatgcctgaagccggcttgcctcaggcagcctgaagggaagaccacacctcgtccagcataaggcggctagcagctacgccgcgcgcggggctggctcccggagctctctgccacccagcgctgtgcccgggaactcggcttcccaggggaggaagagccagcccgcggggctcttccccagcctggaagcgtaggcactcggccgaggccagtggcttcccaggcccgggtctcagcctggctgactgggagactctcccgatagcccggcacatccctcctcacccgctccgccccctccaggccccagaggccccctcccctgacagctgacctccagtgcgcccccaacactttctctgccagctgctggctgtcgcccccacacatcagctcccacctct

SEQ ID NO: 47478 - DNA, 318 bp, Homo sapiens
  chr10:99790021-99790339
  hyper
cgcgcgccaatcgagtccagcgcctcccagcaagttaggagcgaagccgccgccttcgcgatcccagtcttcccgggttcccgggcggcgtccccgccacccttgcgggcggatccgggggggcgcgcagagctggagaaactttctccgccttagggtggggggcaccggtgcagatactcacgccggggtcagcgctcggagccatcctcccgctctcggccccgccgcctaggggcgtgggaagcgggcgctcgctgccgcctctgccgccggcgccgccgcctgcttgctcccagccccggtcccgggctggcc

SEQ ID NO: 47479 - DNA, 322 bp, Homo sapiens
  chr10:99790437-99790759
  hyper
cgcggcagctggagccgggggcccggggtggggggcgccggcgcggccaatcgcggccccgagagcccggagagccgggcgtggggagggagcgcctccccgcgctgatttaggagccgggattgcggtggcagcagccggcagccaggctggcccggcgcggcgcggcggccactggggtgggcggcggcgaaggcggcggcgagggcgggcgccccccgcgccccgccactgcgtcgcgtaaccttcaggcggcagcgaggcctggcgaggaggggagagggcgcctggctgggcgctgggggccccaggccggagggaa

SEQ ID NO: 47480 - DNA, 260 bp, Homo sapiens; identical to SEQ ID NO: 7527
  chr10:99790917-99791177
  hyper

SEQ ID NO: 47481 - DNA, 30 bp, Homo sapiens
  chr10:100027947-100027977
  hyper
gctccctccccgggcgccctggggcctttt

SEQ ID NO: 47482 - DNA, 44 bp, Homo sapiens; identical to SEQ ID NO: 7528
  chr10:100206320-100206364
  hyper

SEQ ID NO: 47483 - DNA, 30 bp, Homo sapiens
  chr10:100206755-100206785
  hyper
gccttccgcgggttcgagccccgcccctgc

SEQ ID NO: 47484 - DNA, 46 bp, Homo sapiens
  chr10:100991901-100991947
  hyper
ttccaacttttcattttcaggcgaggtgcaaccaggctctccaaat

SEQ ID NO: 47485 - DNA, 184 bp, Homo sapiens
  chr10:100992006-100992190
  hyper
cacacacgaacacacagacacacgaacacacagatacacaaacacagcgggtgcttgcttccgctccccaaataaagaatggtaatcaagtttctcaccatcctcatagtttttgagatagtaatccgggcccgggcccccgcggcttttcgccgggttcctcaggttctggaactgcaggaag

SEQ ID NO: 47486 - DNA, 425 bp, Homo sapiens
  chr10:100992221-100992646
  hyper
cgggcgaaagtccccgggccagggtcaccaagcgcttggagctgcagaggaagagaataagagaggaaaggttcccaggacaggacgagagcgcgtggggcacggagaagggccctcttcctactccctgagggcgacctggccggggctagaggctctgtgcctgccccagccggcagtccacgctggcccttggccgctgccctgcgccccagcccgccctcaccgcccggctctgggggctgtgcctcccgcttccagacgcccgcagcggccccctcccgcagacacccagatcctgatctcctaaaggctacagatagtgtttgttcatagagtgtttgtatggggtgggtgtacgtgctacgagcacggcgctaaagcgcagttgcccggcttctgccactgccaggaaagcgctccgg

SEQ ID NO: 47487 - DNA, 441 bp, Homo sapiens
  chr10:100992681-100993122
  hyper
cgaccgttgccaaaaacttgtatgctgaaagccggcattgcctccgcagccccaggggccccacaaacctccgtgcaggaggtgaaacctgccttgtttctctcagaccaggcccggcgcctgagcttaagtggattcctactttctttcttttaatgtccgagttgattttcctttttcactatattgtaaaaactgcattgtttcccaaatccccggacggagagatccccagggtaaaccctcgcctttccaagaacacttctccactcccgcaccaccaccaccaccaccacacacacacacagtaaaggcaaagtctctttggcccctgaaataattccgcctgatctcaggaaaggtaacatcctcctccccaccccacccccgagttaggctccatctttcttctttcccacttggggccgtttggaaccgcta

SEQ ID NO: 47488 - DNA, 1393 bp, Homo sapiens
  chr10:100993447-100994840
  hyper
ggagagttttttgagaagagacgtggctaccccagggtcttgtaaccagaatggtcgtttggcagaagtctccgggaccgcactccaggacaggcacagtcagggcgtcgcgtgggcctactgtggcaaaggagacgtccgcgcgaatccggtcctggggaaagggcagttccaacaacctttcatccagaagcctgcacagccaatgcgaatgcgccccgccaggacttcttccccgaaaatctgccttccagactcttttctgaggcaggaaagcattaggcgaacaggcagattttttaaaaaaagaaagaaagctggtgggggaaagggggtctgcgcagctgaaggagttcaatgaaagtgggacaagcgttgcggaaaactccgttgcaccctacattcggacgagctcatagacgcgctctgctgcacgaaagagctttcgaagaggaagctgggccgcgcggagctggctgttccgccctcgcggcaaccgcaccaacaggaaccgaaacggcctcggcaagggcagctacagcctctcagtcctccggctacctttcctccacgtggaaggagcgctccacgtggcgcctcccgctacctgccgcgtccgcagacccgacccgggccagggggacaaccccaagagctgagaggcgggcgcacctcaagaagcaaaactcgaatttcgcaaggagtgaaaaatacgaaggacgcacaacggacctggcctcggggcaaagtgggactgagagcgctgagggctcttcgaggggaacccacagctgaggctccaacttgtagggaatttttaaaaactcaacacttggattcgacattgcagaggatttatttcttattttacactgcaactctgtccctgatgggaagggatcgcagttgcctaactgccaaactgcaacaacccgggaagagtgtgagcccaattagattacaagccctagagcaaaggggatcacaaacctccgggtttgctaatctgctggtgcggagttcagatctccgaagcctccctggagtatttctaggactcttaccgcttcccttataacgctgtgaccccagcgaggattttttttttcctttaaagaaaagctaaactgtgcagttaccgcaggagatttaaggaggaggaactggcggggggaggggggcattccgtctataaaaagcgccttacaaagtcctgaagtctggaaatgacagcggaggatataaaataaaaaattttaactccgatccaacttgcccaccactcaagcctctgcttaaattcgttttctgagagtgggagagaactgacgaaacgatctttccgtggaaaattccagtttcgtgcaatcccgcttgaacactcacacacaca

SEQ ID NO: 47489 - DNA, 57 bp, Homo sapiens
  chr10:100996055-100996112
  hyper
gggtctcgtttttacgtccttccctgagaggctctggagggcggttcaagctccgac

SEQ ID NO: 47490 - DNA, 30 bp, Homo sapiens; identical to SEQ ID NO: 7532
  chr10:100996332-100996362
  hyper

SEQ ID NO: 47491 - DNA, 542 bp, Homo sapiens; identical to SEQ ID NO: 7533
  chr10:101088989-101089531
  hyper

SEQ ID NO: 47492 - DNA, 717 bp, Homo sapiens
  chr10:101089565-101090282
  hyper
cggacgtggaagtcctggggcccttgcgtcccgggggcgtggcaggctcggccctggtccaggtgcgagtgcgggagctgcgcaagggcgaagcggagcggggcggcgcgggcggtggcgggaagctcttttcactctgcgcctgggatgggcgcgcgtggcaccaccacggcgccgccggcggcttcctgctgcgcgttcgcccgcggttgtacggcccaggcggggacctgctgccccctgcgtggctgcgggcgctcggggcgctcctgctgctagccttgtcggccctgttcagcggcctgcgcctgagcctgctgtcgctggacccggtggagttacgggtgctgcggaacagcggctcggccgccgagcaggagcaggcgcgccgcgtgcaggccgttcgcggcagggggacccatctgctctgcaccctactcctgggccaagccggagccaacgcggccctggctggctggctgtacacctcgctgccgccgggcttcgggggcaccggggaagactacagcgaagaggggatccacttcccgtggctgccggcgctcgtgtgcaccggcgcggtattcctgggcgccgaaatctgcccctactcagtgtgttcgcggcacgggctggccatcgcctcgcacagcgtgtgcctgacccggcttctgatggcagccgccttccccgtgtgctacccgctgggccgcctgc

SEQ ID NO: 47493 - DNA, 30 bp, Homo sapiens; identical to SEQ ID NO: 7535
  chr10:101190596-101190626
  hyper

SEQ ID NO: 47494 - DNA, 30 bp, Homo sapiens
  chr10:101190909-101190939
  hyper
ggagcctgcgcgggcgaccttgaccacctt

SEQ ID NO: 47495 - DNA, 653 bp, Homo sapiens
  chr10:101279839-101280492
  hyper
ctgggatttcttagaaggttgcggggccaatcagcagccataaatcttagagaaccttcaccgttttacaagggagttcgcaggggctgcccttctccctcacgcggtctatttacaacgccgaaatctccgtgttaatggacctaggataatggtgtttactttaccgcgataaagcgctgggcttcctgggggagcggctgtaaaatgtcctggaggtagggatggaacgggcgccgtaaaagcgggcgctggaagggcgggggcaccaggttctccttcaggccggcgcccccgccctccaccctctaggccaggctgagcagcccaggcctggcgggcgagcaccgttcccacataaatcaccagcgccagagtctcgggaaaaggcgcatttttcattgctggctgcagggcgactccagaccgcgaacgagaaacagaagttgtctttagataaaccgttcaccggagcgcgcgttgtggcagcagggtccgcagagcacagggcaacctgggtctggcgctgcgcccccgccaccgatcacctcccagaggccccgcaagaaacccagatcctctcaagggctggtaccacgtcctcctgccagagaggagatagggagccaagcgggaaggaaaaggagaacttc

SEQ ID NO: 47496 - DNA, 345 bp, Homo sapiens
  chr10:101283149-101283494
  hyper
ttcagaaggcggggacgagggctggcagccccatactgaatagaaagcgaaggacggaggtagggagaaaggaaactgctctggggggcggaggtgggggtacacgtaggagggaaggggagggggctagaggaggctccgccccaccgtccggcagtgtttattttcaaggcagcttcccgtcaatcctgtcaccggggcacattcttttcgggggctgtgaaccaccgtcagggctctgcaggaagatttgaggagggggagggctgtcgagtagggagcaggaattcgcagagtagagagaactgcgtctgggcaggcagtccctgcgtggcgcgggggaag

SEQ ID NO: 47497 - DNA, 164 bp, Homo sapiens
  chr10:101290943-101291107
  hyper
gcacgtggcccgcgcggcatcccagctccccgggcggacccaggggctgcctctccacaacagttccgctcccttctgcagagccccgcctctcccacctcccgacaggctgttctttctcccttcaaccttgggcacccactcctgtcgccgttgcgggaccc

SEQ ID NO: 47498 - DNA, 978 bp, Homo sapiens
  chr10:101292335-101293313
  hyper
agttttcctgccccgcgcagcagctgaaaaaaacacactcctggggcatccttccctggcgttggttcgtggacagcaagcctcccagaactggcctaggtcgggaaggtgcagccacgcgggaatcaatggttcaggaaccggatctgtgcagcctcgcccgcagcgtctcggacttcaggactctatactagtccttgtctatttctggtagagccgcaacatcccactcgcagagagcagggggcgtggcccacatgagccagaacctatagggagggaggttggggcgccagccccgcccccccaacgtgacgcaaatctcccggacagaggcttaggagcccgggccccagtccctgcagtggctgtaacaaaacccagacccccaggtcccggccaatggaggcgatttagactggagtgggaccgcgtctgtcaaaagcccgactcggcagcagcggcggagtccaggaggagagctggagccgccgcgctgcctccccgcccccgccgggatttattatttggactggacaattaagtggccctgatgatgttaccaagcccggtcacctccacccctttctcagtcaaagacattttgaatctggagcagcagcaccagcacttccatggtgcgcacttgcaggcggacttggagcaccacttccactctgcgccctgcatgctggccgccgctgaggggacgcaattttctgacggaggggaggaggacgaggaagacgagggcgagaaattgtcctatttgaactcactagccgcagcagacggccacggggattcagggctgtgtccccagggctatgtccacacggtcctgcgagactcgtgcagcgagcccaaggaacatgaagaggagcccgaggtcgtgagggaccggagccaaagtgagtagagggggaaagaaaacgcacccgcacacctggagcaatggcagagcgcacacaaacagcc

SEQ ID NO: 47499 - DNA, 335 bp, Homo sapiens
  chr10:101293521-101293856
  hyper
gcgacgtgggctcagcgcctgggtcctcataactggcagtatttttgctcttccccccgccccaaaaggctcttcccccaaaaagggcaggagcctggacctttttcgttttccctctagggtgagatgagttctcttagcccagggcagccaccccttcttctccgaaaagacagcccaagcagcctgtgtctctcgcacccgcaggggcaggaactttggtggaggccagctgggcggtttcctcccttctctgcttggagctcagcgtccttgaacccgtggcactcggtagagagagaggagatgatcggaaagtgcgtgggaacaatgtc

SEQ ID NO: 47500 - DNA, 30 bp, Homo sapiens
  chr10:101294628-101294658
  hyper
catttactaccgcacgctctgcgcagccac

SEQ ID NO: 47501 - DNA, 30 bp, Homo sapiens
  chr10:101294911-101294941
  hyper
gagcgcgagcacctcgccagcagcctgaag

SEQ ID NO: 47502 - DNA, 158 bp, Homo sapiens
  chr10:101296558-101296716
  hyper
tggactagctgtatagacctgcgttcggtcaagtcttgcactctgccccacctcgagggtcgccagggaaaaggaagcctcgctcgcagtcccagctgttggccgcgcgaaggcggctccttccctggctgcagccagggctaccaacgcgcccgggg

SEQ ID NO: 47503 - DNA, 629 bp, Homo sapiens
  chr10:101296737-101297366
  hyper
cggccgagctctcccccttggccgccctcccttctcccccggcggccgcggctttatgcggctccttgtcacttgcggagaatgcctgtgcgaggcctgtgctgccacacggccgattgtgagcgtgccaaggcgggtgaatggggaggcctcagagcgccgcgccattgtggggccgggcctcgctgaaaggcggctccgggccgggaaggtgcggaaagaatggctttttattggagtcccgaacaaaaggtgtggtaggaaggcgaggtcccctgcgcgaacaaaaaccccagcgcgtcggattgacgtcccccccgagctccccattgcttctcagagcgggggctttgtgcagcagtctgctcaacagagggacggagaaatgtgcgggggttttgttccccactttttgtgctctgggggagggggcggcagggggacgggggctgggcgggcagcagggaggggcgcgctgattaggccgggccggccggggcgctgagacgttcagcgggagtcggcggcctgaatgctgggtcattattgctacaagtttagcaatttctcccttacaggagggggtggggctgctaggctgtggcggggccgcccggctggggagctgt

SEQ ID NO: 47504 - DNA, 31 bp, Homo sapiens
  chr10:101300724-101300755
  hyper
ccaggcgggcccggggcggtcagagccagct

SEQ ID NO: 47505 - DNA, 30 bp, Homo sapiens
  chr10:101345350-101345380
  hyper
agtccctggctttggccctgttgcccttgt

SEQ ID NO: 47506 - DNA, 30 bp, Homo sapiens
  chr10:101351688-101351718
  hyper
ctttctccaccctggattttacttttgaag

SEQ ID NO: 47507 - DNA, 30 bp, Homo sapiens; identical to SEQ ID NO: 7540
  chr10:101380402-101380432
  hyper

SEQ ID NO: 47508 - DNA, 112 bp, Homo sapiens; identical to SEQ ID NO: 7541
  chr10:101381345-101381457
  hyper

SEQ ID NO: 47509 - DNA, 30 bp, Homo sapiens
  chr10:101419226-101419256
  hyper
ccttggggacgtggcgccgccgccggccgg

SEQ ID NO: 47510 - DNA, 30 bp, Homo sapiens
  chr10:101419612-101419642
  hyper
ttctaggctgcagacgtaggagatgcctgg

SEQ ID NO: 47511 - DNA, 90 bp, Homo sapiens
  chr10:101945884-101945974
  hyper
aattctcctagccgcgggccgcgcaggctcctttggaggcaagtcgctttctgtacactgctggttaactgcttcggaagaggacagccc

SEQ ID NO: 47512 - DNA, 30 bp, Homo sapiens; identical to SEQ ID NO: 7542
  chr10:102046443-102046473
  hyper

SEQ ID NO: 47513 - DNA, 30 bp, Homo sapiens
  chr10:102107569-102107599
  hyper
ctccttcctactgccgcctcccgataggtt

SEQ ID NO: 47514 - DNA, 213 bp, Homo sapiens
  chr10:102132967-102133180
  hyper
ctctggctcagccctgcgggtgagtgtttaactttcagcccagcttaagatctccgaagacacccatcgcctcgtcctgcccagtcccctccgctaaagggccggcctgcccgggcctggctggcagctgacatgaatggagaggaagcgcctccctctccacccactctcgccggggttactgccggtcacagacccgggccttcaagagct

SEQ ID NO: 47515 - DNA, 53 bp, Homo sapiens
  chr10:102133790-102133843
  hyper
gcaaagcgttcaggaacgttcgaggctgacgcaaccggcgcaggaaggtggtg

SEQ ID NO: 47516 - DNA, 30 bp, Homo sapiens
  chr10:102196220-102196250
  hyper
attagtgggtgagtgcgtgtggggcccatg

SEQ ID NO: 47517 - DNA, 387 bp, Homo sapiens
  chr10:102321811-102322198
  hyper
aacctggaaattgggacctcacgcaccatatttcccgcgctctcccctgggacgtgccgtccctgctgcagtcgcagcgtggcgccctcgctccacgcagggatcctgagccaatggcggaagcggagtgcgcggcgaggtcgcagttgcgtttctcgcactccccactgcggggagcccgtgggccccgcactgcagggaagctgccggcccaggtctcctgggtggcaagaagacgcctgtggtgtggaagaacctcgcccgcagcccagcacgtgtagaatccagatgtggcttctgctggagccacgtgttccggcctgagcgacgtcgcacgtggcctcctggccgcagagcccatggcgcggggggccactcttctgacgc

SEQ ID NO: 47518 - DNA, 30 bp, Homo sapiens
  chr10:102414411-102414441
  hyper
gcataagattaagccgaggctctcagctgc

SEQ ID NO: 47519 - DNA, 42 bp, Homo sapiens
  chr10:102414895-102414937
  hyper
gtcactctgcgtctcggtctctctggagtccttctgcctctg

SEQ ID NO: 47520 - DNA, 601 bp, Homo sapiens
  chr10:102415092-102415693
  hyper
cgcactgcagcgcggcaccagcagtctatgacaaaaacattatccttctgctgctaaacaatccaataaacctctccacagggagaaagttaacctcttgtctcttcggctgatgccttcccgcccacgtgactgctgccacagtaaattcaaatcattagtctcctcaccccatcaaaaaacttctattagtaatggagacctcgccggagaccttccgcggagagcgctgccttcccaattcccagtggaaaaattctgcgcgaaaaactaattctacttttaataatctgtcatcaggaccagaggcagtcataaattatatgggagcgcgtgcgagagcgcgccacaagagggaaatcagggcgaaaaatcaaagcccaagtttgacaaactttcctgaagataaataataacttacaaacaggattagttgtaaagtcacgctccggcgcgcagccaccgcggcaatcacgtctgccgagggccgccaccgcgaggcacctgtcaccggccgccaccgcttccgagccttcctcctcgtcctcctccttgcctgcctcccctcctcctcttcctcgccctccagccttcctcttcc

SEQ ID NO: 47521 - DNA, 238 bp, Homo sapiens
  chr10:102415956-102416194
  hyper
cctcgagtgggggctcggcgtgtaaaggggtgtacgggagcggcccttggcttcctgcctctgcggcctcccctgcctcccggccccatcccgtctccctgtcctccgccctcacccacccggacagagggagactggcgcgggcagtgcgtgggttgggggcacagcccgacccctaagtttattcgttggcgtgggtgcagggtggcggcgggtccgctccgcccgcctcgggtcc

SEQ ID NO: 47522 - DNA, 30 bp, Homo sapiens
  chr10:102416394-102416424
  hyper
tactgtagcgtgcccgggccgggggaaggg

SEQ ID NO: 47523 - DNA, 385 bp, Homo sapiens
  chr10:102430676-102431061
  hyper
tctatttactcctgacaggatcgccgggggcacggctgcgagataaccattagcgcagccgccgataaagcggggaggctgcatttccaaaggctccgcggccattacgggaaagttagtgtgaaacatgttaaattatccccaaagtggagggagcgggggaggcggcgggggagcgggcgcccgagagagccacgagacccgccgcctccgccggggccgggtgactgcgccgtgcccgacacgccgacgtccaccagggggcggccgcgtgcggcccgagcctcggtctgcgggtccggaggatgggctggcggcccgagccttcctcgcacctgcgggcgcggacccacccgaggccgccggctccggctccggctccctg

SEQ ID NO: 47524 - DNA, 68 bp, Homo sapiens
  chr10:102440841-102440909
  hyper
ggctctgcgtctggcggagacaattactcggatacgctccggctggccttcccgaggccccaggtcat

SEQ ID NO: 47525 - DNA, 62 bp, Homo sapiens; identical to SEQ ID NO: 7548
  chr10:102441170-102441232
  hyper

SEQ ID NO: 47526 - DNA, 384 bp, Homo sapiens
  chr10:102469792-102470176
  hyper
ggagacagtgacaccgggagaaacccgcgccccgcgcccccatcccccaggagcccctccctccgcggcgctccgggcagaagagggaagcagtgacccggccaggtggtgatgatgcggccggccgcgctggtcactcttggccgctccccgcgcgcagcccgacccccctcgtatgggtcacggcgcctgcaaaactccctgacacagaaacgccgcggggcctgcgcgtgtcgggaacaatcctgcgcctgatgggaagcgacagctccgccccgcctccctccactcctgccctcccgcggctcctcccgggcgccgcgtcccgcgctcctgctgccagcccagccggcctggggcgccctagccgctggtcctggccca

SEQ ID NO: 47527 - DNA, 447 bp, Homo sapiens
  chr10:102473268-102473715
  hyper
tgaccagcactagattagaggcgggaactccggatgagaaagagacgagggggccaggatcccagggctggcagcgacaggaaggatgggaagaggtccgcaggcccgacgggtgcgggccagcctggccgcgcagggggagctgggagctgggtgggcggggtggggcggacgccaccaggcgtggcgcggggaacagagcagaatgaaatgcagatgcaaaacgtgctcataagagtttcctctctctccccatctgccaaagccgagattttaatctttaatccatgagcaatcagcgagcagcggcgaatggcacattacagatgttttactgtcgcgggcgctcgcagctttcgcgctcggcacaggcgcgccgggcgcccccgctccgcccgccccctcttctccccctctggttcttcttcctctcccctccccaggtcc

SEQ ID NO: 47528 - DNA, 148 bp, Homo sapiens; identical to SEQ ID NO: 7551
  chr10:102473759-102473907
  hyper

SEQ ID NO: 47529 - DNA, 240 bp, Homo sapiens
  chr10:102475168-102475408
  hyper
gagatccacaacagagaaaggcgtggagaagggcagagacagagaccaacgaagtggggtcgggtagaaagaggcggatataaaggcaggccagagagagtgaatggccgcgtcagccgcaaagaggcccagacagatggacgcaggcaggaagacggacaggagagagagagagacaacgtgcgcccgaggctgaagagctgggtcaagaagagattcggcttccgggagcaggggcgt

SEQ ID NO: 47530 - DNA, 44 bp, Homo sapiens
  chr10:102475555-102475599
  hyper
ggagcgagaggcagcggagccgcgtgtgtgtttttattattatt

SEQ ID NO: 47531 - DNA, 219 bp, Homo sapiens
  chr10:102484026-102484245
  hyper
tgtacctgcagatgccgcggccgccgcgcccggcctcctcctccctcctgcccactgcgcggggcggacgccggcccggccggcctcggcggctcaggaggcttctgaaatgactctaattacagagttattaattttaagaggagggtgagcggggggtttatgattattaatcgagcgcccgagctcggcgggcggggcttggcgggccgcgggcta

SEQ ID NO: 47532 - DNA, 292 bp, Homo sapiens; identical to SEQ ID NO: 7555
  chr10:102484269-102484561
  hyper

SEQ ID NO: 47533 - DNA, 365 bp, Homo sapiens
  chr10:102489298-102489663
  hyper
taccctctggcctggggacaccggtgctggagaagaccctgggaacgggcagaatctgagccgcgtctctgagtcgcagtgggaaggcggctcaggaaatgcgccctccgctggcgctgggtcgcggttctggctgcgttactttttccttgcatctgtggcccggcgcgccagcctggacactagatccgcaagaagggagttttcccagggccggctgaagaatgagaagtccgagctgcggggacgttgggggtctgtgcttagcggccacagcctgcccaccacgggttcccgccaccccgcctccccacctcccttcgcgccagggctgaaagtcccaggcgcccaatgcgtgcccaaga

SEQ ID NO: 47534 - DNA, 351 bp, Homo sapiens
  chr10:102489700-102490051
  hyper
cgccatggacccaggacgacaccccacacccagacaccactctttccaggggcagatgctccggcgcgccccgcgccctgaagttcaacttggaatccaggtccgcgcgggaccccgcctagcgccccaagcgcacaggctgagcgccccgccctggcctcctgggcctgcggcctcagcgcgagagccctggcccccttcccgccgcgggtcgcggtcgggaaagcgcgccctgcaagggggttttgtagataaacaaaagcgtttgctcttctggttttcttttattttctttattcgcctgtcccttccttcttaatctccctcttcgctcttgtttctttaacttat

SEQ ID NO: 47535 - DNA, 786 bp, Homo sapiens
  chr10:102490358-102491144
  hyper
accgagccccggaacgagagaacagatttctcccaggaaaggttttgtgaactaaacgatgctaattacggggtgggggatgcgtcgcccgggaaggggaggcgcgcggggccgagcgcggcctgggaggggagagaccggggctggccgaggccctcccggggcgcctcccctgcacctctcgccctggctttcgcctttccctgggaactttcccgtctgagttaactattaaccaccggcgagaggcaattttcttcggaatttcagcgatttccttttcgcagtggactcagattagcacgcaaacagtgagatgctcggcttgagtctacgcgcgggcgaagatgcctctgtcgcctcaaacagtgtccttcgcgacggcggaaaactacagcccgcccccgctcccgtgcctgctcaggaagccgtgaccaagccagtgcccgccggtgcccggagtgaaggtggaaaaagccgagtgctcctgctcgggggcggggttgagagggggagattaatccgggcaagccaaggggaccttagacttgcagccagggccgccacccgaggagcccgcatgcagggacgcgcctgaaggcttagtcaaacccggggaaatgccctcccccgcctgcagaatccccacgccgtctcttacttcctccctctttgccactggcgagcttacacgtgcacacacacacacccctctctgtctgtgaccgcaacaaactttgtgaaacttgaaccgctgggtgcaaagttcacgcccttttctccttt

SEQ ID NO: 47536 - DNA, 350 bp, Homo sapiens; identical to SEQ ID NO: 7558
  chr10:102495095-102495445
  hyper

SEQ ID NO: 47537 - DNA, 238 bp, Homo sapiens; identical to SEQ ID NO: 7559
  chr10:102495452-102495690
  hyper

SEQ ID NO: 47538 - DNA, 432 bp, Homo sapiens
  chr10:102497283-102497715
  hyper
agctccgggaaaggcgggggggagctgcggagctgggcaggagacagggctgtgtttgggaaaaggaaaccgcacttcgaggcggctccgcagagcagagctgcagagtcttccgccctcccagccgccttctccctttgcctctttctcttttcaccgccccctccctcatctcttcggtagccacgtttggccggggcacaactccctggaggccctgcccccctagacggccccgagcccttttggacctcatccggctagtttaaaatgacaatgacagaggcgcgtgaccgaacgtgcctgccggacgtcctggcgcaactgccgcagccgggtttgcgaaggatgcgggttttacttagtctcgctgagcctgttccggagcagcgaaaaccatcaggaaagggcgagagaaggaggaaggggatt

SEQ ID NO: 47539 - DNA, 30 bp, Homo sapiens
  chr10:102498808-102498838
  hyper
gcccccatagccaccgcaactctcagcagc

SEQ ID NO: 47540 - DNA, 30 bp, Homo sapiens; identical to SEQ ID NO: 7561
  chr10:102499135-102499165
  hyper

SEQ ID NO: 47541 - DNA, 30 bp, Homo sapiens
  chr10:102499614-102499644
  hyper
actcagcctccctccgactctctcgcccgg

SEQ ID NO: 47542 - DNA, 30 bp, Homo sapiens
  chr10:102499974-102500004
  hyper
gctgaagaggaccgcgcctgaggccacaat

SEQ ID NO: 47543 - DNA, 774 bp, Homo sapiens; identical to SEQ ID NO: 7562
  chr10:102501590-102502364
  hyper

SEQ ID NO: 47544 - DNA, 741 bp, Homo sapiens
  chr10:102504007-102504748
  hyper
tcgggctgcaagagcgctgcgcaagcttcgccgagccgccctttcgcagacccagggaagcggggggagggagcgaaggagggagagagagttaaaacatcagctgaagtgccaagatgatttatgagacgagggaaaatatttcatgaagatctcccggatattctgtacttaaccagttaggagacaaagggcttcttctgcctggtgcgtgcgagcggaccccagcgagcaagggagctagtgccagagagagctgcggaggctccggcaggagtggggacgtccccgtggttgcgcctcctgcgctcgccccggatccaccgagctagcagcgggcggcgctcagccgcgtccgcagcctcctcttctccccagccggggagagccagcctcgtctcccacatcctctgccgccagcgacctgcagctccgcactgtttccctcccctgtacccccttcccagtcacccgagggttcagaaaccaagtcccccggctctcccgccatccgctgggtcccaccgaggcaggtgggtactcgccggaggtcttcagctcgattctgaaccaagcgttctggactgcccagacccggtgggcaaggggactggggaggccctgcgcacagtcgcgtggaacgggaggggacaagacaaactgctggacacttttccgtggaatgagaagtggggggtgcgtgggtgggaaggtacctccggagggaaaggccaaagggaa

SEQ ID NO: 47545 - DNA, 113 bp, Homo sapiens
  chr10:102505251-102505364
  hyper
catccatctcccggcgcggggagggggaggaggtctggagggggctttgcagcttttagagagacacacaccgggagccgaggctccagtctccggccgagtcttctcgcagc

SEQ ID NO: 47546 - DNA, 4 bp, Homo sapiens
  chr10:102507531-102507535
  hyper
cggg

SEQ ID NO: 47547 - DNA, 227 bp, Homo sapiens
  chr10:102507767-102507994
  hyper
ggtggactggtgggtgagacaccgcagcccgagtcggtgctggcggccgtggcgcattccaggcccgactcagcgccgactcgctgcagtcccccagccctggactcccgccgtgtccccttcccatccccaccccttagactggggctgaggggccgggccctgagcccggggaggctgaattattcatctttaatctgcccgcagctgccgccttttcataccgg

SEQ ID NO: 47548 - DNA, 57 bp, Homo sapiens
  chr10:102508232-102508289
  hyper
tttctccgaaactcgcgtgaggctagcggggcaggggctgcagcttgccagtccggg

SEQ ID NO: 47549 - DNA, 477 bp, Homo sapiens
  chr10:102508341-102508818
  hyper
cggctacgggttgatcgctctgggtgcaggatttctagactgctgtaggccagggagaatggggcacaggaagcaccctcaggcctggcacccagtggccgcctcggttccgagatcgggagcccgcgctggagccgggttggaaaccccgtgcccttctcttggccgaaagagcaaaagcccgagccgctcggtttcctgggggggctgccgaggtctgaggggtcaaagggactcgagtcgggtttgggtcggctacacagggcgccccgagagttattaactcgccagcgaggcctatgccgtgccacctgggcgagacggtgggccccaaccaggctctgcgaggcgcggcaggcaggcgagcccaagcagccggcattctctgcctgctgcctggagccgctctgcctccctgtctctgagcgcagcagaccccgggcccctgcctcatccgccttccttgctctacttcag

SEQ ID NO: 47550 - DNA, 30 bp, Homo sapiens
  chr10:102509023-102509053
  hyper
cagccgagcctcgacgcccccaaatcgtcc

SEQ ID NO: 47551 - DNA, 30 bp, Homo sapiens; identical to SEQ ID NO: 7564
  chr10:102585779-102585809
  hyper

SEQ ID NO: 47552 - DNA, 357 bp, Homo sapiens; identical to SEQ ID NO: 7565
  chr10:102586048-102586405
  hyper

SEQ ID NO: 47553 - DNA, 121 bp, Homo sapiens; identical to SEQ ID NO: 7566
  chr10:102587491-102587612
  hyper

SEQ ID NO: 47554 - DNA, 610 bp, Homo sapiens; identical to SEQ ID NO: 7567
  chr10:102587830-102588440
  hyper

SEQ ID NO: 47555 - DNA, 159 bp, Homo sapiens; identical to SEQ ID NO: 7568
  chr10:102588941-102589100
  hyper

SEQ ID NO: 47556 - DNA, 1138 bp, Homo sapiens
  chr10:102589250-102590388
  hyper
gccctgcatgtctcctcacccgtggatcgtgacgactcgaaataacagaaacaaagtcaataaagtgaaaataaataaaaatccttgaacaaatccgaaaaggcttggagtcctcgcccagatctctctcccctgcgagccctttttatttgagaaggaaaaagagaaaagagaatcgtttaagggaacccggcgcccagccaggctccagtggcccgaacggggcggcgagggcggcgagggcgccgaggtccggcccatcccagtcctgtggggctggccgggcagagaccccggacccaggcccaggcctaacctgctaaatgtccccggacggttctggtctcctcggccactttcagtgcgtcggttcgttttgattctttttcttttgtgcacataagaaataaataataataataaataaagaataaaattttgtatgtcactccccatggctccaagtttgtctctccctgtctctgagatgggcctcccctccattggtcgatccccaaaagccccttcaatgatcctcccaactacactcccgctgccacctccaactcctttgccgagacccccttggcggcagctgaaccacggcgaaggccgagactagcctgccctttagtagccaccctcccccacgcaccccggccctggggacaggaagttcttactctccgaaacttcagaataactcctagttaggcgcctatactaggccaactctgtggtcctaccagtacacccgcacccagatttagggtgctggctctcagaacccgaagtctgaggccttctccacgtgggtggaggggtggtcgtctgtcctatctcctccctccgttccctatccagtgcagttgcgcgtgggcgcagcagcaattttatccccgaagtctgcaatgaaacgcgaagaccgcagacgcttgccgcaagtttcctcgctctgcgtttacttctgggcccgaagaatgccccgcagaggccctaggagctggttcatgggacttcacgcgcctccagtgtcttgcggagccccagccccagcaagcagcggctgaaattggtgcgccttgtgctgtggtctgggtgtgtcccggagagggcgcgcaggcgcctatgtctgtcg

SEQ ID NO: 47557 - DNA, 30 bp, Homo sapiens; identical to SEQ ID NO: 7570
  chr10:102671978-102672008
  hyper

SEQ ID NO: 47558 - DNA, 31 bp, Homo sapiens; identical to SEQ ID NO: 7571
  chr10:102746537-102746568
  hyper

SEQ ID NO: 47559 - DNA, 47 bp, Homo sapiens
  chr10:102746983-102747030
  hyper
cccctgactgggggcgacctacccggggagtcgttgccacctccaca

SEQ ID NO: 47560 - DNA, 30 bp, Homo sapiens; identical to SEQ ID NO: 7572
  chr10:102756780-102756810
  hyper

SEQ ID NO: 47561 - DNA, 30 bp, Homo sapiens; identical to SEQ ID NO: 7573
  chr10:102757011-102757041
  hyper

SEQ ID NO: 47562 - DNA, 30 bp, Homo sapiens
  chr10:102757872-102757902
  hyper
tgcatgagtgtaaacgctccctcaatacca

SEQ ID NO: 47563 - DNA, 30 bp, Homo sapiens; identical to SEQ ID NO: 7574
  chr10:102792028-102792058
  hyper

SEQ ID NO: 47564 - DNA, 206 bp, Homo sapiens
  chr10:102802795-102803001
  hyper
ccaatatcgaaacccacgaattccctagcgccagccctttgacttcctgcccaaaaatccgcgaggttttcgaggaatcacgcgaggactctcctcctggatcccaagcccaggtttttttttcagctgcctctgaggctgttggctctttcttcggcgccgtcctcctcctttccctctctccacccttgcgcctaacagtccag

SEQ ID NO: 47565 - DNA, 30 bp, Homo sapiens
  chr10:102809969-102809999
  hyper
taattgctctttaacgacgccggataatgg

SEQ ID NO: 47566 - DNA, 30 bp, Homo sapiens
  chr10:102810263-102810293
  hyper
tgggctgtggaaccgcgcgcctctggacaa

SEQ ID NO: 47567 - DNA, 361 bp, Homo sapiens; identical to SEQ ID NO: 7576
  chr10:102822533-102822894
  hyper

SEQ ID NO: 47568 - DNA, 205 bp, Homo sapiens
  chr10:102826289-102826494
  hyper
aagcagaatcagaggggtaggcgggggtggggcgtgctgttcggcgctgtggccaaaatccgcccggcgctgaaagaggggacgtgggtgtgagtcccagcatcagccagggaatccgcccctagcttgttcttcgcccagctgggctccaagacgccctctgcgggcccatagctcctaccgcgtccacctgcagagcagaggc

SEQ ID NO: 47569 - DNA, 31 bp, Homo sapiens; identical to SEQ ID NO: 7577
  chr10:102827419-102827450
  hyper

SEQ ID NO: 47570 - DNA, 30 bp, Homo sapiens; identical to SEQ ID NO: 7578
  chr10:102851346-102851376
  hyper

SEQ ID NO: 47571 - DNA, 350 bp, Homo sapiens
  chr10:102891001-102891351
  hyper
agacccagtcgaaaccgcgaagctctcttgcaccgggctttttcgcctggtgattgatgtcccagagtcaacagcgagcgagcagccggagcggggaagcagaagccagagaggggaagaatacggcgccccctctctccctcccctcccccttctactttagcctttctgcgcacttcgcttccaagtctccgcgcagccaggagccgctgttgcctcccagcccctgctagctgccccccgagccgagcgcagcgagcgccgccgcccgggccccccggtggggccagggccagcatggagcacctgggtccgcaccacctccacccgggtcacgcagagcccattag

SEQ ID NO: 47572 - DNA, 211 bp, Homo sapiens
  chr10:102893740-102893951
  hyper
ccgccgtgggcttgtcgctgagggctaacgggaggatctcggccctgctcgtgggggttcagctgctgcgctcgctgactcgcggggtgttgggcctgggacgcttcctgacgctctgctgcttgcctctgccgtctgtctgtctcccgctccagtggccctctcacccttcactgtaacacgccgtataggtcacccctatcagaaccgg

SEQ ID NO: 47573 - DNA, 1155 bp, Homo sapiens
  chr10:102894090-102895245
  hyper
cgcaggtcaaaacctggttccagaaccggcggacaaagtggaggtgagcaagcggggcgggccggccgcccgcgagcggcgcggtctcaggcagctctcggttcattggcctctcgtggggcgcacatactttttccgctcgcggtttctgatcctttcggaggagcgagctcccgctaggcttgcggggagctggaagcaaccgaggccgatagctgggatggggctgaagagccctggctctgttttaccggaggcttcagggctttctggttggcacactctctgccggtgtagacgcggcaggtctattccgccgcttgggcaaacaggcgggttagtgcactccacgcagtccaggctccagggatctgtgagtcctggggagctttttgtttgcgcaaactcttgcttatggaatcctgctctgtcctggagactggatgcagaacagcccgcaccttgttgcagcgctccagccgggctcccggcagagggtctgtggccccagaccgcggccctgctgacggtctcctcccccagacacccggcctttgcgcagccggtccctaccctggaaggagaaaatcaatccgcgccggctgcggcggggtttcgcgggtcccactggaaggggaatcaattaggagcagatgggtgtgtgtgagaaagagaattttccttctcccatagccacaactctagttactacgcaatgggctttttgttttgttttgttttttcacatttacgctcacggacgtgaagcgtccccaacactctcgagcagcctccctctccgcgcgcactgacgctttctccggctgcaccctctggcacgctgcaccctctggcacgctgcaccctcccgcacatctggcccttgcccgccggagtttctcccctagctcaggccccatggggtagcgcgggagagtctgggcgaagtcggcggcgccgagacgggcgggccttggggcaggaggaaggaattggagtttcctctttttctgaacgaaggcgaggaatctgcctgggattccgcctacggggccacaaaggaagccatggccccacgattctaccacaacatttctgacgctgggaaaggagtgggggatgcggcctcagaccttggaacgctaaagagggagc

SEQ ID NO: 47574 - DNA, 129 bp, Homo sapiens
  chr10:102899472-102899601
  hyper
atgcttcccggccggcgcagatcacacagcaggaccccaggggagactgtggccttcttcccgcctcccaattccccaagaccgcctctagaggctgctgtgtccggagaactccgagcattttctgga

SEQ ID NO: 47575 - DNA, 244 bp, Homo sapiens
  chr10:102900262-102900506
  hyper
ggaggctggaggggaggggggctgcgagggtcacagtcaaggccaactactcacaacagaaagctcgaaactctccctctacctcccctgccggaaatgacccgtctctgttcaaaaatagaaaaagaacgatcggaataattgttcgcagaggtgccgggagagaaggggaattaacaaacctgcctgcgcggagaggtctgcttccttctttggcttcagaaccgacggcaatcaccaaatt

SEQ ID NO: 47576 - DNA, 30 bp, Homo sapiens
  chr10:102905722-102905752
  hyper
gccgggctagatgccgagatgtaattcacc

SEQ ID NO: 47577 - DNA, 30 bp, Homo sapiens
  chr10:102906934-102906964
  hyper
gttatggggcggggcgaggagctaacccag

SEQ ID NO: 47578 - DNA, 58 bp, Homo sapiens; identical to SEQ ID NO: 7583
  chr10:102973586-102973644
  hyper

SEQ ID NO: 47579 - DNA, 30 bp, Homo sapiens
  chr10:102976584-102976614
  hyper
tgccatcgggacacgcgggatctttattta

SEQ ID NO: 47580 - DNA, 1159 bp, Homo sapiens
  chr10:102976889-102978048
  hyper
agcgcaggccggcccggctcaggtcgctcggccagcgcctggcgccctcgagcgggaccctgactcctgaccctgcttcccaggtgggagccgttttcctccttccaaagccagatgcctcgggcccgcgaaccaaaagccttctttccaggaaatttcacaattaaaaatatttatcgggagcagatttacgtttctgggtttccagtctcggggcgtctgggtaggctattaagagtaattagcatcttttgcgcatgcagatttacttcgctcattgccacataactcatccctaaaagccggcgcaggcgaaagcaggcgccgccggcggagccgctgccacagctaccgccgctgcccgcccgagcccccctcccctcctgcgctgcccgctcccagtctctccggcccgaattgtccgctccaggccccagacgctgaacacggaacgaaaaggcttccatcctggagacctggagacgagtgacgccagagcgacctcgtgcggttggggaaggcccagactaggctctccaggctggggccgcgccgtctggaccccaggcattgcgaccacgcatgtgtgtgcaccaccgagtgggcgcttgtgtgtgtgcacgctcacgtgcgcgcgagtgcacaggagtatggttgctagtgcgcgttcctgagagggcgaaggggcgcgtggaaaacgagctgatcaccatcctccccttccctgcagcccaccggttcccaggacgacgctcaaacgtcagtcctaggccacccacctagggcactgagtttcagagggagactcgggcccctaccttgcctcgaattcccttctacagagccagttccatccagccaaacggcctggagcactcagcgcccagccgggggaactgggaggcccaacacccggctgcagccgagcgcatggctggcctggtaccggtgagaggccgccagagaaagcgcaggcggagccgggggtcactgaacagagactttcagggtcgctggggggcggctggagacgatgaggccacgcgactgaagggattggggggtgaggagtggtggtgggggcggacaaagggacaacgtggcggtggacgaaccagggccagagagggccgctgtggctcccgctcttcgggccgaa

SEQ ID NO: 47581 - DNA, 181 bp, Homo sapiens
  chr10:102978303-102978484
  hyper
tgcatggggactgcttgctcccgggagggtgtgggcaggagtctggtgtatatccggccaagaatccctttgcgacgtgtctccatgcctgggtgtgtgtgtatggacctccgtgtgtctgcgtgtgtgtgaccacgtgcggctgagaggccatgtagacgtgacttgggtgtctatgtgt

SEQ ID NO: 47582 - DNA, 337 bp, Homo sapiens
  chr10:102978736-102979073
  hyper
gactactccaaggacatggctcggtttccagggtccccagagctgggacgccgccgggaaaccatggtcctggaggggagggagttatttgagggggtgcttgtccctgcctcgtcccttgtcaggccccgcgcggcgctaaagcgggggccgttttccctttaaatcgcggacactttgacaggggacattaaggacccggctgctcaggctgagcagatcataaaaccggacaggcaatttctgctcccgccaaatagccgggcaaactcgttctgcatctttggttttaatgcactaaactggcagctaagcagggagcgagcaaaaggggggt

SEQ ID NO: 47583 - DNA, 6 bp, Homo sapiens
  chr10:102983050-102983056
  hyper
acaggc

SEQ ID NO: 47584 - DNA, 184 bp, Homo sapiens
  chr10:102984512-102984696
  hyper
cgaggaggcgcgcgcggggacctaatccatcaaattgtctacaaattgtgaagaaaattcaaaaaccatatggtcgccagcgccggcgcgctctgggctgcggagggccgcggccgtgcccgcaccgggagccgcggggggctgggcccggctattgtcgcctgtcagcggccgcccaggccca

SEQ ID NO: 47585 - DNA, 30 bp, Homo sapiens
  chr10:102985181-102985211
  hyper
cgacaacaaaagcccggagagaaacccgct

SEQ ID NO: 47586 - DNA, 30 bp, Homo sapiens
  chr10:102985499-102985529
  hyper
aaggctccaccccgcgtctgactgagtgat

SEQ ID NO: 47587 - DNA, 359 bp, Homo sapiens
  chr10:102986464-102986823
  hyper
cccacatgaggaaaaaaggcccgaggaaatagaagtcaactgcaataaggccgagggaggcgaggaaggagcgggccggtgcattcgccacatgcagagaaaaatcaaaacagccggagctgccactcccctagaccgcagggttagtgttccccgccctggtttctgtctcgccctcagcaaacccggcagcccgagagctttgaaaacatcgaaatctccgagatttaaaaaataataataaaagaaaggaaaaatcaggctgcggtgggaagaacccgctatataggtttaaatatttatatagaagccatacagaattgcacggcgagggcttccggggcggcggaggccgctgg

SEQ ID NO: 47588 - DNA, 176 bp, Homo sapiens
  chr10:102987327-102987503
  hyper
cgcttgagcttagcgcgccgattctggaaccaggtgatgacttgcgcgttggtgaggcccagctgctgcgcgatttggtcgcgatcggcgggggacaggtacttctggtatagaaagcgcttttccaattcatagatctggtggttggtgaaggccgtgcgcgactttcgccgctt

SEQ ID NO: 47589 - DNA, 493 bp, Homo sapiens
  chr10:102988125-102988618
  hyper
gctcaggctggaaggccctggcggccggagagggcagaggcgagcagaggcataggggacgaagcgcgcagggcacagggcgcgaggcgctgggtgcaggggaacccagcagctgcgcctaccttcggctgcctgcagaacgctgacctccagccccttaaacgtcttgctggcgagctcctccagcgcgcacagcggcgaggtctgcgagagcagcgcgcggcccgccaggggcaagccgccctgcgcgtgcttgtccgcggcggccagcaggtgcgccgccccgcacagcgagtaacttctccgcacagacggcttgttgaggatgtcctcgatgctgaacggcgtcagtggcttgttggagttggcaggcggaggcaggtggtccagcgggctgcgccgccgctcctcccccggcgccgccttgccgtcctccttggaagtcatctcggccttgttcggggtcccggccggggcggctcgggccgcgggg

SEQ ID NO: 47590 - DNA, 30 bp, Homo sapiens
  chr10:102988874-102988904
  hyper
ggtgtcaggtggctcggcagtggctcctgg

SEQ ID NO: 47591 - DNA, 105 bp, Homo sapiens
  chr10:102989239-102989344
  hyper
agctcattaattagcgggccgggggtaggaggagccggctggaattagcctgcctaatgcgcctgtcagtccgggcgctgcgctgcgttcggcccgagctgtttg

SEQ ID NO: 47592 - DNA, 655 bp, Homo sapiens
  chr10:102989583-102990238
  hyper
gcccgggtgggccccgctgccacccagagtggactttgcggagctgagatcaagagcccagcgcctctacctctgaccctcttgcccctcaccccactgcctgggcgacgcgcctggggagagggaatctgaagccctcctgcgctggcccgcaggaggtcagagccggctgcgcagccttgggtgggcgacgcgggaagggggtggaggaccccaggggttgggggagggggctagtcggagagctcagccttctccacgcggagaggcggaggagggaattgttggcggctctggacgcctctccccggcctgattccgaagcggccgccctacctcctccggcaatcttgctcactttcctccggcagccgctccccaggctggctggggccaccaacggcctgatgatgggcgtctgaagagtagccaggccaggtgccggggctaacggggccggctccgtgcctccctgctgcgctccgcccgggccccggccggggccccgctgccggccccgcctagcccagcgcccggcttgagtgcatggccaggccgactccagctgttccggatgcggggcgggggcccggcgggagccaggccgcggctggggctttgctctcaggaactcgcagggaggccaggcttccag

SEQ ID NO: 47593 - DNA, 508 bp, Homo sapiens
  chr10:102995972-102996480
  hyper
gtctgaccaaaaaccgttaatggtagtcagctccctccctttcacagaggtctcactactgtcggggggcgccgggcgcaggccgggcatggggcctgagcttaggccaggtggaaaggtggaaggacctagtggggacagacgaagagaccgaggagccgcccgcccggctaaatggacacaggaaaggcctgagtcaggcttctcataataaataaactgcacgtgaataattcagcagtcgcgcgggggccggttgcatcagcgccgccgccgccgcgcggcgcccaattccccgcggaggggagtagccaattaaggcacttgaaaagggagtcgggtggaagatcccccgcccaccagtatcctggatttacccaggtcgagttcagagagcctccccggtcccaaccccctcgggccccatgggtcagggggccgcctgctgggaagtgctacctcagctaagccgctcaggtgtcccgagactccgggcaagggaagacag

SEQ ID NO: 47594 - DNA, 42 bp, Homo sapiens
  chr10:102996784-102996826
  hyper
tcccctgtctccccgcggccccctaggtacactccgtaactt

SEQ ID NO: 47595 - DNA, 328 bp, Homo sapiens
  chr10:102996899-102997227
  hyper
cgatcctgagggattgcattcatcccatctcacacccaccaacgctcaatccctccagttcctccccagccccttcacttccattaattaggtcgactcccttccttcgccgctccctcctgtccccactcagcctccctacacctatgcggcgagcctcgggccaagacctccgccctggctccgccagtcctgcgggggccggcatgcaccagacctcaaaagggatcttcacgggaattccgcatagccagatcccaagcctccagggaggccaccagccctcccccatcttcttcttcctcctccgtctcctttcctcttccct

SEQ ID NO: 47596 - DNA, 303 bp, Homo sapiens
  chr10:102997281-102997584
  hyper
cgccacagccctgtcccctagggagaggcctggactaactttgccgtcctcgtggccttagcccggactgtgagtctcgagcggcttccgagaggcagctcgggtgtcttcgcagagacagatgaggtgggctggcgattccctagcctcagatggctctgccaccagccagctctgtgatcctgggtaagtctttcaacctctctgagtcttgacgttggtaaaaggcaggagatttagagaaggtgttgggagactaaatcttttcattcgtttgagaaagggagtcgcctgtgttgggac

SEQ ID NO: 47597 - DNA, 30 bp, Homo sapiens
  chr10:102998372-102998402
  hyper
ggctcccggtgaccccgtccccagtgccag

SEQ ID NO: 47598 - DNA, 123 bp, Homo sapiens
  chr10:102998647-102998770
  hyper
tggactgagggcgccgctgccacagcgcctgctgccggcgggtcgcgggaagcgtaggccctggccgccgcgctccccgcgcgggtccaacgccctgggtgcccttctcgcctgcgccttgaa

SEQ ID NO: 47599 - DNA, 251 bp, Homo sapiens
  chr10:103043976-103044227
  hyper
cctcattaccctggcggagccggctgagagccgataaagccgagggggagaagggccgacatcagggtaatgggggagcagggccattgaggagctggagccgagccggggaccgctccgcgcgcagctggagcccggcgagagggccgcggaaggggggtgcgaaccggggccggaccccggggaggagccgggaggcgagcggcgaggggcactgcgcggctgggtctgccccggggtttcgcactgcg

SEQ ID NO: 47600 - DNA, 145 bp, Homo sapiens
  chr10:103044300-103044445
  hyper
cgtgcctgcctcgcctccagcccggggtaaggagatccacggaggcctctgcgcctaaactcaggtggccagacagagttggggcgggaggcgggtatacggaaaggacacccttcccctctatgggccccgcccgctgtgcaag

SEQ ID NO: 47601 - DNA, 30 bp, Homo sapiens
  chr10:103051306-103051336
  hyper
tttgggcgcttccccggggctctagggtcc

SEQ ID NO: 47602 - DNA, 334 bp, Homo sapiens
  chr10:103052305-103052639
  hyper
ggggctggaaatcattcagctcggcggcgcgccccagaaccaccccctacccccgctccggcccgcggccgcgcccgcgcccgccgcgcacacgcacgcgcgcacacggaaggcaggcgccgggtatataaatatctccagctctccccatagccgggcagatttattccgctgccaagcctgcagaaaattgacttgttcatggaggcggctattgacacatcaccggggggagggttaggggagaaagcagtggagccggcgcccctccattatacgttaatgtaatcagcagtgtgcgaaatgactgcgcggaaaatagcatcactgacat

SEQ ID NO: 47603 - DNA, 30 bp, Homo sapiens
  chr10:103113509-103113539
  hyper
aatgccaggcaagccgctactggcgtcgct

SEQ ID NO: 47604 - DNA, 30 bp, Homo sapiens
  chr10:103329434-103329464
  hyper
agcccgggaggaggcgcagacggcctcagc

SEQ ID NO: 47605 - DNA, 280 bp, Homo sapiens
  chr10:103347718-103347998
  hyper
tgtggggagccctccgggaatggaggagtctcgcagctgcgggtgaagtcccgggcaggtgcggtgtactcgccgtgtacgcagctggcgcaggccagggaatcccagctcggggctagaagaaagctggagtgcccgaccccggccccaagagtctctccaacccccagagtcggtccccgggtggggtcgactactggccaagctagtcacccgggggtgggcaggaatagaccacttaccagcagagccaatgagagcggacgaaggggggaaggag

SEQ ID NO: 47606 - DNA, 203 bp, Homo sapiens; identical to SEQ ID NO: 7591
  chr10:103348787-103348990
  hyper

SEQ ID NO: 47607 - DNA, 48 bp, Homo sapiens
  chr10:103454952-103455000
  hyper
cacatggggcggcgcgggccgagccctgggcacgcccctcacacctgc

SEQ ID NO: 47608 - DNA, 30 bp, Homo sapiens
  chr10:103535412-103535442
  hyper
cagtcccggtgcccccgaccggcgctgccc

SEQ ID NO: 47609 - DNA, 415 bp, Homo sapiens
  chr10:103535841-103536256
  hyper
cgccgctgccggagccggtggccgctggctgctcgggagccggagcgggcgggagggtcacgggctggcggggtgggtggggaggtgggagggcggggaggggtgggggcggggggcgccgcaccgggcgcgaggggggagcgcggggcgggcggcgggagcccgcagcccccggctgggaactggggcctggatgcagcccggggcgggggcggggcggccggggaggggcggccgacgggttcgggattgagggtctgggctaggggaggggtctggggacccgcgggaggggcgggggcggccggtctgggcgcctccccctatccccggcctgtcccctcgcgcgctccccggtcccggacgcgcggggatgggggcgcctagggctgcaaactctgcgggccgggagacc

SEQ ID NO: 47610 - DNA, 113 bp, Homo sapiens
  chr10:103536299-103536412
  hyper
cgggtctgggtctccgcctccgggcccagccgcttccgccgccggctacgcagtggtctccgagccacctactgtgtgtcccgccgggcccctgggagcggccgctaaccatg

SEQ ID NO: 47611 - DNA, 30 bp, Homo sapiens
  chr10:103539504-103539534
  hyper
ctcagccagtctcccgctcctcctgccaag

SEQ ID NO: 47612 - DNA, 30 bp, Homo sapiens
  chr10:103539938-103539968
  hyper
ggatcggagaaaggcgcctgcgacccagat

SEQ ID NO: 47613 - DNA, 141 bp, Homo sapiens; identical to SEQ ID NO: 7594
  chr10:103543155-103543296
  hyper

SEQ ID NO: 47614 - DNA, 32 bp, Homo sapiens
  chr10:103575732-103575764
  hyper
aaaaaaaaaaaaaaagccaggcgcggtagttc

SEQ ID NO: 47615 - DNA, 32 bp, Homo sapiens; identical to SEQ ID NO: 7595
  chr10:103576003-103576035
  hyper

SEQ ID NO: 47616 - DNA, 30 bp, Homo sapiens
  chr10:103577305-103577335
  hyper
aggctcttaaccaccgcctccttaggaggt

SEQ ID NO: 47617 - DNA, 30 bp, Homo sapiens; identical to SEQ ID NO: 7596
  chr10:103601064-103601094
  hyper

SEQ ID NO: 47618 - DNA, 30 bp, Homo sapiens
  chr10:103816074-103816104
  hyper
ctcccgaaaggcatcgcgagaaataaattc

SEQ ID NO: 47619 - DNA, 13 bp, Homo sapiens
  chr10:103825087-103825100
  hyper
gtcgacgctcggc

SEQ ID NO: 47620 - DNA, 30 bp, Homo sapiens
  chr10:103825762-103825792
  hyper
ctgggccgcacacacgtcctgctgcaccac

SEQ ID NO: 47621 - DNA, 30 bp, Homo sapiens; identical to SEQ ID NO: 7597
  chr10:103879812-103879842
  hyper

SEQ ID NO: 47622 - DNA, 30 bp, Homo sapiens
  chr10:103911866-103911896
  hyper
gtcccgagttttcccgccacgccgagggcg

SEQ ID NO: 47623 - DNA, 200 bp, Homo sapiens
  chr10:103912111-103912311
  hyper
ttgggttcctgagtcgtgctgcgtcgacaacggtagtgacgcgtattgcctggaggatggcggacgccggcattcgccgcgtggttcccagcgacctgtatcccctcgtgctcggcttcctgcgcgataaccaactctcagaggtggccaataagttcgccaaagcgacaggagctgtgagttccgggcttggggcgggg

SEQ ID NO: 47624 - DNA, 897 bp, Homo sapiens
  chr10:104000942-104001839
  hyper
ccaggtctgcagtccgccctcccattctcgacctgttcccaaggcaccggagttcagctgccccaggtctcgttttagggattccaaggtccagcaatagctcctcggccccatgagcccctgtccttagaatggtcaaacactcacagtgcgtcctgcaacaggcagactcccagtagcggcggctgcggcggcgatctagagggcaggcaggggccaggggccgggcacccggccggagtgggggccgcccccctgctcccgggccgcctctccgctcgggcgctcctggactctcggagggagtgagcctcaccgcgtactgccacccccagccggcgcccattcactttatggcagaccagggcgcccccagcccgccgcggcgagccgcgcgcgtcaggccccgcccctttccagctgccctgctggggctccgccctttccagctgtggatctccaggccccgcctttgagggaggggtctggccggcgagacgccaagaaccccgccctctggccaatcagaagcgctcttcagcaactcggccgcgcccctccccacgtggcagagaccgcgctccggctaggacgcttaggcagagccaagtgggcgagagtagagtggtcccggtagccacgggtaaaagggatcggctggcagcgaagtgggttgggccgctaccccgaggaaagtggatcggcgccaggtgggaaggcgcacggggccgccgggtctcagcgctcagacttctctgccactcaagtttcgccgattttctccacttgtcgctgtccgtctctcctcccttttgtctctgttccaatcctcccacgtctcgcctttctttcctcttctttctcctcagccgcttcgctcctgctgtttaccattct

SEQ ID NO: 47625 - DNA, 32 bp, Homo sapiens
  chr10:104005225-104005257
  hyper
gctatgattggctgcgcgcggcagggctcgcg

SEQ ID NO: 47626 - DNA, 30 bp, Homo sapiens; identical to SEQ ID NO: 7599
  chr10:104155270-104155300
  hyper

SEQ ID NO: 47627 - DNA, 61 bp, Homo sapiens; identical to SEQ ID NO: 7600
  chr10:104170201-104170262
  hyper

SEQ ID NO: 47628 - DNA, 393 bp, Homo sapiens
  chr10:104170407-104170800
  hyper
cgcatgtgcgcatgttccgggagagcctgcgcgtggggcctggggagggggcggtccccaggctgagtcacgagagcccgggcttccgtggcaggagccgggggtcggcaagccccagccctgccctccctccgactctggactccgtcgccgactgggtcctccatccttcccctccagcgacttctaccctgccccgccccccaccttgagcagctccctagggaagtcgccgccatcattgaggccctccaggttcccgatgaagtccccgcaggtcatgcgcttcccgatgttctaaggaagggaacggaggcctgtgagtttggagggcccttggcctcccaggtcctgcatgtctggccaggggtttgttttccggctcctgcccgc

SEQ ID NO: 47629 - DNA, 30 bp, Homo sapiens; identical to SEQ ID NO: 7602
  chr10:104178934-104178964
  hyper

SEQ ID NO: 47630 - DNA, 293 bp, Homo sapiens
  chr10:104181704-104181997
  hyper
ctgcgggcaactgagtcgccgggcgcttggggctttggccgagggctgcccacgcctgcagcgcctgtcgctcgcgcactgtgactgggtggacgggctggcgctgcgcggcctcgctgatcgctgcccggccctggaggagctggatctcaccgcctgccgccagctcaaggacgaggccatcgtgtacctggcgcagaggcgcggcgctggtctccgcagcctctctctggccgtcaacgccaacgtgggggacgccgcggttcaagagttggctcggaactgcccagaac

SEQ ID NO: 47631 - DNA, 30 bp, Homo sapiens
  chr10:104192138-104192168
  hyper
gatacaggccacggcgagaatcagagatgg

SEQ ID NO: 47632 - DNA, 30 bp, Homo sapiens; identical to SEQ ID NO: 7603
  chr10:104195356-104195386
  hyper

SEQ ID NO: 47633 - DNA, 43 bp, Homo sapiens
  chr10:104220985-104221028
  hyper
cttttaattttggtcgctaagggcaagcgcccgtgacaaacat

SEQ ID NO: 47634 - DNA, 30 bp, Homo sapiens
  chr10:104262555-104262585
  hyper
tgcgcctgggttagcgatctagcttgcttt

SEQ ID NO: 47635 - DNA, 30 bp, Homo sapiens
  chr10:104263673-104263703
  hyper
gtgcgccggcgccccgccccccttagcgcc

SEQ ID NO: 47636 - DNA, 30 bp, Homo sapiens; identical to SEQ ID NO: 7605
  chr10:104264834-104264864
  hyper

SEQ ID NO: 47637 - DNA, 30 bp, Homo sapiens
  chr10:104403692-104403722
  hyper
tgactgcccctgcgcgcacgcagcgccccg

SEQ ID NO: 47638 - DNA, 31 bp, Homo sapiens; identical to SEQ ID NO: 7606
  chr10:104409284-104409315
  hyper

SEQ ID NO: 47639 - DNA, 30 bp, Homo sapiens
  chr10:104474415-104474445
  hyper
ggtggcatttgtcccgggaccaggtaaggg

SEQ ID NO: 47640 - DNA, 30 bp, Homo sapiens
  chr10:104595232-104595262
  hyper
ctggaggagaaggcaggtacctggcatgct

SEQ ID NO: 47641 - DNA, 30 bp, Homo sapiens
  chr10:104678000-104678030
  hyper
tgtgattggctggtcggcctgcctctcgcg

SEQ ID NO: 47642 - DNA, 31 bp, Homo sapiens; identical to SEQ ID NO: 7607
  chr10:104951847-104951878
  hyper

SEQ ID NO: 47643 - DNA, 208 bp, Homo sapiens
  chr10:105036450-105036658
  hyper
gtaactggaaaaacacgacctcgccctcgggaaggctttctgtgcgcctcacctcaggatgagggtgggtgtaggggacacctcccagaaacccctaacctcccagtcggttaaagaagaggggatagggtcaagggatgcgacagagctgtgtggtttccggatgggaaacctcagtcgtttaggcacccctccgctcgagtcactt

SEQ ID NO: 47644 - DNA, 182 bp, Homo sapiens; identical to SEQ ID NO: 7609
  chr10:105036700-105036882
  hyper

SEQ ID NO: 47645 - DNA, 998 bp, Homo sapiens; identical to SEQ ID NO: 7610
  chr10:105036893-105037891
  hyper

SEQ ID NO: 47646 - DNA, 149 bp, Homo sapiens; identical to SEQ ID NO: 7611
  chr10:105037955-105038104
  hyper

SEQ ID NO: 47647 - DNA, 30 bp, Homo sapiens
  chr10:105041653-105041683
  hyper
cagctggagctgggcgtgccgctctccggt

SEQ ID NO: 47648 - DNA, 30 bp, Homo sapiens
  chr10:105127617-105127647
  hyper
ttctccttccttttcgctcctcctactgcc

SEQ ID NO: 47649 - DNA, 121 bp, Homo sapiens
  chr10:105156272-105156393
  hyper
gattcggcctaatgcgacgattggctatggctccaaatcccgcccttccgattcctgtctctaggtcacctccgcaacacagcaacggaagtagggtgttgagcccgcccacacttccgga

SEQ ID NO: 47650 - DNA, 568 bp, Homo sapiens
  chr10:105253259-105253827
  hyper
ggagctcggcgttctcgcggccctgctccccttgttttcaagtgcaagttccatgtttccgtgctgggaataaggccagccccgggtgccaccatactcgcctgatgtcttaccccgacccgcgccgccgagagcttgcggctacgggaacgcggcgcgccccggggccacatctggcctagcgggcgcgcgcgtgtcactaagacgctcattcaccggcgcagctgtcaccataacaaccggagcgagggaatcctggagactgccggggcggggggcgggggcggcggtcgcaggagggacccggcgcgggcgggaccgcggcggtcgggggacaccagctgcgtcggagcgcccagaacgccccgcgctccgccgagccccgctccacgcagacccgcgggcgggagggagccacgcacatcgccgccgcggccgtctccgcggggcggtaaccgagcctgcctcggagccgccgaacgcccacgccagcgaccctgactctatggccccgggggagcgcgccggagccgccgcgccgcccacccccagccggaaccctagcgtc

SEQ ID NO: 47651 - DNA, 240 bp, Homo sapiens
  chr10:105253853-105254093
  hyper
cgtccccggccccggcccagggccctgcttgtggcccccgctcccgccacggggcatgggaggcaggtagcccagcctgcgccaggacacccgtggcgggcggaacccgccaaggaccgcgaagtccagagaaaggaagctgaggagctgcccgcccgcccccggctgcagccccagcagggccctcccccggtggcgcgcacccgcgcgcgcacactcgcacaccgcacctcagcgcct

SEQ ID NO: 47652 - DNA, 31 bp, Homo sapiens
  chr10:105315201-105315232
  hyper
caccccagcccgagaccgcctggggaggccg

SEQ ID NO: 47653 - DNA, 370 bp, Homo sapiens
  chr10:105615412-105615782
  hyper
cctggggaggggccggcggctccccttcgccgctctccggctcgggctccggggggatcggcgctggcggaggctgtgggcgcaggaggcggaggcagggcctggcaggcagggaagggaagggagggaggggagagaggggaagcgcgcggggaggggctccgggccgggggaggggctcggggcgacggggagggggctgcagcccggccccagtggcaggggcgggccgacgagcccccacccgagcccagcgcgcagccagcggcctggcgcagcaccgggctagttcgctaggcacaaaaactcagggtggcttcggggggagagggagcggggaaagtgagccccgcgcgcccccatcctggct

SEQ ID NO: 47654 - DNA, 30 bp, Homo sapiens
  chr10:105694285-105694315
  hyper
gataactgggttacgcgtctaagtcatcac

SEQ ID NO: 47655 - DNA, 30 bp, Homo sapiens; identical to SEQ ID NO: 7613
  chr10:105726673-105726703
  hyper

SEQ ID NO: 47656 - DNA, 30 bp, Homo sapiens
  chr10:105727757-105727787
  hyper
tgactgttacggttcgatgcaactttactt

SEQ ID NO: 47657 - DNA, 377 bp, Homo sapiens
  chr10:105991884-105992261
  hyper
tggggcaggaggttccgcgagacccagatcggtcgcggggccgtgaacaccgcacctcacggacaaggacgcgccgccggcggagtgggggccttcgtcgcgctcccggccttgcgccatgggcagtgttttcctcaggcgggagcaggcagcgcacgcagcaccccagggcgggtcggttacctttccgccgccgcggggctgcgggccgcgacgccgctgctgtgtacacccgtatcccggagaccgtaagccccgcgcccattggctctgcgctttggcccgctcccttctgagccgagcagattggtggaaggtctgccgctctcggccaatgggtgagcggcaagccaagcgaggggcgggccccttgctgt

SEQ ID NO: 47658 - DNA, 30 bp, Homo sapiens
  chr10:106014281-106014311
  hyper
acaggctctgaagtcgtgaagccttgggac

SEQ ID NO: 47659 - DNA, 30 bp, Homo sapiens
  chr10:106014600-106014630
  hyper
ggagggaaggagggcgggaaggacgcgcca

SEQ ID NO: 47660 - DNA, 736 bp, Homo sapiens
  chr10:106097222-106097958
  hyper
ttttaccttcctggtcggtggctttttttttctttttctttttctttttttaagagaaagcgttttggatggggagtcccgccccgggagtcttcaccaggcggccagaatggcaaagtcacagggatggggttgagggtggggttaggggtgaaggggcagagagttatttgcagcccaagagcaagtctgcacagcgtgaggtctggcccactaatagtcccgaaagaggaagcggcggggattttatccggcctgaagcagccccataacttcactaccatgaaccgagaaaaaaaaacttcacgcctattcctcccttacaggaagggagggaaggggaaggggaaaagggggcagcaaatgagcagggcgaaccggcttttctttcttcggtagcgctctgctcagatgtgagaagtaacgggtcacctggccactaggaacaaaaatgtggtcccgctctgggctccgaggctgcgcgcgcctcgaggaggagctgcccgcagccctggctggagcgagcgcccgggacgcatcccccgacgcggcgggaacaggatgcgggaccgcgaggagacaatacgcccgcctgggcacgcgcgctttaagggaagggggtctccaaagtcagcccccacccgggaggagcaggcgcccgcgctccccacaccctcctgcgccccctctgtcggcagccatctccgacacagctcctccgagctcgcgctctcca

SEQ ID NO: 47661 - DNA, 551 bp, Homo sapiens
  chr10:106098025-106098576
  hyper
cggtccccgccgcgggaggacggctccagcacaggctttgcgcgcaggtcgagggccgaggcgccgctgcttgcaggcggctgcggtggagcttgcggcccggcacttagaggggcgcgggcggcgatgcccccgctggctcccaccttctggcctgcagcggccggctctactgaacttcagagttactcatttcctggatgtcacaaaaactttttcctccttataagaacaaaacacccgcctctacccgcggccccggaagctccttaaggaggaccgtgtgggtttcggtggttgggcccaggatccgccgggaagaccttcccagtgagcccccagaaacttccccggcacggcagaactggagagtgactgggagagacggaatcaggccagtggagtaaactggagcgagtggacaggggcgcggggaggacgcccttaaaagtcgtcctaagccgcggagcggaaggggttaagtccttaccagtcggggagagttttctgcggcgcgttttacaagtggcggaattcctggggccacctat

SEQ ID NO: 47662 - DNA, 20 bp, Homo sapiens
  chr10:106113425-106113445
  hyper
gaaccctgcccaggtgccag

SEQ ID NO: 47663 - DNA, 336 bp, Homo sapiens
  chr10:106113480-106113816
  hyper
cgcccctagagggcgtgtccgttgccaggcgacgggccgacgcgccgagcgcgggtttccgctcggggcgggcgatagagacagcgcgtcgcgcctttagcttctttcccagactccggcccagctcctgcgatctccacagcagcctctgaggccgcccccagagagcatcaggatggctgaggtcaggagtcagcgcccctctgtcgcctttcccttgacccctccccattgtccctctcctactgacgattgtcacaaacggtgattccaatatttccccccatcaacatcttattcccctgcaccctcactcactcccgcgcctttctccgt

SEQ ID NO: 47664 - DNA, 123 bp, Homo sapiens
  chr10:106398564-106398687
  hyper
ggccgcgggaagctgcggggactggatggtgcacctccccagtgcgcataggacttgggagaccacactcctccgggctgtgtgagcctcgggtccgcccagatctcttatactgtggcacct

SEQ ID NO: 47665 - DNA, 464 bp, Homo sapiens
  chr10:106398825-106399289
  hyper
cgcgcccacctgggcctgcggcgctggaacttttcttaggaatacccgctactccctgtctttggaaacccacagatgccaggacccgcaccattctgggccggacgttgtcgctggcttggttctttggcccagcctcccccgctgctaattgccattttggcaccgggtggaaaggcaagttcaagagggcgggggctctcgggaatcgctggatgtcttcttccttggccagcttagattctcagtcgcctcttctgcctcctccatccctcttggctcttacctggcgccctttcgcctcctcttctatctccctcttccttttgcaccattctctcgccccttttctccttcatcttgtctttcctctctccccttttccctctattttctccttcattccttcctctcacctttctttcctctccgcgcattcccctccctctcgctccactttaacc

SEQ ID NO: 47666 - DNA, 1426 bp, Homo sapiens
  chr10:106399491-106400917
  hyper
ctgtaaaccgcagctcgaggtcgtctgtgggtttagctcatttcccttcagcccacctgaagtctccttcttcctacggtcacgaaggatctcagctgcaccaagcgcgcaggctacactcctgcagtagcggattggggaccagataagcccacgcggctcccgcctgagtaccctcttaactggcggccgacactttgaaacaattgagtccgttcagaaacggactggggagagtgagggcacgacctcaaaatcctaggcagcaaaatgaggtctggatcctccctggaagaacagacatctcgactactctctcgccccacctctggccgggaggtcggggcaaggagaatccctcaaccgagaagatctggcaagtccccgatcccaccggggccttccgcctcttttccctcatcccctaggaggctttatcaggttctaaccgcttgtagtgggggccgtgggtgctcggggcgccaagaggagggggctgccgagagcggcctgcctagttctcagcattgcctctttgaccactcgcaggctcctggaaatgcaaacacagcccgtgcgtgatccgcacgcgaccaaaagccgagcgcacacctcccgcccccgccccacttgccatcgctcacactaacgtgcacacatgctcgtgcaaacgcgcacgcacggaaccgcgcgccccctcacacccagccgcgctcccggcccggctcagccaggtgcccccacgcggcagcgcccggtctgcccgccggccccctgcgaacccctcgcctcacgcccgcctgcctgcgcgcacgcacgcgcacgcacgcattccccacgcccccgcgcgggggcgcaggccttgggtggcggggtttggccgggagccggccgggccagggagcggcgagcagagtccagggtgcatcccgcgcttggcttccgtgcgcagcctccccgcgcggaggcacctggctccctctcggctctagaacgcgaacagttggcgttgagcacacaactcctcctccttctcccccgagacccctgtaccctccccgcgcgccatctcccgcccctcataacaggcccgaagagtaaacccccaaacgcgtccagaagcggctcccaactcttcgccgggagcacgttggaggctggatttcggagagactcgggattggggtctattgccggcccctcctggatccggcttgattttcatattttaagaagattttcttattacctttgattactcctttttaccaaatttctggaggagctcagtggggaggattggggggaatctgattttaagaaagaaagcaccgaaggggcaattattaattttcctcgggtttggaatcaccctctggacaagagaacgggcgagcgggagctaggagggaagagtggagaggac

SEQ ID NO: 47667 - DNA, 110 bp, Homo sapiens; identical to SEQ ID NO: 7618
  chr10:106401322-106401432
  hyper

SEQ ID NO: 47668 - DNA, 680 bp, Homo sapiens; identical to SEQ ID NO: 7619
  chr10:106401510-106402190
  hyper

SEQ ID NO: 47669 - DNA, 561 bp, Homo sapiens; identical to SEQ ID NO: 7620
  chr10:106402271-106402832
  hyper

SEQ ID NO: 47670 - DNA, 30 bp, Homo sapiens
  chr10:106440763-106440793
  hyper
aggaccccaccttccgcagagctccgcctc

SEQ ID NO: 47671 - DNA, 30 bp, Homo sapiens
  chr10:106441021-106441051
  hyper
gagcgcagcagtgccgcaggcttcctggca

SEQ ID NO: 47672 - DNA, 131 bp, Homo sapiens; identical to SEQ ID NO: 7621
  chr10:108923766-108923897
  hyper

SEQ ID NO: 47673 - DNA, 114 bp, Homo sapiens; identical to SEQ ID NO: 7622
  chr10:108923945-108924059
  hyper

SEQ ID NO: 47674 - DNA, 55 bp, Homo sapiens; identical to SEQ ID NO: 7623
  chr10:108924345-108924400
  hyper

SEQ ID NO: 47675 - DNA, 208 bp, Homo sapiens
  chr10:108924769-108924977
  hyper
ggtcgaccccgggctcccggagcagtcgatgtgtcgggagcttcctattcctgctttattgtttctatgagtctatgttgctgtttccttttttctccgtctttctggtcttttctagttgaggagatagggatgggtgggcttctgctccttccctctcttatgcttcctgagttggcatcttgaccttacccgcagcagagcctgt

SEQ ID NO: 47676 - DNA, 32 bp, Homo sapiens; identical to SEQ ID NO: 7624
  chr10:109674175-109674207
  hyper

SEQ ID NO: 47677 - DNA, 117 bp, Homo sapiens; identical to SEQ ID NO: 7625
  chr10:109674377-109674494
  hyper

SEQ ID NO: 47678 - DNA, 256 bp, Homo sapiens
  chr10:109674853-109675109
  hyper
cggcagccgccagcagagcccggtgcgggaccgggagctgccggggcctcagctccgctctccccacagctctccgtggctgcaggttgaggtcgaactgcaagcgccacggaccctgcctgctgtttactgcgttttcactggagactccagcaaatgtcctggagaggagagggattcctgctctgtccattttagtctctacattggcaccttggtgtaaacccacagcagaggctgcgtgtcctggctgaga

SEQ ID NO: 47679 - DNA, 289 bp, Homo sapiens
  chr10:110671594-110671883
  hyper
ccctgcagatggtccgcttcagctactccgttaggaggcgggcagttttgtctgtgtcttactccttccgtccagggcattccgcagactcctgctcccttcttcctctccacttgctctcaatagagggcgcgctgggcgaagtaggggcgtggcaggagccccgctccgcggatccaggttgaaattcctccctcctggaatccgaccgtgagcatttctgagcggtggtgaggaggaggccaccaagacacctccctcccgctgtgcaaaggaacgcaggagcccg

SEQ ID NO: 47680 - DNA, 417 bp, Homo sapiens
  chr10:110671929-110672346
  hyper
cgccgctgtctgccaacctttcccagcttttcccacgattggagccaagagaggtccccggggatctcagttgggcaattgtaagggaaggagctcaggacactgacttcaagatgaagggggaggtcagcgaagacagttctagggtgggcggcggccgctgacagagcaggagccacagccaccggggcttggagataggagcaagtcgcaggcggagggggctgcgggctggctgcctgggcagcacaggacttgagggagctgcggggactcctggagtctcatcaggccttccagtcgctgtggggaccccggctgcgcgcggatcgcctgcgccactgtccccactgacccgcccgccgggtttgccaattaccagcgccacctggtcccgcacccaaccccacattttct

SEQ ID NO: 47681 - DNA, 168 bp, Homo sapiens; identical to SEQ ID NO: 7629
  chr10:111216404-111216572
  hyper

SEQ ID NO: 47682 - DNA, 157 bp, Homo sapiens; identical to SEQ ID NO: 7630
  chr10:111216610-111216767
  hyper

SEQ ID NO: 47683 - DNA, 22 bp, Homo sapiens
  chr10:111217161-111217183
  hyper
cgcagcttatgccctggcttgg

SEQ ID NO: 47684 - DNA, 40 bp, Homo sapiens; identical to SEQ ID NO: 7632
  chr10:111643944-111643984
  hyper

SEQ ID NO: 47685 - DNA, 767 bp, Homo sapiens
  chr10:111767115-111767882
  hyper
aaagtccaggccccacggggggcgtgcggaggttgaacctttgcagtggcctcctacagccccagcagccagcgtgggcggccgaggctgactcaaagcggcggctcagcctcgggagtaggagtagggggctcgctcatttagggcgggagacatttccgaggcgcccctcctccccttcgcggtcgggtttctatcggggtcgtttccccctctggccctccggggacgccgcggattcgagctgcacagtcagaagaggacgttgaaaaggcgccaggcagccgccccgaaccaggccctcccggctgccgggcctgcaggcccccaccgctgcggcttcacggacttagagcttgagggcgcggagggggctgcgggggcgggaccaggactcccgaggggcgctcggggcggggccagagagagctcggggctgccagaggcgaggtcttgaggaggcggggccgggaggcttcggagcccaagaggcggggccagaggcgtagggggctgcgaggggcggaccttgggggcgtgaccggggggggcgcttggggacctaggggcggggcgttagggggcgggaccaagggacgctcgaggggcgctcggctagtcccgccagagcgcgagccgccagcccgtaacggtcgccagtgtgaggggcgggagggaaagaagaggggtttaaattagattttttaaaacacagagcaagcgccagaggcgtcggcatcccaggtgtcgccgcttcctgctgcaca

SEQ ID NO: 47686 - DNA, 30 bp, Homo sapiens; identical to SEQ ID NO: 7634
  chr10:111768408-111768438
  hyper

SEQ ID NO: 47687 - DNA, 49 bp, Homo sapiens; identical to SEQ ID NO: 7635
  chr10:111968982-111969031
  hyper

SEQ ID NO: 47688 - DNA, 47 bp, Homo sapiens; identical to SEQ ID NO: 7636
  chr10:111969324-111969371
  hyper

SEQ ID NO: 47689 - DNA, 30 bp, Homo sapiens
  chr10:111970013-111970043
  hyper
aatctgccagcccccgagaggggtttggaa

SEQ ID NO: 47690 - DNA, 1 bp, Homo sapiens
  chr10:111971053-111971054
  hyper
c

SEQ ID NO: 47691 - DNA, 250 bp, Homo sapiens
  chr10:112064509-112064759
  hyper
tgtggggctgggggcggggcggcgggaaggggtcggggcaaatgagcccagtggtagtggcggtggcagcagcagcagtagcagtagcaggaaaatcaccgcgacgacagcaaggcgacccggtctgaaaaggaagaactcggtcggcggcgagggggaagggaggaacgccgggcactggaaggaggaaaagacagagacggtgaagtctcgcgagaaatacaaactctcgcgcgaggtcgctcgactc

SEQ ID NO: 47692 - DNA, 30 bp, Homo sapiens; identical to SEQ ID NO: 7637
  chr10:112065001-112065031
  hyper

SEQ ID NO: 47693 - DNA, 14 bp, Homo sapiens
  chr10:112257148-112257162
  hyper
ctataccccacccc

SEQ ID NO: 47694 - DNA, 1389 bp, Homo sapiens
  chr10:112257205-112258594
  hyper
cggtagcgacgggaatccgttccggactcctctggggccctggccggctccctcggccctgctcagcgcggcgcgggcgggttctcagcccacgtccgtgaagctgaaggccggatcgtgcggcgccgccccgccccccacggcgcttcctcctcggtccgcaccgcgagggtcaccgcggccccggagcgcctgggacactcgaccggcagccgcgggtgatgcgcgagtgagtccctcagcgaagcgcggaagagagaacgaagaggcgccttccacttcctctcgctctaacgccggcacccgccccgcgcgtccctcgcccccgctgccccgccccctgcagggcgtggccacggcccgaggggcggggaaacacccatatttggccttatatgggcagccgcgtcacggacggcactcattcacataaaacgctgcgcggccggcggaatccccggcttctagggcggcgagcggccgggctggctatcgagcgagcggggcgggaacgcggagttgcgccgccgctcgggcgccgggctccgtcgcggccgcagccccgcgggtcgccctcccgtgcctcgcccgcggacaccctggccgtggacaccctggccgtgggcacccgcggggcgcgcggcgcggggccgctggccggcggcggcggcggcatgaaggtcacgtcgctcgacgggcgccagctgcgcaagatgctccgcaaggaggcggcggcgcgctgcgtggtgctcgactgccggccctatctggccttcgctgcctcgaacgtgcgcggctcgctcaacgtcaacctcaactcggtggtgctgcggcgggcccggggcggcgcggtgtcggcgcgctacgtgctgcccgacgaggcggcgcgcgcgcggctcctgcaggagggcggcggcggcgtcgcggccgtggtggtgctggaccagggcagccgccactggcagaagctgcgagaggagagcgccgcgcgtgtcgtcctcacctcgctactcgcttgcctacccgccggcccgcgggtctacttcctcaaaggtgagcgctcggggtccctgccacgctcgcccctccggcgcccccgggtcccctccctgcgccggggcgccctcctacaccctgggaccgggagagtcaccacctgcaggagtctgcaccctgtggcttgttgtgcgcttgggagggcactgcaaatgtcagcactcagagctccccctcttccccacccgcgttcctcgaaagcgcccggcagcgggtctgcccggtggtctgggtggagttggttatgctgcgggggctgctgctgtttagcagtttgggggccgtcggctcgtgccgggcacgagccccctttccagacgcgagcttcgccgc

SEQ ID NO: 47695 - DNA, 168 bp, Homo sapiens
  chr10:112327447-112327615
  hyper
attttgtttggctgaggggagcgagcggcgctttgggggaggggtcgcgtaggcgcctcacctgaccctgcggccgtgcggttgctgctccggggcaggtctccttccaggccaggggcccggaatcatgtacataaagcaggtaaggccttcgcgtccctccacccc

SEQ ID NO: 47696 - DNA, 77 bp, Homo sapiens; identical to SEQ ID NO: 7640
  chr10:112328694-112328771
  hyper

SEQ ID NO: 47697 - DNA, 40 bp, Homo sapiens; identical to SEQ ID NO: 7641
  chr10:112333463-112333503
  hyper

SEQ ID NO: 47698 - DNA, 69 bp, Homo sapiens; identical to SEQ ID NO: 7642
  chr10:112335092-112335161
  hyper

SEQ ID NO: 47699 - DNA, 73 bp, Homo sapiens; identical to SEQ ID NO: 7643
  chr10:112337177-112337250
  hyper

SEQ ID NO: 47700 - DNA, 81 bp, Homo sapiens; identical to SEQ ID NO: 7644
  chr10:112337591-112337672
  hyper

SEQ ID NO: 47701 - DNA, 80 bp, Homo sapiens; identical to SEQ ID NO: 7645
  chr10:112338384-112338464
  hyper

SEQ ID NO: 47702 - DNA, 119 bp, Homo sapiens; identical to SEQ ID NO: 7646
  chr10:112340660-112340779
  hyper

SEQ ID NO: 47703 - DNA, 177 bp, Homo sapiens; identical to SEQ ID NO: 7647
  chr10:112341679-112341856
  hyper

SEQ ID NO: 47704 - DNA, 82 bp, Homo sapiens; identical to SEQ ID NO: 7648
  chr10:112342318-112342400
  hyper

SEQ ID NO: 47705 - DNA, 166 bp, Homo sapiens; identical to SEQ ID NO: 7649
  chr10:112343140-112343306
  hyper

SEQ ID NO: 47706 - DNA, 123 bp, Homo sapiens; identical to SEQ ID NO: 7650
  chr10:112343597-112343720
  hyper

SEQ ID NO: 47707 - DNA, 215 bp, Homo sapiens; identical to SEQ ID NO: 7651
  chr10:112343939-112344154
  hyper

SEQ ID NO: 47708 - DNA, 388 bp, Homo sapiens; identical to SEQ ID NO: 7652
  chr10:112349361-112349749
  hyper

SEQ ID NO: 47709 - DNA, 162 bp, Homo sapiens; identical to SEQ ID NO: 7653
  chr10:112350168-112350330
  hyper

SEQ ID NO: 47710 - DNA, 143 bp, Homo sapiens; identical to SEQ ID NO: 7654
  chr10:112350747-112350890
  hyper

SEQ ID NO: 47711 - DNA, 152 bp, Homo sapiens; identical to SEQ ID NO: 7655
  chr10:112352829-112352981
  hyper

SEQ ID NO: 47712 - DNA, 154 bp, Homo sapiens; identical to SEQ ID NO: 7656
  chr10:112356154-112356308
  hyper

SEQ ID NO: 47713 - DNA, 153 bp, Homo sapiens; identical to SEQ ID NO: 7657
  chr10:112357895-112358048
  hyper

SEQ ID NO: 47714 - DNA, 160 bp, Homo sapiens; identical to SEQ ID NO: 7658
  chr10:112359410-112359570
  hyper

SEQ ID NO: 47715 - DNA, 109 bp, Homo sapiens; identical to SEQ ID NO: 7659
  chr10:112360195-112360304
  hyper

SEQ ID NO: 47716 - DNA, 110 bp, Homo sapiens; identical to SEQ ID NO: 7660
  chr10:112360778-112360888
  hyper

SEQ ID NO: 47717 - DNA, 543 bp, Homo sapiens; identical to SEQ ID NO: 7661
  chr10:112361393-112361936
  hyper

SEQ ID NO: 47718 - DNA, 818 bp, Homo sapiens; identical to SEQ ID NO: 7662
  chr10:112362230-112363048
  hyper

SEQ ID NO: 47719 - DNA, 405 bp, Homo sapiens; identical to SEQ ID NO: 7663
  chr10:112363987-112364392
  hyper

SEQ ID NO: 47720 - DNA, 887 bp, Homo sapiens
  chr10:112403083-112403970
  hyper
tgtgtcaggtgcctcgcatattcgcacccacgcgccagggcattaagccgaaccttgcttggtggctctcagccttgaaaggccgcaggatgtccgcgtccacagctgtgaaccggtgagtgcaggtggacgggcgcacgcgggcgccagggtaattaacagggcttcagagggcgtgacggtgaccgtacgttgtcggcgaactctcttttcatcctttacatttccacggagatttggccaataaataacaagaataaaatgtacgcatggttttgtctttgcgctcgtggggtcgtggcggggtcttttaagtgaagagaaaaagaaaccagaaacccacggtggccccaccggctgcttccggggacacctgaaatcagcagctggaactgacaatttggagagccccggggatggtcatctgagacctgggttacaatacaagtctgacctcggggcgagtccaggctttcttcccctcagggtcgggtgcctcaagagccagtggcgctggccgggctccagccgcgagcagatgccaggcccggcacactttgcacgggcgatgcgcgcggacgtcccgggcgcgctcggtccgcccggcttggcaggagctgcgagaggccgcgcgcaccgtccccagggacagccggaggactcagggctcccgggtggagcgagagcgcggcggccgaccgcgggctgcgtgtgtcgccttcctcacgcggtatgctgcgccgtggaacgctgggctacggaccctgagggtgcactgtggcgggtggcgtacgccgcgctccctccccgcttcctgcgcccagggtcggcgggcagagttcctgggtccagcttggcgctgagcagcccccggccgcagagcagct

SEQ ID NO: 47721 - DNA, 30 bp, Homo sapiens
  chr10:112404172-112404202
  hyper
tgagctctctcgccgcgatcccgggcgggt

SEQ ID NO: 47722 - DNA, 632 bp, Homo sapiens; identical to SEQ ID NO: 7665
  chr10:112431814-112432446
  hyper

SEQ ID NO: 47723 - DNA, 30 bp, Homo sapiens; identical to SEQ ID NO: 7666
  chr10:112631243-112631273
  hyper

SEQ ID NO: 47724 - DNA, 30 bp, Homo sapiens; identical to SEQ ID NO: 7667
  chr10:112632666-112632696
  hyper

SEQ ID NO: 47725 - DNA, 30 bp, Homo sapiens
  chr10:112678754-112678784
  hyper
cgtaagtgaccagacgtctcagtaaaataa

SEQ ID NO: 47726 - DNA, 860 bp, Homo sapiens
  chr10:112836468-112837328
  hyper
cacgggtgcccgttgcgttctgctccgtcggcccggagctgcatggccaactcccagcaggggccgctcctcccctaccccccacccccgggctccctctttaagtctctagctcaaggtacccgcctctccaaagggctcgtcccgcctgagggcaacgctccccgaggtccagcgctaggcgcgggcgctagactggcggaggggtggtgcgaggggcgggggagggtcggcttcccacgtgggggctgacgccggctgctcagcaacgcttgcttgatcctggggctataaaacgagtccaccgtgagcgcagcggagcagcagcagctccagctcggtgcagaagcccagcagccggcgtgccgccgcccggccactccagcgccttcttccccgccttgcgctcctgccccaactcgcgctgtcgtcggaccccggcccatccagcagcgctcggcgcccaccaggcggacgcccaggagaacccctgcctccgtcgcggctcctggagagctgatcgttcacctgccccggcccgcctgaggacgggggtgccttcatgcggcccccacactcctcaccccgccgccgccgccgtcccggagctccgcacagtgtgccccagccccagcagggcgcacaactttggaagtctcgcggcgctccgagaggcggcagagtccgcgccccagccccgggccgggccgggccagaaccgcagcgtctgggggaagccagagagtcggtaatcgcttcggggatgtaaggcgacagacataggacccccgagctcgcatcagcacccttcggctgcctcccggggtgggggcgggccccgcacacggtaagacctcttg

SEQ ID NO: 47727 - DNA, 29 bp, Homo sapiens
  chr10:112838325-112838354
  hyper
gcggcggcggcggcccgcagccggccgag

SEQ ID NO: 47728 - DNA, 30 bp, Homo sapiens; identical to SEQ ID NO: 7669
  chr10:113005648-113005678
  hyper

SEQ ID NO: 47729 - DNA, 30 bp, Homo sapiens; identical to SEQ ID NO: 7670
  chr10:113134325-113134355
  hyper

SEQ ID NO: 47730 - DNA, 471 bp, Homo sapiens
  chr10:114135832-114136303
  hyper
gctggcttttgtgtcggcccttaggggctgaggtgaaaggctttgacacggagccagggtagctttggcagcttctcccctcctggtcagaacacttccactttcagttgtgaaaaaaaaaattaaaaccaggaagtgaagtccccgagcacgttagaaagcctgacatggcctgactcgggacagctcagagcagggcagaactggggacactctgggccggccttctgcctgcatggacgctctgaagccaccctgtctctggaggaaccacgagcgagggaagaaggacagggactcgtgtggcaggaagaactcagagccgggaagcccccattcactagaagcactgagagatgcggccccctcgcagggtaaggggaccatcgagggggtgttattcagcaagggggtcttgtgagggtgtgacagaggccaagggggcatcctgacccccgactttctttaagc

SEQ ID NO: 47731 - DNA, 10 bp, Homo sapiens
  chr10:114206783-114206793
  hyper
cgattcccag

SEQ ID NO: 47732 - DNA, 30 bp, Homo sapiens
  chr10:114280686-114280716
  hyper
attttggcagtctcatggtaacctactttc

SEQ ID NO: 47733 - DNA, 30 bp, Homo sapiens
  chr10:114319364-114319394
  hyper
gccatcccgcacagccacgtttccacagtg

SEQ ID NO: 47734 - DNA, 41 bp, Homo sapiens
  chr10:114571158-114571199
  hyper
taaggtgagtgcagaccgggcgcggtggctcacgcctgtaa

SEQ ID NO: 47735 - DNA, 30 bp, Homo sapiens
  chr10:114709611-114709641
  hyper
cctctccccatccccgccccccaagtgggc

SEQ ID NO: 47736 - DNA, 34 bp, Homo sapiens; identical to SEQ ID NO: 7673
  chr10:114709863-114709897
  hyper

SEQ ID NO: 47737 - DNA, 31 bp, Homo sapiens
  chr10:114710140-114710171
  hyper
gcacctcctgtatcttcggcttccccccccc

SEQ ID NO: 47738 - DNA, 56 bp, Homo sapiens
  chr10:114710659-114710715
  hyper
gtcaatgaatcagaaacgaatcaaaacagctcctccgattccgaggtaggaaaagc

SEQ ID NO: 47739 - DNA, 31 bp, Homo sapiens
  chr10:114710919-114710950
  hyper
cgtggcgtttgcccctcgccctccccacctc

SEQ ID NO: 47740 - DNA, 47 bp, Homo sapiens
  chr10:114711333-114711380
  hyper
cccaacggatcgctctcgcccaccgcccgaaccgtaagtgcctccgc

SEQ ID NO: 47741 - DNA, 30 bp, Homo sapiens
  chr10:114711588-114711618
  hyper
tcagtttgctgcctcgtgatgttggggaga

SEQ ID NO: 47742 - DNA, 318 bp, Homo sapiens
  chr10:114712159-114712477
  hyper
ccggcgcactggctgcgggctctcccgggccgcgcagggcagcagggctgagtggggcggggaggcccctgcggcccggattcttggtttgtgtgcagccggaatggactcctccaagcggacttgtgtatttctagggaattttggcgccttgggatgtatggcggggtcggcgctcgccagcttccgtgtaggcccgtcgtgggccccaggggggccagagaccagggtgtgcgggctcaaggaggtgcgggggccgagggaggctggggcgcctctccttcaagggagtgggccgccgatcgccggccacccaac

SEQ ID NO: 47743 - DNA, 30 bp, Homo sapiens
  chr10:114726827-114726857
  hyper
gcaaagggaaaagaaggggaaagcttagac

SEQ ID NO: 47744 - DNA, 30 bp, Homo sapiens
  chr10:114773911-114773941
  hyper
aatgggttagttcccaggtcggcattcagc

SEQ ID NO: 47745 - DNA, 30 bp, Homo sapiens
  chr10:115438901-115438931
  hyper
ctgacacacgggggcgcacaacaaatattt

SEQ ID NO: 47746 - DNA, 30 bp, Homo sapiens
  chr10:115439264-115439294
  hyper
tggaggtgaccacacgagcgccccatcact

SEQ ID NO: 47747 - DNA, 30 bp, Homo sapiens
  chr10:115439869-115439899
  hyper
ggactgagtggccccgacggcctgcgctga

SEQ ID NO: 47748 - DNA, 30 bp, Homo sapiens
  chr10:115613974-115614004
  hyper
taaaaatgtgttcgcgcccgcactttcagc

SEQ ID NO: 47749 - DNA, 30 bp, Homo sapiens
  chr10:115614526-115614556
  hyper
tgaggtgaatgcgccgtttggaaaccacag

SEQ ID NO: 47750 - DNA, 513 bp, Homo sapiens
  chr10:115803527-115804040
  hyper
ctgcaggagcctgacgcgaggccccgggggttggcttggggagtgggagcggggtggggtgggtgctgggtgccggagctgcgggcccggcgcgctcagaaacatgctgaagtcccggcggctcttccagcagcggcagcggctccagcagcagcggcggcggcggcggcggcggcagcggcagcgacagcgctcggctcctgcgggaaaggcgcccggcgcccatgcctccggccccgcgccgcggctgccctgacccggccgcgacctccctctgcgcaccacgccgcccgggcttctggggtgttccccaaccacggcccagccctgccacaccccccgcccccggcctccgcagctcggcatgggcgcgggggtgctcgtcctgggcgcctccgagcccggtaacctgtcgtcggccgcaccgctccccgacggcgcggccaccgcggcgcggctgctggtgcccgcgtcgccgcccgcctcgttgctgcctcccgccagcgaaagccc

SEQ ID NO: 47751 - DNA, 30 bp, Homo sapiens
  chr10:115804303-115804333
  hyper
acgtgctgtgcgtgacggccagcatcgaga

SEQ ID NO: 47752 - DNA, 694 bp, Homo sapiens; identical to SEQ ID NO: 7675
  chr10:115804794-115805488
  hyper

SEQ ID NO: 47753 - DNA, 134 bp, Homo sapiens
  chr10:115860784-115860918
  hyper
acgccgtgggaaaccgcagccagtgataagctgggaagccacaggggctggcagctgcagtcggaacgaagcggctggaagctccaaacgggagctcttcccagctcgctttccacttcgacggcaccgttcaa

SEQ ID NO: 47754 - DNA, 556 bp, Homo sapiens
  chr10:115998969-115999525
  hyper
ttttcaaggagctataaagcccgtggaggagtcagctgacggcacagtgttcgcggctgcaccgctcggaggctgggtgacccgcgtagaagtgaagtacttttttatttgcagacctgggccgatgccgctttaaaaaacgcgaggggctctatgcacctccctggcggtagttcctccgacctcagccgggtcgggtcgtgccgccctctcccaggagagacaaacaggtgtcccacgtggcagccgcgccccgggcgcccctcctgtgatcccgtagcgccccctggcccgagccgcgcccgggtctgtgagtagagccgcccgggcaccgagcgctggtcgccgctctccttccggtgagtcccagccccgagttggctctggcgcccgggtacccgccagtgccggctgccgatgaccgattcacgctcccggtactggggccccctctgcccagccacccctacccagagcacccgggctgcgcggccccgccgagggtgcgggctttgttcgcattgtctgcgcgcacctgagcgcggccttcctggca

SEQ ID NO: 47755 - DNA, 30 bp, Homo sapiens; identical to SEQ ID NO: 7676
  chr10:116064457-116064487
  hyper

SEQ ID NO: 47756 - DNA, 30 bp, Homo sapiens; identical to SEQ ID NO: 7677
  chr10:116163145-116163175
  hyper

SEQ ID NO: 47757 - DNA, 1362 bp, Homo sapiens
  chr10:116163377-116164739
  hyper
cttttcaaaagaaccgcaatcgagacttgtagaccagctccgaggctccgagtgtgggtgctaagctgggcgtccggcgcacccgggacggcccgcccaccggggtttggcggagatcctggcccccgccaaacccaaagctcgcccagctgcgcactgagctaagccctcgggtccggacgcctccaggagctccacctgccgggcactccattcggcccccgaccctcgcatccctcctttcttggtgtgggggagcaaagaagggcttggagagaaacgatgacccgaacggcaggacgtttggggaggccccacctagcccggggagggtctgcgcgcccactccactgcccaagcgctttgccgggagcaggaagcccctagcccggcgggcgcccgggagaaaggactcaacagcccgaccctttgcccccagcagctcagcacggttcccaccttcttcggggcttcctcggccccaggcatctttcctgtgcggcgggactgagggtggagtggggtgccgggctcaccctctctcctgcaacaggtgagaagccccgccacgccccccactgacgaccccctccttccgcgcccgggaggatcaaagggctcgggccgcagcagccacctaggagcccacccgcccagtccgcggcgccgctgtcgccccctcttaggcccaggtccgggctgggtgggggcagtgggctctgcttatcccgagtcctggcaagacgagtcctagccctgccctccgcgtcgctgggcgaaagggagtgggtgtgcgccgcgcgaggaacccgcgccctcacctttgtaccgctccatcggggccacggagtgcgctcctcgcggctcggcttctgcgctgctctcccggcgctcggctcagcgcccaggccgccgcgctggcccctccccgtgaggtcacgctcgcggccggacctcctggcggggccgccgcgcccagggtcctcggacctggcccccgccagggctcgcccccagcgcccctgtcccagcgcccctgtcccagcgccggagaactccggcccgccgaggctgacagtcggctcttgagtcggtgcgcgcccgcggccccgctcgccgcccccggccgccttggcactcccttcacgtcttgactccgggggcgtcgagagggaacgagactgggacgttcccaaactctgggggaggctccgggaggccgggcttgggtgggcctccaagattgttcccacacccctgcccgctgcaaacccaatgcctggaggaggagaccgaggtccaagctaggaggttgagactggcttagagctcctcgcgcttggctcccgagccagcgcgctt

SEQ ID NO: 47758 - DNA, 292 bp, Homo sapiens
  chr10:116286564-116286856
  hyper
gttacatatcaggcttctctccgaagctcggctaaggcaacgtgcatccctctagagacgcactccggaaaccagccccgtgtgcggcgggcaggcacgctctctcacgcctcctctcctcgctttacttactagttcaacacaccagcaaccacaatgggccagtccatgttcccaaaaaaggagggggagtagatttactttctttctttttttaaatgcaggtaggaaagtaccatttctttgcattcactcactattgtctgcatgtgaaaccgacagtgattgtccc

SEQ ID NO: 47759 - DNA, 258 bp, Homo sapiens
  chr10:116391720-116391978
  hyper
aataaactctgggagtggaagcgcgcctcggcagacagatccgcgggcgctggggcagccaggagaagccccggcatccgcttgtgaggtccggggctgtggtctcgagtcccgccccgcctcggcgggccccgctcccatgcccgccccgctatcgcccccgcgctcttctccgcccgcccgccgagctgcagccgcgcccagctcggggactctgccctgcggctgaaaccactcgctacagctgctgctgtaaca

SEQ ID NO: 47760 - DNA, 934 bp, Homo sapiens
  chr10:116527399-116528333
  hyper
cactgcagctttaaatcgtgctgcctcaagccctggatttcttccatagccgagctgcaaaatggtaactagaaaggaggaaaaaatacctcttcctccctcctggccagcccttccacagctcccggcagggcagccagcgcgagcccatcccccacgcctcccagcccagacgcgcggcgggcacaggtgagcggggcgccgactttggcccttaggctcgcccacatccggggatcaaggtcaagggcgagggcttccttcccctgcccccggcccccggcagccccgagcccggggatccgctgccaaagtttcaggccgggctggggccggcgcggctgtcgcagcccccccgccctcccgcacctgttcggcccgccggggtcagtggacggtgcccacctggtccccactcacctctggcggacatggtgcaggcagcgggagccggagctggaaggcgttggacagccccgcagggcgcggggaagaaggcagccccggagcgcccgcccggccccggccccctccggctcccggtgcggggacgccgcccgcaggacacctggccgcccgctccgcgcagcaaggccgacgggcggggacgcagcggccgcagggacccgccgggcgcggcagcgctgacacccgcggccgcgctgggcggggcgcgcctcccccgccccgagccgccggggcccacccgggtccagcagccgctctgccgcggcgccgggcggggctctgtccccgaggaacgagggtctgcgtcctcccctctccccgcccgtcttcttaataagaagaaaaataacgtgggtgctccgaatggctctccagctctctggtcccagagagagaaagcaagaaagggccgttcgttccttcccctaagtgatgcccttgacaggagagcgaagaccacggtcgc

SEQ ID NO: 47761 - DNA, 44 bp, Homo sapiens
  chr10:116581329-116581373
  hyper
gccggtgtcccaggcgccctgagaaagccgggagagggcggtgg

SEQ ID NO: 47762 - DNA, 30 bp, Homo sapiens
  chr10:116697958-116697988
  hyper
tgttgcatcatcagcgtgcacctccacgat

SEQ ID NO: 47763 - DNA, 30 bp, Homo sapiens
  chr10:116852171-116852201
  hyper
ctgaaaaaaagccccgatgctgcaatattt

SEQ ID NO: 47764 - DNA, 247 bp, Homo sapiens
  chr10:116852455-116852702
  hyper
acgtggtcggactgcggtgcctttaaggcttttgcctgctgcacatgctcagctctttgtgtgttgttggagtttttctctcttaagagaaaaagaagaaataggcaggaggatggggcggaggaagggggaagcgctagggaaaaagcgttgcacttttgcagctgcagacggcggacgggaaggacttcttttctgctgaagctgcgaagcctgtgtcgatctctcattcgtggggctcccgggg

SEQ ID NO: 47765 - DNA, 30 bp, Homo sapiens; identical to SEQ ID NO: 7681
  chr10:116853103-116853133
  hyper

SEQ ID NO: 47766 - DNA, 30 bp, Homo sapiens
  chr10:116854013-116854043
  hyper
ggagccctgaccaacggggagctaggcatt

SEQ ID NO: 47767 - DNA, 31 bp, Homo sapiens; identical to SEQ ID NO: 7682
  chr10:117350835-117350866
  hyper

SEQ ID NO: 47768 - DNA, 430 bp, Homo sapiens
  chr10:118031118-118031548
  hyper
cgggaaaaacttttctcttccaagtttgctctcccggccccaatgctccccaactccacctgcccgccgcggctccgcgagctcccagagactctctgggggtgcagggccctgggctggagggcttcttagtcccccgccaagttgggtcattaaaaaccacaggaaatcaaaaccaagcccgaaaagcttcaggcagcgccgcgccgccaccgcctccctaacccggggattcgcgatcccattccccaaaaagacacttcttccttccacatccaccacacccgcgccccaattttggtgcggagggcggggtgggctgctgcaagcgaccctaggaaagactcagagggtaagaaagcccgcggcgggcctcgacttacccaagagcggcagcgcgaagtacagggtcgccaggaacatggtgccg

SEQ ID NO: 47769 - DNA, 605 bp, Homo sapiens; identical to SEQ ID NO: 7684
  chr10:118031624-118032229
  hyper

SEQ ID NO: 47770 - DNA, 773 bp, Homo sapiens; identical to SEQ ID NO: 7685
  chr10:118032412-118033185
  hyper

SEQ ID NO: 47771 - DNA, 749 bp, Homo sapiens; identical to SEQ ID NO: 7686
  chr10:118033244-118033993
  hyper

SEQ ID NO: 47772 - DNA, 108 bp, Homo sapiens; identical to SEQ ID NO: 7687
  chr10:118034142-118034250
  hyper

SEQ ID NO: 47773 - DNA, 30 bp, Homo sapiens
  chr10:118547541-118547571
  hyper
tcgtgccacctccacgcaacgccgttaaat

SEQ ID NO: 47774 - DNA, 770 bp, Homo sapiens
  chr10:118608584-118609354
  hyper
tgggcctgcctggcacgggcggccttagcaacccggaggagctcactaacagcagagagcaagggggcgcgtggggagggcggggtggcccaagacgctgggccactgggacccgagcgcgcgaccccagccggaattcggagctaaggctgccgcgctccggcaaaacgcgcttgatgaggtcgttaaagatttccccctctggaaaatcgccagggaaaagtggtgaaaaacgaagccgggagggccctagtctcgggagtctaggaggagcccaacccccggacctaatgccgcagggagaaaagacagagcagcgagcgcaaataccatcctagctccaataaaagggaacgacttttaccgcaggaagaacctaggcctggaagccacgcgagatctgggggtcgggatcacgttgcgttgcctagcgacagcagggacgctcgtgggaccccaggctaaaccccgctgtagccttaaatctcctaccatggaggaagaaggcggcggccgcagctgtgggaccactagggagctgcagaagctgaagcagcaggcgatggagtactaccgggagaacgacgttccgcgcaggctggaagagctgctcaactccaccttctacctccagcctgccgacgtctacgggcacctggtagggacctgggacaagcgctctcctcccgccaacccctctccccccgccccgcgctgcggcaacgccttgcgcctgcgcctgcgcctcagaatctcgcatgccagccgcc

SEQ ID NO: 47775 - DNA, 407 bp, Homo sapiens
  chr10:118764186-118764593
  hyper
cccacccgcttctccggcaaggaaggtggcactgtgcaacctcgtccgcactgaatcctcgtcccttcccccagcccccgatcgccagcaaacgcaaccagcgggcagcgggtctcgagctgcggggcctgactagccccgacactccgcgttatcctcggtccagagctttcccaggcgcgccggccacggaggacgcttctctgcgggtgacggagctactgcggtgaccacggcggccgccacgtctcccgcccggcttccaactgccctggccccagcgccctggggccgtccccgcccacgggccgcggctgcccacacctggcgcccgcgtgctgcctaccttgctccttcagactggtaatgagctgcagctgcttctcttcgtccgagctgttcatttt

SEQ ID NO: 47776 - DNA, 181 bp, Homo sapiens
  chr10:118764979-118765160
  hyper
cgagttcagagaaaaccggctgtgggttcgcagcgtgtgtgggaactccactttggacgcttcccgggggtcgctcccaaagaaccacagaggtagagcgggacgcaatgagccatgaacgcctgggcttcttccctagttttcccgcagtagactctgggggcgcggttgcaaaacctag

SEQ ID NO: 47777 - DNA, 114 bp, Homo sapiens; identical to SEQ ID NO: 7689
  chr10:118891019-118891133
  hyper

SEQ ID NO: 47778 - DNA, 191 bp, Homo sapiens
  chr10:118891179-118891370
  hyper
cgctttagaagagcgtgtccggaagtgtcctccccggccctcctcgcttcccaagatttgtttgcaacgtctacacccgtcaccaccgcataagcaccagggtgaggaggtctctttgcaggaattaatatcgatttcagtctcctgctccttcaaagtttctctttgacgatggcgagacttatattcta

SEQ ID NO: 47779 - DNA, 82 bp, Homo sapiens; identical to SEQ ID NO: 7691
  chr10:118891579-118891661
  hyper

SEQ ID NO: 47780 - DNA, 15 bp, Homo sapiens
  chr10:118891715-118891730
  hyper
cgcactataggggct

SEQ ID NO: 47781 - DNA, 509 bp, Homo sapiens; identical to SEQ ID NO: 7693
  chr10:118891947-118892456
  hyper

SEQ ID NO: 47782 - DNA, 672 bp, Homo sapiens
  chr10:118892517-118893189
  hyper
cgccggctgcgcaggctaccgccggcagccgctttgctctttcctggaggagtgggaagctgtcggccaccgccccgaacaggctcggagaaaagattctgaatttcctttgattagcggcgttaccttttcctttgcttttcccccattaaattcctgtttaaagttacaacacccagaaccttaattttgcattgccctgtggggcattctgtatcctgaattttcttacaccttccaaatttcatcattggaagtatttaaaaactggttccacttcatctggttttacgtagcaattgcttttattgctgattagatcaaatttatcagtgtcgttgcctactacgacgtttgttactgtttcctggggtcgggggtggttgtgattggagttgccctaaaggggagaaaaaccgcaggatttgcccgccaggaagctgtgttgtgtaccgactatcccgagaggtccgcaaagcggggcccaggggctcccacaagccctggtttccctggcaagaggaaggaacgtcctccttttttggtctaaagaaacctggaagcccctggggtctgcgcgcagttttcctctttcaaatattcctaggaatagtcggcagcggcagcagccgcagcagccgcggatctagagcaaacgtcctgtgctttgga

SEQ ID NO: 47783 - DNA, 74 bp, Homo sapiens; identical to SEQ ID NO: 7696
  chr10:118893506-118893580
  hyper

SEQ ID NO: 47784 - DNA, 146 bp, Homo sapiens; identical to SEQ ID NO: 7697
  chr10:118893679-118893825
  hyper

SEQ ID NO: 47785 - DNA, 37 bp, Homo sapiens; identical to SEQ ID NO: 7698
  chr10:118894034-118894071
  hyper

SEQ ID NO: 47786 - DNA, 917 bp, Homo sapiens
  chr10:118896501-118897418
  hyper
gagggtacccttgtcgccccgcccgggtcctgcgggccccagctctgggcttgccgaccagaccgtgatccagacgtccccacccccaccctcgagtctccttccctccggagtccgcgcggcggaaggaggagggactgagtcggggccggccgggcccggagatctgctgctggctggggcggcgccgggccggggcccggcctcgcagcctccgccgccggggctaagtgcacgccgcgccatccgagagcggcagagcagagcaccaaagcggcaaccgcggctccgtaaccaagcccagctgcctctcccggcggcagcggtcgggcaccgatcgcggccgtggggtcctcggcccagtgcactaactggcagggccgtagcccgcgatcggcagctgttctccggggctcgcgttcccccttgggtgcgctcagccctccagagcgcgggagtcccctggccggctcccggcaggtcgtccggcccttggagcgcgcacacctcctcccggagttttctgctcctttcccgggtcggaggccgcagcccgatgcccggccgcacccgcgcagcccctcatctccccccgcagcccggtcagcggggcccctccgggcgtggagggccgaggcccctggagagcgcaccggagagtcccaggcgcttgtccccagccggactcggggcggggagggccaacaactttctcccaagtcccagccggcactccttcccaccggcctgtgtcggcggcagcgcgcagctccggccccggagtcgaccccaaagaacgcgcctggcagccctgcccatccctacctcggaccaggatccggcggcagtaatccgggtccgctgcggaattggatttacttttgttacaatcctcagcagcgcccgacgctgagaag

SEQ ID NO: 47787 - DNA, 619 bp, Homo sapiens
  chr10:118897478-118898097
  hyper
cgactctccttgtgcgcgttcttcgagacccgggcagcctcggcgtccgagtggcatcgaacgtccattttgtctggtttcccgaacataggcaagaacaacaacaaaaacagaaaggaaaaaaaaagcaaaaaaaaaaaaaaggggggggggcggagaaggaaaaaaaaaagaggaaaaaggggacaaaacccccgacaacgcggcccgtacgcccggcccggcgacaggcaaggggcaagaatgaatgtccccgcggggaggcttcggcggccgcgcgcgggtcagcggcgacgggagagtggcgcgctcgccgagaggcggccagtctggtccaggatcctggtggagctgcggcgaggccgcctcgtcagcacccgcgtcctctgagcacgtccagtgtccccagcctggcgatcaggtagcgaacagcgcaactccgaaatgctgcggctcccgcctgtttctgagacggcgagttgtagttgtccgacacccggggggacgcacactcgctgttgcaattgattacgggtaatttcgcagcccccacgtttcggttacctcatgaatacactaaattgtttggataatatatcagatcgtaatggatggtttc

SEQ ID NO: 47788 - DNA, 352 bp, Homo sapiens
  chr10:118899892-118900244
  hyper
gccgggtcttgactcccactaccgcgtcgcgggtgcgggtccctgggattcgggtcctcctgatgggggtccctgcagcagatggggcattcacttccctgcagagctcggcccgagggagctcctgggcctccttgggcagggaggggtgcgaccgaattccctggcacaccggcccttccttgccccctaccctggaggggttggaggggtcggaccctcggactacgcgagatcgggtgcgcaggaggattctaggccttcctcagccctttaggagccctgcaggcggcggaagtcccaaaccgcagccttggcccaaatgggacccagatggctctgggtccccggc

SEQ ID NO: 47789 - DNA, 317 bp, Homo sapiens; identical to SEQ ID NO: 7701
  chr10:118922606-118922923
  hyper

SEQ ID NO: 47790 - DNA, 457 bp, Homo sapiens; identical to SEQ ID NO: 7702
  chr10:118922943-118923400
  hyper

SEQ ID NO: 47791 - DNA, 408 bp, Homo sapiens
  chr10:118924327-118924735
  hyper
ggctataaaagcaacgccatacattgggatgaaattagacagcgacaaaatcattaccttgacttcccacaataaagacaaccttaaaagggggctattgatggtttcaaattacataacggtggtttatatgttcttcctctgcgctcacagaaagcaattttaaagtgtgaattcttcaaagaacgggcaaagcattcacacacagacatgcgtttttattttatgtattgcaaagcgctatgagagagagagagagaaaccaaaaacaaaaatcccagcaaaaggaggccgagtccaaagagaatatgtccggtttctatttcaccaagctcctggactcacatttggccccggagccgagtgctcggtctctttccccgggacgggacagggagtggagttcct

SEQ ID NO: 47792 - DNA, 135 bp, Homo sapiens
  chr10:118925334-118925469
  hyper
gagggggctgttggcgtcaggagcgccctgggaggaacttcgtagcggattcgagagacagagggaattcagcaaacttgctgccccgggctgccggctggagcccggcagattcgctgcgcagcactgccccct

SEQ ID NO: 47793 - DNA, 223 bp, Homo sapiens
  chr10:118927080-118927303
  hyper
gcactggcagaagttgagacacgctcccaggaatcgcgggccgtggcgcgtacttccacgcaccccagctagttccagagactcagcttgttctgagatcctcttgtcgagcccccttggtcccggcgcccggcctgtgtggtgctcagatcagacttatccacccgagcaccacgcagaccagcgcctggaccaaggtcccgggaaggaagccctcctcccc

SEQ ID NO: 47794 - DNA, 41 bp, Homo sapiens
  chr10:118927999-118928040
  hyper
cgcgtggctgtccggagcccctccacgttccccagcagcag

SEQ ID NO: 47795 - DNA, 30 bp, Homo sapiens
  chr10:118934480-118934510
  hyper
atttcccccgcccccgacttcctttatgag

SEQ ID NO: 47796 - DNA, 30 bp, Homo sapiens
  chr10:118976169-118976199
  hyper
agtggctcagaggtcgcggggtgctggagc

SEQ ID NO: 47797 - DNA, 163 bp, Homo sapiens
  chr10:119000428-119000591
  hyper
aggcactcggccacgcgctgggtccggggaagaggcgcggccgcggccgaggcggggacagggaggcggcagcccctcctgcgcagcgacggcgcgggcgggcggaggccggggcgccccagccccccgcccccgctccctccggccgtgacgtcagagccgg

SEQ ID NO: 47798 - DNA, 465 bp, Homo sapiens
  chr10:119000689-119001154
  hyper
cgggcacggaggacccgggcaggcatcgcaagcgaccccgaggtaacacggccccggttccctgctcgcagggcgcggtgccggaggggagcgggcccgggggaggcagggaggcagggaggcccccagagctacgcgggcggggctgcggggaccccggggcagccggggcgcagggcgcagggcgcaaggtgcacggggccgagcgtgcagtttgggaggtggcacagttgggggcggcggggatcagggcagcgtcctgggggttctaggttgggtctccagattgggtccccgacggcgctcgcgggcgctctttccagggagcgcgggctctcgtggggacgcgctcgaggcaggtgagccgaggctggggcgcccgggggtgtccccggatgccggtgcgcgcggctccctgacccgcccttccgcggcctgggggacgggagaatggggggtccacgg

SEQ ID NO: 47799 - DNA, 308 bp, Homo sapiens
  chr10:119001328-119001636
  hyper
cgtgcggacagggcacccctgccccggcaccccagccccagcgccccttccccggcactccacttacccctgcgcggtcccggagctccgccaaggcccgggaaagttggagaactcgctttgcaaaaaagacatcccctccaggctgccgcgccggggctaggaggagccgcgttgtgtggcttcgctttcctgatgctcgggtcaaaaactgtgacatccgataagacccagaacttatgtttccccctgataatttcccgcatcctcttgcctgctttcactgcgatgaaaaagatttctgttcc

SEQ ID NO: 47800 - DNA, 309 bp, Homo sapiens; identical to SEQ ID NO: 7706
  chr10:119256045-119256354
  hyper

SEQ ID NO: 47801 - DNA, 240 bp, Homo sapiens
  chr10:119292323-119292563
  hyper
cgcatcgggcacccaggctggagccctgcagtttgtcgtctggagcccggaacccgaggtgaaaggcctccgctgagctcccagactcctcagccgagcatatgctgcactcctcacattcatttttaattcatgacatcagtttagggatcactagagcctctaaacagcctctctcaaaaccaaaacaaccaccataacacaagcgaggacaggagacggccgcggagtccagaacat

SEQ ID NO: 47802 - DNA, 538 bp, Homo sapiens
  chr10:119293027-119293565
  hyper
aaatagcccaggtaccgatctgctccttgtcgccgagcaccagctcagtacaaggcgctggaggggaaggagggaagcacatcagcgtctcctcatagtgatgcagccaccccagccctcaccctatcccagttccccacgcgcccacgtgcctttggggtggatgaaaagatctcaaacgaccagctcctcattggggtaaaggagtgaagagattatctctgatagaggtcaaactccaattgggaggagggcaccaattctgtaaatgacacccgagggcacactcaccaggttcactgcaagccctgagcgttttgcgtttggtgccccgagtgtaagcctaagtattctgtctccgacacgtaaaacaacttaaagtgccattttccaacggaggcatttagaggcaatttgaaaattgaaacgaatctttatatgcaagactggaacgttccagaggccctttaaagctgcggttagaaaggcagttagggaactcaatgatgggctggaaggagacgattgaacgcacagc

SEQ ID NO: 47803 - DNA, 1001 bp, Homo sapiens
  chr10:119293896-119294897
  hyper
cagagccacctccagacccctcggccctcccacgacccccagttcccgggtccgaggttctgggcgccagcggcggccaccgcgccgcgcgagcagcttttattcgcactctctttaactcgccctttctggttctcttcccttcgagcgccctgcagcggagtgttagacaagccctgttgtctgtgggctctcacctcagagtcaatattatctcagatgggcacaatagactggaatgaaaagctaatattgaatcaatgctgtccctgtccgcgccgctgcgatgccaccctttgttgcgcacgccgcccccggcaagctgctggcggccggggctaagcggagggcggccgcggtcgggcctctccgggtccacgccaggggtgggaggacacttcgggcccagcgtagaggaggcctccgaggcccaagcgggcttcggctgctgcgagtccccagaggctccctcgggcctcactcgcggtgtctcctccagacgccaggggcaggccacgaagccgagggctccgcgtggccgtgggagaagcggggtgcacggagccttcccgcgcccagacgccgaggggatgcaaacaggggagccgggcctggtatggccaacctccaggatcgaggggccccagaatgtgcgtgtggccgggggcgggggcagctgcgggggccagaactagagtattccttcgctctcccctgggggccgggcccccacgagttgcagcagagcccgtctgtaattagggcctcctggtccggcaaagctgcggctgctcccagagagagttggggtcttctcagggcccgcgatgggggagtggtcgtggtcagacccccgtgagccccttcggaaggtcccagtccctgtccattcttctgtcccgcagctctctccgcgcaggcggggcagagccggggaagaagacgctggacgaggggtcttggggccgcctcgctggctgcggttggaagcacccgttttc

SEQ ID NO: 47804 - DNA, 350 bp, Homo sapiens
  chr10:119294908-119295258
  hyper
cgcaggcgctgctctgtggccaccagcagaggtttcccggccgctgtgagtcgcccacgcgagcgacgtggggatacggggcgcacggagtctcagctgccgccacgcagcgcttgccctgcccgagcttcggctcactggcagcggcgaggccaccgaccaccctccgccttccagtcctaaactcggggctggagaccgcaggagctaaaccaggaagaagaaagagggcagggcctgaggccgggaagagcggcccgggggtcaacggtgagcgggtgcatacgaggcaagagccagagtgacattaagtggggccgcccgggcaaaccttgcgcgtgcaccccggc

SEQ ID NO: 47805 - DNA, 226 bp, Homo sapiens; identical to SEQ ID NO: 7711
  chr10:119295682-119295908
  hyper

SEQ ID NO: 47806 - DNA, 479 bp, Homo sapiens; identical to SEQ ID NO: 7712
  chr10:119295951-119296430
  hyper

SEQ ID NO: 47807 - DNA, 119 bp, Homo sapiens; identical to SEQ ID NO: 7713
  chr10:119296524-119296643
  hyper

SEQ ID NO: 47808 - DNA, 161 bp, Homo sapiens; identical to SEQ ID NO: 7714
  chr10:119296755-119296916
  hyper

SEQ ID NO: 47809 - DNA, 316 bp, Homo sapiens
  chr10:119297138-119297454
  hyper
cccctccactggcctggatgacggcctaggcgagactttggcagtgtggcgcgaccccagcgctcccccgccctcgggctcgggggcgcggtgggtaccgcgcccgcgcccggccctcgccactaggcgccgctgcgctcacgccgatcggggccccgggtcgccgcgcccgcctggcgagaggcctctggggaagacgccagaaagggatttgtcgtaataatttttaaaaaatgtttttagggcattaattatacttttcgttttctcaccgccaccctgcgcgttcggagaggccggcgtgactggggatctc

SEQ ID NO: 47810 - DNA, 544 bp, Homo sapiens
  chr10:119300883-119301427
  hyper
ccaccaataaacagagagcagcgccagcagcctggggatgtgatcataattatgccgccgcgcgagccaatggggacgagggaactcggtcctaaaatcatcccaaaaccgaaggcgagctcgaaaatgcggacacggcccgggaccggagatgcgatccgtagtcgttagttgcactgggtttgcacagcaaccaccacccccccaccaaccccgggacaacagatggcataataataataatagaaataataataataaaataatatcatctataataataataacattgaccacactgacaaaaataattacgacggaaccttaatagtacagtagcaccatatcgggctctcccctgaccttggactgccggtcccagatattccagaaggaattgttttggggaaggaggtgagcaccctcccagacagaaaacgctagagaccgtggggcgagagagggagagagttggaagcccactgctccggcggggtcggcagctcccggtctcaactcgcaaacgaacgagccgggtcaagaa

SEQ ID NO: 47811 - DNA, 190 bp, Homo sapiens; identical to SEQ ID NO: 7717
  chr10:119301759-119301949
  hyper

SEQ ID NO: 47812 - DNA, 109 bp, Homo sapiens; identical to SEQ ID NO: 7718
  chr10:119302046-119302155
  hyper

SEQ ID NO: 47813 - DNA, 192 bp, Homo sapiens; identical to SEQ ID NO: 7719
  chr10:119302221-119302413
  hyper

SEQ ID NO: 47814 - DNA, 2020 bp, Homo sapiens
  chr10:119302458-119304478
  hyper
gaaaaaaaaagaaaaaaaattaccccaatccacgcctgcaaattcttctggaaggattttcccccctctcttcaggttgggcgcgtttggtgcaagattctcgggatcctcggctttgcctctccctctccctcccccctcctttcctttttcctttcctttcctttctttcttcctttccttccccccacccccacccccaccccaaacaaacgagtccccaattctcgtccgtcctcgccgcgggcagcgggcggcggaggcagcgtgcggcggtcgccaggagctgggagcccagggcgcccgctcctcggcgcagcatgttccagccggcgcccaagcgctgcttcaccatcgagtcgctggtggccaaggacagtcccctgcccgcctcgcgctccgaggaccccatccgtcccgcggcactcagctacgctaactccagccccataaatccgttcctcaacggcttccactcggccgccgccgccgccgccggtaggggcgtctactccaacccggacttggtgttcgccgaggcggtctcgcacccgcccaaccccgccgtgccagtgcacccggtgccgccgccgcacgccctggccgcccaccccctaccctcctcgcactcgccacaccccctattcgcctcgcagcagcgggatccgtccaccttctacccctggctcatccaccgctaccgatatctgggtcatcgcttccaaggtacgtgccacgtcgcggaactgcagcgcgccgctcccgccgcatccttcactgcccccggcctgctccgggtgggcgcttggcaaggcctgggcggaggttcctccggctcgcgggccagcgcgccctgttgggaaactaggcggcgcggggccgggcgtggtgtcgatccccagtctccgaagctacgactggtttggagtgatggcctgcgggccgcttgaccctttgggaaggggtgcgaacggagaagttgtcccccagtgcgctcgaatcagagcaggctgggctgtgcgtgcccggcgccgcggagcccagagcccgcgggatccccaggctcctggtaccctcggcaatgcccccaaccgtcctggctccgaggggcgcggacaggactcggccgccaggcttgctttcgactgcgttcgaccctgttcaccacccactttgcgccccttcagtccagacccgcggcttcttagtcttccaccctcttctggaggcgagaggatcctcgcgccccgggagaaaagtatgggatttgttttttctttcctgcttttcggaggcctggggaggggcgggaacccgtgcgggaggaaagctccagggcttggcgctctcgccgcgacctgcttaattggggcgccgagcagccacagcgggaaggcaggttcggtctggtttttgtttttctttctttctttaaaaaaaaaaaaaaagaacctggtcaggaaactgtcttagagggaaatatctgttcgtgtgttttcatttcttgcgatattttttatttgtttgtttttctctgggtacggggtgggaggaggagagttaaaacttcagaaaaaggagtaattagtttacggattggagtcagtaaaagacctacctccggcggcagccgatcaatactccgcggcttgtccattcattaacccattgcgttcctgccggagcctagaatcgggtagatgtcacccccctccccatattttaaaaaatcaaaccaaaggaaaaaaaacccaaaaagccttttacccttaatcccgaactggatttgcctgcatcctgcctggactgtcggcttgtttttctttgtttgggttttcggtgaatcgatttcctatgctaatgagtgaacccaaaactctgaggctttgcttgaaaagtttagggctgcccttcctcattcgctatcagtcatgcttatggtcccctcaccagacccggagccgctgggatcttcctgcgttacagactgtcctggcggtgtctgcaagtcggtaacccc

SEQ ID NO: 47815 - DNA, 327 bp, Homo sapiens; identical to SEQ ID NO: 7722
  chr10:119304501-119304828
  hyper

SEQ ID NO: 47816 - DNA, 135 bp, Homo sapiens; identical to SEQ ID NO: 7723
  chr10:119304850-119304985
  hyper

SEQ ID NO: 47817 - DNA, 320 bp, Homo sapiens
  chr10:119305061-119305381
  hyper
gggccagcccggctcgggagaagtgcgcggctccggtcagagcagccccccctaatgggatttctgctgtgctccccgcagggaacgacactagccccgagagtttccttttgcacaacgcgctggcccgaaagcccaagcggatccgaaccgccttctccccgtcccagcttctaaggctggaacacgcctttgagaagaatcactacgtggtgggcgccgaaaggaagcagctggcacacagcctcagcctcacggaaactcaggtgactgcggcccgggcgcgaggaacccatctaggcgtgcgccccctccccaaa

SEQ ID NO: 47818 - DNA, 30 bp, Homo sapiens; identical to SEQ ID NO: 7725
  chr10:119306010-119306040
  hyper

SEQ ID NO: 47819 - DNA, 30 bp, Homo sapiens; identical to SEQ ID NO: 7726
  chr10:119306644-119306674
  hyper

SEQ ID NO: 47820 - DNA, 33 bp, Homo sapiens; identical to SEQ ID NO: 7727
  chr10:119310341-119310374
  hyper

SEQ ID NO: 47821 - DNA, 30 bp, Homo sapiens; identical to SEQ ID NO: 7728
  chr10:119310949-119310979
  hyper

SEQ ID NO: 47822 - DNA, 30 bp, Homo sapiens
  chr10:119311621-119311651
  hyper
aggcacgggttctccgtttgcgctgccctg

SEQ ID NO: 47823 - DNA, 338 bp, Homo sapiens
  chr10:119312752-119313090
  hyper
attccagcaatcagcgctggaattactggggcgccgcctagaagcaaccgccggcggggcggcagaggatgccggcctccagcgtcgggggaccgcgcccgaaagccgggctgctttgtggggcctctcgcgcctcgcccgcagcttccggcccgcgccctccgctcgaccgccgattttctcgccccagccagccccgtagccagaggaaagtgggagttttgagaaccctctgaccccagccgtgacccctctccgggaggtggcttctcccgcaggacccggtgcgccagaaaactctaggcggcgccacgcttggaagcgcaaggtccattcat

SEQ ID NO: 47824 - DNA, 294 bp, Homo sapiens
  chr10:119494302-119494596
  hyper
acagcgactctccccgggtcccccaccccagccaagagggaacctgccaatcaggctgcgccaccaccaggctaggaagcctagggtcgccgatgttccaggatggaatgttctggtgtcaccgtgcgggggggtggggggtgtcacagagctgggaactcgctcagagccagggtctctgctggggtcagcgtctgtacgctaaagccagggcgcaaagtgcgtgggcactgcggacactagaggcttatggcgctggaaatacaaggccgagttgccggcgcaaagagttcc

SEQ ID NO: 47825 - DNA, 109 bp, Homo sapiens
  chr10:119494848-119494957
  hyper
cgggagaagttcaggtgggacaggagacacgggggtgaggagatctttgagagggccggccgggaaagtgggggtcgcctgtggctgagagggccgcatgccgaaggtc

SEQ ID NO: 47826 - DNA, 30 bp, Homo sapiens; identical to SEQ ID NO: 7732
  chr10:120006277-120006307
  hyper

SEQ ID NO: 47827 - DNA, 30 bp, Homo sapiens
  chr10:120101877-120101907
  hyper
tctggccctagggtcgccttagcaaccggc

SEQ ID NO: 47828 - DNA, 30 bp, Homo sapiens
  chr10:120278928-120278958
  hyper
ctggtcagatgttattccctgaggtttgag

SEQ ID NO: 47829 - DNA, 161 bp, Homo sapiens
  chr10:120354168-120354329
  hyper
cacggcggcgggcagcgccagcaccgcggacagcgcccagatggccagcacagcgtaggcgctgaggcgcagcgagatgcgccgcctcagcgggtgcaccagcacgacgtagcggtccactgcgatggtggtgagcgtgaacaccgacacatagacggtga

SEQ ID NO: 47830 - DNA, 15 bp, Homo sapiens
  chr10:120354368-120354383
  hyper
cgaacacccagccgc

SEQ ID NO: 47831 - DNA, 30 bp, Homo sapiens; identical to SEQ ID NO: 7733
  chr10:120355327-120355357
  hyper

SEQ ID NO: 47832 - DNA, 30 bp, Homo sapiens
  chr10:120356057-120356087
  hyper
cgtcttttacctcccggggtcagaaaatgc

SEQ ID NO: 47833 - DNA, 30 bp, Homo sapiens; identical to SEQ ID NO: 7734
  chr10:120670186-120670216
  hyper

SEQ ID NO: 47834 - DNA, 30 bp, Homo sapiens
  chr10:120863846-120863876
  hyper
tggactggggactgcggagcccggcctcct

SEQ ID NO: 47835 - DNA, 30 bp, Homo sapiens
  chr10:120938014-120938044
  hyper
atgggcctggggaccggggacgccgaaaga

SEQ ID NO: 47836 - DNA, 85 bp, Homo sapiens
  chr10:121271621-121271706
  hyper
agagagcagcggagccgcacgtggtgatgaggggctaagttcgggggcggcggtgctgaacacaggaaagcggctgctctgcggc

SEQ ID NO: 47837 - DNA, 738 bp, Homo sapiens
  chr10:121301365-121302103
  hyper
cacccaaaggcctgcacaggtcgtagctattgtgatgagcaaaagggtggaaggaccggaatcaagggcacggctccaccttcaccgtggggtctttggcctatcaagttgcccgagatcgtggctcaggctggcccaaagtgacggccaaggcgaatccttcgtaacgtcagaacttcgctggctcggaccgcagaagtgcccttctccatcctggggttccgccaccctcgcgatcccaccttttggctcctcgcggcagaagcgaaggcccccgacgccccaggcccaggggcccagtcggatgcccgggtccagccgtgctcccccgggcgctcggcatccttccacccacgcccgcagcggaggcggagagcgtcacggagggagaagcccgcgcgccgttccgctttcggaatctggagccccatgtcacctccaaagtttggagatttggggcgctcctttttctcccagaccatcactaaaaagaaaactgcggctgttcctctttcagccaaacttcctccccggggctcccggaggagctctgcgctcccgtcgcggctgggaccgcgaaggtgcggtacccagcggggagaggtggtgcggtcggccggggctccagtctgggaggtaccaccgagccgcgcccgagcacaagagggagggcaggaggccgggcgggcgaaacggcgccccgaccccgagcccgcgggcccccgaagccgcttacct

SEQ ID NO: 47838 - DNA, 30 bp, Homo sapiens
  chr10:121303029-121303059
  hyper
tgtcccgcacaccgcgctctcgggacactt

SEQ ID NO: 47839 - DNA, 44 bp, Homo sapiens; identical to SEQ ID NO: 7736
  chr10:121356078-121356122
  hyper

SEQ ID NO: 47840 - DNA, 30 bp, Homo sapiens; identical to SEQ ID NO: 7737
  chr10:121410460-121410490
  hyper

SEQ ID NO: 47841 - DNA, 30 bp, Homo sapiens
  chr10:121411153-121411183
  hyper
cacccgcgccccagcgggcagaccccaacc

SEQ ID NO: 47842 - DNA, 30 bp, Homo sapiens
  chr10:121446162-121446192
  hyper
agtagggggcgcgtcgtgactgcgccttct

SEQ ID NO: 47843 - DNA, 30 bp, Homo sapiens; identical to SEQ ID NO: 7738
  chr10:121632625-121632655
  hyper

SEQ ID NO: 47844 - DNA, 30 bp, Homo sapiens
  chr10:121651989-121652019
  hyper
ttcagggtcaattgcgtctcaattcgcacg

SEQ ID NO: 47845 - DNA, 80 bp, Homo sapiens
  chr10:122216245-122216325
  hyper
gagaatccccagagcgatcgtccactacatgcccacgtgcgtgcgtgtgccagggagcgagagcccggacagcgggagtc

SEQ ID NO: 47846 - DNA, 164 bp, Homo sapiens
  chr10:122216592-122216756
  hyper
atcgccagcggccggcgcggcttcccggagccccggagcccgaggcgcgaggtttaggctgagccctccccggcgcctgcccccgcccggcgcccgcctccgcccccgcccgcggcctggagcgcgcctccctcgcctcccagggtctggcgagccggcgccgg

SEQ ID NO: 47847 - DNA, 330 bp, Homo sapiens
  chr10:122216793-122217123
  hyper
cgcgggagctgctccggccgcaccatgcgggagctggccattgagatcggggtgcgagccctgctcttcggagtcttcgtgtaagtagtggcgcaccgcgggcagggcgcactgacgcgggggaacaaccgaccaagcctctctgtgccctaacttagtttgcgcagccgcttcccactggggcctgggttcgaggtcccttccccgccaagtgcccgcaacgtgtcctacgggaccaagagagacccttcctctctccttcctgggaccctaggcgcggagcgaccaccgcgcgccgaggctgagacctgctcccgggtctcaccgggc

SEQ ID NO: 47848 - DNA, 30 bp, Homo sapiens
  chr10:122610820-122610850
  hyper
gaacctgacagcggcgccgagggggccacc

SEQ ID NO: 47849 - DNA, 430 bp, Homo sapiens; identical to SEQ ID NO: 7740
  chr10:122708489-122708919
  hyper

SEQ ID NO: 47850 - DNA, 31 bp, Homo sapiens
  chr10:122709344-122709375
  hyper
cccttcccttgttctgcgcctgtcctgtgag

SEQ ID NO: 47851 - DNA, 419 bp, Homo sapiens
  chr10:122738986-122739405
  hyper
gcctgccaggaggtgcggatgctgccggcgcctggaccgcgcgttgagcagtgcaggtgaacagctcgcctaacgcacaagccacgcccacaccctttctacacgctttctcgttcacttctcattgcaactccttccgccgcgtggacaggttcagcactctcggagtcgatgtcattattcgccatcgacgcgaacctcggcaaagagacgggtcttaccggtctccgaatgttctcaggccctaagcgcgcagccccgcacccgggtgcagccggcgcggtcccacgtgtccctaccgcgagccgctccccgcgtccctgctgccgccgcgcgcttaactctgcctgcccgcccgccccgccccgcccggccgttcctgcgcagccctgggtcggcctcgcgcttctgtgtttaaa

SEQ ID NO: 47852 - DNA, 30 bp, Homo sapiens
  chr10:123093885-123093915
  hyper
acattcaagtcctgtcctagccacttgata

SEQ ID NO: 47853 - DNA, 30 bp, Homo sapiens
  chr10:123337319-123337349
  hyper
ataacctggatgtctacagaggtcgtatcc

SEQ ID NO: 47854 - DNA, 1665 bp, Homo sapiens
  chr10:123356667-123358332
  hyper
cgagcgggcctcctgcgccaggtccgtggtccgcgagggtcggagccagcgccacgcagggccctcggcttttttccccagcgcggccccgtggccgaaaaaaatgagcgcgcaagttagaactcgcctgcgctttcgacatctcccagccgctgcggcagagcaggcaggcgaactagaaaaagtcggtccagttcgccccctagccccaggcgcactgcgctccctccagcgccgacggcggctgcgggcgaggggcgcccaggcaccggagccgtcgcctccccagcagtgccacccctggccatcgccacccctacgggatgtcaccggccccaccccagcggccccctcccgaaaaaggggtctccgcagggcctggatggtacggaagttcccaggacacacggatggggcacctcggagatgaccccgggaaccggcctgcggggctgtgccacgggcaggcgaaccttccgcccgtctgctctggggtcggagaaacgcgcccagtcagcgggaatgcgcccgccagggtttgacagggaggggggcgtcaacgccagaagcagatgtcagcatctggatgggggtagcagaggcagaacttccagaacgccggccgtcagcacgcacccacctcccccatcacctatgcagccacagagggaggacacggagcgtcctccacaatgctagtccttccgcgccccccgcccggaggacggtgcacccggcgtcccgggctcccgtggcgcccacgtccccggctggcgaagctccccgaggcgtcttgcgcggcgattaccttgaatggcaacgctcctccgcgacctgtgttgtccccgcgccccgcgtgggtcgggatggagaaagcgacgagcccggggttgcggggagcaactccaaacgcagaagagtggtccttgggtcttcgccggcgccaagcctcccgggcttcacgcgtaccccaggctgcggaggagcgcgggcatgacgcccgcgggctgccctcggatttggggaacgagaggaagaaaggactcaggcttggcgttgcctccaccaaactttgctcgcgagttgcgaaggctcagagcgcgcaggcaagctgcggcctcggggcccccggggctcgcggccggcccccgccagcccggagagcagtcgccgcgccgggccaggtacgccgcatgcagccccgcggcgcccgagctttgtggcggccgcgcgcgctccctcgcccgctccgcacccgccgcccgcccgctcggctctccaccgcgctctcctccagccgccgcccgcgccgccgccgccgcccccgcctcctcgcggcgggtcacgcccccactgaaacccgagccgtttcctggacggcggcgccctctctgccaatcagcgccgcgcgcccgggccgccccgagtcccgcgcggctcccgacgcctccgagcagccggagacaccggcccgggaggcgagggctcggccgcgatgcggccgtagggatgcagcgacagcctccgaataaggcctggtcccgcgccccgcgccacctcctccctcctccccgggcgagcgaggctggccaacggctcgctgagcgactgcgttacgttgttttatgtcaagttagaaaacaaatgaccgaaggctctaaccct

SEQ ID NO: 47855 - DNA, 30 bp, Homo sapiens
  chr10:123368166-123368196
  hyper
aaaattaactccttcgcggaggccggatgc

SEQ ID NO: 47856 - DNA, 30 bp, Homo sapiens
  chr10:123687143-123687173
  hyper
gagagtacgggcaccggttaggattttcct

SEQ ID NO: 47857 - DNA, 30 bp, Homo sapiens
  chr10:123687682-123687712
  hyper
taaggggccgccgtcgtcagtgagggtgag

SEQ ID NO: 47858 - DNA, 30 bp, Homo sapiens
  chr10:123734226-123734256
  hyper
aacaatttaaggtgcggcgaggggctggca

SEQ ID NO: 47859 - DNA, 30 bp, Homo sapiens
  chr10:123853457-123853487
  hyper
cagaaactggatgagcgtctgtctccagcc

SEQ ID NO: 47860 - DNA, 1214 bp, Homo sapiens
  chr10:123872268-123873482
  hyper
gagactcctggaagtctgcagcgcctccaggagcagcggccgggctgtgcgtccatcggtccgtgcgtctctcgcctgccgctctgcggccgcgggcccctcggtgcgtctgggcgcgcccggccccgcgcattcctggccggggaggagagcgcggcgggcgccctgcgcgagcagctggccgagcgctgccccgggtcggagagcccagagctgggggaggagcctggcccggcagccgccgctcgcccagtcattggccttttgtgctgcaacttttcccgagcctttcggggagccacgccggccctgcgccgttgtcccgggaaactttgcgtcccagggccgcaccggaccgtggtgaccccacgcgccgcgccgccaccgggctcggaaaacccagcgcccccgggctctttggcagttgcgactccgaacgaaggcggctccgtgcgggccatcccctatctccccgggcgggtaagtgccggggccacgggcgggcggccggggtcagaagatgggcgcccgaaggaccttggcccccagacaaaggcgtactggaagtggccaaagctcatttcggctttccccggcagggactggccgagggtggaaaagtggctaactgcacattcggtcccctgctggcagaggagtgtggctgcggggaaaccgcgggccccagagtgtctgcccaggagcctggttcccttgagtgggagcgcgggggtcaaagcccgtggttcggggcgcgcgccagtggctgggattcccgctcgcggttggggtccccgcgcgtggttgtggttggcgcccgtgaccaggctccctgccagggttggggtcccgcccttgggggcctccgcgccttcccaccgggctctttcccagctcgtgtggtcctactgggtcgcgtgggggcatccccggcgggccacgacggcgcgtggactagccataaaactctgcgctggatttcctccgagtttgggacttttaaattctcgaatagttacgtcagcagggccgagcgcacttcggggatccggcgcaacacgtgacccgcccgagcgtcccctccgcgtccttggctcccgccgcagagtgcgcctctgcctcggggtgtcctcgaaatccagtgtcggggcgctgggatttgctgcccaggctccgagcgccgaatacaccacgctgtggccaggtgtcctctt

SEQ ID NO: 47861 - DNA, 38 bp, Homo sapiens; identical to SEQ ID NO: 7746
  chr10:123922644-123922682
  hyper

SEQ ID NO: 47862 - DNA, 82 bp, Homo sapiens; identical to SEQ ID NO: 7747
  chr10:123923517-123923599
  hyper

SEQ ID NO: 47863 - DNA, 1127 bp, Homo sapiens
  chr10:124133757-124134884
  hyper
cagggagagagaagagcgaaaaattggcgcgcagagctgtaaagcgtttttctccaggtcacaccgcagcctgtaaatttgtgacacttggaccgattatgggacagcttgcaaacaaattatctgcaaactaacgaagcctatttttaaagatccctgttcctcgcagctctaggcgatgacatcagagaacccggagttctacctccgagccaagcccagtggtggtcaaaaactacgaataccaggaagcaccgcggcgcggcggcccagagctccgcgcgcaggcctccccggcgcgccgaggccgccgccgctggaaccaggaagacgccagaaactcggcccgccacgccgcagggacccgcgcggggcctgccgggactcgtagtctctgcgggctgggagcgcccgctccggaatctcagccgccgtctgagggctgaggcagcgtggggacgcgtgcgcagtgcgcgggctggccgtcgcggacgccgctccgggcagccgagcctctgtgggagccggggccgcggcggcgcgggtgctccgggccgaggccgcggtaaagtttagcttgaagaacgcggccgcgctggagcaggggtggtggacggggccaggcgcgaggtggcggcggctgcggggctgccgggctgctggagcgcggttcccgctgtggcgagcggggaggcgtccgcagaggggcggtgggtgctggtgagtgcggagccggcgccccctctgcgcacgtccgcgccacgcgccacagcacctggaggccgccgggccggctcacctgccctggcttggggcagcgggagggggcggcgtcttcttcccgtgggtccccgattgttttcccgacgtcagccctcagcggcgcccggcgggggagggcgggaggcccgcggcggtcgcggggccgacgagctcctcggcgtctccgccccccgagaaatcccgctcggggcgcggtgcgcgcagctgcccggggattcccggtggcgccggtcggagcgcctccctccagggctgtgcccgcggggcgcgcgtccccgggcatcctttcctggtgtttaatgcattttggcttcaggacttgccgaggccgaagccggctccgc

SEQ ID NO: 47864 - DNA, 456 bp, Homo sapiens; identical to SEQ ID NO: 7750
  chr10:124220608-124221064
  hyper

SEQ ID NO: 47865 - DNA, 474 bp, Homo sapiens; identical to SEQ ID NO: 7751
  chr10:124221086-124221560
  hyper

SEQ ID NO: 47866 - DNA, 30 bp, Homo sapiens
  chr10:124221784-124221814
  hyper
gggtggcggatttccgcgggctgcctcgga

SEQ ID NO: 47867 - DNA, 31 bp, Homo sapiens; identical to SEQ ID NO: 7752
  chr10:124639062-124639093
  hyper

SEQ ID NO: 47868 - DNA, 30 bp, Homo sapiens
  chr10:124768523-124768553
  hyper
agcggagaggcctgcggcgaggatggaggg

SEQ ID NO: 47869 - DNA, 30 bp, Homo sapiens; identical to SEQ ID NO: 7753
  chr10:124768777-124768807
  hyper

SEQ ID NO: 47870 - DNA, 30 bp, Homo sapiens
  chr10:124893751-124893781
  hyper
ggccttgaattaggcgaggctcaatctaac

SEQ ID NO: 47871 - DNA, 30 bp, Homo sapiens
  chr10:124895228-124895258
  hyper
tcatcattagcatccggcgccggattgacg

SEQ ID NO: 47872 - DNA, 378 bp, Homo sapiens; identical to SEQ ID NO: 7754
  chr10:124896154-124896532
  hyper

SEQ ID NO: 47873 - DNA, 539 bp, Homo sapiens; identical to SEQ ID NO: 7755
  chr10:124896937-124897476
  hyper

SEQ ID NO: 47874 - DNA, 399 bp, Homo sapiens; identical to SEQ ID NO: 7756
  chr10:124898992-124899391
  hyper

SEQ ID NO: 47875 - DNA, 353 bp, Homo sapiens
  chr10:124899638-124899991
  hyper
cagagaagaccttgtctcttccgtgccaggctcttctctttcccctggcgcccaacacctcctgggcggcatctctagatccccgaccctgtcctggcagacgccgagaagcgtagcgctcaccacacccgcgcgctactgggttccaggccgccgcgctcttagtgagcagcctgcggaggcacagcgcgccggaaccgcctggaagggtgggtccgcccgacagaagcaggtgcctgggcgacactcgctggccgggtgtggccgcctgcctttaagctgggggtctgcacgtacaattcctggcggggcacctttgaagctggggagccgaaagggggagatgaggaacc

SEQ ID NO: 47876 - DNA, 160 bp, Homo sapiens
  chr10:124901886-124902046
  hyper
tataaactgcccccccaccaccgggcgctcattctgagccgcgacgccccctcaacaggctcccggcaccgcagagccagaggccacgcggtgagaaccccagtgcgtgcgctcttcttgtgtgagaggccggaggtagagttgggagaaagaggagccg

SEQ ID NO: 47877 - DNA, 430 bp, Homo sapiens
  chr10:124902138-124902568
  hyper
cgggagggcggtgctgccggctgcttcctgcaagcggtttgaagaggcatcgcgttgtccggccgcctgcgcaagggccacgcgctgctgctttcacccccttgcgcccgcggggcacctggactccccttaagagtccccgtggggcctgagcttctgctgggcgctacgctgccctccacgattccattttgccccatttactcgggtcgtccacttcccgcggctcagtgacccagccagggggcgtcttccgctagcggtccaaatgtagactccgcaaagaggctaagaagacctgtctacccgggtgcgcgcgatggggtcagggtgtaagaaccaggagcctcatagaaacctctgcttggggtccaaagcccagccgggcactcccagaggacaacatccgcccccgcatgtacacgtggcc

SEQ ID NO: 47878 - DNA, 254 bp, Homo sapiens; identical to SEQ ID NO: 7758
  chr10:124902824-124903078
  hyper

SEQ ID NO: 47879 - DNA, 162 bp, Homo sapiens
  chr10:124905717-124905879
  hyper
taccccccaacagcgcgggagcacgcgggacccgctgcgacgtggcccaggagcctgcgccgccgcggcgcagaggagaacgcacaaattgtatttcagcgccaggtccttccgggttaatgagctgacaccatgattaaagctgaccatttgtaatgtgtc

SEQ ID NO: 47880 - DNA, 145 bp, Homo sapiens
  chr10:124905919-124906064
  hyper
cggaggccggcacctgcccctcgctggcctcccgggccgctgcgcgcaccccctggcccccgccccctcgcctgcccctgccccggctgcgcggccgactcctaatcaattagcccattaacgagcccctcgaggagttaagtag

SEQ ID NO: 47881 - DNA, 30 bp, Homo sapiens
  chr10:124906406-124906436
  hyper
ggctaattctagctcgggtaacagctgatc

SEQ ID NO: 47882 - DNA, 1396 bp, Homo sapiens
  chr10:124907186-124908582
  hyper
cggtcccaggagtgccggctttgcccgcccactggggctagaaggggtggagggctgggggaggatggtggagcagcctgtacaagcccctgggaggcgcggagacccgtcgcctgcggaggcgtcgagccactccagctccgagtcccgcaccgcccctgcctctggagagaagggtccaaggggtccaaggagtcggagttgccgcagccgccaggaacccgggctagaatctgcagctgctttcagccctggctgcccctggttagacgccgctgatgcccgccaggccctcggcgcgctctgggggcgcaccggtgctgtgtgcctggccggagcgttttgaaattttccggggccgctcggcggcgctgcgattggccgcgttcgggtaacctctatgcaaatgaggccgcgccgcctccgcgccgccggagacccggcgagttggcgggcgaggaaggggcatttgcaccggggctgggcgggcgcacccagagccaggcgggcaggaacccctgcgcagccatccggtgcctgcatgtccctggcgcggaagggacgcctcaccagcctcggcgccccctccccctagatttcctccccgcccctccccactgcctgcctgctgcaccaccttccacccagatcacccagatcgtctctaaagggagttcttggtttccttcgatttcttatgaacccaggatgggcagcaaagaagatgcgggcaaggggtgtccggcggccggtggcgtctccagcttcaccatccagtccatcctgggcgggggcccctcggaggcaccgcgggagcccgtcggctggccagccaggaagcgcagcctgtccgtgtcctcggaggaggaggagccggacgacggctggaaggcgcccgcctgcttctgcccagaccagcacggccctaaggagcagggccccaagcaccatccccccatcccttttccttgcctgggtaaggatcgcacgtcgccagtgtggcagcgagcgagcgcgaggggagggaggctgagcgccccgccaagactcccgcgccgggccccctctggccagagctgcggcagccgggggttcgggaccgcggggagaggggcgcgcactgtggtgcctcctccgcccggtgggcccctgggagcaggcgaacacagacccgtgccggcttgggcttcctggggaaggttgagttgttgagagagtggaccacagcgagagggacacgcggccggccttacacccggctgtcctcaatcactgcacatctggtactttctttccggacacgaggtggagatctgcaagtcgggtctgggcagtctgtctccaccgtaatctctttctgagtcttcttcctcactcgctccgtatctctgccttt

SEQ ID NO: 47883 - DNA, 142 bp, Homo sapiens; identical to SEQ ID NO: 7763
  chr10:124908972-124909114
  hyper

SEQ ID NO: 47884 - DNA, 285 bp, Homo sapiens; identical to SEQ ID NO: 7764
  chr10:124909252-124909537
  hyper

SEQ ID NO: 47885 - DNA, 72 bp, Homo sapiens; identical to SEQ ID NO: 7765
  chr10:124909673-124909745
  hyper

SEQ ID NO: 47886 - DNA, 224 bp, Homo sapiens
  chr10:124910230-124910454
  hyper
acggaaggttttcaggtttttcggtggaaagacttgcatgcgtctgtctgtggaagtttggctcgctccacgtggagggtgggaccggggtcaggggttaaaggtcgggaccttggcgccgcccagactgcacgtggctggagctgcccgcccactctccctcctaacgcccagaatcgtcgcgcgggctggggcgcaccccggctggaatccagctcaagagt

SEQ ID NO: 47887 - DNA, 446 bp, Homo sapiens; identical to SEQ ID NO: 7767
  chr10:124910708-124911154
  hyper

SEQ ID NO: 47888 - DNA, 30 bp, Homo sapiens
  chr10:124913813-124913843
  hyper
ctgagcggaccaatcggccccctagactga

SEQ ID NO: 47889 - DNA, 31 bp, Homo sapiens; identical to SEQ ID NO: 7768
  chr10:125727316-125727347
  hyper

SEQ ID NO: 47890 - DNA, 1262 bp, Homo sapiens
  chr10:125851235-125852497
  hyper
gtcacagcggctccgcgcacgcaggcagacgaagaagggcccccgcccccaggagctggtcccagcctccagcctggcagcctccttcgaagacttccctacactgggcgcggacctccagccgccagcagccggcaacccagccccagccttcctcctctatacccgccgtcccagccgcgccggccggccccgggcgcagggcgggcgggaacgtgggcacccggacagcgacggggaggtcaagcagctgtgcccaggacccgggcggctccgaagcctcaacacgcacacactcgcgcgcacgccggcccatcggttgcctggaggagtcgggaaggtgcttccacggctcttcattcattttcccaaaggcaaggttcccttcgccccggcgcctctatcctgccatcccagggggccaattgcgccacagcccgccacccagccacccacagccaccgcgtcctatctcccggcacacacaacccaacagactcgcattacatctccaccgccagcgtcgcctccgcgccccggccgctgccatccggctccccagcttcgccgccccgcagccccggctccccgcctctggcctcaccgcgcggctcagagctgcctcgctcggctcgccgcaccaaggccggccagagacgccgccaccgccgggaagcgccggcaactcccgagtcacgccgcctcccgagacgcggcggggcgcagggaggggacagcagtgggggcggggcggggaggaggaaggaggagggggcggggagcaaaagttcacaccgctcggggctcagccgctcccctatctcttcccaggcccgcccccgccatcccccttccctgaaccgggtcccacgggcttaggcgcgggagagctctggcctccccgcccggaaccgccgcaaggctagagccagggttctggaagcgcatccgagctcgcaaccggggagagagtggcggatgcccacttacctgccccgggccgcgcctggaaacttccccaaagtgcgataggggtgtgggggcggagcgcaaggctggggggaatccccgtcccctaccgccaaacgacgcgcgctcacaccgtgaaagcactggtctgtccgtcggtcggtcccccgcctgcggctcccagagctgggcggtgcaggggcgccccgattccgactactgggctccttctcccggacagcccgccggtgcgttccacgcggcttgcgccccccgccggcctccggctatcc

SEQ ID NO: 47891 - DNA, 833 bp, Homo sapiens
  chr10:125852540-125853373
  hyper
cggccgcgtcctctctgcgagggagggggcgtgtgtcgccgctgggtaacccttcccgcggggtcctcaagcgcgcagggcgcccggagcgcggccaggaccaatggcgaagggactcctcccgctggggatcgctgaagcctcggggaggccgggccaaggagcccggggcccaaacctgcctcggctcgtcgagctcgcaagttcattgtctgcctgggccgccgccgccaccgccaccgccaccaccgcgccgggagcgccgcggggagtgaggctgcgcgccgcctccgccggcccggactccctacgcccagccccggccgccgccggcgctgcctggcccgaacccgcggaggggcgccggagccccgagcccagggccagacctcctaccgccgctcctcgccgaccccacctcggcgtctggcacctaacttgtacctgagaagcctgagtccagcccgggagcctctgcggctccggctccgcgggagcgcgcccagccccgagcctctagccccgcatccagggcgcgtcaacctgactccccgagcgctgggaggaaaagtttgggagtgacgtgcagacggcgaatgaaacatccgaggagaaccctccccccgccccatgtcgcgctgacacacatcagctccagtctggaatgtgagatcaaggcgtgtgcgccgagcggtgggtttggcccctgccccctccccctccgagtcaacactgcttgtgtgttgcggtgattccaaataaaagcacatcgaaacccctgaaatctggcagtgacaccttgccagatacttcttttttttaaagacagagtt

SEQ ID NO: 47892 - DNA, 131 bp, Homo sapiens
  chr10:125853672-125853803
  hyper
gcccggccgccagagacatctttaaggaacttggcggtctggagccagcccgtacattaatattcaaggccacagcgctggtgagttcggcgccctctgttgtatttttgcatcccgggaaggctggcccg

SEQ ID NO: 47893 - DNA, 30 bp, Homo sapiens; identical to SEQ ID NO: 7772
  chr10:126077779-126077809
  hyper

SEQ ID NO: 47894 - DNA, 108 bp, Homo sapiens
  chr10:126107130-126107238
  hyper
cgcccgcccgtcggccgctctgggctggaaccaggactccggcctgcaagccgtgggtcgccacgcccctgccccctgaagctgcgcgccggccggagactccagggc

SEQ ID NO: 47895 - DNA, 415 bp, Homo sapiens
  chr10:126107456-126107871
  hyper
gacaaccgggtacacgcggcgtctatgaagcgcaacagtgacgccggagagtcactgcaacttaaaggctgattctgccccgcccccaagacaccctcgccgctcattggctggggcggagggcaggataccaatcgcgtgggtcccgtcctccgccccgccctccggccgcgcatcaaggatctttgctcctcccgcggattcgatccgcgctcgcgcctcctgagcccgccggcctgtacctgagctcaggcccctcggtcgcctcctctggcgggacgagaagagtccttgtccgcccttgctgacgagaagactgaggcccgaaaaggaaaagtctgttgggccccccactgcgcgggccgggtgtggctggaggccgagagacgtgaggctggaccgcccgccctgtgct

SEQ ID NO: 47896 - DNA, 904 bp, Homo sapiens; identical to SEQ ID NO: 7775
  chr10:126135877-126136781
  hyper

SEQ ID NO: 47897 - DNA, 348 bp, Homo sapiens
  chr10:126137184-126137532
  hyper
tcttctctctcccgccgtgttaatagagtttcagatttgtgcggggccggatcgatagatgtcatctattaaaggtaagttttaatcgaacaatattaggatcagacagggaaagggggtttgaagtcggtacctgcaagctgcgggcaggagatatgcaggcgccagtaatagaatatcgatcacgagggtgggggaagggagggcggcccctcggagagaagatccgaacaattaccaggccgcctgcctgggcccaagtgcggccgccagaggcgccccgggccccaggcaatcaccgccaaacttggggaggggagcagggggctgcgcggcatccagcctccc

SEQ ID NO: 47898 - DNA, 208 bp, Homo sapiens
  chr10:126138400-126138608
  hyper
cagggagcgctgcgcgggtgaatttctgtgggtccaggatgtccaggacagagaaagaaatcttgtggtgggagggagccgccttggccccgccgtcctgccatgccagcatgcccgtcgcccacgggccggcggtcggcggcgcggggttggggatggcgccgctcgggcttgccttcggctgtggcttggcggtagctttccagcc

SEQ ID NO: 47899 - DNA, 30 bp, Homo sapiens
  chr10:126138864-126138894
  hyper
ggaggcttccatcccggggatccctcaccc

SEQ ID NO: 47900 - DNA, 30 bp, Homo sapiens
  chr10:126150278-126150308
  hyper
gggtgcccaggccgcgccccagttccgggt

SEQ ID NO: 47901 - DNA, 30 bp, Homo sapiens
  chr10:126431871-126431901
  hyper
gcaaaaatgtgactcgaccagtgtgcctgt

SEQ ID NO: 47902 - DNA, 30 bp, Homo sapiens
  chr10:126490391-126490421
  hyper
ttccatcatggcggcgtccatttcgggcta

SEQ ID NO: 47903 - DNA, 30 bp, Homo sapiens
  chr10:126605435-126605465
  hyper
gacgttgtgccgctcgccgcggggtttatt

SEQ ID NO: 47904 - DNA, 31 bp, Homo sapiens
  chr10:126847189-126847220
  hyper
gaaggattgtttaccccggacagggcaagga

SEQ ID NO: 47905 - DNA, 285 bp, Homo sapiens
  chr10:126847583-126847868
  hyper
cgccgctgggcctcccgcgggagaaaggcccaggcacgccccggctcccgcgcgcctctgcccaactcgcccggggcgctgggggcagcgcgagggagagaaagaaaggcgcttcccctcggccgcgcggggccgtccggcgccgcggagggctgggaggaggaggaaccgcggcggcccggctgtccctgcgccgcaccgggtccctgccgcccggggcgcgccctagccagcccctcctgctaaactttttctttttgattcgccccacccgaaaagtgcggc

SEQ ID NO: 47906 - DNA, 123 bp, Homo sapiens
  chr10:126847900-126848023
  hyper
cgggctcccggcggcggcgggcgaggaggaagtggtgcccgcgggagcgcggccgggcagaggaaatgcccggcccgcccggcccccgcccgcgcccgccgcccggcccgcccaggccccccg

SEQ ID NO: 47907 - DNA, 371 bp, Homo sapiens
  chr10:126848387-126848758
  hyper
cggcctgggtcgccggcggcccccgggcgcgcacccaccgggctcagggagcaggagccgggggcgcccagggaaccgtcgccgagacgccgccgccgccgccgccgctgccctccggacgccgccgcgctcggggtttctttttttttttttttcaaccctgatgggaaggaaggtgaccgcctacttcgcattcatcaactctcatcacaacaacaaaaatcctggcgcaaacggcggccagcgggcgcaatcggtggcgggggcgggcggggacccccgagccagcgtccacccccgggcgccgaggggggacacgaggccgggggcacggaccaaagatgtcctcggatgccggctccgcgtccttc

SEQ ID NO: 47908 - DNA, 94 bp, Homo sapiens
  chr10:126849002-126849096
  hyper
cggccccccctcagcgcggcatggctcccggttcggtccctcgctcctcgggccgccgccggctcctccgggccgctcccgagccaccttaaaa

SEQ ID NO: 47909 - DNA, 648 bp, Homo sapiens
  chr10:126849497-126850145
  hyper
ggaaggagaaggaaaacggagagaaaaggaaaggaaagaagcggcgctggccgcagctcccggtacccgctggctgcgcaggagctaggcgggaggcgaggtgagggtcgccgctcgctcactcctcgctcctgtttttggggggggggggcaaaggcggggtctctttttgcaaaccaatgacacaaccccacatgggccggcctcgcccccttcagatactcctcactacaaatcggctctctcgggggattagtggctccgcgaaagtgcacacaagcgcggcgggcgggagggccaggggccgggcgcggcgggcactccctagcccggccccgcccgggaggccctcgggaggcgcgggggcctcggtggcaggggccgaggtcctgtcgcggtggctcggggtccgctgctcccctggcccttcatcctcctccgccccttccacgtggggtaccgggcagccggccacgtgggggaacgcgagccccgggtggccccggtcccatggggccccgcccagccagcggcgccaaccagcccccttcccggcccccgggctccaacttcctcctggtgccccgcaccggccgcttctgccttctcaggcccgcggggtcaggcgcgggccggccacagggggca

SEQ ID NO: 47910 - DNA, 60 bp, Homo sapiens
  chr10:126850345-126850405
  hyper
tgttgggtcggagccccgggtctcgaggagggaggcgcgctgcggcgtgggggcccgcga

SEQ ID NO: 47911 - DNA, 30 bp, Homo sapiens
  chr10:127511974-127512004
  hyper
aggggtcatggctgcggaatccagcagggg

SEQ ID NO: 47912 - DNA, 30 bp, Homo sapiens; identical to SEQ ID NO: 7780
  chr10:127532323-127532353
  hyper

SEQ ID NO: 47913 - DNA, 31 bp, Homo sapiens
  chr10:127585010-127585041
  hyper
cctcgctcagtgtccccggcgacgcgcgggt

SEQ ID NO: 47914 - DNA, 30 bp, Homo sapiens; identical to SEQ ID NO: 7781
  chr10:127730549-127730579
  hyper

SEQ ID NO: 47915 - DNA, 1242 bp, Homo sapiens
  chr10:128075620-128076862
  hyper
aaagtggtaacggttcgtgatttaggccagttgttgaaaaataaatgcctgttatatagaatcacagaacttgagagcttgcggccaagggaagtcgttcatcggtggaccgacagcgccccgggcggcagaaagaaggcggcggcggcggagacccggggaagttgccggatttttaaaaaggcacctgctgggtgagtcctcactgtgcaaacgggagccacaggtgcccgattttaaggggctacaactcgggaaaacctaagtctgtaaaactaagtacgttaaactaagtaagttctcgctgtgcaccaagttgatgggggcgattatttacggcggagaaactgagtggaggaaggagggagaattccgctaaagtttgcctgcgactgacagctagggagtgacctggaagccaggaagaggggcagagaggaaactaaagaagtaggtaagagagtcagtttatgaaaatagagcctgctgtggagagcagcaggcacacctgcggaggagggggctgcctcacctgcggggccgctgcgcgcccccctaagtgtgttagcgggggaggcggggctggaaaggaaacctggtgaagggctggcccggagcctggggtggggatattcactgcgggatagggccagcaagaggacccgacacgcatcgtcccgagtgacacgtgtaaatgtcaagatacagagacatctgcaaatgtcacccaagagggtgaggacgggggagcggtcccgaggctgtgccctccggggcaggtactggctcctgtggggctgcgggccaagtgtcgcccttccccaaggaattggcacctggggggggggggtcggtctcgccgcgctggaagcgcaagccccggggctccggagatgcgccggggcgcgtcgcccctcggggcagccctggacctcggcgcgcccaggcgcagcgtgcggtgccctcggcggggcgggcagcgagccgccctagttcggcgacttacctcgggcctcgcagggcgcgagcagagcaccggccagggcgagcaggagggcgcgggcgggggacacgggcagcgggcgcgctgccatcgtcgccggccttcagtgcagcagctctcgggcccggcggcgagcgctgcaccatcccacgcgggcgccgagccggggccgggcgtcgcgaccggagggatttcctgcctcggcgagtcagctccggagccctcgcgcagcgcccgcg

SEQ ID NO: 47916 - DNA, 300 bp, Homo sapiens; identical to SEQ ID NO: 7783
  chr10:128076940-128077240
  hyper

SEQ ID NO: 47917 - DNA, 1057 bp, Homo sapiens
  chr10:128593607-128594664
  hyper
tccgagctggggacctcgcaccaccaggctccggcctaagcccgcgccttgcaagccgcccgtttcctacctcccgtagaaaccccccgtccgtcccgcccccctaagggcgcacccctctcacggcgtgagcgccagccccgggagctccaggaactcaggagaaccccgcgggggtgcccgggtgcggagcgcggggctgggcgcactgggacagaggaaggggagccccggcgaccgcggggtcggggcccagggtccgcgccgagggcgggcgcagagcccgcggccgtcccgcctcccgccggcgctcccggcctttcccatccggcccgcgacgctccgcccgccccgtcccacatgacgccgcctccgccgcaaactttttcctccccatcctgtcgcggctcgaaaggaatggaaaatggcggcctagacgcggagtttcctgcccgacccgcggcggctccggcggcgccatgacgcgctgggtgcccaccaagcgcgaggagaagtacggcgtgggtgagcagcgccgccgccgccgcgcctctcgccccaagcccaggctccggcggggcgggtgtgccgggcgcctgttgccgccgccccgagcggccgccgggccggggagaggcgcttccgcccgcgcccgcgccgccgccccgctcgcaatgcccggcgaccccggccgccccgcgcccccggcggcgtcagctccagccccggggatgcgggtcgggaacacgagggggtggggtgggaatgggggcgggcgcgtccctccctagggtgtcccctccgacgcccgctcctctggacctctgccgtggagccccccgggctacccccaactccccggccccggccgctgctatctgcgcggctgggcccgtcagggaagcccaggggtcactgtctcgcggcggcttctgcttcttggatgaacttgcgtcccgcgtccgggctctgggtgggcgggctcaggtcggcgcggtcccagcggataattccgccctttcccggcggggaggagggggcgcgacctgggtggcca

SEQ ID NO: 47918 - DNA, 31 bp, Homo sapiens; identical to SEQ ID NO: 7786
  chr10:128850483-128850514
  hyper

SEQ ID NO: 47919 - DNA, 68 bp, Homo sapiens; identical to SEQ ID NO: 7787
  chr10:128993453-128993521
  hyper

SEQ ID NO: 47920 - DNA, 855 bp, Homo sapiens
  chr10:128993580-128994435
  hyper
cgttggttggtttcccacgcctgtcccggtctgactcgggctgccaggcaccgggaagccccgcggcgccgaccccaacccgcagccccgggaaggtgccaaccccagcgagtggaggagacgagcatttcacgtgggcatctgccttcactgctgctcgcgcctctcctcaacggccggcgtcagggcccctctgttccaactcatcccccccccgaagttaatcagccgtacttgtactttccagggcgctttagtttggaaaatacttaaaagcctcgaaaccttccggggagacggccgcccccagatctcccagttttgcctggctagggctgtcgggcgctcacgaagctgtggcgtctgtctggaacccacatcgcagaggcgcagccccgctcctccctgacgtcgccaaagttgccagacgcccctcagcgacccggtcgcgccagatgcagttgcataaccttgccccccacctgcgaccgcaccgggtccgctcccggctgcaccggggtgtcccggccccgggagccgccgagtttccggccaagccggtttggggccgagtgtgtgcgcccgaatcggggtcggcgcccgtcccagcggtgctctgcccgcggccaagtacgacgggcgcgggggcgcgggaggagggcacgcggggctccgcttaccttccgctgcttacagataagtcgaggtcgatgcagcgcctggctcgggcatgtctcgctgcggaccctggcaagcctggggcggcacggagcactccggacagggcatccgcggccagactcgccgcgctcacgcggaggaagcctcggctccggggacttggcccgctgcgcg

SEQ ID NO: 47921 - DNA, 164 bp, Homo sapiens
  chr10:129534421-129534585
  hyper
cacaggtgcccgactcggagtccgggaggcgggccctctttccaggtacccagcccagcgtcagcctgggtccatcctccgccaccccacagcgcggggagcaggggaggccgaaagccgggcagcttggggggccgggataacccgggctgcagcaaccccgg

SEQ ID NO: 47922 - DNA, 454 bp, Homo sapiens; identical to SEQ ID NO: 7790
  chr10:129534992-129535446
  hyper

SEQ ID NO: 47923 - DNA, 593 bp, Homo sapiens
  chr10:129705207-129705800
  hyper
gggccatacccgcctcgcaggtggggcgggcgccctggatgcgctccccgcgccgggcaccaggcgtcgcccccgctcctcgcagcgcccaggcccccgcccccgccgcggagccacagccggagctggagccgaggcggcggcgggacgcggccggccggacaaatttcctgctaggctgcggacagcgggcggcaggagccggcgcgagcggcttcaggaacccacggcctctgcgcgtccccgcgacccttcttcgcgcccggcgaagacagccgggcgccccggagggcggcgggcaggcgcccgggagatgcggagcctccgctgcagcgcgatctgcgcgaccagaccggcccccccgaggtgagcgcgcgtgcggacagggaccctgcgcccctgtggggaactgtgcaccccgggaggcccaagcaggccggggcgctgcctcggccgctgccgcgggagggaggggccgctccggggctcagagtccggaccccggccccgccgcccccgcggcgcgcccagtaccagcggctggggcccgtacgacccccgaccccggcctgtggcgcgtcccctcacccgga

SEQ ID NO: 47924 - DNA, 50 bp, Homo sapiens
  chr10:129706050-129706100
  hyper
tgccaggatgctgccccgcagccgggcgggcgcccgcgccttcccaggga

SEQ ID NO: 47925 - DNA, 40 bp, Homo sapiens; identical to SEQ ID NO: 7792
  chr10:129923866-129923906
  hyper

SEQ ID NO: 47926 - DNA, 30 bp, Homo sapiens
  chr10:129948111-129948141
  hyper
cgcagcgccccttccgaagcgccccctccg

SEQ ID NO: 47927 - DNA, 371 bp, Homo sapiens
  chr10:129948420-129948791
  hyper
agcgccacctggcggcggatcagggcccccgcgcccttgcgtcctcggaagggggaggggaagggactccaccctgcaccccccacagcgcgctcccgaggccgtttcccaaggatgcgcgggcccgaggggatggggacgcggcccgcgcggcgcgttcctggctacctggagtctgggaatggcgaatcccactcgcagcggacacaggcgaggcgcagcgggacgggattggtgggaacggaaacagcggtcacctgggagcccagaaccagcgagtgcgcggtgcagcgttcgcttaccaaacgttgtgggacaaacgcctttcaactgtttctggacgccagtgggccggcgttaccctgttgagc

SEQ ID NO: 47928 - DNA, 30 bp, Homo sapiens; identical to SEQ ID NO: 7793
  chr10:130008570-130008600
  hyper

SEQ ID NO: 47929 - DNA, 31 bp, Homo sapiens; identical to SEQ ID NO: 7794
  chr10:130009066-130009097
  hyper

SEQ ID NO: 47930 - DNA, 30 bp, Homo sapiens; identical to SEQ ID NO: 7795
  chr10:130009107-130009137
  hyper

SEQ ID NO: 47931 - DNA, 30 bp, Homo sapiens; identical to SEQ ID NO: 7796
  chr10:130066478-130066508
  hyper

SEQ ID NO: 47932 - DNA, 226 bp, Homo sapiens; identical to SEQ ID NO: 7797
  chr10:130085049-130085275
  hyper

SEQ ID NO: 47933 - DNA, 54 bp, Homo sapiens
  chr10:130085355-130085409
  hyper
cgcacgggtccccgggccgcggcgcgctccccgccacgccgcacatcaaggccc

SEQ ID NO: 47934 - DNA, 183 bp, Homo sapiens
  chr10:130338585-130338768
  hyper
cgccaccgcaaccaacaggcctcttcatgggaaattggctgaaaatgtgctgaccggcataaaacttttattagaatccgagagcaggaggctgaacttccagggaatgacgggtctgggcgggctggggagggcgcagccaggacccagaccggggcgctcggtcccccagccggcccccat

SEQ ID NO: 47935 - DNA, 994 bp, Homo sapiens
  chr10:130338803-130339797
  hyper
cggctccctgggcccccagctcacgatgcccgctaggagccggcgccggggcgccccaaggctgcctccccccgcagcgctgcgcagtgcgccctggtgggatggggacgctgcacccctgaacccccccaaatccggcaggcctagggctggaggcgcggaaaccctcactcctgccgagctcccgagcgggacagactttctgaaaggggaaagggacataaatcaggaaattaaaaaaaaatagtttctgcacattttcaaaacccacgttgcgctctctaaggtccttttcattttaaccaaatcagggggaacttgtcctcacagcggcgaggcagatggaacaataaatcacaggcgccgttgactgcctgcagtgcgctctccacagctgtcacttttttgtctctttggttttagctgacatggtttgaggtccactgtgaaccaatctggacttttttttacagtcatatccatcaaaacgaccagtggccatcagcccgctgcggccatcgatcgggtggcccctgcccccgtgcaggccggcgtgacccggctcctaggtgaggctggagagaaggacctcgttttagcggattttttcctttttttttttttcttttgcctccagctacagctgtgattttctgagcagtcttggctaacgttattaaagttgcatcaggatagatacagagcaaagcagataacaggctccgcgcgcgggagctggaaagaccggcagcctctggttcctgttgttgttttttaagtgcgcggaggcgcaggcgaaactcggagtttccaactcgttgcttattttgcaaagtaaacaagcaaatgttatgtgcataaccttcgctgtctcgctaaaggtcagcgcgcccctgctcatttcccgggctgccttttgggggcactctgatgccggggatttcctcgggtgttggggaaacaagacgtgctcgcctaacaaagactcaatcta

SEQ ID NO: 47936 - DNA, 30 bp, Homo sapiens
  chr10:131265560-131265590
  hyper
gtgagtgtctgggtcgcctcgctcccggaa

SEQ ID NO: 47937 - DNA, 238 bp, Homo sapiens; identical to SEQ ID NO: 7800
  chr10:131757614-131757852
  hyper

SEQ ID NO: 47938 - DNA, 32 bp, Homo sapiens
  chr10:131758276-131758308
  hyper
cgcgctcagcccggctccgccgctgggaaccc

SEQ ID NO: 47939 - DNA, 1551 bp, Homo sapiens
  chr10:131761128-131762679
  hyper
atctttatgtcctttcaccagcgcagaaaaggagagccagccgctgcaggggcggcgagcacgcagcaggcacttaccgttgctgtacaataactggagtttatagtggatgccgttgttggttttctcgttgtttggctcctgaaagtaacgataaataattgcatttagtgcgatcggtgtcaggcgcggccaccacgctcggtccccctccgcgaccgaggctctcggcctcacacatggcaggattcctagctcgaagcagcgcggtgatgtcactttcctgctggaagcccagcgttctcctcgccccgagtaagtccgagggcgcagagaagttgcccagccctcggcggtcccgggcggccgcacgtggcggcggcggggtggcctggcggagccgagcccgccgcctaggggggcactcgaacccccgcgcaccggcaccgcctgcctcccgcttctagaaagagagagggtgtgatcgtgtgtttgcacttactttctctttctccacaaagtccacaaaagcggtcctttcaatctccaccggctgcccctgcctatcgtagagcgccagcacgaagtggaagaaattggatttccggaggttggaaggcggctgcttctcgaagtgcgcccgcgccagccccacgccgctgcgggaggaaagagacagcggcccggtgaggagcgcggcgccggccggcggagggggccgggccgggccggggccggggccagggcgcgcgggggcggccggtacgtacctctgggcggccgtgttggcgtccaccacgcccgccgtgtgcatccacgagcgcaccgggttcatgccgctgcccagcggctcctccttcatggtcgtccccccgcgcggaatattctcctgaatcccaaacatgaaaactgctggcggcggccgcagctcccggccgaaagcgtttcctcgagcagcggcgctcggggcttggcggcaggcggctgccctggccgccctcgccctgctcggcgcctgcggtccggccccgccgccggcttcagcccgtcccgggcaggcgcgacatacaccagcggccgggcgctccggacggccaggggcgcggaggcggctccaccggcggcggcggcgcttcgaaggagcaggacgcggtggccgcggcggcgcttgttgttgttgttgtttgcaggcgcgctcaacgtggtgtcatcctagccaggcggcgtccgcggctgcaggacactgcgggatcgcccgcttctggcgcggcccgcctgctccaaagacaaataaacggggcagtgagtgctgcggcgcagtcccgggcgcaggcggggcgcggcggggcctggagcggcgcgcgcagcggacggaggcgcacaaaactcagccctctctccccgaggaatggaccctttcccgggagccaaaactcgaagcccccgggagcggcgctgtcagagggtgacgtcggggggcggtgcctgcgccatatatgggagcggccgcccctcgccgcgcccctcgccgccgccgccgccgcgctcgcc

SEQ ID NO: 47940 - DNA, 390 bp, Homo sapiens
  chr10:131762946-131763336
  hyper
gtaaaatgctgaggcgccccaagttgcccagatgcatgcaataaatgcaaggggctgcagcttgtcctggggccgcccgaaggagaagtgggaagaggcaggtcgaccgcagggagggcgccggagggaggagcgggcaacggactgggaggaggggtgcccagggctccccggccaaggctggacgcgcagctcagcctgatttctaagcagacctaaggctgctgcagggccggccggtcccggtctgagccccgccaggtaccccaagcttcctaccccggcggaggccgccgagtgccgggcagggaatcacgtcggaggcagggtctgccagatgctccctctcccccggtggccgcggcagaccccggcccctggcctgttctt

SEQ ID NO: 47941 - DNA, 250 bp, Homo sapiens
  chr10:131763632-131763882
  hyper
gggactccgcgcccaggagcgcggcccgcccaaaggacgtctgcgcgacacggagcagagacccaggggacgaccaggaactgtcctaggcacttccctgccaagagaaatcaggcccttttgattaaaagaaaaaaaaaaaaaagattgcagggcgcaagtgtgttgcagggcagcctcctcccgccgggtctggggcagcactcccttttcccgtgaattggcagcgtgtgtacgttaatattttaat

SEQ ID NO: 47942 - DNA, 494 bp, Homo sapiens
  chr10:131768740-131769234
  hyper
gcggtttgccaacacgagtaaaggaagttggggtggtggagagctacagtgggcacggacggaaagggtggccacggtcaccgatgtactaatgtcctcctcctcggctacccgatctcactccttcacagcaccttaacagagtgtatacacccgttctggtgcgcaaaagtggggcgatgggtgccggcggccgggccggggagtccgtccgggtaattaactcagctccggcgactgcgacgatgaggccgggagggaaggaagagcataccgctcttggacagaaatgtgtcaagctctcctcccttccagcctgcataaaccctttcgcgcacattcgcgcgacttctaagggatccaagccagcggactgggtccagcagcgcgcggcggcgggacgcacccctcctctccccccaggaaggcgggtgcacgccggggctggaagggggagggtgcacctctggctacaaattcggccgcgaagagat

SEQ ID NO: 47943 - DNA, 847 bp, Homo sapiens; identical to SEQ ID NO: 7804
  chr10:131769490-131770337
  hyper

SEQ ID NO: 47944 - DNA, 383 bp, Homo sapiens
  chr10:131770563-131770946
  hyper
atcaatttttggttgttaatccgaaaggaggagttttaattgcttcctgcgttgtcgtccaggcatctaggcgcttcgaccttccccatccctctctccaagggtctggcgtttgtactgggggaagacggagagtgaaaaacgcggggtccttcagctaaatcctcggaaccccggatcttcgcccgtgccggtacgcgcctcccccgcgccgagaatccctggcacgcgatcgcctccccgcaggcccgccgggaaggccgcgagcagaggccaacggaggcctcccaggcagtgctcgccaggaaccaagacgctgccagggcgcggcgcaaaagttcactgcgaggccaggcctgggcgcagctcatggtcaggggctc

SEQ ID NO: 47945 - DNA, 31 bp, Homo sapiens; identical to SEQ ID NO: 7806
  chr10:132050986-132051017
  hyper

SEQ ID NO: 47946 - DNA, 88 bp, Homo sapiens; identical to SEQ ID NO: 7807
  chr10:133109172-133109260
  hyper

SEQ ID NO: 47947 - DNA, 120 bp, Homo sapiens
  chr10:133110064-133110184
  hyper
gcccccggacccggcccccgccccggtccccgcccgcccgcgcccctccccgccggaccccgccccgccctcgcgctccccggccctggccggggtctcctccccgctgcgcccctggac

SEQ ID NO: 47948 - DNA, 321 bp, Homo sapiens
  chr10:133110553-133110874
  hyper
cgggtcccctggcccggaagttgagccgcgggtgcctggtctgaagttccgcgccccacagtggcccgcgggcctcggcggctcctgccctacgccctccaaggcaccaggcaggtggccccagggcctttgcccacgacaccccctgggtggggcaggaccacccctctgtgaattcgtcctggatgcccccaggcacagtctgtactcctccctcccccagcacacgcggcctctgacgctgcacgccgagcttcctgggacccaggacgaaccgggctccaaggaccctcgctccgcccggaccacacgcaggcagcg

SEQ ID NO: 47949 - DNA, 125 bp, Homo sapiens
  chr10:133110966-133111091
  hyper
cgccagcctcctccccatcccgggtccacagcttcagtgcagcccctggcgacgcgcgctgacagctgggcagagacttccgtgcgctgtaaaccccttaggtcgctaaacccaggaaacccaag

SEQ ID NO: 47950 - DNA, 30 bp, Homo sapiens; identical to SEQ ID NO: 7809
  chr10:133252504-133252534
  hyper

SEQ ID NO: 47951 - DNA, 364 bp, Homo sapiens; identical to SEQ ID NO: 7810
  chr10:133794877-133795241
  hyper

SEQ ID NO: 47952 - DNA, 571 bp, Homo sapiens; identical to SEQ ID NO: 7811
  chr10:133795312-133795883
  hyper

SEQ ID NO: 47953 - DNA, 83 bp, Homo sapiens; identical to SEQ ID NO: 7812
  chr10:133795975-133796058
  hyper

SEQ ID NO: 47954 - DNA, 1 bp, Homo sapiens
  chr10:133796301-133796302
  hyper
g

SEQ ID NO: 47955 - DNA, 30 bp, Homo sapiens
  chr10:133849782-133849812
  hyper
aaaagcatttctctcgcaacaggccagggg

SEQ ID NO: 47956 - DNA, 159 bp, Homo sapiens
  chr10:133999363-133999522
  hyper
cgctcctgccgtgaccgcgcggcagcctcaggagcccgcgaggcctctggcccggcccaagcttggctgcgtgttccgctgcgtggaggacgccttcgagagcaagacgctgccgctggacgctctgggcggcggccgcccgggccctcgggttgggag

SEQ ID NO: 47957 - DNA, 132 bp, Homo sapiens
  chr10:133999554-133999686
  hyper
cggccgcagcaagtccccgagggcagcccggcgtggcccaggcccgggacccccagcaggtagtggccgcgggacagaggccgtgggcccgggctcggactccccgagaccctcgcacccggaggacgccgg

SEQ ID NO: 47958 - DNA, 276 bp, Homo sapiens
  chr10:133999776-134000052
  hyper
cgaggtcccgcccaccaccgcgtcccggtccctggggagcgcgtgcgcctccttctgtctctctctctctctctctctgtcctattcgggcccctcctgccctccgtctctcgcggccagcgtggaacagcctcgcggggtcacagcctggcgctcggaccctggcccgggtcatctgcgaaggagccggctttggccaaggtgccttcctggacgggtgtggttcccagagcgtcgcggcccggggttgactggctcggaatcccggggccttgg

SEQ ID NO: 47959 - DNA, 194 bp, Homo sapiens
  chr10:134000108-134000302
  hyper
cggggcctggcaggacgtggccggactctctccctcgcctccccggggtgcaaaccccgcgcacatcagctggagcaggttgaaatccccacccagcgctcgtccgcgggtctgcgcgggggcccggggtgcagagatcagaccctgcagcggttccagcgctgggggggctttaaagcgaaggagtggctgag

SEQ ID NO: 47960 - DNA, 30 bp, Homo sapiens
  chr10:134001231-134001261
  hyper
caagggccactggccgggaaccctggcagc

SEQ ID NO: 47961 - DNA, 20 bp, Homo sapiens
  chr10:134045848-134045868
  hyper
caacagagaagagggcgggt

SEQ ID NO: 47962 - DNA, 112 bp, Homo sapiens; identical to SEQ ID NO: 7815
  chr10:134045912-134046024
  hyper

SEQ ID NO: 47963 - DNA, 30 bp, Homo sapiens; identical to SEQ ID NO: 7816
  chr10:134046263-134046293
  hyper

SEQ ID NO: 47964 - DNA, 769 bp, Homo sapiens; identical to SEQ ID NO: 7817
  chr10:134120668-134121437
  hyper

SEQ ID NO: 47965 - DNA, 619 bp, Homo sapiens
  chr10:134121687-134122306
  hyper
ctagggatgggggctgtggttcgccgggacacggggaccacggctcagactagacggcgggtacgagagcgagggaggcagggagcgtccccacgggtatcctggggccccggaggtcggcgtccctggcacggggactgctgtgcccggcacggcggcgggaccttctcgcggtctccgggggcctccctcccctgccttcttcgtgaaaacagccggcgcgcgggcttccgccgcccagtgcggggagccctaaactccagccttctgctttgcgcagggtgaggccgggctgcaggcccgggatgcgggcggcgggaatctgccgggcagagcccggctcacggtcaggaggcggcaggctgagtccaagcgctgcgccagagggtggggtggggcagggcgggcctggctgcgcgcgcgcacacgcgggcgcctggggtgggcgctaagccctgagcacgtgcgcccgcgctctcgggcacccccgtgccatcctcgcgacccccgtccggcctgagaccgcgtgcccgagtcgcccagggtccccttgtccagatgcgacaggggcctcggcactcggcgtatttcggaggcctggggcgcggcttgacctccg

SEQ ID NO: 47966 - DNA, 295 bp, Homo sapiens
  chr10:134209483-134209778
  hyper
ggcgaggtcgacaggcgccagcgacccgacggtccccagtggcaccaggggcggtggtcctcaattcccaggctgggaggagccctgcccggcggcgctgggtcgccaggacaactacgcggtcccccgccccgcctccaggcctcgtcaggcgctgcaagtccggctcagaagcccggcccggggccaaggtcaccgcagcaggccgggcccctgcgttctgagccgggtgcggacgtgctggtgctcggggaagtcgggggctttgacgcctgaaggcgcgggagccgggcgc

SEQ ID NO: 47967 - DNA, 946 bp, Homo sapiens
  chr10:134210376-134211322
  hyper
ccgggctcgtggctctcgggtcctcccgagccaggggacactcccggccagcgtgggccgcgagcccgggcgcagccccctctccagcccgggggtccgcaccgcgcgtccggccgacctctgcgggcgggcgcggcttctcccgggacgcggcggcggcgggcggggtccccgggagcggagcccgcggccgcgcgcccccggcccggctcggctcggctgtggcggccgccccagcggagctttgtgacgtcaggcggccgcggggcggcgtcacgcgcggggctgacccggcggcggcggcggcggcggcggcggcggcggggcgggggcggcctgggacgcggcgggagcatggagccgcgcgccggctgccggctgccggtgcgggtggagcaggtcgtcaacggcgcgctggtggtcacggtgagctgcggcgagcggagcttcgcggggatcctgctggactgcacgaaaaagtgagcgggggcgcgggccgggacacccccggggtccccacgcgacacccgcctccgccgcccggagacccgggacccgcctccgggttgggggtggcgtggccccggcgcccgctttcggtttctgccgagcctgagtttcggggcgcgcgagcgcggccgccactcgggggggcaaaagtggttctcaaagtcgtcgcgacttttcggggcgggcgccgggccggggcgggccggggcggggggcgcggggccggggtcccggaactccacacatctgccataattaatgcacttttctttgttcagagccactgttgaattcgactgttggcagaattgtcgttaaagcaggggagggtcagatgcgccgtggccttgccctggcagttcctcacaggtgggggtgccctgtcgaaggccacgggcccctggctgctgggagtgactccgcggctgaggtttgg

SEQ ID NO: 47968 - DNA, 30 bp, Homo sapiens
  chr10:134266664-134266694
  hyper
gcacctgtccaaggcggctccggaaggccc

SEQ ID NO: 47969 - DNA, 58 bp, Homo sapiens
  chr10:134350648-134350706
  hyper
gaagctgcacggtccacgctccgtctgcgcggagagccgggcgcgcgtggcccggccc

SEQ ID NO: 47970 - DNA, 771 bp, Homo sapiens
  chr10:134351008-134351779
  hyper
ccgccggtcgcaagagcgccccgcgtaggccccgccccgaaaggaggccccgccccggggcaggccccgcctccacaaggacaccaagtcccgcacaagccacgccccccgcaggccccgccccactctgttcagatctaggcccaactcaggctccgcacctcaaggctccgcccccagcaaggctccgccccaggcccggctccaccccgcacaggccccaccccgagtcaggctccgccccgcccaggccccgccccgggctcggctccgcggggcgggacttgccctcagcctgagtcggcggcggctgcgggaactttcccagcggatctaatggctgcgcgcgggccgctgtgaggcgcggcggcgagcgacgggcgcggggccgcggagcagcgagcgagcgagcgagcgcgaggccggagccccggccaggcccggccgacccgccgagcccgcgatgcgccccggggccgccccccggcgcagctgacgccccgcggccccgcgaagaccccggccggccggtcccggaggaagcggccgccgccgccgccgcccagcccagcgcccgcgccgcccgggcaccatggcggggaaggcggccgccccgggcaccgcggtgctgctggtcacggccaacgtgggctcgctcttcgacgacgtaagtcccccgtgccggcggcaggccccaagcccggaacccccgaccctgaccccggggtcccgaactgcaagccttggaccctggaccgtgaacctccagac

SEQ ID NO: 47971 - DNA, 50 bp, Homo sapiens
  chr10:134545672-134545722
  hyper
cctcatgctggacagacgtgggtcttactgttctgcgctgtttgtctgcc

SEQ ID NO: 47972 - DNA, 31 bp, Homo sapiens; identical to SEQ ID NO: 7822
  chr10:134564784-134564815
  hyper

SEQ ID NO: 47973 - DNA, 30 bp, Homo sapiens
  chr10:134598480-134598510
  hyper
tgcttcttgagcagccgcgtgatcttctcg

SEQ ID NO: 47974 - DNA, 161 bp, Homo sapiens
  chr10:134598860-134599021
  hyper
cgaaggttttctccagcgcgaagatctgctggcccgagaaggtcgggcgcgagtgcttcttcttcccgtccttgtccaggacgccgccggccggggctgcaagggaggggaagggagggaggtcagcggccggcggggtccccctccgcgcccacccgccc

SEQ ID NO: 47975 - DNA, 114 bp, Homo sapiens
  chr10:134599431-134599545
  hyper
gcccgggcggttagtgtccatgggcgccgccgccgccggcccgggctcccatccgggccccgccgccgccgcccctgcccgccggcccgggaagtttgcgcgcggcccgggcgg

SEQ ID NO: 47976 - DNA, 130 bp, Homo sapiens
  chr10:134599708-134599838
  hyper
gctgattggctgcggaccccgcggtccggccattggccggcgccccccccccgcccgcgcgcccccgccggccgcgcactccatgaagggcccattagcgcggcaggtgcctcccgggctgtaaattcgc

SEQ ID NO: 47977 - DNA, 1592 bp, Homo sapiens
  chr10:134600123-134601715
  hyper
aggacgcgggcctcgagtccacggaatccacgggcctcacggccgggcgaggctcgcacggagctgcctctggtttcgccgacacgcggccggcgcggtggaggagtgaggcaggcgggagcggggcggggaggcgggtcccgggaccacacgcgcggctcggcacttccccgtcatcggcctccaggtctcccgctgggggtcccccaggatgtgacctgggcccacgacttcgcccacgggccgcctctcgcgaatccccggccgggagaacagagaccaggacggcctcagcgcggaagccctgtccagggcccgaacgtgggtgcgggctgggggcgcagcggcagaaacgcggccttagacgcgcgcggggggccggtgtcccccccgcccccacggcaccgggagccgctcgctcatccatcccgcagaccgggcggtgagatgactccgagccccgcgcacggcggccgcgagcaaacgctccgacgtctgtggtgacgtctcgtattgatttagggacacggggcggctgtggctgtggcccacggctcgtggggagcccgagtctgtgcgcagggaacgccgctgcgtggcctctctcgggcctgtgccgcggaggaaggcggcgcccggggttcggggccggggtctcacgtccgccccctcgcccccctccagcgtccgttttcgttttgtgcaggtcgaggcggggacttggcgccgtcggccgctcctggatggcggcttggaaaagccacctgcggccaaactccggggcagtggtgcggccgccgggtgtgtgcgcgctcggggctgccccggcggcttccggctccactgaggtgcagccccgcgttcacggggggttcgcttcccccgtcgactccgcactcgattcgactgggattgggattcgattgggcgcggccgccccaccggtgatcggcccccgcggagcctggcccgggaacccccagcgcccgtccggccccgagacccgccccggcctgtcctgcgccccgctccctcggaggagacacgaggaagggccctcccgggtcgggttcgggcccctcccagcaccccaaggcgacggcgcccgcgcccaaggctcgggctctgagctgagacgcgggaactgcggggccggggggggcgggcagggggagttgggggcgggggctgctgtcgccctgggatcccccactctgcgcggccgggcagaccctgggcgggccgggaggggtgcgggtcgcccgaactgaggcccaggaggcgcgcgcgggcggaacggcgggaggaagccgcgctcgggacaggctctggctcttctcacagcctggaggggcggggcagggggcgtcgctagcgctgttttatggctgaggaaacatggacctggaggcgctgcgctgcggcccgataaaccctgggtctgtctgcgccccccggtcctccctgggctgccgagggaacgcgtggggtcgcgggtggggctggcgtgtcactggctgcggagcgcgcggctctccagggctcaggggcgcgggatgaggggccagggtgagttgggggcgcagaggagc

SEQ ID NO: 47978 - DNA, 418 bp, Homo sapiens
  chr10:134602127-134602545
  hyper
cggcgccgacgctccgcgctggaaaaccgagagcgcggggtttggcagaggccattcaagtttgttttactcgttcagcctgtatttgtggggctcctaccgcgcccgggctgtccggggggtgcaccgtgaacgcagcgggctccggcccgggcgcgggcgggtcagagcagcaaacgcgctcccccggcacccccgcggcgtctgcaggggagcgggcgacggggaggacggcgggggtgtcggcccggaaggagagccggcctaggccccggtgtccccgcgctgggggctgaggggcgacgggggaactccacagagggaaggagcctgcgttcgccttcggccgcccaggccatagagttcacaaactctgatttatcactgaggtgacttgtcccgcgcagccctaggcgag

SEQ ID NO: 47979 - DNA, 123 bp, Homo sapiens
  chr10:134650410-134650533
  hyper
tgccaagcctgtgtggcgaaaaacggccatcaggggatgcatttaggacgcaaggacgtcgctgtgctgttcccctcatttccaggagacctcgtggcagagccacggcgggggctttgtacc

SEQ ID NO: 47980 - DNA, 30 bp, Homo sapiens
  chr10:134755847-134755877
  hyper
gggatgagagggtccggggcctccccgggg

SEQ ID NO: 47981 - DNA, 167 bp, Homo sapiens
  chr10:134756154-134756321
  hyper
ggcgaacaacgccgcgcccccgccctgccccccgccagctccgcgggagtgagacaccagggcagcgacccccggcgaggggcgggaagaagaaaggggagggaaggcggcgtggggggacgccgggggctccgcgcgggcctcctctccccgctcagggctcctgt

SEQ ID NO: 47982 - DNA, 940 bp, Homo sapiens
  chr10:134901184-134902124
  hyper
gaataacacagggtcgtgcagtccgcccggcggcgttttcgggcgagggtctggtgctggggagcgagcgcggagcgaggtgtctctttaaatacgctctgcagtgtgacggcggccgcccggctggaagagccatccccaccctgcggcaggagcccgcccgccgccatcgcccgccccggtccccatggttacgcgcctgcctccggccccgggtccccgctgtcgccgcgggaggtgcgcgcagaggcggcggcgctgctggccgggctgggccgctcgtgcgcggggctgtgactcaccggccggcgccgcagccccgcaatctgttgataactcggtcccagctcggccgctgccctcgcgaatggagagcgggtccccggcggggggagcgcagcgcgtctgtctccgggagcgcggcccggccgccccggcagccgcttcggccacagcaggtgggaaggacgcgcgggtctgggcggcgggagggacgcgcggggccgcggctcggcagaaaagctcgcgccccgaggtgacactggccgcgaggaaagcagctccgagtaactttcggctccgctggggcgggaggcgccacggataatccagggcccccgccccgcgcgcccggcccggagctcgagccacatccaggcagagcaggcgccgcggccgggctggggcgggcgggtcactcggtgccggttcccggtgcaaaccccccggcgcgcctctggctttgtgcagcccgagatggttgagtttggctccggagccgggagtggggcgcagattgatttttaaatatggagaaggagacgcatctgccgctggcgcgttcggtccgagccccccaccggtccccaccggcaccgcctccgccagccccaggcgcagcccccaggccgcccgcggaggggagggagcgacaggggcc

SEQ ID NO: 47983 - DNA, 74 bp, Homo sapiens
  chr10:134902187-134902261
  hyper
cgctgaccgccgctgtcttcacagatgggagcagctcccggactgcgcccgccccgccgcggtcaccctgaggc

SEQ ID NO: 47984 - DNA, 79 bp, Homo sapiens
  chr10:134973645-134973724
  hyper
tggggcccaggtggggcgcagaccccgtggctccccgcggaggccacacgcctggctccgcccccggtgcctcccccag

SEQ ID NO: 47985 - DNA, 225 bp, Homo sapiens
  chr10:134973982-134974207
  hyper
ggacccggccgcggcggatctttacgaggaggacggcaaagacctggacttctacgacttcgagccgctgcccaccctccccgaggacgaggtgagcccccggccccactggggggccccttccgccgccgaggggtccgcggagagcgcccggggggaggacccgggaggggctgtgagctcccgcctccccaggcgccctccatggccgaggggttcccaccg

SEQ ID NO: 47986 - DNA, 307 bp, Homo sapiens
  chr10:135043318-135043625
  hyper
cctccggacccctcgcgtgcaggtgctgagcccgggcgggggcggcgggggcgggggcagcactgggggccggacaagggggcgccagcgccttccggagcgggaggggctccgcacacacctcgacgggggcgggggtaggctcggcacaggctaaaaacgagcggagccgccggggcttaggcatcgcggcacctccgttgaacgggtctaagaacagaactcctgaggaccctccgtttccaaccgaagccagtctttgctctgcgtcttcccggccgcagcgccaggaccgaccccttaggac

SEQ ID NO: 47987 - DNA, 564 bp, Homo sapiens; identical to SEQ ID NO: 7830
  chr10:135043826-135044390
  hyper

SEQ ID NO: 47988 - DNA, 1095 bp, Homo sapiens
  chr10:135050031-135051126
  hyper
aggtaggccgccgatcggttcccggctgaggtcccgccccagcgcccgcctcccgggctccaacctctttgctcagcccgggaggctcggctggctggggcgggcgtaaccgtggggcgaggcccgccggtctttctgatttccgcgggcggcgtgggcgctgaggcagccgcggtcaggacctggccgggagtcggggctgctccgtggaccccgcgtctgcgccgaaaccccgcatggcttcgggggccggacctgcgcctccgcctaactccggccgccggagacgccgtgcggaccccaagccagtgcgcggaagacaccgtcctaccctcggcatggctgcctcccacccggtcacgtcggtccccgcgccccacgccgacgcgcaggcgacccggggacgcggagacgcagacagctcgggactcaggttcgtgggagcagcggccgcgcgtggctatgaccgtcccgggggcccgtgctcagggcgtccccgtgaggtttgggcgccacagtcaccggcggctctgcccgcgccctggccacagtggggacagcctggcttggcggggacgcaccagtcccgccgccgacgcggagttcctaccccgccgtgcgaggcagtggctccggcccttccagctcgggatggagtcagggagccgcccgcgcccgaatgcagaggctcctgcgatggccccggagtgagtcccccagaggagccggattagggctggaggcggccgagtcccccgagaggcccctcccgacattcccgcccccgcgcgccgctccccgggtcctccgcgtctctttcccgggaaagcctccctcggttcctgcgcggccgcacagcctggacgcagcgcacgcgggcaccggcctgactctcccaccccgaagcctgctcccaacctaagtccgccctgactctcccagcctgaagcctgctcgccctcgggtgtccgggctgggcacaggcgccagcgtccccctggagaggagaggtcgcccggcacctcccaggacaggcccaagtgggagtgggaccctcctaccttcctgcagcctcggcccgcggggtggggggtt

SEQ ID NO: 47989 - DNA, 14 bp, Homo sapiens
  chr10:135071048-135071062
  hyper
tctcacggctcccc

SEQ ID NO: 47990 - DNA, 97 bp, Homo sapiens
  chr10:135071117-135071214
  hyper
cgacacttcctcctaatttcctgacactccccactccctggcgggacgttttactccttgctctccttcccactggagggcgcgcgctttctagctg

SEQ ID NO: 47991 - DNA, 30 bp, Homo sapiens
  chr10:135071467-135071497
  hyper
ggtgggcacggcagacgcggtggggacctg

SEQ ID NO: 47992 - DNA, 31 bp, Homo sapiens; identical to SEQ ID NO: 7832
  chr10:135075092-135075123
  hyper

SEQ ID NO: 47993 - DNA, 129 bp, Homo sapiens
  chr10:135090194-135090323
  hyper
gctcggggtccgcgtcgcgtcctgcggggagagccaccctgccccgcgctgcgcccgggacggttccctggaaccactcaccaggcagcatcatcgcgcccagcagccagagcccgaggccgcgcatgg

SEQ ID NO: 47994 - DNA, 106 bp, Homo sapiens
  chr10:135090391-135090497
  hyper
cgaggctcttttccgcgcgccccgccccggcgccccgcagccaatgggcccctcggccggtgggaggggcggggcgcgcggcacctgggggcggggtccgtttccc

SEQ ID NO: 47995 - DNA, 43 bp, Homo sapiens
  chr10:135139253-135139296
  hyper
aggaagagacctgggcagagccggccggagccccgcggcgcgc

SEQ ID NO: 47996 - DNA, 555 bp, Homo sapiens
  chr10:135150010-135150565
  hyper
ttaactccaggctgcgatcctcgtgccggggccccgccgtcacgggaagcctggagaccaccgccctcgggtccgcggggtcggactggcctggggcagccagaggaggcccgagggaggagggcggccgtgcagcgcgccctgcacactcgcacccgcacacgcgcctcgcacacacgcactcacaccctcatccgcacgcgcgccacgcacaagcgcactcgcgagcacacgcacctcgcacacacacccgcacacgcgcctcgcacccccgcaccccttcgggccccccgcccacattctgcaagaaatgtggaaatagctcacaggcggctccactggcagctgctgcaggacgcggtcggggaggacgacgatgcggatgtggatgcggaggatgcggttccagacgcttcgcggccgggcggggcgggggctgcagctgcgagaccgaggctgtggtcgccatggaaacgcggctagaggcggggcctcgactctggtcccgcaccctctacccccacccaccgccccggctagggagccgcgcatgcg

SEQ ID NO: 47997 - DNA, 43 bp, Homo sapiens; identical to SEQ ID NO: 7834
  chr10:135170629-135170672
  hyper

SEQ ID NO: 47998 - DNA, 30 bp, Homo sapiens; identical to SEQ ID NO: 7835
  chr10:135171068-135171098
  hyper

SEQ ID NO: 47999 - DNA, 30 bp, Homo sapiens; identical to SEQ ID NO: 7836
  chr10:135171488-135171518
  hyper

SEQ ID NO: 48000 - DNA, 30 bp, Homo sapiens
  chr10:135237125-135237155
  hyper
gtcgcagaggaaggcggccgccagtagcag

SEQ ID NO: 48001 - DNA, 30 bp, Homo sapiens; identical to SEQ ID NO: 7837
  chr11:207281-207311
  hyper

SEQ ID NO: 48002 - DNA, 223 bp, Homo sapiens
  chr11:207673-207896
  hyper
ctgtgaacgtggggcggggcggggccgtttgcttgctcagtgcctagacgatggtggtggaaagacgcttctgtgggttaggtcctaacggttaggaaggattcacaggcgggtcatgaggaaggagcagacccctcgggcagaagcccgcgaggagcactgggtgtggtgggggcaggggtgcctcctctgtcaagtggagatcggcgcctcgctcgtgcct

SEQ ID NO: 48003 - DNA, 30 bp, Homo sapiens
  chr11:237048-237078
  hyper
catgaaggacgtaccgggcttcctacagca

SEQ ID NO: 48004 - DNA, 139 bp, Homo sapiens
  chr11:280079-280218
  hyper
ccagagtacaagaagaagtaccgggagcacgtgctgcagctgcacgctcgggtgaaggagaggaacgcccgctccgtgaagatcaccaagcgcttcaccaagctgctcatcgcgcccgagagcgccgccccggaggagg

SEQ ID NO: 48005 - DNA, 16 bp, Homo sapiens
  chr11:308230-308246
  hyper
cggccagcctcccaac

SEQ ID NO: 48006 - DNA, 413 bp, Homo sapiens; identical to SEQ ID NO: 7839
  chr11:314082-314495
  hyper

SEQ ID NO: 48007 - DNA, 31 bp, Homo sapiens; identical to SEQ ID NO: 7840
  chr11:320543-320574
  hyper

SEQ ID NO: 48008 - DNA, 80 bp, Homo sapiens
  chr11:327112-327192
  hyper
ctgcctcagtgccccacggacagggggtgcgatctgagcagaatgaggtgacgtcactgggtcagcggctcctgtggcat

SEQ ID NO: 48009 - DNA, 30 bp, Homo sapiens
  chr11:355886-355916
  hyper
gcaggacacgagcccgggggcgcagcttcc

SEQ ID NO: 48010 - DNA, 95 bp, Homo sapiens
  chr11:369795-369890
  hyper
cggccgcgatgccgcggctcccggtgaagaagatccgtaagcagatgaagctgctgctgctgctgctgctgctgagctgcgccgcgtggctcacc

SEQ ID NO: 48011 - DNA, 272 bp, Homo sapiens; identical to SEQ ID NO: 7841
  chr11:406792-407064
  hyper

SEQ ID NO: 48012 - DNA, 30 bp, Homo sapiens; identical to SEQ ID NO: 7842
  chr11:407427-407457
  hyper

SEQ ID NO: 48013 - DNA, 239 bp, Homo sapiens
  chr11:417263-417502
  hyper
ggctctgggaggactgcgacctccactcaccttcgcgggtctgatggcgaccgccactcacctgctgccaggacctggggctcgcgccgggcgggggcggggcagctcacctgagccaggtgcgcagcggcaacagccccggcggcggcgtagccccggcagcggcagcaggtgcggccccgccccgcagtcagggcgggggcggaccccagcgtcccgctctgcgcccaaggctggcg

SEQ ID NO: 48014 - DNA, 124 bp, Homo sapiens; identical to SEQ ID NO: 7844
  chr11:441968-442092
  hyper

SEQ ID NO: 48015 - DNA, 37 bp, Homo sapiens; identical to SEQ ID NO: 7845
  chr11:450010-450047
  hyper

SEQ ID NO: 48016 - DNA, 33 bp, Homo sapiens; identical to SEQ ID NO: 7846
  chr11:450246-450279
  hyper

SEQ ID NO: 48017 - DNA, 224 bp, Homo sapiens
  chr11:485907-486131
  hyper
cacgggcgcgcgtgtgctcaccgtgcgcgcaggcgagcgtaaacagtgcacgggcgcgcgtgtgctcaccgtgcgcgcaggcgagcgtaagcagtgcacgggcgcgcgtgctcaccgtgtgcgcaggcgagtgtaaacagtgcacgggcgtgtgtgttcaccgtgtgcgcaggcgagtgtaaacacagctggtgccctggtgcgtgtgtgctgtgagcacaggt

SEQ ID NO: 48018 - DNA, 30 bp, Homo sapiens; identical to SEQ ID NO: 7847
  chr11:518711-518741
  hyper

SEQ ID NO: 48019 - DNA, 547 bp, Homo sapiens
  chr11:537026-537573
  hyper
cggtgtgtgtttcctggtcctcgggggcgcttcccccggtgcttccttttgccgtcggcctcacttccaaccgaaggtcaggacggcaggcctcggccccaggggcgacccttccacctgggaaaggtgggcgcgagcctccagcagagaccgcctttacccgccccgcgtgggaagcgccaggatcgcgaggaaacgcgacacgtgcatcgcgacggcccaggcacggagccgcaggaagctggcacctgacgcgcctgcgcccacccaactcgagttggtggcgcgtcaccttcccctgggatcgcccgcagcaggggcgcccacgcacgtgccagtccacgtggccccgccctagcgaccgttgctaaggggcgtggctcagccgcacggaacccgagcccccggcgacttataaatatttgcgtattcaaatgaggcctggctcccgttgctatggcgcccaggccgcaaccccgcggcggccggaagaacagcctggagtaggagacagcgcctggaggtggagggcgcccagggccgagct

SEQ ID NO: 48020 - DNA, 30 bp, Homo sapiens
  chr11:560574-560604
  hyper
gcaggcgggggttgcgggatctcaagccag

SEQ ID NO: 48021 - DNA, 208 bp, Homo sapiens
  chr11:568191-568399
  hyper
gccgggtgggcgggcggagggattgaccccacccccgtcccctccaacttgggcgtccgagccccgccgcgcctgcccagcccgaccccccgcagcccccgcgggagggcggcctctgaggggcgccccgcccgccaacctgggatccctcgcgcgtcacctgcgaccccggcgcggggccgtcgccggctctcggcccaacttcagc

SEQ ID NO: 48022 - DNA, 185 bp, Homo sapiens
  chr11:575193-575378
  hyper
taaacacagacacccacgatgagacgtgaacacgctcctcagtgagcattcttgggcagtgcacaacctccccagccatgccagcccgcgctcaggcctcccccgtcttccccgtctctccggcgtcggttctcaagctcgtccttccccgcctcatttctccaaaagtccgcagcaaatcctgg

SEQ ID NO: 48023 - DNA, 222 bp, Homo sapiens
  chr11:575603-575825
  hyper
cgtcccgaggcccacacggcttctgcgcggcatcctcaggacgacctggagccaaatccacacgggacggcacagcagcgtcctgccgagcccgcctcgtccgccagcgcgcacgattcaccgcgcctgctgcgggacgggcggacgcggggctgggctggaatagccggctcacggagggctccggcagtgtttgttcagaggagcgcggcgctggtagca

SEQ ID NO: 48024 - DNA, 30 bp, Homo sapiens
  chr11:577074-577104
  hyper
ctgtgcatggttgccgtcgtgggcttctgg

SEQ ID NO: 48025 - DNA, 53 bp, Homo sapiens; identical to SEQ ID NO: 7851
  chr11:581817-581870
  hyper

SEQ ID NO: 48026 - DNA, 93 bp, Homo sapiens
  chr11:615556-615649
  hyper
aggtgtgactgcaggtgtggccggcgcgcacacatgaagtcacaggtgttgaaccagtgtccaggcctggcgggaaggcgcaggccggaccct

SEQ ID NO: 48027 - DNA, 102 bp, Homo sapiens
  chr11:637161-637263
  hyper
cggtggagcgccgcgggggcccccctgagccggggcgggtcgggggcgggaccagggtccggccggggcgtgcccgaggggagggactccccggcttgcgac

SEQ ID NO: 48028 - DNA, 28 bp, Homo sapiens
  chr11:637349-637377
  hyper
cgcgggccggccgcgggggcatctgcgg

SEQ ID NO: 48029 - DNA, 487 bp, Homo sapiens
  chr11:705950-706437
  hyper
taggggctaggcccgcggaggggcacaccaggcgggtgttggggaggacgcagagggctggggctggagcccaggcggggcagggggcggggcggagctgggtccgaggccggcgggggcgcctccatcccacgccctcctcccccgcgcgcccgcccgctctcgggtgactccgcaacctgtcgctcaggttcctcctctcccggccccgccccggcccggccccgccgagcgtcccacccgcccgcgggagacctggcgccccggccgaggcgcgaacagacggacgcaccggcgagcgccgaggggacaggccgagcgcggggcgccggaggcaggtgagcgctgcggacacgggggagcgcgcccgcccgggcctcagtttacccggtggcgatgggacgcggggcttctggttcaggacaccgggacgaacgcggcgtcgcagggcgcggggcacttggagggcggccgggccgagggcgcg

SEQ ID NO: 48030 - DNA, 30 bp, Homo sapiens
  chr11:776823-776853
  hyper
tgcgctccgacccgcgtgagccccaggcca

SEQ ID NO: 48031 - DNA, 178 bp, Homo sapiens
  chr11:796406-796584
  hyper
ctgacctggcacagcgaggccacccaccgacagggacctcagcgcgtggccaccacacccccagcacacatgtgttcctgtctgctgcctgtgggttgaaccctatagcatttcctggcctggatctgtctagggctggtactctgagaatgaggctttctccgggccagggtaccct

SEQ ID NO: 48032 - DNA, 30 bp, Homo sapiens; identical to SEQ ID NO: 7852
  chr11:809720-809750
  hyper

SEQ ID NO: 48033 - DNA, 30 bp, Homo sapiens; identical to SEQ ID NO: 7853
  chr11:826927-826957
  hyper

SEQ ID NO: 48034 - DNA, 95 bp, Homo sapiens
  chr11:829437-829532
  hyper
tcgacgtgcagggcacggcgggctctctggatgaggaggaggaagaggaggagcgattccacactgtgctggagcagctgggggtggccccggtc

SEQ ID NO: 48035 - DNA, 35 bp, Homo sapiens; identical to SEQ ID NO: 7854
  chr11:832780-832815
  hyper

SEQ ID NO: 48036 - DNA, 30 bp, Homo sapiens; identical to SEQ ID NO: 7855
  chr11:842930-842960
  hyper

SEQ ID NO: 48037 - DNA, 30 bp, Homo sapiens; identical to SEQ ID NO: 7856
  chr11:844070-844100
  hyper

SEQ ID NO: 48038 - DNA, 31 bp, Homo sapiens
  chr11:1139541-1139572
  hyper
tccaatttgttgtctacggaattggctgcag

SEQ ID NO: 48039 - DNA, 134 bp, Homo sapiens
  chr11:1357329-1357463
  hyper
gggtggggagggaggtcgcaagcaatgccatcttcaggaacaaaactcctgcataacgaagcccaggtttctgtgttttcgtgggtgttcccgggcaccttcgggcaggtggccccaggcgatgttgtgtgtct

SEQ ID NO: 48040 - DNA, 31 bp, Homo sapiens
  chr11:1357946-1357977
  hyper
ggcggggcgtggagggcgggggggcggggcg

SEQ ID NO: 48041 - DNA, 30 bp, Homo sapiens
  chr11:1404200-1404230
  hyper
cttggtgagggagacggggcgggtcaggga

SEQ ID NO: 48042 - DNA, 312 bp, Homo sapiens; identical to SEQ ID NO: 7858
  chr11:1411221-1411533
  hyper

SEQ ID NO: 48043 - DNA, 235 bp, Homo sapiens; identical to SEQ ID NO: 7859
  chr11:1411549-1411784
  hyper

SEQ ID NO: 48044 - DNA, 443 bp, Homo sapiens
  chr11:1411841-1412284
  hyper
cggggcgcgcaggcggacaggggcgcacgggacggcgcccctcgggccccgctgcaggtgcgcggcccgggccgcattgtgcgccccagcgaccgggcccattgtgccgcgggaggagggggccgcgcgggcgcccatctgccgtctgccgcggccgcgctaataggcgtgctgcccgagcagctgcgcccccggcgggactcccacctccgcgcgccggccaccggggcctccgggcaggcccgatctccctccgcggtgggggcgggagagtgcggggacctgcagagggctggacagcgccttgcgctgctccggctcgggctcgggcgggcggagcgtctgtgacctgcattcccacggggcagggagaggccattggtgctgggaccagaagtgcgtgggacctgacccgtggagcagccccgcggcctgccggtgga

SEQ ID NO: 48045 - DNA, 499 bp, Homo sapiens
  chr11:1592746-1593245
  hyper
gcccccgcgggggtgacgttcgggacgtcgggggctcgcgcagatccgcgctggatctcaggcggccctggtgggtcctggatttttgtcccccccccattccacacccaaagaaggagctgcggggagaagggcggcaacgcggcgggcgggcgtgggctgggcccgggtccgccgggcgttgcggggggcggggaaggggcctccctgtccctggcgtcctggacggccgtggccgctcattccggggccgcctcctcctcccgggcgcccaccgggtgccgctgccccagcgcccccgacgcggcgccctccgccccccggcccgggccggtgaaccccatccccggcgcccgcccccgccccgccggcgcctccgctcacctcgctcgcgctcgcctcgggggcgctccggggacccgcgccgcgctcagggcgcccgctcggccgcgccgtccatgggcccggcgggggcccgcgcagccggggcaggggccgg

SEQ ID NO: 48046 - DNA, 96 bp, Homo sapiens; identical to SEQ ID NO: 7862
  chr11:1593576-1593672
  hyper

SEQ ID NO: 48047 - DNA, 118 bp, Homo sapiens; identical to SEQ ID NO: 7863
  chr11:1594038-1594156
  hyper

SEQ ID NO: 48048 - DNA, 30 bp, Homo sapiens
  chr11:1594881-1594911
  hyper
tggggtgggggtggcggtggagtgcgtcct

SEQ ID NO: 48049 - DNA, 66 bp, Homo sapiens; identical to SEQ ID NO: 7864
  chr11:1674133-1674199
  hyper

SEQ ID NO: 48050 - DNA, 30 bp, Homo sapiens
  chr11:1714569-1714599
  hyper
tgcttcccactcgccggccgccccgcgggg

SEQ ID NO: 48051 - DNA, 97 bp, Homo sapiens; identical to SEQ ID NO: 7865
  chr11:1770262-1770359
  hyper

SEQ ID NO: 48052 - DNA, 30 bp, Homo sapiens
  chr11:1784965-1784995
  hyper
ggacctcggcgccgcgacccctgcccgtcc

SEQ ID NO: 48053 - DNA, 30 bp, Homo sapiens
  chr11:1853900-1853930
  hyper
gtccggagggaccccgcacctccccaggct

SEQ ID NO: 48054 - DNA, 36 bp, Homo sapiens; identical to SEQ ID NO: 7866
  chr11:1856742-1856778
  hyper

SEQ ID NO: 48055 - DNA, 30 bp, Homo sapiens
  chr11:1874056-1874086
  hyper
gaagagctgcctgcggccatcttggccctc

SEQ ID NO: 48056 - DNA, 30 bp, Homo sapiens
  chr11:1908990-1909020
  hyper
cagattcaaactctctgctcatttcactag

SEQ ID NO: 48057 - DNA, 176 bp, Homo sapiens; identical to SEQ ID NO: 7867
  chr11:1970023-1970199
  hyper

SEQ ID NO: 48058 - DNA, 30 bp, Homo sapiens
  chr11:2048642-2048672
  hyper
gacacaagtggaactcgggggcagctgccg

SEQ ID NO: 48059 - DNA, 171 bp, Homo sapiens; identical to SEQ ID NO: 7868
  chr11:2290846-2291017
  hyper

SEQ ID NO: 48060 - DNA, 421 bp, Homo sapiens; identical to SEQ ID NO: 7869
  chr11:2291072-2291493
  hyper

SEQ ID NO: 48061 - DNA, 124 bp, Homo sapiens; identical to SEQ ID NO: 7870
  chr11:2291800-2291924
  hyper

SEQ ID NO: 48062 - DNA, 113 bp, Homo sapiens; identical to SEQ ID NO: 7871
  chr11:2291944-2292057
  hyper

SEQ ID NO: 48063 - DNA, 254 bp, Homo sapiens; identical to SEQ ID NO: 7872
  chr11:2292105-2292359
  hyper

SEQ ID NO: 48064 - DNA, 324 bp, Homo sapiens; identical to SEQ ID NO: 7873
  chr11:2292391-2292715
  hyper

SEQ ID NO: 48065 - DNA, 31 bp, Homo sapiens; identical to SEQ ID NO: 7874
  chr11:2398444-2398475
  hyper

SEQ ID NO: 48066 - DNA, 177 bp, Homo sapiens
  chr11:2421276-2421453
  hyper
ggtgtgagggtggccgggcagtggccccgaggacggcgccccacaagtttgcggccagggcccagcaaacccctaggggtgggaaagcgtcggcccagctagcgggtccagcagggctgcccccttcaccgtggcccagcggtcacgaccccacgtcctcatcgcgggctgggactg

SEQ ID NO: 48067 - DNA, 172 bp, Homo sapiens
  chr11:2466003-2466175
  hyper
aagccagggggtgaggcggaggcagggccaggccggtccgtggggagagggcgggccaagccggtgggcgcgggcagggacgccctgtgcgcgccggaccggcgggggcggggcgtgcaggcgggggcggggcacgccgtcccatgggaccggccctcggccactgccccct

SEQ ID NO: 48068 - DNA, 670 bp, Homo sapiens
  chr11:2466191-2466861
  hyper
cgcccgggctgggccggcagcggccccccgcggcggggctggcagcagtggctgcccgcactgcgcccgggcgctcgccttcgctgcagctcccggtgccgccgctcgggccggccccccggcaggccctcctcgttatggccgcggcctcctccccgcccagggccgagaggaagcgctggggttggggccgcctgccaggcgcccggcggggcagcgcgggcctggccaagaagtgccccttctcgctggagctggcggagggcggcccggcgggcggcgcgctctacgcgcccatcgcgcccggcgccccaggtcccgcgccccctgcgtccccggccgcgcccgccgcgcccccagttgcctccgaccttggcccgcggccgccggtgagcctagacccgcgcgtctccatctacagcacgcgccgcccggtgttggcgcgcacccacgtccagggccgcgtctacaacttcctcgagcgtcccaccggctggaaatgcttcgtttaccacttcgccgtgtgagtatcgccaccggcgacggccggcacgaaggtgcttcctgagagctggtgtgggggagctctgtcccagcgccacctgccccgtcggagctgcgaccccggagcagaggagggaaggaagtggggaaacgcagaaacacaaac

SEQ ID NO: 48069 - DNA, 30 bp, Homo sapiens
  chr11:2552828-2552858
  hyper
tggtcagcaggaaccggccctttcactgcc

SEQ ID NO: 48070 - DNA, 110 bp, Homo sapiens
  chr11:2554315-2554425
  hyper
ggattccgagagcacgatgtttaaatgttgggggaaaaaatggatcaaagcgatgtgttcccagggagcccctgttttctcgtttcttttcgtacgcccagctttgcagt

SEQ ID NO: 48071 - DNA, 244 bp, Homo sapiens; identical to SEQ ID NO: 7878
  chr11:2883683-2883927
  hyper

SEQ ID NO: 48072 - DNA, 1731 bp, Homo sapiens
  chr11:2905410-2907141
  hyper
agacccgagagggggccgggagagggcgcggggcgcgggccggccggggtgggggcgccgtccccgcccgcgccgaggtccgcggcgggtcagctttgtttacgtcgccgcgcaatgtgctgtgtaagcatttccccttgtcccgcggccaagccccccggggccgccgccgcgcttaaccccctccacgccgtgctcacggcgcccggccgcgcccggggaggggctcccgcggccgggggcgaaaactgcgctcccggggggtcgcggccgggattcagcctcccaccccgcccgcgcgaagccgctggagggcacaacaacggggcggggaggggggtaagggcgcagccgcgccctgagcgctgcgggccctttaatgccacgggaggaggcgggaacccagcgaggcccccgagggctggggggaccggccggccggacaaagcggggccgggccgggccggggcggggccgtgcggggctcaccggagatcagaggcccggacagcttcttgatcgccgcgccgttggcgctggcggccgcggtgccggccgcgggacgtcccgaaatccccgagtgcagctggtcagcgagaggctcctggccgcgctgcccctggttcgcgccctgctcggcgctctcttgaggcgccgcgtccggggccggggccggggcgggggccggggccggggccggggccggggctggggccggggccgcgactggagccggggccggagccggagccggagccggggccggggccggggccaggaccgcgaccgcgaccggagccgcgaccggagccgcgaccggagccggagccggggccggggctggagccaggaccgggactgggggcggggtggacgccggggccgggaccgggacactaggcagctgctccggcgcctcctcgaggccgtcgagggactcagcggccggctcgaggggcgggctgacagccaccgcgaccgcgacgggccgcggcgccagcagcaggcggcagcgccccacctgcaccgtctcgcggtagaacgcgggcaccgagtcgctgtccacttcggtccactgcaggcgtccagggccccgcagcggcatgtcctgctggaagtcgtaatcccagcggttctggtcctcggcgttcagctcggccaggcgggcctgcagctcgcggctcagctcctcgtggtccaccggcccgaagaggctgcggcaggcgctggtgcgcactagtactgggaaggtcccacgggcgacaagacgctccatcgtggatgtgctgcggagggacgcgtcggacatggcccggggctgcgcaaacgcgggcagcgagagaggagaggacagcgagaagaaggggaaaggagaggaggagagggcggaggccgggcgcaagggagaccccgcgccgcccgactctgcgtgtgcgagggacgcggcggctacctggctgtccggtggtggactcttctgcgtcgggttcgcctgtctcgtccggacggcagccgcgccccctcgatgcctgctggctagctcgctcgctcaggcctggccggcacccctcgagcacagcgcacttggcctgtggaacgcccagcccgcctgcgccccctttatacgcgcgggccccacccccgtgcgcgcgggcccggccgcgattagcataatgtagtattttcagtttcaacaacaccacggcgattggcggccgccccgctgccccg

SEQ ID NO: 48073 - DNA, 870 bp, Homo sapiens
  chr11:2949948-2950818
  hyper
agcctgaggggccccgagaccctgacgcgagggggccagcgcgattgcggggcgccgggtcccccaaggaggtgcagcgcccccgccccgccgtctggggttgaagtggtttttcccaaaggccccggtcccggctgttagggcgcagggctcgccgggacgcgggcagtcactcaccgcggcgggctcatggcgtgcggggtttgggctgcggggatggcctggagggctccgagggctcggagggtgcggcggccgcggcagccacggcgtcctcggcgggtgcggcgggtgcggtgcgttcctggcggctgcgaaagtcctgcagggcgcggcggttctggaaatcgatgagcgccagcgcgatggccgcgttccagcagctctcgcccgcgcagcggaagtcgatctccttgtggtcggtggtgacgatggtgaagtacacgtacttgcccgtgcgctccacgcagtccaccttgaggatggagtggaagcgcagctccttggggcgcgcgcgggggctggcggggaacaggctcaggcggtcggaggtgagcaccccgcgcttcttcttccatagctggaagaggctgtcgctgcgcttctccaactcgccctcgcgtagcacctcgtcgggggatttcatgtcgtgccgagcgcgggactgggagcggcaatgcgggcggtgacggcgccggctctgctcctcgtggccccggcgcggcctttatagctgcccctccccgccccgcccctccccgccccgccccggccctcgggccaccccgcccgcctgagccccgcgcgccccgggccataccctccccaagcccagccgtccgggcccgcaccgtcgcgtccgcgctctgg

SEQ ID NO: 48074 - DNA, 30 bp, Homo sapiens
  chr11:3013494-3013524
  hyper
tgcggcagtggcggcgaccctagcttcgct

SEQ ID NO: 48075 - DNA, 30 bp, Homo sapiens; identical to SEQ ID NO: 7882
  chr11:3014198-3014228
  hyper

SEQ ID NO: 48076 - DNA, 30 bp, Homo sapiens
  chr11:3077907-3077937
  hyper
cctcaggtgccctccgcccacctcccggaa

SEQ ID NO: 48077 - DNA, 30 bp, Homo sapiens
  chr11:3078595-3078625
  hyper
atggctgggaatcccggacccgcagctgcg

SEQ ID NO: 48078 - DNA, 31 bp, Homo sapiens; identical to SEQ ID NO: 7883
  chr11:3112953-3112984
  hyper

SEQ ID NO: 48079 - DNA, 118 bp, Homo sapiens
  chr11:3181648-3181766
  hyper
agcgacccacactccccgcgtcgcattcaccctaataggcgggcatacaaatgccgttgcctggagccgcagcccagcgaatgggacccacagcggcgcgccctttagttgactctgt

SEQ ID NO: 48080 - DNA, 749 bp, Homo sapiens
  chr11:3186007-3186756
  hyper
ccttggagcccgcgtcggccgagctggggggacagaccccctgattggccagggtttgtggtggtcagacccagccaccttccctggcggtcccggctcctttaagccccaccaagtggggagccgagctgggcgcgccgcttcccactcgcgggccccacccgccccaacccgccaggcgccgacccgtcctggcccggggcgcccccaggctcccgcgctccccagctccccagcgcgcgaccggccccgcggcgtggttccccgcactggctactgccagggtccgcggggctgcggcgcgagctcctggatcccttcggccggccccccgcggccctcggttcgctccggccctgcccggcggggccctccggatccttcccagcccgccatccccccgccgccctgccgccccccgggccgccgcgctcctacctcctaccgtgccgcgagctcggtgctccgggccggccgggcgcgcgggggctccactggcggcgcgggcctggctgcaggaaatgccagcagatggtccccccgcgcgaggcggagcgagggcgcggcggagggaggaggcccagggagcccggaggcgggaggaggaggcgcggcggccgcaaaacccgggccgaatcgccgcgcggagcgggcgcccaggggctgccccccaccggctgccgcttctcctcatcccccaaccccccgcgcgcgctccggggctcacacccacccgggcggccagaggt

SEQ ID NO: 48081 - DNA, 30 bp, Homo sapiens
  chr11:3400093-3400123
  hyper
gctctgcagggatgcgccggggcgcgcggg

SEQ ID NO: 48082 - DNA, 30 bp, Homo sapiens; identical to SEQ ID NO: 7885
  chr11:3427830-3427860
  hyper

SEQ ID NO: 48083 - DNA, 243 bp, Homo sapiens
  chr11:3444552-3444795
  hyper
gaggaggggattggagcgtggctcaagttcgggaggcgttacctgcggagagtttgaggcaggcccaggagcgagcccacggtctgccgacgcggagccagggacgggccccaggatccggagcttcaggcggggccgagtccgggtttggggcccgggagtcggggccggttagggcgagggtccccgggatcgtccggtcaggccttgggccaacgtaggcactctcgcagttcctccgcc

SEQ ID NO: 48084 - DNA, 27 bp, Homo sapiens
  chr11:3602557-3602584
  hyper
ccgcggacacgccgggccctggcctgc

SEQ ID NO: 48085 - DNA, 501 bp, Homo sapiens
  chr11:3663250-3663751
  hyper
tgggagtttattgcccgccccccgccccaagtctccgcccccgactccccacaccccttcctcagagcctccagtctggggacctttccgagactgtaaaggcggggccgcagtttggctccgcctgagaggggagggccgggggcggaggacccacttgaaggctgcggaagccgccagcgggagggagcgccgagggctctggcgggcgctgcgctgtccccggaggagtccggagtccggctgaaagcaaaggttctcgaggctaactgtagcccccgcgctggtaacccgacacccctttcccagcgccgcacgcggggccgggagcgggcgcgccagggcagggactgaggagcaattccctttctcaaggcctgcggggtctttctgcgggaccctctttggctgtgagtgatggggaggaaacttgtgagactcggcctctccctcaggcgggccctgacccggtcggcccctggtccccggcccaccaggcca

SEQ ID NO: 48086 - DNA, 89 bp, Homo sapiens
  chr11:3819079-3819168
  hyper
agattgggaagcaccggcggggtgtcgggaagggtggtgacgcaacatagagactccgcccccttccttggagcgccgcgactcgggct

SEQ ID NO: 48087 - DNA, 30 bp, Homo sapiens
  chr11:3829204-3829234
  hyper
ggaaatcctttctgcgctacgtaggacagg

SEQ ID NO: 48088 - DNA, 30 bp, Homo sapiens; identical to SEQ ID NO: 7888
  chr11:3829956-3829986
  hyper

SEQ ID NO: 48089 - DNA, 30 bp, Homo sapiens
  chr11:3861497-3861527
  hyper
gctccaggtaaggtcgggactcaggaaaac

SEQ ID NO: 48090 - DNA, 30 bp, Homo sapiens
  chr11:3876233-3876263
  hyper
cctcccaggagcgccgagtcctgtctgcag

SEQ ID NO: 48091 - DNA, 30 bp, Homo sapiens
  chr11:3877461-3877491
  hyper
gtgtccacatcagacgcatgttgactgaga

SEQ ID NO: 48092 - DNA, 31 bp, Homo sapiens; identical to SEQ ID NO: 7889
  chr11:3887889-3887920
  hyper

SEQ ID NO: 48093 - DNA, 101 bp, Homo sapiens
  chr11:6280497-6280598
  hyper
tgtcacggtcactgcggccactgcaacacagtacggtaaatgcggctctaggctcagactaaagcatccgcgcctcagcaggtgacgcacgcagacctggt

SEQ ID NO: 48094 - DNA, 30 bp, Homo sapiens
  chr11:6281089-6281119
  hyper
tgagcaggtggagccgcgttgggagcccgc

SEQ ID NO: 48095 - DNA, 30 bp, Homo sapiens; identical to SEQ ID NO: 7890
  chr11:6341702-6341732
  hyper

SEQ ID NO: 48096 - DNA, 30 bp, Homo sapiens; identical to SEQ ID NO: 7891
  chr11:6440455-6440485
  hyper

SEQ ID NO: 48097 - DNA, 47 bp, Homo sapiens
  chr11:6495353-6495400
  hyper
ggtgctgctagggagccggcgggccggcgagccggatcccggatctc

SEQ ID NO: 48098 - DNA, 31 bp, Homo sapiens; identical to SEQ ID NO: 7892
  chr11:6502786-6502817
  hyper

SEQ ID NO: 48099 - DNA, 30 bp, Homo sapiens
  chr11:6502975-6503005
  hyper
ttttctctcagctgcgtgacttcctgttgg

SEQ ID NO: 48100 - DNA, 30 bp, Homo sapiens
  chr11:6624579-6624609
  hyper
caatgtccgcttcgcggcctgaaacagctc

SEQ ID NO: 48101 - DNA, 30 bp, Homo sapiens
  chr11:6624826-6624856
  hyper
cccggaaaccaaagcgtgacagccaggggt

SEQ ID NO: 48102 - DNA, 30 bp, Homo sapiens
  chr11:6625278-6625308
  hyper
ccgcctttacctcgcgtctagaggacacag

SEQ ID NO: 48103 - DNA, 30 bp, Homo sapiens
  chr11:6633896-6633926
  hyper
gggcagcagtggggcggcacacagtgctgc

SEQ ID NO: 48104 - DNA, 461 bp, Homo sapiens; identical to SEQ ID NO: 7893
  chr11:6947597-6948058
  hyper

SEQ ID NO: 48105 - DNA, 523 bp, Homo sapiens
  chr11:7041362-7041885
  hyper
tggggtttctaaaccggagtagcttctcagtccctgaccctcgattttctgcccctcttccttcaagcacagctcgtcttgccctgtccgcttctggctcagtcctcctgagagttcatgtcacttaacggagcctgtgagagtggaccgggatggccaaaacactcagtccacacaaacaatggccgcagcccggctggaccgaaacggaagtcccaggtcttggagtagacactcgcagtgtttccatggatacgggaggggcggggcgggaagagagagcgcgggaaaacgtgactcctgattggccagaagtatcccgcgcctcccgacctttggccgctggcattcctgcgcgggcgggagctgcgggcgctcgggggataaggcgaggacgcaccagcattaatggaataggagaactcccgaagcttttagggccctgggaaagggggcgtggctggaaacggagctactggcttcggagaattctgtgaccctcaccaccgcgacgaccccgagg

SEQ ID NO: 48106 - DNA, 176 bp, Homo sapiens; identical to SEQ ID NO: 7895
  chr11:7272752-7272928
  hyper

SEQ ID NO: 48107 - DNA, 193 bp, Homo sapiens; identical to SEQ ID NO: 7896
  chr11:7273066-7273259
  hyper

SEQ ID NO: 48108 - DNA, 219 bp, Homo sapiens; identical to SEQ ID NO: 7897
  chr11:7273679-7273898
  hyper

SEQ ID NO: 48109 - DNA, 180 bp, Homo sapiens; identical to SEQ ID NO: 7898
  chr11:7274075-7274255
  hyper

SEQ ID NO: 48110 - DNA, 30 bp, Homo sapiens
  chr11:7534314-7534344
  hyper
cagtacaaccaaaacgggttcaggccacac

SEQ ID NO: 48111 - DNA, 31 bp, Homo sapiens; identical to SEQ ID NO: 7899
  chr11:7534832-7534863
  hyper

SEQ ID NO: 48112 - DNA, 30 bp, Homo sapiens
  chr11:7695172-7695202
  hyper
tctcactcacgagccgctggctctgggtca

SEQ ID NO: 48113 - DNA, 135 bp, Homo sapiens
  chr11:8040428-8040563
  hyper
tctgcggaagggccccgagtggcgacagcggatccgggactcccaagcaagcaggagccggagcagcctcttagcaacccctgtcccgggaaggtttgaaagcagcggtgccctagtgacgccggaaaagatgga

SEQ ID NO: 48114 - DNA, 194 bp, Homo sapiens
  chr11:8040581-8040775
  hyper
cggagcacacctcggaaataaataaataagcgcccaggctgccgcagccgcgcccccgcgggacccgagcgagggggagggggcctcacgggcccgggtccccgcagtcgcgcgtccccgccattggcagagccggagggggtcaccccccggggggcgaatggtacagtcctccgcccgcgcctcggccgggc

SEQ ID NO: 48115 - DNA, 611 bp, Homo sapiens
  chr11:8040960-8041571
  hyper
cgggagaagcgggcctccgggggctaggactggcgcgagcgcccgacccccagggtgggcttgggcacccggaccctcgggcatccgggacccagagcctcgggtacggcgcagcggagctccagcgagggtagtgtccccacacccacggggcagagctgtcggaggagggcacgcggccactgggactagcgagctggcacctctgcccccaccccagctgccccgccagggtcgctccgccgggggaccccgagaaagggcgcggagggggcgccgggaggggcggggcaggggccggggtgggcccctggcgggcggggcgaggagggggcgccttcggctctgggatgcgcccgccggcgtctgcgccccgccggccctccgcagggaccgaggctggccccgggcggagtgtcccgctggctgccggggacccgcgagtcgctgcctgttccgcggggcgagatggcagcctgggccggctgtctgggcgcaggagcggcgctctcgagttgccaggctccgcgcccgccccgcggggatggcgagcggctgccggcgtgggcggtttggagctgcgctccccacgcactcgtcctggaggaagg

SEQ ID NO: 48116 - DNA, 114 bp, Homo sapiens
  chr11:8103002-8103116
  hyper
gcccctccgggccccggcctccagagccgcagccaccgccccgcccccgagagacatgacttccaagccgcattccgactggattccctacaggtacgcgggcgccgggccggg

SEQ ID NO: 48117 - DNA, 708 bp, Homo sapiens
  chr11:8190058-8190766
  hyper
gggaacccttgactcaaagcacgtgaacaaatggtgacgagatgagttaagccagcggggtaagagagaagggactgcgcctaaacgggagtacgcaaggccacctagaggatgcacagacctgcatgcatacgttcctgacccttccagcagcagaaccatctgggccgccacccgctgataacaacggaaccgtgggcattggcccttcaacgccgtctcgcccgccctctccagtcagtttggtggatatttcggtgaaggctgcagactctcagagtcacccctccctcaagcagcgttctccgtactcttcggcgccgggaagctcagagggagctggcctgctcttaccttcaggtgtcggcggcggctcctgccgcttcccgcgggacaggaaggccttgggcagcagcagcgacagagccaggacaagcccagaagccagagcgactctctgcactgtggagtacgccatgactgctcacggtggtcgcaggtgcagacgccagccggaaccggaaccggaaccggagcacgggctgccgctcccgaccgaaccgcgggcggcgcggacggcgtcgcgcgagggacaaggtgcgcgaggcgcacgcatcttcacctccactgtcgggagttgacctgctcctcccgcgtggttacccgtcgctgtaaatggtaccctcgccttcccgttcatactaacta

SEQ ID NO: 48118 - DNA, 743 bp, Homo sapiens
  chr11:8284261-8285004
  hyper
agggagctagcgggccggcacaagaggcggctctctttctcaccgagtcacgctcatgcagatgtcccccggagggtccaacccgccttcccctcgcctgccgggcaccctggcgctcgcgccgtcctcccgcgctcccgcttgccccgagctctggagcccgattctccccgaagccgctgatttgctcggcgctcagcgcctctcgggttacgcggcggctggcgcgagggtgatggctgcggtgagagcagcagcctcagacacgaaatgctcagagcgaacctccgcggcgcggagatcgcaagggagccccagcctccgcgcggccccgcggcgcagcacacggccagtgcacagctcctcggctcgcggccgggacccggggggcgtgcggccccgggcgcgtgcagcccggggctcgacctcctccccccgcaagttccgcccggctgtcccccggtacttccccccgccccagccccggcccccagcgcgccgcccgccccgcaatccccgcacagcccagcaggtgtgcgcccgtgtccccgcgtgtgtgtgcctgcgcgccgcggcagggggcgagggggtgaggggcgtcgagaccccggcccgccacctaccgtcctccttgtccagcaccatcatctcgggcgctccgtgtccagccgcagctaggctcggccgggagaagggcgccgactcggggcgcgctttggaggggcggccggtcttcgggcagc

SEQ ID NO: 48119 - DNA, 493 bp, Homo sapiens
  chr11:8289527-8290020
  hyper
caccccgctgggatccgttccgcagtagggtgcggaaggggaacgtgcagacacccagagaggctgggagactggctggcagtgggcactgccgggaagcccgcggtgcgggtcgcagaggcgctccggatgcccgcaaggcggcaagagtccgtgagaaagttcccagccggagcgcgcagggctggcggcctcgttgggaccgggagacttcctaatcccgccgccgccgaagcccgggcgctgagcctggcaccgccgaccccggcaccggcgcacacatcagccgccgcgcttccgggaagccacccatcagccggaggaggcccgcgggtgctgagggctctgccgccgctagcggggtggactccgcagggccagcgccgcagtctccgccccacgtcccgcgtgcccccgggcaccggcaccgggcgccgggcacctaccgtcctcctggtccaacaccatggtcccgacggctccagccggacta

SEQ ID NO: 48120 - DNA, 248 bp, Homo sapiens
  chr11:8290057-8290305
  hyper
cgccgccggccgcctgcgctgctcccgccggccccgcgcgggcgccgagtccggagagccgcgaccgccgacgggggcagacggaccggagtccggagcgcagccccgcgggcagggagcgcaggaggagggactggggggaaggcgcgggggcgagacggccaggccgggatcgcgggagcctcgcgagcagcagctgcccgggccgggccgcagccggagcctgagccgcgcgcgcgtccttcctc

SEQ ID NO: 48121 - DNA, 30 bp, Homo sapiens; identical to SEQ ID NO: 7905
  chr11:8305026-8305056
  hyper

SEQ ID NO: 48122 - DNA, 30 bp, Homo sapiens; identical to SEQ ID NO: 7906
  chr11:8305287-8305317
  hyper

SEQ ID NO: 48123 - DNA, 749 bp, Homo sapiens
  chr11:8615282-8616031
  hyper
acacttaccccacagtaagttcgcttctaaactttcaaaaagtttcacgtcccaagatggggtgaaggtgagacggtggagatgaaccggggcagacagagaccaccccaaataccggacccgggggaaatggggtaccaacggctgggccccaggagacactcggaggggtccgcgggctcggcccggtccctccgctggggggttaccagccggccggcagcgagatacccagaggcccgtttttccaccgcgttgccatagcaacggcctggccggctgcgccccgggccgcccgccccatcccgcgggcccgccctgagccagtgactccagggaccactcaccgcggccggcggactggcgggtctccgacaggtgcgcacactcggcgcaggctgtcgctgagcccggaattctgcaccgggagaaacttttcagcccgcagagcaaccgcagggcagtggacgggggccgcgcgaggacaaacagcggcggcgggtgcaaagccccttctccaagccgcggggttggccgggaggtgccggctgcacaacggcgcccacgtgacccaggtgcagccccaggcgcgcccaagggcagctcgccttagagaaggacctaaaaccccgtctggggcacagaggagcagccacgtgttacgtaaaataaagctttgtagcaggaatatcacagtactgaggtgattgatgctcaggccactcttctcactcggagtcaagcccatc

SEQ ID NO: 48124 - DNA, 30 bp, Homo sapiens
  chr11:8625694-8625724
  hyper
aatgagtgccccggcgccacctatggggct

SEQ ID NO: 48125 - DNA, 141 bp, Homo sapiens; identical to SEQ ID NO: 7909
  chr11:8710628-8710769
  hyper

SEQ ID NO: 48126 - DNA, 422 bp, Homo sapiens
  chr11:8892170-8892592
  hyper
gagccagctcccaggacgtcccgagatcgggtctccgctcggcaccaggcagctcttcaccgccggactctggccgcgaggttccccacccccaaccgcgcggcccccgccgggccggaaagcagagccggcggctactgaccgcccgggagggcggaccccaccagccccgctcctctgcgcctgcggcggcccccacgcgcgtactcacggagctggacaccgctgccggggccgggagtcgggagcagagggaaaagggctgggagggcaggggcgggaccgggcgcgcacgcgggaaccggggccacccggcccggaggcgcttacctctgcgttccccagccgggccgggcgcggcgcctggatggggtctcgccgggagccgcgcggcccggaggaggagccgctcctgcagagag

SEQ ID NO: 48127 - DNA, 30 bp, Homo sapiens
  chr11:8892878-8892908
  hyper
acctcctcaccatccgaccaagagttgtct

SEQ ID NO: 48128 - DNA, 1108 bp, Homo sapiens
  chr11:9025074-9026182
  hyper
catccagggaggaggcacagccgaggggagcgcaagctagaaaagctacgacggaatccccaccgaaaccgcagcaggggtactggaaggggaggaatccgcgacgcagcgaccgcgagccaagggcagcggcgggccgggccgtgactcagtgaaagccgcaacggccgggcctcggaaaacggcgggcgcgaagccgccggggccggggcgagaacggcggcgggggctcaccatgtccttggacgagcccagcttcttgaggccgtccaggggcagcaggtcggcggagtccttgtggatgaactgcaccgcctgcttcatccggcgctgctgtcgcagtgacgccgcctcccgcatgtcggtctccttgcggccgccctcagtgaggagccctgagtaaaacatcgctgaggcgccggcggcccggtagcccacagccccccggcagcctcagcctcgagctcctccagcgccgcaagggccccgagccgcgccttttatagccgagcgtgacgtcgcggggagcagccagtgcgcgcgcggggggcggggccggcacagagtccacgccccgcgcggctccctcgcgtcccgcgtcccgcgtcccgcgtcccctgctcacccggtggcaaagccggcgaggaggcggcggcgctggtggggactgacccggcagtccgagaatccaccgcggccttttcacccaaccgccccctcctgcgtgggggccccgcatcccctggactggcgtgggctctggggcccgatgccctggcagccccggccatctctgccgctggccgcgggtacctgctcacctgtccacgccgtggccgacccggggatcaccgacagccgggccatgcctcgagtcccgccgcccgcgccgctgctcggcttctcagaaacgcacctccacgccgccagccggggctccagggtccaccgcccgggcccggaggactggcgactccctccgaggttgggagcgctccggatttctccaacttcaggtcggtccccacccaccgggccacgtgactggggagggggcagccggtgcaggcgtgtggaggaggctttcgggacctcctcccccgggcac

SEQ ID NO: 48129 - DNA, 76 bp, Homo sapiens
  chr11:9112509-9112585
  hyper
gaagccatcagcagaacttgccggcccccaaagaaagaaacggcaaagctgccaccgcctcgcggatgtgcccggc

SEQ ID NO: 48130 - DNA, 492 bp, Homo sapiens
  chr11:9112639-9113131
  hyper
cgcaccctcctgcctgctcgccggcgacggtctgactagcaggcgctctggaggcatccggaccggggcgggaaccgtcagcagctccgggtccgaggccgggccgaaggactcagggccccagcggtcgtggcgccttggcccggccggcgggtgaggtcccggggggagcagaggcccccgcggagctgcagccgccagccccgagccccgcgcgcccggctctggactccgccggggacctaaacactcttcctggccctgcctgctgtgccaggtgcgcccccgcggccggacactcaccctcctgcggccccgcggcacggccccgacccggcgggacggcccccgccagcagcagcagtggcggcagcagcagcagcagcagcagcaccgcccaggccgccccgggacggttgcggcccgcgacccccatggatggctcagcggttgcgggcagaggcggcggagtgcgggcggtggcggcggcgg

SEQ ID NO: 48131 - DNA, 30 bp, Homo sapiens
  chr11:9113370-9113400
  hyper
gtgcctcgcgccccgcgcagccctggcacc

SEQ ID NO: 48132 - DNA, 30 bp, Homo sapiens; identical to SEQ ID NO: 7913
  chr11:9285571-9285601
  hyper

SEQ ID NO: 48133 - DNA, 30 bp, Homo sapiens; identical to SEQ ID NO: 7914
  chr11:9287058-9287088
  hyper

SEQ ID NO: 48134 - DNA, 30 bp, Homo sapiens
  chr11:9335566-9335596
  hyper
ccagctctgcctagcgtcgttatcatcaac

SEQ ID NO: 48135 - DNA, 30 bp, Homo sapiens
  chr11:9336001-9336031
  hyper
tgaagggagcggtgcggtgccgcgccccct

SEQ ID NO: 48136 - DNA, 30 bp, Homo sapiens
  chr11:9336521-9336551
  hyper
cttcaatttggaggcgccagagagtgcttg

SEQ ID NO: 48137 - DNA, 30 bp, Homo sapiens
  chr11:9385823-9385853
  hyper
aggacacctaagggcggaagcgggcgcgtt

SEQ ID NO: 48138 - DNA, 30 bp, Homo sapiens
  chr11:9406100-9406130
  hyper
aagtgctccgcaggcgcgcccacaggaagt

SEQ ID NO: 48139 - DNA, 30 bp, Homo sapiens
  chr11:9482340-9482370
  hyper
gattctgcactttgcgcgagccactcaggg

SEQ ID NO: 48140 - DNA, 30 bp, Homo sapiens; identical to SEQ ID NO: 7915
  chr11:9482579-9482609
  hyper

SEQ ID NO: 48141 - DNA, 30 bp, Homo sapiens
  chr11:9596146-9596176
  hyper
ggccgctcccccctcgctttcctgcgccgc

SEQ ID NO: 48142 - DNA, 210 bp, Homo sapiens; identical to SEQ ID NO: 7916
  chr11:9596557-9596767
  hyper

SEQ ID NO: 48143 - DNA, 55 bp, Homo sapiens
  chr11:9636049-9636104
  hyper
gccggcaccggctccggtggggccacagagtctctggagcgaggctctctccaat

SEQ ID NO: 48144 - DNA, 535 bp, Homo sapiens
  chr11:9685506-9686041
  hyper
ttcttgccaccaggcgtggcttgactcgcagaacccacactctggcggctgtgggcgcggcactggaccggcgccggcagcagggcggggcctggcgggggcggggcctggcgggtcaggtgactgcgcggcgggctgtggctgcggaggttgaggggcgtccgaggcgcggaggggctggctgggcaggaggggttggcggggcagcagggccgcggccatggggagcttgaaggaggagctgctcaaagccatctggcacgccttcaccgcactcgaccaggaccacagcggcaaggtctccaagtcccagctcaaggtgggcgcctcctgacccggccccccacccgaccctccccggcgcgctctgtacttcccttgggtggaagcgggacctggcgggccgtgaccgcagggcggggcgggtcggaatgcgcccggtaggcccgcttggggcggagtgggtctgagaccgggatttggtgtttactgcctcccccttgccttcgggccatgccctcggttggatgtgtta

SEQ ID NO: 48145 - DNA, 18 bp, Homo sapiens
  chr11:9863100-9863118
  hyper
agagtcttgctctgtccg

SEQ ID NO: 48146 - DNA, 30 bp, Homo sapiens; identical to SEQ ID NO: 7919
  chr11:10316446-10316476
  hyper

SEQ ID NO: 48147 - DNA, 166 bp, Homo sapiens
  chr11:10324218-10324384
  hyper
caagggcacttgcttcgcgatcctcctggcagagccacagctcaagtttcccccacggaatcacgagcttttgtaaagggcagcgaggaggcagcgaggtggcagcgaggtacagtcgcagagttctctggagaacgaacacccccgccgcgccccaccccccagg

SEQ ID NO: 48148 - DNA, 30 bp, Homo sapiens
  chr11:10326085-10326115
  hyper
agtcctgctcctctcggctttgctccgtcc

SEQ ID NO: 48149 - DNA, 30 bp, Homo sapiens
  chr11:10326314-10326344
  hyper
agaggttgtagtggcgccccttcgctccgg

SEQ ID NO: 48150 - DNA, 30 bp, Homo sapiens
  chr11:10329350-10329380
  hyper
ttccccctgcctgccgcggttgttaaagtt

SEQ ID NO: 48151 - DNA, 30 bp, Homo sapiens
  chr11:10472084-10472114
  hyper
gcggtgtggaagcccggcggggccagcgca

SEQ ID NO: 48152 - DNA, 30 bp, Homo sapiens
  chr11:10562150-10562180
  hyper
ctggctaagtagatcgacgtggctatttct

SEQ ID NO: 48153 - DNA, 30 bp, Homo sapiens
  chr11:10562822-10562852
  hyper
accttcctctgcagcgcccctaccgacccg

SEQ ID NO: 48154 - DNA, 30 bp, Homo sapiens
  chr11:10757366-10757396
  hyper
aagcgctccatcagcgcactctagagtcct

SEQ ID NO: 48155 - DNA, 30 bp, Homo sapiens
  chr11:10772766-10772796
  hyper
aagtggccgtccgccgtccgctgctcgttg

SEQ ID NO: 48156 - DNA, 31 bp, Homo sapiens; identical to SEQ ID NO: 7920
  chr11:10814227-10814258
  hyper

SEQ ID NO: 48157 - DNA, 30 bp, Homo sapiens
  chr11:10830215-10830245
  hyper
agcgctccactcggcggcggcagcggctca

SEQ ID NO: 48158 - DNA, 30 bp, Homo sapiens
  chr11:10830955-10830985
  hyper
gctgtggctgccctcgcgtgcctggcctct

SEQ ID NO: 48159 - DNA, 30 bp, Homo sapiens
  chr11:10880013-10880043
  hyper
gccccaaaggagcacgcagaacctcggctg

SEQ ID NO: 48160 - DNA, 30 bp, Homo sapiens
  chr11:10952240-10952270
  hyper
ctgtattcgccacacggggtcccgagggca

SEQ ID NO: 48161 - DNA, 1133 bp, Homo sapiens
  chr11:11642579-11643712
  hyper
gatcccgagagcccgcgagcaaccagcccagagtcacacgcacatttggacacgtgcgcagcgcgcccccataccgccagctagctgcacacatccgctcgtgcagccctgcgcacacacgtgtgccccggggaagagcgcacggccgcagacagaaggtcccgaacgcaggcaggagctcacacgcaggccccacgactaccacgcatctgcggccccagagccccgccgtggctgagttgatgcgcaccagccccagcgcaccccgcgccgcgcggggcactcccgggcctcatgggcgacccaagtttccggggcgcccgtaccttgaatgtgctgcttgatgacattctccaggtggtccagccgctcaataatcttcagagtgtcccctttgtcttcctccagcttcttgtcgggcgccggctcctgcccccgcacatacacgctggcgatgtagttggtgacccagcccacgtagagcaggcagatgatgttagtcatgccgctcaggatcacgcaagtggacaccaaagttttggtcttcctggtgcacaccattctgggctccttcctccatatagagctcccgggggcccttccttgtcgtgcgccccgaactcccccgcgctcgcaccccgtagcacgtccggagccgctgggcacctcagcacctgagtcccgaggttctccaaagcccggtccgctgccggtgtagccgccgtgcccaagtttgcagctcctgccgctggccacccggagagaccttgacaaaggaaaccaggtggatttttttccaaattaaaaatccctgaacccttcctagaggggtcacgggtagccggcagccgcgcgtccagatgtgtacgtctgggaaactttgccactgcctgtgtcggcggccacgccgcttcccatcgccagcgccggctgccttggcggtccgaccggcccgcgctgctaggagaacagcggcagcggcagcggcggcggggagagccgcgaagcagagcggcccggccccctccgagcgacaagcgctgccaccaatcgcgctccggctcgggagaggggccggtgctgagcggcagcggaccaacggggagggagcggggggcggagtccagctccca

SEQ ID NO: 48162 - DNA, 1075 bp, Homo sapiens; identical to SEQ ID NO: 7922
  chr11:12029931-12031006
  hyper

SEQ ID NO: 48163 - DNA, 846 bp, Homo sapiens; identical to SEQ ID NO: 7923
  chr11:12131780-12132626
  hyper

SEQ ID NO: 48164 - DNA, 30 bp, Homo sapiens; identical to SEQ ID NO: 7924
  chr11:12260402-12260432
  hyper

SEQ ID NO: 48165 - DNA, 794 bp, Homo sapiens
  chr11:12398998-12399792
  hyper
cagggcagagggcggcgcgagggagggagcgagggagggagcgagggaagggaaaggcgagcgtgagctgcctcaaatgcttggaataattccgcttccgtttggaaagccgcagcctcagtcccgccgccgcccgctgcgtccgcccagcgccagctccgcgtcccgaccggcccgcggcagcctgcgccgcgccatggccacctccccgcagaagtcgccttctgtccccaagtctcccactcccaagtcgcccccgtcccgcaagaaagatgattccttcttggggaaactcggagggaccctggcccggaggaagaaagccaaggagggtgagtgcggccaggccggccgggcgggcggtaggagccgggggtgccgtaggggccgaggggccggggcactgggaccgggcgggagcgcgccgcgggtgcccggcgcggtggggcgcgcggcgatgcgtgcgcgcgcttcccgggtacgtcgggcaggagcgacgcgcaccccacactgagcccggggctcgcgggccatcgaggccaccccgcccgctcgcggtcgcccgggcgctgccctcctgggccggggaccaggccaacgcccccgccgggccgtgggcgggcgccgcttggcggccggaggcggcgggaccggagcccaggcggggccccagcccgcagacagtgcgatccagtaggccctgccccgccctctgcgcccgaaggctggcatttcccaagtttccgctgcagctttcctgggcgccgtcgctcttactcgttgccttcattggt

SEQ ID NO: 48166 - DNA, 96 bp, Homo sapiens; identical to SEQ ID NO: 7926
  chr11:12695399-12695495
  hyper

SEQ ID NO: 48167 - DNA, 1423 bp, Homo sapiens
  chr11:12695572-12696995
  hyper
cgtcgcgcgcaactcccgcctcggcgcctgccccctggaagaaacccaggcttccagagttcttcgcgcgagcgcagggacttccaagccgcgcagctcccgtccgccccgccccgccccgccccggctcgggacaaagcccggagcccgcgccgggagacggagggcggctcccgcgcgagccacgctcccccgtgggcgcgagactccgcccagctgccgaaagcccgcgccccaacggcgaagcagccgcgccggtccgccccgattccccatgacgtcaccggcggcggcaggccccgcctccagccccgggcggcaggccgcatgacgtcaccgaggccccacccctccggagcgagttcggtcctggcgttcatttcattcctgtcctcattccgaacattcttagcatcgctcgcgccgcgccgcgccgcctgagccgagccgagcctctgctgccgccgccgcggccccgccgcccgccgcgggcgcccaccaagcactttgcagactcgcttccaccctgcgggccattccgcgcggcggggcccgggcccggggcggccgcgtccaggcacaggccatgcagtgacgcccccccacccctccacctttgcccggagcgcgggcagcagcccagcgcgccagccggccccggggcaggagcggtgctaggcaggggtggggtggccgggcccagggaccgggagccggggagggagccgggcaccgagcagagggcgggggaagcggcgccgaagtttgcctcggactcgccgggcgctgcggtggctccctgggccgaggtaagttggcgcgcggggcggatgctggggtgcggggggcgcacggggcagcggggggccggcggcgcgtccctcgcgggccgctctttctttgcgggctctgctttgtgtgcgacggcgggcgggcacgcggagggccgcggccgggcccccacacccgcctccccgcgccccctccgaggtgagcggccgggcgccgccgcgcgacttgccaggacgccaagttgggccgcgcgctgggagcccgcgcggcaacaggcggcccccggccggccgcgccgcgccccccgcgcgccccctctcccgccgcctgcacgcgcacacacgcacacaccctcgggcgccttggacggggtgcgctggggagccagaagttcggagcgagcgcgggcgggcagagccgccgcctcggagcccggagccggcctgcacccccctgctttcgccgccgccccccggcgccgggtacccccgaggccggcccgggtctgcgcagacttgtgccgctggcggggggttcgctccttcttctcaaagatgaaaaagggcacggtcgtctttgccgcttctccaggactgttgctgccgctgccgccgccgcttcattgcacatt

SEQ ID NO: 48168 - DNA, 30 bp, Homo sapiens
  chr11:12715634-12715664
  hyper
tcagccaggaaaggcggcaggctgagtccg

SEQ ID NO: 48169 - DNA, 569 bp, Homo sapiens
  chr11:13030349-13030918
  hyper
atagcgctagctggtcgtggaatgcgattacagcgtctccattggagaccgctgagtgcctcggtttccctgtctgtgcaaagtgcactccccagacgccgctgcctcgagggaccaggaaatgcgtctgggggcgccaggaaagatgagaagataaagtcacgatgcgtccagctagctatagacacaagcagaggagccagtaggccaaaggagacgcacagctgatccgtgccgaggcgcgggctccactccctgaagtggagggacccttgaatctttccttgcgtaggcgcgcggcagagcagcgatttggcgaaaagggccgagactcaggatgcctgcaatgcgagcgaggggcggacagggcgcacggggcgcggcaaggctgcgaggggcgggcctgggccctgagcctcctgcacttccagccacagctctgggccttgggggcgggaaggggtggagccacgtggggaggagcaaaacccggaggtcccgggcaccttgggcagagccagagcggcgggagccggtcctgggcgcgttgccccgggagcgcccgtcgt

SEQ ID NO: 48170 - DNA, 770 bp, Homo sapiens; identical to SEQ ID NO: 7929
  chr11:13031244-13032014
  hyper

SEQ ID NO: 48171 - DNA, 332 bp, Homo sapiens; identical to SEQ ID NO: 7930
  chr11:13032093-13032425
  hyper

SEQ ID NO: 48172 - DNA, 305 bp, Homo sapiens
  chr11:13298518-13298823
  hyper
ggaaatgcaatggaatcgctccgcgctcgagtattctctttggaactacgggaatgacagctccagtgggacacttggaggtcatgatgaacgcaaagaacgtgagaacacttgcagtcctcggggtggaaatgccttctagaaatactaagtatccgttctctcgttgagactttggcaaaccagggattttaggaagggtctggcactcaacgttcctaaaattggtttcctagatggagccggagggagagagggagtcaggaactgctgcttttcgtcggaatgcccggaggggagaagaa

SEQ ID NO: 48173 - DNA, 396 bp, Homo sapiens
  chr11:13300305-13300701
  hyper
cgcggagggcgcagcgagcctggctccagctccgggtttgacagatgtcagggaagaaaaggttcccgctcggctattgccgggcgttgacatcccagagagcttcccgtttgcttggaagaagacgaggaaggtagaggtgaacgtcgaccttgtggggcgcatgttagcctccccgaggggtcgcgagagccggcagcggggtgagctcaggtgcccgccggcaggagctggggagggaaggggagtgctggacaccggcgcctgctgtcaagttctcgccggccggtgagagacccgctgccgccgcgcaccccgcacctcctgacccctctcccctctccgcctcggccccttcccggtcacctagcgttgttttggcgctttggcgcttgc

SEQ ID NO: 48174 - DNA, 1091 bp, Homo sapiens
  chr11:13689626-13690717
  hyper
cgctctcaccgacccgggccacacccgccaagctggtagttctccgaacggatccctcacgcccagcaatggccggagggcccccgggccccaccataatagcgctaagcacgccacaatggcagccccgctgtctcccgcgcgggcctcgctgcgtgctcccaaccttgggagttggcgcccctcccgcgcgacggacagccgggcgtggccctgggcgcgacccgacaggacgccagcagccggcgggggcgctccaggactcgagatgtggggcgcgggcccattggctgagcattcccccgcgagcctcccggccgcagggcccacctcccggccctctctccgcgcccccattggccgttcgcgttccgcgggcgtccgctcccgccccactcccgcccggagggaaaccgggttgggggtgagaggctaaagcagggaggaggatgactggtcctgcggataagggtgtgcgcgagagccaatcaaaagcggatgtcgaaaagaggcgccgctccagccagtcacgtcgcgaggtgcggtcggggccggctgacgcgactgcgggcctcagccaatgggcgtgccactgcccgtccgctcttcagcagccggtcgcgggcggtggaaaagcgagtgaagagagcgcgacggcggcggcggcggcggcgcagctattgctggacggccagtgggagagcgaggcctgagcctctgcgtctaggtgagaagggggtgcgccagcgggagcggccgggctgcgggctcctcctcgcctggctcgggaagtggttgcgggagctcgggctgcaggcctggccgaggcgggggcgccgaccagccgtcccgcccccgcccccgcccgggtacgcccagaagtgagggcgcccgcctcaccccgggtggtctctgcccctctttgccccgccgccgcccttcacagggccgggaccgcgtgggggacgtacggtggggcctggtttgcagccgcggagcccggggagccgcctggggtgggaggccgctagaggtggcgaaggtggggcggggtggttagccgagcagcgggctccgcgtgctcgcgggag

SEQ ID NO: 48175 - DNA, 30 bp, Homo sapiens; identical to SEQ ID NO: 7935
  chr11:14086442-14086472
  hyper

SEQ ID NO: 48176 - DNA, 30 bp, Homo sapiens
  chr11:14521624-14521654
  hyper
cgctaactggaaatcgttccttcttcagga

SEQ ID NO: 48177 - DNA, 30 bp, Homo sapiens
  chr11:14541899-14541929
  hyper
gctgccgaaagtatcgctcagcgatctaca

SEQ ID NO: 48178 - DNA, 138 bp, Homo sapiens
  chr11:14542170-14542308
  hyper
cctccagtttctcccgctggcgggctgcatctaaagtcgtccgagtcaacagccgtgactctgggtgatactagctctcattaaccgtccacagatttggggtgttatgtgactgaaaggaacgaggctgcaggaaag

SEQ ID NO: 48179 - DNA, 713 bp, Homo sapiens; identical to SEQ ID NO: 7936
  chr11:14665235-14665948
  hyper

SEQ ID NO: 48180 - DNA, 387 bp, Homo sapiens
  chr11:14665995-14666382
  hyper
cgcctgtgccttcttcttcctcacctgcttcctcacccggaccaagcggggacccggcccgggccggagctgcggctcctggtggctgctggcgctgcccgcctgctgttacctgggggacttcttggtgtggcagtggtggtcttggccttggggggatggcgacgcagggtccgcggccccgcacacgcccccggaggcggcagcgggcaggttgctgctggtgctgagctgcgtagggctgctgctgacgctcgcgcacccgctgcggctccggcactgcgttctggtgctgctcctggccagcttcgtctggtgggtctccttcaccagcctcgggtcgctgccctccgccctcaggccgctgctctccggcctggtgggggg

SEQ ID NO: 48181 - DNA, 196 bp, Homo sapiens
  chr11:14666658-14666854
  hyper
ttccgagttgaattcgcttatttcaaagcatgttaactttcagaatggaaaaagggtgtgttgcggggggggggggggaggaaataatgttttattctggaaaggattcttaaaatacaggaagccttttaaaaatgcagaagcaagtagcttttgtcattgaatagaaatcaaatagcccgctaatcacatggca

SEQ ID NO: 48182 - DNA, 358 bp, Homo sapiens
  chr11:15136037-15136395
  hyper
ttgtttcagctccaagggaaacgatcgcggcacattcccttcccctctccagatgttggcatgcggggcaccttgtgggcgaccccgcctggacggcttcgcggctcccgggcgatcaccctggtgcctgccgcctggcccgggggagcccggtctctaattaggcctgaccgcgtccccattccagcgctcctgcagatgggagggagggccatgtttccccccccaggggcaccgaaatagcctcgtagtcccgcggagacagcaggcagccgtggctgacgcgggaccaaggcttggcagggagcgcgctgctgtggaaggtccttgggaggctgcgaccgcctcggagagggcg

SEQ ID NO: 48183 - DNA, 252 bp, Homo sapiens; identical to SEQ ID NO: 7939
  chr11:15671675-15671927
  hyper

SEQ ID NO: 48184 - DNA, 762 bp, Homo sapiens
  chr11:16626017-16626779
  hyper
ggttgctggctgggccgtgcagccagggccaaagcccggccgcaggagtacgcggctagcaccggcgcccgggacgcggacgtcatccgagcgcccattgacagtacagcgggaggtccggagcccagcccagtttgccgcaaggacggcttcgggccacctctagccctaaacttcaagcgcggccctcacagggtctcacacacaaaagcagcccaggacagcccatctcgctaacagcccagccccgccagttcagtcgaagacttatttttagtccccaaataggggctgcattcaatatctgacaattcacacaaaacaacattttcaaacttggtccgcctaagagaccgtaaataaaactcaaaacaagctggcgactgccaccttttatctgctccgaacacaccaattctttttatcttaaagctctgcggagcgccggggaagcagcccggcaccgagctaatctgccctcagcagccccgggccgctcctcccggcatcggagcacaaccccagcagcctttgcacaagccctttcccttctctgcccggccctttaagggagaaggaagaaagcagctcccgcgggagcggccgggctcgggctgggtcccggggcgggtggcagcaccgccccctgccctgggccgagcccgggagcagcggaccgcggccccggctgcagaggaacggcgggtggcggggccccggcagggcgccgagaaggacggagggcgccggctgggctcaggg

SEQ ID NO: 48185 - DNA, 466 bp, Homo sapiens
  chr11:16627083-16627549
  hyper
aagttgcggcggagcggcggtggggtgagggtgggaggagggagcgcaagcgttttctagcgacccgggttttcttcatgaactcctccgagtaaactttatcccggcgagagagcggcggagatcctcgactcccgcccgccctcaaccagtgtcaaccccacaaacagcctaagtttccaaaccgaaatgggggtggggtgggggtagcattaagaagcccagaagctcagcgggtcctcccgacctcccgcacccagagcctgggtgacactgaagcgctccgaacactgtggcgtctcagtcacacagcgaatcaacccaacacttttcaagaaaacaaaatatttgctaggaaacttactttgcatttagtctctattctttgggggatgcggtttaggtcggctcgcaagggaagcccgttttgtccaggttggatattgtctacgtatggatcagccct

SEQ ID NO: 48186 - DNA, 335 bp, Homo sapiens; identical to SEQ ID NO: 7942
  chr11:16628320-16628655
  hyper

SEQ ID NO: 48187 - DNA, 303 bp, Homo sapiens; identical to SEQ ID NO: 7943
  chr11:16628929-16629232
  hyper

SEQ ID NO: 48188 - DNA, 135 bp, Homo sapiens
  chr11:16632603-16632738
  hyper
tgcctctgtgttgtccgaatgtccctgcgcaccgcaaccagcaaaggcaattcggctttgctaactttggcctcgcacctccagagaagaggcgcgaactcgcaaaaggaaaggcgcgcacggttcctggagaga

SEQ ID NO: 48189 - DNA, 443 bp, Homo sapiens
  chr11:16634102-16634545
  hyper
ttctttttaaacacattgaggcgggggggcggggttgggagtggggggatggcgatgaagaaaaggagaaaaagcctggagtatactaccttgctcaaaaagctcccaaaggcagcgtggagcggcacagacacgaactaagacaatgtgtgtctgcggagcctgtacagggtccatttctcccccacgtcaccctcctccattcccctctaatgagacgcggatcaccctccactctcaccgacactgcagctctgcacaagggcagctggaatctgggaaccttacctgcagcaccaatacctaagagaaatcgcgcttccctgacactaacacgccatgccatccccacgcaccctgccaaagtcctgtaaccatctacttcttccatctgcctaagagaaactgtaaacgggatttcccccccacgattgaatggaagc

SEQ ID NO: 48190 - DNA, 309 bp, Homo sapiens
  chr11:16635710-16636019
  hyper
ggcagagggtgggggcagcttcgaagaggcataccaactgctccggtcctggccgaagaccgagctcccttctgcggtgacctcggctcagagctgactccgtactccctgggactcatctcccgcttcctctccaccttcggaacagtagacaaagggactcagggacgcggccagacccaaggtcacaaacggaggtctccgagacgagaattgcgtgcaagagaaggacgttcaggcagcccggccgcctgctgcgagagctgaacatttcccagctctatagtcgcccatttctcaggaaatcag

SEQ ID NO: 48191 - DNA, 111 bp, Homo sapiens
  chr11:16759950-16760061
  hyper
aagctctcggccaacgctcaccgccatacacatccgcgggaacgcttcctccaccagccgaaggcggggcctctgagggcactcccgccacacagcgcgaattgagcctcg

SEQ ID NO: 48192 - DNA, 31 bp, Homo sapiens
  chr11:16760933-16760964
  hyper
gtggtgaggtctaagacgttgagacctagaa

SEQ ID NO: 48193 - DNA, 1554 bp, Homo sapiens
  chr11:17034984-17036538
  hyper
ccctccccgcaggcccgcgcagtggatggaggccgggggcgaggttccgactctccaagaccatcccagagcctgcggcgggagagggggcgtcctcctaagcgagattcccctagtctctccctctccccactccaaccccgcaggcccacaccaggacagaacttctcgttctactcctcccacccgagcccatccaggtcccggcactcgcctctcccggcggggcgcagccccagaccctagaggggaggcgtgcccagcccgcacaccagcacccgaatccagccggattgcaaggtccagggcgcagagtctgcggcctcttcccccccggcccaggtccccagcgtaggtgcggcccccaccgccttcctctcggaggccgccaaacaacttgggcacacaaaacgttgagtgtggccgcggcgcagcgcgcgccaacgagcccgggccggcgggagcagaggaagggcggggcgcccggcgggaacggggagggaccccccccccgcggcacaggtgcgagcgcggcggccccactcactcactcgatgaagtagctggcgccctcctccgtgaagccctcctcccagccgcggggcaggtctgcggaaacgccagaaaagtcgggtcaaacttgggccgccgctgcgcgcgccccccacccgccggcccggcgcccacctgagcggatcatgtggcccgagttgacgggctccccggtgcgcggatgcagccaggtcgtgcagcggagctggtcactgcgggcagagaggtgcacctgttagcgccgccacagcccgccgggtgcccgcccggcccccgcccccgcgcccccacccgcgtccccgcgtccccgggtcctcgcgccgcacttgatgaagaagacgcggccatcccggcacaccccgtaggaccaatgctcaggtaaagtgtcccgcccgaccgtcgccgccgccatgttcgccgagcgcggagccgccgcggggtgggggggagggggcgggggcgcgggcaggggcggaggcgggggcggtggcgggggctcggcctgcgcgtggcccggcggcgccgcgaggcgctccatccaggcgcgggctcctgagggagcgaccgcccggccgggtcctggcgcccggagttcgcagccgctccggccaacccagcgcagtgcccgcggcctttgtccccgagccttccccgcccccagcctgctggcaccggcgctcccctttgcccccgaggccgggagacccgggcggcgcggggggccgctggcgggggccgctggcgggcgcgcctgggcagcttcggggcgcgcggttggacccgaccaactccgaaaacggcgagcgcccgaacgctcagtaaaccccagccgacccgcaccacagaacttcccgacccgggaactccgcttgtgtgtgaaccaagttaacactcaggttcctgccatattcccagcctccttctcttcccctgtaaggttaatcgagtccacacgggattgttgtgtagattaaatgaagtaacaatcgcataaagtgctta

SEQ ID NO: 48194 - DNA, 30 bp, Homo sapiens
  chr11:17099673-17099703
  hyper
atggcagcggctaccgcccagccagcgctt

SEQ ID NO: 48195 - DNA, 30 bp, Homo sapiens
  chr11:17228997-17229027
  hyper
caagaaaataggaccggccactgcggctcc

SEQ ID NO: 48196 - DNA, 30 bp, Homo sapiens; identical to SEQ ID NO: 7946
  chr11:17297717-17297747
  hyper

SEQ ID NO: 48197 - DNA, 572 bp, Homo sapiens; identical to SEQ ID NO: 7947
  chr11:17372998-17373570
  hyper

SEQ ID NO: 48198 - DNA, 116 bp, Homo sapiens; identical to SEQ ID NO: 7948
  chr11:17373642-17373758
  hyper

SEQ ID NO: 48199 - DNA, 220 bp, Homo sapiens
  chr11:17373997-17374217
  hyper
aggcgtgagcccccgcgcccggcctgggggctctattttcaagcgtccctcctttgtgagaagcggagtccccgatgcaacaggtttacattgaaggcctgccctgtgcagggtcgacacctgtgagagcggaaacggtgcttccttggatgtcgcgcgtttggtgcctcggtatttggcgcctctctcgcatcatccgaggggccggaggagagaagaa

SEQ ID NO: 48200 - DNA, 229 bp, Homo sapiens
  chr11:17411056-17411285
  hyper
gttcctcctgcccacgctctacgaaagtggggggctgggagggatctgtgacccgccctcccagtctggggccgccgccctgtcgccctggctcccctcccccaatatccccatccgtatttgggtcagtaatccgcctctcggccgcgccaggtttgcaggttccccgggaaaggaggcgctgagaggcggcgccaccaatcccagggctggcggaaattaggcggtc

SEQ ID NO: 48201 - DNA, 30 bp, Homo sapiens; identical to SEQ ID NO: 7951
  chr11:17497678-17497708
  hyper

SEQ ID NO: 48202 - DNA, 335 bp, Homo sapiens
  chr11:17498221-17498556
  hyper
caccacgttgagcgcgtccacaaagcagccgttgttgaggaccccctggtccacccggtaggcggccgagtggttctcgctgccgcagaaggccaggggcatggcggcgcgggcgcgggctgggctcgggctcagctggctccgctggctccgcgcgcctgccgcgcctctgtcccttgcagctccgccgcccggcccggccgtcaggcccccgccccccgggccccgcccagccccgctggcctccccctccctcaccccgccctgctccaccacctgcggggccggggggcggcgaggaacccgaccggccctgctacgcttgcgcccacctt

SEQ ID NO: 48203 - DNA, 30 bp, Homo sapiens
  chr11:17717614-17717644
  hyper
gccgcggccccgcccgacaactggcttcat

SEQ ID NO: 48204 - DNA, 379 bp, Homo sapiens
  chr11:17740291-17740670
  hyper
tggacacccctgctgtggaaacgtgcagatttagatggaggggattcctaacctgggcaggatccgagtttggagagattggcgcgaagctttagcagcaatctccgattcctgtacaaccatagctgggtttctaagcgtctagggaagaaggactgggcccacgacctgctgagcaactcccaggtcggggactggcggaatatcagagcctctacgacccgtttgtctcgggctcgcccacttcaactctcggggtctctccgcctgttgttgcactcgtgcgtttctctgcccctgacgctctaagctttctgctttctgcgtgtctctcagcctctttcggtccctctttcacggtctcactcctcagctctgt

SEQ ID NO: 48205 - DNA, 36 bp, Homo sapiens
  chr11:17740872-17740908
  hyper
ccgcctagggctgccggtcgctccctccctccctgc

SEQ ID NO: 48206 - DNA, 155 bp, Homo sapiens
  chr11:17740930-17741085
  hyper
cgccagtgtggaggggcgggctggctggccagtctgcgggcccctgcggccaccccggggacccccccaagccccgccccgcagtgttcctattggcctcggactccccctcccccagctgcccgcctgggctccggggcgtttaggctactacg

SEQ ID NO: 48207 - DNA, 28 bp, Homo sapiens
  chr11:17741861-17741889
  hyper
tctatgcgccgggcccgctgcccccggg

SEQ ID NO: 48208 - DNA, 228 bp, Homo sapiens
  chr11:17741952-17742180
  hyper
cggcatggtaaggccgggaccccaggaagtgaggaagttagggcggcgctcgggatatcagggacgcgtttccgagggcggggagctggccttgcgggaggtttgggccaggatccttcccgagagagaggacccccttgtcctgggcagctgtcactggggtagcctgttttggaagtgtgcgggcaagcgttcgagctgccccattgggggcgctattagaacact

SEQ ID NO: 48209 - DNA, 85 bp, Homo sapiens
  chr11:17742398-17742483
  hyper
ggcctcgagccgtcccgcgggcctgactcagtcgcccttgctgtttgcagatggactacagcggccccccgagcggcgcccggcg

SEQ ID NO: 48210 - DNA, 30 bp, Homo sapiens
  chr11:17742779-17742809
  hyper
taaccgagccctccccgcgcagaacccagg

SEQ ID NO: 48211 - DNA, 91 bp, Homo sapiens
  chr11:17756880-17756971
  hyper
gcaaggagagagggagggggccggagcccgccctgcgtcccgagctgcagcccggccacgcagggaggaaggcaggcggcatccatctccc

SEQ ID NO: 48212 - DNA, 151 bp, Homo sapiens
  chr11:17756993-17757144
  hyper
cgaccacctcacagaggagcgcgaatttcccggccctgtctcctcccctccccctcctgggggctggcctctagtccggccccgggagcggctgacctttcccccaaaagctttgtgccgatttctccattttcccgcggagatggggacg

SEQ ID NO: 48213 - DNA, 156 bp, Homo sapiens
  chr11:18034649-18034805
  hyper
tgatgggtagggcgcggggcggggtctgtggtgggaagcggcccgcaggccgggagagagggtgcggccgggccctcgggccactggggatcagtggtgggcggggccggacgacagccccggagccgcctcccagtcagcccgccccggcggcgc

SEQ ID NO: 48214 - DNA, 114 bp, Homo sapiens
  chr11:18034821-18034935
  hyper
cgcagcctcctgtctcgctgggcctctcagcctctcgctcctaccccctcgtactctttatttttagtcataatttcatgtttcatgcaggtgcactgcgcgccacagttcaca

SEQ ID NO: 48215 - DNA, 30 bp, Homo sapiens
  chr11:18415859-18415889
  hyper
caggctcatggctccgaccccggcttctgt

SEQ ID NO: 48216 - DNA, 990 bp, Homo sapiens
  chr11:18416098-18417088
  hyper
cccagctcagagtgctgcagccgctgccgccgattccggatctcattgccacgcgcccccgacgaccgcccgacgtgcattcccggtacggtagggccctgcgcgcacggcgccagagggatgggcgggtagagccaactgcctctggttctgctggcctccgctgctcgcgaagggattcctgctcccgggaggtgtaggagccgctttccagaagcacagcccagagacgtctgggcggcggcccacacaacgcatgtgttcggagctcgccgcgctctgcttttgctctaagcgggaaccatggcttctggccacgctggggaaccgaggaggtggccgcacccaagcaggggtcgaaagcccgggtggatgcggaacaaggatatgataggccttaagggtgggggatacctctgggctcgaaatcggcgggcggtgcaaaactcgaggtccagttctcggagcccatagagccaaaaaagcctcagcttgtccggggcgggttcttgaaagacggaaagcggctgagtaccacgcggcttgcatttttctcttgggacgctcgagaggtgggctccgtgagggcagctgctgcctgcagattatagggagccctttgcgcatttattaagaagctactggtgtatctcgggctgcgctaggcacggcgcatgcaaagatgaagcaggcagcatcccagcccttccgcacctcagacggtcagttgagtaggatccgccggtaccaactcctccttttaacaaatagggagaccgaaagctaggagacagtcagggatctctaagttcccagtgagtaggaggcagaggtgaggtgtagaactcgtttttgcatgtctctcgcctctagacgcacccttccctcatcccatgccctcccacctccgcccctacattaaaggtagcattggatcccggggccgttcagtgaagctagcaggtgtccgcaggaactcccttccccctg

SEQ ID NO: 48217 - DNA, 30 bp, Homo sapiens
  chr11:18548293-18548323
  hyper
ctgggaggcgagcgcgtcgcagcctcacct

SEQ ID NO: 48218 - DNA, 144 bp, Homo sapiens
  chr11:18548580-18548724
  hyper
ggttccaaccaacccgcccctcgagtgccggaatcagcaggacgaatcgggtcccaaagatgtgggcaagactgttccgagggtcgaaactctggttcaggataagattagcaggtatttcacagagtcgacttaaggaagcta

SEQ ID NO: 48219 - DNA, 38 bp, Homo sapiens
  chr11:18610407-18610445
  hyper
gagtgggcaagtgacgagggcacggccagaaacgcatt

SEQ ID NO: 48220 - DNA, 205 bp, Homo sapiens
  chr11:18610539-18610744
  hyper
gaggtagaggcaacacgcggtgttcttgaagagtttccagacagatgtattaaattccacagtgtatcaggaaagagcaagaccgaaaattgcagttgaatttaggaaggaggcggtaatggaacttcagaagcaaaatttcagggagtagaaaggaaaaacaaagtcaggaggagccttgccggagaagcggagataggacagc

SEQ ID NO: 48221 - DNA, 31 bp, Homo sapiens; identical to SEQ ID NO: 7960
  chr11:18720185-18720216
  hyper

SEQ ID NO: 48222 - DNA, 1083 bp, Homo sapiens
  chr11:18742609-18743692
  hyper
ctggttagacctaaggatggtcggtccttggggagggttcagctgaagagcccggagcccctgaccctcacccctactctacggcgagtccctccggcacctcgccacccacaatggtcccgccctccatggctacgcccaccgtcttggtcccgcgttccttttggctcactcgccttgtggacacgccccttcgcttccattgcgtcccgccccgccacgttctggctctgcccctgctctgctctgccccgggggtactttgggtcctctgctcattccggcaatatcccggttcctgactcggcctctcttatcctgccgcgcctctcgggcaatgacagctgcttttcccactgcccggctctcgggccgccgttaaggctctcatcggtgagaagactggcggcccgccctgggggtccctgcctctggccttctcggtaactggacttgggcttggcccccgcaccttcagcacgtgttccttgttaatgctgtcgtagaatatcttggcggactccttgatggggatgccgctctccctcttccaggagatgtggggtttggcgttcccctgcacccgggctcggaacacggctttgtcccctgcgatgagcacaggacgcgttttcgcctcttagccaccaggctagagcctctgccaccctctgccggctctctgcctcctcccagacacctgggcctggccccgggcaggggaggaaccctcggccaggctctgccagggtttagcattggaggtcgttggggtaggacggagggtgggggcactcgattagaaagcgaagcactggagcccggtgagccacaggcagcaacacaccctcgggcgcggtgaccggttgaggcttctccacgaactcagggacgctgtcgcccgcagggatgtttgagctccgggtcactaagctgaagaactccactatgctcgaggacttcctcctcacgacctcctctgtgggggcaggcgagaggtcagaatgggctccaggtagaagcccagctcgcgatgggaggacagagctttcttgagaggacggtggagcatgggaacaaaga

SEQ ID NO: 48223 - DNA, 928 bp, Homo sapiens; identical to SEQ ID NO: 7962
  chr11:18812614-18813542
  hyper

SEQ ID NO: 48224 - DNA, 490 bp, Homo sapiens
  chr11:18813609-18814099
  hyper
cggaggagtgggagcagcgcatccatttcattcatgattttttctcctcttgggagccccgggtcgggccgcgcggctacggcaactgccagagggaccccggcagggccgtgcgcgctgaacctgggacgggacagacaggcagacagaaggagtaggggccagcgagacaaagggggcagagttgggggagggagtcggctcattgggggcatgccgtggcgctccccgcatgttgccaacacctgcgcaagtggagcggccccatactagggcgcatgcaataccaggtgccgaggactcgttctaggacgctgaggaggcgtcctttttcccagttctccctgttcagcctctggggagctagagcgagtggacagcccctccctccactgagtcttgccctcctgacgtgcggcgcggggcacgcacctgttttggttttctcgtgggcaccaggggcccggacgagcagggagctgcccatgtg

SEQ ID NO: 48225 - DNA, 137 bp, Homo sapiens; identical to SEQ ID NO: 7964
  chr11:19093002-19093139
  hyper

SEQ ID NO: 48226 - DNA, 30 bp, Homo sapiens
  chr11:19138660-19138690
  hyper
gcacgagcggggaccgcagcggcggaggtg

SEQ ID NO: 48227 - DNA, 30 bp, Homo sapiens
  chr11:19262109-19262139
  hyper
ggctccggactaagcgcacgagcccaggtc

SEQ ID NO: 48228 - DNA, 30 bp, Homo sapiens
  chr11:19262532-19262562
  hyper
ccctgtccgcccgccgcagtcccgacagtt

SEQ ID NO: 48229 - DNA, 637 bp, Homo sapiens; identical to SEQ ID NO: 7965
  chr11:19263418-19264055
  hyper

SEQ ID NO: 48230 - DNA, 49 bp, Homo sapiens; identical to SEQ ID NO: 7966
  chr11:19264093-19264142
  hyper

SEQ ID NO: 48231 - DNA, 495 bp, Homo sapiens
  chr11:19366639-19367134
  hyper
ccctggaaggggaccggggtggcgaggccgccgattggcagcgaggcgccatgtgaactgcactggttggctggcgggagggaggaggaggcggtttcccgggtaacgggagggcaaggagcggctgcagcggcagcggccgcggctgagaagcgcgggccggagtgcagtgcgagaccggctggaggaggcggctccgcgaagccggtgtgggcgcaggtaggaaccccctatgctgcctcccccaggtcgggtctggctggactgcccggcggcgggaccggcctgggaaagtttgcggtgcaactgggtgggcaaggaggagaggacttggggatgctctgtgctgagctccggggtccagagcagggtggggactgccgttggggagagggccggcccctcattgagaggctcgggggccacacctctgctgcgggactctgaccgagggccagggcctctcaagccacccggccgcagcatagataccgg

SEQ ID NO: 48232 - DNA, 99 bp, Homo sapiens; identical to SEQ ID NO: 7968
  chr11:19367267-19367366
  hyper

SEQ ID NO: 48233 - DNA, 29 bp, Homo sapiens
  chr11:19367947-19367976
  hyper
gctctcgctctcccacgctccggttagct

SEQ ID NO: 48234 - DNA, 115 bp, Homo sapiens
  chr11:19733694-19733809
  hyper
tggccagagcctgccggggtcatggagcctctcccggcttcttcaggccactctaattacagagtctgtggtaggttgcgtggaggagctgtctcggggcgggaagcttccctgc

SEQ ID NO: 48235 - DNA, 1522 bp, Homo sapiens
  chr11:19734194-19735716
  hyper
aagcggccaccagcccgctttgtactcgcggccaagcgcggccccagagtttcggcggcggccagagtttaggccacaccctctttgcagtgagacccgcggccgctgattggcgcaccgtggaccaatgggcgcgccggggcggccccggctgtcagcgcgcgccgcagcagcgccggcagcagcctgtcctcccctgcgctgagccccgcagccagcgcagccttcccgggaagcgcggcggccgctcccgagcgcagccctgcccggcccgccagccgcgcgtcccggcgcccgcgccccacggccacagccttgcctctatctagctcacggagcatgtgcagacccgcaggcgctaaggtgctctcagtccgggggccttctgggcagcggtgactgtcaccccaagagagacctttcgggggctcttgccgcacctctgctgcgtcgcgggtgacactgcggtgctcgcgagcagggtggcagctgcctctcggtggagacgtcttgggacccttgcgcccttcttctctccttccttcgctgctgtctcctttccttccttggctgctcgctctttctctcgccggctcagacccgtagcctccggaacgggactcgtgggtcgccgccgcctctgtctcttccaaaggggcctcctcacttcggagatgcagtgacaagttaatatgggcgtccaagcctctgtttcccaggaggaaatttgcaagaggcggcagcccctgagcgcccagagctcttgaaaggccacccaggagaggtgtgagacccggcggcagcatccgtccaggtgggacccgctgagcgccgtggccagtcccccattcccatcccggcaccccaaaggcgcgctcgcccgattgcttcgagttccccgacctggggattttttttttagccgctggtggtgggcgcctcgtgggctaaggcccggcgcctgctctgctacccgcgctgcctttagcggtcgcccccgccgccgctgccagggacgtgctgggaaagcccaagccccgggagaagatgccggccatcctggtcgcctccaaaatgaagtcgggactgcccaaacccgtgcacagcgccgcgcccatcctgcacgtgcccccggcccgggcgggcccccagccctgctacctgaagttgggaagcaaggtggaggtgagcaagaccacctatcctagccagatccccctgaaatcgcaggtgctgcaggggctgcaggagccagcgggggaggggctcccgctgcggaagagcggctcggtggaaaacgggttcgatacccaggtgagagatgccgtttgccggggtactgttctggaaggatggatgaatagttctttcgggatggtgtgggagaaagggctggatgggagaagggtctaccatgtggccagggaagggaaccattccccttaggccggcaggttgggggatgcgcgaggagagtgggccggccggtgggtgtggcccgggtgccggaggtttgccttaa

SEQ ID NO: 48236 - DNA, 919 bp, Homo sapiens
  chr11:19798522-19799441
  hyper
ccatctttcccccttcgcgcccaccggcggcagtggcgaagggcccactgaagcgccgggtgccacgcggggcggcccgcgggccagctagggggcggggaactcaccagccgccgacccccccccccaccccgccctcggccgccgcggccccagcggcctccgcgctgcgaggagcgggcgcttggacacagggcgagttgtttgatttggcggaggcggggaggccggcggggagcgagcgagggaggcacgagagctgggcagcgcgggcgccggtctccagggtagggtccccgcgcgcagcagcggccccggggcgggggcgaggcgaccgcgggcgccggggatgcctggaggggccgcggccgagaggagacccgggactggacggccagacctgccgggcgcgcgggcaggtgcttcggctttttttttttttcccctcctcctttttcctctgccccttccttcctcgccctgaagtaagatgagcgtgatgctgtggcgctgggaacagaataacaccaccatgaagctggtaagggtggattgcagaccgcaccccctgggcgctgctctactttttaaccccccaccccgccccccatcccctttaggaactggcccgggtggtggaaagcccctgaaatgcattccgcacttggtatttcccttattgttttgaagctagatctcaggggaggtgtgtgtgtttaaaccaggaaagtcgatgtgtgtatgtctctggttgtgagtcattgaaggggggtgggactgggctgcattatctctccgtcccttccacctacgaattcctggagctctcttggattgcacacgctgggattgtctcctacgagcatgtctgcgccctcacagcctgtcccgggacagcgtggtccgcgtcccccgagcc

SEQ ID NO: 48237 - DNA, 557 bp, Homo sapiens
  chr11:20153640-20154197
  hyper
aaaagaggaaaacctcgggcagatggtgagggaagggaacctccgtgttcaggacacctccgcccatccacattcggcctggcaccgatcctgcggaatctctccccaacgcacggtttctacactggaacgattgaaactaagggggtgcgccaactcccccaccttcgcgggtcccctggcaggagacctggtccttgccttaccgcagtaggtgtggctgtgactgaagggagcggcatccctgagcacagtcggagacaaagggaggcgagggccaaccccagcccggaaactctgccctgtaactcggccaaaggagacgccgcattggagcggctgttccgcagcaccatgctgtagaaggtacgttcctctgatgccctgtgcgcaaacccctagccagccttcccacactgccaggataacccttttgaaacctcccctgtttgggacaggccgtgctcccaccttttattggagacgaggcgaacctgggcttagggcgccacctagagccaaaaaagaggaagcgacctggccgcgaagcttcgcta

SEQ ID NO: 48238 - DNA, 255 bp, Homo sapiens; identical to SEQ ID NO: 7973
  chr11:20177587-20177842
  hyper

SEQ ID NO: 48239 - DNA, 1008 bp, Homo sapiens
  chr11:20178093-20179101
  hyper
cgtcggttctggaaccagattttcacctggaatgtcccggccggcgagaagaagggagaagcagaggtcagatcaggggctccgggggacgcacgggggcggggagtggagtcgggtgcaggctctgtccttcgggctgtgtcctctccccacccccagaaatgagttccggtggattcccgcattgactccgcccccgcctcagctcgcggttccgtttgcctcatccgctgccaccctgccccgaagggcggggttgggggccggtgaggccgggagagaaggcggggagtcggggtggggagagaagagggctatcctgcggagcttcgagggtagtggcccgtgtactcactccctctctaggcctcggttttcccatctgtacagtgggacctaagccgtttccgaacccttgcaattgacgggtgcgccggggaggggtgaagggcgggggcggggggggtgctgtggaggaaatgcgctcacctgcgagtctttcaggcccagcttggccgccagcttcttgcggtcgggcttgctgatgtacttctgcttctggaacatcttctccagcgccttccgctgcacgtcggagaagactgctcgacgcagcatgccccgccgaggcttcccgcgcgcggccagcggccaggagaaggtcccggggatgggcaccacgctggaggaagctgcagggtggggggaggtggcgagtgagtgggcgtacgccccccagtcccaacacggctctccctggctttttgctctgatcccttcatctctttaaaacgctcctttttctccccctggagaataggccacgaacctacaaacctgcgagagtgaaaggcgctttccgcccaaacaactttccctttcaaccgtgcaaacccggattaggtaaaaccacggaaacagagaaaacagcccccacaatagcctgtttcgtttttccattcagtggacttagggaaacaaacctgcgtacatcaactaaaacagcaa

SEQ ID NO: 48240 - DNA, 30 bp, Homo sapiens; identical to SEQ ID NO: 7975
  chr11:20180685-20180715
  hyper

SEQ ID NO: 48241 - DNA, 312 bp, Homo sapiens
  chr11:20181724-20182036
  hyper
cggctgatgcggatcagatcctccaccaggaagctggagtggccggaaaatgccgactgcaaggactggggcagcgtcaaggtgggcgtgggccgcaggaggctagggtacccggcggggggcgcgaggaggccggggaacatcatggtaggcgcgggcgggcgaaataacccttctttcagtggccggagggtaaacgcctcgcttcccgcccctcccgcccccacagtgtcctctctcttgggcttagcaaacgtctccaagtaacaatcccacttgggcgtctgcgagtcctccgtggtcctctcgtcg

SEQ ID NO: 48242 - DNA, 489 bp, Homo sapiens
  chr11:20182622-20183111
  hyper
gtgttagaagtcccattctgacgactcagggaaacttggaaacggatgctttggggccactggatgtgtgtccgtaagagtggggagaggtctggagttatttcatttcgggagactggttgagtttgagcgttggtggatacctgaaaagtaaaacgagtctccttcaaattcccagcaacttggaaaacgattttctctaggagtttctgcaaggggctgtccgcacctcaccttgcgggaggagcggaggagagcggcgctgggctgccgagcggcaggattccgcttgcaaagagcttaggctgaccggaaactgcctcgggcaagggtatccaaaggctgtgagtgctatgctggccgttctccaaacacagggagctctcggcagtttaagttgaaactcacagccctgacattttaagccatagcagcgaaggtccagacgtcgtctggagagaaccctaccacttgcggggcccttaactt

SEQ ID NO: 48243 - DNA, 30 bp, Homo sapiens
  chr11:20183674-20183704
  hyper
gcccagctccagaggcgaattaatgctaga

SEQ ID NO: 48244 - DNA, 173 bp, Homo sapiens
  chr11:20184117-20184290
  hyper
cccagaaggacgcgccgggggcttcaggatgtttgattccctaccggtgaagcgcttgtccaagtcttccggatgatcagaatagagtctatatttgccaaaatcaacttggattttgtttttttttggaggggggaacggtaagaacttgaagccagcgtgagcccttccca

SEQ ID NO: 48245 - DNA, 732 bp, Homo sapiens
  chr11:20184705-20185437
  hyper
agctgcgcggcgcggcggctgcggctaagacctgtgactaatgccatttgacctgagcccatggggttttgtgcgtcctgccattcactgttatgtcgttatcttcaagtttatttcggagaaatcactcgcgttctttgtctcaaggctgagctttctgtctatttctctttcaagagaaaagaagacgggaggggaaaagagagaatcggagtccctggtttggggtttaaggtccttgcctacgctgcgggggaggccgcagcagatccggctggggctccccgggcctaggtggccaaagctgccgaaacctgccttggatagtagaaagagcgtgtcggaacgcactctgggggtttcgttccccccgcgcaggggagagcgagcatgttcctgccccgggcgccgtgcggtcgcagcagcagcgcggccctctccagtgcgagccgtgcctggaatgtctcgggtaagcgaagggccagcaagcgaggcgaaacggacactataaagcagagagtggtgtgagcttccccgccctctgaaaagatggcaagtctccgtttcgggaaggctgcaacgctaaggtcaccctttgcaggcttcggacccccagtcctccatgctccctgccggagcagccaacagagtgagagcgcattttggaaagattggccggatgccgggcggcgacagggaaaagcgcccgacgcctggctttggggtgggggg

SEQ ID NO: 48246 - DNA, 30 bp, Homo sapiens
  chr11:20229502-20229532
  hyper
aagtggccggagcccgcacctgcatgcagc

SEQ ID NO: 48247 - DNA, 117 bp, Homo sapiens
  chr11:20385070-20385187
  hyper
agtctactagctggcgcctgggtgagctgagcccagcaggtgagggaaaacgcgggaagagggtcttgcagattccaaacttaggaagggtcgcggctccgcgcacgtgctctcggg

SEQ ID NO: 48248 - DNA, 198 bp, Homo sapiens
  chr11:20618194-20618392
  hyper
gaccgaatggctgcgcggtgatggatgcggatttacggcctccttggctgcggcgcgctgggcctgattatcactataaacaggcgtccgcggagggcgggggcggaggcccgcgtctagaggacgtgcggctggtcttcttcttcttcttcttctttttttttgtttttgttttttaatactgcggttccatcctct

SEQ ID NO: 48249 - DNA, 502 bp, Homo sapiens; identical to SEQ ID NO: 7979
  chr11:20618422-20618924
  hyper

SEQ ID NO: 48250 - DNA, 119 bp, Homo sapiens; identical to SEQ ID NO: 7980
  chr11:20619219-20619338
  hyper

SEQ ID NO: 48251 - DNA, 360 bp, Homo sapiens
  chr11:20619673-20620033
  hyper
cccaccaaaggcaatgcagaccgtgtgtccccagccagctgccctttagaggggctaggcgggaaagccaaccagcggaggcatccaaacactctcgggctctccagaggagcaggagggtgccccttagtgcccccggcgcccgccgcaatctgccactgcagcctacgcctgcggccgcggccgccgcggcattgtcctcccgccgcgtgggacggcccagccgctggcgacggcgcgcaccccgaggcagtgggctgggctgttggcagtagggaagggaaaacgtgctgtctgtggctcctcatccccgaggccaggggttccccgagctagaccggcaaggaaggagagaaggga

SEQ ID NO: 48252 - DNA, 184 bp, Homo sapiens
  chr11:20621326-20621510
  hyper
gggaaagggggcgacgaggagaacaattctcgcagccctaggtatttgtacttgtgagcgtcacctgaggtcgcaaagaggtttcctaggctgtagagctgagaggttggctgtggctcctaaagacccgatcccgggcactgtcctcggtgctgaaaagccagatgccggtacagaggcgagt

SEQ ID NO: 48253 - DNA, 93 bp, Homo sapiens; identical to SEQ ID NO: 7981
  chr11:20622699-20622792
  hyper

SEQ ID NO: 48254 - DNA, 245 bp, Homo sapiens; identical to SEQ ID NO: 7982
  chr11:20623258-20623503
  hyper

SEQ ID NO: 48255 - DNA, 167 bp, Homo sapiens
  chr11:20631746-20631913
  hyper
cggggttgctgggccgcagagctctctgatgagatggcccatcattccctcgcgggtggacccgaaggctccgggcgctgggaagcatgctcctgccgcccggtggtgggaggggatattgcaggaggcttggggctgcggagcgagcgagcggggagcctgggaac

SEQ ID NO: 48256 - DNA, 319 bp, Homo sapiens; identical to SEQ ID NO: 7983
  chr11:20690558-20690877
  hyper

SEQ ID NO: 48257 - DNA, 103 bp, Homo sapiens; identical to SEQ ID NO: 7984
  chr11:20690982-20691085
  hyper

SEQ ID NO: 48258 - DNA, 258 bp, Homo sapiens; identical to SEQ ID NO: 7985
  chr11:20691121-20691379
  hyper

SEQ ID NO: 48259 - DNA, 184 bp, Homo sapiens; identical to SEQ ID NO: 7986
  chr11:20691431-20691615
  hyper

SEQ ID NO: 48260 - DNA, 118 bp, Homo sapiens; identical to SEQ ID NO: 7987
  chr11:20691747-20691865
  hyper

SEQ ID NO: 48261 - DNA, 52 bp, Homo sapiens
  chr11:20692076-20692128
  hyper
ttctgcctccggagacgcagttgtgaggactctcagcgcatcttcttccttc

SEQ ID NO: 48262 - DNA, 30 bp, Homo sapiens; identical to SEQ ID NO: 7988
  chr11:20692852-20692882
  hyper

SEQ ID NO: 48263 - DNA, 1265 bp, Homo sapiens
  chr11:22214157-22215422
  hyper
gagaggggttctctccgagtggcacgcatgagcggatcgatgaagacccggccaaccggctgagggagcatcgggaccccctttggggatcggaggaggaggattccgacaggagggaagcggcagccctggggaaccaggattcctggtcgtgggtggacccagtggaaaaggacgtgcgaagcctgtacagaatggagcaggccggccaacagggccggggggcggcgggtcccgaggagggacgggaggctgcatgtccggaggaggtgcgggaggcggcagagcagggacctggggacggcttgagcggagaggagggggccagcgtggagccagccgggccggggggcggggagatggcggtctccgagggtggggcgccggccggtcttgcggtctggaggcggggaaagaggcgtggaaacagggacgcagcgaaggggaaaggaaagctgccagagggcaggagtggaaaggatcctggcgagcaccgggaggagtggcggctgcgggatcagctgccgagcaggcacagggacaggtgcctggagaagtactgggagagcgcccaggagcgctaccggctgagggtggggaagcgcagggccaagcgcgcgaagcaggttgtgggggaccgggtcgagtggaagtacccgccggagaggaaggccggctggctgtggcgcccagagacggtggagtccgaggaggaggagaaggaggcctgcagaaggaagagcaggcccttagaagtccagcagcagcaactccggcggcccacagtcagattcagcacctgcctcagatctccacgtctgtctcagctgcccctctcctgctgcctctcaggcaccagtgccattaacgagctggcgaagatgggcgacccggatctcctggaagtgttggcggaggaaggtaggaccgcgccaagaggcgtcaagggagagccaggctggctgcctgcacccctccacccgcggcgcagaggccccgggggacgttggcggccctgcggcctgagtcctagggaggttcgctgcgtggcgtgctcagcgcgaaaccgggactgcggggcagagtcccccgcctggggtgagtggggttggtttcggcgccccacagatttctctgctgctcctgcgcgccagggacctgcgacctgtgacccctatggttccggaacaccctccttgctcccctgcaggcctgggaaccgccgagtaattcagggctgctaggctagcgctgcagtgcttggg

SEQ ID NO: 48264 - DNA, 30 bp, Homo sapiens
  chr11:22359318-22359348
  hyper
attgtaccgagacccgcccagacgggcgct

SEQ ID NO: 48265 - DNA, 30 bp, Homo sapiens
  chr11:22364872-22364902
  hyper
tccgggaggctacatcgcgtctcggctggc

SEQ ID NO: 48266 - DNA, 245 bp, Homo sapiens
  chr11:22365111-22365356
  hyper
tctgggaccagcgcacgcggcctccttccctctgctgtggctgaacttgcttttggcgaaataatcgacgtgctgtatggcctgacaggagctgagggcagaccgggagcaggcagagcagggacagtgcgcctgagtgcacaaaggggtgtagaacggcagatgctgcgctctctcctgcactccccgcaggctcccaggctccccgagggtctgacctcctggcaaggcgcctcgaagacctg

SEQ ID NO: 48267 - DNA, 106 bp, Homo sapiens
  chr11:22647395-22647501
  hyper
acggcgactctctgcgtactgattggaacatccgcgaaatgatacgcctctctgcaatgctattggtcgaaatgcatgtcaatctcccagcgtctttatccgtgtt

SEQ ID NO: 48268 - DNA, 513 bp, Homo sapiens
  chr11:22688124-22688637
  hyper
gtcaactgcatttgcgtccaccaaaaaaagtaagcattttacttccgctcggtctatgaggactgatgaaatgtaggaaatctgtttctggcagggagaaaaaatcgttttcccaaacagcactaaaaggagccatcagagaagtatgaagaggggtagtgcggctgtagctgctgccgctgccgccaggctggtggggtgcggggagcggctgctgcaggacctgtgcctggagggggccggccccgagaagctgcaggagcccagcccggagcccaagcgcctctgagagccgccagcagcccagctcgggacgcgggggtgagcacgactggctggcccagttctgcgccaacgccgccgcagcgtgcgcgcaccgcagccggggctcacgggagcccctgcctgtctactgcacccggggcggcgggggaggggagaggtcattaaaaaataacctcaggaacgaggcggggaagagtgaagagccgcggacagttggacaggctcttt

SEQ ID NO: 48269 - DNA, 134 bp, Homo sapiens
  chr11:22850851-22850985
  hyper
gactaaagagctcccggagaaagcaatgtcttttcgcgccgaattccatctaccacatcccccggaatgtcccacgcgtaacgccctctgcgtgcgccggcgccctatgaagatccggcgcagctaaagtcagt

SEQ ID NO: 48270 - DNA, 30 bp, Homo sapiens
  chr11:22851487-22851517
  hyper
cccccctcttctcgcgacaccaaccagtcc

SEQ ID NO: 48271 - DNA, 152 bp, Homo sapiens
  chr11:24518301-24518453
  hyper
gaattgggtctcatctcctgccgagtacgcaagttcaattatcggcagattaggtttctactctccgtgccccgccccgcgccatcctggggagcagcgggaataaatgatccgcccctggccagtgctcacccgactgaccagagcgcagc

SEQ ID NO: 48272 - DNA, 95 bp, Homo sapiens
  chr11:24518550-24518645
  hyper
cggcggcgccgaacaatccccggcagggctcgcctcgccggtgacatcactcctgaagatactcctcgctcccagcgcctgccttccccaggcgt

SEQ ID NO: 48273 - DNA, 243 bp, Homo sapiens
  chr11:24518677-24518920
  hyper
cggaagagcgctcatcactggctggggacagagccgggcaccaaggagcgacaggatcccgaagagagagagagaaggcagcgagggaaggaggaccccggcaggcagcagcatgaaattcagcccagcgcactacctgctgcctctcctgcctgcgctggtcctcagcaccaggtgagtccaggagcgtgagtgacctgaggccaggggcgctgccggggcgaggttggtcctactgtgggt

SEQ ID NO: 48274 - DNA, 30 bp, Homo sapiens
  chr11:26353469-26353499
  hyper
ctagaggtttgctccgatttatatctcctc

SEQ ID NO: 48275 - DNA, 285 bp, Homo sapiens
  chr11:27493262-27493547
  hyper
tagcggaactcctgcccgctgagcgagggccctcatgagaagggaaggtcgcgtggacaggctgccaggggcaagcgtttttagattacttcctccttcttggccccagatgcacttgtgagttgggggtgtgcgcggtggggtgggagggtgcttgtgcccaaaaagtctgggaacgaaagctactgctggctcgaacccggactagcaaagtgcggaaagcccgtggcacaggagtgggtgccaggcagcccgcacgcaggtgaccggcggaccccctcccca

SEQ ID NO: 48276 - DNA, 763 bp, Homo sapiens
  chr11:27493755-27494518
  hyper
gcgccgcgcagagaggcggcgccgcgccgctgggcccggccgagccgagcagccccagggcgaggaagcagagcagccctagcgggcccggcattgctgcggccgcctcccgcgccggcctctcccgcggcgctgctcgctccgctgccctccgatgtcccccgccgcccccgggcagccggcctgcgggctggagcgggggtctcttcctcggcggtccgcgcgggctcggccccttcagcagtccgccgcagcggcgcagggacgcggcgctccggagtttcgcccttcccgctgctccatggacgcgcagaggcagccccgctcctccggcggctcacgccagccgggccggcccggcgcagcggcgggggccgcgctctgccatcgcaccggtctccctgtccctggcctctcaatgcagcggctcttcaaggttgcagagcgcagccttcagccatgccggccactcgccccagcccccgccgtggctctcgcacaaacacccagactctggctcgctgtctcccagccgcggctcaatctcttcccgtccttttcccttctagggttgcacgctctggttcccaaacccccggccgctggcttatgcaaatcacttaggtacatgcaaaagtatcccttctcccggagcgccattggcccggggaggtctcgagctcattactatgcagagaggagagccgccattggccaagaggaggaccagaggggcgtgtttctcgggcgtgagtgacaaggt

SEQ ID NO: 48277 - DNA, 30 bp, Homo sapiens
  chr11:27527910-27527940
  hyper
aaccgggtgtgtgacgtttgcttttcgggt

SEQ ID NO: 48278 - DNA, 164 bp, Homo sapiens
  chr11:27721073-27721237
  hyper
gggttcggcctgcccgagagtgtcgcagaccctttcagttcccagcggtaggaattccgcctcccaagttttccaagctacattggcttcggacttgtaagtccacttcagtctcaattcctggggagcaggtagccgtgtgcagctccggggaagggatgcgg

SEQ ID NO: 48279 - DNA, 30 bp, Homo sapiens
  chr11:27722048-27722078
  hyper
gattggtcaaacggcgccgccccccccccc

SEQ ID NO: 48280 - DNA, 30 bp, Homo sapiens; identical to SEQ ID NO: 7994
  chr11:27739812-27739842
  hyper

SEQ ID NO: 48281 - DNA, 113 bp, Homo sapiens
  chr11:27740063-27740176
  hyper
atcagaaatccccccgcccccaagctcagcccctcccgccacgctcccctgcccgcccctcccctcccctcccttcgcgtagatctgactgagaaaacgactggatctcggaa

SEQ ID NO: 48282 - DNA, 705 bp, Homo sapiens
  chr11:27740480-27741185
  hyper
accaaaccctggggcgaaaactgccaccgggcttggctctgtggccggaacaaaaggcctgagaagggggtgggggtgagggttataggagtgtggagagcctggtggcccccgcccaggggcgcctaagtccctgagctccctgaagagtggcaagaggataacgcagccgcgcgttccggcagttcgctgtcccccgggggtgcaggcgggggcgggagaggtagaacacaggtctgggcggctccgcgccgcttctatctcacccgccaagcccctcacctccacccaccgccagtcccctgcccacccgggtggcggcggcggctcagcgactagccggccgccctccaccggcgcctccggacgcaacctcgccctggcagggcggtctgcgcgtccagctgattggtggctctgtccagccgccgcacggagctaaaagtgttcttctccaccgcctccagccgcccaggccccctcgcccggcccgctctctggctcttcggtccggaaaggaccttctactcccaggcggaggctcccctttccctgagttaccccgactgactcggacctgggctcagtgaggcatccggcccggctggggagcggagcgcggtctcggcagctccccttcccttgagaaagcgggaaccctctaagccagcgcccgaaactcgcggggagggaggacagaaggga

SEQ ID NO: 48283 - DNA, 1149 bp, Homo sapiens
  chr11:27743202-27744351
  hyper
atagatttacgcaaacgccctcactccgagagacacgtttccttttgagttcttacgtgattctaatgaatgagcgaggttaccaatgattgcccaactgccctgctatgtagcaggtgtttcctagggctgccttctaaccgcccgttactgggtcctggcactgaaagttcccagagaaagtgaggagtttcagggtacccctgtaaaaaaaaaaactcagcctgcacaccgctcccttgcccactacgcaggtcacacctggggctccggcgaagctgaattcggctcgggagatttccctgtcgccaggtaagaaaaccttcgccttgtcaggctagggcgggaagaccgctggggaacttgttgcttatcagcgccggcagactaccgctttaataataataccagaaaagcgcagcagggagggggtggggggcggcaacggcgacgactaacctcgctgtttacgtgaccgactcactgtgactctctgggtaaaaaaaggaaacttcttagaaaagttcgtgcccctccccctcccccatcatgactaagggtctccagccgatgaggtcgtgagtgatgatcaaatggggactggggggaggggggcgagtaagtgacttgtccttgggaacatctgcatgcgtcgaagcgcgaaccagcccaacaactttcccttttcctcttaggtactgatgactaggcgagaggcaccaaggcgagccactagttgcccacaggaacctgtgtaagccgagctctcgagcggctgagttgaatgaagttatgactgcgtttgctctaatgggttatggcttcccaaatgtgagttaacagccccggtgcgcagctaggtcggaaggcgagccgcggagagcggagccgcgggccaaggcagggacgggaggggaggcggcaggttgggcgctccgctgctgctcggtgctgcttccccggagccgcttcctcatcctgcgggggctgccccgccgccggggtgccggggtgagcgcggcgggagccagggctggggtggcgaacctcggagggggctctcccaggaagccctgcggttagcgcccgcgcttccccaccagtggctgcgcaagctgggaagcgaagaggtcacgtgttggcggaaag

SEQ ID NO: 48284 - DNA, 114 bp, Homo sapiens
  chr11:27744660-27744774
  hyper
atggagatgtccgtcgctctgaggagcgctagtgccctgggaagtccccagacgcatttcaggtttcgtcgttttggcactgacaccatgattttactcgctctgagttcccac

SEQ ID NO: 48285 - DNA, 30 bp, Homo sapiens
  chr11:28129955-28129985
  hyper
ctcctgtagaccggcgggtgcagggcccgg

SEQ ID NO: 48286 - DNA, 30 bp, Homo sapiens
  chr11:28132180-28132210
  hyper
tttcactttctcagcgttcgtgtgccagcc

SEQ ID NO: 48287 - DNA, 30 bp, Homo sapiens; identical to SEQ ID NO: 7998
  chr11:30037681-30037711
  hyper

SEQ ID NO: 48288 - DNA, 54 bp, Homo sapiens; identical to SEQ ID NO: 7999
  chr11:30038271-30038325
  hyper

SEQ ID NO: 48289 - DNA, 57 bp, Homo sapiens; identical to SEQ ID NO: 8000
  chr11:30038989-30039046
  hyper

SEQ ID NO: 48290 - DNA, 30 bp, Homo sapiens; identical to SEQ ID NO: 8001
  chr11:30393948-30393978
  hyper

SEQ ID NO: 48291 - DNA, 220 bp, Homo sapiens
  chr11:30605940-30606160
  hyper
gcccttctaggctcacggctggctcttcccggctacaacttccccttccttcctgaaacaccagcgccttactcgctcagtcccccgttgccacctccgtcacctcctcggccgccgctcctgctggcactgctggcgctagcgctggcggccccgggctccgctggacgcctatcttttttctctccctcttccctagctctggattgattgatgacca

SEQ ID NO: 48292 - DNA, 539 bp, Homo sapiens
  chr11:30606215-30606754
  hyper
cgtccccgacctcagcctcccgggcgcgttggcatccccgaacccacagcgctgagcccgagcccggggccgccgcctcctccctgctctacgcctgggcgctgccaggttccttccctggaacggcggagaaaggaagggagggagccagcgagcgttggaagggggtgtggaggccacgggatctccccctcttctgacatcttttttcacttaaacttttgtttgtcccacccccccgacctgtttgtgtttgtttgcagcatctcaaatcaattatacatttttcatgacccgcatttgcacttaatttggggtgtgtgtgtgagaggggggtggtgatgtactattataaatcaacttcactggggcatccttaatttattttcttgctgacggattccaaccggctcctgagcctctagaaaaatgcccccttcacctcctaggccgcaaaaccccggaattcaaaggctttacaaagataaccttgttatacgtaaatagcaaagaaactcctgcctctgtagagaagaaat

SEQ ID NO: 48293 - DNA, 1431 bp, Homo sapiens
  chr11:30606795-30608226
  hyper
cgcctagcctcgaccccagcttgggtcgccgggtcgctccgcaggctgcgagcgcggagacccaggcagcggcggagagtgaggttggggcgcggggacggggtgagaaagagccccgagcgagagcggcgcgcgcgggcggccccgggggcggccgcggggcgcagccggagcacaaagctgcgcggtgccttcccctcgtcactgcacctggcctcgggccgccgcgggagcccggggatcgggccaacacaatgcacccaggcctaggccggggcggctcgaacacatcaccccgggactttctagtaaacagctcgctgagccctcgtccccacccccatccccgccgcccggcttccccagcttctcgccgataccccctcctctcctcctaagaaatcctggcggaggagggagcgaagaggtggggacccccagaggtcgggggactgatggctggagggggtggagaagagaagaggcgcaggatggggagtcggagggaagacacctcctaaaaaagaatttgctttcgctcaggggttgaaaatcagccctccccgagcgccgaattgcccgggaggcgcccgctcgtgcggatgtcaggggcaccggggcagcccgggtccgcagcctccgagcccctcgcacgcgcctctgacaaggcacctctcacccgggctccgctttgtgtgtgcatttttttcccttcctctagtgctcggcaccgggctcccggccgcctcctccccctcccccgccctccgcctcccttcccggggcggattacctttcccgggctgcgctccggatcccggggatgccttcagcgcccggcgagcaggcgatccatagccgagcggcccgagccggctggaggagcgctgggggcgcgcgggggcggcgaggggcgcgagcgggccagaaccttcgaccccggaggtcccgccgcaggctggggctgggggccagggggcgcggcgctagagggaggcggggggagaaaggacccgagcagcctcgatctggggagagagcgagcgagggggcgaggagagggagcgagggcgcggcgagccggagggagagcgagcggtgcagtgacagggactgccactggggtcaaaggagcacagctccaggaagcagggcggccgaggcgccgctccgtgcgcgctccccggcgggaccccgcgcccctgcacgcccctcccgcagtccctgcccactcggacccccaccggtgccccgaagccccagggtttcgagaggaggagggagccgagggcgaggcccggtagcctgctggtgctcccgggtcaagcaggcggcaggaagctgagctgcaagttcatcatcatgagtgcgatctgcgtaaaaaatgataggggaaggaaggcgggctacggtgccccaggaaaagaaggg

SEQ ID NO: 48294 - DNA, 179 bp, Homo sapiens
  chr11:31391318-31391497
  hyper
tctgagctgtgccacggccacatcagctcggccagaaacgcgaacacgtcggaacagtgacttccggcggaagaagaagccggtccggagttctggccgacagcaggcgaggagtgggtagcagcgcctatgtgaagttaggtaggtctgatgtcgtataaagcgcggagagggtgccc

SEQ ID NO: 48295 - DNA, 30 bp, Homo sapiens
  chr11:31531120-31531150
  hyper
cacctgggccccgccgaagtcgaccgtcct

SEQ ID NO: 48296 - DNA, 549 bp, Homo sapiens
  chr11:31818930-31819479
  hyper
acacaaacatacacacgggtttacacaggcagcacgcgatcgccgccaggccctgtgctgcctccagaactgacacttaagagagaaaagtcagcagggacagtagagctcaattttaaatctggaaaaaaaaaaaaaaaaaaaaaagatgggaagcggggattggaattccacagcaaaaagaaacctgtcgctgcaggatcccttctctaccccgcggggagagcggcacggagacagttcattactttagaagtggcaactgtttgcagccaggcggtgacctagcggctgctcttacataaaatgggtacatttccccccactttagtggatttgccttccactcttaaagcttttaacaaaataaaactagaagttggatctcgactcccccacccccacgataaacctaagtggtggacaattaagatatcttcttcaaaaggcgccccctcggagccgcgcaaagcaggggccttcagtgggtgccgttcaccttccagcctaatccgtgagaaagcgagtgaaagcgcctcccattatccc

SEQ ID NO: 48297 - DNA, 557 bp, Homo sapiens; identical to SEQ ID NO: 8008
  chr11:31819803-31820360
  hyper

SEQ ID NO: 48298 - DNA, 1548 bp, Homo sapiens
  chr11:31820460-31822008
  hyper
cgccccaagctcatgggagcccacgcaccggggagagcccggagtggaggctctgggctcagccctcccaggcctaggccaccgtgccctgagtccctccccaagacttctcggactaagtgggccagactcttgtcaggggagggatcaccaggacctcagattgctgggggcggaggggtggacgctcgtgagtgcgaagttcgggtgtcacttgggtgtgtccagtgtctacaagtgggaatcctacggtttcaaaagtcaggcagggatggggttgcctacactcggtggggtcaatcgctagtctcaccagaggcgggagcgggcctgggggccctctgagctcgcggaggcggcgggttcggggcccgtgcgggcggggtcgcccaggggagcccgggccccgcgcgtcaggaggcctccgccggccgagcggccgcgctgggaaacaagaagcgagcgctttgctccctatcttcccagtgtccgtcctatattgttttctgctcttaaaactgacatgtctaattggcaattggtgccgaatcgtgtccagaggtctcttgtggaacatttctacagctgtctccttcaactagacgcttattcatgtcgccttaatgagaaacaaaacgttctctaatgagcaattacagagcgacaggattgttcccataacaaattcttgcgagtgacagaagcatcctttgtaccagatatttcgcatactgttaccgattttcccttccctcgcccgactccatggaggcgccgggcatccggagccggtccgagagctcacggatgcgccggcagcctcctcgcagtcccgcgcgccgcccctggccccgagcccctcggctccgttgtgctcctgggagtgagacgccacgtcccattatcccgcatattatctccttgtcacgaggacaacaaataccgattaatcttcggagtaaactgtttcctattcttgaccaagctacctcggggtgtggaggggagcggaggggagccaactgaccctcccctccgccccaccccccccatcccccgctcttcttcctccagcccttctcacagaacctggggtgtttcaggtcccatctctcctcccagaccagagcggctcccggcatcccgccgtcctgctcacagtatcttcacctcaccacttccacatagtcgccacccacagagagtgagaaagtgggacccagaggggcgaacgggggaggggcaaggatagtggggtggttttagttgggagaccaccacttccaatgccccatccccgactcgccctgcatctccctgctcaccttttcatgtgcaccctactcatagtcacataatttgtcaattacagcaaaaagcaacaggatacaattatgttaacctcgcagtctgtcagtgcgttatcttgtcacacttctacaagggggctctccctgcattctaatgtcaaatttgaatagtgcaccacgcagctcgttcttatgcacacagtgctgcccacaaacacacacacgcacccaccagcca

SEQ ID NO: 48299 - DNA, 80 bp, Homo sapiens; identical to SEQ ID NO: 8011
  chr11:31822245-31822325
  hyper

SEQ ID NO: 48300 - DNA, 31 bp, Homo sapiens
  chr11:31824246-31824277
  hyper
atcacctgcagaattcgggaaatgtcgcacg

SEQ ID NO: 48301 - DNA, 30 bp, Homo sapiens
  chr11:31824585-31824615
  hyper
tcagttccctgctatcgatcaaataaagga

SEQ ID NO: 48302 - DNA, 5 bp, Homo sapiens
  chr11:31824958-31824963
  hyper
agtgc

SEQ ID NO: 48303 - DNA, 28 bp, Homo sapiens
  chr11:31826042-31826070
  hyper
acaggcgtttgggggatctgggctccgg

SEQ ID NO: 48304 - DNA, 197 bp, Homo sapiens; identical to SEQ ID NO: 8014
  chr11:31826106-31826303
  hyper

SEQ ID NO: 48305 - DNA, 324 bp, Homo sapiens; identical to SEQ ID NO: 8015
  chr11:31826408-31826732
  hyper

SEQ ID NO: 48306 - DNA, 91 bp, Homo sapiens
  chr11:31827113-31827204
  hyper
gggcctggtttcgctgggcctccaggctcccaggtcggagctctagactagccctgccgcgtaccagcacccaccacgaacaggaaggtgg

SEQ ID NO: 48307 - DNA, 457 bp, Homo sapiens
  chr11:31827597-31828054
  hyper
cgccctgatcagcccagcccctctctccggggtcagagcccgggcaggggcgagagggggtgtgagttacaggatttgggggggatggggtttctctaccgcagcttcgaaaactcgggcgggctgttcttaagggcccagcccctgcttctccagtatcgagaagagccaagcaaacgccctcccctcccgggctgccgggcgcggagcggggagcagccgccgcaggtccccgggcctcagtcggtcggcggccgggccagcgcgggcgtcgcgagtccctgtgtcctcccctgaccctcgggtccgcgcaccccgagcccgaagtcccagaaagaccagaggcacttactgttctgcatgctggctctggctgggggccgcgggattccacggggctcgaatatggggctctgttagcaagaaaataggagttaatcctcgggcagctgcatca

SEQ ID NO: 48308 - DNA, 228 bp, Homo sapiens
  chr11:31829160-31829388
  hyper
tgtgacacaccctgtctacctcgcctcactgctttaaaaagtacgaacaggagggggtgagcgtggtcgacaaagccgacagacggcaaacaatggcttctattctccagctttcctcgaacccaaggagcaaaaccgagtctccctaaccagcaacacagcttccaaccaaatgtaccaacaacccaccaactcacaaagggaacagagggacgcttctagcttcat

SEQ ID NO: 48309 - DNA, 845 bp, Homo sapiens; identical to SEQ ID NO: 8018
  chr11:31831436-31832281
  hyper

SEQ ID NO: 48310 - DNA, 870 bp, Homo sapiens
  chr11:31832775-31833645
  hyper
ccagcaaaacacttcctcctgcgcctgaaccagagcgggaaatgaggccgagccacggttcccttttcaaacccactaatcactccgcaacatgcaaatgcaccgctcgctctcacacaaaatattgctttatgcaaagcagcgccggggcctcgcgccagccgattggatgctccctctccccgcctggtgcaattggtccgtttgtttgaatatgaatacacttgttttcggctccgccggtgggtcccggctcctctccccggcgcagggcccccgagcccgggctctggcgctcgcctgcatctccccgctccgcgcacgccgagattcggcgcggcccgccctgctgccgcgaacttgagcggtcaagtgaaggtttctgggttgggggtcgcgcccccactccccctaagctggactcgggactcccagtcctcggagggtgcaagtttctgtgctgtcctttcttgccaactccaggacagcgtggcctgccgccccgcccccgcccgcccccaccccatcccagccggggccccaagacacagagcacagcggcggccgcaccccagcccacctggccccttggaagaagaggaaaggggcgggagcgtcactgggtcctggcagctccattccagctgcggaggccgcggcgaagcctaggccgagaggaggttgccgggccgagaactaaacgaggccagaggcctccccagcccaagcctccagggcctgtccaaatcctccaccccgctctccccgccctttcttctctcctttctcctttcggaagccgcggtgcgcagcggagcagaggcacagctctggctggagaggcccgagtaaacacgccacttactttgt

SEQ ID NO: 48311 - DNA, 1169 bp, Homo sapiens
  chr11:31833905-31835074
  hyper
gtatgtcagcgtgtgtcgtgtgtgccaccggtcatctgtgtgtggtgcgtgtgtctccgcaccacgactccctctcctgggtctgctcagtccacggaggcagctccccttcagctgttgccagaaaaccggggaggaaagtaagtaaatggcttttctcttctgaccacacaccagaagtccatttgttgaatgccgcacgattaggacacacctcagtacactccaaaggcgcccctcggagcctgcagttaaggtgacaggagagcgagcggctgcctggtcctgcgctgtcccgagctctctcggcggcttcgggccacggagccgggaaggagaaggaaggcctgggctgctgtacacaccccaggacagggcgagggggaatagggctgaagagctgaggcagggaggctgaaatgaagcagccgaagggtacgctagactcttcttgacttagggaaagtgctgaaagtcagagctcatcaataaaatctgcgcgacctgaactcgctgctgactggccgcgtcgccgcagcccctggcagccgggacagtgaggacgctgcaagccgccctgggccgccgggccacatgtgggcctcaccctctcgttcctgcctgggacccagcagccctgcgaccaaggagcccgggcagggctcccgggaagcaaaggcctccccggccctagccagaggtggggtcgcataaccctctcccctccccgggctggggagggctgccggctctaacccttccccgggagctcgcagcgccgggaggaaacctgggtcagaggtgaaggaggtggcgccgggtgtccaggtccgcggcctcctgggcgaggtttcatttcgcaggagcgcgactttcggaggatgccggcaagtggggccgcggccctgagtcccagaccagcgaaagtcggctttctctttctctctccttttactttccaagcgagcattaaagaagcttggactcaagactcaagtccgctgtgcatgagcgagggacttgcgggggggcgggggggggggaagtgattctgtccgaactggaggcgagtatcatttttacaacctctcaattagcgaccgagtggattagcaccttcttaagctttgcctcggaaagaagcagccgtaatcttgttgctatttccc

SEQ ID NO: 48312 - DNA, 550 bp, Homo sapiens
  chr11:31835400-31835950
  hyper
ggtgggggtgctgttctacctcgtggggagcctcactccctctgccaagtaccggctctgggggcgaagcggcctaggggtgtgggggccgagactgaggtgcgggcgcggttgccagaggtgtgtacaaaaccgagacaactcgcaggtcgccattttaattgcggctaccaacacgcccgaggcccacttgctgccctccaagacgcgggggggcggcggggattgcgctttaggttctgtctcctttccccgcctccccacaggcccctgttcccccctaccctccgccccctgtggccagagggaggacctctcaggccggcgggtgcgttcccgcgggggccgccggggtcgtcccacccggtagcggggctgtctgcgtggagggagtcccgctgggggaccgtggctcgccagagcctgcccagagcttctagccagtattgatgcgtcaacatgaggtgaggcaagcatctcacccgcaccgatccctggcattcccctgtgcccaccccatcaggccttcggggaggcaaagaagtgccca

SEQ ID NO: 48313 - DNA, 110 bp, Homo sapiens
  chr11:31836239-31836349
  hyper
gctcccatcccggccgcccagtccctggtgcctcccccacttccaggcctttgtccctctcctttctccagcaacctgccggttcccgctaacccggcagcctcgccgag

SEQ ID NO: 48314 - DNA, 30 bp, Homo sapiens
  chr11:31836658-31836688
  hyper
tcctagcagcccagcgggtcagactcccaa

SEQ ID NO: 48315 - DNA, 50 bp, Homo sapiens
  chr11:31837462-31837512
  hyper
gcgggttggctcagccgaatgcggccggggagaatttaagaattctcagc

SEQ ID NO: 48316 - DNA, 2106 bp, Homo sapiens
  chr11:31837541-31839647
  hyper
cgagaggaaagggaatgaaaaatgaagcaacaaatgacaccacccaggctggcagccctcgttcccggccagaccccgctcctcaggcccggctctggcgccgggtggcgtccagcccctgcacgcgcggcgcggcccgcgggaaagtttgtgcagcgagagtgactgtccttccgcctcgcgcgcgctgcccccttctgccccggaggggcgttgggttcccttcggttttcctttccaattctaaaataaataaataaactccgggccctggggaaatctgaatagtaattccagtcatccaaattctatgagagggtctgaggaaaaaaagacaagcctatcacgggcgccctccgatcacgaagggcacgggcatgagaaggcgacagaggaggtcctcggctcgccctgggcgcggagcgaggactctggtcagaggtaattatgtcaccgcgttttctcgccgtgacagccgaataaacacgatctccaataaacatctctaatgagggaggaggcccgaggatggctgggtttgatttatgactggaggagaaggtccacttcccactgcgaagcaggcgacctgctcgccgcccagctccagggagaggaacccgcggaggagaggatcccggcccaggtaaggcgtgcggccggactgccactgcgctcgtcccccgtttccaggtgaggtgagcagggggcgccaccgctcggagtcgggcggaggtcccaacacctgtcacaggtgactgagctccgaaggtgctcccagaagacctagaaagggggcgcaggagcgcgagtgggagtgggggttgggggctagccggggcctggcccagaggccgccccaaactcccgggcggggttcttgggtgccccgcctaagccggcctgggcgtctccagctgcttttagggccgggctcccaggactttcgcccggctgaaccacaagttagtctaagtttgggtcgtcccttccctgactcactaaggggacacttccgggccccggctctggccctccaagggccgcagggtggtgggcgcttctctttcccgggcttggcggcccggctcccatggcgcccgcgcgcttcccgccgaggcagccagcgcagcgcccgcagtaaccggagcccgcgttctagctcagtgagaatcgctaattattaggtcttccgaagtgaagctcaaatcacacgctgggagctttacgcgctgcccagctctgtcggccgcattctttcgtactccgcgtctttctgagaaacgaaccccatctctagactttgttgcggtccagccatctgcactttgcaaccgcgggaaacttctgctgcacctcgcccgacccgcggcagggtgtctttaagcgctccaggcgcgggtacggactttcccaagcgtggatgtcgtgaactgcgatgcagaggaggtctggatgcaaagtgcgtccccacctcctgcatttttcgcggtcgcgagtggctttagcagacagcagcagcagactcccgccccctactcccagctcagggccggactggaagtccactcttaggagtggaacattttgctacttttgcagaagagcacactcggcaaagacaagtccctcctccaccccccttcctatccctccctcagtaactcgcttccatctttgtatgcctccttttaaaagcaaaaatcaagccccggggccacttggggcgggctttgatttggggacagcagtcgctggcagcggagaggccccgcgggccccgagccgggccggggccggagcccgggcggttacctgggagcggagggcggggaggcaggtgagcctggcagcgccggttcccacacttctcaccgccgctcggcaggggaagtggcagatctgacagccgcgttctacgcgaggacctgccccagagtttaaatgtcaatgataagaaaagagggtgctcaggcaggcgctaactttccttaatatccacgccagcgccgtcctcattggctgcccggcccgcgtgacgtcatggcggctagagttgggcacagctctgcgccgactagttttccggccgggcgggagcctgct

SEQ ID NO: 48317 - DNA, 51 bp, Homo sapiens
  chr11:31840878-31840929
  hyper
gacttgattttttgtcttgctcagcccgtcgaggactggagggcagagtag

SEQ ID NO: 48318 - DNA, 314 bp, Homo sapiens; identical to SEQ ID NO: 8025
  chr11:31841774-31842088
  hyper

SEQ ID NO: 48319 - DNA, 109 bp, Homo sapiens
  chr11:31842174-31842283
  hyper
cgcccagtctgcgtaggctcccaggccagccccggccccagagcttccccatcagccagcagaggctgggtggagagcctggatgggcgtgagaggccttgaagtaggg

SEQ ID NO: 48320 - DNA, 30 bp, Homo sapiens
  chr11:31845627-31845657
  hyper
gcattccccagcgaccgcagccattaacat

SEQ ID NO: 48321 - DNA, 653 bp, Homo sapiens
  chr11:31846200-31846853
  hyper
gggttgttcaggccccgggcctgcacagctatgagaagtggggtgcagggtgctatttgcccagcaaaagctcatttcctcccaaatgagtataatgaaaacccgagaggcgatattagtgtaaagatcgggattagtccaaataggagccgcggacttgggcttcaaaggcgacccctactctttttgcccagtctgggggcggagggcgctcgaagggatacttcaaggacaccacatccaacttgtcgcagccccacgttcaggcacaggagggagcgaacattgggcagagggtaatttcaacaaaggacggcaggctccggggatcccggcttttccctgagttctctgggttggaaggagagggtccgggctctgtcggaggagtgggtacagcccagcacatgcttttctgacgcgcagcgctggcctggggagtgggtgcagctgctgcagccagcccccaccccgccccaggctgggaaggacgcagagtataatacgacggcccccttccccaaggggacactagatccagagctccaggcatatttgttgttcaaagttaattatacctgaaagcaaccaaaatgcgcacgccaggcccacggaggccgattgccgaccagcgtagccggcccgcagcgcca

SEQ ID NO: 48322 - DNA, 40 bp, Homo sapiens; identical to SEQ ID NO: 8028
  chr11:31847672-31847712
  hyper

SEQ ID NO: 48323 - DNA, 103 bp, Homo sapiens; identical to SEQ ID NO: 8029
  chr11:31847769-31847872
  hyper

SEQ ID NO: 48324 - DNA, 83 bp, Homo sapiens; identical to SEQ ID NO: 8030
  chr11:31847895-31847978
  hyper

SEQ ID NO: 48325 - DNA, 136 bp, Homo sapiens
  chr11:31848466-31848602
  hyper
aaggggcttttctgtctagaacgcaggcggcgggagttgcaccgccacagcccgggagaccaaagagtctccactccccgctcccggcgcctcctcgccgaccggagccccgagcccagtgagcccagccggtccc

SEQ ID NO: 48326 - DNA, 555 bp, Homo sapiens
  chr11:31848722-31849277
  hyper
cggacccggagcttgggaggcgaccgccaggctggtgcccggcctgacccggcgttcgcggccgcccgctcgcccgccgcgggccgggagcgtacaggagtgtgacgcagattgtgaaaacagaagggagggagttgggtcatttccttcgctaatcatcgccccctcctgctcctcctccccacccccatcccatcctcgccgccacccagcctcgaactctcttccttgccagagtctgcctcactttgagccagtggctgcactttatggagaaaatatatgtgcccatcactcacccatctatttgcagcgtccatggagcgcctcggggaacacgcatggacaattaaacacacccacttacggcgggatgatgaggctttctgttaaccacatgtgttcagaaatggatacagccctaattttgacacggaatgcagctaatgcaccttgctatagatgtacgtccgttggaaaagtgtgtgatgggcacctgatctacaccaagagaacagggctgtctgcagaagacccagcggcctgacacctttt

SEQ ID NO: 48327 - DNA, 126 bp, Homo sapiens
  chr11:32009000-32009126
  hyper
cgacgccatctgctctgcgaagcagaaacggcggcagctgcgcgcccagtccctccgcccgcgccccgcgcgccgagtccggatccgccgcccggcggcaccgcggacagcgccagccccggggtg

SEQ ID NO: 48328 - DNA, 16 bp, Homo sapiens
  chr11:32354943-32354959
  hyper
aaagctcccccttccg

SEQ ID NO: 48329 - DNA, 165 bp, Homo sapiens; identical to SEQ ID NO: 8033
  chr11:32354999-32355164
  hyper

SEQ ID NO: 48330 - DNA, 30 bp, Homo sapiens
  chr11:32448754-32448784
  hyper
atcgcagacgcgggcggccggccaagttca

SEQ ID NO: 48331 - DNA, 459 bp, Homo sapiens
  chr11:32455986-32456445
  hyper
ccccagacgccctcccggctcttgcgaacagtcaggctcctagctctgcctggctttggaggatgtcgggggccagtgcctgcgtgcactcccactctccggcctcctccccagccgccgcttccgctatcctcacggcccttgggaagcagctgggtaagagctgcggtcaaaaggggtaggagaggggggtgtcctagagcggagagtccctggcgccactgccccgcgcgtagggggcgctccccggcctacttaccctgattgcgaatagcgggctggctctcgaggcagctgggcaggtagggcgcgttaggaaacatcctggcctggccggatgacgcctggctgggcggaggaggaccgaagggcccgtagcgacaggctccggctgtgccagtgaactggccggaaaagtggacagtgaaggcgctcaggcactgctcctcgtgcggctcc

SEQ ID NO: 48332 - DNA, 440 bp, Homo sapiens; identical to SEQ ID NO: 8035
  chr11:32456758-32457198
  hyper

SEQ ID NO: 48333 - DNA, 182 bp, Homo sapiens
  chr11:32457219-32457401
  hyper
cgccctcgcagctggggtgagggcgggtccgagggagcgtccctctcggagacaccctcctcttcaacccaacacgcgctctcagctggccggtgtggcacaaccctccccccacctccccttcttggccttcgccagtgtgggagcctcgtctcactggagagtccgttcaggtaagcagt

SEQ ID NO: 48334 - DNA, 242 bp, Homo sapiens
  chr11:32457712-32457954
  hyper
agttataagccgggcgtatttcgatcggctagtagttgtttacttggtgaggtttgcgccaggcggaaggcggttgccgcctacctaaaattggagtcagcagcacttagtttccctttccagtgaggaatatctaattcttctacggttaagccgggaaaacagcggctagtttaggagggaagaaaacccttgggcaaacgcccaaagcctgcgtatattccggccggagcatcctggcg

SEQ ID NO: 48335 - DNA, 397 bp, Homo sapiens
  chr11:32458433-32458830
  hyper
tgggacggccaggcgcgacgggagggaagcaaccggttgcagtccggcctcctgtacctggctggcccgggctggggctgcaagctttccagccaaacttatgtgaagcaaagtagttgcagtttgacaaagaatggcgtttcaataaatgacatagtaattttttacgctttggtttttagcttgcattgcataaacgttgtcgccattaaattctggctgcggacccgaagtgtgtgcgggcccaggacttactcgaagggcgcacttcttgggaatgcgcatcccgtaggcgcaggagaccctgagggtaaagatgcggcacttgagccctccgcttgcctcccaggccacctttgctgcttgactttgcgtcgtctccactcagaagctttta

SEQ ID NO: 48336 - DNA, 37 bp, Homo sapiens
  chr11:32459413-32459450
  hyper
gaagagcaccggtgcgaaccccggggtgccccctcgc

SEQ ID NO: 48337 - DNA, 198 bp, Homo sapiens
  chr11:32459576-32459774
  hyper
cgaccccaacggatccacatgcccggaagcccaggcgacactaagccagcgctggggaactgacgtactcctgcagtcgcagggcgctccatgcctctctgtcctcttctttgttgtgggtaacgttctctgcgggagacctgaggttttccaagggggacatgccagctacactggccttggcgccctgagctaagc

SEQ ID NO: 48338 - DNA, 2 bp, Homo sapiens
  chr11:32605264-32605266
  hyper
tt

SEQ ID NO: 48339 - DNA, 30 bp, Homo sapiens
  chr11:32605778-32605808
  hyper
aatgcagccacattcggagtgggaggtggt

SEQ ID NO: 48340 - DNA, 94 bp, Homo sapiens; identical to SEQ ID NO: 8041
  chr11:32851552-32851646
  hyper

SEQ ID NO: 48341 - DNA, 30 bp, Homo sapiens; identical to SEQ ID NO: 8042
  chr11:32851935-32851965
  hyper

SEQ ID NO: 48342 - DNA, 804 bp, Homo sapiens; identical to SEQ ID NO: 8043
  chr11:32915114-32915918
  hyper

SEQ ID NO: 48343 - DNA, 175 bp, Homo sapiens
  chr11:33037382-33037557
  hyper
accggcagcgggggcggggcctgcagggagccacgccccgcacagttaacagacgggcgctcagggagctagggagctgtgaagctgctggaggagttggcgtccggggagcaagggccatggccaccgtgcaggagaaggctgctgcgctgaacctctcggctctccacagccc

SEQ ID NO: 48344 - DNA, 154 bp, Homo sapiens
  chr11:33037777-33037931
  hyper
caagcggcagagcccgcccgcacagcccagcttttttctttctacccagactctcaacttgaccgcgcgttggtctgtgcgcccgctaacgtgccaggcacgcgccggggagctccgggatatgctccgcggtgctaccggtgacaagtgtggt

SEQ ID NO: 48345 - DNA, 30 bp, Homo sapiens
  chr11:33060992-33061022
  hyper
gcgccgcccagctgcgagtcaccgcttact

SEQ ID NO: 48346 - DNA, 135 bp, Homo sapiens
  chr11:33183093-33183228
  hyper
ggcggggctaatttcgcgactctggttattccgagcgtgcagaaagcagcgagatcccggggcgggcccaattcctgggctgacgtcactaccctggcttggagaggctgttgctgagccggctccaaccggctg

SEQ ID NO: 48347 - DNA, 464 bp, Homo sapiens
  chr11:33397372-33397836
  hyper
ctgccgcttgggcacgttgaccatgacccccctccccggccagacgacctctctcccgccaaccttcccttctctagatgggggacaggaggggagggaagccctccccttaaggacctccgctgcgcgggagccgccgggaggggtccccctcctgggtctcgagcccggccgggcgcgcgggagcggggagcgcgcggtggctccgcgcggggctgcgcgcgcgcgccggcctcgcctcctcgcctcctcgcccgttccggaggctacgtgctttctttgtcaatgaggcgccgctctgagctgcggtagcactcgcggcccgggaacccgagccggagccggggctggaacccgaagcccagcgaggagcgaggagcgaggagccaggacagcggggcgccgaggctgcagcggcggcgggagggagggacccgagcgcgccccgcggccgccacccccgt

SEQ ID NO: 48348 - DNA, 223 bp, Homo sapiens
  chr11:33398158-33398381
  hyper
gcagagcgaggcagcggcctggatgtgtgaagcgtccccatggctccgcaggaggccaagcctcagggctcaagggaagctgggcccgcgacgcgggggcgcgggggccggcccgtggcgcgtgggcttggtcgggctgcctggggagccgcgcgctgcacgggtgtgaggggccccggggccggcgcgtcccacgatgcgcccccgcggccaccgacgctgc

SEQ ID NO: 48349 - DNA, 30 bp, Homo sapiens
  chr11:33758142-33758172
  hyper
ggttctgagaaggccgggtggccaggaccc

SEQ ID NO: 48350 - DNA, 30 bp, Homo sapiens
  chr11:33888571-33888601
  hyper
gcacattggatgtcccgatgttgatgctgc

SEQ ID NO: 48351 - DNA, 827 bp, Homo sapiens
  chr11:33890236-33891063
  hyper
tggtgcattaactttcgaggttcacatgtccccatcggtggaccccgaggaggggtacacctactcagatttactccggatttcgctgctctagaaatccctggaggcccagagccagctccgaggtggacggtcggacccctcacccgcccgttatccgcaaggctggcagcggctccacctgcggaccgggaaggcggccgttggggaccccggaggccgccacttggaatgttcccctttccaagaccaaatggacaaagagaaaggaccgagaaggagagggaagaagggagcagagtcaagcccagaacgctctccggactgcacctgcgcgcctccaggctctcctcgtgcctgctcccgtgcaaactttctggcccgtggtggctttggggagcgtcccagtagcctggagtggcccgcagaggcgccgggccgacccctgtccctgccgcccgccgcccagtccctctcccagagcccccggaatcacccgggaggaaggaggagcccagcgctcggcacagggggccaagggcacgccgcgagcgcgcacctggagccccctcgcgggccgcccgggtccccccgacgctccgggacgcgaggccgtggacaccgggggtggcaggggcaggggggccgcacttactctgaagggtccaggctcttcctttcgatggccgaggacattggggagggaggcggggtgccgggcggcgggggcgctccctttgtggcgcggggctggccggctgccggggctcggaccccctcgggtgctcgggcgccgccgccgccgccgccgtcgccgccgctcctgc

SEQ ID NO: 48352 - DNA, 30 bp, Homo sapiens
  chr11:33891718-33891748
  hyper
ggagagccgctcagcgaacacctctccttg

SEQ ID NO: 48353 - DNA, 40 bp, Homo sapiens; identical to SEQ ID NO: 8047
  chr11:33892221-33892261
  hyper

SEQ ID NO: 48354 - DNA, 30 bp, Homo sapiens; identical to SEQ ID NO: 8048
  chr11:34073472-34073502
  hyper

SEQ ID NO: 48355 - DNA, 30 bp, Homo sapiens
  chr11:34378278-34378308
  hyper
atagggctgcaagacgccccagagctcggc

SEQ ID NO: 48356 - DNA, 30 bp, Homo sapiens
  chr11:34378790-34378820
  hyper
cgccagcgcctttgcggagcacccgggcca

SEQ ID NO: 48357 - DNA, 30 bp, Homo sapiens
  chr11:34380824-34380854
  hyper
ttctgaccttgggccgtgagttggatatga

SEQ ID NO: 48358 - DNA, 748 bp, Homo sapiens
  chr11:35160354-35161102
  hyper
acccaatggtgcaaggttttacggttcggtcatcctctgtcctgacgccgcggggccagcgggagaagaaagccagtgcgtctctgggcgcaggggccagtggggctcggaggcacaggcaccccgcgacactccaggttccccgacccacgtccctggcagccccgattatttacagcctcagcagagcacggggcgggggcagaggggcccgcccgggagggctgctacttcttaaaacctctgcgggctgcttagtcacagccccccttgcttgggtgtgtccttcgctcgctccctccctccgtcttaggtcactgttttcaacctcgaataaaaactgcagccaacttccgaggcagcctcattgcccagcggaccccagcctctgccaggttcggtccgccatcctcgtcccgtcctccgccggcccctgccccgcgcccagggatcctccagctcctttcgcccgcgccctccgttcgctccggacaccatggacaagttttggtggcacgcagcctggggactctgcctcgtgccgctgagcctggcgcagatcggtgagtgcccgccgcagcctgggcagcaagatgggtgcggggtgctcagcgcggacccggcggcagcccctccggctgagtcggccctgggggactggagtcaagtgagctgtctgcgaagtgcattgggctccggaaagcagggctgggatttgcgctaaaccgttggagaatgtgtctgtgga

SEQ ID NO: 48359 - DNA, 30 bp, Homo sapiens; identical to SEQ ID NO: 8050
  chr11:35161330-35161360
  hyper

SEQ ID NO: 48360 - DNA, 14 bp, Homo sapiens
  chr11:35440083-35440097
  hyper
tcattccttccgag

SEQ ID NO: 48361 - DNA, 237 bp, Homo sapiens
  chr11:35440137-35440374
  hyper
cgctccaggcgctgctaccccggtgtctgctcacactatgcccaatcccctattgttttgaaatcccaaaagtaacctcaagaggatttcttcctcacactctcaggcccccagcgcaccttaccctttttatcaaaataaaacaaccctccacctctcgcattttcaaaggattaagcagcaatctccaggaaagaaaatcaatcccctccccaccatcccatccccagccaagct

SEQ ID NO: 48362 - DNA, 415 bp, Homo sapiens; identical to SEQ ID NO: 8052
  chr11:35440469-35440884
  hyper

SEQ ID NO: 48363 - DNA, 345 bp, Homo sapiens; identical to SEQ ID NO: 8053
  chr11:35440936-35441281
  hyper

SEQ ID NO: 48364 - DNA, 65 bp, Homo sapiens; identical to SEQ ID NO: 8054
  chr11:35441543-35441608
  hyper

SEQ ID NO: 48365 - DNA, 555 bp, Homo sapiens; identical to SEQ ID NO: 8055
  chr11:35547020-35547575
  hyper

SEQ ID NO: 48366 - DNA, 557 bp, Homo sapiens; identical to SEQ ID NO: 8056
  chr11:35639631-35640188
  hyper

SEQ ID NO: 48367 - DNA, 760 bp, Homo sapiens; identical to SEQ ID NO: 8057
  chr11:35640493-35641253
  hyper

SEQ ID NO: 48368 - DNA, 311 bp, Homo sapiens
  chr11:35641291-35641602
  hyper
cggaccgcgcggcgcgtcctggagctgcaccgcggacaggacgccgcggcccggctgctgcgcctctaccggcgccacgagcctcgcttccccgagctggccgcccttgcagacccccacgctcagctgctacagcgccgcctcgacttcctcgccaagcacattttgcactgtaaggccaagtacggccgccggtctgggacttagtgtcaccgggaggaaaagagagagatctggggctggggtatggatgatggggggaagggcggtcgcctctgccactgtcagggaccagccggccaacgcccacc

SEQ ID NO: 48369 - DNA, 187 bp, Homo sapiens
  chr11:35966092-35966279
  hyper
gacgcctggtcgcgcgcggctgcgttagcctcctctgggcctcttcccgagtctctggcgtgcactccgtgcctcagtttccccacctgcaccgcggagggagtagcaaagctgcttcctttcattcctctctgggactgtttggtttgggtaaagtgagttgaagcaaggccggatctgggaattc

SEQ ID NO: 48370 - DNA, 30 bp, Homo sapiens; identical to SEQ ID NO: 8060
  chr11:36397581-36397611
  hyper

SEQ ID NO: 48371 - DNA, 1506 bp, Homo sapiens
  chr11:36397977-36399483
  hyper
gctccgcggccgaagcgtttgttgactcgcgctggagaggaaccgaggctggacgggaccccatctgagggcagagctgggggaggagggagggacggagggagggagagctgggcagagcgcgacggggagaaccatccaggtcgctcatttctctccggtgagaaaacttcctcgggaagaccggaaactttttcctaggcgcgcggagtctggggcggaggcgagcggcgggtgtgcgcgactcggggtgattcacgccggggaccccaaggaggtgagtggtgggtggggggcgtctctgggaggggccggagtcataggctcagcaaccgcgcaggattgagcgaaaattaccgcgcgctaatctgacggggcgcggcgtggcgggggtaggagctagggaaaagtgtcacgtttgggggggcaaccaggtgggaactcctgcatggttaaggatcctccgatcggacgctgcaggcaggcgtaggggatcttactcgagaccaccatggtggggaggtgggcaggccacgctcccggtctgctctttagggtggttgaagtaccgccgtgaggtgggatgcggatgctggtgatcatgggacctaggctgagccgggaggtcgaaaaagaaagtcggcttgtttgactctctcgttctccctctggggggcaaatctaaagagctgaccccgcttaagcacgggagatttcgcgcctgcagcagccttttcccggcggtccccctttttctggagggaggcgtgggagagaagggcagggcagggagccactttgtcccgtgcgctgctgcacgcgcgcgctctgcggactagggtgggccagggcccagccagtggggatcccgccgggacgggctgtgagcaagccctgggacggcccggctgcggaccccgcgctgggagtccgcagtatcccccttccgttttatttctcccgcctgccttcctttcggcgaggctttcctctgcgcgcttactgtgcgcgcatgccgggctcgctgcacgcagggggcgctctaggggccccgcccgggcagctgggaccctgcctgcccaaccctccggcccattttccttgaggccgccgcccggggtgggaccaggctgtgtgcttgctaactgtgcttcaggaatccgctctgggatgccttcctgtctggcaaaaggggttacccccagttctacccagtccctgtcctcggtcacatgctgccgccgcctcttcccccgcggtgccgggagcccgcgttttgtttgtcagcagttaggcggtgagtatttatagacgccacggcagtcctgcggtgcgcaaggtttcaattactgcgatgcgccccacaagacgaaaggttcacgcgctgcgtctgagctgcacgtctgccccggagacccgcgtggaaaaagctctgggctggaatctccgggcttccctgcttgggcagaattctggacctgttgcccagacgacacgtgcacattc

SEQ ID NO: 48372 - DNA, 347 bp, Homo sapiens
  chr11:36616033-36616380
  hyper
atttcccaagaatccgttctctctgggatgtgtagctttggaaatctgtctttgttgctctgggagaggggactcctggaatgtgtctgtgaataaagactagccgaaggtgcgaagtgactagacgggagcaaaggaggaaaactagggaatgggaggtgagagtggctgacaccgacccaacgtccgggttgccggaaggctgcagcgcccggagcggtgtcgggcaaaccgctaccctggtattgctggagcctctcctggggacttttgaacaggtgacccgataggaagcacaactgcttctgttggagtgcggttacctggagaccgcagtctgaagggac

SEQ ID NO: 48373 - DNA, 183 bp, Homo sapiens; identical to SEQ ID NO: 8063
  chr11:40314603-40314786
  hyper

SEQ ID NO: 48374 - DNA, 215 bp, Homo sapiens
  chr11:43333312-43333527
  hyper
tgtattcacttccccgcccacccacaccccttccatggagagcctgcagccaagctcaagctttcaaaaaggcgtgagctaattcaatcatccttgccgcttttttgctcctccaggctgtagagggcgacaaaaaccgcggaggcgcattggggtggggggtgtctactgaaggccgctcccgacgtgcgcgtctttacgtagacgtcgggggc

SEQ ID NO: 48375 - DNA, 67 bp, Homo sapiens
  chr11:43569007-43569074
  hyper
taagtgggttgcctggcaacccggcagacccgcgggtggacaagctcaaggggcagccaggtgccac

SEQ ID NO: 48376 - DNA, 162 bp, Homo sapiens
  chr11:43569128-43569290
  hyper
cgagcgcagccggagcagtcgagcgggcaggacaccgtcagtgccgggagaacacgcgcgcgtgggtggatggcgggagggtcctcacagccagccgcaccacccccctcccccccacatcccgcaacctggcttctcctcgctctaaatctaggggaacaa

SEQ ID NO: 48377 - DNA, 30 bp, Homo sapiens
  chr11:43596514-43596544
  hyper
gcagaggggaaagccgcagtagcaagccgg

SEQ ID NO: 48378 - DNA, 663 bp, Homo sapiens
  chr11:43596844-43597507
  hyper
aagagagcaggagggagagagcgggagccttagaatctgttatttgcgtcactcgaggagccggggctatctgcccgacaaacacacagaattaatccgagttacagccatagctgtctatgctacagtgaccagatgagaaagggcggggaaaggacgcgcgcgggagcgtgtgcacggccgagtttgcattgggcgtcttgggagagtttggggagggggctgtcctgctgggcacgcccctcggggccccgcttgcccggtgcagactaggctgcagcctgctctgcagctgcccagcccaagcctggggtggcgcccgcctcggccgcctcgcctgctcagtggctgcgtggaacacaaagcgctgtctccgagcagaagcgtcttctcagctgaaccagacccaccaaagaggagaatctgcacgtgacgtcagtagctgatgactgacgcaggctggcaaaggagactcaaggcggctgctccgcgctgccttcatgagtctattttctccagccccctcgtagtgaattactagaacgcaaaacacacacacagacacacatatgcagctttcaaaatatacatttccaaaggcggtgtgttgcaaacacaacgcgattttgcagagcgtgggtgggaaacgtgggaagggtatgg

SEQ ID NO: 48379 - DNA, 1464 bp, Homo sapiens
  chr11:43600010-43601474
  hyper
aatagtaacaagggcttttaccgatgtgcagaataacacaaataacgctgcaacccacactttgtcttgacaattcagttcaaaccaaagctgctcacagcctctcggcccaccccgcggcctcctcgtcattcactgggacctactggttccctttcccaagcctcgcccctctcagccctgcaagttgcgtggttgtgtttacaaattctgccacaattgcaaaggaaataggggtggggggagcggtcggggcgggagtggtggtagcgccaataaagcacttgcaacacgtggagcggtggttggggggaggtgtccaagagtcaagaagggggcggagggacaccccatggcctcatttccacctccccattcttccccaccccttctcattgcttggcacaatgcacaagtttaccccccgaactggatcctattaaataattcaatggtagcggtgtaattttggttggaaccagcacggattcccaagtcgtgactgcaaaaagtgagtaatgcgcgctggctgcgtcatggctctagtcacagttcattccgaactgagaaggaatcgtgacttcgcctggagacgtcccctacatgggagatggggggcgggggggcaccaaatcagtggggacgggggtgggggggaagacctatccaatgaaaaccgctgccaggggggcatttgaactccgtcgcttgctgtctcgctgtcccctctctgccccgcgcacctcgctccccctcccggccggcgctcgcagtggcgcgcctgctcgctctcccgctaagcgacgagtcttcaacaagttggaggaaggcaggaacgcaggggttaagctcggaaagccgcaattaccaagatcgtgaccctcccacacagtacagtaacttatatacttacctggaagaacccgctttgccgccgggcaaacacccgtggggggcggggaggggccggagggagcgggccggcaggagaggggctgcttccagctggctgcagtgcggacgggaccggcgcgctcccgtggcccccagaccgaggtaaggagcagggagtcggcgcccgggtcggctggtggtcggtcggctcactggtagtcggtcggctcacgggtagtctgagcagaacttttttttcccagttgccccgcgccgcggcggcggcgggcgcagaccgcggagcccctctggcgcggcgggcgcgcagacgctcggagggtgtgtgcttgcgtctgtcagtcccggagccgaggggatgccgtgggagggtgagtgggtcgcggagctgcaggagggtgatggatgggcgaagggggtgggtcgacagggacttgaagacagtgcctccaccgtcgagagacgttttctccgggcgtgctgggcgagggtgggagtgtgtgtgcgcgcgcgcgcgcccgcccgcacgtcgattccagggtgccaaagaac

SEQ ID NO: 48380 - DNA, 610 bp, Homo sapiens; identical to SEQ ID NO: 8067
  chr11:43602426-43603036
  hyper

SEQ ID NO: 48381 - DNA, 159 bp, Homo sapiens; identical to SEQ ID NO: 8068
  chr11:43603076-43603235
  hyper

SEQ ID NO: 48382 - DNA, 305 bp, Homo sapiens
  chr11:43603523-43603828
  hyper
ttagtatcttatgtcctggtgcgggggacccggaggtgaggcgagccgcggtgaattgggtagatccgaaaaagagggaaaacacccaggcaccgcccgatccccggagtctcttcctcccgcgcctgcttccaacctaatttggggcgttttgcagcctcgggtctcccacatctcctctttttcaaaactaagtagcacggaagggggtaaaacaggcgagaactggggaagcccccgcagagaaggagctttggagagatgcggttgtgcccgactcagacgcttagcaggaacagaagcag

SEQ ID NO: 48383 - DNA, 51 bp, Homo sapiens
  chr11:43604828-43604879
  hyper
gctccagggcccaaggagcaacggccgaacccggcgtcgtgcggcaccgga

SEQ ID NO: 48384 - DNA, 2177 bp, Homo sapiens
  chr11:43963891-43966068
  hyper
cccgcccagtcgcggcgattgagggtccctgtccgggcgcagctcgggccagccgcgtgctccggggccgcggcttctcccggaacccccgcgggcggggcctgccttccggagccggttggcggggggcgggcggcgccggggaaggggccgttactttcccagagcggcggggcgacgtcaggcggaagggcgcggggcgcgcacgctttaaatggcattcgctgtcatccgagctcagagccgtgtgggcagccgcgggctatataagccgcgagcctggccgccgcggggcagacggcgacagcagcggcggcgagcgcctcggagcgcggcggaacagcgccccccgagccccgtgccccccgacgggtccgcccgcccgcccgccctcccgaggagcgccggcccgggcccgcgagggccgccgccaccccgcagcagatttggatcccccgcccggcgagcccccggctgctgcctcccggggggccccggcgcagcggccgccctcggagagccccggcgccccgccgcccggccccgcagacgccggaggcgccatggccgccaagcccggcgagctgatgggcatctgctccagttaccaggcggtgatgccgcacttcgtgtgcctggccgacgagttcccgcagcccgtgcggcccgccaagctgcccaagggccggggccggctgcggcggccgcgccagtctcgcttcaagacgcagccggtgaccttcgacgagatccaggaggtggaggaggagggggtgtcccccatggaggaggagaaggccaagaagtcgttcctgcagagcctggagtgcctgcgccgcagcacgcagagcctgtcgctgcagcgggagcagctcagcagctgcaaactgaggaacagcctggactccagcgactccgactcggccctgtaaggggcgccgcccgcgggggggacgcgcgcgtccgcggtccgcgcggggaccggcgtgtgaaccccgagagtgcccgcgccctgctcccgggggacccgcaaggacccgggaccgccgctcctcgcgcgctcggactcccgccccgctgcgaaccggtcggtgcgcccctcgccgcgctcgccctggcccgggagcgccgggagcggggccgctttcctcgtccttgtaaatgtttattttttaactcttcccagtgcgaactctgctgtgagtgtgtgcggggaggcgcgcccgcgctgagtcggcggcgggtagccactccatgcccttgtccgatggtttgcaactccgattttgcacaccgctccaccgtgccccccagcgcacacccattcacactcacgccaacactctcgctgaacacttttataattgttaggcgtggccgttgggactttgggcgcagcgcggctgctactgcgtctggaggattgatatttatttttgcattgcgatggctgaaggcatttatttaacgatctttttacctggatatgtctgtgaggctcctgaaaggagacaaataaagtcaatatatttgcacagtgcagttttccaggctcttgactttttgcaccttcggggtccaggctcccaagactcggggaggtgggggaggaggtggcagggggatgtcggaccagggagccgggagtggagctacctccacaagcttcggtcaccggaacgaggttgcgccaccggtgcgcgggtcggttgcctgcctccccaagtggatccacccccggtccagtgtgctcctgcgtccctggtctattccccatcgccggcatccgggctgaagtgaagccgcaggaggggcggaggcagagctgacgatggagagctctctcctccgtacagttcacttcccagagctggggtcagggtcctcgccccgcacccgccacagaagacgcatctccctctgcgctgattcctggcggcgggtggggagatgtcggagccagcaatgcgagatgtttgggcgttgggacccgagagtgggctggaggccagcctgggttggtcgagagtgtgggtgcgcgctcgctgtcgcgggcaggtgactccctgaccgcagttgacccagcgcagtgcctggcgctcctgcgctgcggggaaaaccgcggccgctatgtctccagccgttctctgcgctccgcagggttcctccaggagggt

SEQ ID NO: 48385 - DNA, 130 bp, Homo sapiens
  chr11:44087408-44087538
  hyper
ccctttgtgtgggccgcagccaagcatactttggcaagaaatttctgtggctctaacctcctttgaaaactggagaaccaaggccaggaggcagaaggaggtggcagacccggcccggcggcggcccagc

SEQ ID NO: 48386 - DNA, 129 bp, Homo sapiens; identical to SEQ ID NO: 8071
  chr11:44087989-44088118
  hyper

SEQ ID NO: 48387 - DNA, 30 bp, Homo sapiens
  chr11:44117228-44117258
  hyper
gacggcccggatcccggttaccggcccctc

SEQ ID NO: 48388 - DNA, 335 bp, Homo sapiens
  chr11:44327252-44327587
  hyper
actgggcccctaggcggcaccccaggggctccaacctggcccgcgcctccccagaccttggcgctgagagcgctgcttttgcgggtgggtggacggagaggtaacaatctgctttcaacaaaaacctgtcgccaccgaatcgaaagcgaaagggaagggagaagaggggcagcttcccgcagcggccccgcgtctcgggacaggtagactaggaccagtacgcgccggctgcagctccggcggtcggatccggagtttgggggcgaggcgccggagtccctgccctgagtacagggaggctctctgcgtcgctgagaaacgtcggatctccaacc

SEQ ID NO: 48389 - DNA, 562 bp, Homo sapiens; identical to SEQ ID NO: 8072
  chr11:44330877-44331439
  hyper

SEQ ID NO: 48390 - DNA, 299 bp, Homo sapiens; identical to SEQ ID NO: 8073
  chr11:44331482-44331781
  hyper

SEQ ID NO: 48391 - DNA, 381 bp, Homo sapiens
  chr11:44332525-44332906
  hyper
ctctgctgtaagggcgctgggctgggatgtagcggaatctgtgctccctcaagccctggagaagccctgggctgggcccggcttcagaagctttagagcgctgccctctgcgctcccgtctagaggccgcaccgttcacgccccacgtctgcgcccaggcgaggggatttcctgccaggcgaagtacagagagcggactctggagaccccctgaccttgcccgatagtcgcgctgtcacctgttcactccttggggtcaggggtcggggagaggggtgagaccgtctcttccctttctggcctcactgcccccgactgtaaaacgaactgcttggttttgataggttgtggtttcaccaccactgcgagcctcaaggcccc

SEQ ID NO: 48392 - DNA, 17 bp, Homo sapiens
  chr11:44337611-44337628
  hyper
aacactacgggggaccg

SEQ ID NO: 48393 - DNA, 135 bp, Homo sapiens
  chr11:44337726-44337861
  hyper
cgcgcgggtcctcggcgcgctcgccagacccagccgaccgcgtgactcaccacgtcctccgccgggaggaggtcagcatcggccctgggcaccggtccccagccgccgcagcccctgccccaatctccccggaat

SEQ ID NO: 48394 - DNA, 175 bp, Homo sapiens
  chr11:44337882-44338057
  hyper
cgagcctccagtcggatagaggcagggagggaggcactgcccacgacgagtgctctccaggcgctgcaaagagcaggggtctcctaggggctttgagaccgcgggcggacctcgggggagcaggcgtgggacccgatctgtgccggctcagcagggccccagcagcgccccagcg

SEQ ID NO: 48395 - DNA, 711 bp, Homo sapiens
  chr11:44338086-44338797
  hyper
cgctgggacttgcaccccgagtttaggggcttagccatttccggaactcgggctagtggactctggggaatcaggcgctgggagaggccttcgcagctgcgtctctcctgcccagcatattgtgttgaatgaggcaagggagtgagggggtcgtaaaggaaacccgcactcaggggcacaccttcatttatctgggaacagcgcggatcccagaggtgcgggataaaccaggcgttccagctgctcacacgctgtttggtaccccgcgtctatgaagcacaaagcaggagcggattggaggttttacaaactgaccaaccccgccgcccgcgcccgctggagggagacgcacacctttgccctgcatattcgcttccaggctctgcatctctgctcttggggagccggccacccgcttttccgcgcgggggctggggttctcgcctgaaggcgaagtccgcgtgcgcgatggaacctggtgccccgccctctctggcaagggcaaggccaagagcgcagggcggggagaggagctccggggacccgcggaaaacctggctcgaaagccctggaggcgagctctccaccgtgttcggtggccaccttaattcttgttgaaccgagaggaagttgttgaaaccggaagtcggcctctggggtctgagcccgtccaccctttgcagatcggtaacagccgaggaaagcacagat

SEQ ID NO: 48396 - DNA, 30 bp, Homo sapiens
  chr11:44340824-44340854
  hyper
tcataggaggcagccggagcgcacattctg

SEQ ID NO: 48397 - DNA, 366 bp, Homo sapiens
  chr11:44341436-44341802
  hyper
agaccggagcgaaccgacttgcaaaaccacaagggcaactgatgggataaaaagagacacccaaagccatagcctcgtgtgccactcgggccactcccggagcaaagaggcgaggcccggaggaagcaagctccggaggtcgctagctccggaggtcgctgggaggtggcttcttcgttgaacttctagagcgccactgctccaccccccgccccccgccccgcgcatctcagccgacccgcgcaatgtgctctctcggtcctcactcaaggtcttggggcctgaaggaggctgggccgcgccccgaggaggagccgcccgctggaaacacccaggaaactactcgtcctcaggggttggctgtgg

SEQ ID NO: 48398 - DNA, 31 bp, Homo sapiens; identical to SEQ ID NO: 8075
  chr11:44587386-44587417
  hyper

SEQ ID NO: 48399 - DNA, 1208 bp, Homo sapiens
  chr11:44748160-44749368
  hyper
cctggaataaacacttcgggtccagcatgcccctctccccactcccgcaacgatcttccgaattcagacgcagagagggcccgcgagcagagcgggaggtggtcggaggcggaggaaggggagatgggcagagggtgggcccagggacccccagacaaggcctggacgcggggttggaggaggaggcggaggctggcgggaggcgaggggcagcccgcagaggagacgcgcttctcggcagcaacggcgtctggagccgggaggggcggaggtttggggagggggagggagggcgggggaggggagggacggacggcggcggaggtggggccggcgggctggcgggcgtgcagctgccgccggcgtcgcggggctccaggctgcggggcggacgtagcgccgagcgatccaccgcggagccgcgcgaggccgcccgagccccagccccggccccggccccagccccggccccggccccggccccggccccggccccggtcccggccccgagccccgagcgagcgccgccgcctcgcgctgcgggtccccggacgcgccgccaccgccgggaaggcagccggcgccgggcaagttgcgagcgcgcccctccgaccaggaaagtttccccccggccgccggcgggatttggcgcggggtccggcagccgccgctggaaggtatggggctccgcacctccgtgccctccgcacgccgccgccgcgcccccggggacctggggacccccccgcgcgccgccccgggggtgctgctggacgcggcggggaattggggtggagtagggatcccaggacggaagcccggcaaccaagttccactcaaactagcacgcgggggctggggggccggggacggtctccaccccgtgcctgcccggagtccgctgagggccgggggctgcgcccaggacaggtgcagagccggtgggctcccagtgctccgggtggaggagtgggggcttctggagaacggcgcggggtggcaggtgtggttacaaggttcggggtttcggccagggctgcgcccggaaaggggctgctcgccacgccacccggtaagacagtgagggaccagggactgggagcggcgatcggggccgggagggctgtggggcccggcagctgcatggagggcgggctgcctttggggtccctggcagcggggcggggcggggcggaggcgccactcgt

SEQ ID NO: 48400 - DNA, 567 bp, Homo sapiens
  chr11:45307445-45308012
  hyper
tctgctgtcccctccccgccaagctttgtcgcgcaaagatccacgaccgcctcccaccccagttccccctctgcagctgcccggcaaccccgccttgcccgggaagggcctgcgcgccgcccccgctcacctgttgtgcagacccgagcaagctgggcttcgccttctccaggtcggggtcctggtcccgcggcagcagccccttcttggggtgcatgtgccgacacaggcaggtgaccccgcacaacgcgaggatgctggtggctgtgcccagcgtggcgcccagcgcgatcacaggcaccgacagcaccatggtgcccgctcccggcgaggggctgggtcccgcagccgctcaccttccccgggccgggcccgcctccaggcagctcccgggatccgggcgagccagcagctctcccgccgccagaggggcggggacggagggagggaggacggctgcgaggacgtcagaggaggctggacccgcagccacgtcaaccggcaaccccctccccgccaacacgtgaccggacccccaccccaacaggagccggagccttccaggtg

SEQ ID NO: 48401 - DNA, 160 bp, Homo sapiens
  chr11:45376917-45377077
  hyper
acccagatgctgagcgctgaaattctcatccgccacacacaacatggcggcttcctggacccgcgcccaattttcgcttccgggatggaagctacgtcatttccccctctgttgccctagcgccccttggaagccaagaatatgaggaagtcttcttcct

SEQ ID NO: 48402 - DNA, 77 bp, Homo sapiens
  chr11:45377121-45377198
  hyper
cgctcgaaggctctgctggccgcggctagccggtgaggagggtggggggaggggccgtcccgcgtgtgggggagtct

SEQ ID NO: 48403 - DNA, 30 bp, Homo sapiens
  chr11:45392758-45392788
  hyper
acgttagcaacgaccgttctctctacgcca

SEQ ID NO: 48404 - DNA, 97 bp, Homo sapiens; identical to SEQ ID NO: 8079
  chr11:45684298-45684395
  hyper

SEQ ID NO: 48405 - DNA, 256 bp, Homo sapiens
  chr11:45686167-45686423
  hyper
gttgttccggctttccgtggtgggctctgcaccatccggcggctccggccccacaggggcccagctcatcgcagcggtctgggtgcggaggccgggccagggctgggagcaggaagcagggagcggcgcccccgcctccgggtgcagctgggtttggaaagttggtgcgggcgcggggacctcagggtctcaaggcgcctccgcagacccgagccaggcgggtcgtgggacggtgagcccggagcagcccctgagt

SEQ ID NO: 48406 - DNA, 638 bp, Homo sapiens
  chr11:45686449-45687087
  hyper
cgcctcgggggccaccgcgcgtctcaagtttgctgccctcctcgaatgggggcagggagggctgaggtgatcgcggcgctcaccggccaccagccccggcagccccttcctgcgcccaacacgccgccgttcctcgccgccgccacccctccgctcaccgccggtagctgctgtccccgagcggaggggcgtctcccaccgcgcccgcgcccctcccggctgctgcggcggagtgtccgctcccgcccgccccggagcccgcggggcccggccaatacctggtcggggacgcgccgggagcagctgcagcgcccagcgccggctccatcctcgggtctggagtcagggtcgccggggacccgcgggtggcggcggcggcagcagccgcggcggcatcctccgcctcccgcgccctcctcctcggcctccctcctccctcctcttcctccgactccgcgcgcgcctcacgggcccctcttcatggcccgggggcgcgagcccggggcggctcgagcagctgagtgcgttctctccggccggacgcgggacccggggccggggctcagggacccgagagatgccgggacaggggccgggacccggagcgccgcagccccgggcgccggaggagagcagca

SEQ ID NO: 48407 - DNA, 30 bp, Homo sapiens
  chr11:45687428-45687458
  hyper
cttacccccgagggcgctgctggccgggcc

SEQ ID NO: 48408 - DNA, 233 bp, Homo sapiens
  chr11:45825484-45825717
  hyper
cgaaccaagagaagtcgatcctcctggtctccccggctgcctggtgagtggcagaccacaggctagacttcccaggccccggccctggaaggggcggggaaccctccccctcactgccagctggaagaatccgagcggtccccgcacgcacttctggaagtgcaagccggtagcgcggcgggccagggatacagccaagtcccgggacgtgccagctgcggtaactgaagccg

SEQ ID NO: 48409 - DNA, 30 bp, Homo sapiens
  chr11:45826666-45826696
  hyper
gtgagtccagggcccgcctcccggggagtc

SEQ ID NO: 48410 - DNA, 217 bp, Homo sapiens; identical to SEQ ID NO: 8081
  chr11:45907276-45907493
  hyper

SEQ ID NO: 48411 - DNA, 30 bp, Homo sapiens
  chr11:45921542-45921572
  hyper
agcgccccagtctccggcggcccctgctcg

SEQ ID NO: 48412 - DNA, 30 bp, Homo sapiens
  chr11:45921944-45921974
  hyper
cgtaccggcccaagcggcccaccacgctca

SEQ ID NO: 48413 - DNA, 664 bp, Homo sapiens
  chr11:46259435-46260099
  hyper
ctcttgagagtggctctccaccgctgacagcaaacgagctggtccggacggaggacagagggggaagaaacggagggagtcgctgggggacggcgacgagtgggatccgggcgggtgggactgggcgcaaaggaccgcgccgacgccgcatggctgccgggaattcagctcccccggccaggttgagcgggccccggggcccggagcgggcgtcggcatctccggcctccccgcggggctgcaggcaggcggcgccccgagcgcaccccgcgcgagcaggcgcggaacagcggacccaggccgggccttcccgcagcttttctggccgcctcggagggcagggtcccagcgcggcccgaggcgcctcttgccagcggcccgacctcctgccctcccggccccctccaggctccccgcacgtgcaggcccggcgacgtcactgcggctctgacgcgctcttggaggcccgggcggaggcggcgcggcgcgggcttcctccgggaggtcccggtcccggcagcccgcggccgcgtccttggccctcctccgggggaacctcgttcattccaaactctggaaggccggctgtccttcggttactgataaggacgcgagctcttggtaaaagatttgaacaatgcccggaaagaaatagctggaccta

SEQ ID NO: 48414 - DNA, 63 bp, Homo sapiens; identical to SEQ ID NO: 8082
  chr11:46264957-46265020
  hyper

SEQ ID NO: 48415 - DNA, 30 bp, Homo sapiens
  chr11:46299153-46299183
  hyper
atgtgggggcgtggcgccttggccagctgg

SEQ ID NO: 48416 - DNA, 45 bp, Homo sapiens
  chr11:46299546-46299591
  hyper
ccccggacctgccccccgcccgtttgccagcgctcaggcaggagc

SEQ ID NO: 48417 - DNA, 20 bp, Homo sapiens
  chr11:46316812-46316832
  hyper
gagctggtaccattactgcc

SEQ ID NO: 48418 - DNA, 460 bp, Homo sapiens; identical to SEQ ID NO: 8085
  chr11:46316895-46317355
  hyper

SEQ ID NO: 48419 - DNA, 297 bp, Homo sapiens; identical to SEQ ID NO: 8086
  chr11:46317407-46317704
  hyper

SEQ ID NO: 48420 - DNA, 30 bp, Homo sapiens; identical to SEQ ID NO: 8087
  chr11:46330245-46330275
  hyper

SEQ ID NO: 48421 - DNA, 6 bp, Homo sapiens
  chr11:46354559-46354565
  hyper
cgcggc

SEQ ID NO: 48422 - DNA, 30 bp, Homo sapiens
  chr11:46354982-46355012
  hyper
ccccggtggaggagcgtttccgccagctgc

SEQ ID NO: 48423 - DNA, 30 bp, Homo sapiens
  chr11:46368795-46368825
  hyper
ccatccaggcgggccgggccgggctggggg

SEQ ID NO: 48424 - DNA, 30 bp, Homo sapiens
  chr11:46369644-46369674
  hyper
taccgtgggaggatcggctcccaaccctcc

SEQ ID NO: 48425 - DNA, 30 bp, Homo sapiens
  chr11:46402195-46402225
  hyper
ccttcctggggccccggctcccgtttggtg

SEQ ID NO: 48426 - DNA, 43 bp, Homo sapiens
  chr11:46402520-46402563
  hyper
tggaacttctcagacggctcctgtcagcgccaagtttcaccaa

SEQ ID NO: 48427 - DNA, 30 bp, Homo sapiens
  chr11:46403394-46403424
  hyper
tcctgggctcgaggcgtcccccggggagtc

SEQ ID NO: 48428 - DNA, 49 bp, Homo sapiens; identical to SEQ ID NO: 8088
  chr11:46413560-46413609
  hyper

SEQ ID NO: 48429 - DNA, 16 bp, Homo sapiens
  chr11:46414468-46414484
  hyper
cggggaaacaactcaa

SEQ ID NO: 48430 - DNA, 334 bp, Homo sapiens
  chr11:46564031-46564365
  hyper
cggtcatactccagaaagaagcgtctcaggtcacactgaagctcatggcgaatgctgcccgagttgttttggctggagccattccctccatctgactcagttgccaaccctgatgccggaaaacccctcccttctgtggctgaagtgtacacagatgcctgagagccaccttcctgctgtctcagcacagacagcaaactcaccgaagaggcactggttctgggcgggggcatggattccgcctcagagcgggagttcagactgagtactgtccgggtccactcagatcctgtcaacccaggagctatttctcggtgatacctagaagggtggc

SEQ ID NO: 48431 - DNA, 30 bp, Homo sapiens
  chr11:46638666-46638696
  hyper
cacccacctctccgcggctgccaggttacc

SEQ ID NO: 48432 - DNA, 30 bp, Homo sapiens; identical to SEQ ID NO: 8090
  chr11:46638954-46638984
  hyper

SEQ ID NO: 48433 - DNA, 30 bp, Homo sapiens
  chr11:46868047-46868077
  hyper
aatgtgtgtagacccgggcatccttggtcg

SEQ ID NO: 48434 - DNA, 186 bp, Homo sapiens
  chr11:46938420-46938606
  hyper
acattcctaccccagtagggccgctgtcccaacacgccaaagaggctacaaataaccttccaggagagagccggggaggggagagcgcagagcggagcggaacgtgggccggccaagctaccgctcttcggagagaaagagctcagtccgcgctagagaggacgcggaaaaaagcccctgaaaacc

SEQ ID NO: 48435 - DNA, 722 bp, Homo sapiens; identical to SEQ ID NO: 8091
  chr11:47208474-47209196
  hyper

SEQ ID NO: 48436 - DNA, 30 bp, Homo sapiens
  chr11:47236572-47236602
  hyper
gctacctgtggccccgcagttttgtagtcc

SEQ ID NO: 48437 - DNA, 52 bp, Homo sapiens; identical to SEQ ID NO: 8092
  chr11:47237125-47237177
  hyper

SEQ ID NO: 48438 - DNA, 247 bp, Homo sapiens
  chr11:47279141-47279388
  hyper
tcagtgtcgcaattccgggccgtgctgggacctttgctccacgaggtgcctatggaggggagggaacacgattctggaggctgctgggattggggtgggggttcctgggaggcagtccttttgcaagagctgctaagagcgctgggtaaggagaggaaggggagagacatggaacttggctggtctgcagggaaatgccactgttttggccgggagtagggggcgggagtggcgggagagggggtgg

SEQ ID NO: 48439 - DNA, 30 bp, Homo sapiens
  chr11:47291023-47291053
  hyper
ctagaacccagtgtcggtccccaggccctt

SEQ ID NO: 48440 - DNA, 30 bp, Homo sapiens; identical to SEQ ID NO: 8093
  chr11:47448241-47448271
  hyper

SEQ ID NO: 48441 - DNA, 30 bp, Homo sapiens; identical to SEQ ID NO: 8094
  chr11:47574975-47575005
  hyper

SEQ ID NO: 48442 - DNA, 30 bp, Homo sapiens; identical to SEQ ID NO: 8095
  chr11:47587657-47587687
  hyper

SEQ ID NO: 48443 - DNA, 37 bp, Homo sapiens; identical to SEQ ID NO: 8096
  chr11:47661386-47661423
  hyper

SEQ ID NO: 48444 - DNA, 30 bp, Homo sapiens
  chr11:47663991-47664021
  hyper
agcacctgactggccgcgtccgccatgatg

SEQ ID NO: 48445 - DNA, 30 bp, Homo sapiens
  chr11:47664235-47664265
  hyper
ttaagggacagaggcgcatgcgttctgccg

SEQ ID NO: 48446 - DNA, 30 bp, Homo sapiens
  chr11:47736780-47736810
  hyper
agcacggatggctgcggcagagaagctcca

SEQ ID NO: 48447 - DNA, 30 bp, Homo sapiens
  chr11:47789175-47789205
  hyper
gacttccccacttccgtcgggttccaccca

SEQ ID NO: 48448 - DNA, 30 bp, Homo sapiens
  chr11:47869790-47869820
  hyper
tcccgaaagtgcctcggcctttcgcgctca

SEQ ID NO: 48449 - DNA, 30 bp, Homo sapiens
  chr11:47870099-47870129
  hyper
gtggccggctggaacgcctccggagggcgg

SEQ ID NO: 48450 - DNA, 51 bp, Homo sapiens
  chr11:48002695-48002746
  hyper
cgacttgcggggaccccggccggcctcgcacgccggcgatcgatccctttt

SEQ ID NO: 48451 - DNA, 30 bp, Homo sapiens
  chr11:48003050-48003080
  hyper
ggccctgggcgaggcgcgggactccgggcc

SEQ ID NO: 48452 - DNA, 30 bp, Homo sapiens; identical to SEQ ID NO: 8097
  chr11:48294280-48294310
  hyper

SEQ ID NO: 48453 - DNA, 30 bp, Homo sapiens; identical to SEQ ID NO: 8098
  chr11:48561464-48561494
  hyper

SEQ ID NO: 48454 - DNA, 165 bp, Homo sapiens
  chr11:49229743-49229908
  hyper
gaccagcaacaggatcccactcggcagctgacccgcgagtcccagcaccgcggcaccacggggaagactccgaggtttgctccgcgaggcgcccccctaccgaagaggaagccgaggagaaagaagccacccgccagcaccagcgccccagcgcacagccagcgc

SEQ ID NO: 48455 - DNA, 140 bp, Homo sapiens
  chr11:57056830-57056970
  hyper
aagagaaaggcagctgtttcccgaaaacaaagggctgggtcaataaatctgccgcagcagccgtggatcagtgagggcaaaggctcccgcggggagcagccagccagtttctctgaaacgtctagaacagagccatccag

SEQ ID NO: 48456 - DNA, 30 bp, Homo sapiens
  chr11:57078961-57078991
  hyper
ggccctgctccctccggagcagctgcagct

SEQ ID NO: 48457 - DNA, 43 bp, Homo sapiens
  chr11:57092533-57092576
  hyper
attcgtcccaccgtcggcaaacaggcgcggcccagcactcaat

SEQ ID NO: 48458 - DNA, 30 bp, Homo sapiens
  chr11:57103616-57103646
  hyper
gtattggaatgatgcgtgcccgtttctctg

SEQ ID NO: 48459 - DNA, 457 bp, Homo sapiens
  chr11:57194275-57194732
  hyper
agggctagtttagtcacgacgcaggccattctactgccagaaatacccccaactcccatgaccctcgcctaggactcgcaaacctggtccccgccgcccttcctcgcatcaacttctaccaggaaagcctccgggggccgctccccgccagcctccgcaccccgctccagcctgcggcctgccctccccgcagaggagcccgaggggccaggccgcgctcggcgccccatggcgcccgaaaggggacccttcgccctacccgcctgctccgcgccggggctctccgcgccctttccgcacgggccaggttcgcattcgcgcctctcgcagcccctcccagtcccctgctcgcctccgccccctcctgcccgcccggaaggggctggggcagacctcccactctccatcacttccttcttcttttcccttgctcacagcctcccgcgccctttttacc

SEQ ID NO: 48460 - DNA, 541 bp, Homo sapiens; identical to SEQ ID NO: 8100
  chr11:57243624-57244165
  hyper

SEQ ID NO: 48461 - DNA, 30 bp, Homo sapiens
  chr11:57283197-57283227
  hyper
tatttacacgcgtccggagctgcgccccga

SEQ ID NO: 48462 - DNA, 80 bp, Homo sapiens
  chr11:57334770-57334850
  hyper
tttcaggcaggaaaagcgaaattgaaaccagttttgggggagccggctcatcttcaccacgcgaacggctcaagcagagg

SEQ ID NO: 48463 - DNA, 30 bp, Homo sapiens
  chr11:57335341-57335371
  hyper
ggcgggcctcggggcgcacggctttgctga

SEQ ID NO: 48464 - DNA, 54 bp, Homo sapiens
  chr11:57365686-57365740
  hyper
gtgggagctggctccgaggctggctggctccgcaggtccgctgacgtcgccgcc

SEQ ID NO: 48465 - DNA, 30 bp, Homo sapiens; identical to SEQ ID NO: 8102
  chr11:57405800-57405830
  hyper

SEQ ID NO: 48466 - DNA, 40 bp, Homo sapiens; identical to SEQ ID NO: 8103
  chr11:57417003-57417043
  hyper

SEQ ID NO: 48467 - DNA, 30 bp, Homo sapiens; identical to SEQ ID NO: 8104
  chr11:57424758-57424788
  hyper

SEQ ID NO: 48468 - DNA, 110 bp, Homo sapiens
  chr11:57425066-57425176
  hyper
cctcccacctttggcgtcacgttcaaaacaatcctttgactacaactcccagaaggccgagcggcttagcgagtgcacccgctctcggctgctccggcaaactacacatc

SEQ ID NO: 48469 - DNA, 30 bp, Homo sapiens
  chr11:57434671-57434701
  hyper
cttggcaggagcctcgccctacattggctc

SEQ ID NO: 48470 - DNA, 52 bp, Homo sapiens
  chr11:57434927-57434979
  hyper
gaagcaggaagcggcgatagtcgtcggtaattggctgcgctggaagcctgtc

SEQ ID NO: 48471 - DNA, 30 bp, Homo sapiens
  chr11:57479663-57479693
  hyper
cccggcgctgtctccgtgtctgccgttggt

SEQ ID NO: 48472 - DNA, 30 bp, Homo sapiens
  chr11:57480379-57480409
  hyper
ttccgagcctgtagcggacttagagactat

SEQ ID NO: 48473 - DNA, 30 bp, Homo sapiens; identical to SEQ ID NO: 8107
  chr11:58345690-58345720
  hyper

SEQ ID NO: 48474 - DNA, 30 bp, Homo sapiens
  chr11:58346184-58346214
  hyper
cagggaggcaggtgcgcgcgcagccagtct

SEQ ID NO: 48475 - DNA, 30 bp, Homo sapiens
  chr11:58347511-58347541
  hyper
cccccccgccttcgcgttagctcaagagcc

SEQ ID NO: 48476 - DNA, 166 bp, Homo sapiens
  chr11:58668330-58668496
  hyper
attaagggaatcttcgagtccaagaacggaagctaccattggccttaatcttcacctcccgcttttcttccctgcttcttttctcctccctattccagtaggttagttctctggcgccatcagctggcagcacgcgggaatataccaaacgcggaaacgcgccttc

SEQ ID NO: 48477 - DNA, 543 bp, Homo sapiens
  chr11:58672746-58673289
  hyper
tccctctagacctcacgcagacgcgggtgcagcctgctctgcgacttgcagtcagctggaagctgggcctctgcatcatcagggtggagctctctctgctgctgccgctggatcccgcctggatgcacgtcccgccaccgccgccgacccatcagcggcagaagggcagcaatggccacacaccgaagcaccttggcgggctattccccttgcagctctcctcagcgcgctgctcccactcgcaatcaaaaggcggaaaaagcgcgaaaccgccaggcatctcccatacccacccggctgccgcgcaacccctccttggcttccactgggagacaggggacgccgatgagcaggaagaagcagggcagtgactgcttagtttatcctggtacgcgggaactggctgtggaccgagtggttcgggggaggggatcgctgggaccgggatgggtcatctggacaaatagggagggtgggcgggtgggcgcgcagtcccctcggcctggccgtctgacccgcccgcgagcgcgtgcgcccaggcgt

SEQ ID NO: 48478 - DNA, 30 bp, Homo sapiens
  chr11:58910222-58910252
  hyper
ccgcttcctgcgcgcgcgagactcaagctg

SEQ ID NO: 48479 - DNA, 30 bp, Homo sapiens; identical to SEQ ID NO: 8110
  chr11:58911100-58911130
  hyper

SEQ ID NO: 48480 - DNA, 430 bp, Homo sapiens
  chr11:58912102-58912532
  hyper
tgctgtctgatataaacacagcgtcaagtactgcacgctgtagctacctgaggtttaggccggaagaggcacggctgatttaaaagtgaaagaaagtaaccaattggttcgcagacaaccttttcccaaaaggcgggcgattcaaacccctagccccacctgctccgtttcccgcccagctggagctctggagcctttgcttcctcaaatacgagcgggaactgcgttgagcgctggattccaggccgagtgctggcgaggcgcgcagtgagtgagcacacagggcgctggggtgctccgcggggcgcggtcacgggcgcggccgcggcgggctcgagtcccggctgggaggagaaggagctgggtgtcaggaagccggggactgacagcgccacccatctggggagccgggaggacacaggttttattt

SEQ ID NO: 48481 - DNA, 30 bp, Homo sapiens; identical to SEQ ID NO: 8111
  chr11:58939938-58939968
  hyper

SEQ ID NO: 48482 - DNA, 203 bp, Homo sapiens; identical to SEQ ID NO: 8112
  chr11:58940403-58940606
  hyper

SEQ ID NO: 48483 - DNA, 270 bp, Homo sapiens; identical to SEQ ID NO: 8113
  chr11:58940666-58940936
  hyper

SEQ ID NO: 48484 - DNA, 31 bp, Homo sapiens
  chr11:59323956-59323987
  hyper
caagtccctgttcgggcggatgctgttttag

SEQ ID NO: 48485 - DNA, 521 bp, Homo sapiens
  chr11:59333338-59333859
  hyper
ccggtccttgttacggtttaaaaagctggacaaagcccgtgcgccgaacgctttcgaggacttctttggccaagagggggcccgggctgtcaccattcccggcaagcccgcgaccaagcaggcagcggaggcggcgcaggccgagagctcccgcccctctgacagtgagagaagggtcgcagcgcccacggctgcctagaacccgaaagaagaggagcggggtgcggggacacagggttgctcaagaaagtgagctatgcgcagtgctccggaagagcttgtctcaaaccaggtcccaagtgagggcagaggcgtaacttcgtactgggcagtttaaaaggtaagacatatgtccccagtatcctccctcccaggggaaaatgacgataaggtttcccttaactgccccagcccgcgtgagaacccacagggtgttgaccctgttaactgcagaaagaccctgttaactgcagaaatcacatgtagtgatgactaacgcctaaaacggaagcgctgccgaa

SEQ ID NO: 48486 - DNA, 199 bp, Homo sapiens
  chr11:59383394-59383593
  hyper
gggtgggacgcgtccgccagacccacctttgattggttcagataaaggccaatcagacttttggggaagctcattggtgctttcctgaagtttccagcgctcagggaggacgggagaatgcggaatgcccggccaatctgatcgccgattggctgctgtttccgccattcatttcagtttatgcgcctgtcactgccac

SEQ ID NO: 48487 - DNA, 30 bp, Homo sapiens
  chr11:59383813-59383843
  hyper
attggctgtgaaagcggcattgctgaccag

SEQ ID NO: 48488 - DNA, 30 bp, Homo sapiens; identical to SEQ ID NO: 8115
  chr11:59521707-59521737
  hyper

SEQ ID NO: 48489 - DNA, 131 bp, Homo sapiens; identical to SEQ ID NO: 8116
  chr11:59523185-59523316
  hyper

SEQ ID NO: 48490 - DNA, 30 bp, Homo sapiens
  chr11:59578152-59578182
  hyper
cggagctcccccagcgactccggctgtctc

SEQ ID NO: 48491 - DNA, 30 bp, Homo sapiens
  chr11:59578525-59578555
  hyper
aaggtggtcccttacgattcacagcctttg

SEQ ID NO: 48492 - DNA, 30 bp, Homo sapiens
  chr11:60609378-60609408
  hyper
tcacatgttgactgcgctcgcgcgaattgc

SEQ ID NO: 48493 - DNA, 30 bp, Homo sapiens
  chr11:60609989-60610019
  hyper
gggagtactggcctcggagttggcccagaa

SEQ ID NO: 48494 - DNA, 98 bp, Homo sapiens
  chr11:60674188-60674286
  hyper
tacatttcccatgacgcagtgagaatttaaaaccaaaacaattggacagcacttgttttgacaactgtgcggcactgtgccacgggaccctggtcttt

SEQ ID NO: 48495 - DNA, 50 bp, Homo sapiens; identical to SEQ ID NO: 8117
  chr11:60692120-60692170
  hyper

SEQ ID NO: 48496 - DNA, 253 bp, Homo sapiens
  chr11:60718600-60718853
  hyper
aggtcccagcggcgacgcgggcatctctccgcagaaggagctgcggccgtcggggaaggcggtggcgggcagcaggcccgaggcggccaggtagagcagcaggctgagcgcgaccgcgcggtagcggcccaggtacacgtcggccagccagccgcccacgggcgccagcaggtaggaggcgcccaggaataccagcgcggcgcgcgtcgcctgctcgccggtccagttgaagttggtgctgttgaggtacagc

SEQ ID NO: 48497 - DNA, 261 bp, Homo sapiens
  chr11:60718976-60719237
  hyper
cgctccccgggcacgcggggctgctcccgggcgcgcggcgcgggcatcctggctccgggctgggccccccgcggctcttctctcctctcctctccccgcctcagagccctgcactcctgcccccgggcctcggccctctcccccacccaactggctggccctcctttctcaccgctttggcccacccttccctcctgtcccctctccctttcttgccctacccttcctgtccctccgctcactacccggactctaccacct

SEQ ID NO: 48498 - DNA, 30 bp, Homo sapiens
  chr11:60737964-60737994
  hyper
ccaccagagggcagcggcagcaggtgccgg

SEQ ID NO: 48499 - DNA, 155 bp, Homo sapiens
  chr11:60775226-60775381
  hyper
cgcccccgcctgcagccgggaacaccagcgtagcagctaatgccactctggccggggcgcccgccctcctgtgcagcggcgccgagtggcggctctgcgaggtggtggagcacgcgtgccgcagcgacgggaggcgggcccgtgtcacctgtgca

SEQ ID NO: 48500 - DNA, 568 bp, Homo sapiens
  chr11:61062455-61063023
  hyper
ccccggcagcaggagcgcgacacaggcggcccgaaggagcagtccggcccacatgaccggcggcggcgggtcccccgggctgggctcggctcctgcgccgcgcgcgggagagggggctgccggccctcgcccctcctcctggcgccgtggggagcgaaccagcgatccccgaaatggcacgcagagctgagcaggggggcttgggacgccgagaggaggggccgagggccgcgaggggacgcggcggacgattgtggggagggtctctggcacctcgaagcgaaacacacaaaggcaacgccgcccgcctgctgatgcctctccgagaggcgcggagcccggggcgggggcaaagatcagggacccctgggggcggggtttcgccctcggcccacaccccctgccccggtttgggagtcggcttcctgcgaagcgctgactgaaggcgtcagaccgaggccccgggaggaaacagacttcgggaacaaggctagcaccagaggctgcgcgccccgggcatggcccctgtcggtgggacccgagacgccttgttgtgacgaggtgggaa

SEQ ID NO: 48501 - DNA, 22 bp, Homo sapiens
  chr11:61063061-61063083
  hyper
cgctgagcagttctaggcctgc

SEQ ID NO: 48502 - DNA, 30 bp, Homo sapiens
  chr11:61100517-61100547
  hyper
ccaacagcgcgcagcgaactccactgccgc

SEQ ID NO: 48503 - DNA, 30 bp, Homo sapiens; identical to SEQ ID NO: 8122
  chr11:61129505-61129535
  hyper

SEQ ID NO: 48504 - DNA, 30 bp, Homo sapiens
  chr11:61129849-61129879
  hyper
gccgggacgatgtccgcatgacaaccgacg

SEQ ID NO: 48505 - DNA, 30 bp, Homo sapiens; identical to SEQ ID NO: 8123
  chr11:61159822-61159852
  hyper

SEQ ID NO: 48506 - DNA, 31 bp, Homo sapiens; identical to SEQ ID NO: 8124
  chr11:61160872-61160903
  hyper

SEQ ID NO: 48507 - DNA, 30 bp, Homo sapiens
  chr11:61197744-61197774
  hyper
cgtctgcccgatagcgcagggcaagggcag

SEQ ID NO: 48508 - DNA, 692 bp, Homo sapiens
  chr11:61275811-61276503
  hyper
cccagcaggtaggccggccgcacgccgctggacgtgaatggctcgcagtgaccgcgcccctcagcccctccttgtgagcctctagtccagagtctttgatccaccgccagcgtttccttcgccttcttggacccgcggctctggggcgcacacaaccgcacaccaaacagcgtcgggcgtcgggtctcagtgccaggcttggccggggcggggaatctctcggcttgtgcttgctccgcggtgggctggatgggcaggtagggggcgggctccggcgctgggaccccactagggtggcgccttggccccgccccgccccgccctccctccgcctcattggcagccgcacgcgcgtcggggttgccagggcgacgggtcgctaagctgcgagtcagcgcgaaccctagccagtcggcctccggcggaggcaacgggggaggcccgagggcgggcggtggagcgcggcgcgcggcggcggtgccccaagtgggtgcctcctcccggccccgcacggcccccctcccggcgcgggggaaggccggggcggggggcccgggggccggcgcggctccggcaccgtcggggcggctggggggcggccggggcggggcgatgcctggcggtggcagtggcggcggccccggccggggcccgtgaccatgggcatcgccgagtccacgccggatgagctg

SEQ ID NO: 48509 - DNA, 584 bp, Homo sapiens; identical to SEQ ID NO: 8127
  chr11:61276535-61277119
  hyper

SEQ ID NO: 48510 - DNA, 595 bp, Homo sapiens
  chr11:61334798-61335393
  hyper
agccattgagcgccccgccccccagagctgtccaaggtgctgaaacagctgtcggccacgcggctccttgtccttggtgctgaaacagaactcagtcctggggctgcgccctcttccaggtcgccctttgcgcagctcccagcgagcaggatccgagagactgtgcatagtgattccgccttcctctgccaatgcctccctgatcaaccctcagctgaagctatggcagcacccagtgacctcaagagccccctttcctcgagttaggtcctcggatgctgaagaccccagtcctgactcaggacaaaaagggccgccccgcgaacgtggtaaataccacgccccattccctcccgggggcccgccgcactgcctcctggtggctggcgcgggcactgcaccccggcgggcgcacagacggtccccagcggcggcctgggccagcggcgaagcagcggcagacggttctccggcccccgccgccccctcaccgctcccggggcaatctggcgctcagagcttgcggcgttgcccgacacccgcacactccagcctgtctgactgcatcctggccgctttggggctgcctgggtca

SEQ ID NO: 48511 - DNA, 30 bp, Homo sapiens
  chr11:61348069-61348099
  hyper
agactgcgggggaccggggtccgagccgct

SEQ ID NO: 48512 - DNA, 99 bp, Homo sapiens
  chr11:61348493-61348592
  hyper
cgccgccgccgaacagcgccgagccgcctccctccggcctgcgcgccgcgtgtgcgcgccggagcgtgtgtgtgtgtacgaggccgtgtgtatgtgtgt

SEQ ID NO: 48513 - DNA, 218 bp, Homo sapiens
  chr11:61355114-61355332
  hyper
ggggcgggggacgaggcgtctccgctcttaatagctgagcgcccgcaaacgcccggcctgggctcgaggcctgcccctccagcgacgggcgcccccaacattgaagtctttctctgcaacttggacggacccaccccgagcgccccgagtatccggcccggggcagagatgcgcgtgcgcggagggggtgccgcggagcccgcgtgagcagacaaatt

SEQ ID NO: 48514 - DNA, 407 bp, Homo sapiens
  chr11:61447551-61447958
  hyper
acgctaaaactggtcacgagggacctaaaggaggggcaggcacccaggcggctcccttccccgcacgcatcgcggccagtccagcccctcccggccgcccacgggaccccagccgagcctgagccaggcgcccaccgcccccacgcgcagggccggcgcccgcggaagactcggctctccctggcctcgacgccgctcccctccctggcgccagggggcgctgcctccccacgaccgtcgccatggtcaccgctggcggcggagaggggtttacgtaaaggacgcagcgtcccccggggggcggaggcggccttcgcgccggcgccggcgccctgcggaagcggcgttagtgaatcggggccttggggagcccaggatggaggtggcggtcgcggcggcgggccgag

SEQ ID NO: 48515 - DNA, 520 bp, Homo sapiens
  chr11:61519847-61520367
  hyper
gacccgggaaggccccgcgcccctcaagcctgggacggtctcgcgtcccccgacccgggacggccccgcgccccgcaagcctaggactgcccagcgctgagcgccgcctgcaggagtcgggagcgtggtgcccgcggccgggctgggcgcggcgcgggccggcagggggcgctgggcgcggcgggcggggcgcgtggggcgggcaggggccgggccagggacgcgcggggggcaagcgcggcggcggaccgggcgggaccgtagccggagcccagccgggactgtcgcgcgggccgcgccggcgatgccgcgcccccgggccgggctgtagcggggccgcggctggagtgtgcgccgggcaggcgggacatggaggtggtggacgagacggaggcgctgcagcgcttcttcgaaggtgagagaccgcgggctggcggcggcgaccctctggcgctgggaacccccggctgatctccccgggaactggggctcctcgctgtgtttccgcctcctctggctg

SEQ ID NO: 48516 - DNA, 30 bp, Homo sapiens
  chr11:61552664-61552694
  hyper
ctgcagaagagacagggtccaagacagagg

SEQ ID NO: 48517 - DNA, 146 bp, Homo sapiens
  chr11:61582552-61582698
  hyper
tgtgcaaggtaaggtccatggcgataagattcacgttggcaggtccggcagccccgggccctgtaagtgatgcggcgtgtggggcgggggccggggcggagccggcggccggtggcaccacacatacggaccaatcgccgtccccg

SEQ ID NO: 48518 - DNA, 2032 bp, Homo sapiens
  chr11:61582756-61584788
  hyper
cgtctgcgcatgcgccgggacacgcctgcgcccttggccgcagtcagggctcccgagtggtcactctggttgacccgcgcaagctctggcctcgcccactaggctggtcgcgtcagagggtggggcgggtcttcgccccgcagcgtctaagctctgctgcgacgttatgggaacctggtgacccgcggcacactctgggacgccagggtagtggatagggacagtggagggcatcacgctgcagggcacgggatcagagggggatgcaaggggaggggacgccattctggccgccaagggggaaacgcggtgaagggaacgccccgactttcgagtccctaggactgagtccccaggactccaacccagcagagaggcgccggggccttagctctgagggctgtggtctagaaagggaagcagcaggcctggggctggggcgcgcgccgaccccgcagtgagaccaagggaagaagggacaggaccccgcgaagggcctaccgccccagagcgtaaacagcggtccgctccgcggaatagctgaagacctcgctggcctgcggctcagtggcctccccggcgattcgagaacagctctgggggtcctcgctaagtgtatgccattcccaatcccttatgtacgccagcggccgcttgccctccccggccagcgctgtcccttccgcgtcctccagtcttcacacgacgcaggggtccccaaggcagcggtctccccaagcttcccgtttcagccccatcctcgagaatgggctcctttcctgctccctctccgctcctgctggcgagtggagaccggcacctaggtccagacgcggctgcgctgcctctcctagccatcgagacaggatgtgactccctcccctggccactgaccccctccctccccaggcggcctgcatccttgctctcctccctcctagcctacccagctcggggttctgtccccgcccagagacctgaggctcggggctgcagatggaatgcacggcagggaggcgggaccctttgtttgtgtgtgcgtgttgttggcctccatccccactccccagactccacttctccaggcctctctcccgccttttcatcccgcatccgcaggacacccaatcaccgggcaacaggtatgatcaggcgcctccgggctttcctccgaattagtcggtgtttggctcggagtgcgtaactctgtctcccctgcactcagcctccggtcccgccctctcctgtgcccccgcctggctgcgctcaccgtggcatcctgcccggcgtagtggctgatgacccgggagccccctggatgccggcgggtgaactcgctgatgttgtacaccttacggtcgatcactagccaccgctcctcgcaccctgagcgctgggccacctcgtcccaggtgaagtagcgcggggtaggtccctgagccgcggtctcggcggccaccgggtcgggggccatagctggcctggcgacgccgcgcgccgggccagcaggggctgtcaggcgcgtgctcggggtccgcgggctccaggagtggatttgctggcgcgcgcccagagccagccgcctgcgcgccgggttttcagcaccgcagggcagaccggcgggcctcgcagcgcgcgttcccattggccgagcctcgtggcgcggggagcgagatcccgtcccccggtgggtcttgggcaactcacagctgggctgccaacacgcgccccctcgcgggctccctaaaggcgtcgccgccggattcgacttcctgacgtcaggcgggcatcgcggcgttggctcccagggggcgccgcggtaggaacagcggttctagtgcaggccctgggtgcggggccgcgctgcaggagtgaatggactgaggggccagggctgcggggtggccgcaggaagggtgggcggggccggggttgaggtttttccgtgcacgaggctgcccgggcggtcgcggacatcatctttaggctgtggatgccttggccggggtctccagacgctgaccctccaggg

SEQ ID NO: 48519 - DNA, 408 bp, Homo sapiens
  chr11:61595059-61595467
  hyper
aagggcgtcacctagccaagccggccctggagttgagtgccccgcagcccgccggtccacccgcccggccgcttgctggcaccctggtggccgcgccggctttgtgtcggcatcaggtgcaaacccccagagcgccgggcgtgcgcgcacgcgccccggagcgcgcggagcccattcgttgcccccaccgggatctcctctaggatctcctccggcgcccggggccggagagtgggggagggaggaggtcggacacgtagcctgcctcgcagcagggctcgactccacgcgggagggcgggggagccggggacccgccgctccagcccgctggccttcgaaagatcctcctgggccaatggcaggcggggcgacgcgaccggattggtgcaggcgctctgctgatcgc

SEQ ID NO: 48520 - DNA, 1061 bp, Homo sapiens
  chr11:61595682-61596743
  hyper
actcccgagcgcaggcgagaaggctgggggagggggcgcggtgggaggagtaggagaagacaaaagccgaaagcgaagagggcccgggctgcacacaccggctgggaggcagccgtctgtgcagcgagcagccggcgcggggaggccgcagtgcacggggcgtcacagtcggcaggcagcatggggaagggagggaaccagggcgagggggccgccgagcgcgaggtgtcggtgcccaccttcagctgggaggagattcagaagcataacctgcgcaccgacaggtggctggtcattgaccgcaaggtttacaacatcaccaaatggtccatccagcacccggggggccagcgggtcatcgggcactacgctggagaagatgcaacggtaagggtctgggggcgccccagccacccttctctgctgcaggcggagtcaggatccctggctccccgtgggccaaacagacctccggcgctgaatggagcttgggacgtcctgtagggaaggaaagtgcatctattgcactcgtaccccctccccaatcctcctcctcctctgggccgactggggtggagaccggatctgggacccggggaggcggcgctgcggtgaaagtcccagcggtggagaacagggcaagcatctaccgcgcgcgccgggacccacgcgtcctccccttcctcggggtttgtctggaggcagggactccccaagaggggcgctcgggccagacggctttggcgcccccagcggggaagatggccgcccctgcgcgccgctgaaaggagcgggagcgcaggcagccaggtgtgggactccgcgcttgtcccgcactctccatccagactgggtggcgagaaggaaagctcgtccccggccggagatcgctcctgctgggactcttgtctaagaagttcctcaatggccacctgggaaaaaccgcccagcagctcgggttcccacgctccagggattatctagactcaccccaagctcgagccggccttcttggggaccggcgtccgggattggtggaaggagaacggcctggggtttgc

SEQ ID NO: 48521 - DNA, 45 bp, Homo sapiens
  chr11:61659435-61659480
  hyper
cgtcaaatccagtgcgcccagaggggggacgctgtctcggggtgc

SEQ ID NO: 48522 - DNA, 30 bp, Homo sapiens
  chr11:61684922-61684952
  hyper
gccaggggccgagccgccccaccgcctgtc

SEQ ID NO: 48523 - DNA, 263 bp, Homo sapiens
  chr11:61722723-61722986
  hyper
agacaggccaggggaggatcacgaggagctgcggcaaggggctggggagggggcgggggaacgccagcggcaggtcggcgcctctctgtagggaaaggtgcggactgcagccagtgaaactgaagttagacgttaggtaagacgtcctgccgttagcaatgaaaaccccattttctgagggaagcgctgacatcatggtccctggagcccctgcgcgggaggggagggggtctggcggatttctgggaccagcagggggaccc

SEQ ID NO: 48524 - DNA, 30 bp, Homo sapiens
  chr11:61891916-61891946
  hyper
tgttgacttggacgcgcaggaagcccgaaa

SEQ ID NO: 48525 - DNA, 165 bp, Homo sapiens
  chr11:62192261-62192426
  hyper
gtcggcagagggcacggaaggaggcggcgggttagagacggagctctccagttcgagcccctccatggagcaacgtggtccggtgggccttgtgccccgcggccactagggggcagcatcgtccacagggtcctggagcggacgcgctgtcggggctgaggcacc

SEQ ID NO: 48526 - DNA, 30 bp, Homo sapiens; identical to SEQ ID NO: 8134
  chr11:62312705-62312735
  hyper

SEQ ID NO: 48527 - DNA, 469 bp, Homo sapiens
  chr11:62313645-62314114
  hyper
agcgcggaaggacagccgagggggcgcacggtgcggggtcgcggaggcgcggaggcgctgggggccgcggtggcgatctcggaaatttcccctccagtaaacatgggatacgaacggagcagcccccgagccaccgccccatgcagggagaggaggtgggacagaggccaccaggcccggaacggggcgccctgccttgcagtggagccaacagtccgccctccggagaaataaagagtggagcaaagcacttcggagcgattttccaactttaaccaacttgcgccccaactccagaggcagaactccgctcccagagagcgacgcgtcgccgccccgggtggccccgcttgctccaaactgcttgaatcctcacagtgacacccccaacaacgcgccctgccggagcaccgcaacccacctccccgcgacccgcccttggtgccccggaccccgatggcgccacggt

SEQ ID NO: 48528 - DNA, 30 bp, Homo sapiens
  chr11:62314492-62314522
  hyper
cccctgtcctgtcccggacctggacctgct

SEQ ID NO: 48529 - DNA, 30 bp, Homo sapiens; identical to SEQ ID NO: 8136
  chr11:62342061-62342091
  hyper

SEQ ID NO: 48530 - DNA, 33 bp, Homo sapiens
  chr11:62359273-62359306
  hyper
gcagccacaaaggccggcgccgggtggcatctt

SEQ ID NO: 48531 - DNA, 209 bp, Homo sapiens; identical to SEQ ID NO: 8138
  chr11:62369473-62369682
  hyper

SEQ ID NO: 48532 - DNA, 50 bp, Homo sapiens; identical to SEQ ID NO: 8139
  chr11:62369883-62369933
  hyper

SEQ ID NO: 48533 - DNA, 30 bp, Homo sapiens; identical to SEQ ID NO: 8140
  chr11:62380530-62380560
  hyper

SEQ ID NO: 48534 - DNA, 301 bp, Homo sapiens
  chr11:62389606-62389907
  hyper
tctgtgcacccccccgccttgtagacttgatttccggtcccaccgccaggttccgggaaccaccgggtggtgacgtcacatccggcgtgccaaactcgcgtggccggcagtcaaaaccccgggtaggtgcagaatctcgagtaggtgcacgtggtacctacctcgagacccgccccctcatcacggaattgcctgagaaagccagtcctggcgcccagatcttcaccttattcatccatccagtcagtcacgccacccaatagctgttgctcaatacttattacacgaatgaaatctaagg

SEQ ID NO: 48535 - DNA, 233 bp, Homo sapiens
  chr11:62413281-62413514
  hyper
cacgctttcttcatcgctttggagagtacacgcctaccccaccccagtatatccgttaggtcctagtaaacatttgtggcactggtgatatgtttcgaatctttttttttccccagtaatataaacccgagagcgtggaccaagccattcgattacatgttgtgtttgagcaacaccatccacgccgtgagcttactggaccctgggccgtgcccagcgaccgtggacactga

SEQ ID NO: 48536 - DNA, 30 bp, Homo sapiens
  chr11:62414221-62414251
  hyper
attatcgcagggggcggggcttcaggccag

SEQ ID NO: 48537 - DNA, 181 bp, Homo sapiens
  chr11:62420778-62420959
  hyper
gctgacaggaaacgcgaaaggaaccagctaccaggcctcgcaggaaaattaatccggcgatgtcctcgaccctcttacattagttccgcaccctgtcggagtcccagagcataatcccgggacgatgatagcaggaagccgattcgccctatatgcaaccactttattcaaaagcctattg

SEQ ID NO: 48538 - DNA, 30 bp, Homo sapiens
  chr11:62432568-62432598
  hyper
tgaggaaacaaagtcgcggcccccacacag

SEQ ID NO: 48539 - DNA, 304 bp, Homo sapiens
  chr11:62432818-62433122
  hyper
agctgtagtagccagattgggcggccgggagtggtgggggtgccgggtggaaggctctgggcggggtctcaggaccctccttttcttggcggggatcgggcttgtggtgccgctccccgtaatgtacggaggaagagggaaagggctctggccccctcggcgtcatgtcttcggtgctggcggcttcccatccgctggttctatcctcaaacgccgggacaccgggaatctcggagaaggacaaccgagatccagctggctcctccatcggggtgctcacactttctcatttgatttcaggtct

SEQ ID NO: 48540 - DNA, 231 bp, Homo sapiens
  chr11:62433206-62433437
  hyper
cgggactgcagagttcggggaagctgtacgccgcctttcgctacgcggaatttgcagatcttcccctggacctcaggcctctccggctggagtagggtggacgcttcacataagcttctctggtcgaacttacccgaatctccagatggccgcgctgcgtcgaatgctccacttgccgagcctgatgatggggacgtgccgcccctttgcgggtagggaggtgggggcaga

SEQ ID NO: 48541 - DNA, 30 bp, Homo sapiens
  chr11:62439247-62439277
  hyper
gtcgcaatgctgggcgcaggggctggcgtg

SEQ ID NO: 48542 - DNA, 30 bp, Homo sapiens
  chr11:62493462-62493492
  hyper
ccctagccaagtaacgttaactaactctaa

SEQ ID NO: 48543 - DNA, 30 bp, Homo sapiens; identical to SEQ ID NO: 8141
  chr11:62493994-62494024
  hyper

SEQ ID NO: 48544 - DNA, 30 bp, Homo sapiens; identical to SEQ ID NO: 8142
  chr11:62495746-62495776
  hyper

SEQ ID NO: 48545 - DNA, 30 bp, Homo sapiens
  chr11:62496433-62496463
  hyper
gcggggtctggatccgagtctgccctctcc

SEQ ID NO: 48546 - DNA, 230 bp, Homo sapiens
  chr11:62521740-62521970
  hyper
gtgctcgccgccatcgcttttgcagtcaggcgttggattgggtgacgctcctgtcctcaacttttcctcttcgtcccgccttccttgcctccgagccctcaggattggctgagcttctccttctacctaatccagcaggcaggaggtacccggctccgagtcgctgaacgcggcgctctcctggcgaggctggaggtcgggaaccctgcagtgtcggacccgagctgaca

SEQ ID NO: 48547 - DNA, 104 bp, Homo sapiens
  chr11:62538732-62538836
  hyper
cgtcacgtgaccgccggtctctacagtctgttcacactggccaatcaagagccaggaagcctcctggagggccggaaactttccaaggcgcccgccgactggct

SEQ ID NO: 48548 - DNA, 30 bp, Homo sapiens; identical to SEQ ID NO: 8143
  chr11:62539148-62539178
  hyper

SEQ ID NO: 48549 - DNA, 30 bp, Homo sapiens
  chr11:62553854-62553884
  hyper
attctggtgagtaccgtccccttccagcct

SEQ ID NO: 48550 - DNA, 7 bp, Homo sapiens
  chr11:62554242-62554249
  hyper
cggtgac

SEQ ID NO: 48551 - DNA, 74 bp, Homo sapiens
  chr11:62554822-62554896
  hyper
ccaccttcgtgggtcgcgccggataaggtgggctttgggcggggtgctgctgcagcggcgcttcctggtggtca

SEQ ID NO: 48552 - DNA, 30 bp, Homo sapiens
  chr11:62609871-62609901
  hyper
ataggggcgaggcacgacccgcaccttgca

SEQ ID NO: 48553 - DNA, 523 bp, Homo sapiens
  chr11:62623423-62623946
  hyper
ctacggcgagcgcacgcgcatacgttgaccgcatgcgaccccggggagttgtgggtagagagttccagggaaggagggcgtagacaaagcgccacctgaacttgcggcgcgaaaaaggcgcgcatgcgtcctacgggagcgtgctggctcaccgaccgcattgcggcttggttttctcacccagtgcatgtggcaggagcggtgagatcactgcctcacggcgatcctggactgacggtcacgactgcctaccctctaaccctgttctgagctgccccttgcccacacaccccaaacctgtgtgcaggatccgcctccatggagctacagcctcctgaagcctcgatcgccgtcgtgtcgattccgcgccagttgcctggctcacattcggaggctggtgtccagggtctcagcgcgggggacgactcaggtactggatcccgggctaagctcgggaggaggtcccctttggtggggccatttcgggaaagtatgtcaggacgtaagtgcttcactgaagaca

SEQ ID NO: 48554 - DNA, 30 bp, Homo sapiens
  chr11:62648262-62648292
  hyper
ccctgagccgcccacggctggggcagtccc

SEQ ID NO: 48555 - DNA, 30 bp, Homo sapiens
  chr11:62648808-62648838
  hyper
gagcgccgcgttgtcgcgagctaccggcgc

SEQ ID NO: 48556 - DNA, 30 bp, Homo sapiens
  chr11:62649145-62649175
  hyper
ctccttccccgcggcgccagaagccagttg

SEQ ID NO: 48557 - DNA, 330 bp, Homo sapiens
  chr11:63258494-63258824
  hyper
gctcaggcccatcccgcctctgcggcctcgccggcccccaggccttgcaggggactacgcccctggcgagttcccagtcggcgcggcccctggtcggcggagccgcggaagcttgggcactgggggcggctcggggaggaaccgcggaggggaaagcgccgcgggctgcaaacggcagaggcgcgcggggtggcgacagtggcgcgggcgcagtgagcgcgtccgagaacagaatgggacgaaacggggcgcttagaggcccgggaatctgtgggtcttttaggcggagaggggcgaaggaggttattcgttttggggaaggtcatggaa

SEQ ID NO: 48558 - DNA, 30 bp, Homo sapiens
  chr11:63438069-63438099
  hyper
atgtttcatgtcttcgggaaagcaaaagaa

SEQ ID NO: 48559 - DNA, 277 bp, Homo sapiens
  chr11:63438922-63439199
  hyper
aactagccagaaggtggggcacgcggagccgcgacggagcgagcgcagcgcggtctgcgtggcccaacggacagcccgaggcgtggcgagcgcaggacgaggctaggcgaggcggggcgggaaagcgcacgcggcagaatcccgccaccgcctgccgcgtgtgcgcgaagcgagccgccgggtacctgttggcggggcgctgagtgctaccgtcctttgggaattgtagtcccgcgctcactgggtcccggccagcggtcctcatactgcgcactca

SEQ ID NO: 48560 - DNA, 30 bp, Homo sapiens
  chr11:63449484-63449514
  hyper
ccagtgggcgttaacgccaagactgggcag

SEQ ID NO: 48561 - DNA, 30 bp, Homo sapiens; identical to SEQ ID NO: 8147
  chr11:63536315-63536345
  hyper

SEQ ID NO: 48562 - DNA, 106 bp, Homo sapiens; identical to SEQ ID NO: 8148
  chr11:63655733-63655839
  hyper

SEQ ID NO: 48563 - DNA, 30 bp, Homo sapiens; identical to SEQ ID NO: 8149
  chr11:63684149-63684179
  hyper

SEQ ID NO: 48564 - DNA, 30 bp, Homo sapiens; identical to SEQ ID NO: 8150
  chr11:63684896-63684926
  hyper

SEQ ID NO: 48565 - DNA, 93 bp, Homo sapiens
  chr11:63705682-63705775
  hyper
attcgggtcacgtgcgggtcactccggtgtgctggggatgggttgaaattaaaactttccgggatgcctggtgttcacgctaacagcactgtc

SEQ ID NO: 48566 - DNA, 144 bp, Homo sapiens
  chr11:63741834-63741978
  hyper
gtttaggcttctcgcgtacatgattgggtggccccagatgtcattcacaagtataagccttggaggcggaacataactcgaagaagagcccttttgtgctccgcccatagcgtaggaaggtgtcaattggctgtttcgaggaac

SEQ ID NO: 48567 - DNA, 5 bp, Homo sapiens
  chr11:63742038-63742043
  hyper
cgcgc

SEQ ID NO: 48568 - DNA, 30 bp, Homo sapiens; identical to SEQ ID NO: 8152
  chr11:63753583-63753613
  hyper

SEQ ID NO: 48569 - DNA, 36 bp, Homo sapiens; identical to SEQ ID NO: 8153
  chr11:63803824-63803860
  hyper

SEQ ID NO: 48570 - DNA, 30 bp, Homo sapiens
  chr11:63933999-63934029
  hyper
ggtcagcagggcaccgcctccacaccccag

SEQ ID NO: 48571 - DNA, 30 bp, Homo sapiens; identical to SEQ ID NO: 8154
  chr11:63952876-63952906
  hyper

SEQ ID NO: 48572 - DNA, 70 bp, Homo sapiens
  chr11:63993860-63993930
  hyper
atgggcatttggggcgcctgaacccaagacctctggatggtagggatgcccgggcgtcctggataccctg

SEQ ID NO: 48573 - DNA, 30 bp, Homo sapiens
  chr11:64008117-64008147
  hyper
aagcccgtgttacacgcctgtattggatga

SEQ ID NO: 48574 - DNA, 30 bp, Homo sapiens; identical to SEQ ID NO: 8155
  chr11:64008409-64008439
  hyper

SEQ ID NO: 48575 - DNA, 151 bp, Homo sapiens
  chr11:64009404-64009555
  hyper
ccggccccctgcagcggccgcagaggtgttggtgtgctggaccgggggcagctgggtgtggcgtgagtggggccgcccagtcggggcaactgcagtgcagccagatagggtctggactttgcgtaaagggacaggcgggaactgaagagcg

SEQ ID NO: 48576 - DNA, 30 bp, Homo sapiens
  chr11:64019640-64019670
  hyper
gcccctactctccccggtgccctgcctgaa

SEQ ID NO: 48577 - DNA, 46 bp, Homo sapiens; identical to SEQ ID NO: 8156
  chr11:64038084-64038130
  hyper

SEQ ID NO: 48578 - DNA, 30 bp, Homo sapiens
  chr11:64039287-64039317
  hyper
agtgggtaggggggcgacgttaatctcagc

SEQ ID NO: 48579 - DNA, 369 bp, Homo sapiens
  chr11:64059292-64059661
  hyper
ctcaggggcagggacgccccaggggcgactggccgggcggggtgcccacctctcgcgcgtgggcgcctccgggagtggtgtggccgccggtcccgccgcccgccacgctccgaggcgtcgctgtgcggacgcgggggaggcggtgggagcgagctgcgggcgctgcgcggtggccctgctgtctggcgtgtgcacgctagtgtccacacacgtgtgcgtgggctctgggtgccctggcgcggccggcacgcccatgggggccggggatgccggggcgtctgcggagagtgcaggtggggtgcgtgcgtgcagcggggcggcgcggcgctgcagcctcgggatggagcgtgggcgcgcgggtctttgtgc

SEQ ID NO: 48580 - DNA, 209 bp, Homo sapiens
  chr11:64059901-64060110
  hyper
gaagcagggcgaggcgagaggggacggagaagccgcggagatgctgtcacagccgcagcgggcgagcagggacccaccattcccctgtccccgccttgcgctgtccggcctctcctccgggtttcccttcggacgcctccgagccccctcagcctcctcctcgagggccagctccccgcacccccaccaagctccacacatttcctcgc

SEQ ID NO: 48581 - DNA, 15 bp, Homo sapiens
  chr11:64060160-64060175
  hyper
cgccttcctttccct

SEQ ID NO: 48582 - DNA, 626 bp, Homo sapiens
  chr11:64067394-64068020
  hyper
gtcgctgccccgggcgggtgtatccctcacagcacctcacgactgtgcctcaaagcctgcatcaataaatgaaaacggtctgcaccgctgcgggcgtgacgctcccggacgcgagtgggtgtggaattgctttcctcgggccaccgtgggggcacctctggcctcccgtgacccccaggccgagggtccccgggcacccaggtcggtcaagtctcggccctctcaggcccgcgtctctgcctggaggagactgtgtagggtccggcgtggggatcagccaggatgggctgcgcgtctccagcctctgcacacacattggcgggtggggtgcagggagggagaggcaggggagagagaatggcatctcgcgtggagggctgtcgtttgaactctcccagcgcgagagaccctgccccgcccccttcctggagcgttgactcccttctcgtctcgaggcctgtggcgtctgggtccgttggggcagaaccatggaggaaaagccttcgaaagtaagacgtctccctaggccccttaccctgtccgctccaacccacccttggtccgactcgggcccctggcgctatttcttactcagccttggctgcccgcagcccccacccaacccc

SEQ ID NO: 48583 - DNA, 375 bp, Homo sapiens
  chr11:64068047-64068422
  hyper
cggctcagttccccagcccgctcttccttcccgctccagccatccgcgacccttggctccctccttgtatgtggcccacaggtgtcgctcaagtcttccgaccgccaaggctcggacgaggagagcgtgcatagcgacactcgggacctgtggaccacgaccacgctgtcccaggcacagctgaacatgccgctgtccgaggtctgcgagggcttcgacgaggagggccgcaacattagcaagacccgcgggtggcacagcccggggcggggctcgttggacgaggggtacaaggccagccacaagccggaggaactggacgagcacgcgctggtggagctggagttgcaccgcggcagctccatggaaatcaat

SEQ ID NO: 48584 - DNA, 30 bp, Homo sapiens; identical to SEQ ID NO: 8158
  chr11:64072074-64072104
  hyper

SEQ ID NO: 48585 - DNA, 30 bp, Homo sapiens
  chr11:64072676-64072706
  hyper
gcccactcctctcgcgcgcagcaagccccg

SEQ ID NO: 48586 - DNA, 30 bp, Homo sapiens
  chr11:64126325-64126355
  hyper
gcagccggcattcccgggcagattcctggc

SEQ ID NO: 48587 - DNA, 202 bp, Homo sapiens
  chr11:64410377-64410579
  hyper
gggtagggatgaagcggaggtaaaccagggcccaagcctcggtccggagccaacaaaatcaactggatcccgccgggaaatcgggggtccgcggagcggcaacgccaaggtccaggatgcctgggtccatcgcgaggagctaggggtctctctgcatcccggcggggtcggagcggcgcagagggccgtcagaaacccgggg

SEQ ID NO: 48588 - DNA, 30 bp, Homo sapiens
  chr11:64411489-64411519
  hyper
atgggcacagtgtgcgggtaggcacacagg

SEQ ID NO: 48589 - DNA, 33 bp, Homo sapiens; identical to SEQ ID NO: 8160
  chr11:64480297-64480330
  hyper

SEQ ID NO: 48590 - DNA, 893 bp, Homo sapiens; identical to SEQ ID NO: 8161
  chr11:64480379-64481272
  hyper

SEQ ID NO: 48591 - DNA, 30 bp, Homo sapiens
  chr11:64490479-64490509
  hyper
cagagctacagggccgccccgtctccgacg

SEQ ID NO: 48592 - DNA, 82 bp, Homo sapiens
  chr11:64509679-64509761
  hyper
gtgcacgctcgaccccgcccacctcctgcttgcccaggactccgagagcaggaggcaaattagagaggaaaggtgtggtggg

SEQ ID NO: 48593 - DNA, 499 bp, Homo sapiens
  chr11:64509801-64510300
  hyper
cccgagccgcccatcgtccggaggggaaccagctggggcggaaggagcctgggttccccggggtcaagaatccagaggtcatttcctgagcgcttggggggaaggggcaccccttcaccagataagccgccccccattagccggaaacagctcccaggccggagatagcgagttcctccggattccccgggagacagataatgcccctcaagtgtcagagtccgggacccggccctcccttcgccgccgctggggaaggctagagaagggaaacctcatctgtctgaagggcgtgcatctctctgccctgcgttgcggaggaggctttcgttaaagagactgcacgctgcggagcagggtgggtccgggtcagggctgtgccctggactgtgcctgggaggcagggacccgggctcagactcggggctaggctcaggctccgtgtgccctcccgagccactcaccgaaggcttcgatgcacccgcggagcagctcctcc

SEQ ID NO: 48594 - DNA, 30 bp, Homo sapiens
  chr11:64511609-64511639
  hyper
gcagtgcctctccacgcatgtacactccca

SEQ ID NO: 48595 - DNA, 129 bp, Homo sapiens
  chr11:64511955-64512084
  hyper
tgccaaatgggggtacgcgggggagggccccgctggaaggtggctgggaaaagctgggtgcaccgtggaggtcctccgccctccggggatccagcgcgccttagctctcgtggccgctgccccctctcc

SEQ ID NO: 48596 - DNA, 1421 bp, Homo sapiens
  chr11:64512373-64513794
  hyper
cccccctccgcccctgcgcggagctccgcaccgccggctgcgccacccccaccgggggctccctctcgccccgcacgcggcggtccctgcggcagcttaacccctcccctgccgcgccgcccgggaggccagggccgcgggcggggggctgcgccactagctgccccgagggcgggcgaccggaggccccgccgcccgggacgcggaggggggaccgaaacgaagagcccctcccccaaccgcggacgccccagtgccccccgccctgcctgggtgtcgggcggaggaagccgggaggggcaggaagcggactgcggtggggaaggggcgccccgcccagcccccagctcgggttcctgttttcgagacaaaccgttcccatggggctaacccggcccgggaccgggcgtcttcctgcaggcagcgggtggcacaggcctagtggaggtcgggggcgtggggacagctggtccttgagatagtctgggggatgggctaggacaagatgggaatattttggggagagggacctgtggggagcgaggaatgaaatcgtggctatctggagacgcggccttgatgtctgggaatgggggcggggggcccagttcacacaggaggaacggggccccggaagcctggctccccacagggtcgaatggaaaggggcagccgcatgtggcggtgggttctccgcagctcggagactggagacctggatgcctggccaacagggaggaacttgggaggggcagccgcaggcggttggggtccccactagccgggcctaggagagcgggtaacggtttccgaccatttggcttcagacacactcactgtgaaaccaccgaccccaaacctcccttccgaggcgtgcccctcccagccttggggcgggggatccaggaccgcccccgcacctcagtcttggtaatgtaagacttagaaacaggacctttctgttcctcagtttccccataatgagggcctagactaggcggtctgcgagtgttccctgccgtaacactcccccgactttggatccagtgtagccacctgctaagagacccttaaacgccgcagtagggcggggctaagggcggagccaagaaggcgccgagcatcctctgcttcctccccctcctgggtcctgccctcgacagcgcggatcctccgtggtccgggaagcctcagcccaagtcccggctcccagccccggtgggccccacccaggcagacgccccgcccccggccagcgaggctggccgctgacctagtatggacacggcactgggaagagaggcgtggagggtgacgccaggaaaggggctggagaggcctaggccccgcccccacgggtcgccccctccacctcccatcaccgtcccgccgtgggacgcacctgccgagggtggaggata

SEQ ID NO: 48597 - DNA, 45 bp, Homo sapiens
  chr11:64578116-64578161
  hyper
cctggaaatagtggcgggccgggccgctgcgctgtggcttctggg

SEQ ID NO: 48598 - DNA, 30 bp, Homo sapiens
  chr11:64611789-64611819
  hyper
ggtgcgggtccctgcgggaaagtctgcggg

SEQ ID NO: 48599 - DNA, 30 bp, Homo sapiens; identical to SEQ ID NO: 8166
  chr11:64645541-64645571
  hyper

SEQ ID NO: 48600 - DNA, 30 bp, Homo sapiens
  chr11:64646421-64646451
  hyper
cccccacacccccgcgggatggctccacga

SEQ ID NO: 48601 - DNA, 129 bp, Homo sapiens
  chr11:64655568-64655697
  hyper
gaggaagctgtccccgcccgccccgcgcctccgtccggtttctgcatctttgcccctggcattccttcctcctccagtgatcacgacctgtttctggggttcacctcagcaaacgccgacctcacactc

SEQ ID NO: 48602 - DNA, 30 bp, Homo sapiens
  chr11:64684716-64684746
  hyper
ccaggccgcgcctccggacgcccagccacg

SEQ ID NO: 48603 - DNA, 199 bp, Homo sapiens
  chr11:64698944-64699143
  hyper
ccactctgacagagcacgtgagtacctctgggggctaaggcagcctctcacctctgcaggcgtgactcctgtctcatctcccacaggtgatccgggggctgctcaaatactggccaaaaacctgcacccagaaggaggtatgaagaagggctttgatgcccgccagagggaggctgggagggctcggcctctagaaggc

SEQ ID NO: 48604 - DNA, 497 bp, Homo sapiens
  chr11:64739231-64739728
  hyper
gcaggggggactgcacttcggcggcggagggtggagcccggcccggaaacttccctcagaaataaacagaaacgcaaagacaacttcccgagggcccgggccgtcgtgtgccgttacctcagccccaggtggttcccaggctcggccaggctatgtctcacacactgactaggggtccttcggcctcagaaaagtggccccggacggaatacccactaagaagtgctctctgaaaaaggcgggcgccaacctcgaacgaagtcgttttgagggactggctcgccagctcctaagcaacttcggggctcgtgccgcgcacccaccaggccttctgcgcacgcgcaagtgcgcttcccaccgccccttcgggcgcagctccaaggcctggccgcggtctgcgcgtgcgcatttcattgtcgacaccgagaggacgccttggcgccttcaggtccctcctggatttaccagcccattgtttatttcgcgcctgctttagc

SEQ ID NO: 48605 - DNA, 31 bp, Homo sapiens; identical to SEQ ID NO: 8168
  chr11:64759021-64759052
  hyper

SEQ ID NO: 48606 - DNA, 30 bp, Homo sapiens
  chr11:64851484-64851514
  hyper
ccgccccgggcgcgcgccaaccgggaaggc

SEQ ID NO: 48607 - DNA, 30 bp, Homo sapiens
  chr11:64863596-64863626
  hyper
gggctgcagggggacgtttcacctgaagga

SEQ ID NO: 48608 - DNA, 30 bp, Homo sapiens; identical to SEQ ID NO: 8169
  chr11:64880120-64880150
  hyper

SEQ ID NO: 48609 - DNA, 30 bp, Homo sapiens
  chr11:64885330-64885360
  hyper
ccgggcgtcaggtacgagccccgccctatg

SEQ ID NO: 48610 - DNA, 30 bp, Homo sapiens
  chr11:64889775-64889805
  hyper
accagacagttgcgcgcacagaaggctggc

SEQ ID NO: 48611 - DNA, 30 bp, Homo sapiens; identical to SEQ ID NO: 8170
  chr11:64902549-64902579
  hyper

SEQ ID NO: 48612 - DNA, 161 bp, Homo sapiens
  chr11:64949027-64949188
  hyper
gcgtggggtgcggccgtccggccctgcaactcgagctgctgcccctggttaaaaataccccctgcccggccctccccctccgttccccgcggtgcccttccgccgcgccccagcccccccatccccccccgcgctggcccctccccggggactgctctgcc

SEQ ID NO: 48613 - DNA, 30 bp, Homo sapiens
  chr11:65029088-65029118
  hyper
gggtgacaaacatgcgccactgagttttat

SEQ ID NO: 48614 - DNA, 196 bp, Homo sapiens
  chr11:65081962-65082158
  hyper
gaatatacttgtgccggcgcttccccgacgcagccctgcagggaaggatccggtccaaggtctctctgcgatttctgaagaattcggtcttcccggagcctctcccccggctcttctagaaccgaaggttttagttcccatgggcacagccggaggccgcctgcgccacccggccctcagccgccagaaccaggac

SEQ ID NO: 48615 - DNA, 74 bp, Homo sapiens
  chr11:65121846-65121920
  hyper
tttcccaaaacaattccgtgagggctgttagccctgcttggtagacgaagaagccgatgcggtctagggtcacg

SEQ ID NO: 48616 - DNA, 30 bp, Homo sapiens; identical to SEQ ID NO: 8171
  chr11:65149402-65149432
  hyper

SEQ ID NO: 48617 - DNA, 30 bp, Homo sapiens
  chr11:65150068-65150098
  hyper
gattatttaaagtgcgtgttgatctgcaat

SEQ ID NO: 48618 - DNA, 30 bp, Homo sapiens
  chr11:65153827-65153857
  hyper
cgtgggcaggccaacgcccctagcctgatt

SEQ ID NO: 48619 - DNA, 650 bp, Homo sapiens
  chr11:65185290-65185940
  hyper
gagtgaggacacaggcgctcagcgtggcagggtgggaacaggaaggtctcgtgagctctgtgacaggatggggctacaggagacagaggtagcagtgagctggtgaagaggcaggaggaggcaaggaggacagggtgttctagggtgccagctcaggcaaggctccaaggagtgggtgagtgctcaggaggacgggggaccaaggcctggggtaaggggcaggtgcccaggcactctagcatggcacggaacaggggacagtcccaggacatccggatgcagggggctgacaccgcaaagttctttcctgtaaagcacagcccgaggcctggggcttggccctgggcagaggaagccccccttagatctgccttggcagtagtgaggaaagggcgtgcacagaccccacgcagcccgaggtgacgggtcaaatgcaagagtgagaagccccctcctgagggtcctcccctgcctcgccttcctggtgggcggcctgctttccagcacatgtggtggaccagcccacattaggtcaaagtgttaaaaatagccggagggctcagtatgtttgggggtggggggggaatgggaggtgctgagggagggcccaggacagttgggaaggaggaagggcccgtggggctggggtt

SEQ ID NO: 48620 - DNA, 30 bp, Homo sapiens; identical to SEQ ID NO: 8173
  chr11:65188769-65188799
  hyper

SEQ ID NO: 48621 - DNA, 99 bp, Homo sapiens; identical to SEQ ID NO: 8174
  chr11:65189905-65190004
  hyper

SEQ ID NO: 48622 - DNA, 30 bp, Homo sapiens
  chr11:65191692-65191722
  hyper
agatgcatccggctcgaggggccatcagct

SEQ ID NO: 48623 - DNA, 293 bp, Homo sapiens
  chr11:65197598-65197891
  hyper
gtgtctgtgaaatgcgggtaaatgaatgtagatgtttggcagcagctactccttgttgagctctcacagtgaactctcctgcctctgccctccttccccgcctcccctggtgcctagcgtcaggtctagccacttcctcctgggcccctctcccttttctgtggctggctgcctgcccgcctggcgctggacctttcatgtaacgggaatcagcatgtatattctggtctggtctgtttctacacttaattttgtttccagtagtatttccctgtaccggcagagttcacaaa

SEQ ID NO: 48624 - DNA, 81 bp, Homo sapiens
  chr11:65264701-65264782
  hyper
ccatggcccttgatagctacacgaggtttgtgttctgattttaaattaatggatgacgtcgagactatatggaggaaatga

SEQ ID NO: 48625 - DNA, 317 bp, Homo sapiens
  chr11:65265756-65266073
  hyper
gagagcctggaagctgaaaaacggtagaaaaatttccgtgcgggccgtggggggctggcggcaactggggggccgcagatcagagtgggccactggcagccaacggcccccggggctcaggcggggagcagctctgtggtgtgggattgaggcgttttccaagagtgggttttcacgtttctaagatttcccaagcagacagcccgtgctgctccgatttctcgaacaaaaaagcaaaacgtgtggctgtcttgggagcaagtcgcaggactgcaagcagttgggggagaaagtccgccattttgccacttctcaac

SEQ ID NO: 48626 - DNA, 211 bp, Homo sapiens
  chr11:65266387-65266598
  hyper
aaactagaacctatttttaaccgaagaactactttttgcctccctcacaaaggcggcggaaggtgatcgaattccggtgatgcgagttgttctccgtctataaatacgcctcgcccgagctgtgcggtaggcattgaggcagccagcgcaggggcttctgctgagggggcaggcggagcttgaggaaaccgcagataagtttttttctctt

SEQ ID NO: 48627 - DNA, 242 bp, Homo sapiens
  chr11:65266933-65267175
  hyper
gtgattaaaataatttgaaggcgatcttttaaaaagagattaaaccgaaggtgattaaaagaccttgaaatccatgacgcagggagaattgcgtcatttaaagcctagttaacgcatttactaaacgcagacgaaaatggaaagattaattgggagtggtaggatgaaacaatttggagaagatagaagtttgaagtggaaaactggaagacagaagtacgggaaggcgaagaaaagaatag

SEQ ID NO: 48628 - DNA, 325 bp, Homo sapiens
  chr11:65267948-65268273
  hyper
aggactgaggagcaagcgagcaagcagcagttcgtggtgaagataggaaaagagtccaggagccagtgcgatttggtgaaggaagctaggaagaaggaaggagcgctaacgatttggtggtgaagctaggaaaaaggattccaggaaggagcgagtgcaatttggtgatgaaggtagcaggcggcttggcttggcaaccacacggaggaggcgagcaggcgttgtgcgtagaggatcctagaccagcatgccagtgtgccaaggccacagggaaagcgagtggttggtaaaaatccgtgaggtcggcaatatgttgtttttctgg

SEQ ID NO: 48629 - DNA, 31 bp, Homo sapiens; identical to SEQ ID NO: 8178
  chr11:65276133-65276164
  hyper

SEQ ID NO: 48630 - DNA, 994 bp, Homo sapiens
  chr11:65306212-65307206
  hyper
gctggggtctggcgccgccctgcgcagcccgcgcccacgtcagacgtgaacatcaatttgcttcgaaagccaagggtaaagaggcacgatctgatttatcagtttctaggaaacaccctctgggaggaaggcaggcagcgcccgccggagaccttacaaccgcccgctaaccggggaggggggccggtaggggcgcctcgggtctcaaggcgccgggagggtctgcgggccctgaaggtccctgggtccgagccacaagtcggggcagaagtgaggccgagctcgcggaaatccctcagtgatcaccgaggtctgggccgagggcggcgtcggcggcgtcagcggcggcgctggggaacgcaggccccgtgcgggcggctgcgcgcgaagccggctttgcagacgcagcggaaggagccgctggtgttcacgcagcgctcgctcttgcacagcagcccgcgctggttcagctctcggcactcgtcgatatctgaaggtgagggcgacaggtgcggcttcgctgagcctccaggcggctcctcaccaccggccccgcccctgcccccacccccgaagcccggctcacccacgcagcgggcgcgggaggcgtcgagctggaagccgccgggacactcgcacacggcgccgcccggccgcggcacgcagcggccactcacgcagcgacactcgtctgaatcctcctctgaactgtcctcatctgcgtggcccggaacaatatggacttcaacactgagccccggccaaaggctaccaaccccgccaccgcccgacccggcagcactcacctcttgggggcttccccaacagcagggggcttgtgtcccagaaggaattgctctcgctctgcgatgtcgggcaatgggaccctgggaggagcagaactggtcagcgacgtccgggtccccgggccctggcccccatcctcgctcccggccaactcctccccgactgccttacccgcgccgcgcggcgg

SEQ ID NO: 48631 - DNA, 30 bp, Homo sapiens
  chr11:65325857-65325887
  hyper
cggcgcggcggcggcgaggggggctgggac

SEQ ID NO: 48632 - DNA, 30 bp, Homo sapiens; identical to SEQ ID NO: 8179
  chr11:65339688-65339718
  hyper

SEQ ID NO: 48633 - DNA, 174 bp, Homo sapiens; identical to SEQ ID NO: 8180
  chr11:65342124-65342298
  hyper

SEQ ID NO: 48634 - DNA, 477 bp, Homo sapiens
  chr11:65343103-65343580
  hyper
tgctctggttaagacgtgggtggctgcaccttggagttgagagctggtcctcgtccacattcacagtatgactctgagcaagtcccttcccctttctgggtctcagttttcccagccgttgaaagggggccagtagtacgtacctcccagggctgcgggcaggaaggaaggcggcccgggcagcgctctctagggtggcaccaagttgctggttgccctctctccacgcagcctctgcgcgcaccgagcgggcactgcggtcgggcgacaccccttccacgcccccctcccccgcccccgctcccgctcccgggtcgcggcgcgaggccccggaagccgggtcgccccgcccccgcgctcctgccccggcccccgccccgcgccggagccccgcccgccttccgacgggggtgcggctccaggaaacggcgcgctcccagctccgcgctcgccacccgacgcgccccaggcgacccc

SEQ ID NO: 48635 - DNA, 30 bp, Homo sapiens; identical to SEQ ID NO: 8183
  chr11:65343818-65343848
  hyper

SEQ ID NO: 48636 - DNA, 31 bp, Homo sapiens; identical to SEQ ID NO: 8184
  chr11:65344969-65345000
  hyper

SEQ ID NO: 48637 - DNA, 30 bp, Homo sapiens
  chr11:65381081-65381111
  hyper
agggctgtccacaccgggttggcataaccc

SEQ ID NO: 48638 - DNA, 71 bp, Homo sapiens
  chr11:65405604-65405675
  hyper
gcagcgggaccccagcgcgggcggcggcggctgggcgggagccccagaggtactggcgggagcaggggacg

SEQ ID NO: 48639 - DNA, 30 bp, Homo sapiens; identical to SEQ ID NO: 8185
  chr11:65405888-65405918
  hyper

SEQ ID NO: 48640 - DNA, 50 bp, Homo sapiens; identical to SEQ ID NO: 8186
  chr11:65419933-65419983
  hyper

SEQ ID NO: 48641 - DNA, 101 bp, Homo sapiens; identical to SEQ ID NO: 8187
  chr11:65420273-65420374
  hyper

SEQ ID NO: 48642 - DNA, 30 bp, Homo sapiens; identical to SEQ ID NO: 8188
  chr11:65487490-65487520
  hyper

SEQ ID NO: 48643 - DNA, 30 bp, Homo sapiens
  chr11:65548871-65548901
  hyper
gggtgaccaaggtgcggtcgcagggcgccc

SEQ ID NO: 48644 - DNA, 916 bp, Homo sapiens; identical to SEQ ID NO: 8189
  chr11:65554042-65554958
  hyper

SEQ ID NO: 48645 - DNA, 507 bp, Homo sapiens
  chr11:65555255-65555762
  hyper
gtgtcaccgctcaggcgaccctcggctccgacgtcgtaaatccagaaaaccgggactcgcatgaggcgggagaaggcactggagcgatgccactttggggggcggggagcgggctggagtttcggccgagatttgtgttaaaagctcagagcttcagccgctcgcacaggtccttcctcctcccccacaacactggtggccgggtcggagtgagggtcgggccggtggggggcgtgggcccccaaattttcgttgggctccggctgctagtcccgcgcagtgagccgagacggtgggacaggcgcccgctgcgccccgcttgcccttaaagcagaggtgggatcgggtctcacctctgctagaaacgcacttccttcaccttgcggagggcacaattgcatggaaagcagctgcagggagcccaccccacagcggagggccaggcccggggaagctggtgtacccagttatttttggcagacgcctagacagcgtcgactgtgagag

SEQ ID NO: 48646 - DNA, 303 bp, Homo sapiens
  chr11:65582777-65583080
  hyper
cagtccaggtccaaaaagtctcgagaagcgcccgggagccaggagaaaagccgagagatgaaaggagatgcctgaggtgccgcagcccaggtctgagccgggctagaaaccgcgtgacaaaacaaagatgcgttcttagccgtgatggaactcccagattagcttggctttcttccttttgttttgttttgttttattcatctctgtcgcatctattttcctctgggcatgtgacacttccactctttctcttctttagtcctcttccagaagttctgttctgtgctggattaggtcaggagt

SEQ ID NO: 48647 - DNA, 30 bp, Homo sapiens
  chr11:65585349-65585379
  hyper
tatttcagatagaacgcactttttaaccac

SEQ ID NO: 48648 - DNA, 848 bp, Homo sapiens
  chr11:65600723-65601571
  hyper
caattaccatgagcccgttccaaggtccccaggttttctctcgcagcatcggcacccccttgcagccccgctccagtggcgaccgttcgcggaccccggcctcgcttggggcgccctggccgcgggacttgtggagctccctagtcctcctaggctgcttaccccgccgctccctcccgtccaagagcggaaacctaaacagaccccccttctccacagacattgtcccctgccctcgcccctggtccaccacccacatccccaccactgcttcccattccctgtccccaccctgccaccctcaccctcttccccttccccttccccttccccactgcctggtgggcgccaaactgggcgagtgcgcacgcgcaggccgcacgtggccgttggaaggaggggcccggaacggcggcacggggttgttgtgggggtcagtcccccggggactggagggagacgcggcacgcggcctctgcgaccctatgaactctgaccccagctcccacactgtcgcctatcaccggcccactctccgtgccgcgtgtcccttaaaagctggggcctgggacaggaacgacagacaatgcagccaatggcgtcacgcgcggtgccccgctacccaatcgaaaggcgtggctgagggaaacgcggtgggaaccgcccccgactccaggcgactccttggccgggcgggggagagcgtccccgtcagctgagagcatcctcactcggtcagttcctcgggcgagttacggggacgacctgcgggagcacgcgggcagtggccggacgctgaagcccaggagagcgatggagacgtatgcggaggttgggaaggagggcaa

SEQ ID NO: 48649 - DNA, 30 bp, Homo sapiens
  chr11:65625138-65625168
  hyper
agccttgggtggggcgcgcgcgccgagacc

SEQ ID NO: 48650 - DNA, 30 bp, Homo sapiens
  chr11:65640432-65640462
  hyper
gagccgcctcccggcgccggaccagggtcc

SEQ ID NO: 48651 - DNA, 30 bp, Homo sapiens
  chr11:65640924-65640954
  hyper
tttgggggcgagggcggcagttcccttttg

SEQ ID NO: 48652 - DNA, 34 bp, Homo sapiens
  chr11:65657803-65657837
  hyper
gcaggagtcaggggcggacgcctgaatcttgttt

SEQ ID NO: 48653 - DNA, 173 bp, Homo sapiens
  chr11:65658811-65658984
  hyper
cagcgtgggcagtccggatcagttgcccctggcctgttcccccgatgattgaaggcactgcttcctccacgccgacgcccgcccggattgctccccgagccccgggaccgctgtggacctcgggacctggacgccgtcctggctgcgcaggaggggccgctggcatggactaa

SEQ ID NO: 48654 - DNA, 410 bp, Homo sapiens; identical to SEQ ID NO: 8194
  chr11:65666907-65667317
  hyper

SEQ ID NO: 48655 - DNA, 30 bp, Homo sapiens
  chr11:65667909-65667939
  hyper
tgaaccactgcgaccgcggggggtgggggc

SEQ ID NO: 48656 - DNA, 111 bp, Homo sapiens
  chr11:65728916-65729027
  hyper
ggaacttaaagccacgaagacactgacttaatgggctctaagtccttccagttctgggatcccacctccgggttaattccgcttcccttgaggagcgcatgcgcaatggga

SEQ ID NO: 48657 - DNA, 121 bp, Homo sapiens
  chr11:65746277-65746398
  hyper
gagctccagcgacacgcccctgggcaccgtggccctgctccaggagaagcagaaggctcagaagaccccctacatcgtgctcagcggcagcggcaagagcatgaacgcgtgagtggctcga

SEQ ID NO: 48658 - DNA, 30 bp, Homo sapiens
  chr11:65769508-65769538
  hyper
gccggcggccgcgacggtagcgtcagttag

SEQ ID NO: 48659 - DNA, 30 bp, Homo sapiens
  chr11:65769852-65769882
  hyper
gtcgaggtccggggcgcctcaactctatag

SEQ ID NO: 48660 - DNA, 30 bp, Homo sapiens
  chr11:65838222-65838252
  hyper
gcccggggccaggccgcacccccgccccgg

SEQ ID NO: 48661 - DNA, 30 bp, Homo sapiens
  chr11:66024896-66024926
  hyper
caaccttctccctgcgcctcagtttctccc

SEQ ID NO: 48662 - DNA, 30 bp, Homo sapiens; identical to SEQ ID NO: 8195
  chr11:66026144-66026174
  hyper

SEQ ID NO: 48663 - DNA, 30 bp, Homo sapiens
  chr11:66035261-66035291
  hyper
tgttgcgggtgaggcggctgctctcatatt

SEQ ID NO: 48664 - DNA, 291 bp, Homo sapiens
  chr11:66035634-66035925
  hyper
atgacgcgcggctgcgagttaggactgcccagtacacgaagaaccctggacaaatgtacttttattagtcttactagaacccacattctcatttaatgttcacaacgtgggtattgggagggcaaggatgactacctccgtcagacagatgtgaaacgtgccaagcccagccctaaattgagctttctaaacaccgagtcgcggtcaggctttccagcactgtcctcaagcctgagtgcgtccggagtgcaaactacaagccccagaaggcaatgcgccagcagtgatggg

SEQ ID NO: 48665 - DNA, 30 bp, Homo sapiens
  chr11:66045471-66045501
  hyper
agtgccgaggggtgcggggtgccgggggcg

SEQ ID NO: 48666 - DNA, 107 bp, Homo sapiens
  chr11:66049840-66049947
  hyper
gtctttccatctgtcgtgggctgggggtgggagacgggaagacgggggtggggtggggggcctacggccatgcccccttcctctctgtctccgcccccagcaaacac

SEQ ID NO: 48667 - DNA, 30 bp, Homo sapiens
  chr11:66059783-66059813
  hyper
ccctcatccagcctcgcccgtcctgtgacg

SEQ ID NO: 48668 - DNA, 741 bp, Homo sapiens
  chr11:66079390-66080131
  hyper
cctaccgaggcctcgcggtggctgtaagtccgtggggccgaggccaggtggcgccaaaggcccatcgacgccatctgcccggctgtccgggcccagtctccgggctcgcccagagaacccgaaatctggacaaacggaaaccgtaggtggaggaagaagagggctccagggccaggttcaagggcatcgtggtgagagatgaggggttcggaggactggtggatctgggcatatcgcgaaggtggtaagggacccaggggtggagtgggcggtgcttgcgccaagagggtgagcctgagtgtgggcggggcgtgcgataagaggctcgctcggtagcgctcttcgcagagccgtatttgtgcgctacgccgcagccagggcgctctgggtgggcgggactccagggcccccaggggcgtggcttgcatctttcgtgggcggccccgggggcggggctccgtgtaggtgaaccgctacctccgctcgatgtgtgaggtgtgacagtcctacgagggcgcagttcttccacttttgtgagcttgagagggggcggagcttgtagctggggacggagcctgaagaggaggttgaggggaacttcacacgtttccctggagggcggagtttacatcatcccccaacagagttaagacctctgagggattccctgcagtgtccagggctctgtgaggcgaagcttgcagttgtgttgggcggggcctgtagcgccgcgtgaagaga

SEQ ID NO: 48669 - DNA, 31 bp, Homo sapiens; identical to SEQ ID NO: 8198
  chr11:66107464-66107495
  hyper

SEQ ID NO: 48670 - DNA, 45 bp, Homo sapiens
  chr11:66139090-66139135
  hyper
aaaggggcagagaagccgcacctgcacctgcgctggggcggaggg

SEQ ID NO: 48671 - DNA, 352 bp, Homo sapiens
  chr11:66176317-66176669
  hyper
tgagtggggcatcccttcctccgggcgccgggctgcacccccttaccctgggcagccgcggggccgtgacgcctggcggagggggcgcgcatctcggcgcgcgccggtcttcgcagtggctcattcatcgccgccgaggcacgccgttgccatggggacgtgatgcaggcgcggggagcgggagggagagggaggccccgggtgacgtccgcgctcttctcgcagctagtctcccgcggcctcccaattcttgcctaatttggaagagagccgcagcccttctgctgatgcgcgcgcgctggcgcctttttaaggcaactggcggagtggcggctccaccagagcctgggag

SEQ ID NO: 48672 - DNA, 119 bp, Homo sapiens
  chr11:66186289-66186408
  hyper
ctacgtcgatgtccccggcaaaccgtagcatgacttccatggtgactctttcagcaccacggacagcggtcggcgcagtattccttcactgcagattcgctcagattgctggaggccat

SEQ ID NO: 48673 - DNA, 1130 bp, Homo sapiens
  chr11:66187354-66188484
  hyper
gtgcaggggtcatggagggtccggcgctgccccttcgcttctcagctgctcccccatcttgcccgcctaggcagggcggggagccctccggagcggtgcggaggcagccaggccccgcccgccgcagccgcggcagccgccggaggattcctgtcctaatatggagctgggattcccccggccccgcccccgcccccggcccgcggggagacagaggctggcagcagggcggggggaagcgctcgcttgggggccggcaacggggggaagggatgcctaagtgcagacccaggtcctcgccgtgcccccacgtccctgcctcagtttccccttcagtaaggttaattagctgagagggaaaccacgaatcactgcagactacagcgctgatgttggtttctattcttggctgtgggaaaacaggatcaacgccaaattcagctggtccctttcccaccggactccctttccacccatcctcgggacttagacccccatgaacaccccctgataagccgccaaggcccgatttgggaagcgggggcgggaatttgttctctaaaaatggccaagggaatcccaggttaaatagtccccagagaggaaccccagcagtgacctgtcccacggaggccaaggaaagtcctccttccctgcatgtgaacgtgaccttgtctgtcaagtaacgagggggatttgtagacaaccctgttcttccccattccctcaactcctcagaaaaattagtgtcagtgccggcccctctctgccctctgcggactcctgccgcgggcttcaggccgccctaaacctggccctgtcgcttccctcaactgaacgcattcagacgccagggtccccacactccattcaagctttcctaacgcagcgccttcctctccgctcagctcccgccaggcttggccccctccgcagcctcctgctcccccctcgcccgcctccctccctctctcattctacgtcatgagatgacgtcggaagccgggcgggaggaggagcccccctccccagtcagcggctcccgctgcagcttgcttagcccagcctcccgctctcccgcccccccggctctaaaacgagccccccacgcctggcaggagctatataag

SEQ ID NO: 48674 - DNA, 213 bp, Homo sapiens; identical to SEQ ID NO: 8203
  chr11:66188570-66188783
  hyper

SEQ ID NO: 48675 - DNA, 129 bp, Homo sapiens; identical to SEQ ID NO: 8204
  chr11:66188852-66188981
  hyper

SEQ ID NO: 48676 - DNA, 30 bp, Homo sapiens; identical to SEQ ID NO: 8205
  chr11:66189282-66189312
  hyper

SEQ ID NO: 48677 - DNA, 30 bp, Homo sapiens
  chr11:66206472-66206502
  hyper
cattcccacaggaacgcgcacaggcactac

SEQ ID NO: 48678 - DNA, 30 bp, Homo sapiens; identical to SEQ ID NO: 8206
  chr11:66233890-66233920
  hyper

SEQ ID NO: 48679 - DNA, 132 bp, Homo sapiens
  chr11:66247854-66247986
  hyper
aggggggcggggttcgcagagccccaatgaatgggggagccggaagcaggaagtgagtttgcgaacggagcagctgctgcaggtgaggcgcggcgcctgggcttttggggtcaaagcgtgtcatcccggggg

SEQ ID NO: 48680 - DNA, 30 bp, Homo sapiens
  chr11:66278022-66278052
  hyper
gtgggaaagcttggcgcccggaacctttgt

SEQ ID NO: 48681 - DNA, 30 bp, Homo sapiens
  chr11:66313839-66313869
  hyper
ctactccccacagccgccccgatattaata

SEQ ID NO: 48682 - DNA, 36 bp, Homo sapiens
  chr11:66314196-66314232
  hyper
gagatccaccccggcgcccccgagtcccgcagttcc

SEQ ID NO: 48683 - DNA, 30 bp, Homo sapiens; identical to SEQ ID NO: 8207
  chr11:66346724-66346754
  hyper

SEQ ID NO: 48684 - DNA, 30 bp, Homo sapiens
  chr11:66406616-66406646
  hyper
tgccccgagagaggcgttcaccactccagt

SEQ ID NO: 48685 - DNA, 110 bp, Homo sapiens
  chr11:66445297-66445407
  hyper
cgctcgagcctggacgcgaccgggccctttctcgcgcgccagctcacgcacgcgcgagtgcgcgctgcttccctccccttcccctcgcgggagccgagtgaccaatcccg

SEQ ID NO: 48686 - DNA, 114 bp, Homo sapiens
  chr11:66494763-66494877
  hyper
tctgcccatacctgaaacccccgggctctccagcgttggaactgtggctgctccgagagggggagggcagacgacatgtagcaggttaagaccggggcaaacctgcacctcaca

SEQ ID NO: 48687 - DNA, 1025 bp, Homo sapiens
  chr11:66725361-66726386
  hyper
tgagccacatccagtacgatggggacaacttgggctcccgatcctgacagacttgggttcgaaccctcagggacctcgcgcgaggcgctttagtcagtttctccatctgcaaaatgggcccgagagcaagaatgaggcagcccgcaggcggacgctgcggaggggcgctcgggggctgcagccgggggcgggtccgggggcgggtccagccggccgagcccccgcgcgagggggaggggcgccgtccgctgcgtcgcgtcgcgcaccgcgcacagcccgtcgctgtctcctccagccgtcactcgcggagcccgcgccgcctttgcgcgcgcgacccttacataagcgtccctcgcagcggtgccggcgcacgtccacccgctccgacccgccgcgggaagaggaccgtgcggagcgcggcggacactcacctcctcgccgtcgccagtcctcgccgccgcctctaccgctgctgcctccactgacagagaacagctgcggtctccgtgcaaccgaacttgctgcagtcccggccccgccttacggacttcctattggcccagacagcccaacccctcccgttattgggcagtgttctccgtcactcctcgcccctaggctctggactcctccctgtgcccgcctgtccgtcacgtttaagccttggcgccccacgtcagccccgcccctcccgtccccggcgagcgcctggataagtggcgaggctgggagagcccgcccctggcgcaccaccgcctactcccttgtctccggagcctcacgtgggccgccggaccctagccgacgcccgcaataggcggaagtggccgggctgtggctcgcagttattggctgtcggcgggggtggggacgttcgattcattcacccgagtagcacgtgtctcccgaagctgcaagcacaacagttcgcactggggctcaggcatcccggctagacgcagatacgcgctggctagcggagaagaggtcgcaggaaaagctaacgttagcgaagggcaggagga

SEQ ID NO: 48688 - DNA, 537 bp, Homo sapiens
  chr11:66790580-66791117
  hyper
cctggatcccggacgcgcttggggatctccggctcggaccccaggagcagagacagcgctcgagcttgtcactttaaattcaagagggagcgggcgggcaagcgggcgagcgcgagggagcgcgcggcgggctcctgggagcgtgcccggactgcggcgcagctccggtccgccgccccggcccggccgagcccccggcccgcgccgcgctcctcggaggcgggagcccggcgacactgcaggggtggcgttgccgccggcggccgggctaggcgcaggtgcgtgcgcgctgcgggaggcgggccggcagctggagcccagccggagcggcggcccctccgcggagcccgggtgagtacgcaccccgccgacccccgtgcgcggccgggatcgcaccctgatcgcggacgcacgcagccccctcctcgggccctgggcccgggaccccagagccccgcgcactccgcgctcctgcacctccgcgccgcgcttgcacacgaacgaatgccgggcaccgcgcacgctgggcgcccttac

SEQ ID NO: 48689 - DNA, 15 bp, Homo sapiens
  chr11:66791246-66791261
  hyper
cgccctgactgtcct

SEQ ID NO: 48690 - DNA, 97 bp, Homo sapiens
  chr11:66824137-66824234
  hyper
cgcggccagctcacagtaggtgctcgggcagcgtttcttcagggacctagacggcctggagaggaagggccccagcccagccgcccgggcctctcac

SEQ ID NO: 48691 - DNA, 15 bp, Homo sapiens
  chr11:66885224-66885239
  hyper
gatttagaatttaaa

SEQ ID NO: 48692 - DNA, 127 bp, Homo sapiens
  chr11:66886029-66886156
  hyper
gccctgggcaggcctgagccgggagcccaggtcccgcgggcccagcccggcggcttgaccccgggagaccctgctttgaggcgggtatcggttgccctggcccaggcctcccggccctcaggttgtg

SEQ ID NO: 48693 - DNA, 30 bp, Homo sapiens; identical to SEQ ID NO: 8213
  chr11:66886903-66886933
  hyper

SEQ ID NO: 48694 - DNA, 121 bp, Homo sapiens; identical to SEQ ID NO: 8214
  chr11:66897391-66897512
  hyper

SEQ ID NO: 48695 - DNA, 241 bp, Homo sapiens
  chr11:66897571-66897812
  hyper
tacaggcgtccgccaccccacctggctaatttttttttttttcttgcaccaaagctttctaaagttagtgatttatttctgacaagtttgcaaaacccaagagagagcagttttctgggttgaactcatacttcgtgtttactcgagtctgagtcacggcacctgacttcctcacaggtgcacctgactgctctttaccacctggctaatttttatattgttttagtagagacagggtttc

SEQ ID NO: 48696 - DNA, 90 bp, Homo sapiens
  chr11:67007553-67007643
  hyper
gcagcagcattgttcgcaggcacaggaagccgcggctgagctgaagggctcgagaaggagcccagagcgctgcacgctgctccctctggg

SEQ ID NO: 48697 - DNA, 30 bp, Homo sapiens; identical to SEQ ID NO: 8216
  chr11:67084674-67084704
  hyper

SEQ ID NO: 48698 - DNA, 30 bp, Homo sapiens
  chr11:67121084-67121114
  hyper
agccaatggcaggccgcctatgcggggcgg

SEQ ID NO: 48699 - DNA, 30 bp, Homo sapiens
  chr11:67139892-67139922
  hyper
cccggggactctttcgaaggtttccttcga

SEQ ID NO: 48700 - DNA, 58 bp, Homo sapiens
  chr11:67141092-67141150
  hyper
ctttaataatcccatccgccaggcccactcgcaggtttttttcgctcggtttcggatt

SEQ ID NO: 48701 - DNA, 400 bp, Homo sapiens
  chr11:67141407-67141807
  hyper
gagccgggggacagcgccggcttcgggtgggcttctccccaggcgttggcctgggacaccgccccctgccccctgtcccctgccgatgcggggtccctgatccaacctacctctgcctgtgcgaggtccctgctcccaccctacctctgcctcctcatctctaaccttccctcctcctcccccttgagtaaatgcaatgacacattctcccaaatgccagcgagctggcctgggagcaagtgatggtgtttttcctgctgccctttgtctgggctgaccgccccccctgcctattgtcccgccgcttgtcccatttccaaaagctagagctaagcgaggcgctggggctggggcaggtgactaaccagctcacaatgccccctgcgggggaggaagaggg

SEQ ID NO: 48702 - DNA, 170 bp, Homo sapiens; identical to SEQ ID NO: 8219
  chr11:67183097-67183267
  hyper

SEQ ID NO: 48703 - DNA, 30 bp, Homo sapiens
  chr11:67188476-67188506
  hyper
cctgtgtctggaggcgtgcggcgcgctgga

SEQ ID NO: 48704 - DNA, 30 bp, Homo sapiens
  chr11:67195791-67195821
  hyper
aaggctaggcgcctcgccactctaggacta

SEQ ID NO: 48705 - DNA, 154 bp, Homo sapiens; identical to SEQ ID NO: 8220
  chr11:67210850-67211004
  hyper

SEQ ID NO: 48706 - DNA, 30 bp, Homo sapiens
  chr11:67211303-67211333
  hyper
ttcccggcccccgacggaacgcacacctcc

SEQ ID NO: 48707 - DNA, 293 bp, Homo sapiens
  chr11:67232108-67232401
  hyper
gaagaactggaagccccggtggcccttgaccgcgcagtagatgaagatcacgtgatagactgcggggcggggcctgtcagcgcagaagccccgcccctccccgcaacaccgcccccagtgccgccccacagcccccgccccttccgccccggtgcccgctcgcacctccaggcaccaacaacaggaagcccggcacgaagaagatggcgctggagacacctgcgggagggaccagagcccggtcagggcgagggggcggaggcttcgaggccttccgggctgccgctgactgc

SEQ ID NO: 48708 - DNA, 62 bp, Homo sapiens; identical to SEQ ID NO: 8222
  chr11:67232464-67232526
  hyper

SEQ ID NO: 48709 - DNA, 30 bp, Homo sapiens
  chr11:67236937-67236967
  hyper
caggcgtgtatgtgcgggggcttggagggg

SEQ ID NO: 48710 - DNA, 376 bp, Homo sapiens; identical to SEQ ID NO: 8223
  chr11:67271841-67272217
  hyper

SEQ ID NO: 48711 - DNA, 30 bp, Homo sapiens
  chr11:67272621-67272651
  hyper
ccgcgctcttggcccgcctgccgacgcccc

SEQ ID NO: 48712 - DNA, 30 bp, Homo sapiens
  chr11:67272965-67272995
  hyper
tgccttccttcccccgggcagtgggaaaaa

SEQ ID NO: 48713 - DNA, 45 bp, Homo sapiens; identical to SEQ ID NO: 8224
  chr11:67275124-67275169
  hyper

SEQ ID NO: 48714 - DNA, 30 bp, Homo sapiens
  chr11:67275599-67275629
  hyper
gttggctgcggggccgctcagccgcgctct

SEQ ID NO: 48715 - DNA, 30 bp, Homo sapiens; identical to SEQ ID NO: 8225
  chr11:67350961-67350991
  hyper

SEQ ID NO: 48716 - DNA, 31 bp, Homo sapiens; identical to SEQ ID NO: 8226
  chr11:67351439-67351470
  hyper

SEQ ID NO: 48717 - DNA, 96 bp, Homo sapiens; identical to SEQ ID NO: 8227
  chr11:67777601-67777697
  hyper

SEQ ID NO: 48718 - DNA, 130 bp, Homo sapiens
  chr11:67806322-67806452
  hyper
ccaggcctcctctccgggattaagcgcctcaggacccgtccgccaggccacagcctgggctcaacctctcccagacttcctggactccagtggagccttgggccgggggcggggcgtccctggcccctcc

SEQ ID NO: 48719 - DNA, 30 bp, Homo sapiens
  chr11:67806653-67806683
  hyper
ggaggagatcctggcgccccacccagttgg

SEQ ID NO: 48720 - DNA, 30 bp, Homo sapiens; identical to SEQ ID NO: 8229
  chr11:67895827-67895857
  hyper

SEQ ID NO: 48721 - DNA, 30 bp, Homo sapiens
  chr11:68039638-68039668
  hyper
gagcaggtctgtggcggaagtgggtgttcc

SEQ ID NO: 48722 - DNA, 111 bp, Homo sapiens
  chr11:68080103-68080214
  hyper
gagccgcgcgaggagccgccgccgccgcgccatggagcccgagtgagcgcggcgcgggcccgtccggccgccggacaacatggaggcagcgccgcccgggccgccgtggcc

SEQ ID NO: 48723 - DNA, 131 bp, Homo sapiens
  chr11:68080740-68080871
  hyper
agttctgagcccgggcgcggggcggcctggccggtggcgctgctcctgtgagccgcgtggctgtgggtttccaagcggactgacacctgccaggtgcccgggcgacccgaatgccccgtgtggccgccggg

SEQ ID NO: 48724 - DNA, 39 bp, Homo sapiens
  chr11:68451834-68451873
  hyper
gagggggggctctccgccgcacccgcctatgatggccca

SEQ ID NO: 48725 - DNA, 786 bp, Homo sapiens; identical to SEQ ID NO: 8232
  chr11:68606632-68607418
  hyper

SEQ ID NO: 48726 - DNA, 30 bp, Homo sapiens
  chr11:68607675-68607705
  hyper
ggtgtgcattctcagcgacacttatgtcct

SEQ ID NO: 48727 - DNA, 30 bp, Homo sapiens; identical to SEQ ID NO: 8233
  chr11:68608210-68608240
  hyper

SEQ ID NO: 48728 - DNA, 30 bp, Homo sapiens; identical to SEQ ID NO: 8234
  chr11:68671473-68671503
  hyper

SEQ ID NO: 48729 - DNA, 31 bp, Homo sapiens; identical to SEQ ID NO: 8235
  chr11:68801618-68801649
  hyper

SEQ ID NO: 48730 - DNA, 207 bp, Homo sapiens
  chr11:68816259-68816466
  hyper
gggccctttagctccgccccactcaggagaaccccacccctccctccccgttctcattggctgggactgcagggatcccctgcgccacagtgccgtgcgcgcgtcagcaaaaacgccagggacggggtctccgcgcctgcgcagtgaagctgggcgccttcggggcttgagcttctgagggtcgggtccagcgcgtgggctgctgga

SEQ ID NO: 48731 - DNA, 161 bp, Homo sapiens; identical to SEQ ID NO: 8236
  chr11:69062211-69062372
  hyper

SEQ ID NO: 48732 - DNA, 254 bp, Homo sapiens
  chr11:69331402-69331656
  hyper
ggagtgagctgctcccgtgctgggaagagcttggctcaggtccatgggaacatggcggcattgaggccatctttctggaagaccacttgtgtgagtcacccaccttcttaaaactcttcagcagctgaaggtgataaaaagtcatgattaaacatgatgctgagtcaaagaagggtcaggaaggaccacatgttgtgtgattccactcccatgaaggtctagagcagggaaatcctcaccggaaacccacagtc

SEQ ID NO: 48733 - DNA, 30 bp, Homo sapiens
  chr11:69379145-69379175
  hyper
atgagatcatccaggcttaacagggtgggc

SEQ ID NO: 48734 - DNA, 724 bp, Homo sapiens; identical to SEQ ID NO: 8237
  chr11:69452651-69453375
  hyper

SEQ ID NO: 48735 - DNA, 187 bp, Homo sapiens
  chr11:69453762-69453949
  hyper
cccgcgggttcctggacggctctttacgctcgctaaccgggcttgcaattttgcgctcgtccctgagccgggaaatcaacgaagttcctagtcgagatctgcccggtccgcctagtaacagcgccgcgcccccattggctcatgctaattccagtttcctctgtcttgcgcccgggatgggggggtg

SEQ ID NO: 48736 - DNA, 1077 bp, Homo sapiens
  chr11:69454808-69455885
  hyper
tgccagccccctcacgctcacgaattcagtcccagggcaaattctaaaggtgaagggacgtctacacccccaacaaaaccaattaggaaccttcggtggtcttgtcccaggcagaggggactaatatttccagcaatttaatttcttttttaattaaaaaaaatgagtcagaatggagatcactgtttctcagctttccattcagaggtgtgtttctcccggttaaattgccggcacgggaagggagggggtgcagttggggacccccgcaaggaccgactggtcaaggtaggaaggcagcccgaagagtctccaggctagaaggacaagatgaaggaaatgctggccaccatcttgggctgctgctggaattttcgggcatttattttattttattttttgagcgagcgcatgctaagctgaaatccctttaacttttagggttacccccttgggcatttgcaacgacgcccctgtgcgccggaatgaaacttgcacaggggttgtgtgcccggtcctccccgtccttgcatgctaaattagttcttgcaatttacacgtgttaatgaaaatgaaagaagatgcagtcgctgagattctttggccgtctgtccgcccgtgggtgccctcgtggcgttcttggaaatgcgcccattctgccggcttggatatggggtgtcgccgcgccccagtcaccccttctcgtggtctccccaggctgcgtgtggcctgccggccttcctagttgtcccctactgcagagccacctccacctcaccccctaaatcccgggggacccactcgaggcggacggggccccctgcacccctcttccctggcggggagaaaggctgcagcggggcgatttgcatttctatgaaaaccggactacaggggcaactccgccgcagggcaggcgcggcgcctcagggatggcttttgggctctgcccctcgctgctcccggcgtttggcgcccgcgccccctccccctgcgcccgcccccgcccccctcccgctcccattctctgccgggctttgatctttgcttaacaacagtaacgtcacacggactaca

SEQ ID NO: 48737 - DNA, 30 bp, Homo sapiens
  chr11:69472531-69472561
  hyper
tgggcagagtgggcacgtggacttcggacc

SEQ ID NO: 48738 - DNA, 32 bp, Homo sapiens; identical to SEQ ID NO: 8239
  chr11:69477504-69477536
  hyper

SEQ ID NO: 48739 - DNA, 30 bp, Homo sapiens
  chr11:69490301-69490331
  hyper
gtccattggccgcgcgcgtggagagccgac

SEQ ID NO: 48740 - DNA, 30 bp, Homo sapiens
  chr11:69500733-69500763
  hyper
caccttgcagaccgcgccctgcactccctg

SEQ ID NO: 48741 - DNA, 1394 bp, Homo sapiens
  chr11:69516890-69518284
  hyper
gttgcaagggtgggtttggagcggctctgggtgggagtcagcgtccagcgtgccgaccaccccctttctctgcagtcctctcacgcaggactccgccataaaacctgaaacaggcgctccgagtacacggagcacggcagaggcaccgagcaattttgagactctaaaatgctttgtcccgctgttcacaaaggagctggttgggccggaggcggccccgcctctgcatcctttctggggtgggggccccgggcaggcgcggccacccccgccctggcccctgctccgccagggagtccggggctgcgtgtgaggcctgcgcgggccgagacctcacacagcctcctctgcgcgcggggccgcgggaggggcgcgggttcgttcctttgaactcccagcctttgttcccggccaccagagccccagcgctcgtacacttccggccccgggacctctgcggttacctgggccttccctgccagcccccaccccctgcccccaccagaaagcgtttacaggacaggtgaggcccgcaggaggaaaagcactcccctggcgcaacatgactccagcgcatctgcgtctaagccacaccgtgctcctggtagattaaaaattaattctaaaaaaaaaatctctcctatcccaaatgcactgttttctgccttgcttgacaattgatttgtttttaaaggaaagttatgggtagatcctcttttttctttcccattctttttttcttcttttatactggagggagggaaacggaggcgaggaccacacacgcgcaggcagaggctgaaaaggcccgaggtgggttttcctgtttaatatcaaaggaggccgaataatgggtttcctcggtccggctaggccggcctttgactcaattggaaatgcaaaggcagcttttgcctattctctggctgctggctgagaccctaaatttccgtaggaaatcgtcggacatgcacttaatcggtctttgcaatctttccctcgaagttgcacgcgggtctgggcggaggaggcgaggaaaccctggattcgaaccagcgcctttctctccttcaggcctccgcccggggacaggcgccggtcccccgccccggcgcatccgccccgtggggacacttaccagcccctgcatcttgccgtcggcgcccatgcagaggtaccgcacgctgtgcacgcccttgatggccacggtccgcagagcgactgccttgatctccagcaaacctaggcgcaggggaagcgagaagctgcagcaaggaccgctgggcccgcaccacgtgggtgcggtcggtccacaagcctgtgcttctccctagcgtcccgcgctgtttggggactaacggagggatcctaacgtccaggtgccaaaacctggg

SEQ ID NO: 48742 - DNA, 1332 bp, Homo sapiens
  chr11:69518514-69519846
  hyper
ggcggatggggtcgccccagccgtagtgcacgtggggccccgcgtccgagaaggcgagggggcgcccggccacggccagccagaggccggccaggatccatacgtggaccaccacacacccgctccgcatggcacctccctggggctctcggcgcagctccggcgatgggggtgcgggaggctgggcggcgaccgggatgcgctgcggggctgtgagtgccgggttgggatggtcgtggccctagatcctggacgcagcgctcctgctctgacggcgcggcggctccgggccggcagccttatatagtagcgccttacgggccccacgggtaggtgcccaagacacccgagcatttcttatcgggattgcatcaagcctccgccccccgcacacacccactcacaccccgcctccggccccagccccagccccctccccgggcccgggcaggcaggcggcggcttcttgtcccagccggggtgaccccgcccaggccgttcggatctgcgggaggaggaggcctcgcttagcggccgggtttcggggaactcctccccaccgcgcagcggccccgaggttcttggctgggagagtttgactttgtaaagcaatcgacaactggggcccttcccccaggcctcaggctcccagtggatgcactcggcgtggggcactagcgggggcggggtcaggaaccccggggccagaggttggggggcaccgagttttgcccccttcaccctctgtcgggaaaagcctcacctcggccttagtgcccttccccttaaaagcccactcgcactccctcccccgactttcgcagccccgcacatctgacgtcaaagccgtcccgtagaattttccccggcagttccgacagtctcaggttctttcagcttcatcttcttgcaattcctgccccgccccttttatccgggtaaattgccccccgacggggggccgggcgcgctctcggccggcggggaaacaatggaagccgcgcggactgtaggtggcgccgcagcctcggcgtccgcctgggctttgcgctcctggccccgcgcccctgcctgctccgcgctcgccccggccccgcggctgtgcgcgagatgcaacctgaaagggggcactgggaaggaggctctcgggcagggtgggcgggccagctgcgggattggtgaaccccagcttctcggctggagggtggtggaggcaggggcgcagggagggaggcctgggcctccgtttcccgttttttgagctgtcttgtgtcgggggtctggtttttgagtccccgagtccctgcgcacggggtcaggaggaacagcacg

SEQ ID NO: 48743 - DNA, 30 bp, Homo sapiens
  chr11:69589107-69589137
  hyper
gtgtaggggacccccggcggccgcacccag

SEQ ID NO: 48744 - DNA, 940 bp, Homo sapiens
  chr11:69589445-69590385
  hyper
tgagcgggttggcccggcggccgttgccccccgcccccgccccttcgcgcctggccgcgccactcactgtcgcgggtgtccgcgtgcgcgccgccgatgcggccgtcggggagcgcctggaggtggaagccgatgcccacgttgcagtagagccgccgcagccgcttgatgcccagcaggtagtcgccggcgccgctctggacggccgcctccttgggctgcgctgccaccggcaggcgcgccaacgagagcgccaccaggctctcccagcggcgctccagctcggcctccagcgtgccgttgggtgcagtgggtgcggcggcgccccctcggcccgcccagggcgccagcaaggccagcaggaccgccgggagcagcgctaccgcggccgtcccgggccccgacatcccggcccgagggccgtgcgtcggtcaggcggtcagtgcgcccgggaagctggggggcagagctgcgcctgtggcgtcccgcgggagcgcacggccgacctcgggcaggagtgcgcaaccgaggaggtgcgggaggcaagcgacggggcccccgggcgccgggctctaccccggctgcatggagcggcgagccgggcggaaagcgcgcggctggagctgggactctgaggagcagtgcgcgcctccctgagcgccaggcccgcccgaggccgagccgctatatatatagcccggcgccccctcctactcgcccgctcccgcggggggccgttcgcgttctcctgggcgcccggggcgctgtggcgttcgcggctggtcgcaggccgcctgccaatcagggccgggggaagggaggaggctggggactagcgccgcgagtgccacctggagggaccccggcccccacccttggctccgcccggcccacggacctgttcgtcccgccccttggcggctcctacacttctgctttt

SEQ ID NO: 48745 - DNA, 31 bp, Homo sapiens; identical to SEQ ID NO: 8244
  chr11:70016124-70016155
  hyper

SEQ ID NO: 48746 - DNA, 30 bp, Homo sapiens
  chr11:70049101-70049131
  hyper
tgacgttcgggctgcgccctccccgccccg

SEQ ID NO: 48747 - DNA, 30 bp, Homo sapiens; identical to SEQ ID NO: 8245
  chr11:70049947-70049977
  hyper

SEQ ID NO: 48748 - DNA, 104 bp, Homo sapiens; identical to SEQ ID NO: 8246
  chr11:70117684-70117788
  hyper

SEQ ID NO: 48749 - DNA, 30 bp, Homo sapiens
  chr11:71159716-71159746
  hyper
gtggccacgtgggccgcgcggagaacgcgc

SEQ ID NO: 48750 - DNA, 30 bp, Homo sapiens
  chr11:71163463-71163493
  hyper
ggcggaacgaggtcacgaaggaaaccttgc

SEQ ID NO: 48751 - DNA, 54 bp, Homo sapiens
  chr11:71163704-71163758
  hyper
gaaaaggcaaacagtgcgctacctgagctacttacacacgtggtacaggagtga

SEQ ID NO: 48752 - DNA, 31 bp, Homo sapiens; identical to SEQ ID NO: 8248
  chr11:71274923-71274954
  hyper

SEQ ID NO: 48753 - DNA, 447 bp, Homo sapiens
  chr11:71318341-71318788
  hyper
agctggcggtgctgctggtgacgctggtggcggccgcggtctcctacctgcggatggagcagaagctgcggcggggcgtgcgccagccccgcatcccgtggccccagcacaaggtgcgcagttaccgctacttggaggaggacaactcggacgagagcgacgcggagggcgagcatggggacggcgcggaggaggaggcgccgcccgcggggaccaggcctggtcccgagcaggctggactcggccgccggccctgcccgtaggaacaggcgcaggggggcgactggccagaggagcagtgaggggccgcctggtccacggactcagcctccctcctcgccggccttagtttaccacttcttaggtcggggggaccccctccgagtcccgcgctgtcttcaaaggcccctgtctcccgtcccccacgttggggacgcccctcccaga

SEQ ID NO: 48754 - DNA, 72 bp, Homo sapiens
  chr11:71639579-71639651
  hyper
aaaatgagtcctaccgaggcaagatggcaggtgctgcagccaggaaaatacatttccgtgtgttttaatatt

SEQ ID NO: 48755 - DNA, 31 bp, Homo sapiens
  chr11:71752006-71752037
  hyper
gactcctaaagccaaacgtatctacaggttt

SEQ ID NO: 48756 - DNA, 30 bp, Homo sapiens
  chr11:71791694-71791724
  hyper
agaaggggtatcaccgcttccggaccccgg

SEQ ID NO: 48757 - DNA, 30 bp, Homo sapiens; identical to SEQ ID NO: 8249
  chr11:71814373-71814403
  hyper

SEQ ID NO: 48758 - DNA, 30 bp, Homo sapiens
  chr11:71823828-71823858
  hyper
taaaccggatgtgacgttgacctaccttag

SEQ ID NO: 48759 - DNA, 228 bp, Homo sapiens
  chr11:71951577-71951805
  hyper
cctcctggagtgttccagggccgtggagagcagtttagggcgccagtaaaccttttgtctagggcatccagtcaaggcgggccaactgaacatctgtacacggagttgtacaaatagacaacagtctgctctagcccggctctcttcggccctgtgcctgccacaaactcagcctcccgggctccgggttttcaaagctgcagcgccggggtagggaaccccaggggt

SEQ ID NO: 48760 - DNA, 118 bp, Homo sapiens
  chr11:71955006-71955124
  hyper
cgccacgcacgagtcgtacgaattgaggtaggagtagtccatcggcccggggggcgggggcgggggccgggccaggccgggtcggggtcggggtccgggtggaggtcggaagggaggt

SEQ ID NO: 48761 - DNA, 329 bp, Homo sapiens
  chr11:71955189-71955518
  hyper
cggccgcactcagcccgggtgcaacgcaagtgcagccagcccggcccgcgcgccttttaacgcgcaggaccccgcggaggggggcggggcggggcgagctccgaaggggcggggcctaggaggcccagacaccgcccaaagccgccccgacccccaccccgaagggtccccgccgccgtcttagggctcagaggtgtggagctgggatgcgcgggaccctatccccggagtccctatcctgccccaatccggaccagaccttcggtctctacacagcgtccgaggccagagggtcccgacccttttcccgggcctccccacctgcggcc

SEQ ID NO: 48762 - DNA, 65 bp, Homo sapiens
  chr11:71955549-71955614
  hyper
cgctcgtgtgaagaagttaattcaattcgctctgataaccgagttattccgatctggcccctcag

SEQ ID NO: 48763 - DNA, 30 bp, Homo sapiens
  chr11:72353328-72353358
  hyper
ggcggcggctcgtccggcttgaggaagacc

SEQ ID NO: 48764 - DNA, 125 bp, Homo sapiens
  chr11:72388172-72388297
  hyper
tcagttctggaatccggcctccgcgctgcccccatagccttgagaggactgcaggctccacaggcttcagctacctctttgccgaagaaggcggcttcttctcagcgcccgcccccgccccgtcc

SEQ ID NO: 48765 - DNA, 328 bp, Homo sapiens; identical to SEQ ID NO: 8252
  chr11:72432831-72433159
  hyper

SEQ ID NO: 48766 - DNA, 163 bp, Homo sapiens
  chr11:72433402-72433565
  hyper
tcacccagaatcccccggggcagacacttcctccccgcccccaggctgcacccccacccaagctgggaagagacaaccaacagtgtccactgatcttgcaggccctcacagggtggatgcccaggaagtcctgactgacaagccctggcggtggcctctccac

SEQ ID NO: 48767 - DNA, 61 bp, Homo sapiens
  chr11:72463658-72463719
  hyper
gcttgcgggtcttccgactgtctcctgaggctcaggtctaacccccgccacctcgcccgct

SEQ ID NO: 48768 - DNA, 30 bp, Homo sapiens; identical to SEQ ID NO: 8254
  chr11:72492523-72492553
  hyper

SEQ ID NO: 48769 - DNA, 30 bp, Homo sapiens
  chr11:72525201-72525231
  hyper
ggaggctccgacctcgctcctgcttatgac

SEQ ID NO: 48770 - DNA, 30 bp, Homo sapiens
  chr11:72852481-72852511
  hyper
gggctggcgacaagcggctggagggctcaa

SEQ ID NO: 48771 - DNA, 319 bp, Homo sapiens
  chr11:72853955-72854274
  hyper
cagtggggaggggggcgcagcatgcctgtgggatacgagaattccggcgttttcttcctctcagcccctcaacaccctactctccctaccagctagatgtgcgcgagagaggcgagcaaggacaagtcgctttgcggctggccgcaggtgccaggccattgcgattgtagggcggaaaggcagttgctctgcaaaggaaacggcggcactctactgcagggcattcaagtcaaacatcactgactccgctgagagggagccaagagaacgttaaggccgaggcccccgtttcacagacggggaggcaagtgcccataga

SEQ ID NO: 48772 - DNA, 257 bp, Homo sapiens
  chr11:72929152-72929409
  hyper
cccggcagtgagagcgtcgccgcccgaccctcccgttgcagcaccggtacagacacgctgaccccgcggccttgtcgctgggcggcgtcccggagcgggtggcgcggtgtctacccgggcgggttgagggcggtgccagggtcagtcaaaagtccgccccgccccctgcctggcccggcttcggggttggggaacagcgcagggaggtgggtagccgggctcccaggcacgtgggtctctgcggctgcggcgggacc

SEQ ID NO: 48773 - DNA, 1422 bp, Homo sapiens
  chr11:73018831-73020253
  hyper
cgacggacccttcagttagcccgcggctccccgggctctccctggcgccgagtcccacccctttcccggcccagagagtgtgcgtctgcgtgcacctgagtgtcagtgtgtacgagagtttgtgagtccgaggttgccatgttggagcccctgggcaggaggtgtttccgcgcggaggctggtggcccgcggtggacgcggcgccctggctgcgagtctgcggagctgagcacgctcagcggttgtgtgtgtctcagcgactccctgggggcagctcggcctgctgggctcccgagggacctctctggagggccagagggtcgcctcagtctgcaagtcctccagcaggctttttcttcttcggctcctccctgattccctcccaccacgcggttcccaggctcgcgcacgcccggagcccaccccctcttttgggcgcgaggccccgccccccgcccccttgcctctgccgcaaagtttatttgcaacaaaagggtgccaggagcgagcagccaagggcgttgggcaggcggacgcagagtcgaggaaccaagcgctgggatcccgcccaggcggtgccgcggtgcccctggtcgctccagccgcggcgggggctgggcctgggggtcggcgctgaggcgggaggggccgcccgggatggagacgttgcggccggtggccacagaaacttgagccgcggcagagaaacctctgctccggtctctgcgtcctcttcccacactcccgtgcgctgctttcggcgtgggccgctgcgctcctagggagtgggggcgcagggggggttggccgcggctgcccgaggccagcccccccggagtgagttacgccactatggcggacggggcaccccggccccagctttaccgcagcgtctcgttcaagctgctggagcgctggagcggcggccccgggctgagggaggaggacacggacacccccggcttgaggcgacgcgcctcgtgccggccgaccacggctgcccggggccagccctctcggcgcgtgtccaagctggcgtctgggcccctggccgcccccgcgcagccgcgcccgctccgcagcctctcgccgtcggttcgccagctctcccggcgcttcgacgcgccgcgtctggacgacggctccgctgggacccgagacggaggcgtcttacccgcggccgcggaagaagcggccgagggcccagcgcgaggagcctggcccagcgtcaccgagatgcgcaagctcttcggcggtcctggctccaggaggcccagcgccgactctgaatccccaggaacgcccagccccgacggtgccgcgtgggagcctccggctcgggagtcgcggcagccaccgacgccaccccctcggacatgcttccccctggcgggtctgcgttcggcgcggcccctgaccggg

SEQ ID NO: 48774 - DNA, 218 bp, Homo sapiens; identical to SEQ ID NO: 8257
  chr11:73087924-73088142
  hyper

SEQ ID NO: 48775 - DNA, 43 bp, Homo sapiens
  chr11:73309241-73309284
  hyper
aggaggagccggcgcggcgccgcgacacgtcccacagcctcag

SEQ ID NO: 48776 - DNA, 115 bp, Homo sapiens
  chr11:73358557-73358672
  hyper
gtcccagtacgcctcgggtcagcatctcttcacgtcactccccctccctggggtgggcaggtccggagggcggggcccgggggcagctgggctctcaggcgctgcgggaggagag

SEQ ID NO: 48777 - DNA, 281 bp, Homo sapiens
  chr11:73372053-73372334
  hyper
ctgggagagctctggaaccagcgttcgtctcgagctgacctcacccttctgggatggctcctcagccctgcggtcggcaatacccattcctgagccggtagcggcccctggtggctactgcgggaatgctgcctcctccccgctctggggcctggcggttgggaatgcccatcgttaggcgcctggtggttgtgcttagcgatctcagggtttcctcgctgctccgccctagcctgccgtagcggacccgtaggttccgggacatccgtagccgatccaag

SEQ ID NO: 48778 - DNA, 102 bp, Homo sapiens
  chr11:73490689-73490791
  hyper
ttgacttgaactggcgggtcttgttgtgccggggctgccacgttatttccagcttttgaggtggattttgcccgctggtgtgccaccgtcagcgcttccggg

SEQ ID NO: 48779 - DNA, 890 bp, Homo sapiens
  chr11:73693776-73694666
  hyper
gagaacacggcagtgcgtgcggctgtgtctgtcggctggcggagggcgcgtcggacgagccgggcgagcgtggacagtcaatcccaaggcgcgcgcagctgggcttcgcagtggggctccgcgcaggcggcggcgcggcttaagcctcgggggcggggcccggggtggggcctgcggggcggggccgggcctgccagctcctacttgggtgcggagaccctggagcagccgcctttccgcggggaccgccccgcctagggttctctccatgactttctccactcccgtttccgtgcgtcccatcaccgcgtttactccttcgttccccgagatggtcactcccttgccactccccgcctctgcctcacactctctcgggccgccaacctctgtgaggatggcaagactgaccgccagaaacaagtcttgtccagtcacacacctcttgccttcccagccaggacggtttctaacagcgtccagcggggccgtgtcttaagtgcacttcctcttttatgggcccagcccccctacgctgggcaaactacccaccctcctgcgagcgagcgcgcggctggctcctgcagggcgggactggggcctcgcgaccggcctcgctgtcgattggttacagccgccgcgttgtcgggggaaggaaccaatcagaactgcagcaacaggtggcccggcaaccgacaacagccgttgggctcggctggggttcgcgccttctcccccggtggagcggcctggcgtttagggaccaggacactaaaggccccggcggggcgggagcacccagcgtgacctcacgctcctacacacagacaagcaaacgggccggcccccgcacgtgacaaggcagagccgggcccaggccagctgcctgt

SEQ ID NO: 48780 - DNA, 30 bp, Homo sapiens
  chr11:73882112-73882142
  hyper
agcgcatagggatgcgccctttgtggactc

SEQ ID NO: 48781 - DNA, 114 bp, Homo sapiens
  chr11:74022543-74022657
  hyper
gccacgctggtcagcgccgagaacgtgtcgccccgagccgcagccctttctgggtctcctgtcccgagcgccagcaccgccagcagcgccgccagccgcgccccaggacccata

SEQ ID NO: 48782 - DNA, 66 bp, Homo sapiens
  chr11:74178339-74178405
  hyper
gtctcacggagagcgcgccgtggcccttggaagggaggcgggaagacccctcatttccaccccagg

SEQ ID NO: 48783 - DNA, 132 bp, Homo sapiens
  chr11:74178470-74178602
  hyper
cgtttgctcgctggacacggcgccctctgaccgagggtggcccaagcgctgcgaccctgtgcattccaccagccccgttccactccgcgggtgcccagcaccgcccagcgcgctctctggctctgggctccc

SEQ ID NO: 48784 - DNA, 30 bp, Homo sapiens
  chr11:74204090-74204120
  hyper
tgcttctgaatatacgatatctgaaaaggg

SEQ ID NO: 48785 - DNA, 32 bp, Homo sapiens
  chr11:74204885-74204917
  hyper
cccaggaccaaaagcgcggggccagactcatc

SEQ ID NO: 48786 - DNA, 30 bp, Homo sapiens; identical to SEQ ID NO: 8262
  chr11:74304076-74304106
  hyper

SEQ ID NO: 48787 - DNA, 30 bp, Homo sapiens
  chr11:74345534-74345564
  hyper
tgctggacatgtcaatttagagaaccaatg

SEQ ID NO: 48788 - DNA, 256 bp, Homo sapiens
  chr11:74394497-74394753
  hyper
ctttacaagcgaaaacaaacacggccacaagcagcccctgtgcgacgcggccccgcgcccgccagcgccgccgccgcccggtcaaagccggctttgtgcccgtcccgccgcccccgcggcccaggcgattttaattagcgtctgggtctgcgccgggagatgggaatcaaagcccccgttcttccagcgcccccaccgcggcccccaccgcggcccccgcctctcggatccccgcggctccgcgcacccctgctgg

SEQ ID NO: 48789 - DNA, 30 bp, Homo sapiens
  chr11:74441973-74442003
  hyper
gggaggaagggagacgaaaaggacacggag

SEQ ID NO: 48790 - DNA, 30 bp, Homo sapiens
  chr11:74442532-74442562
  hyper
tggcgctggcctagcgctggcgcctcctct

SEQ ID NO: 48791 - DNA, 215 bp, Homo sapiens
  chr11:74459625-74459840
  hyper
tcaaagtttaacatcgttcagaattgccagtaaagcccctcagttcccacctctttcagttcagtaagaggaaactgcaaggacttttcgagagtgcggctgatgaccgcataataaagaataactaataaatattaatgaagtatcccctctggccaatcaggtctgaggagaaccctctttgggctcacagaagcctcgcccctcatgaatat

SEQ ID NO: 48792 - DNA, 143 bp, Homo sapiens
  chr11:74660137-74660280
  hyper
taggcggcaaccgacggccgggacgtctaacctcaagtcccagcaagccccgcggccacgtcctctgactacctcgcgccagcaagacccaaactacggatcccgattgactccgcgcggcgcgtcacgctgtcagctccagc

SEQ ID NO: 48793 - DNA, 1001 bp, Homo sapiens; identical to SEQ ID NO: 8264
  chr11:74951727-74952728
  hyper

SEQ ID NO: 48794 - DNA, 388 bp, Homo sapiens
  chr11:74952948-74953336
  hyper
cgcggacagcggcgccgacgctcgcggagaggaggcggaggccgccggcccggagctggaagcctcctacgtgttcttcgggctggtgctggcactcatcggcctcatcttcctcatggtgctctacctaaaccgccgcggcatccagcgctggatgcgcaacctgcgcgaggcgtgccgggaccagatggagggctaccactaccgctacgagcaggacgccgacccgcgccgcgcgcccgcgcccgccgcgcccgcgggctcccgcgccacctccccgggctcggggctctgagcggcgcccccgggctcggggcttcccttgcctggcccgaagccgtggagatgagacacccgcgagccccgagctctgagaccttcccctgac

SEQ ID NO: 48795 - DNA, 715 bp, Homo sapiens
  chr11:75062272-75062987
  hyper
cggttgccagtgtgtgcgccagcatgcctgtgccacgggttagtgtgcccgtgcgtgtattgtgtgtcaacctgcccccgtgcgtctctgcggctgccggccaatgctgggtgtcagcgagctgtgtgtccgggccaggagctgcggcccacatggggcggcccggccctcgccctttgggtccccccgcccacggccctgccggggagaccacacaggagacctcgggtggaggagagctggtactagatcccgcggtggccgcgaacgcagaaccaggacgcaatcggagcccccgcccgtgtcctcgccgaggtcgcccccacgcgccccccgccgggcggccgccctgcactcaccgggtccctttgtcgcccatggtccgcgacggtcgcagggaggtccgcggcgtcagcgcccaggctggaaaatccccagccagcaggaggagcgcgggccagcccgctcccggctccctgctccgcctcctccgctctcccggccgccgccgccgcccccgcccccggtccccgcccgccgcccgccgcgtcgagcagcgcagcgcccgggccgcggccaggggcgtggaaccgcgcggggtgtgtgcgtgtgtgtatgtgtgtgtgtgtgcgcgtctgcgtgtgcgcgcgccgcccagcgaggcagggcagcgcggcgggacgcgtcagggccccaaggtcggcgtttgtggtgg

SEQ ID NO: 48796 - DNA, 15 bp, Homo sapiens
  chr11:75095705-75095720
  hyper
cgccccctagcggcg

SEQ ID NO: 48797 - DNA, 30 bp, Homo sapiens
  chr11:75110811-75110841
  hyper
ggttccaagtgaagcgcagagagatgggca

SEQ ID NO: 48798 - DNA, 38 bp, Homo sapiens
  chr11:75140839-75140877
  hyper
agcaggcgcgagcctcgagcagcagcgggcggcactcg

SEQ ID NO: 48799 - DNA, 930 bp, Homo sapiens
  chr11:75140939-75141869
  hyper
cggcaggcgcacgtgctccagcaggcgtcgcagctggccgcggcgggccggcgcgtcgtggcgcacccagcgcatggccgcttcaaacacggcctcctcgcgcgccacgcccagcgcggggtccgccagcagcgccaccacctcgtcaggcgccagctccaggaagtcggcgtggcgcgccacctcggcgaaggcctgacgcaggacgcggccgcagcgctcggccagcggggccagcgagaaggcggcggccacgcggcgcagcgctaggctgttggcggcgcgcaggcggccctcgagaaagcgcacgcaggcctcgcgcaggcccgccacgcccagccgctccgccagcgccagcacggccgccgcctcgtcctccgcgcgcagccgcacgcccgctccgtacacgtagtcgagcaccacggccagcgccgccgccgccccggccgggctcgtgcctggcgcctcgggagctactggcaccactggcaccacggccgggccgcgctcgggccgcccggccgcgaacaagctgcggaagtaggcgctgcccgcgctgagcgccgcgcggtggcacggaaagtcgcgcccgccggcgcgcagcaccacgtcggtgagggtgccgctccgccggtaggcgttcagggcctgcagcacgcgctgcgcgtggcacggacccgcgcacggcgcttcgcagcccggctccgactcctccggcgcatggccttgccgcatcctgccggggagagaacacaaacagcgtcggggaagccacctggctgcgcccgggagaggcgacagccctcatccgtttatttcctctcttgaccatttgttcagcgactctcccctccgttcagcatccaggttccttacggctacagtgccccagccccgcctcaccagcgcgacattctgccctgcctaccc

SEQ ID NO: 48800 - DNA, 30 bp, Homo sapiens
  chr11:75236444-75236474
  hyper
ttcccgggcgctcgcgctgttccaagctgt

SEQ ID NO: 48801 - DNA, 31 bp, Homo sapiens; identical to SEQ ID NO: 8270
  chr11:75237128-75237159
  hyper

SEQ ID NO: 48802 - DNA, 453 bp, Homo sapiens
  chr11:75294168-75294621
  hyper
ggccgtgtggggcgtcggcaggtatcacgggtggggtccattgtgtgaggactaacatcgcggcctttccccagaccagccaccggggactccagagaggcctcggcccagctcccggaaagggtctcccagccaggccttctagcggcccaaagcgggtaggcagagcgcagataccggggcctctttcgcccaccctcgccagggcactatccttcccaccggcccgatcccgcgtcccgaggtctcgcggggccaggctgcacgggcggcggagcccggagcccggggcggggccggagatgagcctgcaggcggggggctgtgcgagtgcgcggggacgggggctgctgtttccgagccgagagccctggtagcggggctctgtgggcggagacgccctcccgagcctgggcatcttcggagtgggactctcgggtcggagttccgccg

SEQ ID NO: 48803 - DNA, 89 bp, Homo sapiens
  chr11:75294662-75294751
  hyper
cgggtggggagcctcccattccagagaccccccgactccctgcccctcgcggcgtaggggcgccctttctgcggcgccgcggggccgtc

SEQ ID NO: 48804 - DNA, 853 bp, Homo sapiens; identical to SEQ ID NO: 8271
  chr11:75378395-75379248
  hyper

SEQ ID NO: 48805 - DNA, 935 bp, Homo sapiens
  chr11:75379282-75380217
  hyper
cggcggggcgcccgggtgctcggtggcctccgagtacttggtgaaaaccagcggcacagcgatgtccgctttgtccaactggttccagaagcgggcgatgcagcaggccctcgtgatgcacggccacgccatgatgctagctgaaaagccggcctcctctttcttcttgtggttctaaagcaagtctctataatcttccttcagcctccgatcctgaccggccaatgtggttcccaccgttttctacccccgatcagccggagctagttcgccctcctccctcagcgagcacccggggagagctgtcctaggagagtctgtagagtccctcgattaccggtcgcaaacgcctttgggagcgcagtctgctgcgagcgccgaagggtgagacgcacggcgttcccgagtccccggcgagggtgtctgggacgcgcccctccctgcggctgcggcggcgcacagacctcggtcgagcgaggcgacgtgaggagaggtggctacaggcttaagccatggcgcagaggaggggccgggcggtgtggccgcagggtccgcggaccgggctcgagtctccttcctgccggcgtcctagtgcagccggccacctagcagggctgggaggccatcacctccagcggagaccgagcattgctgcctccgccgctgcccgcgaggatgccgcagccgccgccgccaccgcctcttctcctgggaagcgaccccacccttttctgcagctctcggtctccgccgctgcccgcgaatgatgctgcagccgctgccgccgccgcctctgcctctgctgcagggaagcggccccacccttttatgctgctcagcagtgagaaaaaaatccaggaacgatgctgactgaaagagtgctgcagaaaaaaacaaaacaaaacaaaaacacctgctgtcgtcagcttgcgctg

SEQ ID NO: 48806 - DNA, 386 bp, Homo sapiens
  chr11:75863300-75863686
  hyper
caggacctttgagtcacgtctctgcctgacctcagccctgcgggccccgttcccgccattccttcctgcctctcacgttgactgggctccccctgtcggtcggcactggctgaacagccatggagtggcgctttggggaaaccacgggcgaccaggaaagatctcaggcaagcctcgggtaagtgagctgtaaactgagacctgaacccagacacagcccatgccaggccgagcgaagagcctgtgcaggggcttggagtagagaagagcacggctcctgtgaaggattcagaggctggagctgggcgatgggccaccgcgcggaggaggcgcgggcggtggtccgagttcctcaagggatctacagacggcgcccctcctaccca

SEQ ID NO: 48807 - DNA, 30 bp, Homo sapiens
  chr11:76155364-76155394
  hyper
tgacagagatagcacgagatatcactacca

SEQ ID NO: 48808 - DNA, 30 bp, Homo sapiens; identical to SEQ ID NO: 8274
  chr11:76155906-76155936
  hyper

SEQ ID NO: 48809 - DNA, 30 bp, Homo sapiens
  chr11:76156382-76156412
  hyper
cggtgagtccaggtcgtctggctgggtatc

SEQ ID NO: 48810 - DNA, 718 bp, Homo sapiens
  chr11:76381597-76382315
  hyper
aggcgcgcgacagtgcgccccccgagggccggccagcctcgcctgcccggcggctcctacctggctcagcgcggccgcagctcctctcccgggcagtctcggcacattttgcgcaaacccgcccccgggtcccaccccgcgccagaccccggggtcacggcccgaggaggagcaggccgctcagctgccccaccggagcccccgcgctccggctgcaatttaaatacctctcccgccggcccgccccgccacgcccccctctggcgaggccgtggggtcctagcgcctggccccgtgcctcggtttatccggagccggcgggggcggagtggggtggggcggcgaagcatcttcaccaccctgggacctcggccgggaaggggcgggggcccagtgtggggggatgagagggcgggagggagaggggttgcagaggaagcgccgtgggagcgaggcccatcccagcggccgccgcacgtgcagttcgcggccccgcggggtccggaggggggcgcggtggctctaggagccgcaggtccacagaggaaatccggcctggccccgatttcccagctgctggcgccgccgcacttaacgcgggggcaaacaggcgaggtgacggcggggctgaatgcggaaggaaatgacccttcgctggccctggggcggccgcggagggggttccccgcaccaagccgtccactctggtgggtcctgg

SEQ ID NO: 48811 - DNA, 31 bp, Homo sapiens
  chr11:76466226-76466257
  hyper
actaaaaatacaaaaacgtctctactaaaaa

SEQ ID NO: 48812 - DNA, 30 bp, Homo sapiens
  chr11:76493861-76493891
  hyper
tggtttcttgctcccggtagtccctgaacc

SEQ ID NO: 48813 - DNA, 375 bp, Homo sapiens
  chr11:76494602-76494977
  hyper
gacgcctagggctgggcgggagtggggaacgccgacccaggggagaggtcttgcgggagacaaaggctacgcccaggggccgtgtgggtctttgtgcggacacgtgcatctcacgtttgtgggtctttgtggatttgcggtcggggacgcgccgctgtcggtgcctttgtgtgtccgtggctttgcgcggctgctttgcgcccgtgtccacgtttgcgggcctgcgcttggctgtgggcgtcggtgggcgcatcgcgtgtctccgcgtacgtggtcggtgcctgccgacgtgtctgggctgggtgtccgcagagggtgtgcgcaccgagagcccaacgccgccccacccccccgctcccccgccgtcccctcggg

SEQ ID NO: 48814 - DNA, 30 bp, Homo sapiens
  chr11:76495274-76495304
  hyper
cgttgccctccccgcgcttcttggaaagag

SEQ ID NO: 48815 - DNA, 30 bp, Homo sapiens; identical to SEQ ID NO: 8278
  chr11:76510451-76510481
  hyper

SEQ ID NO: 48816 - DNA, 31 bp, Homo sapiens
  chr11:76682667-76682698
  hyper
atatgaaaaactcaaacggtcagaagattga

SEQ ID NO: 48817 - DNA, 1394 bp, Homo sapiens
  chr11:77184260-77185654
  hyper
gactcggtcccggaccggtactcgtgtggcctcccggctccagcctggcctggccccgccccgccccttccctctcccaggtctctcgaatcgcccggcgtctgagacccgcgaccccgccggtacgcgcacagggggcctttgttggcccgacgggagcgggcctcgcggggcgccgcccgcctcaccttacctggcgcctcctcccgcccaggcgcccggccccgcaacgcgaaataaatgggcccagacccccactccacccgtccccacccccgcgccccagccctggcagcccgggacgcgaggggtactgggcggtaggcccgctctcaccttccgcgctcgctcagctcctctcggctcctcctcctcctcccggcggtgggtgccgcctagccgggagtgagggcgcgagtgtgcgcgagctaccgcttcactttctccctcctgccgccgccgccgcgctgcccgtggcggggctcccctcaggacaggggaactgcgagggaagggatgatgggggggcgggagggagcgaggcgacgcgggcggggggggaaggggggactgaggggcgaggtgcgaagggctcagatggcctctgaggcaggaggtggtaactggatgcggagaccaggttcctcgagggggctcacgaaagcgcggggctccgtggaaaagggaatgagagtccaagggggaaggcgtctgtgggggaggactgcagagcctgtgagggaagcgcgatgggcgagcgagggggcgggagcgtgtgggggaagccgtgagggggcgtctactgtgcagccaccaccttcggctccggctgcagccgcgggagggcagcctcccccgcccacagccgcgctattgtacgccgcccggcaggcctgaccgcctagttcactggctcccctactcctcctcctcccgcctcctcctcccctctgccctttccccttctccccctccccctcccccactccccctccccggcgcggcggcggcggctgcggctccggtggagccgtgcccgccccgcctcccgcaggtgagagggggcggggagggcctgaccgacccgtgggagcgaggccaaaccctggcccgcatgagggcgaacgcctgggattacgtcatcggcgcgtgacgccagaggctggggaatcacccgcttgctgcgtgacgtcatcgcgtcgcgtcactgttctcggtccgctgtccgtggcgggttgtttccgtgcagcctttctatcagacaattttgggacgatttctgggagggctactgtagtagtcaggatggagaaagacggctaacttccggcgctgagggtccttttcaggttaacaaagcaccaccgcatctatgagctcgttgtcaagggctg

SEQ ID NO: 48818 - DNA, 83 bp, Homo sapiens
  chr11:77300372-77300455
  hyper
cgcccactaactcacccgccccctgcgccgcgtctcccctctcaatttcagtcgcccattgataaaaacgaggtggctatgtg

SEQ ID NO: 48819 - DNA, 30 bp, Homo sapiens
  chr11:77348585-77348615
  hyper
ggaggagggcggcgcgcaggaggccagcgc

SEQ ID NO: 48820 - DNA, 30 bp, Homo sapiens; identical to SEQ ID NO: 8282
  chr11:77531376-77531406
  hyper

SEQ ID NO: 48821 - DNA, 30 bp, Homo sapiens
  chr11:77532757-77532787
  hyper
gttccacttcggggcggggcgggggcagtg

SEQ ID NO: 48822 - DNA, 30 bp, Homo sapiens
  chr11:77790781-77790811
  hyper
tgcgatcatggtgacgccgtttccacttga

SEQ ID NO: 48823 - DNA, 30 bp, Homo sapiens
  chr11:77850513-77850543
  hyper
agcccctggccgtgcgagtcccttactatg

SEQ ID NO: 48824 - DNA, 30 bp, Homo sapiens
  chr11:77850872-77850902
  hyper
ctagttcatgcttgcgttgaaagagtggtc

SEQ ID NO: 48825 - DNA, 44 bp, Homo sapiens
  chr11:77899881-77899925
  hyper
tcagagtggcagctcgcggggtggcccccgctccggctccgccc

SEQ ID NO: 48826 - DNA, 30 bp, Homo sapiens
  chr11:78129381-78129411
  hyper
acggacctactacgcgccggagcctttgct

SEQ ID NO: 48827 - DNA, 30 bp, Homo sapiens
  chr11:78285819-78285849
  hyper
caattgtaaacctacgaacagaacccgggc

SEQ ID NO: 48828 - DNA, 108 bp, Homo sapiens
  chr11:78673197-78673305
  hyper
gacccccaggctggcggagccacttttaactaagaatgaattagggacaaactcttcctcagagtctgagtccggggttggctgggccacaccgttgcctagcaaccg

SEQ ID NO: 48829 - DNA, 30 bp, Homo sapiens
  chr11:78789409-78789439
  hyper
gtgtatgtgtaaaatcgtgaattttacttt

SEQ ID NO: 48830 - DNA, 30 bp, Homo sapiens
  chr11:79148487-79148517
  hyper
ccgcgcggcgcttgcggctggaacttggcc

SEQ ID NO: 48831 - DNA, 30 bp, Homo sapiens
  chr11:79148874-79148904
  hyper
ttcctggattcccacggctggaccagagcc

SEQ ID NO: 48832 - DNA, 545 bp, Homo sapiens
  chr11:79149330-79149875
  hyper
ttctctatcaaagcccatcaacgtgatacacaggctgcggcgctggagggaagcggcgaaacggggagaataaacgcaacagaagcaaactgctgtctgcagaggcgagaggcgaaggaacggaagccatacccgaccccagccccatcccgtccccatcagcgccgggctagcgcaggaaaccaggaataggtgtaggtaagggtggcagcccggcagagccagcgttctactccctctaacccctcgccagcgtgggcctggatggctgggctgcctgggcatctccaagggggaccaggcaccgcgggcaggtttctaaacacgtgaagggcacagggcttgaaagacaaggaggggcgcccaggaagggcggaaaagaggggctttggggctccccaggacaccaagtcagtttctgaaaacggcgttccctggaaggccttccaacacctccgagggaagacttggagctctgaagacccaatgaaacctcagttctgactgactcctcctctgcgatcaattccggatgcccccactta

SEQ ID NO: 48833 - DNA, 136 bp, Homo sapiens
  chr11:79150290-79150426
  hyper
tggctgcctccctgcgcccctttcactgcgtcgatggtttacagataactgcatttctataaaccctctctccacggttagggggtgggagggagttagagatcgggtgggggcttggcgcggtactgttgagggc

SEQ ID NO: 48834 - DNA, 935 bp, Homo sapiens
  chr11:79150891-79151826
  hyper
gggagccctccaagcgtccatctggcggctgcagcctcagttggctcctagacgaacatcaataccgcggccgggcgcccggtgaggagaggcgggcgccccgcgggttgcagagggcgaggagctggggtcgcatctccaggatctgagctccaaccaccgcccgtgcggggctgctgcagccggcacttgccccgcagggcaggctgcagccgctgaagcccggcgccgcctcgcgggctcctccagcgcccgacgggggcctggggcgagctagtctgcagaggggctgcaggcgaccgggccggggcggggaacgggatccgggagaggcagacgaacctggggcgcgccgcctccctcccacccgcttcccacctccctgccctcccccaacccttgctcccaggctccagtccgcggcgggctccgggggctgcggcggctccaggctccagaacagcttgcctcttcggccacccgcgccctagcctccctcctcctgggccaggggagcaagcaaacatctcccggagccctcggcagccgcgtgagctacccgaaccctgcccgggccagcagtgcagagggcgatggagctggcgaggcgtcgccgcggtccccaaggcgcttttccgtagagcggatcacgccgccttaccgtggctgcaggctgctaccgccggggaagcggcgaggacggcggcagggaggcaaggcgccgcgccggtggctcctctctctctcggcggcgcggctcctctgctccgcgagccgtagcggggcgcccaggaaggagcaggtccgggctctgcgctcagctccagcgagaccaacaatagctcccgcggggagcggagccccagcgagcctccagccgcgcgcgcacgaccggctcccgctcccggccgctcccggccggcgtccctgccagc

SEQ ID NO: 48835 - DNA, 195 bp, Homo sapiens; identical to SEQ ID NO: 8285
  chr11:82443373-82443568
  hyper

SEQ ID NO: 48836 - DNA, 285 bp, Homo sapiens; identical to SEQ ID NO: 8286
  chr11:82443651-82443936
  hyper

SEQ ID NO: 48837 - DNA, 1099 bp, Homo sapiens
  chr11:82443948-82445047
  hyper
cggcgccgtagtcgggccccagcagctcaaagaactccacggcctccgcgcccttctccaggtcgcccaagctcacgtccggccccgacgggccacacccgccgccgcctgcccgggacggctccgtgaagaaggacggaggcagattgcgtgcccgcagcgggaccttcctggcccctgggatcgccgtggcccccgcggggcctgccacgtcccctcccgcgcccccagtgcccgcacctcctagcccggccgccggcgcagccacctcaccccccgccggctcggcacccccggggacgtggcgcagcgagtcgaagagcgcggccagacttcggctttgcaagctggcggccgcggcggcctgcgacgcctcccgccggggggcagccttgccgtgggccggggccgcgactgtcggggcgctaggggcggccagcggccgtttggctggcgtgtcggcggcgctcggggagggcgggccggggggcgcggcgcccatgaggccgctgcagcgcttgatctgcttctgcaggtacttgcggtggttcaccttccgcttcgacttgcccggcttgtccagcgccagcttgatgttgctggacgccgagtcaatgaagctgagtagatcgcgggtggcctcgcgcacgtcccctccttcggctcccgacagcagcgcacccgccggagccccggtctcatcgtcctcgaaacagcagcccttgtccagggctccgaaggcgccccctagcccgtccggggagcccccgaagccgaagggcacgaaagggtgcgtgctgaggagcgccgcctgcaccgccatcgccgcggctcccgggctgtccgcagcgctgcccgtgcgcccccgccagctcctgcccgccgcccagacccagctcccgccccggcgcggcgcgcgcggcgcagcctactagttccgggcctggctcgctgcgctgcctcccgggggagctcattaggtcttgtaagcaaggggcggagggagggagcgcgcggcgaccgtcccggtggtagaggggaggggcttacttagcctggcttggaggagtggggggtcgctttagttttctgagctttc

SEQ ID NO: 48838 - DNA, 30 bp, Homo sapiens
  chr11:82782881-82782911
  hyper
gagcgagcggcaatcgcaagcccagcagca

SEQ ID NO: 48839 - DNA, 30 bp, Homo sapiens
  chr11:82867946-82867976
  hyper
agtcccttatgaatcggccaatgagaaggg

SEQ ID NO: 48840 - DNA, 30 bp, Homo sapiens
  chr11:82868540-82868570
  hyper
ggattatcagtcatcgctcgaagacctgac

SEQ ID NO: 48841 - DNA, 30 bp, Homo sapiens
  chr11:82868916-82868946
  hyper
cgcattgtatatcccgacacacacacgctt

SEQ ID NO: 48842 - DNA, 30 bp, Homo sapiens
  chr11:82905184-82905214
  hyper
ttctgcagcagcgacgtgaattttagtgaa

SEQ ID NO: 48843 - DNA, 30 bp, Homo sapiens
  chr11:82905813-82905843
  hyper
ttctcacttaagcccgcaacagccttagcc

SEQ ID NO: 48844 - DNA, 30 bp, Homo sapiens; identical to SEQ ID NO: 8289
  chr11:82997453-82997483
  hyper

SEQ ID NO: 48845 - DNA, 493 bp, Homo sapiens; identical to SEQ ID NO: 8290
  chr11:84148447-84148940
  hyper

SEQ ID NO: 48846 - DNA, 238 bp, Homo sapiens
  chr11:84431425-84431663
  hyper
aacaacaggggacattccttccgggctgcggcagtggcagctcgctgggggacccaaacgctgtgctcgccgggcacatggagcgacagcctagaccgagctgccgcttcgatcactgccccctgcacccgccgtggccatcccggagccccggtggaagcaacgccgcgggcaagtaccgagcctctcggggtctcccttccctggggaacgaggcgtgtggggggagggacagaac

SEQ ID NO: 48847 - DNA, 425 bp, Homo sapiens
  chr11:84431902-84432327
  hyper
acatactgcagctcccgatttggtaaaaagccagtggcttgctgcaatccagagtcactgtggggagcgctggccgggcaagtggggtgggaggaaggggctgagaaagggaggaagcgctgtgcttgccagactggccctgcctttgggcgctcttggtgccacgaaggagtccccagcgtgggagcgcgggacctccccgcgctgacgtgaccccgagactgcatttggcccccaccgctacagccacccgagggtagaagacctccgaggccgacttcccgggaaggggaggcccgctcggagcgcggcagggaacttcctcccagccctttgacaacagcatgccttgccgggggcagagggccagcaaagaaatctggggtagaaaacaggctcaaaatgatttcgctggtgccctacga

SEQ ID NO: 48848 - DNA, 30 bp, Homo sapiens
  chr11:85338458-85338488
  hyper
gcaggatgagttggcgaagcagatttcttc

SEQ ID NO: 48849 - DNA, 30 bp, Homo sapiens
  chr11:85339606-85339636
  hyper
gcgttctgggtccccgcccaccggcaagtc

SEQ ID NO: 48850 - DNA, 30 bp, Homo sapiens
  chr11:85359002-85359032
  hyper
gcccgcccacgccgcgtcacgagtcagcca

SEQ ID NO: 48851 - DNA, 30 bp, Homo sapiens
  chr11:85521977-85522007
  hyper
ctggaacccgagtgcgcacctccgagtcgc

SEQ ID NO: 48852 - DNA, 30 bp, Homo sapiens
  chr11:85522560-85522590
  hyper
gaagggacagccaccgcgcagggaaagggg

SEQ ID NO: 48853 - DNA, 161 bp, Homo sapiens; identical to SEQ ID NO: 8293
  chr11:85780825-85780986
  hyper

SEQ ID NO: 48854 - DNA, 145 bp, Homo sapiens; identical to SEQ ID NO: 8294
  chr11:85955559-85955704
  hyper

SEQ ID NO: 48855 - DNA, 30 bp, Homo sapiens
  chr11:86014098-86014128
  hyper
aaccagagaaggatgcgagtagtgtgtttc

SEQ ID NO: 48856 - DNA, 30 bp, Homo sapiens
  chr11:86382375-86382405
  hyper
cccccattttctacccgcattttctcttta

SEQ ID NO: 48857 - DNA, 932 bp, Homo sapiens; identical to SEQ ID NO: 8295
  chr11:86382674-86383606
  hyper

SEQ ID NO: 48858 - DNA, 30 bp, Homo sapiens
  chr11:86391915-86391945
  hyper
tatctcttttcttatcggggcatgcaaatg

SEQ ID NO: 48859 - DNA, 30 bp, Homo sapiens
  chr11:86503647-86503677
  hyper
aagctgaaaataaaacgaataaaattacaa

SEQ ID NO: 48860 - DNA, 1142 bp, Homo sapiens
  chr11:86510899-86512041
  hyper
gtgctttgggccccacgcacagcactgagtgctgtaaggaaatgcaaagcattggtggccctgccatgggaatacaggtttctgttctttggaggcaccggagaaactaggagttcggtcagcaccttaaggcgctaaaagtgtacgtgggggtggggcgcacacaggttctgaaccaattcttcaaatttgcccagggctccccatacaccaggtgtggcccgcgtccctagttctaggctgttgggggaggggtcgccttttgtaggggacctggtctttttgcgagctggcagcgtgctcccagcagcgaaggccgtagtctcgctcaggaggccgcgcgccagacccggggatgcgcggtgttcaaagggtgacggcgcgcgggtcccgggcaggagagcccgccagagccggtgctgcctggcgccgagaggcccggactggcgactgctgccgcgccaccggggcccacctgcgcagggacgctcggcctcaggccctctgggctgctccaccctgctccggccgcaggcgagcggcgaggggaggggggcacggtttatgtgcagtggggcgggcggcgtccgcgcggcttccccgaggccggaggcggggcgggcgggcctcgggtggcgcggggggcggacccgccagctgcctgcgctgctcgccagcttgctcgcactcggctgtgcggcggggcaggcatgggagccgcgcgctctctcccggcgcccacacctgtctgagcggcgcagcgagccgcggcccgggcgggctgctcggcgcgggtgagtgcgggcaccgactggggcatccgcccgggcgcgggagaggcgaggcgccgggaggagcgggacaaagggccgggtatgcgcggggtagggtaactgcgggctgccggaggcaccgcaggacttcgccagggcagtcctcggggttccaggacacgggctgggggcctgaaggagctctggggagacggcgggggctgcaggtcatttggattcatgcagtgtcacccatgaaacggatggggaaagaagatcctgctgtcttgggtgcaggatgttggttgggaagcagagagagccggctctcggcaagctgtccttcggcgggggcgatggctacacccc

SEQ ID NO: 48861 - DNA, 30 bp, Homo sapiens; identical to SEQ ID NO: 8297
  chr11:86512316-86512346
  hyper

SEQ ID NO: 48862 - DNA, 30 bp, Homo sapiens
  chr11:86512761-86512791
  hyper
tgacaggtttataaccgtgcctaccatgaa

SEQ ID NO: 48863 - DNA, 284 bp, Homo sapiens
  chr11:86513413-86513697
  hyper
actgtaattcttaaacgattatgtgattaggtctgttttgccttaatagggtctgtgattcaggaaaacgagaacaagcccgactgcagagtattcacagagcttggttcattcttaagcatttgctttaggatttagcatgatttcaccgttccatatcactgaccactgattccatggaagaccctttgtcatctctccaaatggtgtccaaaacctgtatctttgcaaactttcctgccgtttctttctgtcattactgtttatagcggctgcaggaattc

SEQ ID NO: 48864 - DNA, 30 bp, Homo sapiens; identical to SEQ ID NO: 8299
  chr11:86514121-86514151
  hyper

SEQ ID NO: 48865 - DNA, 650 bp, Homo sapiens
  chr11:86665885-86666535
  hyper
gttgtcagctgcagctcggcgtccgtctgcagctcgtgcccaaccaggttgggcatcttggtcacgttgtagccgaggttctggcacatggagatgcggatggggtcgcagcgccgctcttcctcgtccccgaagccccgcgccggccccaggagcagcagcaactgcaggagcaaccccagactgagaccgacgcccccgggcgcccccgggacgctcggccctgcgccccgccaggccatggccagcatcgggggtagcagcggcagcggctggggctgctctggcagacacccccagtttgcacgggggcgccggctgcccgcgctgctcccagctcccgggacgggagtgtgatgcggcgacgagggggcagcggccggctctccagcagctgcgcgcgactgtgtgggattttagacgtcccgggccgaggccgagggacaggctgcgagggtcatggctgcaggcggcgagcccacaagccggcgccggccgcgtccgttcggcgtctccgcgaggccagccagcagccagcgctgcgcagctctcaccgccggagccctgcgcggcgctggaggctcgcggcgcggcggcggggcgggacggacagcgggcctctccaatggccgggcgcggtgggcagctag

SEQ ID NO: 48866 - DNA, 30 bp, Homo sapiens
  chr11:86667134-86667164
  hyper
gcgccccagagctgcggagctgcagacccg

SEQ ID NO: 48867 - DNA, 30 bp, Homo sapiens
  chr11:86748646-86748676
  hyper
gccaccccctactgcgcacctgccatagcg

SEQ ID NO: 48868 - DNA, 482 bp, Homo sapiens; identical to SEQ ID NO: 8301
  chr11:87908222-87908704
  hyper

SEQ ID NO: 48869 - DNA, 30 bp, Homo sapiens; identical to SEQ ID NO: 8302
  chr11:88071022-88071052
  hyper

SEQ ID NO: 48870 - DNA, 191 bp, Homo sapiens
  chr11:88071605-88071796
  hyper
cacgcacacacatggcgctctcagagatgatattgctcaaccccttttatgttacagaggaaaagcaagaggcccagagagaggaagcggcttgcccagggtgagaagggtgaggaaggaagctagccaatgggagaaggctggtcttatgaaccgttctagtgtgtcagtctgatcgccaaaaattatta

SEQ ID NO: 48871 - DNA, 177 bp, Homo sapiens; identical to SEQ ID NO: 8303
  chr11:88241798-88241975
  hyper

SEQ ID NO: 48872 - DNA, 144 bp, Homo sapiens; identical to SEQ ID NO: 8304
  chr11:88242130-88242274
  hyper

SEQ ID NO: 48873 - DNA, 224 bp, Homo sapiens; identical to SEQ ID NO: 8305
  chr11:88242358-88242582
  hyper

SEQ ID NO: 48874 - DNA, 439 bp, Homo sapiens; identical to SEQ ID NO: 8306
  chr11:89224223-89224662
  hyper

SEQ ID NO: 48875 - DNA, 85 bp, Homo sapiens; identical to SEQ ID NO: 8307
  chr11:89224735-89224820
  hyper

SEQ ID NO: 48876 - DNA, 560 bp, Homo sapiens
  chr11:91957629-91958189
  hyper
gcaccacgctctccccgcggcaggaaagtacgttggtgtcatcctagagccccagagggctgagggaagactcgagctctaaaattagccgcttccaggcccggcgccgggaatgccctccagttcgccgcgcctcctccgccgccccctcccgcgcgccccctctcccctgcgccacgctcctagatcgctagtcatccccgccgccgaggctcctctccccctcgcccttttcgctcgcggtttgggaggaggagactgcgagagacaagcgcgagggggagactggagaggggcttggccgtgcgtcggcgtcggctgtgatggggagcccggagcagccaggcggcgagcagtagcggcggcggctgcagctcggagcagacaggagagccggcgctcctccccgcaggctgcgctgtgaactggcctgcggattgggatctcgcgcctcccgtccctctcctcccgctgctgttctcttcatctcggctcccctcctccgcttgcgaacccccggcggcggcggcggcggcgtcccgagcgcagagcgcttctgc

SEQ ID NO: 48877 - DNA, 1112 bp, Homo sapiens
  chr11:91958214-91959326
  hyper
gcggtgggcgctgcggcggcagcagccgggggaccggctcgcccggagcaagagcgccgagcaccgggtgaagaagaccacgggggaggcgcctcgtagagccgtggatcgccagcggaggcaagggtgcgtggggatttgtagcgtgatgatttggctgcctggtgcaccgactggagcgcgcctgccggagcacagcctcagctgctgggtgcaaatgggctgcgaggtgggctggggaggcgagagccgacgaagcgcgtgggggaaacttttcaccttgtaaagttccaacctccgcgcagccccgagccgccgttgctaccgctgcaaacaggagaagagggtggcttggccccgcggcgggagccgggaggtttacacggagagttggccaagtttggggctgaggatctggggaggggttgcgaggggggttgcggatcagtgcacccatccccggctcccagccgcccctgcaggtggatgagaaggttcaggtggcgagcctgcttggcagccggtgcctctcgggcgcagtgggggatgttcagatgccgatggatgatgcacttaggggaccccgaggtgcaagttgggtcatcgctaggcgaggcgcggcgcagagagggagcccagcctccactttcgctaggaaagggaaagggttaccagtctgcgggtccgttccccacgcctgactcgggcttgcggggcttgtggtcagggtgagatgtagtgaacggcggcggcggctcttcgactggggacgacatcctttacggagtggttggggacagagactgtccctgctatcttgacaaggagagggaaccggaatgctttgcgagagtgcatgatttttggcgggcgtgtgggaaggctgcttgtctttgaaaagaaagcagcgcgggtctgaccatccccaggagtgcggaggagctgtctccggattgggggcgagaacgccaggggcaccagctccgagctcaggccccactcccgggcggttcgggacgaatcccctctacaggccagtgtgtgtgcagggcaagtgtagggggctgaggggcgctggcggggaggcagtagaggtggcctggaccatcttg

SEQ ID NO: 48878 - DNA, 617 bp, Homo sapiens
  chr11:91959354-91959971
  hyper
cgccagtgggagtcgctgagctaaagtgcatctggccccccggcttgcatgatggcgagcccggatatttttagctgtgctgtgatctgaattccctcctctcctctctcgttgacttttgtcacatgtgctttccgagatggtttaacattgaacatgattgggctttgcggaaagcaacttttattcactttccaccgttctcctcttgtgggcggggggtggcgggggcgtgcttggggcaaggatgcaggggtggccggagtttggctgcgagctaagagagccgcttgggttgctcgggatgagaggaacaggggtgctcccggggtgtgggtgtgctggcggtgacatcctgaggctgcagctcgctggaataatgggctcaaaccaggcggtggagaggggtccccggaatggacgtcgggggcggggaggctgcggagaccctgcgaggtctccgtgaaggactaggaggggctcccgggagggagtggcgcctgcggcccggagcgtgggcggccggtggctctggcacgcggaatctggtggactcctagcgcctcggccgggagctccagctccatcccgccgccgccgcgcgcccaatgggactc

SEQ ID NO: 48879 - DNA, 30 bp, Homo sapiens; identical to SEQ ID NO: 8312
  chr11:91960274-91960304
  hyper

SEQ ID NO: 48880 - DNA, 95 bp, Homo sapiens; identical to SEQ ID NO: 8313
  chr11:92675279-92675374
  hyper

SEQ ID NO: 48881 - DNA, 17 bp, Homo sapiens
  chr11:92930617-92930634
  hyper
aaaaaccgtgagtcacg

SEQ ID NO: 48882 - DNA, 644 bp, Homo sapiens
  chr11:92930674-92931318
  hyper
cgccccactcaacacacacactcacccacacgcgcgcgcgcaaacacacacacacatattttaacgccctattcaggcctgggcttcgtctgaccaagttctcggggtcagataaccggttcctttgcggatgctgaccacggggtcagttagcaatcgggcctcaactcaggccaagcgcggggcccctggaggtgtgggcgcacccgactcccgcacagacccccgcccacgtcagccccggctccctgcccacgcacaacaccgacctagctcctcgcgcctcgccgccccggcagccgccggcgtcgccgccgcttccatctctcgcgggtctccaggacgccgccgcccgagtgctcactctcccgccgctgcgtggccggcgtcaggcccaggcctacctcccctgcccggagggacccgcgcctggtgcccgcctccctgccccggcgctccccaaccgcgcggcgaggagcatgcgcagtgggacagcccggctcggcgggcaccgccggcgaggggcgggaggggccgaagacccgaggactgctgcgaggccgggttgggtaacccgagaggagggttgggtaacctgagatcagcgagggtgggaccttagagctagccgagacccgggccca

SEQ ID NO: 48883 - DNA, 366 bp, Homo sapiens
  chr11:93063613-93063979
  hyper
cagcgaggtcgcgctcgcgcggggtgaggttggaggcagccgaggagccgcacagggcagcgcctgccgccgccgccgcgcccatcccccactccgacggccacgagttcgggccgcgacgtccccatggcaacacgcggcggcgccgcgcgcggggagggagaggcccaactgcctcgttggtcgcgcggcgggagggcccaggcggcgggagcgcggcggcgggtggcggggccccttggggcgggcctggcggggcgggaggtgacatacgcggtcctgcgccctcgcctcagacctctcgggcgagcgcggcgcagcgcaggtaatggctcctggccttcccggccccgcctcgcccctgac

SEQ ID NO: 48884 - DNA, 70 bp, Homo sapiens
  chr11:93275704-93275774
  hyper
ccgctggggaggggcggtagtcggccccagcagcagaggaagcaacgctcagctccctcctccacccacc

SEQ ID NO: 48885 - DNA, 30 bp, Homo sapiens
  chr11:93395257-93395287
  hyper
ccccagatcacccgcggacatggcctgcca

SEQ ID NO: 48886 - DNA, 30 bp, Homo sapiens
  chr11:93474805-93474835
  hyper
gcggagctctagctcgcgtattctgaggag

SEQ ID NO: 48887 - DNA, 30 bp, Homo sapiens; identical to SEQ ID NO: 8315
  chr11:93861764-93861794
  hyper

SEQ ID NO: 48888 - DNA, 278 bp, Homo sapiens
  chr11:94134185-94134463
  hyper
cacaatgagcagggctttcaccgtggggttctgggactcagcgccgtagcgcctcctgcccacaaagttctgccagtcggagaaggtgtagttgttccaagagaagaagtgcgaggcattgggcacggccagggccgcctccgcgctctgctcgtcggcccggccctcgtggggctcggtggctcgcaccaaggggaggagacagagcagcaagaggtgagggaccattttgcaggagccacccctcccctgggagcctgcgggccgggcgtcccctc

SEQ ID NO: 48889 - DNA, 186 bp, Homo sapiens
  chr11:94134682-94134868
  hyper
cgacggtgacgcgctctggctctgacaagcctggctccccccaccctaccgggtggcgccgttgctgaccccacgcccagccgttcccactcccgcctgaaactcctccgacagggcttcgcttcgggggctcagtccccagcgcgtacacactcgcgtggtgtcggcttagcctcttgtaaagga

SEQ ID NO: 48890 - DNA, 30 bp, Homo sapiens
  chr11:94227023-94227053
  hyper
cacttcatggataacgtagatgcttcaagt

SEQ ID NO: 48891 - DNA, 526 bp, Homo sapiens
  chr11:94245525-94246051
  hyper
acttcagcaccttctttggtgcgcggaatacctagggcctcggaaggccggctgggggcggggagaatcggcagtcactatggcaacccgagacgcctcgcatgctgggctgcctgcgactgagctgagaaggaaaccgtgcccagggctctcggaagaccgctgcggcatgacaggcgaggaggcggtggtggtgaccgcagtggtggcgcccaaggcgggtcgcgaagaggagcagcctcctccgccagcagggctggggtgcggggcgcgcggggaacccggccgcggccccctagagcacggccagcagtgtgagttcagctccagccgcggacgctactgggaggaggggcgtggagaacgagtgacagggcaattgggggaaaccgcagtgggactggctgagaaggtttggggcaggggaggtggagctgctgcttttggcagaaccagagatgatggcactgtggcagaaagcataggtccatctttccaagccctccttcccgatagcctgcctgaa

SEQ ID NO: 48892 - DNA, 18 bp, Homo sapiens
  chr11:94277135-94277153
  hyper
cgcggcagctgctttaga

SEQ ID NO: 48893 - DNA, 299 bp, Homo sapiens
  chr11:94473469-94473768
  hyper
taacataacagagcagggaatcgggttagaacgggttatgctctgattttttggaaaatgggcaaacggggcggggactagggaggattccgccagccgggagttgggaggccgcgcgcgcctctgcggagcgtgacggccacggtcgcctagcaacgagcggggatgcgcggggcgcctgggtgggcgaggggtgctcgccgccgccgccgcgcgccctcgggcccccgggaccgcgggaaaacttcgcggctcctcggcgctggggcgtcggcgccaggcccggcagacagagcaat

SEQ ID NO: 48894 - DNA, 717 bp, Homo sapiens; identical to SEQ ID NO: 8321
  chr11:94473802-94474519
  hyper

SEQ ID NO: 48895 - DNA, 804 bp, Homo sapiens; identical to SEQ ID NO: 8322
  chr11:94501253-94502057
  hyper

SEQ ID NO: 48896 - DNA, 451 bp, Homo sapiens; identical to SEQ ID NO: 8323
  chr11:94502100-94502551
  hyper

SEQ ID NO: 48897 - DNA, 30 bp, Homo sapiens
  chr11:94883522-94883552
  hyper
ccccacgcccagtcccgagagagagagcgg

SEQ ID NO: 48898 - DNA, 936 bp, Homo sapiens
  chr11:94883964-94884900
  hyper
cggcggctccaatctggggtcccgccggcgccgacccctcagctctctcccgatacctgctggcctctctcatctttggtggcactcgccgccacggggacggtgagatcaaagaggtagacctaggccaggagggactgccagggctccttcccgcgggccagcctctcgtccttcctcccgggacggggctctttccctttctccggatgcgggcctttgagagtcagcgacgccttagactcctcccagaaaaatgcaccctcatctacccaattctgccctaccctttggagctcctggaccctctaaccgctcggtggggtcagagcccacccccggaagggccgctggtcggggactggttcgccctctcctggcctcctcggaccagtgcgcggggaggatcccgctaacgccgggcgcctgcagaccttgagcggcctcgccctggtgacctccccgggaaaggctgggcggtgcttccacaatgagggccacctgttaatttgcacgagaaagtgctgccgagggcccacacgtgcgaatccacctgtggagtgcgtcccctctctggggccaaggcctaggggaggccgaagcggagaagttgcctgaagactgggaagtaagagtaggggcgtcggaggaatcgaagttgcagtgacatcaggctcggacagccggcggactcctcgcaaggtgatcggatacttccgagagccccacagtcctcctgggcctttgccctcgcgtctgggatgcgctcgggcgcccccagtctgcgatgcgttcgtacctccagtagggtgacgttttcgccgggcccctctgcgaacagtctccgccctcctccactgtgagatatttcacagtttcacccgcagagggcaaccttattccaagttcccgagcgccctaggcctctttctcctc

SEQ ID NO: 48899 - DNA, 30 bp, Homo sapiens
  chr11:95522931-95522961
  hyper
tgcggccgtggatccgcttccttctcggcc

SEQ ID NO: 48900 - DNA, 34 bp, Homo sapiens; identical to SEQ ID NO: 8325
  chr11:95523018-95523052
  hyper

SEQ ID NO: 48901 - DNA, 30 bp, Homo sapiens; identical to SEQ ID NO: 8326
  chr11:95831955-95831985
  hyper

SEQ ID NO: 48902 - DNA, 30 bp, Homo sapiens
  chr11:96076456-96076486
  hyper
ggctggtgccactgcgcgagtgagtaatcg

SEQ ID NO: 48903 - DNA, 1331 bp, Homo sapiens; identical to SEQ ID NO: 8327
  chr11:96122354-96123685
  hyper

SEQ ID NO: 48904 - DNA, 872 bp, Homo sapiens
  chr11:98891176-98892048
  hyper
tgaaaaagtccactctcaaaccgacctaagtgaacgcgtcagtctgtgctgctgctgtcagaggtgtgagccggggactacaggaatcagagtgaagacaggagcggaggaagggactctcgcctggatctcccgtgccgactccagccagcacgtttgctttgtaatctatgaatgttaaatacggaggggttgcagagcagaaacgctcggggaaggggggcaggtcctctgtacttagcagggaaggaaaatgccggttgactagtgagacgagtggagaaacacagagcaccctccgggaggcgcacagttcgttaagcccagggacatgctcaatgaacctttgcagcaagaggcagtgaggcgctggacgcgggcgccggtgacagcgcgggcggccggggaggggcgaggggccgccccgggaggacacagccagtcagaggcgcggggcgcagggcgcgcggacgcattggaggaaaacacgcgagccccaaacacaccagccgcaggaggcgccgcacctacttcccaatataaccaactacggcgtgggggagcggaactgcgagaaggcggcagccaaagtgccattaaagctcggggcggagaggatgcgttacctgggtcccgtctgctgcgagaggcagggcaagctggaggattccctctgaatgattaagaactccgcaattcgcctctgccacaggctgcaaaggacccgaggaaccgctctctctgaactgtgctgatgggcaggaggatgggagacaggaattgagagtcacagaggaaggacagtggagtctggcatcttattggtaagtggctgacattcctttgccagtgactgcgttctgtgattgtgc

SEQ ID NO: 48905 - DNA, 596 bp, Homo sapiens
  chr11:100997694-100998290
  hyper
cccctcccgggggaacggtgccttaactcctctccaagacaagcactcctggtaaacgtccttcttctaagaaagaagcatttcataaagcccccaactcgccgcgcactttctgccccactgggctacagcggacctagtgtgacgctgcacgttttaaatcggggttggttctgcttcggaatctggaagattcggaaagttaaaaaacaaacaaaaaaacagctttcagggaggcacgccccaaaaatagtatattctgcgcccaccttcgtgtccccaagagtgaggagaggagggaagaagaagggaggcaactgcccctgtgctgtgtcccgctgcccaccctctccggccgccccggggagcgcagcggtgcgctggggctggggctgagggttggcggccgccgccgccaacggaaccgctactcccggacgcgctgggcgtgccccgtcccgggccctcacctcaggtagttgagatagggcgggtagacctgcggcaggccctccttgagcacggcggcctggtagccgagctgcgggagcccgttgaggccgagtgcagggtagagcgcgggggccgccccggcg

SEQ ID NO: 48906 - DNA, 389 bp, Homo sapiens; identical to SEQ ID NO: 8330
  chr11:100998355-100998744
  hyper

SEQ ID NO: 48907 - DNA, 18 bp, Homo sapiens
  chr11:100999022-100999040
  hyper
gcccccggcgggacagcc

SEQ ID NO: 48908 - DNA, 339 bp, Homo sapiens; identical to SEQ ID NO: 8332
  chr11:100999159-100999498
  hyper

SEQ ID NO: 48909 - DNA, 769 bp, Homo sapiens
  chr11:100999901-101000670
  hyper
gggtgttgaatgtggctggaccggagggatctccacctcctgggtcgggggcgggggagggcggcgctggtcagctcctgcccttggcctccatcctgtcgtcaggggaactgtggctgtcgtttgtcccagcgagcggcaagtggggagcgcaagaaaaagtagtaattgttaggagatctcgtctcctaactcggggagttctccaagagagttctccaacttctgtccgaggactggagacgcagagtactcacaagtccggcacttgagtggctgcggctgcgacggcaatttagtgacacgcggctcctttatctcccgactttttctctggcatcaaactcgtgcatgctgtgaagctctcagtccctcgctgagttccactgccccctcactaaaaccctggggctagtcggacctctcggtacagcccattcccaggaagggtcggacttctgctggctccgtactgcgggcgacagtcatctccgaagatctcagatcccagtagtgcgggagcactagccgcctcgggttgtagatttcactcaaatgacaagtgaagctagttctcattgagaatgccacccacacgcacaaatacaacaaggcttaccccgattagtgacagctgtggactggccagacagctttctaacaacgcctcctcctctagggaggccccgcccaaagcccctccctaccccaattaccggtaggatctgaaactctggagttggcatttccacccgttattctgaatgct

SEQ ID NO: 48910 - DNA, 201 bp, Homo sapiens
  chr11:101453336-101453537
  hyper
ttacccacagcccaatacaaacgacccgacgccctcacttctatagcccgtgagtctcccagcccctaacaggctcgtctccccagacgccccgggtgaaaaggttcgcgccgccggtggagagtcctattggttctatttctgtcttcactccaaggccccaggaccggggagaggtcctggtctaactttggctgtccc

SEQ ID NO: 48911 - DNA, 235 bp, Homo sapiens
  chr11:101453715-101453950
  hyper
cgtagcgatcctgtctcttgtagagcgcaggatgaaggggtctggagaaatcgaccacccatctaatcacctgcaatggtggtgttactatgcggtctcactctcgtgggcaaacatatccatgcgtacctacgaggagcaaacctagacaaccccgcctcccccactccccgcgcgcccctccactcactcaggtcccagccctggctctcgcggacctcccagcaccgtccta

SEQ ID NO: 48912 - DNA, 276 bp, Homo sapiens
  chr11:101454510-101454786
  hyper
gggcagagagggcacaggcggggccgctggtggtagcgaagcgtaagagcggagagcaagggagacggagctgaagagttactatgtcaacagagactctccagccctcagctcccgccttcatcccccgcactctccgtcaagatccccacctttaaagggatccgagcgacgttctagaaagcagccaaagcctgtcctgtagccacaactttcaggaggcggtatgagcctgaactaggaggagccaggcacgcactctttttttcccctcca

SEQ ID NO: 48913 - DNA, 39 bp, Homo sapiens
  chr11:101785492-101785531
  hyper
ttacatctgtctttcgtcactgtcggtactgccacaaaa

SEQ ID NO: 48914 - DNA, 30 bp, Homo sapiens
  chr11:101786102-101786132
  hyper
cctcgggagagcggcgggcatcaccgacct

SEQ ID NO: 48915 - DNA, 371 bp, Homo sapiens
  chr11:101918142-101918513
  hyper
cacgacggccgccgcgtctccatggaaacggcccaggcatccacccagccgagagcacgatggctactggggagctcggggacttgggtggctactacttcaggttcttgcctcagaaaaccttccagtctctgagctctaaggagatcaccagccggctccgccagtggtgaggaaccgaggcacagggagagaagaggcccttggtcttcgcggctgtggaggcgcaggccgggcgtcgaggggcccgcgcgggtcggcgccattctgagtgaaccctgaggcttcctgagtgaaccccgaaccacccgggaagggcggatgctgtgggtgggatcggttatcggtgcgctctgagagggtgccagccc

SEQ ID NO: 48916 - DNA, 30 bp, Homo sapiens
  chr11:101981152-101981182
  hyper
tttggcgtttgaggcgagtttctgtctcag

SEQ ID NO: 48917 - DNA, 951 bp, Homo sapiens
  chr11:101981774-101982725
  hyper
gaggcgctcttcaacgccgtcatgaaccccaagacggccaacgtgccccagaccgtgcccatgaggctccggaagctgcccgactccttcttcaagccgccggagcccaaatcccactcccgacaggtaacctcgttgcccctctccccgtttccccgtcgggcgggcctcagaccgggggggcgctcgggagccgcggccgccagctctggtcaggggaggggggttgcgggaactctagctggggtgggggtcccgaggcgaagtggaactggagtcgtccactccgccgcggtgaccagctccccactcctcccagagtccggggctgagatttgtttttcccttctgagtttctctctgcggttgcagccccggggggcgtgctttccctccttcttcctttctttcttcccggggttcccgagaggttggcgggagtggaggaggggtggggaggaaggaagggggtggggaaaagtcgggcctgggccgcggtgggcttgcacaatgcgcgcgcctccgcgcgctccgcaccttcgctcccgccgggccgggctgggaaagggggaggggggcctctggcatttgtgtgtgggtgtgttgccagcggcggccgagtttgtgaagttgagccctgggcccctttcctttgcggcctctcggtccacttcagtctcctgggggagtcaaataattgttctcttgttttccagtgttgattagaggtgggggtagaaccggtccatttagttttttgctctttctttccttcccccctcccgtttcccctccccctcccgtaagcatttattttcctcgcggctcaggcgatttcggaatacaggtttcgggcttcccctgcccagactttcctggaagttgtttatggagttctttcacccctgctcttcccttgtgtgttggaacttgggccggcttgctcttatc

SEQ ID NO: 48918 - DNA, 30 bp, Homo sapiens; identical to SEQ ID NO: 8336
  chr11:102188131-102188161
  hyper

SEQ ID NO: 48919 - DNA, 32 bp, Homo sapiens
  chr11:102323922-102323954
  hyper
cggagctttcccctcgcgtgacccagcctaag

SEQ ID NO: 48920 - DNA, 915 bp, Homo sapiens
  chr11:102962154-102963069
  hyper
gtctagaaaaaggcagaggagcgatacgggagtaggggatcgagggtcggttgtggggtgggggtgggggtggggggaagcgcaatttacatatgcatctgttccccaccctgcagggcacgtagactcttaacgtgggcggctcttctagtctctccataaacgccagcgtgcacacactcgaacacgaggtcgggtcgggcgcggagactcgcggtgttcggcacctacagcctagctcgatcaaaggggcctcacctgtctccagccccagcccggcaggccgggcccgactccttttcctccagttgtccagcaaaggagggaggagggaagcttgaagggtggggggagatggtacctggagattttacactttttgaggcctccgtcttccgctactgctgctgccaccccaggggattttctcttcttcttcaccggcatcttccgccctccccggcagggtgggcaggggagccggggaagggggtccctgtccgctggaagcccctcagcgctggcacccagttcccagagacagcagcaagcggaggagcagagtcgccagcccgcaccggcgcggcccagcccggccgccgcccgctcccaggtatcctcgtcgtctttctctgaccgggacagggctggctcctcgccggtggacactgcggttcgttctcaccgggaggagataacgcggacagcgcggcagctccaccagtcacagcaagcaagaggctcagcctaacccggaggcgaatcgctgaggcccggaagtgacgcaatcgcggagccggtcccgggaaggggcgtggttccggttagcctctgccactcgtaggtaggccaggcagagcgaagctgtctgacccgtcgactgcggcagtccgcggaattcttgtatcctgtcca

SEQ ID NO: 48921 - DNA, 107 bp, Homo sapiens
  chr11:102980416-102980523
  hyper
aatcaacaacttcttggatgacggcaaccagatgctcctcagggtgcagcgatccgacgcaggaatctccttttccaacacggtacggttccttgcactcctgcctg

SEQ ID NO: 48922 - DNA, 30 bp, Homo sapiens; identical to SEQ ID NO: 8341
  chr11:104034043-104034073
  hyper

SEQ ID NO: 48923 - DNA, 851 bp, Homo sapiens
  chr11:104034315-104035166
  hyper
tatccccatcagcacgcgtcccacacctctcagtcccattccggaaatggagctctctcaggactggatacaggcaggagacctccctccccaaacaatgcattcagcccgagttcacattcaagattcaaaaagaaaggggaaaaacatagaaagaacaataacaatagcaaacatgatttttttttcagttaaaaaataaaatgagtctcttaccatctcgcctgaggttggcgttgcgcaaagctttgatggatgcgctctgcggggttgcagaagtgtcccgacagctgcaaaagtttgcgcagattagagtgtagacaaagatgagccggtgcatttgggatcagcgactagagacagcgtcgctccaagaaaaagccgggttctgctcccgggaccgacgccgcgccgccctgcgctctcgccgcctgcgctcgccctgcgctggcccgggtcgctgtgctaatcgccgagctctccccaaacttcctgcatgctgaactttccgagcgcgtgtgggtgccgcacttccttgtggtgctgagctgataaatggtgacgggacaaacaacaggttgacgtttgtttgttcgccccctccggtggccggcagctgcagcacaggctgcagggggcgggcagcgccgaatctagcggggcaggcgagcggagcagcagcgttctccagccccggccgcggcccctgagaggcgcgcactcgggctcagagcggcggcgcgagcacctcagctccccagtttcccaggccgggcctaaacctgctctgccactgagcatgcccagtttaatcgccggccgggactcttcccaccgccctgggctttacc

SEQ ID NO: 48924 - DNA, 720 bp, Homo sapiens
  chr11:105480858-105481578
  hyper
cgtcctcctcacgaacctgcaaggatgcggcaggggcctgggggcatggggaggtactaaccccccggagcccccgattggggcttgcagacctggcccgtgggcggattttctgcctagcgcagccgagaagcagaggtgccaggaaaaccaagagaggggcgctgggggtgcccatccccagagtcggtccctctgcgaaccgaggaagaaaagaggagggagtcagcgagtggtcagaagggaaaacctgacaccagactggctccggagcgtccgggagactggggcgctccggtgagcacccagggggtgaagccagccgagcggtgggcgaggggcgtgcggagggagtgcgcgctcgaggaggggacgccaggagggcagcgatgctccgggctggtgcaggcttgctgggggatgtcggctgatgcgagctggagagcgcgtgtggcggccgcggcgccagtgtttgtgtgtatgtgagaaagcaaggggcgagcgcgagtgcgagtgaggcaaagatagagcgcatgtctcatccctgcgagcagccactagacgctccaccaccatcttttgcatgtgcaacatttgcagccggacagaaaacctctcccagggctatggagactgcgggaaaaatctggcggctcgcgatggattgctaaggagaactagtcataatcttaaaccaccgaaacctctttcctttttttt

SEQ ID NO: 48925 - DNA, 155 bp, Homo sapiens
  chr11:105481848-105482003
  hyper
ttgtagcagatatccgaaagtgagttaaatgagttgctgataagcaattcagggaaaccttcagcagttcccttcccctctgtttccctcctcttcctttctctcctttgcaaaaagacttcctctttagtgcaggttccgttggaatacaccca

SEQ ID NO: 48926 - DNA, 30 bp, Homo sapiens; identical to SEQ ID NO: 8346
  chr11:105892730-105892760
  hyper

SEQ ID NO: 48927 - DNA, 131 bp, Homo sapiens
  chr11:105948590-105948721
  hyper
gtctttgcccgggacgctaaggcagccatggtactacaggtcttttttggtatttagagcctaggaagcagatcttgggggaggcgggccgggctgtggagacccgacactcccgcgctggccgcgaccct

SEQ ID NO: 48928 - DNA, 1039 bp, Homo sapiens
  chr11:106888277-106889316
  hyper
cagtgctgtagtcccctcttccgccctagcctaggggatcctctgtcgccggagccactggaaccctaggccgtgcagggtaaggccgggccgccccccagcggtcgggctctgcgctcgcgccccggctcgcccagcgccaactttacagatccgcgttctctcccccgaaggcggtccccccttccgccccccgctcaccgagggcgccgtcaggcggctgatgctctcgcccagcgagtccaggttgacccgcctccggcgctgcaccctcctggccccggcagtggcagcggcggcggcggcagaagcagccggggtcggggccggggcggcggcagcggcagctgcggccgggctgggctccagcggcccgggcgggctccggctgccattccagcagagcctagacagggggcactccccctcctcctccgggctggtctccaggtagtcggagcccagggagctgaaggactcggacgaaatcttccttcgagacatgctgccggcggagctgcagcggccgaggcggtggcggcgaggacgcgagcggcggcggaggcggcggtggcgggaccggcaagcgacaacgttaagcgcgtcggggccgcggggcgctgcggtcgcgcccggcggggcgggagtccccggggccgcggagccccccgagccggctgctcatggcgggaacttggggcgccgccgcaccttggggcccgggctcggcggcggcgccgggctgggctgggggccgccgccgcctctgctgctgctcgcgcggcgccgcctcagcgcccgcctcggcgcatcgccgtgcgccgcgctcccgctcacggggaggctccgagagtgtgtgaccgcggtcggcggggcggggagggctgcggcccaagcagaaggggaggcagaggcagaggcttctgccgcctgcgcgcctatctcgccccctttccctctctgctcccgcctctctccacttgctgccctgcctccctccttctccctttatccccccgcccccccccatgctctccct

SEQ ID NO: 48929 - DNA, 705 bp, Homo sapiens
  chr11:106889400-106890105
  hyper
cgttgctgtcctctgcgcgccctccctgctccgaggaggtgcgcacaggagctcgggtcggactgagggccccaaccccaaacgccttatcctcggccctcgggagcagatgggtcccggcggcgctggtggggagaagggctcggggctggggggcgagaggcctccccctggagccaccttggggaaacctgacagtgtgaagtgggggttagggtccatgttgtcctttctccgagtttatttaggaagttccgaggcaaaagggaaaggccaagcgtccagccagcccactccagaggagacgctttcaggggaagggaaggacaggggcaacattttggcgcccatcctgctggagcagctcctggggacttgtgttccccgcctcgtgcgaggccgtgtgggcgcggagcgagcccagaaaggggcggcagtgaggacagcgtctgctctgacaagacagcactgttgctgagcctcagccgggcggggtgcgcggggctcccggctccgctggctcctcactagtgctggacagctccgcttgccacctatagccgcctttgcaggcgttgagaactggagaacagttcctcctcaaacgacctagcacctggcccgggggaaaccggggaatgatcccacgtccctcatcctcagggctctttgcgccaaatatgcgatctgtttgcacctgactgc

SEQ ID NO: 48930 - DNA, 128 bp, Homo sapiens
  chr11:107328544-107328672
  hyper
taaagctaagaagccgcaagaaaattctagtttacgacggtcgtaatttaacaaacaaaccgggacttccggacccgaggaaggaggagcacggctccaccaacagggcatgcgcacatctgaggtcg

SEQ ID NO: 48931 - DNA, 30 bp, Homo sapiens
  chr11:107461311-107461341
  hyper
ctcgcaggattgacacgatctctcaattac

SEQ ID NO: 48932 - DNA, 1348 bp, Homo sapiens
  chr11:107461569-107462917
  hyper
ggaacacaccttgcccggactgtctgggaatcccattgacaggtcatctcaggttcaccatcttcctgtcgtgggctcctccagggaggccacccgggagcaattaaactgggccacaccagccacctcccacagcagcggggtccgcagatttaaccctttccccccagattccggcactgggtgccgcgctctctcccccagcaccgcgcccgcgcccccggctcccggactgggcatgctcagtagccgcccgcttcgtgctcccagggaagcctctgcacgccctcccccgctgctctcggtcgcctcctcgccgccagccgccccgggtgcatcccggcttgctccgctccacgcgacccagattcctgccccgcccccgccccttccgcgcccgcagccagtgcggcagccgcggccgcccctgtccagcctcggcgcccgggaccgagcgcgtcgctcgccgccgcggagcgcgtagccggagcgcctggggaaggcggagatgaagaccacgccgccgcgcgccgggagctgctgagcctaccgccgccagagtccaggtgattggcgaccccagaggagcctagggagtaggggcgaatgcccttggggaggagagaggtgcggcgaggacgcgaggcatcacgcaagctgcgctgtgcctgggaggcagcagaaatgctaagcatcgggggcagagagggaacgggaatgaaagtgcactctgccttggtgcaggggctccggggtcacccaggacagtgatttccccttctatcctgtcctcccaattaacacccgagaggctgcaggtcggcgcgagaggctgtttgcatctcggcccgggcgtaggtcgcctagcgacctaacgccgagggctcggggaagggatcccagacagagccaaaatggaaggcgggacaagggcggcctggctggggcgaggggctggtctgggtccctgggaaccccttgccttgtgggcttcggtctccagggaggagctaggcagccgggctgcggggccgccggactgtggggtcctccgcgcagcgagctgggaggagcggtcggctgggctgttgagctgcgcctcctccaactgctgggaaactccgcacttcaatattggagcatctctttcccgggcaggtagaattggacagccgagtggggagtgacagctgacagctgacggggctgttaaaagcagagcagtggagtgtggtggtggggtgagctgttgtgggtgcttttttttgttttccaagtgtgggtacgggctgttctgactcagtgtttatgctcaacctctaagcggcgagttcggtaacacatctta

SEQ ID NO: 48933 - DNA, 30 bp, Homo sapiens; identical to SEQ ID NO: 8350
  chr11:107730474-107730504
  hyper

SEQ ID NO: 48934 - DNA, 860 bp, Homo sapiens
  chr11:107799192-107800052
  hyper
aaggcggcgggcgggcgcccgcgaggtgctgaaaggacagttcccgccgccgaacttagcccgcgggtggggcggcccgggagccagcggggcacgtgagcgatggagaccatctggatctaccagttccgcctcatcgtgatcggggactccaccgtgggcaagtcctgcctcctgcaccgcttcacccagggccgcttccccgggctgcgctcccccgcctgcgaccccaccgtcggcgtggacttcttctcccgcctgctggagatcgagccgggcaagaggatcaagctacagctctgggacacggcgggacaggagcggttcaggtagggaccccggggaccttgggcaccgcgccgccccctcagcccgcccggacgccccttccccaggcgtccgccccgccggccctggtcgggagaggctctggcccttccctctcgaaagtgcaaacactccattctcgcttcccctttgcccctcctcttccagggacgacttcctcctccgcaatttctcacttctttctttggcgcccatttcctgcgccccctttccatctttcctttcccgcctgaaccggggtcgtcctcgccgccccctcttccccaactctttcagcccctgtgggtatttttatcccctccggctccccggctgccttcttcccaaactcggcttccctggctgcgcacagcatgacccgaccaccctcctccaagcaggcgccccttttcctaccctaacccagcggctcccacgctgtgtggccggggagaaccgcgagggagggttcccagattcgtgatggatcctttagcttcacagcaaggagcgctccaacccaggttcctgca

SEQ ID NO: 48935 - DNA, 30 bp, Homo sapiens
  chr11:107992752-107992782
  hyper
tgtgcagctgctcccgagattttctttaaa

SEQ ID NO: 48936 - DNA, 30 bp, Homo sapiens
  chr11:108092857-108092887
  hyper
aaccaaggaaattgcgcccaaggttgaagc

SEQ ID NO: 48937 - DNA, 59 bp, Homo sapiens
  chr11:108093205-108093264
  hyper
ccatcccgcgtccgcgcttacccaatacaagccgggctacgtccgagggtaacaacatg

SEQ ID NO: 48938 - DNA, 30 bp, Homo sapiens
  chr11:108094096-108094126
  hyper
ctcctccttttaaacgccctgaattgaacc

SEQ ID NO: 48939 - DNA, 30 bp, Homo sapiens
  chr11:108345500-108345530
  hyper
aatctttccttaaagtgtagccgggataca

SEQ ID NO: 48940 - DNA, 30 bp, Homo sapiens
  chr11:108357121-108357151
  hyper
gcctgaggatcttccggacactcacagtac

SEQ ID NO: 48941 - DNA, 643 bp, Homo sapiens
  chr11:108368606-108369249
  hyper
cactccttgtaacgcccgggcgccgtccattcgcaacatcagtccctgcacattaaatgcggaagggcccttcaagttcattcattcattcattccacaaactttcgtggtgatttttgcccgctttgagtatgggcgggaggagggaagaggagctgaccagacccaaaaaggggcgacacacgccggggagggacgccacgcaggccgcgggcggactcccgggcggcggggacgcgcggggacccggccgcgggacgagggaggccggcggctggacactacctgcgggagagcgagtgaggttctggccctccgagttgaccgcctgcaggtagaaatagcggaccggcaggacgacggccgcctgcagcccgggcccccacaccaggctccgcggcgcgctgaccagcacctccggggcccccgcggccaccagcagggcgaggcgcagctgcagcagcagggcccgcgggaggcggcgcatggtcggcggggcacaactgcggtccagctccgcggcggcgaggaggggccggcagcgccgcggaccgggcggggactggggcccaccgcggggcgggtctttcgggcgggaaagattgcggcgcaggctccctttcccgcccgctgtcccgcctcg

SEQ ID NO: 48942 - DNA, 894 bp, Homo sapiens
  chr11:108463470-108464364
  hyper
tccccacagcaccacgcacaagaagacccacccattccagccaaccccgtgtgtccaagtcccattcgcccacataagcctctatttgacaaattcctcgagctcctacccttggggtggggacctttcgcctcccgtgaggtgccggctctcccgtgcttcgctgactgcccgcattgggtggggagattcgcctctggtgccgagggaaaactgcgttaggcgagggtggaagctctgtcggacccgtgcgagcacgtgggtgcgcgcgggccgcggagtgagcagcagccaggattcctctccagatcgcgcccccgccgcatttcattgcctgaaacggcccacgccccgcgatggcccagcagacacccggcacagcacagcgtcactgcgcggcccccgcagcgcacggacccccccaccctgcccgaccccagacccgcagccgagcccgtctggtatgtggtgggtggagagggtaccaactaagcatcccaaagtccttcagggagcaactccgcgcagttttctcttcccgacccgcagcctccgcagcagccgctcggagcacccccgggcaggtgccccgcgcgagctcagcgccttccccgcggatccccggcccctgcgggacccaggcccaggacaaaagaaatgaatttgctctgtacctgatcctgtccttctcggccctctgtaactcctcattcctttccagcacctgaaggatcttcctggcctcttcgtcatttaagaaactgaaatcaaacgccggaggaactttcgtcattttctttactgtgtgtgagttacacttaagctccttggcgcctcctgttaggaaggcatttttcaacctgtacaagaccagtttcacgaacttgatcccac

SEQ ID NO: 48943 - DNA, 91 bp, Homo sapiens
  chr11:108535764-108535855
  hyper
cgggcttctgagttcgcgcatgcgcctctgtgcgtttgtcccatgctggttccgtgagtctggccttaggtgtctcgtgtctggggttgat

SEQ ID NO: 48944 - DNA, 48 bp, Homo sapiens
  chr11:109292781-109292829
  hyper
gccctggcggtggctgcctgacgtcaccggcctctctggcaataggct

SEQ ID NO: 48945 - DNA, 340 bp, Homo sapiens
  chr11:109292891-109293231
  hyper
cgcggctcggtctctggtccattcactccacgctttctgcagccgccactgcagccgcgcggcgggggctccctccttgcagccagccggcggtccaggtaagagacaaggtgtgagtaaaggcttctgatggccgggtggcctgacggccaggtgcgagtggggaggacagctcacgcggcctgagcagccacccctggccatagctccagcccccgcccctgcccccggcccctgccctggcttgcttgcgcgctacctcgctactccgcagtgcaacagtttgcagctgcctcttgggagcagcaaggaggctctcctgtgcgctgcgggtctaccg

SEQ ID NO: 48946 - DNA, 171 bp, Homo sapiens; identical to SEQ ID NO: 8356
  chr11:109293592-109293763
  hyper

SEQ ID NO: 48947 - DNA, 217 bp, Homo sapiens; identical to SEQ ID NO: 8357
  chr11:109293873-109294090
  hyper

SEQ ID NO: 48948 - DNA, 1263 bp, Homo sapiens
  chr11:110166500-110167763
  hyper
gcggcctcaagggcccgagaaagttacagggctccgagagctgcaacagcagcaggtagagctgcggccgggaaccgcggccctggcctggcgggtgcgagcggcgggagcgactggcgccccaaagcctgtcatgcaacatcccctttgccactggggcggaacgcacgctctctagtaatttaacacccctcctttcaaactggaggccggggaacaagttctaataaatgtaaaatcgaattctacctacgctgaatatctggattttcaaacaacccttgggaccatgccagcccgggcccggggcccagtccaggcagcgggagcccaccgtccccagggcgctgggggtccgacaccggcgctgaaggcagactccgcgccccgaggaaaggagaatcccgcggcggcgaaggtcgactttggcccggccaggcacgttcgggccgcggctcagccacgactcgggcagggcctcgcggcccctaccagccccgggaggagcctggccggccgggccgttaccacagtggcgcctcggccagctgggcgcgagcggaggcgcgccaagccctggcggcggcgccacggccgggcagcacgggccccgcaacttcgcgccgccaccttagcgtctccggaggaaccgggagcggggagtgggggaagggagggcgccgcgccttacccggagagcgggcggcttctgcccgccggcgtgtggctggggcgctgcgcggcggcgcggctgcgacagggagggagaagcggtggtgcgagcgctggcccgcgggagacgagaggcgccgccgccaccgcagacagctccgcaatatggccgctcggcgcctccgcgggaaaaggcggggctgcccggcgcccccccgcctccccctgccggccggccgtcctcgcgccgcggactgagcgccaacgccgccgctgggggccgcccccgccccgcccctcccgcaggctcgcagccgcaggcctggctccgggcgtggccgggggtcgcggtctggggccggccaacgcgaggtgggtggctgcgggctcgggagcgcccagggaaatagggcgaatgcgccggagggtcgagcccttccagagagcgctgggctccagctaaacctgcggtcgagggaagcggagccgcccagcccaaagctcggagtgtgcccgccgcctccccaacgagtggaaacttgaaactcccgctggtgccagcaaactcactgagggcgttgccgtcgcccc

SEQ ID NO: 48949 - DNA, 233 bp, Homo sapiens
  chr11:110300414-110300647
  hyper
gggatgggggtatgcggaacagaacacagtggtctagctaaccgatttccgctagacgtccagctatctttcaaaatattttgtttctgcacggcaacttcagccgctaaaaaagcatccagcttacaacggaacctggagggttggtaaaggccccctgcgctggccccgccccatgggaccgggcggcgtgggcgtgagaggcggggcggggccgcgctctgcttgccaat

SEQ ID NO: 48950 - DNA, 1204 bp, Homo sapiens; identical to SEQ ID NO: 8360
  chr11:110581824-110583028
  hyper

SEQ ID NO: 48951 - DNA, 1035 bp, Homo sapiens
  chr11:110583043-110584078
  hyper
cggaggcgcggctgccgtgctcaggcagggagccgagctccgggtgctcgccgcgcgcctcccgtcggggccatgtacctccgcctgcgctcgacaccgcgggctggaggcgagtgcagcggcgacagcccgtcagcgccgcggcccgccccgcctcgggcccgccccctccgctccgggcgccctgcgccggggcccgcccccgcagccctcctcagccctcctccagcctgggccctcctagcctcgtcccagcctgcggcgcgcctggcgggcgtctctctatatatgttagcacaccggccaccggctgaccttttcggtctgtgactccgcgtgggtgcagcccgcaggagctcatcggcctgtgtcacgcacgggggcctctagtgcacggacacgcgcctctcccgccacctgcccactcccaccagaccccatcccttcccgcgccgtgcccgcggcggaaggcgcccctgcagcgcgtgcatccgcggagcggtggcgacctcagcctgagcagaggagttgcagtgattcctgcctcgctttcagcggactgcggagggaatcccccaccccaccccactggggatagggtggcacgtcgcagagtgtcgcagctgtacaaatttggaagcccacagcatcgcctgacctcttgtgcaatcccgaacgctagcctgttcgggtaaccctgagtgggcttctgcagccggtcatgtcagcggcccctgcacatttgcacccgcggtttccgctgtctgcaggctgcagagacgggggcattccaaacgtgaaagagcaatgaaggaaaatgcagacagagcgaggacgccgaaatttggctaagctattgagaaggctacaatatgtggaagtgtttatcagatatctgcgccgagagcataacttcctgtcagcccaaatagaggcaaaaatattttaaaggccaaagaataatcagagggagaggatttggagctgacccgcgttgagctgagtgttgctgcactttgcggggctggttgactg

SEQ ID NO: 48952 - DNA, 649 bp, Homo sapiens; identical to SEQ ID NO: 8362
  chr11:111169608-111170257
  hyper

SEQ ID NO: 48953 - DNA, 30 bp, Homo sapiens
  chr11:111171693-111171723
  hyper
acccatagaaaatctctcccagaaattcac

SEQ ID NO: 48954 - DNA, 362 bp, Homo sapiens
  chr11:111383169-111383531
  hyper
gcggggttccaaggacggttggtcgcccccgccacagtcactcggccgctcagagcggcggggcgcacggggtcgagagagccagctctagggtttggggctgggaactgaagcctggcgtgaaggaagtgggagcccgggccgaggaggcgaaggggaaaggaaaagcgaggggaacctgagcgggagggccctgagaggagcgggaggctgcgggaaggggaggcctggcactcctgggggtcatgggggtcggggcgcggctcccggcctgggagggcgcgggtcctccccggcagcgccgcccgctggcccagctacgcgtgttgtgcgctgcgaggccggcgggggtcccgctgggc

SEQ ID NO: 48955 - DNA, 347 bp, Homo sapiens
  chr11:111383557-111383904
  hyper
cgcccagccatggtagggcgtcccccggtgaaatggggtccgaggcgggccccgaccccgcgtcggcgctgcggaccgtccgggagctgcagccgcgggtgcccggtgctcggtttgtaggcagtgtcattagctgattgtactgtggtggttacaatcactaactccactgccatcaaaacaaggcacagcatcaccgccgcccggccgggaagaagacgccggctcgggcagcccgcagccttcgagagaagatgcctgagaagcgcggcgtcggcgtgggtcctgcgcagcctgccccgcgagcgcccgctgcaagtgcgaggaaacccgcggtttctccagat

SEQ ID NO: 48956 - DNA, 41 bp, Homo sapiens
  chr11:111385435-111385476
  hyper
ggttctcggaggggcggggcaggggcggggcggggggaggg

SEQ ID NO: 48957 - DNA, 427 bp, Homo sapiens
  chr11:111411154-111411581
  hyper
tagttttaggcacactgtgctcgttatcagattgcctaggggcccgactgaagtattcctccgcccagcgcctcgggcaaacgcgggatctcccagggaagctcggagggggacagggagctggttcccctctgcgactcgcccctctctggctggccgagtgtctggcgccaacctcgctggaggaggctgtcgggggcgggccagccagcggggctgccctcctcgcagtgacgtcccagggggcggaggggcgaccgactgactccgcgccctcccccccgcctcccgtgcggtccgtcggtggcctagagatgctgctgccgcggttgcagttgtcgcgcacgcctctgcccgccagcccgctccaccgccgtagcgcccgagtgtcggggggcgcacccgagtcgggccatgaggccgggaa

SEQ ID NO: 48958 - DNA, 660 bp, Homo sapiens
  chr11:111411821-111412481
  hyper
cgtctgagacccacgccagttcccggagctgcgcagttccctgcgcgtcctggaacgctcgaagcccgttcccagtccagagttatgggggtgggttggagaatgtaggagaggtggggcagtgggcaaacctgccccagtgggtgccccttcggcccgctcctttacacgcatcgaatcagtccttgggaccacccccgcggggcaggcttgccagctggcccccgcctaccgcccgctccgggaggcggccgcagagacagcggggtagggatgctggatccccggtgccgtgggaaccctgcctgttactcctcgtctcttctgcggggttggatggctgggtcgagcgcccggtatgagagcgcttagagatcgggaaagaactccagttagtgtgggacgagccccacctgactccggggaatgactctctgcttccttcctcctgttgtgtcactgcagcctcggatttggacctcagaggaggtaaagtgctctggcttctggcttctttcagttgttctgcatgtcggggggagaacatccgtgcccttttctcagatcctttttgcgggtgccaacagcttgaccaaacgggacagaggagactgggaacctcctctactctggcatcctggcttgcgaaactaatttaaa

SEQ ID NO: 48959 - DNA, 141 bp, Homo sapiens
  chr11:111472615-111472756
  hyper
cggagacatcaaaacgtggagggttttattatatatagcaacgagaagagaaaaggacacaaagaaaggagcctgtgagcaacgcattgctcagccacagttctttgccggtgccaaatttaggacgcgctgtacttgtag

SEQ ID NO: 48960 - DNA, 31 bp, Homo sapiens; identical to SEQ ID NO: 8367
  chr11:111945412-111945443
  hyper

SEQ ID NO: 48961 - DNA, 30 bp, Homo sapiens; identical to SEQ ID NO: 8368
  chr11:112045967-112045997
  hyper

SEQ ID NO: 48962 - DNA, 31 bp, Homo sapiens; identical to SEQ ID NO: 8369
  chr11:112046231-112046262
  hyper

SEQ ID NO: 48963 - DNA, 311 bp, Homo sapiens
  chr11:112096984-112097295
  hyper
agagattcagatagcgagagacacccttaactgtctcccgaggccgggattggccagagcggaagcggagacgcacttcctaggggcgcgtctggcacgcactgcgcagccgcggtgggaggaggcaccggccgcgcggcgggaggaggtgccggccgagcaccgcagacagcgccgggaagatgagcacggaaggtggtggccgtcgctgccaggcacaagtgtcccgccgcatctccttcagcgcgagccaccgattgtacaggtagggtgtgcacacaggtacagcggcgggcggtgggcgccgggcc

SEQ ID NO: 48964 - DNA, 868 bp, Homo sapiens
  chr11:113345085-113345953
  hyper
gggccgagagccgggcggtcaccctccgctactgccgccaccgtcgcctgcactgccgggtagaaacgggtctggcacccaagcctccctccccgactaggtgtcaacccaagagaaggcgaaggagaacgaaagttcaggaccaaggacagcggcaaccgtgggagcgggagaatccagccagaatctgcctctcccccatccttagcttctgccttagaaactgaaaagggtcaggtcgcaccaacacagagttgccaaaaacagcccttcttcctccggaagaagtcggaaactctggccgcgagccccgggtctcgcgcttgggtgctgggggaagtgccctcccgagattgtggggagcggcctccctcccgccctccgatgccgcggctccgccgtgctgccctgggcgccccgcggggaggctgccccagctgcgcccgctcgtgctcggggagaggattcccttctaagtggcgaggaggctactgagaaggagggagaggggatagcagccgcgggctccagacgccctctgcccccgcccgacggggagcccatgcagagccggatcccaggcgggcgctcccgagcaggcggccaggagtggccgcacaaacttctggtcctggcctcgctccccttggaggtccctcctcctctccccgtgacactgagtcgcccgccgctccatccggccggtgcttaccttcaagccatagggcgcccgggggcagagacggcgccggctgcttgaggcttccagctcccgccgcatccacgcgcggccgcccctccggcagccgtccggggccgccactctcctcggccggtccctggctcccggccccgccgcgccgttcag

SEQ ID NO: 48965 - DNA, 158 bp, Homo sapiens
  chr11:113644513-113644671
  hyper
cggaaggcgaggggcgcactacaactcccagcaggcaccgcgccaatcccgagatgggatttccacggtgtcccgtagttggcaaactgtaagcagacgcgttttcttccttagttgttttcaaagttcgttgcttcccgcccgtttttcactggagg

SEQ ID NO: 48966 - DNA, 30 bp, Homo sapiens; identical to SEQ ID NO: 8372
  chr11:113745707-113745737
  hyper

SEQ ID NO: 48967 - DNA, 31 bp, Homo sapiens; identical to SEQ ID NO: 8373
  chr11:113746651-113746682
  hyper

SEQ ID NO: 48968 - DNA, 30 bp, Homo sapiens; identical to SEQ ID NO: 8374
  chr11:113907091-113907121
  hyper

SEQ ID NO: 48969 - DNA, 434 bp, Homo sapiens
  chr11:113929592-113930026
  hyper
agaaaagtttctcccaggactcgaccttggcctccagcaatcgcgacagctaaaaacgggtgtctcgcttcgacaatagatccccgcggaccttctggcacctggttcactagcgcccgcgaactctgcctcgggagacttattgaaatccggatgctcaagccgggaggcgcgcagtaaccaggaggatgagagggccgggtttgggctaggaaagcggccttttaaaacagatgtcagggggactgcagccccgagccatgagaaaaaagttaaaggcgagatgacacgcactgaattggggcaaacattggaagaggagacaaaactgcgtgcttgagcaccggggtgcggggagggggggacaaaacccgtatccagtgcaaattaaaatcttgggagtaggtgggggctgctgcgcgcccttcaccctc

SEQ ID NO: 48970 - DNA, 1441 bp, Homo sapiens
  chr11:113930325-113931766
  hyper
ccagcactaaagatggagaggcgccggggccttgcaggggagggggctcggcgttgacgtgggacgcggcggaggcgcagcagccggtggtgatttgctaacctcgcagcagagaggagttgagggcgatgagagcgggtactgcgaactgccgggcgatgctgtcgctgccgccgtgatacggagagcaacagttccccagcaacacccctccccgacacaggcacacaccccccgacaggcacgcacacccaccccacagtgcccggctcggctgcggtgagtgaggggccgggaagaggcgcaccgcccagcgagcgccgcgcgccggggcttcccggggctggagaggtctggggggcgcgcgctcgcttcggccactcggccgctgggcttgtgccttttttatttggcgtgttcccttcctgccgctgcagccgtcgccgccaccggttgggggtcggctagaagggggagccccggctgtcagcctgggcgcagctgcctccccagcccttcctcttcagggcacggtcggggtgagaggtggggggcgtagcggtgtgcgggggctgagggcgtgagcagaggggtcggggatccggaggctttgtaccgccaggggctggcggagcaacagagcccgtgggtgctcttatgtatgcggaccggtgcgcgggcgcaagataaggttgtggtttatttatttgtgtgtttattcgccggccggctgggaagctagaatcggaggagctgacgagtagatctgggggcggaggggagcaggactgggactgcttacgttttgtttctctttgagaaaacgtggtgggctttttcttgattggacttgatccccaccccccttttgcaggggagggagggaagctccagagggtctgcagcgctgcgggccctcctcggctctcggcgggaccggcggtgacaccggagctcgccgtgcgctcccggccgctctcggtgggtgccggtctctgcacctgatgcgttcgggatgcctttcccaccctggcgcgcccgccgctagctcgcacagcgcctcgcacactcccgcacgcgcttgaaatgcgcacggtcccgccggcccgcggaaccacccggacgcacggagcgctccgcaccgactcgctcgccgcctccccgagacgctcgcaccgtgcttgggccgggcgcgctggccgctggcgccgctggccagaggcctgggacccagccggtcgctcccagggggtcacggccctgggtcggagagggagggcgggcagaccccttctcgcctttcctcccacaactcgctgcggggcttttgtgcttccccttcgccgcggggcgggtccgcctcccctgccgctctcgccgcggagtccagcccgcccggactgtcgccgttcctccccgtctctttcgctttccctcgtcc

SEQ ID NO: 48971 - DNA, 159 bp, Homo sapiens
  chr11:113932091-113932250
  hyper
gttctcagaaaccccgatgtctgcgggaaagcacgcggtggctcggctcggctgaatgctcatcccaaccttgacggcctccgtccccaccccggggcgggcagcaaaaatgtcttgaccagccgtcctgtgaatcctttctgcgtgagcttggtggct

SEQ ID NO: 48972 - DNA, 30 bp, Homo sapiens
  chr11:114310042-114310072
  hyper
catctggtcgcaaccgcaggtgagactcta

SEQ ID NO: 48973 - DNA, 3093 bp, Homo sapiens
  chr11:115373104-115376197
  hyper
tatgcgccagttaccgagcctttactcacgctcacgtttaactgacactggcgctttttacaatgcagcagcacgagggatctctttcaggaacattttattgaacccatccagtcagaggcatcacctgaaatgaagttgtaaccacaccggcatcggctgaacccaattatctcgtaactcataaattaagaattcacagaggaaaaacacataaacaacatccggagacagtggcatggaggaaaaaaaccctcagcgctggaattgacgctgctgccagacgccccccaataggtttcccaagccgagctcctttgcaagcctattttgggggcaagcagccaacccggcgtcccccaaatctcaagctagcacccccacacatcccccgtctcctacagcgtgtctcctgcggtgtttacataactgtgtgtcctctagcgtgtaaacaaaaggcacagcccaagcggagaggcgcccctgaagcagcaccgtggccccaacgctgtgcccgcccgggcctggggctccgcaggtgggggctgagctctcggcgtcctccgccacttgttgctcccgggtcctgcagctctggagctgcaaggaggggctttgcaggctcagagccctgctgcatcccctcctgcatcgccgctcgcaccccgcggccccgtgccactcggtcccggcgcccgcctggagcctgcagcaggggccagaggacgccgcgcggctgccaagcgcggcgaggtggcgggaagggaggctgggtgcagcacagccggcctctccgctgaggaagagctccggctcccttttgttagcaaaagcaaacactgccctcttctttcccgaccgcgccaacgcgcccggcacacgggcagccacacatcgggctccagccgagtgctcggtgtcttcagggaaggcaccgggcgtgcagagccgcccctgggcaaattcccaagactgctcttcacgcagggagcgcgcggaggcccgcagggtgcccgcctggccgcagaggccgcgacgccccctccgccaccctcgggccgccgaaagaacgggcagccgggaaatcccgtgtccccactcgtggcagaggacgctgtggggcgggcgggctgcgggctcccggcgccttcccgcagaggcggcgacagcggccgccccccccgcggggccgggccggggaactttccccgcctggagccgggccaaaaagacccgcagcagagccgagggggcggagggctgcgaacggccggagggaaacacgagaggcgtgcagtttggggacaggggagaaaggcagagcgcgttgggggaaggggcaggggagatcagacaagtctggggatgtcctggggaccggggagaaatcacgccgcgggcggctgggagtcagccaccaggaggcttcggggatggagaactgggggggccctctggagaggtgggggcgaatggacagccctgggaggtgggaggacctgcaagttacggggagaacggcgagtttagaagggtccggaagggttgaggttgtctttgaaccatccccttcccccatgctttacagcccccgggccccccattctcactccactctgcaccccgcgccaagccggggagagaaggtgtgggtgcagccatccctggggactctcattcacacttagccgggcaggggagaaggggctcacagatgccctcagccccttccctctcagccctgagtttcctctccacactccctccgcttcggatgtaggaagtggggggaggttgtcatggaaacgtttcccccctctgtggccaaggctactggggtgccttcggagatttaggggccaaccggtcggtgcccacacctacctgtggggatcagtgccgcggcggagaagagcaacagcagaagccggagccggagcccgggaggcgccgccgccgccgctgccgccgcacactgggatccgctcggcagcactacactcgccatgtcgggcacctgcctcagactggcggcgttggctgcctccggagcccgagcggacagctaatgagatgctaatgacatgcgctggaggcggagtccgggcagaccaatcacagcgccgcgagcccaacccggctctcggagggcctcgctccctcccccaccccgccccctggcgctggcgttcggcggcgcgcccgcgccacctaggggcggggccaaggggaggggcgtatgcaaatatgtttatgttaaaattcgggttttgctttccccggatcaaggaaaaagtgttctcccgggcgcctggcgtgcaaggactcgggctccagggggcgggtctagcttcttgtacacctttattaggaatgtttatagcaatcgctgtatcagaccgacgactggagaatctcccttaagagggtcctctgtcccgcacaccgagtgcatctggcctagcgaaccagacgttgcaaatttccgtcactcaccttgcaccgaaggaatagatctttgggaacgggggctgtgcgggagtggagagtaagaaggcaggtccccggattgacaaaacaatctgggagaagtgcatgcgtgctttgcacgtccggcggagcgggagagcccgctcaacagcctagcggtagactcggggatagttggagaaggcagccgtagagtcgggttctgagattttccagtcggtctttttgcggcagaatctcgggaaaggtagatcgaggagggtatgctcaggctcctccgcttgtcgagggtctcctccctggttttaatatataggtgtgtgttgaatatatgtgtgaaatatttgtaatattagatatttaagattacacaacaacggaaaaaattagtcaaggcttcaggtgaagagcgggggtggtgggagttggggagagggagtgtggtgaaggcagggtctgccgtgttcctccttcggggctcaaaccctctcactcctcctctgcgcccccagcccttcctaaggaagctggggaccaacaggtgctccgagcttcccctgtctctgggagagcctctcctgctaaagcgacttgcatctccgg

SEQ ID NO: 48974 - DNA, 161 bp, Homo sapiens
  chr11:115529934-115530095
  hyper
tgggaggggaccctgcgggaggaggctgcttcagtctccagagaccatctcccatctctacagcgactcccctatgaccgtcccccacccggtgctctcgggccacggggaagggacactcgggaaagacaccagagaccgggagggtgcagctgggctct

SEQ ID NO: 48975 - DNA, 402 bp, Homo sapiens; identical to SEQ ID NO: 8381
  chr11:115530221-115530623
  hyper

SEQ ID NO: 48976 - DNA, 554 bp, Homo sapiens
  chr11:115630577-115631131
  hyper
ggccagatgaagggagctgctcggctgagctgcggaccagcgcgagagcagcgggcagtggcggaccagcgccagggcagggcaggggtggacagagggctctccccacccttccctcctccagtgaaagtaccagaagagatggcggccgctccgccgagtgtcattaccgcggaagcagcagaagccggcggcaggagcgggcccgagagcccgcggccagtggcctgcgcaccccgcgcccagcgcccccgccgcgggtcatcagtgtcagcgttgaggggtcccggggagcggttgcagggcggcggcggcggccgggtcatcagaagcacagtggagccgccccctgctttgggaggagcaaaagagcctctcgcttgcctcccgctcgagctccttctcctcttccttttcctagcgcttctctccctccctcggcggggtccgcagagacagctgggcaggcggaggctgcgcgcctctcgcacctccacgcccaccctcccgccgcccccccctcggcctgaaagatctgcgtccacaccaccctg

SEQ ID NO: 48977 - DNA, 30 bp, Homo sapiens; identical to SEQ ID NO: 8383
  chr11:115791602-115791632
  hyper

SEQ ID NO: 48978 - DNA, 161 bp, Homo sapiens
  chr11:115846300-115846461
  hyper
aacacagcaaaagctcccagccgcttctctggctgcgaatgaaaagcgctgcctcctggctcccgggcctgacggacagggggcctttctgctcagctattattagagccgatgtggcagaagctcaggcagctctgggcggtggggggttcttgttttaa

SEQ ID NO: 48979 - DNA, 31 bp, Homo sapiens; identical to SEQ ID NO: 8384
  chr11:115936675-115936706
  hyper

SEQ ID NO: 48980 - DNA, 31 bp, Homo sapiens
  chr11:116064587-116064618
  hyper
agctcctgcaaagttccggtcggagcttgga

SEQ ID NO: 48981 - DNA, 30 bp, Homo sapiens
  chr11:116643408-116643438
  hyper
gcatgagcaggggtcggcggagaagccgag

SEQ ID NO: 48982 - DNA, 254 bp, Homo sapiens
  chr11:116643718-116643972
  hyper
acaaaatgcctcaacgcgtaacggacgccagccacccgacagggcggggccacggccggaagtggcggagagtgctaagaatcgcgcggctggcaggtgcggccaccgggacgcgctcgcaggctagccagggacgtgcgcaccttcggggcgctccacagccctgggacgacgccaccaggtttcttctcttcattcactcacccacccacccacccatccatccaaccgcagcaagcgctgttctatgaggc

SEQ ID NO: 48983 - DNA, 613 bp, Homo sapiens
  chr11:116706357-116706970
  hyper
gagttgttgagatccggcaggaagtccctgctccagggccaaaggccccacccgggctcccccggatgtccccgcacccccctctattctcccaaaagaaagaagctgcttcccactttggaaacgtttattctgagcaccgggaaggggggcggcggcgggcgcctcactgggtgttgagcttcttagtgtactcctcgagagcgctcaggaagctgaccttgaagctctccagcacgggcagcaggccttggcggaggtcctcgagcgcgggcttggccttctcgctgagcgtgctcagatgctcggtggccttggcgtggtactcggccagtctggcgccgccgttctccttgagagcctcaaggcgcgcggccaagcgctggcgcagctcgtcgctgtagggggccagatgcgtgcgcagcgcgtccacatgggcgcgcgcgcggtcgcgcatctcctcgcccagtgggctcagcttctcttgcagctcgtgcagcttctggcgcgcgccctcttggagctctgcgcgcagcggctccaccttctggcggtagagctccatctcctcctgccacttcttctggaagtcgtccaggtagggctgcacctt

SEQ ID NO: 48984 - DNA, 30 bp, Homo sapiens
  chr11:117014685-117014715
  hyper
tgtgaagggaatggcgtcagtgtgacttca

SEQ ID NO: 48985 - DNA, 111 bp, Homo sapiens
  chr11:117015080-117015191
  hyper
gcgccacccgccgacgcctcagccgcttggggcccgcacggaccctctacttcagtgagtgcatccagggtcgcagggaaccggtggcttagaggcgggggtcggaagggg

SEQ ID NO: 48986 - DNA, 30 bp, Homo sapiens
  chr11:117050218-117050248
  hyper
cgattctgccgccccgctacccttttggga

SEQ ID NO: 48987 - DNA, 30 bp, Homo sapiens
  chr11:117103865-117103895
  hyper
tcctacccgcgccacgggctctctagccac

SEQ ID NO: 48988 - DNA, 489 bp, Homo sapiens; identical to SEQ ID NO: 8386
  chr11:117186648-117187137
  hyper

SEQ ID NO: 48989 - DNA, 59 bp, Homo sapiens
  chr11:117198409-117198468
  hyper
aactacactcccatcgtgcaacggaaaacggacagagctcctgcgtgcaccgaagggac

SEQ ID NO: 48990 - DNA, 147 bp, Homo sapiens
  chr11:117352807-117352954
  hyper
cagtttagctccttcgcatggcccttgatggcgatggtggtgttggggtgggaagtgatcatggccgggactggggggcggaggcagagaaggcccagtgaaggtcgggagaccagcctggaggaggcacgcgtgccctgcgcagaa

SEQ ID NO: 48991 - DNA, 294 bp, Homo sapiens
  chr11:117667149-117667443
  hyper
ttggagaacaaacttgctatccgagggacctccagctctcgggactctcactatccccaccctgcctccagccaatgcgcggataagcgccatgcggtgcgccaacattcgcgccagggctggggtccgcggcgggagagggacgcacggacatagcggaggaatcagccgccgagtccgaggcctgaataagcaaggactcctaggtcaagagtcacggcctgaggacccctcgactcggagggcactccggggtcccagtgccaccaagccgcaggaagagggcaaggggct

SEQ ID NO: 48992 - DNA, 124 bp, Homo sapiens
  chr11:117746422-117746546
  hyper
gggagaagcctccagtagccacggtcccgcgagcgtgcaggcttgcagcaggtgacgcggcagacccatgtttccagcgaggctgctcccagctcccaccctcgggtgcctcctctaccagcca

SEQ ID NO: 48993 - DNA, 35 bp, Homo sapiens
  chr11:117747145-117747180
  hyper
tgcccaggcggggaccgcggcgcagctgaccgcgg

SEQ ID NO: 48994 - DNA, 30 bp, Homo sapiens; identical to SEQ ID NO: 8387
  chr11:117789330-117789360
  hyper

SEQ ID NO: 48995 - DNA, 109 bp, Homo sapiens
  chr11:117856817-117856926
  hyper
gcttcccagcacatgcacacacgcgcgcgcgcacacacccacacacacgtacccacggccggccgggctacccggaccactttgatccgaaggcactggaggcccagag

SEQ ID NO: 48996 - DNA, 30 bp, Homo sapiens
  chr11:117857278-117857308
  hyper
ccctgccctctccgcgcccgctccattaaa

SEQ ID NO: 48997 - DNA, 89 bp, Homo sapiens
  chr11:118023498-118023587
  hyper
gccgccggtcggggctcgggaaagttagcgggcagagagcgagaggagggggagggagggagcggagggggaggcgcgctcgcccgctg

SEQ ID NO: 48998 - DNA, 30 bp, Homo sapiens
  chr11:118230309-118230339
  hyper
ttgctgtgctgagtcggaagtgggaaccct

SEQ ID NO: 48999 - DNA, 30 bp, Homo sapiens
  chr11:118230634-118230664
  hyper
ggaagaggccggagcgctatcattgcatta

SEQ ID NO: 49000 - DNA, 30 bp, Homo sapiens
  chr11:118662876-118662906
  hyper
ccggactgtgagggcgtatcttgggggacc

SEQ ID NO: 49001 - DNA, 30 bp, Homo sapiens
  chr11:118796410-118796440
  hyper
ggactccgagggtccgggtcacagcccccg

SEQ ID NO: 49002 - DNA, 30 bp, Homo sapiens
  chr11:118799420-118799450
  hyper
atctgactgcccagcgcccctcacttgccc

SEQ ID NO: 49003 - DNA, 141 bp, Homo sapiens
  chr11:118977771-118977912
  hyper
acctcacaggcgtccgacctgtggaaatctaacaagcataggggaaagcaaaggcagcatcttaggtaagtgaagttactcttgccttgagctgagtgtgggagcaccgcgattgcaagatggggcgaggtgatcaaagat

SEQ ID NO: 49004 - DNA, 30 bp, Homo sapiens
  chr11:118978940-118978970
  hyper
agagaaaagggtgccgctaaggctggaggt

SEQ ID NO: 49005 - DNA, 30 bp, Homo sapiens; identical to SEQ ID NO: 8389
  chr11:118992029-118992059
  hyper

SEQ ID NO: 49006 - DNA, 30 bp, Homo sapiens; identical to SEQ ID NO: 8390
  chr11:118992398-118992428
  hyper

SEQ ID NO: 49007 - DNA, 65 bp, Homo sapiens; identical to SEQ ID NO: 8391
  chr11:119039731-119039796
  hyper

SEQ ID NO: 49008 - DNA, 196 bp, Homo sapiens
  chr11:119039917-119040113
  hyper
ctccccctgcgttcccgaggccacccgaaagtaggagagctgtttgggacccagtttggtggaggagctctggacctgtaggaacaccgcccctgtacgtttcctgcagtgccccctccttttctcattgccctggagacctgggtgatcaccggagaactgccctcggccccgcaagtcccgtcttgactcagtg

SEQ ID NO: 49009 - DNA, 30 bp, Homo sapiens; identical to SEQ ID NO: 8392
  chr11:119077264-119077294
  hyper

SEQ ID NO: 49010 - DNA, 237 bp, Homo sapiens; identical to SEQ ID NO: 8393
  chr11:119103175-119103412
  hyper

SEQ ID NO: 49011 - DNA, 84 bp, Homo sapiens; identical to SEQ ID NO: 8394
  chr11:119142430-119142514
  hyper

SEQ ID NO: 49012 - DNA, 107 bp, Homo sapiens; identical to SEQ ID NO: 8395
  chr11:119144574-119144681
  hyper

SEQ ID NO: 49013 - DNA, 131 bp, Homo sapiens; identical to SEQ ID NO: 8396
  chr11:119145546-119145677
  hyper

SEQ ID NO: 49014 - DNA, 143 bp, Homo sapiens; identical to SEQ ID NO: 8397
  chr11:119146701-119146844
  hyper

SEQ ID NO: 49015 - DNA, 103 bp, Homo sapiens; identical to SEQ ID NO: 8398
  chr11:119148461-119148564
  hyper

SEQ ID NO: 49016 - DNA, 563 bp, Homo sapiens; identical to SEQ ID NO: 8399
  chr11:119148860-119149423
  hyper

SEQ ID NO: 49017 - DNA, 493 bp, Homo sapiens; identical to SEQ ID NO: 8400
  chr11:119155747-119156240
  hyper

SEQ ID NO: 49018 - DNA, 127 bp, Homo sapiens; identical to SEQ ID NO: 8401
  chr11:119167630-119167757
  hyper

SEQ ID NO: 49019 - DNA, 87 bp, Homo sapiens; identical to SEQ ID NO: 8402
  chr11:119168097-119168184
  hyper

SEQ ID NO: 49020 - DNA, 176 bp, Homo sapiens; identical to SEQ ID NO: 8403
  chr11:119169060-119169236
  hyper

SEQ ID NO: 49021 - DNA, 101 bp, Homo sapiens; identical to SEQ ID NO: 8404
  chr11:119170360-119170461
  hyper

SEQ ID NO: 49022 - DNA, 30 bp, Homo sapiens
  chr11:119186499-119186529
  hyper
tccgcacacacccgcggaccccaccctagg

SEQ ID NO: 49023 - DNA, 30 bp, Homo sapiens
  chr11:119187376-119187406
  hyper
aggctttgaggatgcgccccagctgcgcct

SEQ ID NO: 49024 - DNA, 31 bp, Homo sapiens; identical to SEQ ID NO: 8405
  chr11:119187862-119187893
  hyper

SEQ ID NO: 49025 - DNA, 30 bp, Homo sapiens; identical to SEQ ID NO: 8406
  chr11:119192140-119192170
  hyper

SEQ ID NO: 49026 - DNA, 30 bp, Homo sapiens
  chr11:119204861-119204891
  hyper
gcaggctgcgaaggcggtgctattccaaag

SEQ ID NO: 49027 - DNA, 46 bp, Homo sapiens; identical to SEQ ID NO: 8407
  chr11:119209336-119209382
  hyper

SEQ ID NO: 49028 - DNA, 30 bp, Homo sapiens; identical to SEQ ID NO: 8408
  chr11:119211032-119211062
  hyper

SEQ ID NO: 49029 - DNA, 30 bp, Homo sapiens
  chr11:119234935-119234965
  hyper
ctcgggccccgcgacgtcagcgctggggcg

SEQ ID NO: 49030 - DNA, 30 bp, Homo sapiens
  chr11:119251839-119251869
  hyper
gcgagtgagctgcacgcacacgtggggagg

SEQ ID NO: 49031 - DNA, 30 bp, Homo sapiens
  chr11:119252459-119252489
  hyper
tgttcctactgtggcgtcattagagcccgg

SEQ ID NO: 49032 - DNA, 774 bp, Homo sapiens; identical to SEQ ID NO: 8409
  chr11:119293352-119294126
  hyper

SEQ ID NO: 49033 - DNA, 773 bp, Homo sapiens
  chr11:119455153-119455926
  hyper
cgattccctcttccgcggctccgcgcggcggagctcaggggcgcaggctcttagagctgcggtggggcgggggccgcgggacgtccgtttgttctccgcggaggaggcgacgcgccgccaacgaccgcagctccacgtcctggcgcttctgggagccgccccagcgggagccagggagaaaatgaatcgccttgagtgacacaggacatggcagattggatgtttaatttgggtatctctttagaacgccccccacgcccacctcctctgctcccacttagcatccagccggcgagaaagccctgctcctcacaaattgccttgtcggctcggagaaaaatgccagcgtgactgattgctaggtgggtccctccaagtgcgcgggaaggaaccggcacgaccgcacaatgctccttcctacagagacgcggcgtcgtgccagagccggagatttgagtcagacaccgggaaggactgcccgtggaggagggcggctcgtggggctgggggtttgtttaggggtctctcgggtccagagggagggccaggcgaccctggctggggtctggtggctgtggggggcctgcggggcccagaggaaaaggccggcacccggtccgcgagagggggcacgtacggggcgcagaggcagaacgcagcccgcagcagacggacagccttccccagactgcctggagctcggagcccggcgccgaaacctgcagatcacaacctgtcagtcgcgctttcccggcagcctcacctgcctccag

SEQ ID NO: 49034 - DNA, 313 bp, Homo sapiens
  chr11:119587837-119588150
  hyper
agcactgagaggtgggcgccgaggactgatgctctctccctcttccatcatcaccgccccttcaggactggccacgaggcccatcatctgacccctgggagggtggggaacggtgctgtggtcagggcagaggcaggccgggagcagggggctgtcgcacacgttcccccaaaggcctatccatcacgccagtggagaccatcagagtgctctgccggcccaggacactgatgactctccaggcaccataaagacagggaataaatctgggaagttgctgggtaggagggtgcctcaacggcagggctggcca

SEQ ID NO: 49035 - DNA, 261 bp, Homo sapiens
  chr11:119598251-119598512
  hyper
ccaggcgaggggactcggtcggatttgcctcctaaacgcattttccagttcattccccagcacaatatgcctgggctggtcccagcctccgtccccaccccacccgtcagaatgggccaccagggccaccccggggtcgggcgcgaggttaacccctcggctgccggcagcccgcacctcgaggaaggacacgcggggcaccctcgggaaagtgggtcatgcagctacttggatggcaggaagcccgcggtgtctcctcca

SEQ ID NO: 49036 - DNA, 15 bp, Homo sapiens
  chr11:119598929-119598944
  hyper
tttgtaaagaactga

SEQ ID NO: 49037 - DNA, 314 bp, Homo sapiens; identical to SEQ ID NO: 8414
  chr11:119599011-119599325
  hyper

SEQ ID NO: 49038 - DNA, 58 bp, Homo sapiens; identical to SEQ ID NO: 8415
  chr11:119600031-119600089
  hyper

SEQ ID NO: 49039 - DNA, 145 bp, Homo sapiens; identical to SEQ ID NO: 8416
  chr11:119612122-119612267
  hyper

SEQ ID NO: 49040 - DNA, 210 bp, Homo sapiens
  chr11:119612323-119612533
  hyper
cgtacttttactggggtacggggagccctgccccacggctgtcagctcgggtcgggcgcgccgggtgcccaggaggcagcctcccaccctcccccgcacacgtcgttccagtccctccgccacaaagagaccattgattgggaagagcggccgggttgtggtaggaaggctggtggggacacgcacgcacacacacgcgcgcacacagag

SEQ ID NO: 49041 - DNA, 457 bp, Homo sapiens
  chr11:119613000-119613457
  hyper
caccccgcctcctgccgcgcctgacactccgcagggcccgggggtgggtgggcaggggtgcgagggggcgtggggctgggcgcgccggcctggggggaaagccccgcctcccggatgtcgtctcttcgccccctactagctcttgtctcctccccaacccctcgccccaccccctgcctaatttttgccagtggatcatcggcctttggatgaatccgcagcaaatggctcattcggggcgggcccgcctccccatccccccagtgtgcggtctcctctccccagcaaagatgttcggtggcacttacggcccctttttaacaccaggcgaagccaatattgttaggaaggaagaactgctgtggcagctgctgcaaagacaaatcatatgcagtaatgcatcacgggctgagggagggtctgagtgtgcggcagggcagcgcgggcttatcagcgc

SEQ ID NO: 49042 - DNA, 371 bp, Homo sapiens
  chr11:120039778-120040149
  hyper
cccggcaaagagggcgccgagggggcgcagccggggcgctgggcggacccagaggggacatggagaggaacgcggaaggtacgcggtagagacggggaggtggcgcgaggcgggacatggtgagcgacccgaggggcgcgcggactgggctcgcggacggggctcgcggacgtagagcagtcgaggcgcggagggggagcgcgcccccgtgtggccaggcggggaggcgccacggccggggccgtgggggcggtgggaagcgctccgcgtccgggctctcagcgttccctggcctgccccggctcgctaggctttgatggctgcttccgctccccataaaggcctgtttcatggccgacgccggcatgggc

SEQ ID NO: 49043 - DNA, 354 bp, Homo sapiens
  chr11:120110686-120111040
  hyper
gcgggatcgagacccgccccggcagcacccccggccccctccccaggtccccagctccatgtatgcaaatcactgctttgcatgggcctggggccaggcgcggggctcctgccagggggcgtggccggcggcccccgccccgcgccgcgtgctcacctggggagtgtggcaatcctggcggcgccgagtgttgcccgggccggagcagcggagcgcgcgacagtggcggcgacggctccggcagcggctcccgcggcggcggcggccgggaactggaggaaggagaccctggcttcgcaggggccccggctggggcagaggcgaggggcctgggggggcgctggctttggcccc

SEQ ID NO: 49044 - DNA, 164 bp, Homo sapiens; identical to SEQ ID NO: 8418
  chr11:120196356-120196520
  hyper

SEQ ID NO: 49045 - DNA, 102 bp, Homo sapiens
  chr11:120206446-120206548
  hyper
cccagctgctctcccgcagccctgcgcctccggctcatgcagcgctctccccccggagccggcaggtgcccaggtgagcggggcctgcggaggcagcgaggg

SEQ ID NO: 49046 - DNA, 30 bp, Homo sapiens; identical to SEQ ID NO: 8420
  chr11:120207924-120207954
  hyper

SEQ ID NO: 49047 - DNA, 974 bp, Homo sapiens
  chr11:120435028-120436002
  hyper
atttgtaaacttattagtgtgcgctcgcggggagggggctcgggaatccgggcccgggcaaccggcgccgcatgctaatcagggggcgcccgcccccgctttgcccgtggccctcctttcccgattccccgacgtttcgggaggagtggggtcggagcgcagggctgggaagggtcttaggacccaggaaggagacgggtgcctcccagagaggaccccatcccctccgaggtccgggcggctcccggcctctccctggggtgccgtagcccccctcgacccgccttcccgcagccgcagtcgttcgggcctggaggtggccgggcatcggtgccgacgccgcgagggcagcgcccgcggcgggaatactaatgcaccctaaagggcacggccgccgccgcagcaggtaattagctggaccgcggcggagcgcgcggaggtggctgctggctgcaaggactgcgcccagcctccgcctcgcccctcgaggctcccgcgtgggccggcgggcagtgcgtgggccacaggaagcgggctgactggacccggctcaggacttcgcacaagggcagctctttgtttacagctcctctcccagctccccgctttcctttcgcccaccgcctcccttttccggcgatcggctccgccggctgcgggggggtggggggggtggggtgtcctgtgtagccgcccacctcctgtcccggcctcgtgctcccgctggggactgtttgcggtgagtctgtcgcacgcacgtcagggccgaggcagtgatgcggggcagcgtgggaggacgggctgcggagcccgcgtcatcctgcctgtggggagcgctgtgcctgctctcctgccagcgcgcccagctgtcccggccgccgccacgcgggactgcctgccatgtcgccaccggctgctgacctcattaggcctcatgtcatggaggagccggcgattaaaggactctaagaacc

SEQ ID NO: 49048 - DNA, 507 bp, Homo sapiens; identical to SEQ ID NO: 8422
  chr11:120894618-120895125
  hyper

SEQ ID NO: 49049 - DNA, 827 bp, Homo sapiens
  chr11:121526133-121526960
  hyper
tctctcctcctcctctgccctcgggcagtcctcagggacaaagctctttgttgtgaacactccgagacaatacgggattgcacagtccccagggcacaatcggggctgtcctccatggagagtgatcgcccgggcagagacccccacctgttgatctcccccttcccggggcgagtggcaacctgcattgtgctggggacgcacgcgtttccacagcaggctcagcagatggtgctggtgagcaaagccattcccgtccctctcgcgcccctccccaccgccagagcctcgctggtctaaagcaaaaacagatgttttcatcatttctggatctggcatgtgactcgcagttcagcaatgcgccgacataacccagagttgtacgtccccatcatcccccgcaaaataaaaatcctgaacttaaacgagccttcctcctaggcgagccactgacacatgatctgtgtaatccacccggcacgtgtttaatcggactccaactgcaactgcctttgtagccagccccggctctataattgggaagttgtctttttttcagcgaagacacgggacagccagactagctatctttacaccaagggctgggaagaggcgctagccttttaaaatagccctggtctggctggctggcgaacctgtctgcgtgggagccggtgagcggggccagagcaaaacaggaaggccgcggcggcgcaccctgttcccggcgccctcggcaggtggcagcattggcccgagctggcctctgccgctggccagccccaaagcagggcccttttactttcggtggcctcaaaattattagt

SEQ ID NO: 49050 - DNA, 554 bp, Homo sapiens
  chr11:121593319-121593873
  hyper
cagagcacgtggtcccgccaaacaaaggaacatgtgtgctgcaaaccatccccctatcacgggagcgcagagctccgccaggagagggccgggcctgcgcactctaatttttcactgcagtttaaacactccgtgaggctctcaggaagcggcgggggtggggggcggccggagagaaggggcccgcgtctccgccgcttccatcaccgccctggaaatagcatctgaacgcgcacggcccgaccaggcttcccccaagctgctaagatttcatttcacctccgacaggcttcatggggactcgctgttaaaagatcactctcccgggatgctgtcgtgggggagggggcccggcactgtatacagctgtcaaaacgtctccgacaggagacgaaggcacatctgcacaagcctgtctcaggctgcggggcacacagggagcgcctcaaacctatcagtgtaatgccgagcggtaattgcattaggattagttatctcctgtgctctgctcattagcccggaggatggctcgcatccagcgagagggtggcaca

SEQ ID NO: 49051 - DNA, 30 bp, Homo sapiens
  chr11:121800444-121800474
  hyper
cccctctgatttcacgctcacacattaacg

SEQ ID NO: 49052 - DNA, 30 bp, Homo sapiens
  chr11:122086251-122086281
  hyper
gagcccagggctggcgactggggagcctgc

SEQ ID NO: 49053 - DNA, 30 bp, Homo sapiens; identical to SEQ ID NO: 8425
  chr11:122311278-122311308
  hyper

SEQ ID NO: 49054 - DNA, 207 bp, Homo sapiens
  chr11:122526546-122526753
  hyper
cggccgcttgccggcgttctggctcctgtggcctcaccaggaagcgtcagagtcccgacactggggaagctcggagcgccgcctccgctgccgccgcctcctgcctggctctgggtccccgagccccctcccctggcccagcccgactccctcctccttcccgaaccatccggctcgggctccttccctggcgatggctggccgctg

SEQ ID NO: 49055 - DNA, 31 bp, Homo sapiens; identical to SEQ ID NO: 8426
  chr11:122626283-122626314
  hyper

SEQ ID NO: 49056 - DNA, 826 bp, Homo sapiens
  chr11:122847486-122848312
  hyper
cagtagcccgtggaacgtggaagcgttgcgggacaggagcgcaacaagttcgggaagcagaaattgctctaggggttttctgtgcccaagtttcccgccgcgcgctggcgccgcgcagtacgcgggaggcagggcgtaaggggcgtctgcgcctgggggctacaaactcaggaagggtgccaggatgcagaaccgcgagctctagaggagaacagggacgggagaggatggaagcgccgcccagagaaggagggagtcgccttagtatttgagtcagagatgggactctggggatgggggatgggggcgagtgggaggttagtgacgagcagtgcacgagtctgtcctgaaactggacgttttaaagatcagattgtggttctatctggatctcggcggagcggaggccccagagacctggtccctttgcagccaaacggactgcccaagaacgggcaaggacttggcgtggagaggaaagaacagagctaggggcaagttgctgaaaggcgagggagaaaggggtctatgatcggagaaaacagagagccgagagctgaatttccagtctgggacgcggtacttgggctggtccctgaccccaaggacgacggacgcaggaaaatgggcgcccgggcgcacagtctcccgtggctgggaccgggagggctagaggggaggcgggaggccgggccgcgggccgtgctggctccgcaccggcctggaggacaggtgggttttgtttgtcttccaggagcggatttccaaggcccgccacgagactggagtctgagtcttccggtccaggagggaaccgcgctcggcc

SEQ ID NO: 49057 - DNA, 260 bp, Homo sapiens
  chr11:122848368-122848628
  hyper
cggccctgagcccagctccccctcgtctccaatgtccacctcgtcctctggctcggtcagcacgaagggaccggcgggcaggctcagccgagcctcggcggcggtggcggcctctgaaccgcgggggctgccctcggggctttctggcccgtctggtgctttgggttcgtcttggcttttccgcagttgctttttatgcttcatccgccggttctggaaccacgttttcacctgatttcggggagataaaaataaaatca

SEQ ID NO: 49058 - DNA, 30 bp, Homo sapiens
  chr11:122848985-122849015
  hyper
agagaaaatcagacccgggcctggcagagc

SEQ ID NO: 49059 - DNA, 96 bp, Homo sapiens
  chr11:122849413-122849509
  hyper
tcctgtccagagccccgctcgagaaattttgcttgggtaagtatgacatggggttggggtgtcggtacttttttttttctttttcttttctttttt

SEQ ID NO: 49060 - DNA, 315 bp, Homo sapiens; identical to SEQ ID NO: 8429
  chr11:122849808-122850123
  hyper

SEQ ID NO: 49061 - DNA, 74 bp, Homo sapiens; identical to SEQ ID NO: 8430
  chr11:122850148-122850222
  hyper

SEQ ID NO: 49062 - DNA, 80 bp, Homo sapiens
  chr11:122850424-122850504
  hyper
aacagaaaagaaaatcggaaaatagatccggaggctgtttaaaaatgtcttcttggagagacttccgtagggtcggccag

SEQ ID NO: 49063 - DNA, 428 bp, Homo sapiens
  chr11:122850779-122851207
  hyper
cctctcacgtctcctcgtccgtttcggggtcgcgctagggacccagctacctaatatagtcctcattctttttctcattctttccctctcactccaagcccagcgaagcagaagggtttgaggggtttttccatggccgggtccggggagacttgtctttcctgaccctcgcaggcttgactctgtctgagacgcaccaagcagagagaagctgccacaagcaacatcggccaatcccagagaaaataaacaaacataacaacaaccagtgcgggtacttagggctttggccactgctgtatgggaggaccaccggagcagctgagaatagattgtcaccggcgggtggtgaagccagtgcagagatgcggacctggatttacaaacacttttagctttgttctggattccagcgcgcacaaactgcc

SEQ ID NO: 49064 - DNA, 311 bp, Homo sapiens
  chr11:122852402-122852713
  hyper
gacaagggccgggacgaagtggaggacgcaggcagagtctccaagcctgctcgaaagccggcaaccaccctccgaggctcgaatctccgctgctctctcccgggcctgggctaccccgggcgctggagaggcaagaagacaagctcctgggtaggttgggtctctgtgttggagaattggcagcttggagaggggggccgggagagccaatgacgaggctgccagaggcagaggggagggtgcgggaggctcggggcggggcggggagctgtccgcggtgctgaacaccaccggccgagcctgggaacaac

SEQ ID NO: 49065 - DNA, 884 bp, Homo sapiens
  chr11:122854781-122855665
  hyper
tctcagagtgtttgcgggatcgggaagggagtggggggcaatgtagaccgcctcctccgtccttatctttcccttgtttcgtgagccctggactcagcgtcctgctttcccccaaagctaaggcaatctccccaggccctgctctcaggcggagaagccaggagcgatgaggggcggggcggctcccggcgccctcttttccagccccgctcccgcgctgccgccggagagggactcggggcgcagccgccccgcctctgccggggccccaggaggaatctaagaaaagagagatggagggaggaaatggcatcgcttcaggaaggggcaggacctccaggaccgaaggcgttttctttctctttcctttcagcgacactgggaaacaaagctccgcggctgaaaagaacaccacgcgcggccaggacccgagcagggccctggggcgctaagggcggggaaaatagggcatccggagtgcaggagattcctcagggccgcccccttctccgggggtgccctgaggaaccgcggcggggactcgccgctggcagcctgcgggtcctggtgccagcgcgcatgggcgggctgtgcggacgtggctggtcctccaaaggtttcagatcccgtccgggccgctcagtcccttaaagctgtgtcccaaagcctaggggagacagcgaggctggggacgccgggaagtttctctgaggtgtggggctcctgagcagaaacgcgcgggggattgccagggctgcagaaactttggctcgaggcggtggctggcccgccttacttccgtggtggggttagggaggcccctctgaaattcaatcttggtattgaatctggtatcttcctgtggcaggcaacgcataccaaag

SEQ ID NO: 49066 - DNA, 671 bp, Homo sapiens
  chr11:123065522-123066193
  hyper
ggctgcagggacacccggtcagaaccggcgtctttcccggacgcagggctgcgtttgcccacggccatccaaactcccgccctcccagaggcactcacctagcaagaggagaaggaggagggacatcccgatccccggacgcgggcgcttccccgctcagctgctgcttggctccggggcggccgggcgcctccgacggacctcgggcgagctgggcgcggcgcctcggggtgcgcgcgaggtggctgcagccatgtgccgggcgggagccggccccgcgccccgtgcccctgggggcagatgggctcccggcgctcgccccaccagctggcgcccggacgggagccgggaccagggtcagggaggaaaacgcgaggcgaaaaggcgctaccgcttcgtggaacacttttccctgtttggaaagaaaaaggagtgaagaaagagagagggaaaaaaaaaattcagctggaaccacatggttgcctcctaccgcagcccctccctctctctctcgctgttccctccttccctccctccctcccgcgcggcgtttggggtttgcggtgggggccggtcggggagaagcgtgagctggccgggcagggagggccgggggagacctggggccgtgcagaggcgggtgggttgagaggcgccgggcgtaggattga

SEQ ID NO: 49067 - DNA, 31 bp, Homo sapiens; identical to SEQ ID NO: 8436
  chr11:123084067-123084098
  hyper

SEQ ID NO: 49068 - DNA, 450 bp, Homo sapiens
  chr11:123172412-123172862
  hyper
ggcccaagaacctgcatctaacgacttcccggtgtgctgtggcgcagcgggcagggacggaggcgcccaggggcaggcggcagcacgggaagaggccagcaggtggcgcggtcgcccaacccggccgccccccgggcgccgagggaagcgggtcaggggcgtccccacctgcccaagcgccggctctcccaggcagcaggggcggcggcggcctggctggctgcgctgcagagcggagagcaggagcggcgtgggaggaattcggagcactttcgccgcctgcctccttttactgctggttgccctcaaaggagccctctccctccacacgcctttgggccttaccagccgccggaagcggcggcatccatcccagcaaagcgtgcattccatcctctggaaaaaaagtctttgagcttcctttacagtgaccttactttggggactgaa

SEQ ID NO: 49069 - DNA, 75 bp, Homo sapiens; identical to SEQ ID NO: 8438
  chr11:123172915-123172990
  hyper

SEQ ID NO: 49070 - DNA, 460 bp, Homo sapiens
  chr11:123228946-123229406
  hyper
gaggggaggagagagacggagagaggagagagggggaatgaaaggggagagagagggaccaagaccggcgagcgggagacaggagcggaaaccacagaggtagagtcagggccgacactgaagaaacgtagatgcacagggaggggccaatattagtgtacagagagaaagagggaacacggtgcggtgacacctagcctcggagacagtgggagctccgagcccacggagagcgggggagttccgcttcctcccgccccagcggctcccgccccgcctgggcgcagccggccgtcccggctccgagggtgcagcgcgcccgggcgcagcgcgagtgcgtggagccgggctccagcacgaccccgccgctcgggtttgggtgtcctcaggctccgcgctcctcctcccctcctccagatgggactggctctcctctttgcaaagccaggctcgcggggag

SEQ ID NO: 49071 - DNA, 31 bp, Homo sapiens
  chr11:123229461-123229492
  hyper
cgcccgaaccgggtgtccacatgagtgcctc

SEQ ID NO: 49072 - DNA, 205 bp, Homo sapiens; identical to SEQ ID NO: 8440
  chr11:123300823-123301028
  hyper

SEQ ID NO: 49073 - DNA, 1044 bp, Homo sapiens
  chr11:123301082-123302126
  hyper
cgcaaaccgctgagagtttgctgcaccgccccctggggcccctggctgccgagtcccgctaaggcaaagacgccagcaagcgaggaagcgcagcggaagaaaaacaagcgggcgcgcgaggggagccccaggagggctgccgagtggctggcaggcggctcccgcccctcccgggtggcctcgccggcggctgacggcccggaggacgcgcgctccgaaaagttagactccgggcggcggcgcgctacgccgcgtcccctcgcgtcccttcctcgctgcgctccgggaaaggaacttgttccttcggccccaggattggggagtgtgccgcggggccgagggtggggaacagccagagggagacgcgaaccaggccgctggcggagggctcagggggagcgcagaggcgacggcccccatgccggcggccaacatgatggagaaccggccgctgcccgccctgcaggtgcccgagccgcagggtgcgcccgagggcagcccggtctggtccagttcgtcgacccccacgcttcgccgccggcgcttcaagatgcgccgcatgaagaacgtacaggagcagagcctggaggccgggctggcccgggacctgcccgccgtcttggcccccggcaaggagttcctgcagctgccgtccatcgagatcacgccctccagcgacgaggacaccccgtggtccaactgctccacacccagcgcgtccccgcgccgaaaacgcttcctcctccgcaagtggctgagggtgagggagcggaaggagtgcagtgaaagcaggtacgtccccgttccgcccgtctccttcccttccctcccgtcctctccagagccgtccagggccccggggcattctgggggaaacgtcctgggggagaacaggagcccgtcaccagaggcgcttctggagggcgctgcgcctggtcccagggatggtggcattcagcttccacgcgtgccacccgctccccaactcagggtgaggggcttcatgttgcacgacacgtttacgtggggctttacgctgcattc

SEQ ID NO: 49074 - DNA, 31 bp, Homo sapiens; identical to SEQ ID NO: 8442
  chr11:123326582-123326613
  hyper

SEQ ID NO: 49075 - DNA, 834 bp, Homo sapiens
  chr11:123524778-123525612
  hyper
agcaccacggacagtcgcctccccgcccaccccggaactccagcttccactcgcgcccctgcctcgctcgtttgcgcccagggtaagctcagctcggaagggagtcgcactgctggcctagcagccaggctgtggaagggtccaggttgattcacctctcgcctccccaggatcggttgcgttccgactggaatcctcccagccccgcggctcctgcttcgtccgccctaactgcttctccagctgggcgtgaccccactcccgaagccgccggggccgcccgtctgggctacagaatgcgttccacgtcggtcccgtccacgcccgccctcggctccctggggaggtgcagcggggccgggaaggaagcggcagctcccgttcggccggcgatgtcagaggttggggggtgggtgtagaggcggagccccttcccgggagctcgcccccggatggtgcggggccccgaccctgggtggcaggtgatcagcaacccttctctaggcccccaggccgtgtgtgctgtcagccctgacatgcgcaggcggctctccgccaccaccaccgccccggaccctccccctagtgcacactccccaccccctgatgggcgtgcccctcccaggcccagcgccgcgccgagcgggggcggagccgggagcggcgcagacacttccagccgggatatctttgctcgcgcgctcgctggtctctccaggtctccctctcgcgcctccgcacctcccccgagctcgggcgcaccgccgccctcggctcacgccctccaggcaaacccactccgctcccgcacggacttgccgggtgtagctccgg

SEQ ID NO: 49076 - DNA, 30 bp, Homo sapiens
  chr11:123612523-123612553
  hyper
gaccccacagctgccgtccgcgacccctaa

SEQ ID NO: 49077 - DNA, 406 bp, Homo sapiens
  chr11:124587804-124588210
  hyper
atgccattgcctgcatctcttcgagagggaaatcgaatcaaaagtgagcgtctgccagtctcagtcctgtgatggctgaggagcctgggcgaagagcatagtaaatatttggcaaagttagcagccttcggagcgggaatagagaagggagtgagtgattcagagagcaacgtgcaggcccctgcagccggagcaggacttttgctcctattcctgagcgaaagggaacaggctgctatccccctgaccggaggggccttccagcacctcccaggggagcggctgcgcttgaggcgacgggaacagaggatggggacggcgggggctggagtggccgcagcagcgagtccgccgtccgactgcggggagggagggtggcagcgacgccctttgtgtggggagctgc

SEQ ID NO: 49078 - DNA, 30 bp, Homo sapiens
  chr11:124588469-124588499
  hyper
agggatcaggcaggcgagatgctaaggtaa

SEQ ID NO: 49079 - DNA, 250 bp, Homo sapiens; identical to SEQ ID NO: 8444
  chr11:124616910-124617160
  hyper

SEQ ID NO: 49080 - DNA, 30 bp, Homo sapiens
  chr11:124629785-124629815
  hyper
gcccgctggccattccgctgaggccgggca

SEQ ID NO: 49081 - DNA, 259 bp, Homo sapiens
  chr11:124630112-124630371
  hyper
cctcctgggtgtctgctggctcggaagtcaccaactggtccgtttttttcggtcccagggtccacggagccactgggagagaaaaggagtctggttgggtctgatcgaaggacactgggacagcccaagaaagggacccttccggcccacagccctctccgaggccagagtgagggagccggcaggggccgaaggagagcgaaatgggcccgctccccggggctatttttagtctccctctttctctgagaaactcccc

SEQ ID NO: 49082 - DNA, 162 bp, Homo sapiens
  chr11:124630410-124630572
  hyper
cgccgaggagcctactgagccggagagcctcctccagagcccagaagagcggagccgggcgcctgcacgttgcaccggggtcaccagtgccatttaaccctcgagtggctggcgggaactgggcaaccccccagggggaccgattggaacttttgagtccag

SEQ ID NO: 49083 - DNA, 30 bp, Homo sapiens; identical to SEQ ID NO: 8446
  chr11:124631651-124631681
  hyper

SEQ ID NO: 49084 - DNA, 30 bp, Homo sapiens
  chr11:124669465-124669495
  hyper
ggactgccgcacggcgcacaatgagaaact

SEQ ID NO: 49085 - DNA, 833 bp, Homo sapiens
  chr11:124709233-124710066
  hyper
cggcctctccacggcctctttaccaactgcagccccagctgagacccctcccgcggggagggagggaacacgaagcgcggccggggctgggggcggggagcaggtgtgaagcggggtggcagcggcgcgcggtcaccctccaccgcgccgcggagacccggcgtcacccccacgcgcacacaatggcgcgggggccaggccgaggacggcccattagcggctgatggaggaggcgggagcccggcgggccgcctaatccccgcacgcggacacctgggtgggagcgcgggcgagtggagggcgcgcctgcacgcaggatcccgggctgggcaacggcctagaccgcctctcgccaaacctcccacgccagcgccagtccgacgaacaggagctggtccagcgaacaataaaaggccccggggctggggagggatggaagcgcccttggagcgcgcaggctacgggcgcccccggcagcgcccccgcgccttcccctcccgccccgcggccgctgattgcctattgtgcgtcccctctgcggccgcccgcgcgatgcactctgcgagctggccccttcgtttctaaatgagcagccagcgccgcagacacgtgccaagggaagggtagttcactgcgtggggcggggggacatgcaataagacaagagaccgcacggaaatagctccgtgcccgtctgctgcactgtccttctcacgtgccttcggacaaggggactttcactctctcccctcctctgccccaatcgctctgtctccctgagactgaccaccctcttctctaacccgaactccgcaggggagccttcagccttt

SEQ ID NO: 49086 - DNA, 30 bp, Homo sapiens
  chr11:124713379-124713409
  hyper
gcttgtggctaacccggctaaacagcaaaa

SEQ ID NO: 49087 - DNA, 33 bp, Homo sapiens
  chr11:124735200-124735233
  hyper
taatcccttaattacgccgtgatcggcgtggca

SEQ ID NO: 49088 - DNA, 96 bp, Homo sapiens
  chr11:124735737-124735833
  hyper
agtggcgcctcccagcgcctccctgggtcgtggggtctaagggataatttggagcttcgagcacatgagtgggggtacccgcgggaggtcgagggc

SEQ ID NO: 49089 - DNA, 473 bp, Homo sapiens
  chr11:124736032-124736505
  hyper
caggcagctggtcttcggaaccccgaagtttcccaagaactcacttaggaccagaggaagccaaaatgctggatgtgtttgctacggaggggataggggcggcgatcattttaaggaaacttagaagtttgtctttcagcggcgggactctcagccggcccaccccggcagagctgtggcgggcgggcggagctggcggcgaggtcgttaccgctaattacggtgattaataaatgactgggacagcgcgctctcccctagcgccgcggggaagctgcgggagccggccgccgccagcctgcggagaggccggagcgcgccccctgcctgccgcatcgggaacccccgctttaccgggcgctttcgcgtgtggttccctccaggtgcacgcggtccccatccctctgcctcgacccactcgagtctagtgacgagcactgtgctggggactcgaaggtggagagaaaggagac

SEQ ID NO: 49090 - DNA, 445 bp, Homo sapiens; identical to SEQ ID NO: 8449
  chr11:124738650-124739095
  hyper

SEQ ID NO: 49091 - DNA, 30 bp, Homo sapiens
  chr11:124739416-124739446
  hyper
tgcgtgcccccccgcggccacccggagcct

SEQ ID NO: 49092 - DNA, 43 bp, Homo sapiens
  chr11:124746303-124746346
  hyper
cgccgccctctactggcgccggaaacagcgcaaagagctcagc

SEQ ID NO: 49093 - DNA, 30 bp, Homo sapiens
  chr11:124824110-124824140
  hyper
ggcgagctgcgggccgattcctggccagtg

SEQ ID NO: 49094 - DNA, 792 bp, Homo sapiens
  chr11:124932778-124933570
  hyper
ccgagattagtcatgcagggccgctgagtgtgacttccagccctccagcgtctcgtgtcccgcccgtgtcggagcccatggctttttaggacaggaagcgctgcggggtagtgcgggcaggcaggcacgtcacaccggacagcgtcgagattgctgctttcggttccccagcgggtggtgaggcagaaagtgcagggcggaatgaggagccccagcacctcagagctgtcgggcagtggcggggaagcaaagcacaggagcgctgtggtgccagcggccgggctagggacgactggcgggtttgcgctggacccgaccccgagggcgggcgcaagggggcgggcgctgccgtactcaggccgcggggccagggcgggccggccggcggggcatttaaaccccgctgacagccagtccagcccgggacacgcgcccagctctgtagcctcctccgtcgactcagccttaggtaccggtcaggcaaaatgcggtcctccctggctccgggagtctggttcttccgggccttctccagggacagctggtgagcggggcaggggagggaggcgtgccgggacctcctgggctcggggcttgcaggggccgcggggggcctcggagatcaccccagatcggccccggcgtcgccgcgtggccaggggtgctggggggacttggtcccgagctcctccagcggcgcccgcctcggaggttgataaccctccctgcccaactccgcccgcgctcccccagaccccgcgacgctggctcggtgacactggggaagaacag

SEQ ID NO: 49095 - DNA, 30 bp, Homo sapiens
  chr11:125034424-125034454
  hyper
ccgcgcccgccgcccgagagcctccggtag

SEQ ID NO: 49096 - DNA, 806 bp, Homo sapiens
  chr11:125034920-125035726
  hyper
gagaagctggggaagcgccgggagagcgcggagcggagcagcgcgaggggcggcgaggccgggcacggaggctgcgagagccccgcgggccgcccgctcccctgcccggccagcgctcagccccgccgccgccgccgccgccgcctcgccgcgcttgggcccgtggccggccgcgcattgtcctcgggtgcaaggagccgggctgcggactcgaatcgccgcgggcccaaccccgtagcgggcgggcggggagctgtgcgccaggagcgccaggggacccgagaataggaacaggcacgccggcccgagcccgggtgcagaaggctcccggccgggcgctccgcggggagaggctgggaaccgcgggcaggctccaggttctctttctcccggcttcgggcgtccttggggccggcgcttactccgcgccaccagcctggagatgctttccagcggctggaggcgggagcggtcccaggctggggccaggtgaccggaggagtcgaggagccgcggccgcggcctggggaggcagggcgaatgagggtttgcagacggatcagtggagacaggggaacaccggcggggcccgggaagccaggatccgaggggctacacgcacggaccctcacccagggaggagcgagaatgtgtagggtcaccggctttccatgattgctggggatctttggtgaggcgggcgtaggggcccgcgcgaggcttgggaatcgggagcccttctggctcgagaactaggggatgagttcgtaaaagagggaactgaaagcgatcgagagcggagagct

SEQ ID NO: 49097 - DNA, 30 bp, Homo sapiens
  chr11:125036073-125036103
  hyper
ggaggaacgggtggcgtttttaggattcag

SEQ ID NO: 49098 - DNA, 401 bp, Homo sapiens
  chr11:125133214-125133615
  hyper
agcagtgggggaagccgcatgaggaggagcggcgtgggagcaaatggaggggatctgctggcgggcctagtttaggcaaacagcagggactgctggcgacggctccagcccccactcccgcggtaacagctgcagtccagctgctggcatccctgctgggggagcgtgctaaacctctccggggtcagcactgtggtatgtcggtttccatagcaaccagccaacgggccactttctcagaacaattcccctactcagccgggttctggacttagctcagcccaagggcatgtggctgaggagcagcgcgggagggggagagctgccgagggccagactgggccccacagaacgtggctatctcagtccggtcttcgcacggagggcgtggagccgaggat

SEQ ID NO: 49099 - DNA, 617 bp, Homo sapiens
  chr11:125365066-125365683
  hyper
tcctccccccagtccggtggggtaaagaaagcctcctccaggcagcacaatggctggcactctgaggaagccggactcatcccgtgcaggccgcatacacactccactgcccttccggccaaacaagcccggacacgggagagggatgagagtcggggatgcctagcggcgaggagagaagggataggcaaaagggaagaagagcgggctgtgatacctcctcgacgccgtcaaacactgctccccgcattccagagcccggggcccacccgacggcagcgcgccccgccaccgcgcagccgccccggtcccttctcccgcccgtctgtagtaaaacaatcgctctcccggcgtctgcggccgctgccagcggttctgacactgcaggaatgcgcggtctggggaaggctccgcactctggggaggggcacgagcggggtcgggggtaagtttttagggacaaagatgatcttggggcgtttacggtgactggaccagataacggtcccgggacgaggtaccgacccactgccccagcgcgatcgggcggcgttcccttcttcccccagcccccatacctcgccgccctgccttcacacgcgcgcacacacgcgggc

SEQ ID NO: 49100 - DNA, 557 bp, Homo sapiens
  chr11:125365742-125366299
  hyper
ggagggccgatgctgagatgatactggaagtgcccatcatcccacatctccagggcctggcgcggcgtcccagctgcgctccctgaagggctgggcaggaaggcgacggcctcccgttgttcctttctaatcccagaatgggaccaggtgaggggagctgcggcgaccccagaccgtcctgtcagagaatcccggggcctccttaccacccccaccagaccccacccccagcagtgagtcgggtcctaactaaagtcaacccccgcgacggcacctgtgcgggtcctggcggagggaggcggatcccggggctcagccggacacccccatccacgggccgcgggagcggccggagcgcagcgcagcgcagcggagagccagccagccagccagccagcgagcgctccccgcgcagctccggcggcgcccggctccgctcccgcctccaccccaccccttccccgcgctcgtgcccgggctccgggggcgcgcccgcgctcgggcacccacccaactggcacgcgcgggagctggacgtcatcccctcgttaacattc

SEQ ID NO: 49101 - DNA, 30 bp, Homo sapiens
  chr11:125439563-125439593
  hyper
gttggtggggctaccggcgaggacccctta

SEQ ID NO: 49102 - DNA, 30 bp, Homo sapiens
  chr11:125462645-125462675
  hyper
ttgacagacagttccgagaccctatcgctc

SEQ ID NO: 49103 - DNA, 30 bp, Homo sapiens
  chr11:125495567-125495597
  hyper
gcttcccccagcagcgctcgagcaccgccc

SEQ ID NO: 49104 - DNA, 30 bp, Homo sapiens
  chr11:125495841-125495871
  hyper
ccctcaagttttggcgggaaaagcgctgca

SEQ ID NO: 49105 - DNA, 62 bp, Homo sapiens
  chr11:125757372-125757434
  hyper
atcccgggcatgctcccgccggcggagaaggcccagacaaaatgtgcgccaatcaggataca

SEQ ID NO: 49106 - DNA, 30 bp, Homo sapiens
  chr11:125773227-125773257
  hyper
agctaccgtttctccgcccacagggcagaa

SEQ ID NO: 49107 - DNA, 30 bp, Homo sapiens
  chr11:125773675-125773705
  hyper
ttcgtccaaattgagcggtcattaaatcat

SEQ ID NO: 49108 - DNA, 108 bp, Homo sapiens
  chr11:125773952-125774060
  hyper
ctttgctaaccaattcgctaacctttctgacatcttgtgatgtggaggcggaaatttccagggaaaccgacacggggcgtaaagcgcggcggggagtccggggggctc

SEQ ID NO: 49109 - DNA, 326 bp, Homo sapiens
  chr11:125774122-125774448
  hyper
cggaagctgccccctctgccctccggtccgcgccctttcgccccgctctctgccctccgccccgctctctgccctccgccccgctctctgccccccgccccgctctctgccctccgccccttccgcgcgccacccagccttccagcgcctgcgcgccgcaccgcggtggtcgcgggcgcggacgcggacgcctgccccctaaggaagcccattggccagcggatggggccagcaccgcctcgcgccggtggtggaagcacgtgctgggggcgggagcagcaatcgcagccatggcgtcgttactgtggggaggcgacgcaggggcg

SEQ ID NO: 49110 - DNA, 56 bp, Homo sapiens; identical to SEQ ID NO: 8455
  chr11:125932493-125932549
  hyper

SEQ ID NO: 49111 - DNA, 436 bp, Homo sapiens; identical to SEQ ID NO: 8456
  chr11:125932556-125932992
  hyper

SEQ ID NO: 49112 - DNA, 128 bp, Homo sapiens
  chr11:125933200-125933328
  hyper
ggtctccaaatggtcgactctgtcccccgaggccccgccctagcctcgttcgggccccgccctagcctcgttcgggccccgccctagcctcgttcaggccccgcccctcgccccgccccgcccctcgc

SEQ ID NO: 49113 - DNA, 70 bp, Homo sapiens
  chr11:126138754-126138824
  hyper
gccgcttcctgctgcgccaagcgcgggacacgtcacaccagtggccccggaaatcggctcaaccgtactt

SEQ ID NO: 49114 - DNA, 120 bp, Homo sapiens
  chr11:126138866-126138986
  hyper
cgcgcaggactgacgtatcgcaaggccagccaatggcgggtgggagcgggcctgggtggggctccaggagaggtcacggggagacggccacctagagcattgggcggggcagagccctga

SEQ ID NO: 49115 - DNA, 32 bp, Homo sapiens
  chr11:126152966-126152998
  hyper
gagagcggggcctgcgcgctgctcttccccgc

SEQ ID NO: 49116 - DNA, 30 bp, Homo sapiens; identical to SEQ ID NO: 8458
  chr11:126173622-126173652
  hyper

SEQ ID NO: 49117 - DNA, 30 bp, Homo sapiens
  chr11:126220719-126220749
  hyper
cacgagatcacgcagcgtttgtcttcttgt

SEQ ID NO: 49118 - DNA, 102 bp, Homo sapiens; identical to SEQ ID NO: 8459
  chr11:126225981-126226083
  hyper

SEQ ID NO: 49119 - DNA, 30 bp, Homo sapiens
  chr11:126322262-126322292
  hyper
aagtgtgtccagccccgcagttcctttcac

SEQ ID NO: 49120 - DNA, 30 bp, Homo sapiens
  chr11:126431363-126431393
  hyper
gtctattcagcaccacggacagaggcacgc

SEQ ID NO: 49121 - DNA, 332 bp, Homo sapiens
  chr11:126870168-126870500
  hyper
acagtaccattttgttgcattcgcaaaggcgaagaggcaatgccagagcatctcagcccggcaccgagagacgcatccatcagtccgagttcccgaagcctgcccacgttcctgcccacagcctcccgcgccctgacaacccagccgactttcttccaactccagcagcgcaggggtcctaccttgactgaagaggaagaagcagacgaagagcagatcgagctggaagggtttcattccttagcgcagcgaaggaaagccggcggggtaacttggctgtggttagtttctcttccttggcggctctcggtgctcagcctccgccggtcctc

SEQ ID NO: 49122 - DNA, 270 bp, Homo sapiens
  chr11:126870524-126870794
  hyper
cgtccgtgggtccctccgggtggcttcggtctctttgtgcctctgggtatctgcagccagccgacacaaactgcctgttcttagccgcctcgggaagccgggattgtcagcaatgtccccactcggagaagatccattctctggctcttggcatcccaggcacacggcttcctcaggcgggctcctcccacagtgagcgagcgagctagtgacgagtgacagaaggactcctttcactgaagctgaggcgaggggagagggaggggagac

SEQ ID NO: 49123 - DNA, 621 bp, Homo sapiens
  chr11:126873030-126873651
  hyper
tggattaagtgatgagctgcccgcctctaaaaggaccaggaggcgtatcaagcctgagtgccggaaaacccacggcaatcttcagcagccaccacgtggggcagagaacgcgagcagtacctgcaggacccacagccggtcgggctctggcgccagcctcgacggcggccccgccatctccgcccggctgcccgcggcctcacctcctccgggggctcggttagcctcctggcgctgcaaggctgcctgcgcgcggttcgctccgggggagggaggaggagggaggcggcgaggagccgacggctccacctgatggagaagcgcggagagtccctagacctcggagtgcgctgcaagaggggagaggagagagaccgccgcccctgctggaagccttcgcgtccgggggcggcgcgcgggggaaggggtctctggacagtcggtggaggcggcagccctacagagacagccgaaagccagcaacttggaaaaccgcccgaattctgggtttctgcacatccaggctggctccaggtctcttgtgcccaccgtgcaagccggcgggatgccagcaggtggcatcctctccagcgtttcttcgccaggcgtggagtccggagg

SEQ ID NO: 49124 - DNA, 30 bp, Homo sapiens; identical to SEQ ID NO: 8461
  chr11:127423281-127423311
  hyper

SEQ ID NO: 49125 - DNA, 852 bp, Homo sapiens
  chr11:128391893-128392745
  hyper
ccaggagtgggggacgtacgggatggtagcaagtttgcagttactgttgtttttctttttaatgaggattagtaacagggggaaggggacgggggaaatccgactttcttcccaaaaatctcaaattcccgctgcctttctttcccccgcgcccggacggtgcgcgcccggcactccaggggaagttggcactttgcggcgaagtgagcgcgctcgggtcccagcctcgcccgcgccgcgcccgctcctcctgcccggccctcgcccgctccctcctctccgccggcggctgcctcgttcgctctcgatctcccggccgctctccctccctctcgccctcccgcgctctcccctcctctttagggcgtttctcgcggcgccgcgtctcggccgctgggtccgcgcgccctgggccgggcgatgtccgcttgggggagcgaggggcggggcgtcggggcagggcggggagccgggggcggggccgagcaccgcggccaatctccgcccgcggcccaaagcgaaaggaagggctggcgagcgcggggccgggccgcgaccgcggaggagcagtgcgtggagccccgggcctcggagcccaggcaggggcgggaagggccgggagcgggtgtgcaggctgggtgcacaggccgcctccaccgtttcgggaaagtccgtctgattctccacgcattcttgagggcttggtcacccgctctcgccccctcccagtagcagcatagttttccaagtgcgtgtacatcattcattcacaaagactgacacacaggacgtgaggcatgtggatgaaggcgagcgtgcaggcaggcgcaggggattcgtgagcccgtgtcc

SEQ ID NO: 49126 - DNA, 30 bp, Homo sapiens
  chr11:128418652-128418682
  hyper
gctccgggccggcttcgcctgcgcccgcgt

SEQ ID NO: 49127 - DNA, 571 bp, Homo sapiens
  chr11:128562614-128563185
  hyper
attttttttccctctttcccccgtcggactcttaaataaaagtgagcaagtccaaagcgtggtccggagagcgtggacaaggtaacctgttttggatgtccgggagaagggagtccggccgaaagggcccagcccctcgaggctgctccaactggggcgcgcggcggcccaggagggaggcggggaggtctccgggttgggccggggaacgccggcctccaggctgggtagggaggacggtccagagcgcgggcctccgggtctcaccccgggaaaagtctgggtctgctctgcgctgttgcgtgctgcgctcctgggacctgctgactgtcctagagggaacgtcccgcggtagtgtcagttccctggggaccaggaagggcgactcttgcctgggagtcagtgcttgggccgtcgggtccgggtaagcgctgggggtttggctcgagaagatgcggataggtggcctagggcgccgcggatctccgccctctgcgggcaccgggagcccagggtcgaggcgcgccgccccgaggggccccttctcctaacaatgcgcccggaatggagt

SEQ ID NO: 49128 - DNA, 499 bp, Homo sapiens
  chr11:128563336-128563835
  hyper
cggttttcgtccgagtcttccccggcagtaggcgctgggttacccgcagccctagccaactctccctccataccccccctaccccacccccaaaaagtttgtctccggctggaaaaagcattaatgaacgtatctgtgggaagaaacggaaagtgaatgagtcaggagggccaccttcggccaaccgcctcaggaaaagcaaagaagccaaaggtctttggctttggattttgggggaaggtgatggggggaggttcagacttcgggaatcagggcgcggacgctgggcgtggaccccgtcattgttcccggctagctcttatctcccaggagcaagtatcctgtgtgcgcagcgcatgaatgtgtctgggcatctccgcgtatatttatatagtgtgtgatgcgaaaagcaggaccagcaggggaggaagagggggtgtggggggggagggaagacgagggagagcagaggggagagaagagagaggagagctcgagg

SEQ ID NO: 49129 - DNA, 687 bp, Homo sapiens
  chr11:128563856-128564543
  hyper
gagagagagagagagagagagagagagagagataggacttcctccccgattcgcaaagtgaagtcacttcccaaaattagctgaaaaaaaagtttcatccggttaactgtctctttcgctccgctacaacaacaaacgtgcacaggggagtgagggcagggcgctcgcagggggcacgcagggagggcccagggcgccagggaggccgcgccgggctaatccgaaggggctgcgaggtcaggctgtaaccgggtcaatgtgtggaatattggggggctcggctgcagacttggccaaatggacgggactattaaggtaagcggcggggcaacggacgcgggcggcggggaccggccggggaggcgaagcggcgggcgggtaggtgcggggcccgcgtcccggaagacgtggcctctctcccttccctccgcgccccggcttcgcgccggctcctccggcgctcgggtggcgagtcctactcgcgggccagccggccaggcgcccgcattgagggcgaccctcccccgaaatcccagcccccaaagtggagccccggcccccctcccacctcgctgcccgccggggctgcaggaggggacggcgggaaaccgggggaccccagggtacggaacggagtcaagggcgagagacctcggggtccaccactcccaccgacacccggggctc

SEQ ID NO: 49130 - DNA, 274 bp, Homo sapiens; identical to SEQ ID NO: 8466
  chr11:128564602-128564876
  hyper

SEQ ID NO: 49131 - DNA, 543 bp, Homo sapiens
  chr11:128564991-128565534
  hyper
cgcctccgttgcaggggccggctgtgagcccgcgccccgcgcccgcccggccattcccaccccagccgccgccgccaagcctgggtctaggttgcaaagtgcaacccaggcggaaaggtgagggtttgggttcgcgtctcacttcagaaaagttgactgctgtctctgaaagggttcgccaagtagggccaggagcagagaggagggacaccccctaacgtgacgggccttagaggacctaggggaatgaatgggaccaggggttagcttcgaggctgccgcgcaacaccaagcgggagtctgtctggaaaaactattaggctggcgaggtggggactggcagagcccgccattccccagaacccgaaagaatcgactccctgctcagggctcagcaagagaaggctaagatgttgggctcagagaattcaagagatttttatcttctgggtggggtcgtggtttttattttctaagttttttttatgaaagtttgaaatatgctgacttaggtaaaagacaccaaccgaaggaacttgcaaa

SEQ ID NO: 49132 - DNA, 30 bp, Homo sapiens
  chr11:128729914-128729944
  hyper
agcagcgccccctggcgcctgccgagggca

SEQ ID NO: 49133 - DNA, 63 bp, Homo sapiens
  chr11:128760449-128760512
  hyper
ggcgcggaggacgccggctctgcccacgcctgggcaaggttgagctccgttccctccgggctg

SEQ ID NO: 49134 - DNA, 30 bp, Homo sapiens
  chr11:128760894-128760924
  hyper
tctgtctgctccaccgcacccactaaatac

SEQ ID NO: 49135 - DNA, 95 bp, Homo sapiens
  chr11:128761131-128761226
  hyper
cctcccagtcctgccgagctgacggcgtcccggatcacatggagcccccgccccaccccagcccgccccccgccgccaacgccggtggcccttcc

SEQ ID NO: 49136 - DNA, 30 bp, Homo sapiens; identical to SEQ ID NO: 8469
  chr11:128775011-128775041
  hyper

SEQ ID NO: 49137 - DNA, 541 bp, Homo sapiens; identical to SEQ ID NO: 8470
  chr11:129148498-129149039
  hyper

SEQ ID NO: 49138 - DNA, 835 bp, Homo sapiens
  chr11:129149096-129149931
  hyper
cgtgtctgccctccgcgggccgggcccgacgccctccgcccgccgccgccgccgccgagcgccgcccgcgccgccgagcctagcgcctggccgccgagggcagccgcgggggctcggccgggcgtcccccgcgccagcgcctcatcccgcctcgcgccccgtcaggctcgggggcgggggcgccgggccgcggcctccaagtccccacctccggcacgcaccgcgctcgccctcccgcggcggagtcggcccccggggacgcgggtcctcgggctccagagcctctcaccctgacgccttcgggccgcccccgcagcgcccccgcccagctggccggcgcgtgcccccgccggagcccgccgcccgcccagcctccgcctcctccgctccgcctcctcctgcacccgcgacgcccgcagcggggagaagaggcgcgccgccgcggccgcgggcacgagcacgcgcgaggagggcgggcggcgggcggagcgcgcgcgcggccgagggggcgggggcgcgccgaagcctcgcctgctgttgtcccgggagcgcacgtgcgctgcggtggggcgccgaggggcgttcggcgggtgcccctaggggactgggggacagggaacgcgaagtgggtagagacgctgcctgagaggtcccgacgtaggctgttgcctcggccccggcattgtgctgcggtgcaaaaataaaaaaccggccgccgccgcagcagcagcagtagcaccgggaagaggcatcctccgagactacggcagtggctcctctctactcccagctgacccccagaacactgtcaccgcgccgcggaggagagggggct

SEQ ID NO: 49139 - DNA, 30 bp, Homo sapiens; identical to SEQ ID NO: 8472
  chr11:129234362-129234392
  hyper

SEQ ID NO: 49140 - DNA, 461 bp, Homo sapiens
  chr11:129242780-129243241
  hyper
gaagagagaaaacagaagcgggaaattcgacagaggaggagaggcccaaagggcggggagcaatgcggggaagggagaagtgggagggaagaagaggagaggagtcagtggcggtggaaggaaggggaagaaccagagagaagaaaagaggttaaggaaaagaagagcaatgcaaagtcggggccccgaatagtgccgcattctgtgggcacacgccgggcagatagaaagtatagacgcgacgcgctcggcccctcgtcgggcgtcgggtcctggtgctgtcgctcaggtgctggtccccagctccaagcccgcctcgtagtcggcgctgcgggtgagatcgcccgcaagcactcagtttactggcggctgcctaccagcggctcactttcctcggggcgcctaaagctccccgcccggcattgccccgggagcgaacgctgagcccctgggacccagcc

SEQ ID NO: 49141 - DNA, 352 bp, Homo sapiens; identical to SEQ ID NO: 8474
  chr11:129243304-129243656
  hyper

SEQ ID NO: 49142 - DNA, 405 bp, Homo sapiens; identical to SEQ ID NO: 8475
  chr11:129243895-129244300
  hyper

SEQ ID NO: 49143 - DNA, 236 bp, Homo sapiens
  chr11:129244440-129244676
  hyper
cgactctctaacccggtcgtatcgcgagggatccggatattgaaagcccctttgccggaagactcgggcgctgggagaagcccgcatgggacaggctgccccagtgcccgccggctccctagaatcgtgcagctctgaccctttccaacgaggaaaaaatgtttttataaacaatgttttaaaaaaaaccgcacacttttttaaaaagtcagaatctcgctcttgtcgcccaggct

SEQ ID NO: 49144 - DNA, 1361 bp, Homo sapiens
  chr11:129245102-129246463
  hyper
gtcttacgctcggagcgcgcaggctcagcgcgggctgcgagactgcgagtggagggcttgggaagccgcggtcttcgggaaaccgtccacgcggggaaggagaaaggcacggtgggtcctcgggggcactggctctgtggcccgaagtcccgggagcctagtgaggactagacttctttctagtaagagacctgaacgtgccctcccgctgggctgcggacactgggagccgggccggcgggtggcaggacaggcagtaaggtgctcatggggaacactgccccggggagctaccggcctgggccttggccgcgggctggggcggtgcgcgctccccgcaccgcgcgcacactcctgcacacacacctggagcgcgtcccgggggggagggggaggagagccaaaacgagcgtcttaaaatagagagccaggcagaggagcgcgagacaccagagcgggaggcagcgactgagagccgccgggcactaggcgcgcaggtcggcgccggagtggcacgggcgggcgggggcggggtgggcgcggacgcccctcagcacacactccgcacccggccctgcaggaagctcgcgctgattgacagctgcgttgtcccaaaaaggctcagcgaagatgctgatctgcgggtgggtctagacgcgcggcaggcgcgcccgctacccgctctcctccgcgcgccacccgagccccgccgcctccccagctgccgggagcggggcccaggccccgccgtcgcgccagccccgcggccccagcgggccgggcactcgcagccgcgctcgggccggcggacgctcgcgccggctcaccatgcactgccacgccgagctgaggctgagctcgcccggccagctcaaagcagccaggcggcgctacaagactttcatgatcgacgagatcctctccaaggagacctgcgattactttgagaaactttccctctactccgtgtgcccgtcgctggtcgtgcgacccaagcccctgcattcctgtacgggtaagacgctccgctaggggataagtggggttcggtagctttcacgtccgtgtaggtggcctgtgctttgcgatccgagggcgagaggaagggttaagttaagggattcttttcctgcgcctcagcaagcggtgggcattgcaaaggcatctgcgacgtggccgggaaggaccacgcaaggtgtggatggcacgagtggaaataaaggcggcagggccttaggagtgggctgctcgcgcaacgcctgattgtcctgctcggaggagaacgcttcctcgtttcctgctgaaagttcaaacacttgagcaggttcagcgtctaaatcgttgtttcaggaagtggtggt

SEQ ID NO: 49145 - DNA, 30 bp, Homo sapiens
  chr11:129461155-129461185
  hyper
tgaaatcaaaagacatgcattcaaatgccg

SEQ ID NO: 49146 - DNA, 217 bp, Homo sapiens
  chr11:129765559-129765776
  hyper
cgggcgggtcctggagcggctcgggagagcggagggtcggcgagggtgcctgcgcgcggctgggcctggggatgcaggttccagcctgcttgcgcgtctcacctgatttaggagcttccagaggccccagacagtgcctgtctttgcctgaccgcgaatcaaagttccatagcccgtgagcgaaggcacgtctattagctgacgtttgcagagagca

SEQ ID NO: 49147 - DNA, 30 bp, Homo sapiens
  chr11:129872500-129872530
  hyper
cggaaagagctgggcgccattttgggtggg

SEQ ID NO: 49148 - DNA, 42 bp, Homo sapiens
  chr11:129872811-129872853
  hyper
tgtaagccccatgccgtgcctagagacgagaaacgctggggc

SEQ ID NO: 49149 - DNA, 30 bp, Homo sapiens; identical to SEQ ID NO: 8478
  chr11:129873363-129873393
  hyper

SEQ ID NO: 49150 - DNA, 172 bp, Homo sapiens; identical to SEQ ID NO: 8479
  chr11:130029946-130030118
  hyper

SEQ ID NO: 49151 - DNA, 31 bp, Homo sapiens; identical to SEQ ID NO: 8480
  chr11:130064639-130064670
  hyper

SEQ ID NO: 49152 - DNA, 42 bp, Homo sapiens; identical to SEQ ID NO: 8481
  chr11:130066273-130066315
  hyper

SEQ ID NO: 49153 - DNA, 264 bp, Homo sapiens
  chr11:130183473-130183737
  hyper
gcttccggtatcagccgatctccaaataaagcattaagaaaataagtggaagttatggagaatttcttcctgacttcaagagattatctacttacacgctgaaaaagaaattaagtttttgtcttcatttttgtaagttccaaaaaaaagcacacaattacggggttttattgtaaattctgcttggattcatagaactcacatggacgcaatttccttttaatcagttctaacgtacctgtcatttctcgaggtaaccccttt

SEQ ID NO: 49154 - DNA, 984 bp, Homo sapiens
  chr11:130297484-130298468
  hyper
cagccatggacgcatcggccaccagcagcgtctccacgaagcgcgcctcagacacaaaccgcttggtcctactcgtggcccccaggggcggtggcggctcgctagcgccttctgcctcctcttcttggctctcctcctcgctgtcctcctggtggtctcctctctcctgcctctgaccctctcccgtctccacctcccactcgggtcctcgcgggagggggcgggctccggcgggaccccagcgctgcaggcggtgcggctgagccagggagccccccgcgccctgcggctggatggtgaactcctcgccgtccagcaggaaggagccgctcagcccgcggcacaggctgaccgccgccagcgactcgggctccccattcacggtgccggagaagaagcagccgcgcagcccccgctcgcccccggtcgcccggccggagcccccgaggcgctcgatcttgaactcgggcgctaggaagctgtcgtcgggcgccaggcgcagcacgaagcccttgccgaaggcggacaggtggagcgcgagctcgcccgcgctgccgggcaaccgcgtgggcaccaccagctccgaggcctgccccccggctgcgggccgggccggggcgccgcgggccagcggcagcagcagcagcagcagcagcaggagcggaggccaccggggggcggcgggggcggggagcatgggggctgcggcggtggctgcgcgcaggagagggaagaagcccgccaggcgcgggcaggtgctggcggcccgagcgcggcccggccgctctctccaggaaaagcggaatcaatcgggtgcaaggccgactcggcccgcggggcccggcggcgggagcgctcccccggcggcccctctggctggcgcagcccgctcctcccgcgccgccgcccccgagccgagcgcgagcagctggccccggcccgcgtgcgcccgtcctccgcccctgcccgcgccagccccgcgca

SEQ ID NO: 49155 - DNA, 1475 bp, Homo sapiens
  chr11:130318282-130319757
  hyper
taaccaagagcaaaacgcaaactgagacttcagcgccggtttctcgggccagcccacgcctcctgcctcagctcaatgccactccctccccgccaagtggctctccgctctggaggcgggaccgagttctccggtggcccctggaggctccggcagcgagctctgggaggctgggaggggagtgaggggaggggcgctgactgggccgtccaaagaggagggggcctttaataggctcgcccagcgcctggcttgctgcgctgcgagtggctgcggttgcgagaagccgcccggcaccttccgctagttctcggctgcaaatcttcgtccttgcacttgacagcgattgtacttaagctcccagggcgcgctttgcttggaaaggcacaggtaggaagcgcgggctgccgggtgcacgctcgccgccctgggaggagtctccctcccttggctctcctttctgggaactgccggctgtcccgtagcgttggcggttccagagtgcgggctgcacggagaccgcggcagcggccggagagcccggcccagccccttcccacagcgcggcggtgcgctgcccggcgccatgcttctgctgggcatcctaaccctggctttcgccgggcgaaccgctggaggctctgagccagagcgggaggtagtcgttcccatccgactggacccggacattaacggccgccgctactactggcggggtcccgaggactccggggatcagggactcatttttcagatcacagcatttcaggaggacttttacctacacctgacgccggatgctcagttcttggctcccgccttctccactgagcatctgggcgtccccctccaggggctcaccgggggctcttcagacctgcgacgctgcttctattctggggacgtgaacgccgagccggactcgttcgctgctgtgagcctgtgcggggggctccgcggagcctttggctaccgaggcgccgagtatgtcattagcccgctgcccaatgctagcgcgccggcggcgcagcgcaacagccagggcgcacaccttctccagcgccggggtgttccgggcgggccttccggagaccccacctctcgctgcggggtggcctcgggctggaaccccgccatcctacgggccctggacccttacaagccgcggcgggcgggcttcggggagagtcgtagccggcgcaggtctgggcgcgccaagcgtttcgtgtctatcccgcggtacgtggagacgctggtggtcgcggacgagtcaatggtcaagttccacggcgcggacctggaacattatctgctgacgctgctggcaacggcggcgcgactctaccgccatcccagcatcctcaaccccatcaacatcgttgtggtcaaggtgctgcttcttagagatcgtgactccgggcccaaggtcaccggcaatgcggccctgacgctgcgcaacttctgtgcctggcaga

SEQ ID NO: 49156 - DNA, 453 bp, Homo sapiens
  chr11:130786090-130786543
  hyper
tggccttcacactgccccaggcggaaggcctcttcggggcctcggggcgggcgctgcaaggccctggggcccacggacacttacacacgcagcgggcagcggccggcgaagactgggtcacacgccgccgggaaccgcgcgcccacactcagccccgacctgaagtggactcatcgcggtcctctccgggagcctcggccctctgccgccgtaaacctgggcgactgcgctccgcagccgggcctgtgtgaaggctgaccgccggccggccgccggcgacagcttccgggtcgacgtcgacgggagcgaggcatgctgggagagcgtccgcgcgcgccccgaggagcggcgctgcccggcgccctctgctggcgaggagccgccctgacggccctgcgcgaggtagtctctgagcctgagcgtgagcctgagcgcgcacggggcgcgtgctcg

SEQ ID NO: 49157 - DNA, 197 bp, Homo sapiens
  chr11:131056755-131056952
  hyper
ctcttggagccgccccgaaagcctgcctgccacaagagttcctgtccttgcgagaggcggagcagctttgtggctgatctcccatctggttgacaggaatgacagctcagagttgtgctcctggaggggaaagtgctgagggcagagaagaggaaagaaactgcagctaggggttgcccacgcggtcgtggcaggct

SEQ ID NO: 49158 - DNA, 319 bp, Homo sapiens
  chr11:131564787-131565106
  hyper
ctgcccttgggactcgctcagcgccctcgcagccggaatggggcctgggaagggaggagccccagcagaggggcagtcggagagccatgaaattgcgacctgctgccaccagagggcagtgttggacgggctgggaggagcgccgccgccgccgggagggtgcaggagagagctgtctgccaggggaaacgcacgatgcgttgtccaggacattctcacctgaaaatgctctgggccacggacaggctgaggattttagtacccacccccccgccctgaaaagaaaaatctctgtgacgagataggcactgggtttgta

SEQ ID NO: 49159 - DNA, 202 bp, Homo sapiens
  chr11:131780876-131781078
  hyper
ggtggcgagcccggctccgaaacttacaaagtgttggatgtcccccgttcgaactgagggactgcagaccgcctctgggtagctggatgaagcccaccccgtccccttctggtaccaaagtgcttactcctctccaaagtgccgtgtctgaactgccgctgggaagaagcggctcctgagacgcgcccacacctttcacctg

SEQ ID NO: 49160 - DNA, 293 bp, Homo sapiens
  chr11:131781293-131781586
  hyper
gcaccccacccacttcctgtgctcgcccggggggcgtgtgccgtgcggctgccggagttcggggaagttgtggctgtcgagaatgggggtctgtgggtacctgttcctgccctggaagtgcctcgtggtcgtgtctctcaggctgctgttccttgtacccacaggagtgcccgtgcgcagcggagatgccaccttccccaaagctatggacaacgtgacggtccggcagggggagagcgccaccctcaggtagggagctgacattgttctgcgaactgatggtttgtatgggg

SEQ ID NO: 49161 - DNA, 15 bp, Homo sapiens
  chr11:131781648-131781663
  hyper
cgctggttccctggg

SEQ ID NO: 49162 - DNA, 30 bp, Homo sapiens
  chr11:132813489-132813519
  hyper
catggacagatgtacgtgtcccccagcccc

SEQ ID NO: 49163 - DNA, 313 bp, Homo sapiens
  chr11:132814102-132814415
  hyper
gggagaggggagggcgggagagggagttctggggaaagcagcaaactgaaaactgacactggcaccttccctcgccgatgccagcgcagaagttgacaaaccccgccctggagagctgaactaccctgcccacgccagatggggcaccggtgtgcgtgtccatcgcgctgcgaacggctccccgcccagccaagtccagccctgacggcgcgctgtcctgggcccgcgcagaggtggagtgcacccacctccgaggacccacctcggaaacgcccgtgcccctccactggacgcctgtccccaaagtggcaaa

SEQ ID NO: 49164 - DNA, 30 bp, Homo sapiens
  chr11:132864098-132864128
  hyper
cgcagcggctggtgcgctcctgccaggagc

SEQ ID NO: 49165 - DNA, 456 bp, Homo sapiens
  chr11:132934113-132934569
  hyper
agcgcaacccagcgcggttcccagacgctgccgggtaactgatgccgccggcacagcttctgttctcacttgtggagctttgtctcccctcgctgggcagcccctggtaccgcaacccgcctggccgccttcccggctgaggcccccgggcagagctcctccgcagggagcattcccgtggacaaacacccctttccctggtagctgtggcaacagttgatctgtggcagcggaccaggaggagggtcaaatgggagaagggacggccagctggtcctaccagagactgtcgctggcgtcctcaggggccgctgcagggccaccttgtgtgcttgccctttccccacggtagactgccccgggagggggactgtgctgcctgaattcttgtccgggtgggactggcctcggtgaaggatccgggaatgggacttccgggccgggccggaggggaag

SEQ ID NO: 49166 - DNA, 30 bp, Homo sapiens
  chr11:132948624-132948654
  hyper
agcggcactggctccgatcaggcacaagag

SEQ ID NO: 49167 - DNA, 423 bp, Homo sapiens
  chr11:132952577-132953000
  hyper
agctacgaagccgggcgaggggctcaaggcccctctggagaccgcttctcccccgcggcccgtcccgccgctgcggaccccatgcgcggcctccccgccccggcgcctgggcctcctcgcggcccgggcggggcccaccaacccggagaggtcgccagcctgcagggtgccgggggcccctccgagccgacctcgtcccaggcagacgcgctgcccggagaccgccgcaagggggcgccaggggccggggcggacgtcgcgccagtgcctcgccgggaccgcacctcgtccgcgcggccgccagagggcgcccgtcagcgccggagcccgcggcggacgccccagccgagcccagccactgcctggtggagccacagggcacccgcccggaaacaccgcctgcgccccgacggcacccgtgtg

SEQ ID NO: 49168 - DNA, 95 bp, Homo sapiens; identical to SEQ ID NO: 8491
  chr11:132953232-132953327
  hyper

SEQ ID NO: 49169 - DNA, 92 bp, Homo sapiens
  chr11:133402169-133402261
  hyper
agcagggcagttgtcgccgagaagacgacccagtaggcaggatggtacatctcgacgctgcggtgctctcagctgccgggcttgctactgct

SEQ ID NO: 49170 - DNA, 1320 bp, Homo sapiens; identical to SEQ ID NO: 8493
  chr11:133825338-133826658
  hyper
